United States Patent Application Publication US 2011/0014706 A2 - sequence listing, part 35

SEQ ID NO: 88712 - DNA, 722 bp, Arabidopsis thaliana columbia
ttccgggtagacccacccgtccgccttgagaagcatgttataatggaaggaggagagaagattgagatcaaattcgccagcaagatccacatgaggatttgtttggaaggagggtatcatgtgcttgatgagtctacacattacagtagtgacctaagaccaactgcaaagcaactgtggaagcctaacatcggtgtgcttgagctaggggtcttaaatgcgaccggtttaatgcccatgaaagctaaagaaggtggtaggggaaccacggacgcgtattgtgtggcaaagtatgggcagaaatggatcagaactcggacaattattgacagctttaccccaagatggaacgagcaatatacttgggaggtttttgatccgtgtactgtagttacagttggtgtgttcgataactgccatctacacggtggtgacaaaaacaacggaggaggaaaagattcaagaattggaaaggtgaggataaggctctctactctcgaggctgatcgagtctacacacattcatatcctcttttggtgctacatcctagtggagtcaagaaaatgggagagattcacttagcggtgaggtttacttgctcttcattgctcaacatgatgtatatgtattctatgcctttcttcctaagatgcactacctacatcccctcaacggtagccaggctcaaaacttaagggatcaagcaactcaaattgtgtca

SEQ ID NO: 88713 - DNA, 1604 bp, Arabidopsis thaliana columbia
  unsure (1)..(1604): unsure at all n locations
atgatttgccggcactatacgactcatttagggaaagctggtacgcctgcaggtaccggtccggaattcccgggtcgacccacgctgtccgcaacacagagctgacgttagcatttgtctctgaaatcccagatccgaaaacccaacaatggcgtcagagaacaacggatccagatccgattccgaatccatcaccgctcccaaagctgattccaccgtcgttgaaccgaggaagatagctctgatcaccggaatcaccggccaggacggatcatacctgacggagttccttctcggaaaaggctacgaagttcatggtctgatccgtcgatcatcgaatttcaacacccagcgaatcaaccatatctacatcgatccacacaatgtcaacaaagctctgatgaaactccactacgccgatctcaccgacgcttcctctctccgtcgttggatcgatgtgatcaaacctgacgaagtttataacctagctgctcaatctcacgtcgctgtctccttcgagatccctgattacacagccgatgtagtcgcaaccggtgctctccgtctccttgaagccgtcagatctcacaccatcgacagtggccgtaccgtcaagtattaccaagccggatcttcggagatgtttggatcaactcctcctccacaatcggagacgacgccgtttcaccccagatctccttacgcagcttccaaatgcgctgctcattggtacacagtgaattacagagaggcgtacggtctcttcgcttgtaacggaatcttgttcaatcacgagtcacctcgccgtggtgagaatttcgtgacgaggaagatcacaagagcattgggaaggatcaaggttggtttgcagacgaagctattccttgggaatttgcaagcgtcaagagattggggatttgcaggagattatgtggaagcaatgtggttgatgttgcagcaagagaagccagatgattacgttgtggcaacagaggaaggacacacagtggaagagtttcttgatgtgtcatttgggtatttgggactcaattggaaagattatgttgagattgaccagaggtactttaggcctgctgaagtagataaccttcaaggagatgcaagcaaggcaaaggaagtgttggggtggaaaccacaagtagggtttgagaagcttgtgaagatgatggttgatgaagatcttgagcttgctaagagggagaaagtgcttgttgatgctggatacatggatgctaagcagcaaccttgatttgatcaattatacaaagatggagtttcttacatttatctgcttttatagagttttaaatttcgtttttttttctttctctttttgttgctttggtggttgtttgttgtctttttatgttttagtttctttgttgctttttaagttatctaaattgtttccctccaatgagttgaggatgaaagcgcagtgaattttgaatgaaggagcaaagaatcatatactacagttcttcaattaaaaaaaaaaaaaaagnnnnnnnnnnnnnnnnnnnnnnnnnnnnnnnnnnnnnnnnnnnnnnnnnnnnnnnnnnnnnnnnnnnnnnnntagtatc

SEQ ID NO: 88714 - DNA, 1547 bp, Arabidopsis thaliana columbia
  unsure (1)..(1547): unsure at all n locations
cggacgcgccacgcgtcgtcttcttcttctctttcgatcaaatcttttcagattcaacccaaaattgaagacaaaaatgtctcgcagatcgctaactctcctcaagaatctagctagaaacgcgaatggatcaggtattcaaacccgatccgtgacttacatgcccagacccggtgacggagcaccacgcgcagtgacgctgatccccggagatggaatcggtcctctggtgacgaacgccgtggaacaggtgatggaagcgatgcacgctccgatcttcttcgagaagtacgatgttcacggagaaatgagccgtgtgccgccggaagtgatggagtcgataaggaagaataaggtttgtttgaaaggtgggcttaagactcctgttggtggtggtgttagttctcttaacgtccagcttaggaaagagcttgacctctttgcttctctggtcaactgttttaatttgcctggtttacctactcgccatgagaatgttgacatcgttgtcatcagagagaacactgaaggtgagtacgcggggcttgagcacgaggttgttcctggtgtcgttgagagtctgaaggtgatcacgaagttctgttcggagcgtattgcaaagtatgcttttgagtatgcctacctgaacaacaggaagaaagttacagcggtgcataaggctaacatcatgaaacttgcggatggtttgttcttggaatcttgtcgcgaggttgcgaaaaagtatcccagcatcacctacaatgaaatcattgttgataactgctgtatgcaacttgtagccaaaccagagcaattcgatgtcatggtaacgccgaatctctatgggaatttagttgcaaacactgctgctggtattgctggaggcacaggagtcatgcctggaggaaatgttggggctgaccatgcggtattcgagcaaggtgcatcagcaggaaatgttgggaaagacaagatagtattggaaaacaaagcaaacccagtggcattgcttctctcatcagcgatgatgcttagacaccttcagtttccttcatttgctgaccggctcgaaacagcagtgaagaaagtcatcgctgaaggaaagtgccggacgaaagatcttggtggaacaagcacgactcaagaggtcgttgatgcggtcattgcaaaactagactgactttgacaaattacgtgttcccgctctgcataaatcatcaaattcctgatacagattttgtgttgccaaaatatggggtatgatccaagcacaacggttatctggttttgtacctcgagttttattatattctttagccgtggaatatttcgataagaaaaaaaaacatgttccaaataattcatgttgctacgtttgttggcgccttttgtcatgtcaaagtttcttaaacacttgttcgtggaatatgcaaacttttatggattcgtaatttcaaaaaaaaaaaaaaagnnnnnnnnnnnnnnnnnnnnnnnnnnnnnnnnnnnnnnnnnnnnnnnnnnnnnnnnnnnnnnnnnnnnnngaaagc

SEQ ID NO: 88715 - DNA, 717 bp, Arabidopsis thaliana columbia
cacacgcgtccgcacaacactctcacaatatgatcccttatccaaccgtagaagatgcgtccgtggcgttaggacgaaaccttacttggttcgagacggtttggttcgattactcagccaccaaatccaatttccatgtatattgccacaccattctggttctcttccttgtcttttcactagctccttttcctcatgtgattgtcgaatggaccggttggttcgatcagtttaagattcagaagaaggttaagtattcgttgtctgatatgttccaatgttatcaagaagtcatgaagttgttccttctcgtcgtcggcacattgcaaatcgtttcttatccttccatccagatggttgggattcgaagtggtttgccattaccatcgttaatggagatagtagcacaattagtggtttacttcttgatagaagattacactaactactggatccatagatggatgcattgcaaatggggttacgagaagattcatcgaatccatcatgagtacacatcacctatcggatacgcatcgccgtatgcgcattgggccgagattttgattcttgggattccgacgattcttggaccggcaattgctcctggccatataatgacgttttggttatggatatctttacgacaattcgatggcgattgatacctacagcggttatttttttccatggtatgtgtcaaaattatttccattt

SEQ ID NO: 88716 - DNA, 1225 bp, Arabidopsis thaliana columbia
  unsure (1)..(1225): unsure at all n locations
gggctttgtactatttgagtgtttttataaaaccatttttccatcttcctcatcaccttcccaagaagaagaacaccaaagaagaagaaaggttaataatgatgggcagtgtcgagctgaatctgagggagactgagctgtgtcttggtcttcccggtggagatacagtggctccggtaaccggaaacaagagagggttctcagagacggttgatctgaagctaaatctgaataatgagcctgcaaacaaggaaggatctacgactcatgacgtcgtgacttttgattccaaggagaagagtgcttgtcctaaagatccagccaaacctccggccaaggcacaagttgtgggatggccaccggtgagatcataccggaagaacgtgatggtttcctgccaaaaatcaagcggtggcccggaggcggcggcgttcgtgaaggtatcaatggacggagcaccgtacttgaggaaaatcgatttgaggatgtataaaagctacgatgagctttctaatgctttgtccaacatgttcagctcttttaccatgggcaaacatggaggagaagaaggaatgatagacttcatgaatgagaggaaattgatggatttggtgaatagctgggactatgttccctcttatgaagacaaagacggtgattggatgctcgtcggcgacgttccttggccaatgttcgtcgatacatgcaagcgtttacgtctcatgaaaggatcggatgccattggtctcgctccgagggcgatggagaagtgcaagagcagagcttgaagtcaaattaaaaggataagtggtatcgattatatatttgattaacacattgattggtgttaattgctcttttttttcttacgatgaaatacattgttcagtttcttttgattgtctgtgttttgatcaaaaaaaaaaaaaaaaaaaaagtttgtatgctattatgtgtaatgaacttaagttaaatatttgagacatttgtaatggaaaatgtgtaatgtgatttacagacgtttcaacccgggtgtctctncctagagatggggcgatgagagacaacagactgttcctctatcgtaagataaagttgtaggagtggtgtagttctgtcaactccgacatgaagtgaaggatgaagcaggatgcaacctcgtatgactgatcatgtgatgtaagaatgttctctccgatgatcagatgtagtccgttcaagatgc

SEQ ID NO: 88717 - DNA, 1451 bp, Arabidopsis thaliana columbia
ccacgcttccgactcttcttcatcttcttcctctgacgatcattttcagaagaatctgattccgatcaaaattgcagaagaagatgtctcgccaatcgttttctctactgaagaatcttcgtagcatcgcttccggttccaaaatccagacccgatccgtgacttacatgcccagacccggtgacggaaaaccaagaccagtgacgttaatccccggagacggagttggtccgttggtaacaaacgcggttcaacaagtgatggaagcgatgcacgctccggtttacttcgaaccgttcgaagttcatggagatatgaagagtttacctgaaggattgttggaatcgattaagaagaacaaagtttgtttgaaaggtggtcttaagactcccgtcggtggtggtgtgagctctctcaatgttaatctgagaaaggagcttgatctctttgcttctctcgtcaactgtttcaatttgcctggtttagcttctcgtcatgagaatgttgatattgttgtgattagagagaacactgaaggtgaatatgcaggtcttgaacatgaagttgttcctggtgttgttgagagccttaaggtgattacaaagttctgttcagagcgtatcgcaaagtatgcgtttgagtatgcctacttgaacaacaggaagaaagttacagcagtgcacaaggctaatatcatgaaattggctgatggtttgttcttggagtcttgtcaagaggttgctaagaagtatccaagcattgcttacaatgaaatcattgttgataattgttgtatgcaacttgtggctagaccagagcaattcgatgtcatggtgacgcctaatctctatggtaatctagtggcaaacactgctgctggtattgctggaggctctggagtcatgcctggaggaaatgttggggcggagtatgcggtctttgagcaaggtgcatcagcgggaaacgtggggaaggatacaacggaagagcaaaagaacgcaaaccctgtggctttgttgctgtcatcagccatgatgcttagacaccttcagttcccttcttttgctgacaggcttgaaaccgctgtgaagcgtgttatcgctgaagggaattgtcggactgaagatcttggtggaaacagtaccactcaagaggtcgttgacgctgtcattgcaaatttggattgactttgacaattccaacttcggcttgtgtaaagccatcagtcacacgtcggtatgattcacgcttactgggaaatacttctagttcccacattctttcgagataactcgaattgggatttcagatttcgagaaaaataacatatggttttttgttttgtttttcttctttttgttcatgtaatatgcaaagtgcaaagtgaaaactgcctcagagcattattttttgaataatgaaaattatgtttaacttcaaaaaaaaaaaaa

SEQ ID NO: 88718 - DNA, 388 bp, Arabidopsis thaliana columbia
ctcaaagagatttcggtcccatgcatgagtgtttttgatgttggtggaaacagcttatcgggtgtaatccctgattttctcaacagtaccacaagccattgtcctcctgttgtttactttgacaggttttctattgaatcttacagcgacccgtcgtctgtttatctctccttctttaccgagaaggctcaagttggaacttccctgatagatcttggaagtgatggacgtccggccgtgtttcataattttgcagacaacaacttcactggtactctcaagtctataccacttgcacaggagcggttgggaaagcgagtctcttacatattttctgctggagggaatcagttgtacgggcaatttccgggaaatctgtttgataact

SEQ ID NO: 88719 - DNA, 414 bp, Arabidopsis thaliana columbia
accacgcgtccggttgaacactgctagttctggtaataacagattgagtggtgatagttatgtattgtgctcttctgggtttcatgaacatagaggttatgctgataaatatgagttcttggaatcaaaaccactttgctctcaagatggcttctttgattacctcaactttgtttctgttctggtgtctggcttccatctgaatgtggcattcctatgatcagatatcttaaaatgggaatcggcaaaacggaaatcaatttcatgagattactttcagctgcacctaatcagcaaaaccagtctaagcttatgcattatgttgctactttgagggaacagttggaacaactctcggaagagaagacccttgaagggcttcccagagttacaaacgctaaggtgaatgagtac

SEQ ID NO: 88720 - DNA, 1118 bp, Arabidopsis thaliana columbia
cctgcaggtcccggtccggaattcccgggtcgacccacgcgtccgctctaaccaaaaaaaaaaaaaaaaaacttctgaatctccgaaaaaagccaatcgggggaagaaaaaaattcaacggccgtctggttactgtcttgcttgcttccgacgatctatcttccccgagtagatttgaaatggctgctcctcctgctagagctcgtgctgattacgattacctcattaaacttctgctgatcggagacagcggtgttggtaagagttgccttctcttacgtttctcagatggctcgtttaccaccagtttcattacaactattgggattgattttaagatacggactattgagctcgatgggaagagaattaagctgcaaatctgggatactgccggacaggagcggttccgcacaatcacaactgcgtactaccgtggagccatggggattttgcttgtgtatgatgtgactgatgaatcatctttcaacaacatcaggaattggatccgtaacattgagcagcatgcttctgatagtgtcaacaagattctagttgggaacaaagcagatatggatgaaagcaaaagagctgtgccaaaatctaagggccaagctcttgcagatgaatatggaatgaagtttttcgagactagtgccaagactaacttaaacgttgaggaagttttcttctctattgctaaagacattaagcaaagacttgcagataccgatgcacgagctgagccgcaaacaatcaaaatcaaccaatccgaccaaggtgcgggaacatctcaagctactcagaaatcagcatgttgcggcacataaaaattgggtccacgacgcctgtcaaaggagagaatctggctagtgaaagagaaatggtatttggaaagaaaaaatgaaaaaggaaatcaatcttcttttgcttttcttctatatgagatggtgtttctacgtattcttttaagattctctctttccctaatggtatagtgtgactgtgaaggacacaattcgtattccatatttctggaatggattctctgacatcagattatgacttatgataatatcagtttatctcaaaaaaaaaaaaaaaaaagggcggccgct

SEQ ID NO: 88721 - DNA, 461 bp, Arabidopsis thaliana columbia
ctggcacgcctgcaggtaccggtccggaattcccgggtctacccacgcgtgcgcgtccgccttgtccgattctgcttcacctctgcgcattccttgtctgatcctcgcaggaaactctactgtcagcaataggttgatgggttctgcagccagacagcctctcttctcatttggtgttattgctgatgttcagtatgctgatatttctgatggccgctcttttttaggtgttcctaggtattacagaaacagcatccttgtccttcaaagagctgttgaaacttggaaccaacatgggaacctcaaatttgttattaacatgggtgacattgttgatggcttttgtcccaaagatcaatccttggctgccactaagaaactagtccatgaattcgagaaattcaacgggcctgtgtatcatatgattgggaatcactggccctaccatctcccccgcaaaa

SEQ ID NO: 88722 - DNA, 393 bp, Arabidopsis thaliana columbia
aaaatgccaacaaatcaaattttgtcaaaatggaggccaaaacattttttctcttcatgcttttcatcttttctcagtcttggctctcaacttctaaaaggatcctaaacaatccctctgttttctcatcgtctttgaatttttcgagtggtaatgcagagagacttataaaatcattcaatctaatgcctaagtatgacgttaatgtcatcccaaaaggaagccttgatgctccaagactcattgagagacacattgattttctggcgacagccggttccacaaacgcttccgttggtccttctgttcaagagtttggccactacgctggttattacagccatcctcattcataatcagccaagatgttctatttcgtttttgaatcacgga

SEQ ID NO: 88723 - DNA, 1823 bp, Arabidopsis thaliana columbia
  unsure (1)..(1823): unsure at all n locations
atgatactccagctcatctacgactcanatagggaaagctggtacgcctgcaggtaccggtccggaattcccgggtctgacccacgcgtccgaatttcactcacaatgacgtgtaacgtcgacgttgtcggtggacacaaagctccataaagacactattactgtattattatcttcgaaatatctatctcttcgtcgtcgaacccaaaaagattctccgtcttagattccgatcacgatgaacccaacccaaaaacccgaaccggtttacgatatggtcatactcggagcatccggatttaccggtaagtacgtcgtcagagaagctctcaagttccttcaaacaccgtcttcttctccgttaaagtctctagctttagcgggtcgtaacccgacccgtttaacccaatctctcgaatgggccgcccgcccgaacccaccaccttcctctgtcgctatcctcactgctgatacatctgaccctgattcacttcgtcgtctctgtactcaaaccaaactcatcctcaattgtgttggaccgtttcgtatccatggtgatcctgtcgtctctgcttgtgctgattcagggtgtgattatttggatataagtggtgaacctgagtttatggagagaatggaagctaactaccatgatagagcagaagagactggctctttaatcgtttctgcttgtggttttgattcaattcctgctgaattgggtcttctctttaatgctaaacaatgggtatctccatcggttcctaaccagattgaagcgtaccttagcttggagtctgacaaaaaaattgctgggaactttgggacttatgagtctgcggttttaggtgttgctaatgcagaaaagcttaaagaattaagacgttcaagaccaagaaggccaagaccaacgatttgtggtcctcctgctaaaggaccaacattagaaaaccagaagacgattggtctttgggctttaaagctaccttcagctgatgcagtagttgttcgtagaactctcacaactctaacagagaaaccacatgggcttcctgggattaatgaaagtcctgagcagatacaaaagagagaagcattctggtcatcgatcaagcctgctcattttggtgtaaagataacgtccaaatctctctttgggatattccgatatgttacacttggagtgtcacttggtttactttccaagttctccttcggaagatggcttcttttgaaattcccttcagttttcagccttggttggttccagaagaaaggtccaagtgaagaagaggtagaaagcgctacgtttaagatgtggttcataggtcgtgggtacagcgaagagagtctagcttcacaaggagaaacaaagcctgacttggaaatcattacaagaatttcaggacctgagattggatatataaccaccccgataacacttgttcaatgcggtttgatagtcttgggccagcgcgaaagcctagttaaaggaggagtctacacacccggcattgtgtttggttcaaccgatatccagcagcgacttgaggataatggtatatcttttgagctgatttcaaagatcaagactcaaggataaaaagagatctcttatcctgcttttctattctgtttttagttgttatgttatgcttcacagtgacattgaagacagtttgatggtaagttgtattccaataataataaaactgtttcctttacgtttgctaaaaaaaaaaaaaaaaaaaaaaaaagggcggccgctctagaggatccaagcttacgtacgcgtgcatgcgacgtcatagtcttnctatagt

SEQ ID NO: 88724 - DNA, 386 bp, Arabidopsis thaliana columbia
cccatttcccattttctgctaattttctttcactttctcggctgattttcctgggaaaatactctttatctaaacgtcctaaaacactactcaaaaacgaatgttttttttatgttataacttatatttgtgtgactattttgatataactattattgcagatctgtggatcttaacacttctctaatgcttataatgacgagatctaagcatgagaaggaagagataagaagctcatgacaagaatctgaagaaaattaaatttgtttttcacttatcgccgccattgttgttctacactgagcttagacagttgacacctgtaatccaaaattcaaaaggttatcactgcaacatactcaggctttttacttaattatcatagc

SEQ ID NO: 88725 - DNA, 454 bp, Arabidopsis thaliana columbia
cttcaatcaaaatcatgaacattttaagttctcgcttggttggacttgttccaatgctgatcaaaattgatgctgcgaattccttgattgaggattatgccgcctgccttgagggacgacttgaagagggtgaagttgtagagaacagttgtgatgatctaggggtccttattatgcagcttctggttgataatatcaaccggcctgccccaagtatcacacatttgcttctgaagtttgatcttgatgcccctgtggaagggacagttttgcagccgaagtttcactacagttgtctgaaggtcattcttgaaatgctggagaagcttccaaaccctgatataaacttcttactctttgagtttggcttccaacttttgtgtgagttgaatttggatccactaactagtggtccaaccatggatctattgagcagcaaaaaatatcagttttt

SEQ ID NO: 88726 - DNA, 2414 bp, Arabidopsis thaliana columbia
  unsure (1)..(2414): unsure at all n locations
nnnnnnnnnnnnnnnnnnnnnnnnnnnnnnnnnnnnnnnnnnnnnnnnnnnnnnnnnnncccacgcgtccgccacgcgtccggcaattcttagtttctcttctatcccctttctgggttttgtttgaaccctagctcgctttggatccagtggttttaagttaaaggtaaatttatcgaaagtaagtagattcctaatggcagcttccaatcattcatctggtaaacctggaggagttttaagtgatgctttatgtagggagctctggcatgcctgtgctggacctcttgtaaccctacctcgtgaaggggaacgagtttattatttccctgaaggccacatggagcagctcgaggcatcaatgcaccaaggtttggagcaacagatgccttccttcaacctcccatctaagatcctctgtaaagttatcaacatccagcgcagggcagagcccgagactgacgaagtatatgcgcaaataaccttattgccagaactggatcaaagcgaacccactagcccagatgcccctgttcaagaacctgaaaagtgcaccgtacattcattttgcaagacactaactgcttcagacacaagcacacatggtggcttctcggtgctacggagacatgcagatgattgtctcccacccttggatatgtcccaacaaccaccgtggcaagaattggttgcaactgatttgcacaatagtgaatggcattttaggcacattttccgaggccaaccaaggcgtcatttgctaacaactggatggagtgtttttgttagctcgaagaaactagtggctggtgatgctttcatattcttaaggggtgagaatgaagagctccgagtaggtgttaggcggcacatgagacaacagactaatatcccgtcatctgtcatttcaagtcatagcatgcatattggggtccttgcaacagcagctcatgccattacaacaggaacaatcttttctgtcttctacaagccaaggacaagtaggtcagagtttattgtgagcgtcaataggtatctcgaagctaagacccagaagctgtctgtaggcatgcgtttcaagatgagattcgagggggaagaagctcccgagaaaaggttcagtggcacaatagttggtgttcaggaaaataagtcttcggtctggcatgattctgaatggagatcgctaaaggttcaatgggacgaaccctcatctgtatttcgtcctgaaagagtttcaccttgggaacttgagcccctagttgcaaatagtactccgtcttcacaacctcagcctccgcaaaggaacaaacgaccaagacctcctggtttaccttcaccagccactggtccatctggtcctgttactccagatggtgtgtggaaatccccggcagacactccttcctcagtgccattattctctcctcctgccaaagctgctacgtttggtcatggtgggaacaaatcatttggagtatctattggatcagccttttggcccaccaatgcagatagtgcagctgaatcctttgcttcagcgtttaacaatgaatctactgaaaagaaacaaactaatggaaatgtctgtaggctttttgggtttgagctagttgaaaatgttaatgtggatgaatgtttctctgctgcctctgtgtctggtgctgtcgctgtagatcaacctgtcccatccaacgagtttgactctggccagcaatctgagccattaaacatcaaccaatctgatattccttcggggagtggtgaccctgagaaatcctctttgaggtctcctcaagaatcacaaagtagacagatacgtagctgcacaaaggtgcacatgcaaggcagtgcagtaggcagagctattgatttgacaaggtcagagtgttatgaagatctgttcaagaagctggaagagatgtttgatatcaagggtgaactcttagaatctaccaaaaaatggcaagtcgtttacaccgatgatgaagatgacatgatgatggttggtgatgatccatggaatgagttctgtggaatggtgaggaagatattcatctacacacctgaggaagtgaagaaactttcaccgaagaacaaactcgcagtcaatgcaaggatgcagctcaaagctgatgcagaggaaaatgggaatacagagggcagatcatcatctatggcgggatcaagatgagtatatcactgtgttatgttttaaatgtacttgccacgtaggaaatatgaaagcagaagcaagagatcgttagacaatatgaaagttgagatgtctgtgtatagcaatgaagttttatgtcttcaagtcttatgaattcacttagatgcaatgtgttttgaggagttgtgtagcttttgtacgggaaatatggaaattaagtttcacgtcttgttctacc

SEQ ID NO: 88727 - DNA, 386 bp, Arabidopsis thaliana columbia
tgttgctctgccattggtccacagaacaacagaacagtgttagcacttgcaagcagaattgggatcaactatggaaaattaggcaacaatcttccttttccttaccaatcaatcaacctcatcaaaaccattaaagcaggccacgtcaagctctatgacgccgatccagaaaccctaaagctcctctctacgaccaatctttacgtcaccatcatggtccctaacaaccagatcatctcaataggtgctgatcaagccgctgctgataactgggtcgccactaatgtccttccttttcacccgcaaacccgaatccgattcgtcctcgttggcaacgaagtcctcagctacagttctgatcaagacaagcaaatatgggctaatct

SEQ ID NO: 88728 - DNA, 744 bp, Arabidopsis thaliana columbia
  unsure (1)..(744): unsure at all n locations
acgtgtcacatttttccctctcttctctctctttcgctctttcttcttccccgcagttcccggagacgacgccggaggaaaatcgtacggaaactttgcttcgacttcacgtggccgctccacgaagcgcctttgggtttcgtcttccccgtttctctttctctctcttcttttgcctttgttaccacgaatagaacgagaggagagagataggaggagagttttgggatattggtggagagcgattatcgggagagccagagaaaaaaataagcagcttcttcctccctcatcgttgggaccgtgacttttgttttcttcagctttaagcaaacaaaaaaaaaagatgaccggcgttggcgagaatcagcttatctccattcaacctgatgaactcaaatttctctttgaacttgagaagcaaagctactgtgatcttaaagttgccaataaaacagagaactatgttgctttcaaggtgaaaacaacatctccaaagaagtattttgtaagacctaacactggtgtcattcagccatgggactcttgcatcattagagttactctacaagcgcaacgagagtatcctccagatatgcagtgcaaaggcaaatttntcctgcaaagtaccattgtaccnccacacacttgttgtgggctgaacttcctcaacggcacttttcacccaagggctagtcgggaaggcctttaccaggttgttagnttcaaaggcctcttattttt

SEQ ID NO: 88729 - DNA, 254 bp, Arabidopsis thaliana columbia
cgaaagacttaaaatcaacgagctcacggggatgtcggccgtttcaatctccgccgtcaaatctgattttttcaccgtcgaagccatagccgttacacaccatcggacgccgcatccaccacatttcccttcgctccggtttccactagcgctcaagtccccgccggctacttctcgtaaccttgtggctggatcaaaactcctccacttctcgcgtcgtcttccttctatcagatgctcatatactccgtcgt

SEQ ID NO: 88730 - DNA, 917 bp, Arabidopsis thaliana columbia
  unsure (1)..(917): unsure at all n locations
cataaacacaaaatccggtttttaataatggcgaaaatctccagtattcacattctcttcttcgtcttcatcacaagtggcattgctgattccgccaccgtattcactttacaaaacagttgtgcgtacaccgtttggccgggaactctctccggcaacagcatcaccctcggcgacggcggatttcccttaactccaggcgcttccgtgcagctcacggctcctaccggttggtcaggccggttctgggctcgtaccggctgcaactttgacgcctccggtcacggtacctgcgtcaccggagactgcggcggcgttttaaaatgtaccggcggcggagttcctccagcgactctagcggaattcaccgtgggatcaagcaatgccggcatggatttctacgacgtgagcctcgtcgacggttacaatgtaaagatggggataaaaccacagggaggattcggaaattgcaaatacgcaggctgcgtctcggacatcaacgagatttgccctagcgagcttaggatcatggatccgaattcgggaagtgtcgcggcgtgtaagagcgcttgcgcgtttagttcgccggaattttgctgtactggtgctcacgcgacgccgcaaacttgttctccgacgtattactcgtccatgtttaagaacgcttgtcctagcgcttatagttacgcttacgacgacgcatcgagcactttcacttgtaccggatctaactacttgatcactttctgccctacccagtcttaaaaccggagctccggtttagatttgggttgggtttctctctctctcgtttcttttgcttgttatgtacggaaagagaaataaagaaagatatgataaggaaaagcgactatgatccatttttaaagattnnnnnnnnnnnnnnnnnnnnnnnn

SEQ ID NO: 88731 - DNA, 855 bp, Arabidopsis thaliana columbia
  unsure (1)..(855): unsure at all n locations
gaaagctggcacgcctgcaggtaccggtccggaattcccgggtctacccacgcgtgcgcgcgctgttgcttcttcgaagaagcaaccttctctgttagatgaacactttgaagctgtatcagatgatgacgagaacagtgattctgatgcatcacagccttcagatgacgaggccgacgatggagacgcaactaggccaagcaagaaagcgagaactccgaagttgtatgaagtgaaagatgagcggcatgccgcagcttatcacaaccgcacttcactggctaaagaagatagtcttcctatgggcgagcgtgtcaaggctatagagaaccggcgtggcaactttggaggctcgaaagatatcaaattcggtcctggaggatcacgggagttttctttcaaggcgagagggtcatcaaagtacaaagaagatagagacgatgagtatgaagatgggcaaagaaacaagaggagaggagttcagtctcttggactgaaatcaacaaatattagaggcggtttcaaaggtagaggaggtggtggttttagagggaaaggaggcgccggttcccggggaaaaggtgcccgtggtggtgggcgtggaagaggccggcaatgataaatgtagcttttcaggggctttattagatttgaaaaatgtgtcacccactattgagaatcttgaaacttaattgatcacatatacaattttggaatatttttgacctggtcttcaatcagcacaacagaatttgcttaaaaaaaaaaaaaaaagnnnnnnnnnnnnnnnnnnnnnnnnnnnnnnnnnnnnnnnnnnnnnnnnnnnnnnnnnnnnnnnnnnnnnnnnnnnnnnnc

SEQ ID NO: 88732 - DNA, 721 bp, Arabidopsis thaliana columbia
  unsure (1)..(721): unsure at all n locations
ctttctctctctttctccttaaaaactctaactttactcatctcatctccaaagtctcaacctttcttctctaatggagatctgcacttacttcaaatcacaacccacttggctcctcattctcttcgttctggggtcaatctcaatcttcaaattcatcttcaccctcctcagatctttctacatctacttcctccgaccatccaaaaacctccgccgatacggttcatgggcaatcatcaccggaccaacagacggaatcggtaaagctttcgcctttcagttagcccagaaaggtcttaaccttatactcgttgctcgtaacccagacaagctcaaagatgtctctgattccatcagatctaagtatagtcaaactcagatcttgaccgttgtgatggatttctctggagatattgatgaaggtgtgaaacggattaaggagagtattgaaggattagatgttgggattttgattaataatgctggcatgtcttatccttatgctaagtattttcatgaggttgatgaagagttgatcaataacttgattaagatcaatgttgaaggaactactaaagttactcaagctgtgttgcctaatatgcttaagaggaagaaaggtgctattattaatatgggttctggtgctgctgctccttatgcccttcttaatcccttttacccctgnttatgctgggggctaaaacggccggggnnc

SEQ ID NO: 88733 - DNA, 513 bp, Arabidopsis thaliana columbia
  unsure (1)..(513): unsure at all n locations
nnnnnnnnnnnnnnnnnnnnnnnnnnnnnnnnnnnnnnnnnnnnnnnnnnnnnnnnnnnngattggctctagcccacgcgtcggagcatccatggggcaattgctctcatttcgcgtttatctgtctgctgaaacgcagaaagcttctccagggtcgtttaagcgaacccaaaagactcgaaaaccattttcgcctgatagaagaggtccggtggctccgtcgcggaaatctcagaatctgaatttggaaagtttctccacatagagctgtatctgcagtcagattgatgagaattgagtacggtggtgcttttgctgatcttttgaatgagaaaggaaaagggtctgggagcaatgagatgagttatgttgaaaggactatcggttttcggactcgcgatttggattgacccgagatcttagactggttacagatgttgttggaggaacaatacggtggaggaggtatcttgatcatttgattggttccctttgccacaacgaaagatcatt

SEQ ID NO: 88734 - DNA, 783 bp, Arabidopsis thaliana columbia
cggacgcgtgggcggacgcgtgggtaaaaaggtcgagatttcttgatagcgcaatgaccacacagaccagagttcgaaccttcaaaagggaaatatataatttgtttcttagtttctcgagtatctaccacctcgagatctgaaaatctgattctacctttccattttctttctcaaaagtcgtggctttgagaatagttttttcctcttcttctcatcagactcggtttcctagttgactcattttcaagatctgggcatctgtcatttctttaataaaagctttctttttttatttatcccttttgttttcagctgctggttgcttgtagtaggtatagttttgggtggccttacttgcttttcagcaaaagctgggagattgagatttcttcttcttctctctctttagtctttgggatctgcgcatttctcagaaattatatgggactctcgaaagcatgatgctttttgttgtctcacttgtaatttgttcgggactttgttgctgaagaaaactaagcaatgtctgtagaaacatggttcatgattcagaagactactactagctcatgagttcactggtacttggaattaagatgattgatcagttcatcaactttgtaattcgacctcctagggctgagtatgatcctgatcagtatttgtgggagaaggagtttagcctcggtggcacaaagtgtaaaagacaagacttggaggcaacttacaaattcgaggggtcacactttgcgttgcagtcattatgttccctcatcttct

SEQ ID NO: 88735 - DNA, 535 bp, Arabidopsis thaliana columbia
  unsure (1)..(535): unsure at all n locations
aattacccnangnttacaggncnggcctgntcngccaaaggggcaaaattgcaactgcccgaaggtgtacagattgcaaataaataatgggatccctaccaaaagttggtacgatggtccaactgatgatgggttgattactatacttcccttcttagagactttggctgttgctgatgatgtccggcctatcattggcaggagatttggtaacaaggaataagagtttccttctctttttttctatatacatcgagtgcagatcctgatttctctcctttggattttagttacaaattggcccttaattagttcctcatatctctttttaggtcgttaattaggtaaccaaagaataagctcgttgagtctagtgagaataagtttccttgcttgctccctttttttaatagaagacctagttgtgggcttaaatcttatgactttgctggttcttctctgccaagatagatcctagaaaatcttgcagtttgttacaaatgtacagttggttaagctgagataatggatgtgt

SEQ ID NO: 88736 - DNA, 356 bp, Arabidopsis thaliana columbia
agcgtgatgctgaagatatctttgctgagtttttcggcgaatccggtgatgcttttggcggagggagtagcggaaggacacgtggagatggcggtgatggtggcggtcggagatttaaaagtgcagaagcagggagccaggctaatagaaagacgccgccgacgaacaaaaaaacgacgccgccggcgaataggaaggctccggctattgagagtaaattggcttgcacattggaggagctctacaaaggtgcaaagaagaagatgcgaatttctcgccttgttcctgatgattttggaaagccaaagacagtccaagagatattgaagataaacataaaaccaggttggaagaaa

SEQ ID NO: 88737 - DNA, 3309 bp, Arabidopsis thaliana columbia
ggccgccaccaccaccgcctcatcagcacacttcgggttcgcattctggaccattagactatagccacaacccacaaccatcatctctcgcggctgctcctccagagtatcacagacattcttttgactaccaaccttctccttacccttatcagccccaaggtaactttggtgcttatggtcctctgcctcctcactattcgtatcaagagccagctcaataccctccacctgaaacctaaaccgcaagagcctctgcctcctccgcagcaaactcaaggttttcaagaatatcgtaggcaagattgtctcagtaccgggggaacaggtcatgataatgtaagcaattctggatcttcttatcctcctgtggatgaacttctaggtggtctgcatatttctactaaccaaccatggtccctcagttccacaactatcctcccttccttcgaactcttggcaaagcgccctggggacttgtatggttaccctaacagctcgtttccaagtaactctcatttgccacagttagggagagtagattcctcaagttcttattatgcatctaccgaatcgccacatagtgcggatatgcagatgacactgtttggtaaagggtcgttgaaggtcctgttgtcgcatgggaatttggatatttggatctatcatgctaaaaatctccctaacatggatatgttccataagacactgggtgatatgtttggaagattgccagggaaaattgaagggcagcttactagtaagattaccagtgatccttatgtttctgtatcagttgctggtgctgtggagtcagaccctcgcgttcgcatgagtaactgcgaaaatcctgtttggatgcaacatttttatgttcctgttgctcatcatgctgcagaagttcattttgttgttaaagacagtgatgttgtgggttcacagcttattggattggttacaatcccggtggagcagatatactcaggtgccaagatcgaaggaacttatccgattctaaccagtaatgggaagccttgtaaaccaggggcaaacttatcattatcgattcagtatactcctatggacaaactcagcgtttatcatcatggagttggggcaggtcctgattaccaaggggtacctggaacatattttcctcttagaaaaggcggaactgtgagattgtatcaagatgcacatgtcccagaagggatgctccctggtataagactggacaatggaatgttttatgaacatgggaagtgttggcatgatatgtttgatgccatacgtcaggcgcggcgtttgatttatatcacaggttggtcagtgtggcacaaagttaagttgattcgtgataaattaggtcctgcatccgaatgtactcttggggagcttctaagatcaaagtcccaagaaggagtgagagtcctcctctcgatatgggatgacccaacttcacgtagcattttgggttataaaacagatggggttatggcaacccatgatgaggaaacacgccgtttttttaagcattcctcagttcaagtcctgctttgcccccgaaatgctggaaagcgacatagttgggtcaagcagagggaagttgggacaatctatacacatcatcaaaaaaacgtaatagtagatgctgatgctggtggtaacagaaggaaaatcatagcttttgtcggtgggcttgatctatgtgatggccgatatgacactcctcagcatccgttgttcaggacactacagacaattcatatagatgattttcacaaccccacttttacgggaaatctttcaggatgtccaagagaaccgtggcatgacttacacagtaagattgatggcccggctgcatatgatgttctgaccaacttcgaagagagatggttgaaggctgcaaagcctagcgggatcaagaagtttaagctgccgattgacgatgcgttgttaaggattgataggattccagatatattaggagtttctgatactcctactgttagtgagaacgatcctgaggcttggcatgttcagattttccgttcaatcgattcaaactctgtgaaaggtttcccaaaggatccaaaagatgctacatgcaagaacttggtgtgtgggaagaacgtgctgattgatatgagcatacacacagcgtatgtcaaagccattcgtgcagcccaacatttcatctatattgagaatcagtatttcattgggtcttcatacaactggaatgcgcataaggacataggtgcggataatttgattcctatggaaattgcgttgaagatagctgaaaagatcagggcgaatgaacggtttgctgcttatattgtcattccaatgtggccggaaggtgttccaaccggcgctgctacccagaggattctttattggcagcacaagacaatacagatgatgtatgagacaatctacaaggcgttagtggagacagggcttgaaggagcattctccccacaagattatctcaatttcttctgtcttgggaacagagaaatggtggatggaatagataactcaggaaccgggagtccaaggcaaatgcaaacactcctcaggccgttgagtcggaaaagcagaagatttatggtctatgttcactcgaaagggatggtagttgatgatgaatacgtagtaattggatctgcaaacataaaccaacgatcaatggaaggcacaagagatacagagattgcaatgggagcttaccagcctcaacatacatgggcaaggaaacattctggtcctcgtggtcagatctatggatacagaatgtcgctttgggcagagcatatggcaaacttagatgactgtttcacacagccagagagtatagagtgtgtaaggaaagtgagaacaatgggagagaggaactggaaacagtttgcagctgaagaagtctcagacatgagaggacatttattaaagtatccagtggaagttgatcgaaaaggaaaagtccgaccacttcccgggagtgagacgttcccggacgtcggaggtaacattgtcggaacattcatagccatacaagagaatctaaccatttgataataaggaaggatcccagtggcacacttttgacattttttttgtgtggatattatatcttgagagttgataataagagggtgggagatttgattaatttgataaacttttcacattattaatcgtgtataaagtggtggcttataaaaatgaataaagttgttaatagtttggctgatatattatcactctaaattttcctaccaaaactaaattactcacact

SEQ ID NO: 88738 - DNA, 729 bp, Arabidopsis thaliana columbia
  unsure (1)..(729): unsure at all n locations
cnnnnnnnnnnnnnnnnnnnnnnnnnnnnnnnnnnnnnnnnnnnnnnnnnnnnnnnnnnnnnnnnnnnnnnnccancgcgtccagctttcaataacaatatgctgcgtacttgtgctatttttaagatctatatgtcgatagatcaagatcacctctaaagttactcaagacgaatataaagaggaaagtgagaatgaagaccctgcagacgagcccaaagaaaaagattcaaatttgaaaccctttgcaagtttagaggaattggagaaaggaaggttacctccacaggatattctttcactccctatgttcaagaactacacagctgggaatccgtcggttgtactgtatatcaaaaaccttgccaaagatgttgttatcgatgatttctattacatatttgggtcacagtttgaaagcagcgaagtagctaaatcaagtcttggtgtgaggctaatgcaggaaggaaggatgagagggcaagcttttttgacatttccgtctgttgaagtcgcacatcgtgctctgaatcttgtaaatggttttgtgttcaaaggcaaaccaatgataatccagtttggcaggactcctggagcagccaagccaaacgaatgatgatgatatatataacatcaacggtttttgaagagtaggtgcaaattctttttgtgtatcatcatgtaactctttgactctcagtttaaagtcaataaaatatatcgctgcct

SEQ ID NO: 88739 - DNA, 952 bp, Arabidopsis thaliana columbia
  unsure (1)..(952): unsure at all n locations
tctttcgcgtctttngcttcctcccgctttttcgccaatgttttctttagatctagctaatatggcgacgattttttnctttctcgcttctaatcaccgtagagatcctcccgatctgcaaatccgatccgaattctcaacgaatttgtagatctgatctgtgattccatcgttgacgacggatcttcgcttacatcgtttganctgtcgcagatctgccgttttctatagatctagatctggatcgtccttcgcggcttcttcacatgcaagattctgtgaattgttcaagttgaggcatcatttctggattacnaggagacgnatctntttgcagacgggatgtgtgtgtgttggatgaattgagataagggtgtagaagatgttttttggnaagcaaaaagttcctgattgnatcttntnanccggcctttgccatgaaaggggcgtttcatgggaggcnaaaaaactggcccccaanaaaaaaagatttttggggttttggagaggaggccncacggggtataatttttcccgggaccccttcccccctgtgtgtgccggcttgcccctgctctatctcncaccctgctcttttcacattncataccttccttaaatgcncatatacactcaaaaaccgatcataagcagagtttgtaaccaatatggagcagtgggcgattacaaatcttcttgcccaacaacctcgagagttaaatcagtaactatgaagctggtagacgacggaattgaagctatgcaaagctgacgttggttttttctgaagttgatttgttcttgaaaggtatcttgatcaaaagatagtatctggttatgtgctaagtcaaaaattcctgatatttatagttcattacattttattttcttagtttattgtggcctgttgtggaagagnacaatcattataacattttatataatgagaaaa

SEQ ID NO: 88740 - DNA, 1418 bp, Arabidopsis thaliana columbia
  unsure (1)..(1418): unsure at all n locations
tccattgttactatttgtgggtatctatcctaattacatctacctatgttgttagatatctatactaagtagtggttgcaagtaagatatgatctgacaaggtatgtgagcaatactatcagtttggaaggccaggccgatgtccacgattattttacgctcctcgatccaatatatatnnnnaagctggtacgcctgcaggtaccggtccggaattcccgggtcgacccacgcgtccgcgcagatctgccgttttctatagatctagatctggatcgtccttcgcggcttcttcacatgcaagattctgtgaattgttcaagttgaggcatcatttctggattactaggagacgaatctgttgcagacggatgtgtgtgtgttggattgaattgagattagggtgtagaagatgttttgtggatagctaatagcttcctgattgcatctctgtcatccgacctttgccatgtcaggtgcgcttgcatggcaggtcaaaaaactgatcctcaataaaaaaaagattttgtgggttttggagaggaggtcgcacgggttattattttttcccgggatctcttctcctctgtgtgtgtcgtcttgcctctgctctatctctctccctgctctttcacatttcatatctttcttaaatgctcatatacactcaaaaaccgatcataagcagagtttgtaaccaatatggagcagtgggcgattacaaatcttcttgcccaacaacctcgaaagttaaatcaggtactcatatccatattaaatcgaattcttaattagcataataaggtaaacataatctgcaagaggaattctggatttaaataaaccataatccggttgccctaattgttaacttgtatcaacgcttatgcgaatcatgaaattttaatttaattggttttgttatttatcttattgatcaattattgttttacaagttgtcatttaatctattgaaaatgatggtattaagaattgctgttaaacaattttgcgggttctttgtatgtatcattggtattgttttattagttctatccgtttagaagctttttagaatatggtaaagaacatttttatttgctcgtagtttgtatatgtctgtaaccaccagttcctgtagtaactatgaagctggtagacgacggaattgaagctatgcaaagctgacgttggttttttctgaagttgatttgttcttgaaaggtatcttgatcaaaagatagtatctggttatgtgctaagtcaaaaattcctgatatttatagttcattacattttattttcttagtttattgtggcctgttggcggccgcgaaatcatgcagaaaaannnnnnnnnnnnnnnnnnnnnnnnnnnnnnnnnnnnnnnnnnnnnnnnnnnnnnnnnnnnnnnnnnn

SEQ ID NO: 88741 - DNA, 1388 bp, Arabidopsis thaliana columbia
  unsure (1)..(1388): unsure at all n locations
accacgcgtattctttcgcgtcttttgcttcctccctctttttcgccaatgttttctttagatctagctaatatggcgacgattttgttctttctcgcttctaatcaccgtagagatcctcccgatctgcaaatccgatccgaattctcaacgaatttgtagatctgatctgtgattccatcgttgacgacggatcttcgcttacatcgtttgatctgtcgcagatctgccgttttctatagatctagatctggatcgtccttcgcggcttcttcacatgcaagattctgtgaattgttcaagttgaggcatcatttctggattactaggagacgaatctgttgcagacggatgtgtgtgtgttggattgaattgagattagggtgtagaagatgttttgtggatagctaatagcttcctgattgcatctctgtcatccgacctttgccatgtcaggtgcgcttgcatggcaggtcaaaaaactgatcctcaataaaaaaaagattttgtgggttttggagaggaggtcgcacgggttattattttttcccgggatctcttctcctctgtgtgtgtcgtcttgcctctgctctatctctctccctgctctttcacatttcatatctttcttaaatgctcatatacactcaaaaaccgatcataagcagagtttgtaaccaatatggagcagtgggcgattacaaatcttcttgcccaacaacctcgagagttaaatcaggtactcatatccatattaaatcgaattcttaattagcataataaggtaaacataatctgcaagaggaattctggatttaaataaaccataatccggttgccctaattgttaacttgtatcaacgcttatgcgaatcatgaaattttaattttattggttttgttatttatcttattgatcaattattgttttacaagttgtcatttaatctattgaaaatgatggtattaagaattgctgttaaacaattttgcgggttctttgtatgtatcattggtattgttttattagttctatccgtttagaagctttttagaatatggtaaagaacatttttatttgctcgtagtttgtatatgtctgtaaccaccagttcctgtagtaactatgaagctggtagacgacggaattgaagctatgcaaagctgacgttggttttttctgaagttgatttgttcttgaaaggtatcttgatcaaaagatagtatctggttatgtgctaagtcaaaaattcctgatatttatagttcattacattttattttcttagtttattgtggcctgttgtggaagagaacaatcattataacattttatataatgagaaaagcttattgcaattttcctnnnnnnnnnnnnnnnnnnnnnn

SEQ ID NO: 88742 - DNA, 544 bp, Arabidopsis thaliana columbia
  unsure (1)..(544): unsure at all n locations
acctggcctgnattccctgggctgcccactgtgtccgggaaaatgacaagaactatgtattgtnagacaacgagattgcattcaacgaggctgtgattgaagaaagagagcaaggaatacaagaaatccatcagcaaattggtgaggttaacgagatattcaaagatcttgcggttctggttaacgatcaaggagtcatgatagatgatattggtactcacattgacaactcccgtgctgcaacttcacaaggaaaatctcagcttgtgcaagccgcgaaaacacaaaaatcaaacctcctctctgacatgcttgctcttggtgatatttggcattgttctcctgatcgtgattatagtactcgcagcttgatttcgaacagcaagaacatttcgtttgtgtgtgttcattgatcttaaggcatcaatgactggaactacttggtatatattatatgttgaagagaacacttaaaagttgtttttgagtttgtttgtttggatctatttttattttgtttttattttctcaaaaatcttttttt

SEQ ID NO: 88743 - DNA, 1375 bp, Arabidopsis thaliana columbia
  unsure (1)..(1375): unsure at all n locations
nnnnnnnnnnnnnnnnnnnnnnnnnnnnnnnnnnnnnnnnnnnnnnnnnnnnnnnnnnnnnnnnnnnnnnnnnnnnnnnnnnnccacgcgtccgccgcggttcacgtttttcacaatctgtccggagagagagaaactcaccggggaatcttgaaatcaccatcacatcctctcttccctcgatctccgttatcgactgtaaatcgaattttgttgttgctttgttttcttgggcgaataaaagaggataatttagtggcggggttttcgagaaagagagagaaagaatgagttttcaagatttagaggcgggaagaggaagatcattagcttcttcaaggaacatcaatggtggtggtagtagacaagacacgactcaagatgttgcttctggtatatttcagatcaatacaagtgtttccactttccatcgtcttgtcaatactcttggtactcctaaagatacgcctgagctcagagagaagctgcataagacaagattatatattggacagttagtgaaagatacatcagctaaacttaaagaagctagtgaaactgatcatcaaagaggtgtaaatcaaaagaagaagattgtggatgctaagcttgcaaaggactttcaagctgtgttgaaagagtttcaaaaggctcagcgtcttgctgctgaaagagaaaccgtatatgctcctcttgtccacaagccatctcttccctcaagctacacatccagtgagatagatgtgaatggagataagcatccagagcagcgtgcccttcttgtggaatcaaaaagacaagaacttgtactgttggacaatgagattgcgttcaatgaggctgttattgaggaaagagagcaagggatacaagaaattcagcagcaaattggcgaggtgcacgagatcttcaaagacttggcagtgttggtgcacgatcaaggaaacatgatagatgatattggtactcacatcgataactcttacgctgcaactgcccaaggaaaatcccatctcgtaaggcatcaaagacacaaagatcaaattcttctctgacgtgcttgctcttggtgatttttggtatcgtgctcatgattgttattatagtgctcgcagtttgatttccccaagctcataaaagcatggacaagtgcttcatcatcaatcaagaagcatcaatgagtatatgtttgtcacgactctctttgttcctacaatttagtctgttggactattggtctcttgtttcttgttatcgagtatatagagtagttcactttggtttgatttggcttgtgtttgctgagtcttggttctgaaggagagagtgttactgctttgtctctgtaatataacttggttctgaagcggccgcg

SEQ ID NO: 88744 - DNA, 1233 bp, Arabidopsis thaliana columbia
tctcaattaaaatcagtttgggattttttcgtaaacgcttttcaatcttcgctacgtcagggccacgatccacgccttgaccttcgttttttttttctcagagattagagaaaactccgataaccaatttctcaatctttttgtagatccaatttttccaggaaaaaaagaggtttcgcgaagaagatgagttttcaagatttagaatcaggaagaggaagatcaacgaggaaattcaatggtggtcgacaagattcgacacaagccgttgcttctggaatattccagatcaataccggagtctccacgtttcagcgactcgttaacacacttggtactcccaaagatacaccggagctccgggagaagctgcacaagacaaggttgcatattggacagcttgtgaaggatacttcagctaaacttaaagaagctagtgaaactgatcatcaaagcggtgtcaatccaagtaagaagattgcagatgctaagcttgcaagggactttcaagctgttttaaaagagtttcagaaagctcaacaaactgctgctgaaagagaaaccacttatactcctttcgtgcctcaatctgctcttccctctagctatacggcgggtgaggtggataaggtaccggaacagcgggcacaacttcaggagtcgaaaagacaagaacttgtattgttagacaacgagattgcattcaacgaggctgtgattgaagaaagagagcaaggaatacaagaaatccatcagcaaattggtgaggttaacgagatattcaaagatcttgcggttctggttaacgatcaaggagtcatgatagatgatattggtactcacattgacaactcccgtgctgcaacttcacaaggaaaatctcagcttgtgcaagccgcgaaaacacaaaaatcaaactcctctctgacatgcttgctcttggtgatatttggcattgttctcctgatcgtgattatagtactcgcagcttgatttcgaacagcaagaacatttcgtttgtgtgtgttcattgatcttaaggcatcaatgactggaactacttggtatatattatatgttgaagagaacacttagaagttggttttgtgtttgtttgggttggttcagttcggtttgaggttctattggttaatgtaatagtgtgtgcgtgtgtggcttttttgttgtgcaaacattttgttggagatgacagaaactctgttttgtttgtgg

SEQ ID NO: 88745 - DNA, 834 bp, Arabidopsis thaliana columbia
  unsure (1)..(834): unsure at all n locations
ccatcgcgaaaataaaaaatcagtgagagagatggcgaggtcgagaagaaagtacaggaactctagggctaaagttcgcgttgctcttcctaagaagaaccctaatatctttaaaccagctttcaacttccctcccaagctccgcgctctcatgggagacgatgtccctgaatgggacgatcaagctagcgttatccagaactacaaatcctttggcgtcatctctaaccctaatttgcttggtatccgagctcgtaccgaccatatgattcaggatgattccctcaacgttcctccacctgtagagccaccgactgatgatcctattgctaaggagttcgagcccattgattctggaagcgaacttgaggaagacgatcttaagacagcattggggaagcaaagaaaagatggaaagagtgctcctttacagccgcttaccactatgcaacgcacacatataaggcgtttggtggagaaacatggtgatgacattgagggcatgtaccgagacaggaagctaaactcgatgcagcattcggttgcaacacttcgaaagctatgtacgagatatcagatttacaaagacaagaacccgattttagtttcatgatgatgatgatgatctctgtatcctttgttcaattttgttataaacttgcaacaacactacaatggttatgaagtttctataaatcagaattcagtattttttataaaaaaaaaaaaaaaaagnnnnnnnnnnnnnnnnnnnnnnnnnnnnnnnnnnnnnnnnnnnnnnnnnnnnnnnnnnnnnnnnnnnacgggaattgcatcccaaaccggggggggggg

SEQ ID NO: 88746 - DNA, 472 bp, Arabidopsis thaliana columbia
cggacgcgtgggcggacgcgtgggcctcgaccctttaatttctaatcaccgaccaaaattgatcggaaacctagagctcttcgtattgctccgccaccatgcatatccggcgccagatcttcgttaaatctcctgactgtcaaaaagtcgtcgctctgcaattggatcctgcgcaatctctattaactctttcgggtatcacttccttactcgaatcgtcgcagcgtatatcgttttcggcttgctcgattactctagatgggaagcttttgaatggctctacacggatccaagtatcgaagcttccttctgtatccatgctcactcttttccctcgcctccgtggaggtggaggagatggtggggcaacgggagccgagtctcgcgattgctatctcaatatgtacgcggagaagaaacctgacagggctgatcctaatgagcagaggctctccaaatggttgaattgtgc

SEQ ID NO: 88747 - DNA, 472 bp, Arabidopsis thaliana columbia
attaaagaagatagatagagagagagagagagagtaaaaacctaaagggtgatatacttatataaaaattaatttaagattgtgattaagtggttcactatatttaagttactttgaggagctactaatcatgggtcatcactcatgctgcaaccagcaaaaggtgaagagagggctttggtcaccggaagaagatgagaagcttattagatatatcacaactcatggctatggatgttggagtgaagtccctgaaaaagcagggcttcaaagatgtggaaaaagttgtagattgcgatggataaactatcttcgacctgatatcaggagaggaaggttctctccagaagaagagaaattgatcataagccttcatggagttgtgggaaacaggtgggctcatatagctagtcatttaccgggaagaacagataacgagattaaaaactattggaattcatggattaagaaa

SEQ ID NO: 88748 - DNA, 623 bp, Arabidopsis thaliana columbia
  unsure (1)..(623): unsure at all n locations
cgcgcaacgtctaattcgattcactatagggaaagctggcacgcctgcaggtaccggtccggaattcccgggtcgacccacgcgtccgtacggctgcgagaagacgacagaagggtacggctgcgagaagacgacagaagggtacggctgcgagaagacgacagaaggggaagtcagtcgtaggagacctcactcacacatactttgttggaaatgctccaatggcgcacatggccatacaacctacagaagaaatgcctgatttgacatcttacaagaggttcttcttcaaatgcagtgtactagcagcatcgaattacgacataagcaactgcgaggattttgtgtgggtaaccaaagacgagctcttggaattcttccctgagcaagctgaattcttcaacaagatgatcattagctgagccactcacaccacagaaactcctattttcatcccttcttctccatcaatgtcatctctctgggattagacagtgtgagaaggtcaatgtaataaccaaacaaaaccatgtctctggttgtgacgtgaaggaaatttttgtggacatttttanaaccctacnaacccaaaagcggcccgtttataggaccaagcttactac

SEQ ID NO: 88749 - DNA, 1063 bp, Arabidopsis thaliana columbia
agcttgctcagggaagaattcgcggccgcgtcgacgaaaaaccctctcactctcaggctcaagcgccggcgttcactctctaaccaaactcgatttcgtttctgggttgtgagattgagaaatgccgagatcatctttgcggctactagctaagcctctcttggagagcaggcgagggttttgcacgagctctgataagatcgtagcttcggtgcttttcgagagattgcgcgttgtgatacccaaaccggatcctgccgtttacgctttccaggagttcaaattcaattggcaacagcagtttcgtcgtagatatcccgatgagttcttagacattgctaagaacagagccaagggtgaataccaaatggactatgtacctgctcctagaattacagaggctgacaagaataacgataggaagtcattatatagagccctagacaaaaagttgtatcttctcatattcggcaagccatttggagctactagtgacaaacctgtttggcccttcccagagaaagtctatgattctgagccaactcttcgcaagtgcgcggaatctgctttgaagtcagtcgtaggagacctcactcacacatactttgttggaaatgctccaatggctcacatggccatacaacctacagaagaaatgcctgatttgccatcttacaagaggttcttcttcaaatgcagtgtagtagcagcatcgaaatacgacataagcaactgcgaggattttgtgtgggtaaccaaagacgagctcttggaattcttccctgagcaagctgaattcttcaacaagatgatcattagctgagccactcacaccacaaaaactcctattttcatcccttcttctccatcaatgtcatctctctggtattagacagtgtgagaaggtcaatgtaataaccaaacaaaaccatgtctctggttgtgacgtgaaggaaatttttggtcgacgcggccaaaaaaaaaaaaaaaaaaaaaaagcggccgctctagaggatccaagcttacgtacgcgtgcatgcggcgtcatagctcatctatagtg

SEQ ID NO: 88750 - DNA, 399 bp, Arabidopsis thaliana columbia
cggacgcgtgggcggacgcgtgggcggacgcgtgggcggacgcgtgggcggacgcgtgggctcaatttggattggattttctgcatatcatcgctctagctttcgcgggttttggattcgattccttacccttctccaatcgaagtttttggctttgaattggatttgggtttcgttccaaaatcagctctttttgttaatcagatatgcaggaccagctggtgtgtcatggttgtaggaatttattgatgtatcctagaggagcatctaatgtgcgttgtgcgttatgtaacactatcaacatggttcctcctcctcctccacctcacgacatggcacacattatatgtggtgggttgtagaacaatgcttatgtatacgcgtggggctagtagcgta

SEQ ID NO: 88751 - DNA, 781 bp, Arabidopsis thaliana columbia
tcactataggcgaatgctggttcgcctgcaggtaccggtccggaattcccgggtcgacccacgcgtccgagcgtaaattacgaaaaacagagagataaatccgggcattgagattttggagatagagagagagaaaaatcgaaatctattgtctatctcctcaatttggattggattttctgcatatcatcgctctagctttcgcgggttttggattcgattccttacccttctccaatcgaagtttttggctttgaattggatttgggtttcgttccaaaatcagctctttttgttaatcagcagatatgcaggaccagctggtgtgtcatggttgtaggaatttattgatgtatcctagaggagcatctaatgtgcgttgtgcgttatgtaacactatcaacatggttcctcctcctcctccacctcacgacatggcacacattatatgtggtggttgtagaacaatgcttatgtatacgcgtggggctagtagcgtaagatgctcttgctgtcaaactacgaaccttgtgccagcgcactccaatcaggttgcccatgctccttccagtcaggttgcgcagatcaattgtgggcatttgtcggacgacccctcatgtattccttacggtgccatcattcggtcgaaatgcccctggttggtcaatttccgtaaccttacggttagtattgagccaatggaaaggggtaccctcttcccaaacttaacccggcccaaatgggaaccagcttggttcccccctttttccttaaactttaa

SEQ ID NO: 88752 - DNA, 1190 bp, Arabidopsis thaliana columbia
  unsure (1)..(1190): unsure at all n locations
gcgtaaattacgaaaaacagagagataaatccggtcattgagatttttgttatagagagagagaaaaatcgaaatctattgtctatctcctcaatttggattggattttctgcatatcatcgctctagctttcgcgggttttggattcgattccttacccttctccaatcgaagtttttggctttgaattggatttgggtttcgttccaaaatcagctctttttgttaatcagggtttcatctgtgtgggtcttgttttgaagcaatttgtgtgtgtttggatgaaagtagcagatatgcaggaccagctggtgtgtcatggttgtaggaatttattgatgtatcctagaggagcatctaatgtgcgttgtgcgttatgtaacactatcaacatggttcctcctcctcctccacctcacgacatggcacacattatatgtggtggttgtagaacaatgcttatgtatacgcgtggggctagtagcgtaagatgctcttgctgtcaaactacgaaccttgtgccagcgcactccaatcaggttgcccatgctccttccagtcaggttgcgcagatcaattgtgggcattgtcggacgaccctcatgtatccttacggtgcatcatccgtcaaatgcgctgtttgtcaattcgtaactaacgttaatatgagcaatggaagggtacctctcccaactaaccggccaaatggaacagcttgtcccccctctacatcaacttcaacaccaccctctcagacccaaaccgttgttgtagaaaaccccatgtccgttgatgaaagcggaaagttggtgagcaatgttgttgttggagtgacaactgacaaaaagtaatcaagaatgagtgagatcttaaagatcaaatccaaattcttcctctattcctgcgtttggtttgtgcatattacatacgcggaaaaactgtatgttatatatctcttgactcctttttaacccaagagaaaaagcttatcagaatctcttgttactgcattattggggtttattcaaagttgaagacacaaggtttttgctcgaatnnnnnnnnnnnnnnnnnnnnnnnnnnnnnnnnnnnnnnnnnnnnnnnnnnnnnnnnnnnnnnnnnnnnnnnnnnnnnnnnnnnnnnnnnnnnnnnnnnnnnnnnnnnnnnnnnnnnnnnnnnnnnnnnnnnnn

SEQ ID NO: 88753 - DNA, 533 bp, Arabidopsis thaliana columbia
  unsure (1)..(533): unsure at all n locations
cgactcactattagggaaagcttgggtacgcctgcaggtaccggcccggatttccggggtcgacccacgcgnccggccgctcttgaaaaaatcgcagagtagagactagaaggagaagaagatgagagtgaagaggcagaagaaaaacaggagaaccgtgagattcttcacggtctgttacggattccgtcaaccctacaaagtcctttgcgacggcactttcgtccaccatcttgtcactaatgagatcactcccgccgacactgctgtctctgaactcctcggaggtcccgtcaagctcttcaccaccagatgtgtgattgcggagttggagaaactgggtaaagattttgcggaatctctcgaagctgcccagacgcttaatacagcaacatgtgagcacgaggaggcaaaaacagcagacgagtgtttgtcagaggtataggggtacaaaatactgagcatttcttccttggtactcaggacgcggagtttaggagaaagcttcagcaggagtctatagttcctcttgg

SEQ ID NO: 88754 - DNA, 326 bp, Arabidopsis thaliana columbia
ctctctgtggaatgcatcagctacgctcgctgaccttttcagctgattatgcgggttatctgagcacaccgatctcagccacgccgtgtcctgactagggcttcccctctcatgcctgggttttggctgttcgtatatgaacggtgcactagtttcagcaggagtggaggaatcacagtctgcaatcaacaggcaaagtatcggcagattgttacaaggaatatctatggcacatatatcacaagaatttaaccaacatgtgttcactgtgtgatcatctatactaaaccagactaatacccccatatttgatacccagataatgc

SEQ ID NO: 88755 - DNA, 1097 bp, Arabidopsis thaliana columbia
  unsure (1)..(1097): unsure at all n locations
gcgngcggaagcngggancccctagagcggtcgccctnngttttatttctttgcttcttgtcgaaatttatttactatggcctattaaaatttggcaaggggctgtacatgtcaggacgcagaactctttagtactctctaaaagaaaagaccttacattgatctttaggttacatacgaggaggaggtccctgcttacagtgcatgngaccnactactacaaatattacaaggccagactctgcttcgtcatttccattttggagagaagccctctcatctcttcctccattctcatcttcatttcataaaactctctctgccctctctgcattgcctctaactcctcgtacctcctcctccttctctcctgagcatcctccatactcaacttccccattctccgattgaactctgtttctatcttctccttcttcgctattgctattcggtttcagtccctctggttctcttcgtgcatcatcggaccgcccttgaaacatttctgctctgcttgcttcattctcacaatgctctctagcttttcgaaacgaggttcctttggtgaaccccttttcagctccatctccgctgcacatatttcaacttgcctctctctgtggaatgcataagctacgctcgctgaccttttcagctgattatgcgggttatctgagcacaccgatctcagccacgccgtgtcctgactagggcttcccctctcatgcctgggttttggctgttcgtatatgaacggtgcactagtttcagcaggagtggaggaatcacagtctgaaatgaaacccaatatgcgattgcaagcttcaggaaggcctatcaatttacttttcaaactaccagcgcgcatcagcagcttgtctcagctgtttccctctagagtctttgcttgatgaaaatattttattgacatactccagttccttgcaaaagcgctcaaatttccattcccttgcaaaattcagaaacacttctttgacatagcctaacatatatgagggatggttacaggcaacgcagtgaaattgcatctcggcggacgcgtgggtcgacccggaaattccggtgcggtactgcaa

SEQ ID NO: 88756 - DNA, 1157 bp, Arabidopsis thaliana columbia
  unsure (1)..(1157): unsure at all n locations
cactacttaggaagctgtccctgagtccggtccgattccggtcgacaccgtcgatgtggcagtgtgattantcgacagatagaggatgctcttgaagttgacaactgattgatacccgattgatggcatggtgcggcctgagaagatcatagacaccggggctcatgccatatcccacgcttgatcagacacagtgaacatgccccaggctatcgaagagtccatgatggggaagctagtactcatatcagacacaactgtgattgcgcacattccattggggaaagttaactttacagaggaagacctgctcataaacttccttgcagcagtgaaatcggtggagacatacaagccaaagggagctaaaggagtgtactggaaaagcgctcacatatgctcgtcaatggggccttccatcaagttgaacataagagagatgatagacttcaagcctcccactgcgaactaatcgacaacgccatttgtaaatggggtccttttgggagacgggcaatgccagtgtagacagagaagagaaaccccaagtctagtctgttagtaatcttttcacgcctcactgctttgtatcactttgatggccatttgcttcttgtcgttatttatttactattgcctattaaaatttggcaaggggctgtacatgtcaggacgcagaactctttagtactctctaaaagaaaagaccttacattgatctttaggttacatacgaggaggaggtttcttgttacattacatgtgatttactactacaaatattacaaggccagactctgcttcgtcatttccattttggtgagaagccctctcatctcttcctccattctcatcttcatttcataaaactctctctgccctctctgcattgcctctaactcctcgtacctcctcctccttctctcctgtgcatcctccatactcaacttccccattctccgattgtactcttcttctatcttctccttcttcgctattgctattcgtttcagtccctctgcttctcttcgtgcatcatcggcccgcccttggaacatttctggctctggctggcgtcattctcacaatgctctctagctcttcgaaacggggtcccttggggaaccccttttaaatccactccangggaanattna

SEQ ID NO: 88757 - DNA, 581 bp, Arabidopsis thaliana columbia
  unsure (1)..(581): unsure at all n locations
ggagaactggccagactgttatagtcgctgttcttgcacaaggtgagaaggttgatgaagccaaaagtgcaggggcagatattgtgggcagtgatgatttaatcgaacagattaaaggaggcttcatggagtttgacaagctgattgcatccccggatatgatggtcaaggttgctggcctgggaaagattcttggaccacgggggctcatgccaaatcccaaggctggtacagtcacagcgaacattccccaggctattgaagagttcaagaaggggaaagttgaattcagagcagacaaaactgggattgttcacattccatttggggaaagttaattttaccagagggagaccttctccataaacttcccttgcaagcagtgaaaatcggtgggggccaaccaagcccaagggggctaaagggggtgtactgggaaaccgcccacatatgcccgccaatggggccttcccaccaagttgaccttagggggntggttnntctaacccccccctgggaccaatncgcaaccctttgaaatggggcccttttgggaccgggatcccttttacaaaaanaac

SEQ ID NO: 88758 - DNA, 637 bp, Arabidopsis thaliana columbia
  unsure (1)..(637): unsure at all n locations
acaaggtttgttgagtctgttgaagcccatttccgtctcaacatcgatcctaagtacaatgaccagcagctgcgtgcaacggttgagcctgcctaagggaactggccagactgttatagtcgctgttcttgcacaaggtgagaaggttgatgaagccaaaagtgcaggggcagatattgtgggcagtgatgatttaatcgaacagattaaaggaggcttcatggagtttgacaagctgattgcatccccggatatgatggtcaaggttgctggcctgggaaagattcttggaccacgggggctcatgccaaatcccaaggctggtacagtcacagcggaccattccccagggntatttgaaggagttcaaagaagggggaaagttcggattcagggcccaggccaaaacctggggatttgttcacaattcccatttggggaaagttaatttttcagggggaggccctttttaaaaacttccttccaagcagttaattcgcgtggggccaaanagccaaggggctnaaggggtttcttgaaacggtccaatttctgnaatnggcctccnnaagtttncntgggggnttgcttagcncccttgggttttcancctttatgggctttggggatccttttg

SEQ ID NO: 88759 - DNA, 868 bp, Arabidopsis thaliana columbia
ttttaaaaaaaacactttcttttaggggcccttttttagggcaatgtgcccttcaaaactttccttgggataccttcacatcccttacatttttttctaacgggggggaattccctccactataactacaaactttccccccaatttctacgcaaaatagggaaattcctttggttgaaattatttgcccatttctttcgacaaaatactatattgggtttcaagttccctagggctttttcttggggcaatcatgggccccgcccttgaaacatttcggctagggctgtttcatttctcacaatgctttttagttcttaaaaaaaaggtttctgttggtgaaccccttttcaactccttctccgctgcacatatttcaacttgcctctctctgtggaatgcatcagctacgctcgctgaccttttcagctgattatgcgggttatttgagcacaccgatctcagccacgccgtgtcctgactagggcttcccctctcatgcctgggttttggctgttcgtatatgaacggtgcactagtttcagcaggagtggaggaatcacagtctgaaatgaaacccaatatgcgattgcaagcttcaggaaggcctatcaatttacttttcaaacttgccagcatcgcatcagcagcttgtctcagctgtttccctctagagtctttgcttgatgaaaatattttattgacatactccagttccttgcaaaagcgctcaaatttccattcccttgcaaaattcagaaacacttctttgacaaagccaaacatctctgagggatggttacaggcaacccagtgaaattgcatctcggcggacgggtggtcgaccggaattcggtcggtcttccgg

SEQ ID NO: 88760 - DNA, 807 bp, Arabidopsis thaliana columbia
atttgacacaggaaataacaataatctagaaacaaagataaaaagtaattatcgtccctatggtatggactttaaattcagagttgcaactggtagattcagcaatggaatggttgcttccgattatttagccaaatacatgggagtaaaagaaattgtaccggcatatttagacccgaaaatacaaccaaacgatcttcttacgggagtatcttttgcatcgggtggtgctggctacaatcctactacatccgaagcagcgaatgcaatcccaatgctggaccaactgacatatttccaagactatatagagaaagtaaatacgttagtaagacaagagaagagccaatataagttggcaggtttagagaagaccaatcagctaatatccaaaggagtggcaattgtcgtcgggggaagcaatgatctgatcattacatattttggaagtggtgctcaacgactcaaaaatgacatcgactcttataccactatcattgctgattctgccgccagtttcgttttgcaattgtatggatatggagcaagacgtataggagtgatcggaacaccaccacttggatgtgtaccatcacaaagactaaagaaaaagaaaatatgcaatgaagagctaaactatgcttctcagcttttcaattctaagctcctccttattttgggtcaattgtcaaaaaccctaccaaattctacattcgtttatatggacatctacactatcatcagtcagatgctagaaactcctgcggcttatggatttgaggagacaaagaaaccgtgttgcaaaac

SEQ ID NO: 88761 - DNA, 476 bp, Arabidopsis thaliana columbia
gaaaggctggtaccgcctgcaggtacctggtcctggaattccacgggtcgacccacgccgtccgacgatatcacgctctgaagcagaagaaaaggtaattctgaatgtctggaagaaaccggattcacagagatatccgagacagctatcatgatcatcgtgatttacctccggagagaccttttctccgaggccctccattgttacaacctccaccaccatctttgttagaagatcttcagatacaggagggtgaaatcagaaggcaggatgctgaaatcagaaggcttttgagtgataatcatggactagctgacgaccgaatggttctggagagagaactcgttgctgctaaagaagagcttcaccgaatgaatctgatgatttctgatcttcgtgctgagcaagatctgcaattgagggagtttagtgagaaaaggcataaacttgagcggggatgtcgcgctatggagtcg

SEQ ID NO: 88762 - DNA, 440 bp, Arabidopsis thaliana columbia
cccacgcgtccgcccacgcgtccgcttgcaactctcaaaccctagatcaccaccaatccaagtctccctcttcgttttccatctccgccgcagctaaacccaccgtaagataccgtgagtgtctaaagaatcatgcggcgagcgtcggcggaagtgttcacgacggatgcggcgagtttatgccgagtggtgaagaaggaacaatcgaagctctcagatgcgctgcttgtgattgtcaccgtaatttccaccggaaagaaatggacggcgttggaagctcggatttgatctctcaccaccgtcatcaccactaccaccataaccaatacggtggaggaggagggagaagacctccgccgccgaatatgatgcttaacccactcatgcttcctccgccaccgaattatcagccgattcaccaccacaagtatggaatgagt

SEQ ID NO: 88763 - DNA, 695 bp, Arabidopsis thaliana columbia
  unsure (1)..(695): unsure at all n locations
nnnnnnnntactgactcactatatgggaatagctggtaccgcctgcaggtacctggtccggaattcccgggtcgcgcccacgcgtccggctcttatctctttctctcatggcctcaccacaagcaaccaaattgtctcttataatccgatctcaaaggttggcttgttgggagcactgagacatcaaacatggtttcttctttctttcactcttaaaaaaaccaatttagccctaaaaacctccttttagtttaatcccaaaagttcctcaaatctcttctattctctctctctctccattaaaacccttcacaagcaaaaagctttgagctttaaatgagtttaaggtcctgcaaaaactgggtttttcctcgtgtacttgttcatcttatctcctctgcataaacttcattgaagaaaaagtcttttttattttgttgatctcttttaattaagatccttttgggttttaatttattaatctccaagaaaaaaaatggatatgagaagccatgaaatgatagagagaagaagagatgacactggccacaacaatggtggtgttgttattagtaacatcattagtactaatattgatgataattgcaatgggtataacaacacacactcgtgtctcttgcaactctcagaccctagatcaccaccaatccaagtctccctcttcgttttccatc

SEQ ID NO: 88764 - DNA, 876 bp, Arabidopsis thaliana columbia
accgaaactcaatttgtgaaatttgggggtttaaggatgaagggtttagtgtctactggttggaaaggtcctgtcaagttcaggatgcccactgctgaaaacttggtacctattcgattggacattcaattcgaaggtcagcgttacaaagatgctttcacttggaacccttcagacccggataatgaagtcgttatctttgccaaaagaactgttaaagacttgaaacttccctatgcatttgtcactcagattgcccaatctattcagtctcagctctcagactttcgggcttatgaaggacaagacatgtacactggtgaaaaaatcataccaattaagcttgatctccgagttaaccagactctcatcaaggatcagttcttatgggacctaaacaattttgagagtgatcctgaggaatttgcaagaaccttgtgcaaggatttaggtgttgaagaccctgaagttggacctgctgttgcctttgcaataagggaacaactttacgagattgcaattcaaagtgtggcttcagctagggagagtagattaagcaagaaaggccgcagaggatctgatcatggttcagcgagcaaggcaagtggcctgtcaatggacttaatgaagttattcagttttaagtccagtgtagttcggaaaaggaaagacttggatgtttatgaaccagttgtggatctgctaacaagtgaggaagttgatgcgcttgaagccagggaagagagacatgcaaggtgaagagtttcgtttacatgtataaatatttcttagggcaacactcaaaatatgttgtatcatgcttaacttgagttaatgatattaagacaatcttttatgagaaaaaaaaaaaaaaaa

SEQ ID NO: 88765 - DNA, 460 bp, Arabidopsis thaliana columbia
tcagatgttttcatccttcacaacaagtttcgttcaagtctgatccgatgttctcctctagctttctcagattgattcttttactctgtctcgtctcttcttccttctcctccaccgcttcttcctccaactccactgccgccgatcaaactctccggccgcaagaagagctccagaagctaacactgattagacaagaactcgacaaaatcaacaagccggctgtgaaaactattcagagctcagatggagataaaatagattgtgtttcaactcatcagcaaccagctttcgatcatcctctcttacatggacaaaaaccattggatccgcctgagataccaaaaggatatagcgaagatgatggatcatatgaaaactcccagctttggaggttttatccggggggggtcttggccggaaggtacgattccgataagaagaacaacggaacaagaca

SEQ ID NO: 88766 - DNA, 463 bp, Arabidopsis thaliana columbia
gggaaaaatggcgaaaggagacgataatgtgcagaggaagaagaataaagtgacgaggaagaagatgagtaggaagaacgataccgccaccgtatctgctcgtatcgccgccattatcgccgccaagaaacgtcgcaagtctggcaaacgcagcatgtgtcagggaatgtgttttactcttcctacacttgaagatccattcaatgaaaggcaaggtaaagctgatattactaaaaagaagaagaaaaagaaaaaggtgaagagtagagaagacaagaaaccatctcctatgtctattgaaggtgttgagaagatggatggtccaccaaagtttctgatgttaaacttgaatgagattgagagctcatttcgtaaagatattacatacagtgaacaacatgataagtctttgtttactagtagttgggggattgagttctggaaatgttactcatctgggaat

SEQ ID NO: 88767 - DNA, 548 bp, Arabidopsis thaliana columbia
  unsure (1)..(548): unsure at all n locations
ctccccganaacccnttggagcccttcaatgctgggaagnccccttaccggaggatctccctatggtggggttgagggggaaccctttgccggcgaggcggagccagattaaaaccaataatattccccgaggcaacccggagagactttggatgagctggccagagaatgtgaaagaagggcttaatggtcacctcgtggatgactatggaaagatcttcgagcttgcctttggctatgacaaacaagaagactgagaacacacataagccacgttgaccttttgtcatctggtggtgtctccatttaaacaacactaccattcctgattctccttgatccttttcttccctcaagaagaaaggtattctgtaaccttttttttatgattaggggaatttattggtgggtggattttattattttgggatataacccaagcccaatatccttattaggcctccggaccaaggtaaaaaaaccaaaggtggttttccaaaaaaaaaaaaaaaaggcggccggtttaaaagaatccaggctaacgaagg

SEQ ID NO: 88768 - DNA, 3369 bp, Arabidopsis thaliana columbia
  unsure (1)..(3369): unsure at all n locations
atgaagggctttgatactaatcttcgtctacaggcttcttctccagaattctccaatggtttcttgcctaaaaggcaaaactttataaaactcaatcgcagaaattgttaccccagatcttctttctctcccaccatgttaaagctcttcacttcctccgcctctcgagtccaccatttgactccggtaagtagggtcgtcgggtcttctccagtggagtctccattgttcaaagcgttgagtcaaatcactgggtggaatcggcgatctacttcgttgggtcatcgtgctttcttctgctctgagcctaccaatggagaggcggcggctgaagctgaaactaaggcggtggagtccgattctgaagtgtctgactccaaatcttcgtctgcgattgtgcccactaaccctaggcctgaagattgtttaacggttctagcattgccggtgccacataggccgctttttcctggtttttacatgccaatctatgtcaaggatcctaaagtactcgcagccttacaagagagcagaagacgacaagctccatatgcaggagctttccttctgaaggatgacccatcagctgattcatcttcaagcactgacgcagaaaaaaacataaatgagctgaaagggaaagagttgcttaaccggcttcacgaagttggcacacttgctcagatttcaagtatccaaggagaccaagttatccttgttggtcacaggcgacttcgcataaaagagatggtgagcgaagaaccacttaccgtcaaagtcgatcatcttaaggataatccgtttgacatggacgatgatgtcgtcaaggcaacatcttttgaagttatttcaactcttagggatgtactgaagacaagttcactatggagagatcacgttcagacatatacccagcatataggtgatttcacttatccacgactagctgattttggagcggcgatatgtggcgcaaataggcatcaagctcaagaatttcttgaagaactggatgttcacaaacgtctgcggttgacgctggaattgatgaaaaaagaaatggaaattagcaagatacaggaaaccatagcaaaagcaattgaagaaaaaattagcggtgagcaacgtcgttacttgctaaatgagcagctcaaggctataaagaaggagcttggtgtggagacagatgacaaatctgcactttctgcaaagtttaaggaaaggattgagcctaacaaggaaaaaattccagcgcatgtattacaagtcatagaagaagagcttacaaagctgcagctgttagaggcgagttcaagcgagtttaacgtgacgcgtaactaccttgattggttgaccatattgccttggggaaattacagtaatgaaaactttgatgttgcacgggcgcaaacaattcttgacgaggatcactatggcttatctgacgtaaaggaaagaatactggaatttattgcagtgggaagacttagaggcacttcacaagggaaaatcatctgcctctccggccctcctggagtaggcaaaactagtattgggcggtctattgcacgtgctcttaatcgcaaatttttccggttctctgttggagggttagcagatgtcgctgagatccaagggcatcgtcggacatatgttggcgccatgccaggaaagatggtgcaatgtctaaagagtgtggggacagcaaatcctcttgttctaatcgatgagattgataagctggggagaggccatgctggtgacccggccagtgctttgttggagcttctggatccagagcaaaacgcaaattttctggaccactatctcgacgttactatagatctatcaaaggttttatttgtgtgcacagcaaatgtgatagacatgattccaaatcctttgctagacagaatggaggtgatttctattgctgggtatatcactgatgaaaaagttcatatcgcaagagactatttggaaaaaactgcacgtggagattgtggtgtcaagcctgaacaggttgaggtgagtgatgcagcgcttctttccttgatagaaaattactgcagagaagcaggtgttaggaatctccagaaacagatcgagaagatttaccgtaagattgcacttaaattagtgcgtgaaggagcagtccccgaagagccttcagttgcaagtgatcctgaagaagctgaaatcgtggctgatgttggcgaatccatagagaatcatactgtcgaagaaaacactgtttcttctgctgaagaaccaaaggaagaggccccaaaccgagaagatagcttattgaaacaggttatgattgatgagtcaaaccttgcggattatgtaggaaaaccggtattccatgcagagaagctctatgagcagacaccggtaggtgttgtgatgggtctagcttggacatcaatgggtggttcaacattgtacatagagacgactgttgtggaggaaggggaaggtaaaggtggcctgaatataacgggtcagctcggtgatgtgatgaaagaaagtgcacaaattgctcacacagtcgccagaaagatcatgctagagaaagaaccagagaatcagttctttgcaaactccaagcttcatctccatgttcctgcaggagccactcccaaggatggtccaagtgcaggctgcaccatgatcacatctttactatcacttgccacgaagaaacccgttaggaaggaccttgcaatgactggagaagtcacactaaccggaagaattcttcctattggtggggtgaaagagaaaactatagcggcgaggcggagtcagattaaaacaataatatttccagaggcaaaccggagagactttgatgagctggcagagaatgtgaaagaagggcttaatgttcacttcgtggatgactatggaaagatcttcgagcttgcctttggctttgccaaacaagaagactgagaacacacataagccncgttgaccttctgtcatctgttgttgtccccatttaaacaacgctaccattcttgattctctttgatctttttcttccttcaagaagaaagttattctgtaactttttttttatgattagggtaatttattggtggttgaattttattattttggnatatagccaaagccaaatatcataataagacatcaggccaaagtaaaaaaaacaaagttgtttctcattttgtgcttgtaatttcatcaacatattcgcgtattactttcactgttgctatgtgttcggtcacacttcataacagactagtaacttgttggcataattttctgttttatattcctttcnnctggattnnnnnnnnnnnnnnnnnnnnnnnnnnnnnnnnnnnnnnn

SEQ ID NO: 88769 - DNA, 405 bp, Arabidopsis thaliana columbia
tttaaagctgccagagaggaacaagaagttcatggtaaagaaactcaacagactcaagagagagatggagttgtttggtccgcaagctgttgtcagctaataccgcgagtatggagaagataaggaagacgattatctatggtggttggacattttattactaaaaagctcagttcgagcaggcacttatgcaagagatgctgactgtttgtttttaaccgaaaagagcttattgatgttatcagggctgtttaaagtgtatggggctatggtagattctggttttccggagcatgaaatcgcagcatccgacaaagaaaaggtgagtaatttggtaccactagttcctacacacggaatcatccaatcttctgaagcagagtattgtggtatttgttcaaatcc

SEQ ID NO: 88770 - DNA, 434 bp, Arabidopsis thaliana columbia
caaaaatcaaaacttttactttttatttctcctctctggatcttcctcttcaaagctcaaggccattagggtttatctgagctccaaaatcaccctaattctagtgtatttctcagcaagcaagcttcttctttttttgtcctgggtaactgtgattgttgcaggatcttgtgtagaaacagatcacaagaagatgaatgataactcggtggtgcggctttgattatcttcagagattttagattctgtatccactctgttgcgatggggtcgtttgcaggcgcttgtgagattgtggaagagaaggatgatgaagtaagattgccaaaacattccgggagatatggtaaatcggttatgggatcatcaagtcaggatttggtggagcgtaagcaacgagagtatcatggttctcttgagtatgacattgatat

SEQ ID NO: 88771 - DNA, 552 bp, Arabidopsis thaliana columbia
  unsure (1)..(552): unsure at all n locations
ttcnnnnnnnnnnnnnnnnnnnnnnnnnnnnnnnnnnnnnnnnnnnnnnnnnnnnnnnnnnnnnnnnnnnnnnnccacgcgtccgcggacgcgtggggccaaagagaagcttgtcttgaatctttagctacggttttgaagaataatcctgaagctgtttctgattttgttggacttgagtctgggaagtattttaattctgtgactgagttaacaaaggataggtatccgacgactaggctgctttcttgtctttgcttagttgtcatatacaacacttctccatcttatttcataaacatgggaaccaaatcaagtttgataactactctgcttgagcttcttaatgaccctggtcaatctggagatgatgctgccttgggtttatcctgtctgattgcggaaaaagaggatttacaacagttagcttacgaggccgatgcaatcaagaatattggttgagatcttgaagacaggtagtgagctccagtctaaacgtcttcagggtttgtttttgtctctagctgaattgtgctcaaagctagaggattg

SEQ ID NO: 88772 - DNA, 1139 bp, Arabidopsis thaliana columbia
  unsure (1)..(1139): unsure at all n locations
tcgacccacgcgtccggtctagtcttttatattgtagataatatttctatctggacataacaacaatggcagatgcaaacgaagtagtggaatgggccaacaatttaaagtgggataaatatgctggaaataaagaaattgttgatggattggccgctttgagacaaaaaatcacagctttggacggcgctgaaggaggctctggtggcaatcaaagagttaaattagtagttgtcggtgatggtgccgtcggcaaaacatctctgttgatttcattcgctgaaaacaaattccctgaggattacgtccctacagtcttcgaaaactacacttctaaaatcactcgcgacgatggtacacttgttctgttgcatttgtgggatacagccggtcaagaggactacgaccgattgagacctttgagttatcctggcgctgatgtcatcctgctctgtttctccaccgtcactgcctcgtcattcgcctccattaaagaaaagtggtaccccgaagtcaaccactacgtgcccgatgctccttatattttggtcggcaccaagctcgacttgcgtgaggctggtctgcccgatccctccactggtgagtcagatcccgtcacccccgagaaggctgaggagatgcgaaagcaaatcaaagcgttgaagtatattgaagtctctgccaagacacgaaagaacttgcagactctgttttcagaagccgtggacattgtcttggctgaacgacgcgcacacgagcctcccaagcccaccgctgcttcatcgacgaacggcactaacggcactaagactgagcacactcctcgcgaagagcccatccgaaagaagaaggagcgtcgctgcttgttgatgtaagagccctgtgattggtcactctaacatcgactcgagatctgcactattactattttatttgtcgtttttaactttatttaatcaaaaaaccctttcaaccaataagccacgataagagtcgtgcagtcaaatttattttggtagcccttggatctgctatcaagattttcttgtattatcgacttgtaattaataggactgtagcgatatcgtgcttctttatttatttcaatnnnnnnnnnnnnnnnnnnnnnnnnnnnnnnn

SEQ ID NO: 88773 - DNA, 401 bp, Arabidopsis thaliana columbia
ggttgtggcatttgcaacattcacgagtcatagattcgccttggctgcaatgaatgagctaaatggtgtgaaatttgatcctcaaacaggatcaaatctacatatagaactagctagatcaaactctagaagaaaagaaaggccaggaagtggaccttatgttgtgattgataacagaaacaaggaaatttctaagtctcaggatgaccagagtgatgaaggggatagcgatccagatgaggtgcaggaacctggaaatagcgattctccaaaggaaaacgatactaccaaaagcgaagcggattctgagccagatagtaaagcaccatctgctaatgggcacttagagaaagcatctgaaggaggttctggtgctcgagcttgttcgaccttgtttatag

SEQ ID NO: 88774 - DNA, 466 bp, Arabidopsis thaliana columbia
accggaatggaagggccgacccagcccacccgtgcgaaggcaaacgaggcgacgaagaaggtatccatatttgaagactccgatccacgcgggttcgacatgggtgaggaggcagcctccaaaggtgaaagctttccttgccgtcgtatctggcatggcggctcttgttctcctcaaactcatcgttcacgatcacgacaatctcttcgttgccgccgaagctgttcattctattggaatctctgttcttatctataaactcatgaaggagaagacttgtgctggattgtcattgaaatctcaggagcttacggcgatatttctagctgtgaggctttattgcagttttgtaatggaatatgatatacataccattctggacttggctaccttgggaacaactctctgggttatatatatgatcccgtttaacctcaaaactacctacatggaagaaaaagacaac

SEQ ID NO: 88775 - DNA, 571 bp, Arabidopsis thaliana columbia
  unsure (1)..(571): unsure at all n locations
ccnnnnnnnnnnnnnnnnnnnnnnnnnnnnccagcgnnnnnnnnnnnnnnnnnnnnnnnnnnnnnnnnnnnccacgcgtgcgcgagaagacgacagaagggggcccagaaaatcagagacagaagaagaagaaaagcgaaaaaaagcaaaacatgaaggcgacgacgaagactccgatccacgtggtgtggtcatgggttaggagacaacctccgaaggtgaaggcttttctcgccgtggtcactggcatggcggctttggttcttctcagattcattgttcacgatcacgacaatctcttcgttgccgctgaggctgttcattccatcgggatctgtgtgctcatctacaaactcatgaaggagaagacctgtgccggattgtcactgaaatctcaggagcttacggcgatatttttagctgttaggctgtattgtagcattgtaatggaatatgatatacataccattcttgacttggctactttgggaacaactctctgggttatatttatgattcgtttcaagttaagagctagttacatggaggacaaagacaactttcctctcta

SEQ ID NO: 88776 - DNA, 641 bp, Arabidopsis thaliana columbia
  unsure (1)..(641): unsure at all n locations
acccacgcgtccgcattctctgattcggtccatcgatctcaaaggctcaaagcttaatcgtttcctttcttcttattctagccatggctcagaccgttgtcctcaaagttggtatgtcatgccaaggctgcgttggtgccgtcaatagagttttaggcaaaatggaaggggttgagtcatttgacattgatatcaaggagcaaaaggtgacagtgaaaggtaatgttgagcctgaagcagttttccaaacagtttcaaagaccggaaagaagacttcttactggccagtggaggctgaagctgagccaaaagccgaggctgatcctaaggtcgaaaccgtgactgagactaaaaccgaggctgagactaaggctgaggctaaggttgatgcaaaagctgatgttgaaccaaaagccgcagaagccgggactaagccatcacaagtttaggtttactaacggtgaaaagggaaggttaatcttccttttcaaatcgttcctttaccttttcctttttgtgngttgttgtaaggaatcttcccctcaatccctaatatctttatggatgntacccttttccaaccttttgttaccagttttggccctgttggccccctttttttnggaaaaaaaaaaaaatac

SEQ ID NO: 88777 - DNA, 672 bp, Arabidopsis thaliana columbia
  unsure (1)..(672): unsure at all n locations
ggacggggnggaatnncgggtcggaccacccgccganctaatcgtttcctttcttcttattctagccatggctcagaccgttgtcctcaaagttggtatgtcatgccaaggctgcgttggtgccgtcaatagagttttaggcaaaatggaaggggttgagtcatttgacattgatatcaaggagcaaaaggtgacagtgaaaggtaatgttgagcctgaagcagttttccaaacagtttcaaagaccggaaagaagacttcttactggccagtggaggctgaagctgagccaaaagccgaggctgatcctaaggtcgaaaccgtgactgagactaaaaccgaggctgagactaagactgaggctaaggttgatgcaaaagctgatgttgaaccaaaagccgcagaagccgagactaagccatcacaagtttaagtatactaacgatgaaaaggaaggctaatctacctttacaatgcttctttatcttttgcttttgtgtgttgttgtaagaaatgcttcctctaaatacctaatatctttatgtatgtatacctttttcaactattgataacaagatgttggacccatggttggtccgacttttctttttataaaaaaaaggntannttatntntntnngatnttataggggngggccgnttttngngggt

SEQ ID NO: 88778 - DNA, 398 bp, Arabidopsis thaliana columbia
ggaaactcggcaccacgaggtaatgtgtttggagtagttgatgatgagtctcatatctcccacaatagatgttaaagaagcagtggactgggttctacacgagactggggatcctgatatttcagtgcacatgcgaatgttgatgagcaaatctgttacacctatgcgtgcagcgataaactgtctagggaaagcaattaacagacttggcataccgaacccgagagtggttatagtgtctgacactccatctgtagtgaaaattatcaagacagatatcagcaccattgcacaggttctacattttgactataagcttttccgaggtgatatcgctcaacgtggccgcggtttaccaatgttagatttcagaataaaggattggggtcctgcaccga

SEQ ID NO: 88779 - DNA, 923 bp, Arabidopsis thaliana columbia
  unsure (1)..(923): unsure at all n locations
cacgatctagcttaaagttctgtaacctaagcgataatcacttagctactccaagtttcttcttaatttctctcacactagtagttctaagctttagaaatggcaacagcatcgttcaacatgcaatcagtcttcgccggtggattaaccactcgcaagatcaacaccaacaagcttttctccgccggtagcttccctaacctcaagaggaattatccggtgggagtgagatgcatggctgagggaggacccacgaatgaagactcttcaccagcaccatctacctcggccgctcagccgttgccgaagtcaccatctcctcctcctcctatgaaacctaaggtgagcacaaagtttagcgacttgctagcgtttagcggtccagcaccagagaggattaacggacgtttagcgatggttggattcgttgcggcgttggctgtcgagctatccaagggtgaaaacgttttagctcagatctccgacggtggcgtctcatggttcctcggtacaacagcgatcttgacacttgcgtcgcttgtgccgcttttcaagggcataagcgttgagtccaagtccaaaggtatcatgacgtcagacgctgagctttggaacggacgtttcgcgatgctcggtttggtcgcgttggcgttcactgagttcgtcaaaggtgggacactcgtctaaggaaaagagagcacgttatggggaggatgttttaatacgattttgcccatgtaatttctctgtaaagtaatctgtgttaggcctactgtgtgttttatacatgtgtactaagtgacattttgaaacttcgggttaaaaacactttaaaattagtggtgttctatnnnnnnnnnnnnnnnnnnnnnnnnnnnnnnnnnnnnnnnnnnnnnnnnnnnnnnnnnnnnnnnnnnnnnnnn

SEQ ID NO: 88780 - DNA, 419 bp, Arabidopsis thaliana columbia
cgtgaaaaaaatggaagatctatggaagagagcgaaatcgtttgcagaagaagcagcgaagaaatcacaaaccataacactacaatcatcttcaacaacattcgtcaatctcgtcaccgaaaccgctaaaaaatccaaagagttcgctctcgaagcttctaagaaagctgattcgatcaatgtctccgagttcgtcgccgagacggcgaagaagtcaaaggaattcgctgctgaggtttcaacgaaagcggatcagctcaaagtcgtagcattgaaacaagctgatcagatccagaatataaaatcgattgccgacattatacctggaggattaggaggatcaggatctggtggtggtggttctgagatttctgaatctgagcttgttagttttggtattactgatgatttgagagagt

SEQ ID NO: 88781 - DNA, 530 bp, Arabidopsis thaliana columbia
atgatttgccggcactaatacgactcacttagggaaagccggtacgcctgcaggtaccggtccggaattcccgggtcgacccacgcgtccgtctcaaccttctcgtcttctttcggacaacaatgtcacaaaaagtctgatcctttctctttagatttggcttcgagaaatggctcgcgatcggcgggaaggtctggagatcaaggtggtgaatccaccggcggcggcgacaaacaatgtggctgtagaaacgtctccggcgacggcgacgaggagacggagacaacaacaacgagcttcgttcgctgagtttagaccgtttaagctttggtttccatggcttgttccagctatcgtggtggctaacattgcccttttcgccatttcgatgtttattaacaattgtcctaagaactcggcttattgcttagctaggtttcttgggagatttgcttttcagcctatgaaagagaatcctcttctgggtccttcttcattgacattggagaagatgggggctttagatgtat

SEQ ID NO: 88782 - DNA, 440 bp, Arabidopsis thaliana columbia
cggacgcgtgggcggacgcgggggctctctcgttctttgcgtgttggaaagttcgaaacagagcctctgtaaattacgcgtaaagtttcaatctttattcacacaattcacacagctaatgtaagcatgagaatcttcagattcacgtcaatctcaccgcggattttgccgtcgaatcattactcaacattcccgttgaaacaaaacgtgtcttctctctcaccggcgaaatacattgcgggagctttacaagaacatatcaattctccggccccaaaagctggtaagaagatacacgcagatatcatcaaaactgggtttcaaccagatttgaatatatccatcaaactactcattcttcatttaaaatgcggttgcttgagttatgcacgccaagtgttcgacgaattacccaagccaacattatcggcttacaacta

SEQ ID NO: 88783 - DNA, 412 bp, Arabidopsis thaliana columbia
ctcaaccatcgcatattcgccgccataagcagagagtttcacatataaacgaaaaattcccttcgagaagtctcaagtcgacgatatggagaacggagacattccagaggacgctaacgagcattgcccaggtcctcaatcagaatctgctggaaaatcagattcttgtgctggctgccctaatcaggaagcttgtgctactgctcctaaaggacctgacccagatttggttgccatagcagagaggatgagcactgttaagcacaagattctggttttgtctggcaaaggtggagttggtaagagtactttctcagctcagctctcgtttgcccttgcgggcatggatcatcaagtaggtctgatggacattgatatatgcggtccaagcatcccaaaaatgttaggactt

SEQ ID NO: 88784 - DNA, 435 bp, Arabidopsis thaliana columbia
caaaaacagaggatgtgttttgtttattcttagtcatggtttctccattacatctagaattcccataagtgcttgtttcatcttgggttacaggtgctgggaattagatggtcatcaatcttttatgttgagagtgtagcaagagtgaaaaagctctcattaagtggattgttgctttacaagttgagaatagctgatcaattctttgttcaatggccacaactgcataagaagtatcctcgggctcactatgttgggtgcctgatgtaagctgattggaactctacttacacctagatatattacaaaaacttagaaagctacatagtgtacaccttctctttatatgcaggattgagttttaaacaatgaatttttgtaatcagctgttttgactttgttaatgacttaatgctatttcagtgagcttataat

SEQ ID NO: 88785 - DNA, 476 bp, Arabidopsis thaliana columbia
ggaaacccggcggaccgcacgcgtccgctcttcttaatagtcaatcatatatcaaaaaatttaaactcttcttgatcaatggcttcttcttctgctgctatgtctcttgaatccatctctatgacaactctcaacaatctctctcgtaatcatcaatctcaccgcagttctcttcttggtttctcaagatctttccaaaaccttggaatctcatctaacggtccagatttctcctcccgatcaagatctactacttccaagaacctcaacgttactcgagctttcttctggaattggggcaagaagacctaaaactccataccaagtgagagccaagaactaaacgtgtatgagctcaacgaatgagatagaaacagtccatcagttcttaaactcggcaagaaaccaacagtagcttgtctcggagatctcgttccattcacaaacaaactctacaccggctatctcaagaaacc

SEQ ID NO: 88786 - DNA, 426 bp, Arabidopsis thaliana columbia
atcttcgccacatcacagattttgttttcttccgtttctcgaaattcagtttcatcatcatcctctctggatttataaattttcaatctacctttcaatcgccgggggataatcgaaacccgatctgtgtaaaaaaaatgatgaaatcgacggcgagatttgcgtctgattgtcgttataatgatcacaaaagcataaaagcgtgacgtttccgcgtcttcgcgtatctcggaaactttaatccgtatctaaagagctaaatttgaagcgatctttctctttttcttttaatattgttttttttccttgaagcttgcctactttcgaagttattccatgttttatcttcaattctagatcatagtttttggaaatttaagttttagttttttttgttaagctcgatctggatttgccgatttgaat

SEQ ID NO: 88787 - DNA, 1288 bp, Arabidopsis thaliana columbia
  unsure (1)..(1288): unsure at all n locations
cgtcgcccgcacaccattcccccgccgcccgccgtagtatcgccggntcctatacgactcatatagggaaagctggtacgcctgcaggtaccggtccggaattcccgggtcgacccacgcgtccgtacggctgcgagaagacaacagaagggggcacttcacaagcataaactctcatcgggagctagggttttagctgattctcttgtgacggaaccacaagaagagaagagaccaaaaggaggagccaaaatcctctctttctttggaattagggtttcctcaaaggaagtgaactgaaaatggtcgcggacaagagcaagaagtcgaaaattgaagagaaaggcgaagaagaaaacttggagcaaatcgacgcagagcttgttctctcaattgagaagcttcaggagattcaagacgacctcgagaagattaacgaaaaggccagtgacgaggtcttggaagtagagcagaaatataacgtgatacggaaacctgtctatgacaagcgcaatgaagttatccaatcgattcctggcttttggatgactgcttttttgagtcatcctgccttaggcgacctcttgactgaagaagaccaaaagatttttaagtacttgaactctctggaagtggaggatgccaaagatgtgaaatctggatactctataacttttcacttcacttcaaacccgttctttgaggatgccaagcttaccaagacatttactttccttgaagaaggaacaacaaaaatcactgcaactcctatcaaatggaaggagggcaagggcttgccaaatggagtgaaccatgatgataagaaaggaaataaacgtgcattgccagaggagagtttctttacttggtttactgatgctcaacataaggaagatgctggggatgagattcatgatgaggttgctgatattatcaaggaagatctctggtccaaccctctcacctacttcaacaatgatgctgatgaagaggattttgatggagatgatgatggtgacgaagagggagaagaagacgatgacgatgaagaggaggaagatggtgaggaatgatgggagcccaaagataacacattgctggcttgcttctataacagatgtgtaaagtttgtgttatgaggttctcaattttagcaatgatgagactaagctttctcttttggaatatttagtttatttactatcaatagctacattctgtttgtacgaaccatgtcatcatccatgtcctaaatcttgccatanctacaaaaaaaaaaaaaaaaaaa

SEQ ID NO: 88788 - DNA, 452 bp, Arabidopsis thaliana columbia
  unsure (1)..(452): unsure at all n locations
ctttcttcttcccggagaaaatttggccctaaatcactttcccgggaaaatcaaactctggggaaagagttgaaacaatgtcacaaggcgatacagtaccgcttcatccatcgtctcaatcagacattgacgagatcgagaatctgattaacgaaagcgtccaatcaggtcccggaaccgttctcgccgctcgtccaccgagcccaaccagaccttcgattccagtatcttcttcttcttcttcttctccgtttatgcaatcgaatcttccaccgcttcatccgtcgtcatcagctcagaaagtgacacatgtccccgttcctccgcctcttccggcggtaagtaactccagcaattttcaaggagcgagtgtttttggatctccggctaataacggtnacggggcctgttttggntactgtnagngngattttnttggatcgngngnaatt

SEQ ID NO: 88789 - DNA, 1607 bp, Arabidopsis thaliana columbia
atggctctaaacaactttttgactttccaactactccttcttctacttcgtgtttcatcggaatctccatggatcgtcgccggagatgtgtctcgaatcccgatcaatttcctcgaattagcaaagagcccggaggttttcgattcaatggtgagaatcagaaggaaaatccacgagaatcctgagctgggatacgaggaattcgaaactagtaagttcattaggtcggagcttgaccttatcggagttaagtataggtttccggtagctatcaccggtattatcggatatatcggtaccggagaaccaccattcgtcgctctaagagcagatatggatgctttgcctattcaggaagctgttgagtgggagcacaagagcaaaaatcctggaaaaatgcatgcttgtggacatgatggtcatgttgctatgcttcttggtgctgctaagatacttcaacaacatcgccaacatttgcagggaactgtggtgcttatctttcagccagctgaggaaggtttgagtggagcaaagatgatgagagaagaaggagcgttgaagaacgttgaagctatttttggtatacatctttccccccggactccctttgggaaagctgcttcacttgcaggttcatttatggctggagctggagctttcgaggctgtaatcactgggaaaggaggtcatgctgccatccctcagcatacaatagatcctgttgttgcagcttcaagcattgtcctcagtcttcaacacttggtttcacgtgaaactgacccttcggattcaaaggtggtcacagttactaaggttaatggaggcaacgcgttcaatgtcatccctgattcaatcaccataggaggaactcttcgagcctttaccgggtttactcagcttcaggagagaatcaaagagattattacaaagcaagcagccgttcaccgatgcaatgcgtccgtgaatctagcacccaatggtaaccaaccgatgccaccaactgtgaacaacatggacttatacaagaaattcaagaaggtggttagggatttgttgggtcaagaagcttttgtggaagcagtgcctgaaatgggatccgaggacttctcatactttgcagaaacaatcccgggccatttctccctcttgggaatgcaagatgagacccaaggttatgcgtcgtctcattcaccacactatagaatcaacgaggatgttcttccttacggagctgctatccatgcaacgatggcagtacagtacctcaaagataaggcttctaaaggttctgtctcaggctttcatgacgaactctaatccctgtcaaccttggtacagtttcctcatcggtcattggttcgaattcagaagtaccaaatttacactccattgttgatagaattccatttaaatgatgaaaagccttaattcgtagaacaatttcaattggcaaattctcaacttttatgatatgtttgtgtaactgtaacatactggcataatcttagaacatgaattataattaataggctagtcttgttgtaatgcattggcaaaaccacaccttttatatttatattgatcagaatcggagattttaagcatca

SEQ ID NO: 88790 - DNA, 1819 bp, Arabidopsis thaliana columbia
  unsure (1)..(1819): unsure at all n locations
tatacgactctcttagggaaagctggtacgcctgcaggtaccggtccggaattcccgggtcgacccacgcgtccgcggacgcgtgggcggacgcgcttcttcgtctcttctcatcctcctctcaagctccaatggcgagagttctagtctcgtctccatcttcattcttcggttcaccgttgattaaaccgtcgtcatctctccgtcacagtggagtaggaggaggaggaaccgctcaatttcttccataccggagtaataataacaaactcttcactacttcaaccaccgtacgattcagcttaaacgagattcctcctttccatggcttggattcatctgtagacatcggagcgattttcaccagagctgaatctcttctctatacaatagctgacgccgccgttgttggtgctgattccgtcgtaactactgattcatccgccgtgcagaagagtggtggttggtttggttttatctccgatgctatggaattggttcttaagattttgaaggatggattatcagcggttcatgtaccttatgcttatggatttgcgattatcttgcttacgattatcgtcaaagcagcgacgtatcctttgactaagcaacaggttgaatcaacactagcgatgcaaaatcttcaaccgaaaatcaaagcgattcaacaacgttacgcaggaaatcaggagaggatacaactagagacatcgcgattgtataaacaagctggtgttaatccgttggcaggttgcttaccaactttagcaaccataccagtttggattggtttataccaagctctctctaacgtggccaacgagggattgtttacagaaggtttcttttggattccatctctgggtggaccaacatctatagctgctcggcagagtggatccggcatttcgtggctttttccgtttgtggacgggcatccaccattgggatggtatgacactgtagcttatcttgttctacctgttctacttattgcctcccagtatgtgtcaatggaaattatgaagcctcctcaaactgatgatcctgcacagaagaatacgcttcttgttttcaagtttcttccactcatgatcggttactttgcattgtctgtcccatcaggactatctatttactggctcacaaataatgtacttagtaccgcccaacaagtatatctgcgtaaactaggtggtgcaaagccaaatatggatgaaaacgcaagcaaaataataagtgcgggacgagcaaagagatctattgctcagcctgacgatgctggcgaaagatttagacaattaaaagagcaagagaagcgcagcaagaagaacaaggcggttgcgaaagatacagttgaattggtagaagaatctcagtctgaatcagaagaagggtctgatgatgaggaagaagaggctcgtgaaggagcgttagcttcgagcacaacaagcaagccgcttcctgaggttggccaacgaagaagcaaaagatcgaagcggaaacgcactgtatagaaccaaagcaaacgaaattgcaagtaaggaagagaaaagagagagatttgaatcttgttccttagtttgatcttttgatatatatttgcatacaccatgtccggtaattatctaatattagggcacaaaaaggtcattctaaagttaaaagcagtagttgatcaaagtaaattgtttatgtgattcatcttattataaatgtattaacgtaaatgtgtgtactattatgacttttcaacatgcccgcttcagttttgttagcatttcgttgttgtnnnnnnnnnnnnnnnnnnnnnnnn

SEQ ID NO: 88791 - DNA, 499 bp, Arabidopsis thaliana columbia
  unsure (1)..(499): unsure at all n locations
agaaacttccannnnnnnnnnnnnnnnnnnnnnnnnnnnnnnnnnnnnnnnnnnnnnnnnnnnnnnnnnnnnnnnnnnnccacgggtccgcgcacgtgaagaattctggcgtgaaatcagattgcaaccttcgtcaggatagtaataaaccttatgggaaagatttgagtgacgaagtgagtacagatagaagtagaatagttgaaacgaaaggtgggaaagagaaaggagattctcagaatgactcagaggatagaatgaaggaaaatgacttaaagtcagcagagaaagttaaaggcgttgaatcaaataaaaaatctactgatccccatgtaaagaaagactcaagggatgtagagaggcctcacagaactaattctaaggaagaccggcgtaaaagaaaagagagggaaaaggaagaagaagggtcaatacacaggcgggctgaaaactcgatcaaggacaaaagaatacgttctccaaccagtaatgaatcttc

SEQ ID NO: 88792 - DNA, 399 bp, Arabidopsis thaliana columbia
ccctcgcgtccgcccacgcgttcgctccaatttcgcgtgatcattccctctaatttcggatttttgcatcttctccgatcatcttcaccactatgggtgcttcatcttctacagacgacaaagaatcatcggagaaacgagaaatcgaaagccttgctgcttcaaccggagctcttcctctgcttaaacgatccttctccaaactcgtcgattctcaaaccaatactgttccttttcaatccttgaagcaaagttttggtttgagctacgatacaattactactgaaggagagcaaaaagtttcagacttgtttcccaaattgttggagcatttaggatcatctttagtacatttgttcttcgtgcctgataaagaaggattgagttgggttgagtttg

SEQ ID NO: 88793 - DNA, 660 bp, Arabidopsis thaliana columbia
tttcattggagggctcagcagacaaaccttgagtatctattgatgttggatgttgatggtttggcctggagcttccgtagagaagctggtcttgatgcacctggagattactatggaggatgggagagaccagatagtgaactccgtggccattttgtcggtcactatttgagtgcaacagcttatatgtgggctagtactcataatgatactctcaaggagaaaatgtcagctcttgtctcagctctatcggaatgccaacataagtctggcacaggatatctctctgcttttccttccagttttttcgaccgctttgaagctataacacctgtttgggctccttactacaccattcacaagattttagctggtctgattatttctatggccgtgttcgtaatgtgataaggaagtacagtgttgaacgacattggcaatcactaaacgaagagactggtggcatgaatgatgttctttatcagctatacagcatcactggagattccaagtatttgctgctcgcacatctctttgacaagccttgctttctcggagtcctcgcaattcaggccgatgatattagtggattccacgctaatacacatattcgcatcgtcgttggattccaacaacggtatgaaatcactggtgatctac

SEQ ID NO: 88794 - DNA, 536 bp, Arabidopsis thaliana columbia
gaaggctggcccgcctggcaggtcccggcccggatttcccgggtcgacccacgcgtccgcccacccgtccggggttgaacgacattggcaatcactaaacgaagagactggtggcatgaatgatgttctttatcagctatacagcatcactggagattccaagtatttgctgctcgcacatctctttgacaagccttgctttctcggagtcctcgcaattcaggccgatgatattagtggattccacgctaatacacatattcccatcgtcgttggatcccaacaacggtatgaaatcactggtgatctactccataaggaaatctcgatgttctttatggacatttttaatgcttctcacagctatgcaacaggaggaacatcagtcagtgagttctggcaagatcccaagagaatggcgactgcactgcaaactgaaaacgaggaatcatgtactacttataacatgctcaaggtctctaggaatctgttcagatggacaaaagaggttagctatgcagactattacgagcgcg

SEQ ID NO: 88795 - DNA, 2124 bp, Arabidopsis thaliana columbia
ttttttttctccacggcttaaagactcactcatcactgtgctactactctctcttcttttggctgagagggtaaaagtcatgaagaaactcctctgagttttttttctttctttcttataataaagctcttatctttatctctgtttctctctctttaatgggtggtttaatcgatctgaacgtgatggagacggaggaagacgaaacgcaaacgcaaacaccgtcttcagcttctgggtctgtctctcctacttcgtcttcttcagcttctgtgtctgtggtgtcttcgaattctgctggtggaggggtttgtttggagctgtggcatgcttgtgctggaccccttatctctctaccaaaaagaggaagccttgtgttgtatttccctcagggacatttggaacaagcccccgatttctccgccgcgatttacgggctccctcctcacgtgttctgtcgtattctcgatgttaagcttcacgcagagacgactacagatgaagtttatgctcaagtctctcttcttcctgagtcagaggacattgagaggaaggtgcgtgaaggaattatagatgttgatggtggagaggaagattatgaagtgcttaagaggtctaatactcctcacatgttttgcaaaacccttactgcttctgatacaagcacccatggtggtttctctgttcctcgccgagctgctgaggattgcttccctcctctggactatagccagccccggccttctcaggagcttcttgctagggatcttcatggcctggagtggcgatttcgccacatttatcgagggcaacctaggaggcatttgctcactaccgggtggagtgcgtttgtgaacaagaagaagcttgtctctggtgatgctgtgcttttccttagaggagatgatggcaaactgcgactgggagttagaagagcttctcaaatcgaaggcaccgctgctctctcggctcaatataatcagaatatgaaccacaacaatttctctgaagtagctcatgccatatcgacccatagcgttttcagcatttcctacaaccccaaggcaagctggtcaaacttcataatccctgcaccaaagttcttgaaggttgttgactatcccttttgcattgggatgagatttaaagcgagggttgaatctgaagatgcatctgagagaagatcccctgggattataagtggtatcagcgacttggatccaatcaggtggcctggttcaaaatggagatgccttttggtaaggtgggacgacattgtggcaaatgggcatcaacagcgtgtctcgccatgggagatcgaaccatctggttccatctccaattcaggcagcttcgtaacaactggtcccaagagaagcaggattggcttttcctcaggaaagcctgatatccctgtctctgaggggattcgcgccacagactttgaggaatcattgagattccagagggtcttgcaaggtcaagaaatttttccgggttttatcaacacttgttcggatggtggagccggtgccaggagaggccgcttcaaaggaacagaatttggtgactcttatggtttccataaggtcttgcaaggtcaagaaacagttcccgcctactcaataaccgatcatcggcagcagcacgggttgagccagaggaacatttggtgtgggccgttccagaactttagtacacgtatcctccccccatctgtatcatcatcaccctcttccgtcttgtttaccaactcgaacagtcctaacggacgtctggaagaccatcacggaggttcaggcagatgcaggctgtttggtttcccattaaccgacgaaaccacagcagttgcatctgcgacggctgtcccctgcgttgaagggaattccatgaaaggtgcgtcagctgttcaaagcaatcatcatcattcgcaaggaagggacatctatgcaatgagagacatgttgctagacattgctctctagaagggttctttggtttctgtgttttatttgcttgtggcttaagtaaagttcttattttagttgatgatgacttgctgctaacttttggaatgtcacaagttgtgacttatgagagacttgtagacttggttcaaaaaaa

SEQ ID NO: 88796 - DNA, 471 bp, Arabidopsis thaliana columbia
  unsure (1)..(471): unsure at all n locations
aatccttcgatggaatttgagatcaatgaaagttagggtttttctttgagatttcttcacccagataagaaatgtcgctcgtgagaagatttcaaacaggtcgttctttattgaaaacagctggatcaagagaatcttcgtctcttccatttaggaatggaaatgagttctctttgattcaaattggagatgatttcagatttggttgttggagaagctatcattcgtctcgttgtcacgttcctgaagctcatggaaaaagtgcgtattcacgtttatatgaaggccacagcgtcaatacacatttgcttcgatctacaatgattgcagagtttttgccgtttatgaatgaaaaaaggtctgctacaacgcaagttaaggctccacctcagcttcagaaaacgggtgctggtagagtgtccatggtaagttctggatttgnatatgaaccctatgcgctccgggagaaaa

SEQ ID NO: 88797 - DNA, 437 bp, Arabidopsis thaliana columbia
  unsure (1)..(437): unsure at all n locations
aaagtcttggtgatcatggttgtgagtacatgactggtggtactgttgtggtgcttggaaagactggtagaaactttgctgctggtatgagtggtggtattgcttatgtccttgatgtggacggaaagtttaacaccagatgcaaccttgaactggttgatttggataaagttgaagatgaggaggacaaaatgacgctcaaaatgatgatccagcaacatcaaagacacaccaacagccaacttgctcaagaagttcttgcagactttgagaatttgctgcccaagtttatcaaggtttttcccaagngatttacaaacggtgttttatcaagccatgaaacacgagnaggtntccaaggcaagcaatcgagcggnntttttagaaaagctttnncggggnnttgangggaaagaactccnggggggaaaanttcc

SEQ ID NO: 88798 - DNA, 826 bp, Arabidopsis thaliana columbia
caaagatgtcttgcttgatttcatcaacttgctcactcgtccccttcgactcgaatctgactcgttcgaatcgtttcaccaaactgggttctgcagtttcatggcaatcttcctttcctaaactctccatcgaaatcggctctgttatctcatcccccattgtcaagaaggattcttttgtgcaagctgcgtggactcgaagatcacgaggtgaagcagcgaaaagacccaacaggaagtcatggaaacagagaacggacatgtacatgaggcctttccttctgaatgtgttcttctccaggaaattcatacacgctaaagtgatgcataggccaacaagcaaagtcatttcagttgccaccacaaatgctagagatataaggactaatataccgtctcttgttgataacgaagcgtgtagactcatcggtaagctcatagctgagcgttcaatggaagcagacgtcttatgctgtctcttatgagccaagaaagggagaaagaattgaagggaagctagggattgtaatcgatactattaaggaacatggcattatttttgttccttgattcattctctcttagaataaatgacttagcattttcattaccaagaagctctgtatcttgttttgatacctatgcagagcagaggagaaatcgttggtagagaatggttcaagaagacagagttgcttactaggtgttccatgaaatgccaatggggagaaagaatacgaaggagtagaaatattttaaaaatgcttatatatatttgtattgtatgtacacttatttcttcttgtcacaacacatgtatctaagc

SEQ ID NO: 88799 - DNA, 609 bp, Arabidopsis thaliana columbia
  unsure (1)..(609): unsure at all n locations
nnnnnnnnnnnnnnnnnnnnnnnnnnnnnnnnnnnnnnnnnnnnnnnnnnnnnnnnnnnnnnnnnnnnnnnnnnnnnnnnnnnccacgcgtccgcggacgcgtgggtcaagctcgacgaagatgtcttgcttgatttcatcaacttgctcactcgtccccttcgactcgaatctgactcgttcgaatcgtttcaccaaactgggttctgcagtttcatggcaatcttcctttcctaaactctccatcgaaatcggctctgttatctcatcccccattgtcaagaaggtaaagccgtctactttcgtagtccatgcacaatctctgaggttgtttcgtactttctcttgcgcgtatagtattgtgcttgtctgattttttttagcttagtgtgttcttatatgtttgagctcgttgttcagatttaggcaattgtaatttgtggtttacagtaaaaatctaggcttcttctagtgaatctttatgaacatgaaactagaaactcttaatgtgaataaaaatgtggggtttcttttttcatgatttgtgtttcttctcaggaagttcaatttgccatttaggcttgcgagtgattatcttcaaagcttatc

SEQ ID NO: 88800 - DNA, 522 bp, Arabidopsis thaliana columbia
gctggtacgcctgcaggtaccggtccggtattcccggggggacccacgcgtccgcccacgcgtccgtacggctgcgagaagacgacagaagggtacggctgcgagaagacgacagaagggtacggctgcgagaagacgacagagggaggagacagcaaagtcaagagaagggaactgctcgctctttggcgggcctctgaccaacaacatgaatgggacagactcaaccatgtctcagagaaacaacttgaatgatgctgcggggcttacacagataacatcaccaaagggtcaggacctttcagatcagtcaaaagggtcaaaatcaacaaacgatcatcgtgaacagggaagaccattccagactaataatcctcatccgaaggatgctcaaacgaaaaccaactcaagtaggagttgcacaaagggtcacaagcagggaattgcacttggccgttcaggggatctttcaaaggcccaaaactatgaggagttagccgctgagctggacaggccgtttga

SEQ ID NO: 88801 - DNA, 1905 bp, Arabidopsis thaliana columbia
  unsure (1)..(1905): unsure at all n locations
agtagnagccagctcttgctcctcctgctttgagtcctgttccaatgcctaggcctaagaggcccagatcaaatatagcaccttcatctcctgactcttcgatgcttaccagagaaggtacaactaaggcaaacatggaccctttaccagcaagcggactttcaagggtcttgcaaggccaagaatactcgaccttgaggacgaaacatactgagagtgtagagtgtgatgctcctgagaattctgttgtctggcaatcttcagcggatgatgataaggttgacgtggtttcgggttctagaagatatggatctgagaactggatgtcctcagccaggcatgaacctacttacacagatttgctctccggctttgggactaacatagatccatcccatggtcagcggatacctttttatgaccattcatcatcaccttctatgcctgcaaagagaatcttgagtgattcagaaggcaagttcgattatcttgctaaccagtggcagatgatacactctggtctctccctgaagttacatgagtctcctaaggtacctgcagcaactgatgcgtctctccaagggcgatgcaatgttaaatacagcgaatatcctgttcttaatggtctatcgactgagaatgctggtggtaactggccaatacgtccacgtgctttgaattattatgaggaagtggtcaatgctcaagcgcaagctcaggctagggagcaagtaacaaaacaacccttcacgatacaagaggagacagcaaagtcaagagaagggaactgcaggctctttggcattcctctgaccaacaacatgaatgggacagactcaaccatgtctcagaaaaacaacttgaatgatgctgcggggcttacacagatagcatcaccaaaggttcaggacctttcagatcagtcaaaagggtcaaaatcaacaaacgatcatcgtgaacagggaagaccattccagactaataatcctcatccgaaggatgctcaaacgaaaaccaactcaagtaggagttgcacaaaggttcacaagcagggaattgcacttggccgttcagtggatctttcaaagttccaaaactatgaggagttagtcgctgagctggacaggctgtttgagttcaatggagagttgatggctcctaagaaagattggttgatagtttacacagatgaagagaatgatatgatgcttgttggtgacgatccttggcaggagttttgttgcatggttcgcaaaatcttcatatacacgaaagaggaagtgaggaagatgaacccggggactttaagctgtaggagcgaggaagaagcagttgttggggaaggatcagatgcaaaggacgccaagtctgcatcaaatccttcattgtccagcgctgggaactcttaaacaaacaaaataaccaacaacccttttgctgcaagccgagcaggatgggggtcgattggtggagactggagagcaaaatgggatgatgggtttaagataagatattaaaaatgcaatttttgaagtattttgttggccacttagataattagcatcttccatcacccttattatctatctaataataattaatagatattataaagtaaaacataaaaaggttacaggtattatatagtagaatatgaaaagctcttttataagtagaatatgatggtgtggagttgtagtcggaggctggtatcggttctttttatggatgtatttttttccttcttccaaagatctcttgaagtctttttattgtttatattaatcccaatgtacataagttttcaaaaaaaaaaaaaaaaggnnnnnnnnnnnnnnnnnnnnnnnnnnnnnnnnnnnnnnnnnnnnnnnnnnnnnnnnnnnnnnnnnnnnnnnnntagaatcg

SEQ ID NO: 88802 - DNA, 569 bp, Arabidopsis thaliana columbia
ggtctttgtcttttgtcattttttgcttcgagctaagatcagtgaagagaaaagatgggaagatgtttaacgaagaaggtgtttttgattcagagtccgatcttgtttcttcatctcctgatctctttatcgtccggtgcagtgaaaccggatttgaaaggagtatgtgtttctaaaggagggaggtttccgccatatgagttggaagggaagcctcctaagtctgttggtaggggatccaaggatcttactctgtgccgggtgtttcgtaaaaagacttgttgttcttctgttcagactaacccggctttcgtagctgttagaaacctggctacttatggagaagctagtcaagaatgcttggagttgtttgagttattggagtgttcaatctgtaacccaaatgttggaattcaaccgggtcctcctcgtatatgcgcctcgttctgtgacagagtctttgaagcctgcaaagatgcatactttgccagtaatgcacttaaacgggtgattggccctgtggggtaaacgcggcaataatcttcattaggctcaaatgggatccatgg

SEQ ID NO: 88803 - DNA, 401 bp, Arabidopsis thaliana columbia
tctagttaaactaaaattgcattttctaaatcctaaccaagataactgttagtattaaccatgaaattacataactacatacataagcatttggtttagcttttgaagtttcacactttctttaactttgctttgcattgttgttttctttttcaagtttgatctttctggcgttgaatttacttaaaaagctattgattactggtctggttaaatcaatcctttaactttataaagttgtgtcctttgtctttccctctcttttattcattgttcttttaattgtttgacctgatagattccaaagtaatttgatcatagattccaagatccaaattctaacgtataaaccatcttttttgtcccaagattattgaatgatcaaacgattagtctttgag

SEQ ID NO: 88804 - DNA, 1149 bp, Arabidopsis thaliana columbia
  unsure (1)..(1149): unsure at all n locations
cttcggtagtgaagagtaacgctcctttggaagatgatgccaccttccaaccgaatcccaattctgtttaccaaactgaacatctatcatacttcaaatttgttggtcgcatggtggcaaaggcgttgtttgatgggcagcttttggatgtttatttcacccgttccttctataaacacatactcggtgtgaaggtgacctatcatgacattgaggcggtggatcctgattactacaagaatttgaagtggctattagagaatgacgtgagcgacatactcgacctcacatttagtatggacgcagatgaggaaaaacacattctttacgaaaagacagaggtgacggactacgagcttaaacctggaggacgaaacatacgggtaacagaagaaacaaaacatgaatatgttgaccttgtggccggccacatacttaccagtgctattcgccctcaaatcaacgctttcctcgaaggctttaatgagttgatacctcgtgagcttgtatcaattttcaatgataaagagcttgagcccctaatcagcgggttgcctgagattgattttgatgatctaaaagcaaataccgagtataccagctacacggtagggtcccctgttattcgttggttctgggaggttgtcaaagctttcagcaaagaagatatggctagatttcttcaatttgtcactgggacatcaaaggttcctttggaaggcttcaaggcactgcaaggtatttntggccctcaaagattacaaatccacaaagcatatggagccccagagcggctgccatcagctcatacatgttttaaccaactagacctccctgagtatcaatctaaggaacagcttcaggaacgcctgctacttgcaattcacgnagccagtgaaggttttgggtttgcttgaagaaagcttgtcgaaaccaacccccgtcaccttaagaatcagtgaaaccccatcaatccttcattcttttgactcctctgtacatatctcgnaggtttttanggcaggnaatggngaagagcttttgtttaagactgcaggatgnataggaatcgaagtggctattttttncttgncccntttttgctnggntttngcccnttttattttntngggtntntttttgncctnc

SEQ ID NO: 88805 - DNA, 3604 bp, Arabidopsis thaliana columbia
atttcaattagccctagcaggttttttgtctatgtcactactcttcctaagaagagccaagccgttatttgtatcttgttgttcagctactcattctcgctccagcttcttatctccgacgcttacgaatcagctagttcgttcgtttcacggttccagaacaatgtcggaatcagagaagaagatcctgacagaggaggagcttgagcggaaaaagaagaaggaagagaaggctaaagaaaaggagttgaagaagcaaaaagctttggagaaagagaggctggctgaactgaaggcaaaacaggccaaagatggaactaatgtccctaaaaagagcgcaaagaagagttccaaacgggatgcgtcagaagagaatcctgaggattttgtggaccctgaaactcctcttggagagaggaaaaggctttcttcacagatggccaaacaatacagccctgctaccgtggagaaatcatggtatgcttggtgggagaaatctgacctttttaaggcggatgctaagagttccaagccaccttttgtaattgttcttcctcctccaaatgtgactggagccttgcatattggccatgcgcttacatctgcaattgaggatacaattattcgttggaagagaatgtctgggtataatgctttgtgggtacccggggttgaccatgctggtatagctacacaggtggtggtcgagaaaaagatcatgcgtgatagaggcatgactaggcatgatgttggccgtgaagaattcgtaaaggaagtgtggaagtggaagaaccagtacggcggtacaattctaacacagctacggcgactaggagcttctctcgactggtctcgtgagtgttttacaatggacgagcaaagatcaaaagctgtcactgaggcctttgtacggttatacaaagaagggcttatatatagggatattcggcttgttaattgggattgtattttgagaacagccatatctgatgttgaggttgagtatatcgacattaaagaaaaaacgctactaaaagttcctggctatgagaagccagtagaatttggtcttcttacctcgtttgcttaccctctggaggagcttgggagagtaattgttgccactaccagggtggaaacgatgcttggggatactgctattgctattcatcctgatgatgcaagatacaagcatcttcatgggaaatttgctgtgcacccatttaatgggcggaagttacctattatctgtgatggaatacttgttgatccaaattttggtactggttgtgttaagattactcctgcccatgatcccaatgactgtgaggttggaaagcgccacaagctggaatttataaatatattcacagatgatggaaaaatcaacacaaatggtgggtctgacttcgcagggatgccacgctttgcagctcgtgaggcagttgttgaagctctgcagaagcaggggctgtacagaggtgccaaaaacaatgaaatgaggcttggactttgctcaagaactaatgatgttattgagcctatgataaagcctcaatggtacgttaactgcagcatgattggaaaggaggctcttgatgttgctatcactgatgaaaacaagaaactcgagtttgtaccaaagcagtacacagcagaatggagaagatggctagagaacatacgtgactggtgtatttcaagacagctttggtggggacacagaataccagcatggtatgccactctagaggaggatcagctcaaggaggttggtgcatacagtgaccattgggttgttgctagaactgaggacgatgctcgagaagaggctgctcagaaatttttggggaagaagtttgaactcactcgagatcctgatgtacttgatacatggttttcttctgggctctttccattatctgttctgggatggccagatgtaaccgatgacttcaaagccttctatccaacttctgttcttgaaactggacatgatatcctctttttttgggttgctcgtatggttatgatgggaatgaaactaggtggtgaggttccattcagtaaggtttatttccatcctatgatacgtgatgcacatgggcgtaaaatgtcaaaatctcttggaaatgtcattgatccacttgaagtaataaacggagtaactcttggaggtcttcataagagattagaagagggtaacttggatccaaaagaggtgattgttgccaaagaaggacaagtgaaggactttccaaatggtatccctgaatgtggcactgacgctcttcggtttgcgctcgtctcttacactgctcagtctgataaaattaacttggacattcttcgagttgttggttaccgtcaatggtgtaataaactgtggaacgccgtcagatttgcaatgatgaagcttggcagtggttatactcctccgcagactctaagtcctgaaaccatgcctttcagctgccaatggattctctctgttctaaataaggcaatatcaaaagcagtggtgtcactagatgcatttgagttctcggatgcagccaacacaatatatgcatggtggcaataccaattctgtgatgtgtacattgaagcaattaagccttattttgctggtgacaacccaacgtttgcttcagagagggctcatgcacaacatgctctctggataagtctggagactggtttgagactgcttcacccatttatgccttttgttactgaagagctatggcaacgacttcccgcacccaaagacacagaaagaaaggcttctatcatgatatgtgactacccatctgccatagagaactggtcaaatgagaaagtggagagcgaaatggacaccgttctggcaactgtgaaatgcatgagagcactcagggcagggttgctggagaaacagaaaaacgaaaggttacctgcttttgctctgtgtgaaaacaacgtaacatctgaaattgttaagtctcacgagttggagatcagaacccttgcaaatctatcatccttagaggttgtgtcaaaaggacaacatgcagcaccacctggatcttcagttgagacggtgaacgagaacctcaaagtatatcttgaagtggacggagccattaacacagaagctgaacaagaaaaaatcagaaacaagattggtgaactacaaaaacaaaaagagaagttgcagaagatgatgagtgtgtttacttacgaagagaaggtccctgcgaatataaaagaagacaacgcaaacaagcttgctaagatactccaagaattcgatttctttgagaaggaaagtgctcgtcttgctgcagaaacaagcaattcaggaaatcaataaatggaactgaagaactgagacacagagagtcacagtttctatctgcgaaggccaacaaatgaaatatttcaggttaagaaactatgtctgatgatgttattgtgaactagttttgagttataacactatttttactacatctctgaaaagaagactgttgatattagttttgaagagattattattcccaaacaccatttgttttggtcaacatgaacaacttaattgttctttgtttattgttgcact

SEQ ID NO: 88806 - DNA, 514 bp, Arabidopsis thaliana columbia
gcagattgcttgtggggatagtcattgtttggctgtcactatggaaggagaggtccagagttggggccgcaaccagaatggtcaacttggtctgggggacaccgaagattctctagtgcctcagaagattcaagcctttgagggaatacgaatcaaaatggttgctgctggtgcagaacacactgctgcagttacagaagatggtgacctctatggatggggctggggaagatacggaaatttgggattaggtgaccggactgaccgcttagttcctgaaagagttacctctactggtggtgagaaaatgtcaatggttgcttgtggatggcggcacacaatatcagtttcctactctggagcattgtatacttatggatggagcaaatatggacagctaggacatggagacttggaggatcaccttattcctcacaaactggaagcactgagcaacagttttatctcccagatttcgggaggttggagacatacaatggcattgacttcagat

SEQ ID NO: 88807 - DNA, 502 bp, Arabidopsis thaliana columbia
ttcaactacagcctcactcaaccacgccacttctgcaagacctgccggagatactggacacgtggcggagctctccgcaacgtcccagtcggcggtggctgccggagaaacaggcgtaccaaaagcaacagcaacaacaacaataacagcactgctactagcaataacaccagtttctcctccgggaatgcatccaccatcagcacgattctctcctcccactatggaggaaaccaagagagtatcttaagccagattttgtctccggcgaggctaatgaatcctacttacaatcatctcggagatctcacaagtaatacaaaaacagacaacaacatgagcttgttgaactatggaggattgagtcaagacttgaggtcaatccacatgggagcttctggtggctcgcttatgagctgtgttgatgaatggagatcggcgtcttatcatcagcagtcaagtatgggcggtgggaacttggaggattcttctaaacctaatc

SEQ ID NO: 88808 - DNA, 3374 bp, Arabidopsis thaliana columbia
atacgactcacttagggaaagacggtacgcctgcaggtaccggtccggaattcccgggtcgacccacgcgtccgaaagaaaaaaaaaaacttgtattttttcttgacaaaccagctcacaggcattgcatgatcaaactcatcagagattatatgtttttacatgaaagatgaattcaaatggccatgaggaggagaagaagttggggaatggagttgtggggattctagctgaaacagttaacaaatgggagagacgaacaccattgacgccatcgcattgcgctcgccttttacacggtgggaaagacagaaccggcatttcccgcattgtggttcagccatctgctaagcgtatccatcatgatgccttgtatgaagatgttgggtgtgaaatttctgatgatttgtctgattgtgggcttatacttggaatcaaacaacctgagctagaaatgattcttccagagagagcatacgctttcttttcacatactcataaggcacagaaagagaacatgcctttgttggataaaattctttctgagagagtgactttgtgtgattatgagctcattgttggggatcatgggaaacgattattggcgtttggtaaatatgcaggcagagctggtcttgttgacttcttacacggacttggacagcgatatctaagtctaggatactcaacacctttcctctcgctcggtgcatcgtatatgtattcctcattggctgctgcaaaagccgctgtaatttctgttggtgaagaaattgcaagccagggactgccattaggaatctgccctcttgtatttgtcttcaccggaacaggaaatgtttctctgggggcgcaagaaattttcaagcttcttcctcacacttttgttgaaccaagcaaacttcctgaactatttgtaaaagacaaaggaattagtcaaaatgggatttcaacaaagcgagtctatcaagtatatggttgtattattaccagccaagacatggttgaacacaaagatccatcaaagtcattcgacaaagccgactattatgcacacccggaacattacaatccagttttccacgaaaagatatcgccatatacgtctgttcttgtaaactgtatgtactgggagaagagttttccctgtcttctgagcacaaaacagcttcaagatttaacaaaaaaaggactcccactagtaggcatatgtgatataacttgtgacatcggtggctccattgaatttgttaaccgagctactttaatcgattcccctttcttcaggtttaatccctcgaacaattcatactacgatgacatggatggggatggcgtactatgcatggctgttgacattttacccacagaatttgcaaaagaggcatcccagcattttggagatattctttccggatttgtcggtagtctggcttcaatgactgaaatttcagatctaccagcacatctgaagagggcttgcataagctataggggagaattgacatctttgtatgagtatattccacgtatgaggaagtcaaatccagaagaggcacaagataatattatcgccaacggggtttccagccagagaacattcaacatattggtatctctgagcggacacctatttgataagtttctgataaacgaagctcttgatatgatcgaagcggctggtggctcatttcatttggctaaatgtgaactggggcagagcgctgatgctgaatcgtactcagaacttgaagttggtgcggatgataagagagtattggatcaaatcattgattcattaactcggttagctaatccaaatgaagattatatatccccacatagagaagcaaataagatctcactgaagattggtaaagtccagcaagaaaatgagataaaagagaagcctgaaatgacgaaaaaatcaggtgttttgattcttggtgctggacgtgtgtgtcgcccagctgctgatttcctagcttcagttagaaccatttcgtcacagcaatggtacaaaacatatttcggagcagactctgaagagaaaacagatgttcatgtgattgtcgcgtctctgtatcttaaggatgccaaagagacggttgaaggtatttcagatgtagaagcagttcggctagatgtatctgatagtgaaagtctccttaagtatgtttctcaggttgatgttgtcctaagtttattacctgcaagttgtcatgctgttgtagcaaagacatgcattgagctgaagaagcatctcgtcactgctagctatgttgatgatgaaacgtccatgttacatgagaacgctaagagtgctgggataacgattctaggcgaaatgggactggaccctggaatcgatcccatgatggcgaagaaaatgatcaacgatgctcctatcacaaaagggaaagtgaagtcttttacctcttattgtggagggcttccctctcgtgctgcagcaaataatccattagcatataaatttagctggaaccctgctggagcaattcgagctggtcaaaaccccgccaaatacaaaagcaacggcgacataatacatgttgatgggaagaatctctatgattccgcggcaagattccgagtacctaatcttccagcttttgcattggagtgttttccaaatcgtgactccttggtttacggggaacattatggcatcgagagcgaagcaacaacgatatttcgtggaacactcagatatgaagggtttagtatgataatggcaacactttcgaaacttggattctttgacagtgaagcaaatcaagtactctccactggaaagaggattacgtttggtgctcttttaagtaacattctaaataaggatgcagacaatgaatcagagcccctagcgggagaagaagagataagcaagagaattatcaagcttggacattccaaggagactgcagccaaagctgccaaaacaattgtattcttggggttcaacgaagagagggaggttccatcactgtgtaaaagcgtatttgatgcaacttgttacctaatggaagagaaactagcttattccggaaatgaacaggacatggtgcttttgcatcacgaagtagaagtggaattccttgaaagcaaacgtatagagaagcacactgcgactcttttggaattcggggacatcaagaatggacaaacaacaaccgctatggccaagactgttgggatccctgcagccattggagctctgctgttaattgaagacaagatcaagacaagaggagtcttaaggcctctcgaagcagaggtgtatttgccagctttggatatattgcaagcatatggtataaagctgatggagaaggcagaatgatcaaagaact

SEQ ID NO: 88809 - DNA, 3654 bp, Arabidopsis thaliana columbia
ctaaaaaactcactaattccaaagaaaaaaaaaagcttgtattttttcttgacaaaccagctcacaggcattgcatgatcaaactcatcagatgaattcaaatggccatgaggaggagaagaagttggggaatggagttgtggggattctagctgaaacagttaacaaatgggagagacgaacaccattgacgccatcgcattgcgctcgccttttacacggtgggaaagacagaaccggcatttcccgcattgtggttcagccatctgctaagcgtatccatcatgatgccttgtatgaagatgttgggtgtgaaatttctgatgatttgtctgattgtgggcttatacttggaatcaaacaacctgagctagaaatgattcttccagagagagcatacgctttcttttcacatactcataaggcacagaaagagaacatgcctttgttggataaaattctttctgagagagtgactttgtgtgattatgagctcattgttggggatcatgggaaacgattattggcgtttggtaaatatgcaggcagagctggtcttgttgacttcttacacggacttggacagcgatatctaagtctaggatactcaacacctttcctctcgctcggtgcatcgtatatgtattcctcattggctgctgcaaaagccgctgtaatttctgttggtgaagaaattgcaagccagggactgccattaggaatctgccctcttgtatttgtcttcaccggaacaggaaatgtttctctgggggcgcaagaaattttcaagcttcttcctcacacttttgttgaaccaagcaaacttcctgaactatttgtaaaagacaaaggaattagtcaaaatgggatttcaacaaagcgagtctatcaagtatatggttgtattattaccagccaagacatggttgaacacaaagatccatcaaagtcattcgacaaagccgactattatgcacacccggaacattacaatccagttttccacgaaaagatatcgccatatacgtctgttcttgtaaactgtatgtactgggagaagaggtttccctgtcttctgagcacaaaacagcttcaagatttaacaaaaaaaggactcccactagtaggcatatgtgatataacttgtgacatcggtggctccattgaatttgttaaccgagctactttaatcgattcccctttcttcaggtttaatccctcgaacaattcatactacgatgacatggatggggatggcgtactatgcatggctgttgacattttacccacagaatttgcaaaagaggcatcccagcattttggagatattctttccggatttgtcggtagtttggcttcaatgactgaaatttcagatctaccagcacatctgaagagggcttgcataagctataggggagaattgacatctttgtatgagtatattccacgtatgaggaagtcaaatccagaagaggcacaagataatattatcgccaacggggtttccagccagagaacattcaacatattggtatctctgagcggacacctatttgataagtttctgataaacgaagctcttgatatgatcgaagcggctggtggctcatttcatttggctaaatgtgaactggggcagagcgctgatgctgaatcgtactcagaacttgaagttggtgcggatgataagagagtattggatcaaatcattgattcattaactcggttagctaatccaaatgaagattatatatccccacatagagaagcaaataagatctcactgaagattggtaaagtccagcaagaaaatgagataaaagagaagcctgaaatgacgaaaaaatcaggtgttttgattcttggtgctggacgtgtgtgtcgcccagctgctgatttcctagcttcagttagaaccatttcgtcacagcaatggtacaaaacatatttcggagcagactctgaagagaaaacagatgttcatgtgattgtcgcgtctctgtatcttaaggatgccaaagagacggttgaaggtatttcagatgtagaagcagttcggctagatgtatctgatagtgaaagtctccttaagtatgtttctcaggttgatgttgtcctaagtttattacctgcaagttgtcatgctgttgtagcaaagacatgcattgagctgaagaagcatctcgtcactgctagctatgttgatgatgaaacgtccatgttacatgagaaggctaagagtgctgggataacgattctaggcgaaatgggactggaccctggaatcgatcacatgatggcgatgaaaatgatcaacgatgctcatatcaaaaaagggaaagtgaagtcttttacctcttattgtggagggcttccctctcctgctgcagcaaataatccattagcatataaatttagctggaaccctgctggagcaattcgagctggtcaaaaccccgccaaatacaaaagcaacggcgacataatacatgttgatgggaagaatctctatgattccgcggcaagattccgagtacctaatcttccagcttttgcattggagtgttttccaaatcgtgactccttggtttacggggaacattatggcatcgagagcgaagcaacaacgatatttcgtggaacactcagatatgaagggtttagtatgataatggcaacactttcgaaacttggattctttgacagtgaagcaaatcaagtactctccactggaaagaggattacgtttggtgctcttttaagtaacattctaaataaggatgcagacaatgaatcagagcccctagcgggagaagaagagataagcaagagaattatcaagcttggacattccaaggagactgcagccaaagctgccaaaacaattgtattcttggggttcaacgaagagagggaggttccatcactgtgtaaaagcgtatttgatgcaacttgttacctaatggaagagaaactagcttattccggaaatgaacaggacatggtgcttttgcatcacgaagtagaagtggaattccttgaaagcaaacgtatagagaagcacactgcgactcttttggaattcggggacatcaagaatggacaaacaacaaccgctatggccaagactgttgggatccctgcagccattggagctctgctgttaattgaagacaagatcaagacaagaggagtcttaaggcctctcgaagcagaggtgtatttgccagctttggatatattgcaagcatatggtataaagctgatggagaaggcagaatgatcaaagaactctgtatattgtttctctctataacttggagttggagacaaagctgaagaagacagagacattagaccagcaaaaaaagaagaagaaggaagaagataagcctcgatccttgggtgacgagtatctatatgtttatatgtactatatgttatgttgtacagaagaagtcgtgtccacaaatatcaattgatgtcagatgtctagtaagtgatcatgtgtagcatacaaactggcgtactttaaaaagtggttaaccaaatataattcctaaaaaaaaaaaaaaaaaaaaacaaagggcggccgctctagaggatccaagcttacgtacgcgtgcagttacgctcataaagcttctatag

SEQ ID NO: 88810 - DNA, 619 bp, Arabidopsis thaliana columbia
  unsure (1)..(619): unsure at all n locations
aaaaaattgtgtgtggactctttctctcttctttgctggttttgaggagaatcgtgtcggctaaatttgtgtcagacacaccacactctgattgcaaagtcttcctcttcttcttccaccagagacaattccatcatcatcatcaaatagacaagggaagaattcaatttcccctttctttattggcgcgaagatctttcacagaatcaatcaccaacgaaaaatcgagaatggatgtttgcttgagctattcatataatatggatgatgagattgctaagttcatcagaagagtgaatccaccaagggttgtgatcgataacgaagtctgcaaagatgttactgtcattaaggtggatagtgcgaataaacatgggatacttctggaagggttgttcaagttttgactgagcttaatctgactattaagaaagcttatatctcctctgatggtggctggtttatggatgttttcaatgttactgatcaagatgggaacaaagttaccgatgaaattgttcttgaatatatccgtaaatctcttggtcctgatgagtcttcttgcttcagtccatcaatgagatcaaccatngnggttaaacaatctgtcgactacact

SEQ ID NO: 88811 - DNA, 521 bp, Arabidopsis thaliana columbia
  unsure (1)..(521): unsure at all n locations
atgatctccagctctatacgactcatttagggaaagctggtacgcctgcaggtaccggtccggaattcccgggtcnacccacggggtncgagaccgatcgtgtaagccggtcaaaccctgggtcatggcttatactgcgtcccggagactgtacctggagaccgtggggaagacttgaagcatggcgggaacgcggtggagccactgatggtctaggttacagattcgaactcatcccagacggatcaagcggtgcaggaatcgtgcttgcggaatcaaccataagttctcacagaggtgggaaattctcaatcgagttgggatcggtcgccttcttcatcgtcgccaacaagtgtggtgaaccgatcgagaagccgtagaggtgggagtagtggaagcggtggaggagcatccccggcgaatagtccgagaggggggaacggagattacggttacggattgggggccgtggaacgtgtacaaagggtttgtgatgtcancaagtgtggaaggggaaggga

SEQ ID NO: 88812 - DNA, 2138 bp, Arabidopsis thaliana columbia
  unsure (1)..(2138): unsure at all n locations
nnnnnnnnnnnnnnnnnnnnnnnnnnnnnnnnnnnnnnnnnnnnnnnnnnnnnnnnnnnnnnnnnnnnnnnnnnnnnnnnnncagagtttcactctcaacatttcattctctctctctctctcaacaattagatctgtttcgataatcacgaggtttccctcacttcctttccattgctaaaccaggatttgcctcctgcatttggaaatggacgcttctatgattaccaattccaaatccattacttctccaccctctttagccttagggaagtcaggaggaggaggagttatcagaagttcactatgtaacttaatgatgccaagcaaagttaacttccctagacaaagaactcaaactctaaaggttagccagaagaaactcaagagagctactagtggtggtcttggtgttacatgcagtggtggtgataagattctcgtagcgaatcgaggtgaaattgcagttcgtgttatcagaactgctcatgaaatggggattccttgtgttgctgtgtattctactatagataaagatgctcttcatgttaaattagctgatgaagctgtttgtattggtgaagctcctagtaaccagtcgtatttggtgattccgaatgttctgtctgcggctattagccgtggatgtacaatgcttcatcctggatatggtttcctttcggagaatgctctctttgttgaaatgtgtagagaccatgggatcaattttattggacctaatcctgatagcatccgtgttatgggagacaaagcgactgcaagagagacaatgaaaaatgcaggggttcccactgtaccagggagtgatgggctattgcagagtacagaagaagctgtcagggtcgccaatgagattggtttccctgtaatgatcaaggcaacagctggtggtggtggacgtggaatgcgtcttgctaaggaaccgggagagtttgtaaaactgttgcagcaagctaagagcgaggctgctgctgcttttgggaatgatggatgttatctggagaagttcgtacaaaaccctagacatattgagttccaggtgctggcagataaatttggaaatgttgttcactttggtgagcgtgactgcagcatccagaggcgtaaccaaaagcttctggaagaagcaccttctccagcattgaccgctgaattgcgaaaagccatgggtgatgcagcagtcgcagcagcagcatccattgggtacattggtgttggtactgtggagtttcttttagatgagagaggttccttctacttcatggaaatgaacactaggatccaggtggagcatcctgtgacagagatgatttactctgttgatttgatagaggagcagattcgtgttgcaatgggagagaaacttcgctacaaacaggaagatattgtgctcagagggcactcaattgaatgtcgtatcaatgcagaagatccatttaaaggattcagacctggacctggcagaataacatcatacctgccatctggaggtcctttcgttagaatggacagccatgtctattccgactatgttgtgcctccaagctatgattctcttcttgggaagcttattgtgtgggctccaacgagggaaaaagcaattgaacggatgaagcgggcgcttaatgacactatcattacaggggttccaacgactatcaattaccacaaacttatccttgatgttgaggatttcaaaaatggaaaagttgatacagctttcatcgtcaagcatgaagaggagctagctgagcctcaagaaattgtggcagtgaaagatctgacaaacgcaacggtttagaatgatacatcagctctgaaagaccacccaattattgcaatcttcgtctccttttgtgtgttcattggtacaaacttcggtaacgataagactgttttactagagtctgtggttttatcaatgttcttcttgtatcataaacaagaggaaacacttttgtttgtagtctctatgtcaagatttttcaataattttcatatatagtagagattatatggaaaacaaaaacccgaggccgctctagaggatccaagcttacgtacgcgtgcatgcgacgtcaaagtcttctataggtcaccnnnnnnnnntagaatcg

SEQ ID NO: 88813 - DNA, 777 bp, Arabidopsis thaliana columbia
  unsure (1)..(777): unsure at all n locations
cggacgcgtggggccgccagaggcttttgtaacccgcttgaaaaccacagttcagaaaacggaggatgaggattatgtagaagggagcgaaacaggatatcccgaggcatctggtaatccggttgatggtgcagcttccccgtcagctaccacaggctatgtcacaaagctagctgctgccccagctcctgtacccgatctgctangtgacctaatggggtcagataatgctgcaatcgtccctgtagatgaacccacaactccgtcaggtcgtccactgcctgttgtcctaccagcatcaaagggtcaaggtctgcagattagcgccccgcgtgcccgacaagatggtcaagtattctacagtatgctcctcgagaacaactcgcagtcacttcttgatggcttcatgattcagttcaacaaaaactcattcggccttgcagctgtcggatcacttcaggttccgcctctgcaacccggagcatctgccaggacaatgatgccaatggtattgtcccaaaacatgtctactggctccaccagctcggtattgcaagttgccgtcaaaaacaaccagcagcctgtctggtacttcgaggataagattgtacttaacgctcttttctcagaagatggtcggatggagcgcggaaccttcctcgagacatggaaatcgttaccggattcaaacgaggtgcagaaagaattccccgggataaccatcacgagcgtggagtcaacacttgatttactcgccgcatcaaacatgttcttcat

SEQ ID NO: 88814 - DNA, 1404 bp, Arabidopsis thaliana columbia
aaaagctgtctctttagctctgacgttgtttcctgtcgaagtcgcagactcgtcatcacagctcaggcgagtaattctgagtttcttctatctacgcgcaatatctctcaaaggaggcctcttcaaaggtaccacaatcatatcctctcgtttctatctgaagaatcagagagaagagatatatagaggatgcctgtgatctccaaagcttcatctaccaccaccaattcatcgattccttcgtgttctaggattggaggtcagctttgtgtgtggcctggtttgagacaactttgcctcaggaaaagcttattatacggagtaatgtggttattatccatgccactgaaaacattgcgtggagctagaaaaactcttaagattacacacttttgtagcatttccaacatgccctcctcattaaaaatcgaactggtgccctgcagtaaggacaactatgcttatctgttgcacgatgaagacaccggaacagttggagtcgttgatccttctgaggctgcacctgttatagaagcattgagcaggaagaattggaatttaacttacattttgaatactcatcatcatgatgatcacattggggggaatgctgaattgaaagaaaggtatggcgcaaaggtgattggatcagctgtagataaacatcggattcctggaattgacatacttctgaaggatagtgataagtggatgtttgctggccatgaggttcggatacttgacactcctggccatacacaaggccatattagcttctactttcccgggtcagcgacaatattcacaggagacctgatatatagcttatcctgtggtaccctttcagaaggtacccctgagcagatgctttcatcactccaaaagatcgtgtctctaccagacgatacaaatatatactgcggccgtgaaaacacagcaggcaatctcaagtttgctctatccgtagaaccaaagaatgaaactcttcagtcctatgcaactcgagtcgcccatcttcgcagccaggggctcccatcgattccaacgactgtcaaggttgagaaagcgtgtaacccattcctcagaatatcgagcaaagatatccgaaaatctttaagcattccagactcagcaaccgaagctgaagcattgcgtcgtatacagagagccagagatcgtttctgaaaacttgggtatattttcttatttgtatagaaaaatttgcaagtcaatcatcagctgcaaagatcaatattttatatgttttgggctttcttcagttatcatttgaagttgtgtattcaacacaaaaaaatctaaatatttagtttaaactcaattattaaattatgagattttcaagtgtaatgaatgcttcaacatacaaaaaaaaaaaaaaaaaaa

SEQ ID NO: 88815 - DNA, 498 bp, Arabidopsis thaliana columbia
  unsure (1)..(498): unsure at all n locations
accacgcgtccgctctctaagactcatatcattacgtcatgagttcaatagcaagagaccgaaaggaacaaatggtgatccattcttcaatcgtcttgcttcaagaaagattcagacaacttcagagagcaagagagttaagagctgaacgagagctcctaaaccctaaacctaaccaccaagacaacatcttgcaatattacagcgaacccactagtttcggtttctttcagtttctacctataaactctcaaacatcttcgtcacagcagctcctatccctctccttatgctcacactccacctctgaatccattgaaaagccaagcttttgtcatcagtggccaaataaagatgacaagaagatgggtgggattgatcgatacgacgatgttgggttgttgacaagggntttnnaatcttttaaaaaccttnaaatanttngttcccncccaaccttttttgnangntctttaattnaaaaatgggtggatttta

SEQ ID NO: 88816 - DNA, 457 bp, Arabidopsis thaliana columbia
ggtgcattcactaataatctgatttgggtgactccatataaccggtcagaacaatatgccggaggagttctaatttaccagagccaaggtgatgacacactacaagtttggtcagaccgggaccgttcgatcgaaaacaaggacatagtactgtggtacacactagggttccatcacgtaccttgtcaagaagattatccagttatgccaaccgttgcggctagctttgaacttaaaccagcaaatttctttgaatccaatccgattcttgggtctgctcctttcttcgaaaaagacttaccggtctgtagaccatttgcttcatcttgaccggttctgttctgactaatactctaatagtatacaagtagagaagatcaaatatccggtgtagccaaacacttgttgaagtttatttgccggtttttgcaataataacaaaacgtccaatatctgt

SEQ ID NO: 88817 - DNA, 519 bp, Arabidopsis thaliana columbia
  unsure (1)..(519): unsure at all n locations
atgnnnnnnnnnnnnnnnnnnnnnnnnnnnnnnnnnnnnnnnnnnnnnnctgcaggtaccggtcccgaattcccgggtcgacccacgcgtgcgcccacgcgtccgcggacgcgtgggaaatttttctccatattacaaaagaactaaagaagatggatcagtcatcatcaacgttgctcataaaccagagaaagtcatcatcgtctccgactaggatcccacctaagcagaagaggaagtcaacgactacgcacaaacccatcaaagtccgttacatatcaaatccgatgagagtcgagacttgtccttctaagttcagagagcttgttcaagaactcaccggtcaagacgccgctgatctaccaccgtcgcccaccacttttaccgccgtagatctccaccgtccgtgtgagtcggagatgaacttagagccgttggatggagaggtccgtggagagtattattcaccgttggatgaggaagtgtttaatgctcctcagatgtcggcaggtctttctg

SEQ ID NO: 88818 - DNA, 500 bp, Arabidopsis thaliana columbia
  unsure (1)..(500): unsure at all n locations
atgatctccnnnnnnnnnnnnnnnnnnnnnnnnnnnnnnnnnnnnnnnnnnnnnnnnnnnnnnnnnnnnnnnnnnnnnnccacgggtgcgggcacgcgtccggttgggacaaaggacaagagttggagagcatgaagctatgaggaagattaagaatgagtttatgacacattgggatgggctaatgacgaaacccggtgaaaggattctcgttcttgcagcgacaaacagaccgtttgatcttgatgaagctatcattaggaggtttgagagaagaataatggtgggacttccttcgattgagagcagagagaagatcttgagaactttgttgtcgaaagagaaaacagagaatcttgatttccatgagcttgggcagataacagaaggctacagtggaagtgatctcaagaacttatgcatcacagctgcttatagaccagttagagagctgattcagcaggaaagattgaaagatcaggagaggaagaagagagaag

SEQ ID NO: 88819 - DNA, 390 bp, Arabidopsis thaliana columbia
  unsure (1)..(390): unsure at all n locations
ggcgtgtaaagttcaaaagagagagtgagcgaagggaactgggggaactctcacagtggcatgcacctgatggtagcctttgcccctctgctgttgatattaaacggaagatggaaatgttaccggttaagcaagaaggttactcagatggtccagccccgctaaaacttggaataaggaagaatcgtaatggcatttgggaagttagcaaacctaatacaaatggattatcttccagtaataggcaagaaaaggttgggtatcaggagaagaatattataccaatgagtagtagtgctactggaagtgganggagggtgaatgatgcaagcgtaaaccaggatgctattggaacttttgactttgtagccaacggcatggaacttgatt

SEQ ID NO: 88820 - DNA, 508 bp, Arabidopsis thaliana columbia
  unsure (1)..(508): unsure at all n locations
cnnnnnnnnnnnnnnnnnnnnnnnnnnnnnnnnnnnnnnnnnnnnnnnnnnnnnnnnnnnnnnnnnnnnnnccacgggtccgagaatgtcctcgatgggtttgctaatgagcattaccgcgtggtggctgttaaatgatgggtaaaatctagtttgatggaggttgtgtttggcactatgcttgttagtttcttgcatcaagttccccgttttacagcttttggcatcttttctgcaggggaaatctgtgaaacatgaagctcccggagagatgatatgtaattttttgtgatagacaaggccaaccttttcttacctctccaaggggtaagacttggagcttattcagtttatggttctggatcctatggctgggaagctcccactatatctccttgacccatattcttttggcggaaaagtttacctctactgggggagttcatgcactttcgcaccttcttaaaccctgagggatccttttcccaaaatgggaaaaagggggatg

SEQ ID NO: 88821 - DNA, 569 bp, Arabidopsis thaliana columbia
cggggggcggggttaaagagtgggaaaaattaagttaagtgaagggggggttgggcccaaagctttttaggtttttggaaaaaggtttcccgttttaaaggttttgggttttttttttcaggggaaatttgtaaaaatataagcttccggaaaaaataataggtatttttttttatagaaaaggaaaagcttttttttactttttcaaaggggaaaagattggaggttatttaggtaatgtttctggaatcctaaggttgtgaaaggccggaatataatctgcttgcccaatattcttttgagggaaaagtttacatctactgggggagttcatggacttgcgccccacttaaacgctgaaggatgctttcccagtaatggtaaaaccccatggtgcattcagtatgtagtagacataggatttatgaatcaagatagtagtactcaagttttgtggatcaaaatttaaaactaatgctttctgaaacagtgaaacagatggtctattatgtgttgatgataaacggctattctcgtagacaatagagaagcttgatccacatgaaaaa

SEQ ID NO: 88822 - DNA, 940 bp, Arabidopsis thaliana columbia
ggcgctaaaaaaatgctcgcctatttaggcaccaaacttaaggaagaaggtgggggttcaacagaaagaatagtggtaacagacttgagagaagaagcggttgtttacatcaatggaactccatttgtgttgagagaattgagtaaacctgttgatacgcttaagcatgttggaataaccggtgcagtggtagaaagcttagaaacacggttaaaagaagatatattggctgaagttcgagagactggaggccgaatgctattgcatcgtgaagaatacagcccggcatcaaatcaatctcgggttattggatattgggagaatattcaaccagaaaatgtgaagacacctgcagaagtatatgctgctctgaaagatgaaaattacaatatatcttaccggagaatacctttaaccagagaaaaagacgcattagcttccgatgtagacgcgatccagtactgtaaagacgattccgctgggagttacttgtttgtatcgcacaccggttttggaggagtttcttatgcaatggctataacttgtctcctacttcaacctggtcagaacttcacagctacaccaaccacaaattcttctaccttagaagaagatgattcgccttcaggggcttgtgatgaagaagcgttgagtatgggagactaccgcgacatactgagtctcataagagtgctttctcatggtcctcagagcaaatcagacgtagatggaatagtcgaactgtgtgctggtgcaggacatttgcgagaagacatcgtttactacagtaaagagctgaacaaacttcctattacaaaagatgaaaaccgttcatacatcatggacatgggtgttaaagccttaaggcgctacttttccctggatacattaagatcatacctctattaccgttgcccgaaaaaaatgaaattcttggatt

SEQ ID NO: 88823 - DNA, 713 bp, Arabidopsis thaliana columbia
gctggagtgaatcgcaaaaccaaatttggaggattctttctgaggggtttctcagtgagaaaatggcttcgaaacggatcttgaaggagctgaaggatctccagaaagaccctccaacctcctgcagtgcaggtccagttgctgaagacatgtttcattggcaaactactgattcgccgcttggtaaaggattgccctgggttctgtatcacggcgtgcataaagatcttcgaatcaatgtagtttgccccggaagagatgcagctttagggatcgatagtgttggaactgttccagcttctctcataacttttgcttccatccaagcattaaaacctgacatgctaatatccttaccctgtacccatagtttccattcttcttgcttaaacccttggcttagagcttgtggagattgtccttgttgccgtagagccatagcaaaggaatagaaacttgtaaatagaatctttgcctaaccattaggccatagccatacacatcttctcttcttcttgctatagacatccttaaaacgatcttctgagttttgtcgcccatgagtgttttttttactgtcacatgtttgtaatggtttttgttgtgccattaggcagttcaagcgttgatatcgtatggtgtgaatctttttagttttattcactgtgatctctcttttaatgtcttgttggttatatgaaagagactttttc

SEQ ID NO: 88824 - DNA, 440 bp, Arabidopsis thaliana columbia
ctcgagccgaatcggctcgagcaaaagtgttccaccctaatgtcaacagcaatggaagcatttgccttgacattttgaaagaaccagatggagtccatgcacaatcaccatatcgaaggcgaaaaagcactctttaaccaatagcagtggatgagatgcagtgaatctcctcttgttcttaatcaaatctcttgtcaatttataggttttgctttcgatatgttcattgttaacggacccaaacccagatgatccattggttccagagattgctcacatgtacaaaaccgatagagcaaagtatgagtctactgcgagaagctggactcagaaatatgcaatgggatgaaagtttgtgtcctttgatccctcacagactcggttttaatagagagagagagagaaagagagaggacttcttcacatagggatcttccatg

SEQ ID NO: 88825 - DNA, 762 bp, Arabidopsis thaliana columbia
  unsure (1)..(762): unsure at all n locations
nnnnnnnnnnnnnnnnnnnnnnnnnnnnnnnnnnnnnnnnnnnnnnnnnnnnnnnnnnnnnnnnnnnnnnnnnnnnnnnnnnnccacgcgtccgtcctcatggagatggattaagtgacatcgaagaacctgaggtcgatgctcaatcggagattcttcgaccgatctcctcagtcgtcttcgtcatcgctatgcaagcggaggctcttcctttggtcaacaagttcggactctctgaaactactgattcgccgttaagagctctccttttttcgattttgcttgtttggatttgatctccatgaatctctcacttcaaagtttacttttttgcaggcttggtaaaggattgccctgggttctgtatcacggcgtgcataaagatcttcgaatcaatgtagtttgccccggaagagatgcagctttagggatcgatagtgttggaactgttccagcttctctcataacttttgcttccatccaagcattaaaacctgacatcataatcaatgccggaacctgcggtggcttcaaggtcaaaggagccaacataggcgatgtattccttgtatctgatgttgtgtttcatgatagaagaataccaattccgatgtttgatctgtatggagttggtctccgtcaggcattctcgacacccaatctcctcaaggaactcaatttgaagattggcaggttatctactggtgactcgttggatatgtccacgcaagatgaaacattgatcattgccaatgatgctac

SEQ ID NO: 88826 - DNA, 577 bp, Arabidopsis thaliana columbia
  unsure (1)..(577): unsure at all n locations
gcaaaaccaaatttggaggattctttctgaggtatcaaagctttctccttttgattaacccacacgcgaatttgctcgcttctttctgaggggtttctcagtgagaaaatggcttcgaaacggatcttgaaggagctgaaggatctccagaaagaccctccaacctcctgcagtgcaggtccagttgctgaagacatgtttcattggcaagctacaattatgggtcctgcagagagtccgtattcaggcggtgtgtttctcgttaccattcacttcccttccggactatcccattcaaaccaccaaagggttgcattttgggacggaggtgtttcacccctaatattcaacagcaacgggaggcattttgcnttggacaatttttgaagcgaccaatctggggcccctgccccttaaaccattttcccaaagggtgtttnccccccaggttttgggccgcttttaaaaaaagttcccanttnccnggttggcccctttggggcccccagggttnnncacantttttaaaaancgggaagggncaaattnggggggttttttnaanaaattggggctt

SEQ ID NO: 88827 - DNA, 1176 bp, Arabidopsis thaliana columbia
  unsure (1)..(1176): unsure at all n locations
aaaaggtccaaaaacgaataaactgtatctctcattcgccggagtttccagccgtttctttccgattctcggatttttcctgggaatcaaacgcatcgccgagaatcggaagagagggataaggttatggctcctcatggagatggattaagtgacatcgaagaacctgaggtcgatgctcaatcggagattcttcgaccgatctcctcagtcgtcttcgtcatcgctatgcaagcggaggctcttcctttggtcaacaagttcggactctctgaaactactgattcgccgcttggtaaaggattgccctgggttctgtatcacggcgtgcataaagatcttcgaatcaatgtagtttgccccggaagagatgcagctttagggatcgatagtgttggaactgttccagcttctctcataacttttgcttccatccaagcattaaaacctgacatcataatcaatgccggaacctgcggtggcttcaaggtcaaaggagccaacataggcgatgtattccttgtatctgatgttgtgtttcatgatagaagaataccaattccgatgtttcatctgtatggagttggtctccgtcaggcattctcgacacccaatctcctcaaggaactcaatttgaagattggcaggttatctactggtgactcgttggatatgtccacgcaagatgaaacattgatcattgccaatgatgctacgctaaaggacatggagggtgctgccgtggcgtatgtggctgatcttctgaaaataccagtcgtgttcctcaaagccgtgaccgatctagtggacggagataaacctacagcagaagagttcttgcagaacttgacagttgtgaccgctgcattagagggaactgctactaaagtgatcaacttcatcaatgggagaaacctttcggacctttaacttctgttctcttccttttttatggagagtgattttttaaaatgcgttcaacgtgcttgttgcagtttcactgatttccagtgatcatatttctcgttaataaatttcaagttataagacgttctctccctagtgttgcttaaattttgcggccgnnnnnnnnnnnnnnnnnnnnnnnnnnnnnnnnnnnnnnnnnnnnnnnnnnnnnnnnnnnnnnnnnnnnnnnnnnnnnnnnnnnnnnnnntt

SEQ ID NO: 88828 - DNA, 539 bp, Arabidopsis thaliana columbia
cttcatttcattctatagatggagatccaatttttcaactagcagggcttcaagtgacctatgaatgcaacaagaaaccacaaggtcttactcaagatgctattaactgtttacaccggcaaacttttagctcagccgaggttaaatccgagatgagagattgtagcatatgtttagagagtttcactaaaggtgacatgctaatatccttaccctgtacccatagtttccattcttcttgcttaaacccttggcttagagcttgtggagattgtccttgttgccgtagagccatagcaaaggaatagaaactttgtaaatagcaatcttttggcctaaccattagggccttagccttacacatcttctcttcttcttgctatagacatccttaaaacgatcttctgagttttgtcgcccatgagtgttttttttactgtcacatgtttgtaatggtttttgatgtgccattaggcagttcaagcgttgatatcgtatggtgtgaatctttttagttttattcactgtgatctctcttt

SEQ ID NO: 88829 - DNA, 572 bp, Arabidopsis thaliana columbia
  unsure (1)..(572): unsure at all n locations
tccaagcatctgcaggagtgaatcgcaaaaccaaatttggaggattctttctgaggggtttctcagtgagaaaatggcttcgaaacggatcttgaaggagctgaaggatctccagaaagaccctccaacctcctgcagtgcaggtccagttgctgaagacatgtttcattggcaagctacaattatgggtcctgcagagagtccgtattcaggcggtgtgtttctcgttaccattcacttccctccggactatcctttcaagccaccaaaggttgcatttaggacgaaggtgtttcaccctaatatcaacagcaacgggaggcattttgccttgcatttttgaaaggacaatggggccctgcccttaaccatttcggagggtgtttctttccgaaattttcctgtttaaaaggctcccaatcccggttccccgtttgtgcctaccagaggtttcacaaatgtcaaancggcagggccaatacggggttctnaagaaactgggcttagnagtttnnatnggtnacaaggtngnntnttagactgttttgttcatgctgtttttntctctntnc

SEQ ID NO: 88830 - DNA, 1174 bp, Arabidopsis thaliana columbia
  unsure (1)..(1174): unsure at all n locations
annnnnnnnnnnnnnnnnnnnnnnnnnnnnnnnnnggccccccctcgaggtcgacggtatcgataagcttgatatcgaattcgcggccccttctttccgattctcggatttttcctgggaatcaaacgcatcgccgagaatcggaagagagggataaggttatggctcctcatggagatggattaagtgacatcgaagaacctgaggtcgatgctcaatcggagattcttcgaccgatctcctcagtcgtcttcgtcatcgctatgcaagcggaggctcttcctttggtcaacaagttcggactctctgaaactactgattcgccgcttggtaaaggattgccctgggttctgtatcacggcgtgcataaagatcttcgaatcaatgtagtttgccccggaagagatgcagctttagggatcgatagtgttggaactgttccagcttctctcataacttttgcttccatccaagcattaaaacctgacatcataatcaatgccggaacctgcggtggcttcaaggtcaaaggagccaacataggcgatgtattccttgtatctgatgttgtgtttcatgatagaagaataccaattccgatgtttgatctgtatggagttggtctccgtcaggcattctcgacacccaatctcctcaaggaactcaatttgaagattggcaggttatctactggtgactcgttggatatgtccacgcaagatgaaacattgatcattgccaatgatgctacgctaaaggacatggagggtgctgccgtggcgtatgtggctgatcttctgaaaataccagtcgtgttcctcaaagccgtgaccgatctagtggacggagataaacctacagcagaagagttcttgcagaacttgacagttgtgaccgctgcattagagggaactgctactaaagtgatcaacttcatcaatgggagaaacctttcggacctttaacttctgttctcttccttttttatggagagtgattttttaaaatgcgttcaacgtgcttgttgcagtttcactgatttccagtgatcatatttctcgttaataaatttcaagttataagaaaaaaaaaaaaaaaaaaaaaaaagggcgagccgctctagaggatccaagcttacgtacgcgtgcatgcgacgtcataactcttctatagt

SEQ ID NO: 88831 - DNA, 822 bp, Arabidopsis thaliana columbia
cgcttccgtttcttaaagcataaaaaccaaaactttctctttcgttttgctttcttccaatcatctgcaggagtgaatcgcaaaaccaaatttggaggattctttctgaggggtttctcagtgagaaaatggcttcgaaacggatcttgaaggagctgaaggatctccagaaagaccctccaacctcctgcagtgcaggtccagttgctgaagacatgtttcattggcaagctacaattatgggtcctgcagagagtccgtattcaggcggtgtgtttctcgttaccattcacttccctccggactatccattcaaaccaccaaaggttgcatttaggacgaaggtgttccaccctaatgtcaacagcaacggaagcatttgccttggcattttgaaagagcaatggagtcctgcactgaccatatcgaaggttttgctttcgatatgttcattgttcacggacccaaacccagatgatccattggttccagagattgctctcatgttcaaaaccgatagagccaagtattagtttactgcgagaagctggtctcaaaaataagccatgggatgaaagtttgtgtcctttgatccctcaaaggctcgggtttaatagagagcaaagagcaacagagagggcttttttccataaggattttccatggaataagttagaatcctatgtgtttaccatctccttgtttggaacctccttaatttccaacaaaaaccatccttttcctccaaaaaaaaaaaaaaaaaaaaaaaggcggccggtttaaaggatatccaggctaaggaaggggggctatgcaagttat

SEQ ID NO: 88832 - DNA, 616 bp, Arabidopsis thaliana columbia
  unsure (1)..(616): unsure at all n locations
accacgttaggtctcaaaggctctctctgtctctttctcaaaaatcatctgcaggaagtgaatcgtcaaaaccgagtttggaggatctgtcttgaggagtttttttttggttgagaaatggcttcgaaaaggatcttgaaagagctcaaggatctccagaaggatcctccaacttcctgcagtgctggcccagttgctgaagacatgtttcattggcaagctacaataatgggtccatctgatagtccttattcaggcggtgtctttctcgtaaccattcacttccctccggattatcctttcaaaccaccaaaggttgcattcaggacaaaagtgttccaccctaatgtcaacagcaatggaagcatttgccttgacattttgaaagaacaatggagtcctgcacttcaccatatcgaaggtttttgctttcggtatggtccatttgttaacgggccccaaacccagttgatccattgggtcccaggggttgctcacatgtccaaaaccgttagggaaaagtttggggttcttgcgggaagttggcctcagaattttgcaatggggtgaaagtttttcccctttccccccaaaggntgggtttnnntgggggggg

SEQ ID NO: 88833 - DNA, 725 bp, Arabidopsis thaliana columbia
ttggtccgcctgcaggcaccggtccggaattccggggtcgacccacgcgtccggtttctcattgataaaatggcttcgaaacggatcttgaaggagctgaaggatctccagaaagaccctccaacctcctgcagtgcaggtccagttgctgaagacatgtttcattggcaagctacaattatgggtcctgcagagagtccgtattcaggcggtgtgtttctcgttaccattcacttccctccggactatccattcagaccaccaaaggttgcatttaggacgaaggtgtttcaccctaatatcaacagcagcggaagcatttgccttgacattttgaaagaacaatggagccctgccctcaccatttccaaggtgttgctctcgatatgttcgctgttaacagatccaaatccagatgaccctttggtaccagagattgcacacatgtacaaaaccgacagagccaaatacgaggctactgcaagaaactggactcagaagtatgccatgggctaaacaaagattcgtatgcttcagcacctgtttatgttttcatgtctgtttctttcttcttcttgttttaactttaataaaaatgtctaaaatatcaactttttcgtctgtactatatatgtttatgggttttattatcatcatctttatctgaaatttgaagatggaaggcggccgttctagaggatccaacttacgtacgcgtgcatgcc

SEQ ID NO: 88834 - DNA, 872 bp, Arabidopsis thaliana columbia
aaggctctctctgtctctttctcaaaatcatctgctggaagtgaatcgtctaatccgagtttggaggatctgtcttgagggtttggttttttggatcgctcacgcgtccggaatcgcaaaaccaaatttggaggattctttctgaggggtttctcagtgagaaaatggcttcgaaacggatcttgaaggagctgaaggatctccagaaagaccctccaacctcctgcagtgcaggtccagttgctgaagacatgtttcattggcaagctacaattatgggtcctgcagagagtccgtattcaggcggtgtgtttctcgttaccattcacttccctccggactatccattcaaaccaccaaaggttgcatttaggacgaaggtgtttcaccctaatatcaacagcaacggaagcatttgccttgacattttgaaagaacaatggagtcctgcactcaccatatcgaaggttttctttcgatatgttcattgttaacggacccaaacccagatgatccattggttccagagattgctcacatgtacaaaaccgatagagcaaagtatgagtctactgcgagaagctggactcagaaatatgcaatgggatgaaagtttgtgtcctttgatccctcacagactcggttttaatagagagagagagagaaagagagaggacttcttcacatagggatcttccatgaaataagttagattcctatgttttatcatctctttgtttgaaacctctttaatctcaaacaaaaacattacttcacctctttattatccatatgttccctatctttgtttctatgctttttccaaaaaattataagaaaaattattattttatgtaaagcttgaaactttg

SEQ ID NO: 88835 - DNA, 3555 bp, Arabidopsis thaliana columbia
  unsure (1)..(3555): unsure at all n locations
cggacgcgtgggcggagttagagagagagagaaagatatagagagaacacagagaggcgagagcgacgtagggttggtgtttcgtacggattttctcggtcaatcttagtttctccggcgagagattgcttttcaggaatcatcatggtgagaaagagaagaacggatgctccatctgaaggaggtgaaggctctgggtctcgtgaagctggtccagtctcaggtggtggacgtggttcacagcgaggtggtttccagcagggaggaggacaacaccaaggtggaaggggttatactcctcaacctcaacagggaggtcgtggtggtcgtggatatgggcaaccaccacaacagcaacaacagtatggaggaccacaagagtaccaaggaagaggaagaggaggacctcctcatcaaggaggtcgaggagggtatggcggtggccgtggaggtggaccttcttctggaccaccgcagagacaatcagttcccgagctgcatcaagctacctcacctacttatcaagcggtgtcttctcagcctacactgtctgaggtgagtcctacccaggtaccagaacctactgttctggctcagcaatttgaacaactctctgttgaacaaggagctcccagtcaggcaatccagcctataccgtcttctagcaaggctttcaagtttccaatgaggcctggtaaaggacagagtggaaagcgttgcattgtgaaggctaaccatttctttgctgaactgcctgataaggatttgcaccattatgatgttaccattactccggaagttacatcaaggggtgtcaatcgtgctgtgatgaaacaacttgttgataattatcgtgattctcaccttggaagtcgtcttccagcgtatgatggtcgaaaaagtctttacactgctggtccacttccctttaactccaaggagttcagaatcaatcttcttgacgaagaagtaggggctggaggtcaaagacgagaaagggaatttaaagttgtgatcaagctagttgcacgtgctgatctgcatcacctaggaatgtttttggaggggaaacaatcagatgccccacaggaagctctgcaggttcttgacattgttcttcgtgagctgccgacctctaggtatattccggtgggccggtccttttattcccctgatataggaaaaaaacaatcattgggggatggcttggagagctggcgtggattctaccaaagcattcgtcctacacagatgggcttatcactcaatattgatatgtcatcgacagccttcatagaggcaaaccctgtgattcagtttgtctgtgatttgcttaaccgggatatttcttctcgacctttatctgatgctgatcgtgttaagataaaaaaggctcttagaggtgtcaaagttgaagtgactcatcgaggaaacatgcgccggaagtaccgcatttccggtttgactgctgtggccactcgggaattgacattcccagtagatgaaagaaatactcagaaatctgttgtagaatacttccacgaaacatatggttttcgcattcagcacactcaactaccatgcttgcaagttgggaattctaataggcctaattacttaccaatggaggtatgcaagattgttgaaggccagcggtattccaaaagattgaatgagagacagatcactgctttgctgaaggttacctgtcagcgcccgatagatcgagaaaaagatatcttacagacggtgcaactcaatgattatgctaaagataattatgctcaagagtttggcatcaaaataagtacttctctggcttctgttgaggctcgtatactgcctcctccatggcttaagtaccacgagtctggaagggaagggacttgtctgccacaagttggtcaatggaacatgatgaataagaaaatgatcaatggtggaacggtgaataattggatctgcatcaacttttctaggcaagtgcaggacaatctagcgcgtacattttgtcaggaacttgctcaaatgtgttacgtatctggcatggcatttaatccggaaccagtcctcccaccagtcagtgctcgccctgagcaagtagagaaggtcttgaagactagatatcatgatgccacatcaaaactctcccaaggaaaagaaattgatctgcttattgtcattctgcccgataataatggatcattatacggtgatttgaaacgcatatgtgagactgaactcggcatagtctctcaatgttgcctgacaaagcatgtctttaagatgagcaaacaatacatggctaatgttgcgctgaagattaatgtgaaggttggaggaagaaacacagtgcttgttgatgctctatctaggcggattcctctagtcagtgatcgacccaccattatatttggtgctgatgttacccaccctcaccctggagaggattcaagcccatctattgctgctgttgtggcatctcaggattggcctgaaatcactaaatatgctggattagtttgcgctcaagcgcataggcaggagctcattcaggatctgttcaaagagtggaaggatcctcagaaaggtgtggtgactggtggcatgataaaggagttgctcatagccttccgtagatcaactgggcataaaccactaaggatcatcttctacagggatggagtcagtgagggacaattttaccaagttttgctctatgaacttgatgccatccgcaaggcctgtgcttcgctggaagcaggttatcaaccaccagtgacatttgtggtggtgcagaagcgtcatcacacgaggctgtttgctcagaaccacaatgatcgccattcggtggacagaagtgggaatattttacctggcactgttgtggactctaaaatctgccaccctacagagtttgacttttacctctgtagtcatgctggtattcagggcacttctcgacctgctcattaccacgttctttgggatgagaacaactttactgcagatggacttcaatctctgaccaataacttatgttacacgtatgcaagatgcacacgctcagtttcaattgttccccctgcatattatgcacatctagcagcttttagggctcgattctacatggagccagagacatcagacagtggctcaatggctagtgggagcatggcacgtggaggtggaatggctggtagaagcacacgcgggcctaatgtcaatgctgcagtgaggccactcccagctctgaaagagaatgtgaagcgtgtcatgttctactgctgagttgattcaccctctatctatctttatgacctaaattaatgaagaatatcatgtatgctttctaagacttatcgtgtgtttggatatttcatcactctttctctatgagtatgagatgctttatgactcttgtttgacaactactaaaatttattattcaaaacagactttgatcctttcaaaaaaaaaaagggcggcagctctagaggatccaagcttacgtacgcgtgcatgcgacgtcatnnnnnnnnnnnnnnnnnnnnn

SEQ ID NO: 88836 - DNA, 375 bp, Arabidopsis thaliana columbia
ggcaaacattccggcgatatacaaagtcagcaatggccgttctctcctctgtagcttctctcatacccttctcttatggggcaacgagactgactagttcagcttcattagcctcaagaacttccggattcaatctctcttctcgttggaactcaacgagaaactcccctatgttgtatctttcgagagcagtgacaaacaacagtggcaccacagagatttctgataatgaaacagctccaaggacttactcatggcctgataacaagaggccaagggtgtgcattctacgtggtggctttggaggattgtacacagctttgagattagaatctcttgtttggcctgaagacaaaaagcctcaggtggttttgg

SEQ ID NO: 88837 - DNA, 762 bp, Arabidopsis thaliana columbia
  unsure (1)..(762): unsure at all n locations
gaattcggcacgaggcttctggagatctcttctgggaatcgagcttcactgttaaagattttccttcaatcggctaaaaatgatacatttcgtgttactagtcagtcgacaagggaaagtaaggctcaccaagtggtattcgccgtatacgcagaaggaaagatctaaggtcatacgtgaactcagtggagtgattctgaaccgaggtcccaagctctgcaattttattgaatggagaggatacaaggttgtctacaaaagatatgcaagcttgtacttctgcatgtgcattgatgaggcggataacgagttagaggtactggagataattcatcactacgtcgagattcttgaccgctactttggcagtgtgtgtgaactcgatttgatttttaacttccacaaggcgtattatatactcgacgagctgttgatcgccggagaacttcaagagtcaagcaagaaaacagttgcaaggataatatcagcccaggatcaattggtggaagttgcgaaagaggaggcgagttccataagtaatataattgctcaggctaccaagtagtccttctctgaacttctcttatgcagctgaaacaatcgtaaatgagttaatattttccttcaactctgagatattctcttctgaatcacactttgtttgtcatgccatgtcatgtgattgtttgattgattagaagaaagaagcattcatcgttttgggtttnnnnnnnnnnnnnnnnnnnnnnnnnnnnnnnnnnn

SEQ ID NO: 88838 - DNA, 292 bp, Arabidopsis thaliana columbia
gcaatttctcatgaagacagtcaaaaaatctctttttgtcttctcaaatttaaacctcacctttaatatttctccttacttttgaagctgtaataatattcttgaatctattcctttctttctctttctcatgtttaatcggtgaaggctttactctgtttctttcatcatgtttcaatcaaaagccttaactttttctttagctctttccattacaagagacctctagcttcatactttttagaagaattctctctttttctcagtttagtctcaagatatggtttcaaga

SEQ ID NO: 88839 - DNA, 4878 bp, Arabidopsis thaliana columbia
  unsure (1)..(4878): unsure at all n locations
gagagagctcaaagccatggactttctcggttccacgacgggtagcggtacgttagcaatgttgttctcgttttcggaatctattttgcctctggattctaggtctttccttctgaaacctcttttcctgagatggctttctggtttcttacactcggttttgttgctggtcctgtttttctcatgggttcgtaagaaaattaggggggatagtggtgttacggagagtttgaaagataggagggattttgggtttaagtcagctctgttttgtagtttagctctgtctctgcttaatctcgtgttgatgtcgttgagtggtttctattggtacgagagtggctggttagataatgaacagctagtttcctcccttgggtttcttttgggaatggtttcttggggggttttgtcgatttgtttgcatcgctgcagagattgtgagcataaaaaggctccctttttacttaggctatggttggttttctatctagtggtctcttgctactctcttgtggtagattttgtgatgtacgagagacgtgaaaccgtacctgttcaccttctagtgttcgatatagtcgcttttattgctgctgtgtttctcggttacgtggctgtcctcaagaaagatagaagcaacagcaatggagttttggaagagcctctgttgaacggtggtgattctcgtgttggtggtgatgacagcgttgagttaaataaaaccaatgggagtggtgaggctactccttactcgagagctggcattctcagtcttttgactttctcatggatgagtccattaatagacattggaaacaagaaaacccttgatctagaagatgttccgcagcttcatgatactgacagcgtagtcgggttagctcctaagtttcggagtatgcttgaatcaccagatgggggcgagagaagtggcgttaccacgttcaagcttataaaagccttgtattttacggctcagtgggagattctagtgacagccttctttgctttcatctacacggttgcatcatatgttgggccagcactcattgatactttcgtgcaataccttaatggacgtaggcagtataaccatgaaggatatgtgctagtcattactttctttgctgctaagattgtggagtgcctttcacagagacattggttctttaggctacagaaggttggtattaggatgagatcagccttggttgcgatgatatatgaaaagggtctgaccctttcatgtcagtcaaagcaaggacgcacaagtggggagattataaatttcatgactgtggatgcggagaggattggtaatttcagttggtacatgcatgacccctggatggtcttgttacaagtcggtctagctctgtggatcttgtatagaaatcttggactagcatcaatagcggctttagttgctaccattatagtaatgcttataaattttccattcgggagaatgcaagagaggtttcaggagaagttaatggaagctaaggatagccggatgaaatcaacatctgagatcttaagaaacatgaggattctcaagcttcagggatgggaaatgaagtttctctccaagatttttgatcttcggaaatctgaggaaggatggctgaaaaagtatgtgtataactcggctgttattagttttgttttctggggggctcctactctggtgtcagtctccacttttggtgcttgtatacttcttggaatcccccttgaatcaggaaagatactctctgcacttgcaaccttcaggattctacaagagccgatctacaatcttcccgacactatctccatgattgtgcagactaaagtctctcttgatagacttgcatcctacctttgcctggacaatttgcagcctgacattgtagagaggcttcctaagggaagttcagacgtggcagtagaagtgatcaacagcactttatcttgggatgtctcatcctctaacccgactctcaaagacataaatttcaaggtctttcctgggatgaaggttgcagtttgtggtaccgttggctctgggaaatcgagcttactttcatctttactaggagaagtacccaaggtatctggaagtcttaaggtttgtgggacaaaagcgtatgttgcgcaatctccttggattcagagtggtaaaattgaggataacatcttgtttggcaaacctatggaaagagaacgatatgataaggtgcttgaagcatgttcgttgagtaaggatctggagatactttcattcggtgatcagaccgttattggagaacgcggcattaatttgagtggtgggcaaaagcaaaggatacagattgcacgtgctctctaccaagatgctgatatctatctgttcgatgatccttttagcgctgtggatgcacacacagggtcacatctctttaaggaagttctactggggcttttgtgttccaaatcggttatatatgttactcatcaagttgagttcttacctgctgctgatcttatactggtcatgaaagatgggagaatcagccaagctggaaaatacaatgatatcctcaactctggaactgatttcatggagcttataggtgcgcatcaggaggctcttgcagtagttgattctgttgatgccaattctgtttctgagaaatcagctttaggccaagaaaatgtaattgtgaaagatgctatcgctgttgatgagaaactagaaagtcaggatctgaagaatgataaattagaatctgtggagccccaaagacaaattattcaagaggaagagagggagaaaggtagtgtcgctttggatgtgtactggaaatatatcacactggcatatggaggagctcttgtgcctttcatattgttggggcaagttctctttcagcttctacagattggaagcaactactggatggcttgggctactcctgtttctgaggatgtgcaagctcctgtgaaactttccacgttaatgattgtgtatgtggctttggcctttggaagttccctctgcattcttcttagagccacgcttcttgtcactgctggttacaagactgctactgaactgtttcataaaatgcatcactgcatattccgttctcctatgtctttctttgattccaccccaagtggaagaatcatgagtagagcttctaccgaccaatccgcagtagatttggaactaccgtatcaatttggatcagttgctatcacagtgattcagcttattggaatcattggagtaatgtctcaagtttcttggctggtttttctcgtcttcatccctgtggttgctgcctccatatggtatcagcggtattacatagctgcagcacgagaactttcgcggttagttggagtatgcaaagctcctctaattcagcatttttctgaaacgatttcaggggcgacaaccattaggagtttcagccaagaatttagattccgttctgacaacatgaggctaagtgatgttactctaggcccaaattctatacagctgggagcaatggaatggctttgctttcgccttgatatgttgtcatcacttacattttgtcttttcaattggttttcttggtctccaatacctactggagtgattgatccaagtctcgcgggattagccgtgacttatggactcagtttgaatactctgcaagcttggctgatttggactctctgtaatcttgagaacaaaatcatatcggtagagaggattcttcaatatgcaagtgttcccagtgaaccacctcttgtgatagaatcaaaccgacctgagcaatcatggccttcacgtggtgaagttgaaatccgtgatcttcaggtccgatatgctccacatatgcctcttgtgttgcgaggaataacatgcacattcaaaggaggtttaagaacaggaattgttggaaggacaggaagcgggaaatcgactttgatacaaactcttttccgcattgtagaaccttcagctggagaaatcaggattgatggagtgaatattttgaccattgggttgcatgacttgcgtttaagactaagcatcataccccaagatccaaccatgtttgaaggaacaatgagaagtaacttggaccctcttgaagagtacacagatgatcaaatctgggaggctcttgacaagtgccaactaggagacgaggtgaggaaaaaagagcaaaagctcgattccagtgtgagcgagaatggagacaattggagtatgggtcagagacaactagtgtgtctcgggagagttcttctcaagagaagcaaaatcttggtgcttgatgaagccactgcttctgttgacactgcaactgacaatctgattcagaaaacgctaagagaacacttctcagactgtacagtgataaccattgcacacaggatatcttcagttattgacagcgacatggttctgcttctaagcaatgggatcattgaggagtatgatacgccagtgagattactggaggataagtcttcctctttttctaagcttgtggctgagtacacctcaagatctagttccagtttcgattgaagcaaagactctgctattttcctgctgatgatgacgatgaagaaaaacttaggatgtctgaatctggtttagccacaacactagctggattatgattcacacaagaagaaacactatcttttgttaaaagcttttgttcttagtttatagcttctactactgttgaacccctaaaaacgattattctacatcgctagtttcaaatcaatgcaataaaagattgttcacttctgaaaaaaaaaaannnnnnnnnnnnnnnnnnnnnnnnnnnnnnnnnnnnnnnnnnnnnnnnnnnnnnnnnnnnnnnnnaacga

SEQ ID NO: 88840 - DNA, 593 bp, Arabidopsis thaliana columbia
acgactcatttagggaaagctcggtacgcctgcaggtaccggtccggaattcccgggtccccccacgcgtgctgtttttctttttttcctccctctcttgattaatgcaaaaccaaaaagagtcactctacatatccctcttgtgcataatggtgcaaacttttatgacagcaaagttgtttctcttccactctcgtcaccccactcccagcgagggctagcgttcatggccgaaattcattttggctcccctcaaaagaaacaatttcttcacatggatacgggtagcagcctcacatggactcaatgcttcccttgctccgactgctatgcccagaagatttatccaaaataccgaccagcagcttcaataacatatcgcgatgcgatgtgtgaagattcccatccaaagtccaatccgcattttgcattggcatcctttgccgagaatatggcccctaccagcagcgattgcttagccgataccaacatcaaaggaacactagcgcaagaaatgattacagtagatacacatgatggtgggttcaaaagggtgcacggtgtgtattttggatgcaacacgttaagcgatg

SEQ ID NO: 88841 - DNA, 818 bp, Arabidopsis thaliana columbia
  unsure (1)..(818): unsure at all n locations
atgatatgccnnnnnnnnnnnnnnnnnnnnnnnnnnnnnnnnnnnnnnnnnnnnnnnnnnnnnnnnnnnnnnnnnnnnnnccacgggtggcggcacgcgtccgcacgagacgaagaatgagttcgtgggtttgctcttccgtaactcgaaacgtcgtaaagtcacatcctttatcattaaccaaacaccttgatttcccggcgacgattcggagaagatcagtcagctttccggcgacgattcggagaagatcagtcagctttccgataacatctgcgccgaaatttccgtctttgaaactccaaaagtctcaatcgtcgatccatgaaggagaagaagactcagaatcagccgtacaagccctcacgattccagaagagtggttgctcccttctagagccattgaggaatctgaatggttgagagtaactttgcacaaatggttggatgatgagtattgccctgagccaaccaatgtggagatcagtgaagtagctgcaaagtcttactatagttcactgctagagaaagaaagtgacatgggagagattttgttgaagatggctcaagatttaacttccatttcataccaagaaagcttccatggagctttcacatccgctaatgcagctataaatttgattgttgacagaatagaaaccggcctagtctagtctagtctagtgcagtctagttcacttgaagtttcaagaacagttttctttgtatattatgagttttgttacttcacttggtcaggtgcagggaaatctaaagaatttacagttgtgaaaaaaaaaaaaaaaagggcggccgct

SEQ ID NO: 88842 - DNA, 589 bp, Arabidopsis thaliana columbia
tctactacgactcactattgggaaagctggcacgcctgcaggtaccggtccggaattcccgggtcgacccacgcgtgcggaaatgttcaactctctgaatgcactctcagaagatggcagcctggtgacgatgccaccctgggttaacccgtggctgctcctggcaatggctgtctcatttggactccactttgtgatattgtacgtcccattcttggctcaggtgtttggtattgtgccactgagcttgaacgagtggctgctagtgctggctgtgtcgctgccggtaattttgatagacgaagtgctcaagtttgtaggaaggtgcacgagtggctaccgctactcacctcgcactccctcagctaagcaaaaggaggagtaagaaaataattcaaaaggcattattattagactcttagttttagctgaaattaactttgttgctttactcatccttgctatatttaattctccaaacgataatttttggtttgaaaaagaaaagtttctaactaaaaaaaaaaaaaaaaagggcggccgctctagaggatccaagcttacgtacgcgtgcatgcgacgtcatagt

SEQ ID NO: 88843 - DNA, 3528 bp, Arabidopsis thaliana columbia
  unsure (1)..(3528): unsure at all n locations
ctttgtcgaaaaccgtaagctttggcgagtttccgggagaatttgacgaatctgttttgcaacgagtgagaattcatggggaaaggatcagaagaccttgtgaagaaggaaagcttaaattctacacctgtaaattcggatacgtttcctgcttgggctaaagatgtcgcggaatgtgaagaacatttcgttgttagtcgtgagaaaggtttgagtagtgatgaggtgttgaagcggcatcagatctatggtttgaatgagttagagaagcctgagggtacttctatttttaagctgattttggagcagtttaatgatacattggttcgtattcttttggcggctgctgttatttcctttgtcttggccttctttgatggcgacgaaggtggtgagatgggtatcactgcatttgttgagccgcttgttatttttctcatcttaattgttaatgccattgttggcatctggcaagaaactaatgctgagaaggcgttggaagctttgaaagagattcagtctcagcaagcaactgtcatgcgtgatgggactaaggtttccagtttgcctgcaaaggagcttgttcctggtgatattgtggaactgagggttggtgataaggtacctgctgatatgcgtgtggttgctttgatcagttcaactttgagagtcgagcaggggtccttaacaggagagagtgaggcagtgagcaaaaccaccaagcacgtggatgagaatgctgatattcaaggaaagaaatgcatggtgtttgcaggaaccactgtcgtgaatgggaactgcatatgtttagttacagatactgggatgaatactgagattggaagggttcactcacagatccaggaagctgcacaacacgaggaagatacccctctgaagaaaaaacttaacgagtttggggaagttctgactatgatcattgggttaatttgtgcgttagtgtggctcatcaatgtcaaatacttcttgtcatgggagtatgttgatggctggcccagaaactttaagttctccttcgagaagtgcacatattactttgagattgctgttgcactggcggttgctgcaattcctgaaggtctgccagcagttattaccacatgtttggctcttggcacacggaagatggctcagaagaatgctctggttaggaagctacccagtgtggagactcttggatgcaccaccgtgatatgctctgacaaaactggaactctcacaaccaatcagatggctgtttctaagctcgttgctatgggttcgaggatcggtactcttcgatctttcaatgttgaggggacctcgtttgatcctcgagatggaaagattgaagattggccaatgggtcggatggatgcaaatcttcagatgattgcaaaaattgctgccatttgcaacgatgctaatgtcgagcaatctgatcagcaatttgtgtctaggggcatgcctactgaggcagctttgaaggttttggttgagaaaatgggatttcccgaaggattgaatgaagcttcgtccgatggcgatgtcttacgttgttgtcggctatggagtgaactagaacaacggattgccacccttgagtttgaccgtgaccggaaatcaatgggagttatggtggattccagctcaggaaacaaactgctactggtcaagggtgcggtagaaaatgtattggaaaggagtacacatattcagctacttgatggttcaaaacgagagcttgaccaatactcaagggatctgattttacaaagcctacgtgatatgtccttgagtgcattaagatgtctcggatttgcttactcagatgttccatcagattttgccacttatgatggcagtgaagaccatcctgctcaccagcaacttctcaacccatccaattattcatcaattgagtccaatctaatattcgttggatttgttggtttaagggatcctccaaggaaagaggtgcgtcaagccattgcagattgcagaacagcaggtattcgggtcatggtcattactggagacaacaagagcacagcggaagcgatctgccgtgaaattggcgtatttgaagcagatgaagatatctcctcaagaagcttgacgggaatagaatttatggatgttcaagatcagaagaatcatctacgacagactggagggctcctgttctcaagggctgaaccaaaacacaaacaagagattgtcaggttactgaaagaagatggagaagtggttgccatgactggagacggagtcaatgatgctcctgctctgaagttggctgatattggtgtggctatgggcatttccggcacagaggtagcaaaggaggcatctgacatggttttggcagatgataatttcagcaccattgttgcagctgtaggtgaaggcaggtccatctataacaacatgaaggccttcatcaggtacatgatctcttccaacatcggcgaggttgcatcgatatttttgacagctgctcttggaatcccagaaggcatgatcccggttcagcttctgtgggtaaatctcgtaacagacggtcctccagctactgctttggggttcaacccccctgacaaagatattatgaaaaagcctcctcgtaggagcgatgactcgcttatcactgcctggatcctcttccgctatatggtgattggtctgtacgtgggagtagcaacggtgggagtattcatcatatggtacacacacagtagcttcatgggcatagacttgagccaagacggtcacagccttgtgagctattcacagctcgcacattggggccaatgctcttcatgggaaggcttcaaagtgtctcctttcacagcaggctctcagactttctcgttcgactcaaacccttgcgactatttccagcaggggaaaatcaaggcgtccacactctccctctcggtgttggtggccattgaaatgttcaactccctgaacgcactctcagaagacggcagcctggtaacgatgccgccgtgggtgaacccgtggttactcctggctatggctgtctcattcgggctccactttgtgatactgtacgtgccattcctggctcaggtatttgggatagtgccactgagcttgaacgagtggctgctggtactggctgtttcgcttccagtgattcttatagacgaagtgctcaagtttgtaggaaggtgtacgagtggctaccgctactcacctcgcactctttccacgaagcaaaaggaggagtaagaaataaatcaaaagcattatattattagactcttagttttagctgaaattagcgttgttacttacctcggcgttggttatttaattttctaaaacgataatttttggtttgataaaaatgttctaacttgcttctcatttggttcacggacaaagagcctgaaatagatgaatgtttcaccaaaaaaaaaaaaaaaaaaagnnnnnnnnnnnnnnnnnnnnnnnnnnnnnnnnnnnnnnnnnnnnnnnnnnnnnnnnnnnnnnnnn

SEQ ID NO: 88844 - DNA, 451 bp, Arabidopsis thaliana columbia
aattttcaaaacatcaaccaaaaaacaaaaaaccaaaaagaaaaaacaaaataaaaacaagaaataatggagatgaagaacatctttgtggccctctttatctcggccgtgttagtgagctcagtctccgcggctacaatggagtctccagcaccatcaccaggtgcttcctctgcctccaccgtagcttttccggtggttggctccattgttgctgcatcactctccgccttcttggctcttctcttgcagtagaaagacaagagtcctcaaaatatgagaaggagatatataacaaaactctttttttgttctgattttgttccttagaatctatgatgacaaataacccattttgatgtataatctcattgtgtaagttattacactaatatatatgagtatatgataataataacactattttatcagatctaatgatatctggtcc

SEQ ID NO: 88845 - DNA, 202 bp, Arabidopsis thaliana columbia
tgtagaccctctctaattggaaagggaacatccagctgaatcagatcagcttgttctacatgagtatcaatcctaccatggctcttcaggagtacctcctcatcgtcttcaacaagctcagatatatccatagatttgtatttgtctgtacgaaagaagtctatgatgtaagagttccacatgaagaagtgaattacagaag

SEQ ID NO: 88846 - DNA, 528 bp, Arabidopsis thaliana columbia
  unsure (1)..(528): unsure at all n locations
nnnnnnnnnnnnnnnnnnnnnnnnnnnnnnnnnnnnnnnnnnnnnnnnnnnnnnnnnnnnnnnnnnnnnnnnnnnnnnnnncccacgcgtgcgagggtgtaaagcttcgaatctctccctttgcttcgtcatatatctaaatcaccccactcaagatttcaaattccctatatctttgtttttataaattctttctaattttattgtcacatataattgaagcctaataaatcacaccacactgtcttactctgtttttgtttcttctctactctgttttttttttttcccttcaacattgaagataaacttatcttttctctctcaaagactgaaactttatcaaaaggggctcatcggcttcatcattggtatctccatcttcatatacagaggtaaaagatgcttggcgtccatcaacaacagcgaacacaacagaatcaggctactggtttaatggggagggctatgatctgctgcatagggagggtttagggactggggatcacggtttttttatattcaaaa

SEQ ID NO: 88847 - DNA, 978 bp, Arabidopsis thaliana columbia
  unsure (1)..(978): unsure at all n locations
attccttcttacctcttcaccatgcctttnctagtttctcttaacctacgccaaaaccatcttagtgaccctcttgagaatataaatnattctgcaacctctaaacttttaattttagacatggcttataaccttatgagtcatcgaatcctagaacctatctcaaaattagccaacctcatacaaattgacttatcttttcagaagacaccccccacgcgtgcgtgcacattcaactttgatttcttgctcttcaagtctctagtgcgtttggatctttccggaaatagtgtttcagtggttggtaccggttcagaaaatttgacacatctagacttgtcgagctgcaacatcaccgagttcccgatgtttattaaggacttacaaagattatggtggttagacatttccaataatagaattaaaggaaaagtgcctgagttgttatggactctgccttctatgctccatgtaaatctctcacgcaactcctttgattccttggaaggtacgccaaaaataatcctcaattcgtcgatttcggagttagatttgagttcaaatgccttcaaaggatcttttcctattattccaccttatgtcaacatcatggctgcatcaaataactatttcactggaggcataccacttatattctgcaaaagatatcgactcagtctccttgatctagcaaacaacaacttcagtgggtcaattccgagatgcttgacaaatgtatcactcggactagaagcgttgaaactcagtaacaacagcctcactgggagacttncggacatagnagatcgtttagtactacttgacgttggccacaaccaaataagtggggagctttcaaggtctctagtaaactggacaaccctnaagttctaaattntgggaggaanccacatcaacggcantttccctttttggctgaggtttnacgggnttgnatcatntnctgggcaaanagag

SEQ ID NO: 88848 - DNA, 496 bp, Arabidopsis thaliana columbia
tttgacgcgtgggagactatatggcctcccattgctccatgagagtaatcctcctcagattctccaatggcgtctcttccagatccattctcaactccactaaccatcgtcttcttagtcttaccatgaccaacactctctcgtctctttcctcaatctctccccacactactacttcgcatttcacggctgcgtcacaacaatcagatgaccagaactgcttccgcaagcttcaactcagaaagatttcgatttcaactcctctttcgtatgggtcgtcgttcttccaaaatcgctggtcgaaagggcgctcaagattcaaagaaggcgaagctatactgtagaattggcccggaggttgtatctgctgtcaagaaagggggtccaaacccagtttcaaatacgactctagctactattcttgacaaagctaaagaactggatgtaccgaaagacattgtggagcgtaatattaagagggcttctgagaaggggc

SEQ ID NO: 88849 - DNA, 379 bp, Arabidopsis thaliana columbia
agagttttcgatagcgatgacgacagcgatgatgagatccggtatttggaaaagttgaaatataagagagtctctgtgtgtaatgaggatactgagtctggaaggaagcagttgacgccatctgggattacaaatggagaaaattccggcaagaagaaagctgtgtccgaacaggcgtccgaagacatggattgtccggaggaaattgaaacggcgtctgatgaaaaagagattggtaatgataataagagggaatcaaccatgactagtcgtcagcgagcccttgcttctggcagatccagcgcgattgatttttcagatggattacctcctacatctagaagtaagattttaatcctttgctactgccacataaatc

SEQ ID NO: 88850 - DNA, 1279 bp, Arabidopsis thaliana columbia
  unsure (1)..(1279): unsure at all n locations
gtcgacccacgcgtccgagaagcggaggcgatttttctagggtttttgctcggaatcgatttcacgatgggaacgagcagcgatccgattcaagatggttccgatgagcagcagaagcgatcagaaatctatacatacgaagcgccatggcacatctacgcaatgaattggagcgttcgtcgcgataagaagtatcgtctcgccatcactagcctcctcgagcaatacccgaaccgtgtcgagattgtgcagctcgatgaatccaatggtgagatccgttccgatcctaacctctcctttgagcatccttatccaccaacgaagaccattttcatacctgacaaggaatgccaaagacctgatcttctcgctacttcaagtgatttccttcgtttatggagaatcgctgatgatcattcccgtgttgagctcaaatcttgtctcaatagcaataagaacagtgagttttgtggtcctcttacttcttttgattggaatgaagctgagccacgtcgaattggaacatctagtactgatacgacttgtactatctgggacattgagcgtgaagctgttgatactcagcttattgctcatgataaggaagtttttgatattgcttggggtggtgttggtgtttttgcatctgtttcagctgatggctccgttagggtgtttgatcttcgtgataaggaacattcgacgattatctatgagagctccgagcctgatactcctttagtgcgtcttggttgggacaaacaggatcctaggtacatggctactattatcatggacagtgctaaagttgtggtgcttgacattcgttttccggctcttcctgtggttgagcttcaacgacatcaagctagtgtcaatgccattgcttgggctcctcatagctcttgtcacatttgtactgctggagatgattctcaagctttgatttgggatatttcatccatgggacagcatgttgaaggtggtcttgaccctattctagcttacactgctggtgctgagattgagcagcttcagtggtcctcttctcagcctgattgggtcgcaattgctttctctactaagctgcaaattctcagggtttgatcttttcaaagaatttctcatctcttgtcagattagattttactcattttctatcgtattaggggtctcgttacccttgttactatcctcaagatgtaaagactgttctcaatcgaattaatgaatctgtttgatcttgttgctnnnnnnnnnnnnnnnnnnnnnnnnnnnn

SEQ ID NO: 88851 - DNA, 722 bp, Arabidopsis thaliana columbia
  unsure (1)..(722): unsure at all n locations
gcccccngnggnatttttnngaaacctnnaagggttaaaatctcccttgaaggcgccctttggccgnactggggcttaaacacctgccccaagggcgcttctgaccgcctaaactnatcaaccactccttcccttgaggacaatatggagtttttgatttaaatgcatggatgatttatctatggaacagcaaaagttccagtattactaccggaacctgtctcgtcagcaagcacaacagcaagcctggctccagaagagaagaacggagaacatggctcgtaaatcagctggagaggagcctttaccagaagaggatccttcaaacccaatctttaaggcgatccctgaaccatctaggctagagagtttcctcatcacaaaccaagtctcaaacttctgtggccaaatcaatggagtggctggccagaacttcagcaggctttacctgaccaaagcattgcacgacaactgattgcaaagactacccaagtttttgttttttgagtcagaaagtgaaagacttggtggtagaatggatcctatatttgtttttcgtggatgtttttgtttttatttttgttgttgtgaagtaatttaatttacaagcttttcaaaaaaaaaaaaaaaaggagtctttattcttatgcataatgaaaaattattgttgttatgaaccnnnnnnnnnnnnnnnnnnnnnnnnnnnnnnnnnnnnnnnnnnn

SEQ ID NO: 88852 - DNA, 735 bp, Arabidopsis thaliana columbia
gtttcccactccacatccaaaaaaacagtgtaataataatcataatcacctgatcaatctcttacataaaagctacagatctggtgttatacaatcatcaccgcaccaagttcctaaaggtttcgactttactgtttctattttcggaaagagagtgcaagattgaaatcgaagatgaaggcggcaacaaggccgatccacgccgtgacgacatgggttcgtcggcaaccaccaaaggttaaaggttttctcggtgttgtctccgccatgactgccctcgttttgttgagagtgattgttcatgaccacgacaatctttttgtcgctgctgaagctgttcattcccttggaatctccgtccttatctataaactcaccaaggagaggacttgtgctggattatctctcaagtcacaagagctaacagctctgtttttggcggtgagactgtattgtagttttgtgatggagtttgatattcacacgttacttgactcggctacattggtgactacactttttgttatctatatgatccgttttaagctcaaagctagttatatggacgacaaagacaattttgctatctactacgtcgttattccatgtgttgttctatcagtactcattcacccatcaacacatcatcatataatcaataagatttcttgggccttctgtgtttaccttgaagctgtttcagtccttcctcaccttagagtcatgcaaaacact

SEQ ID NO: 88853 - DNA, 441 bp, Arabidopsis thaliana columbia
ctcactttagggaaagctcgtacgcctgcaggtaccggtcccgaattccccggtcgacccacgcggtccggtttcacgctatttggaaggattcaagcaactttggtgatatctatgacgaagatcacttcatatcaagccttgaaggttatgtgaaaatagtgagagatgttcctgatgagataatgactccttttagttacaatgtttcaagtattcctactgtgtcgtgttcaagcttgggctactgtgaaactactataacggggaagtttatccggttttaaacgaacatggggttattccgataactcctttcccaaatagattggccatgagtgttccaccctatatacaacttttgaggggcctagctaattacaaagcattggagttttcttcacctatatcaacactagctgagaagttagtcgatcggat

SEQ ID NO: 88854 - DNA, 514 bp, Arabidopsis thaliana columbia
  unsure (1)..(514): unsure at all n locations
nnnnnnnnnnnnnnnnnnnnnnnnnnnnnnnnnnnnnnnnnnnnnnnnnnnnnnnnnnnnnnnnnnnnnnnnnnnnnnnnnnnccacgcgtgcgagttctctccttgagtatcttcttatcctattttccaaattccaaaacaattcacaaaatggctacatgctggcctgagccgattgtttccgtgcaatccttgtcccaaaccggtgtaccaactgtaccaaaccgctatgtgaagccggctcatcagagaccggtctttaacaccacccaatccgatgctgggatagaaatccctgttctagacatgaacgacgtttgggggaaaccagaggggctaaggctcgtgaggagcgcgtgtgaggagtggggtttcttccaaatggtgaaccatggtgtgacccactcgttgatggagagagtgagaggagcgtggccagagttcttcgagctaccgctagaggagaaacggaagtatgcaaactcaccggacacgtacgagggatatggaag

SEQ ID NO: 88855 - DNA, 446 bp, Arabidopsis thaliana columbia
  unsure (1)..(446): unsure at all n locations
nnnnnnnnnnnnnnnnnnnnnnnnnnnnnnnnnnnnnnnnnnnnnnnnnnnnnnnnnnnnnnnnnnnnnnccacgcggtgcgcggacgcgtgggcaatgttaatggtttttctcctggtgattgggtcattccatctccaccttcttcagggacttggcagacttatgttgtgaaggaagagagtgtgtggcacaaaatcgataaagagtgtccaatggagtatgcagcgacgattactgttaatccattgacggctttgaggatgcttgaggactttgtgaacttgaattctggggattctgttgtacagaatggtgcaacaagtattgtgggtcagtgtgtcattcagttggcaagactccgtggcatcagtaccatcaaccttattcgtgacagggctgggtcggatgaagcaagagagcagctgaaagctctaggtgcagat

SEQ ID NO: 88856 - DNA, 356 bp, Arabidopsis thaliana columbia
atcaggggatatataaacaagaatgagtgtccacataaataatccaactaacacatcagcataatcccaaccgaaacagcttctagagagagacaaaaaagaacagagtaactatctaaaactcaaaatgtgtgcacttgtccctccattatatcccaatttcggctggccttgcggagatcatagcttctatgaaaccgacgacgtatccaacacgtttcttgattttccgttgccggacttgacggtgactcatgagaatgtgtcgtctgagaataacagaacattactagacaatcccgtggtgatgaagaagcttaatcacaacgcgagtgaacgtgagcgtcgcaagaaga

SEQ ID NO: 88857 - DNA, 523 bp, Arabidopsis thaliana columbia
  unsure (1)..(523): unsure at all n locations
agatacttccnnnnnnnnnnnnnnnnnnnnnnnnnnnnnnnnnnnnnnnnnnnnnnnnnnnnnnnnnnnnnnnnnnnnnnnccacgcgtccggggtgaatggacagagcataggtaggtactggccaactagtatcgctggaaatggcggttgtacagaatcatgcgactatagaggttcttaccgtgcaaacaaatgcctcaagaactgtggaaaaccttcacagacattgtatcatgtacctcggtggggggctaaaaccgagcgggaacatacttgttctgtttgaggagatgggaggagatccaacacaaatatcatttgcgacaaaacaaacaggaagcaatctttgtctaacggtgtcacagtctcatccaccaccggtggacacatggacttccgactcaaagatctcaaacagaaacagaaccagggccggttctttcggtgaaatgccctatctctactcacgtgatattttctataaaatttgcaagctttggtacacccaaaggtacttgcg

SEQ ID NO: 88858 - DNA, 498 bp, Arabidopsis thaliana columbia
  unsure (1)..(498): unsure at all n locations
attgagggaccgggnctgaantncctgggntgcccactgngtccggtgtacacacccgtcaacttctctcagagatgaatatccaatccccaagaccgctcttcttccgcgggagagccagtggtcgcagcaccagccccgctttgagctggtggttagatatagaaatgaccggacagatggtcagccaacccacctgacgcgttcttgaggcgggtttcttgtttcacacacattcttcccccccctaatgaatgagaagagtttatgttaaaatcagtatatcagtttgtaccggtctcagctcgaggtctcattcttgattcttagaattcttcccttttttcctagggaacggaaacattttattcaaatataattccacagttttattgtaaaaaaaaaaccaaaacaaaagnnnnnnnnnnnnnnnnnnnnnnnnnnnnnnnnnnnnnnnnnnnnnnnnnnnnnnnnnnnnnnnnnnnnnnnnnnnacaat

SEQ ID NO: 88859 - DNA, 820 bp, Arabidopsis thaliana columbia
  unsure (1)..(820): unsure at all n locations
atgannnnnnnnnnnnnnnnnnnnnnnnnnnnnnnnnnnnnnnnnnnnnnnnnnnnnnnnnnnnnnnnnnnnnnnnnnnnnnccacgcgtgcgcgcacgcgtccgtcgacacatctgttatgcaagttgattacagaacctttgtggagattattttcgaaaattctgaggatattgtccagagctggcatcttgatggttactctttctgggttgttggaatggatggtggacagtggagtccagatagtaggaacgagtataacctacgcgatgcagtcgctcgctgcaccgttcaggtatacccaagctcatggacggctatattgatagcactcgacaacgtaggaatgtggaatctaagatccgagttctgggcgaggcaatacttaggacaacaattgtatttacgtgtgtacacaccctcaacttctctcagagatgaatatccaatccccaagaacgctcttctctgcgggagagccagtggtcgcagcaccagaccgctttgagctggtggttagatatagaaatgacggagagatggtcagccaaaccagctgacgcgttcttgaggcgggtttcttgttttatacacattcttcattttgctaatgaatgagaagagtttatgttaaaatcagtatatcagtttgtaacgatctcagctcgaggtctcattcttgattcttatattctttctttttctatggaacgaaacatttattcaatataattccacagtttcatcgtaaagcttattatcaaccccaaagggcaaccgctctagaggatccaagcttacgtacgcgtgcgtgcg

SEQ ID NO: 88860 - DNA, 695 bp, Arabidopsis thaliana columbia
  unsure (1)..(695): unsure at all n locations
tcgaggtcgacggtatcgataagcttgatatcgaattcgcggccgctggcatcttgatggttactctttctgggttgttggaatggatggtggacagtggagtccagatagtaggaacgagtataacctacgcgatgcagtcgctcgctgcaccgttcaggtatacccaagctcatggacggctatattgatagcactcgacaacgtaggaatgtggaatctaagatccgagttctgggcgaggcaatacttaggacaacaattgtatttacgtgtgtacacaccctcaacttctctcagagatgaatatccaatccccaagaacgctcttctctgcgggagagccagtggtcgcagcaccagaccgctttgagctgggtggttagatatagaaaatgaccggagaagatggtcagccaaacccaagctgaccgcggttctttgaggcgggggttccttggtttttatacacattccttcatttttgctaaatgaattgagaagcagtttatggttaaaatcaggatatccaagtttggaacggtctcaagcccgaggggcggccccgaattcggccggccgcgcggccggaanttccntgaagcccggggggncccanggtnntaanggccnacccggggngcccaccttcnnnnnnnnnnnnnnnnnnnnnnnnnnnnnnnnnnnnggggagt

SEQ ID NO: 88861 - DNA, 945 bp, Arabidopsis thaliana columbia
  unsure (1)..(945): unsure at all n locations
nnnnnnnnnnnnnnnnnnnnnnnnnnnnnnnnnnnnnnnnnnnnnnnnnnnnnnnnnnnnnnnnnnnnnnnnnnnnnccacgcgtccgcccacgcgtccggcgaaggattgcatcaagtaatcgccgtgtaactaactacttttgcattcaccatcgctcttacgtttgaatctatccagatccaaagctcttcttcttcccggcaattctgagatctcattttcaccggcgacgagctttaatcggagaacgatgaagcagcttcacaagcaaatgagctcgaagcgtgatgaagaaaccattcccatgagccaatccagtccttactctcccaaaactttaaagcatcccagatctcttcccagatcgcttcactatctctttcgtgaacaacgactcctctttatcctcgtcgggatcttgatcggatccactttcttcatcctccagccttctctctctcgtttaggcgccgctgagtccacctcgttaatcaccagatctgtttcctacgccgtcaccgattccccgccttccaggtcgacttttatttccggaggcggccgaggtagaaccggtcgtgttcccggcggtatcggacggaagcgactgaggattgttgtcaccggtggagctggtttcgtcggtagtcatcttgttgataagcttatcggtaggggagatgaagtgatcgtgattgataacttcttcactggtaggaaggagaatttggttcatctattctcgaatcctaggtttgagctaattcgacacgatgttgttgagccaatcctccttnaggtcgatcagatttaccatttagcttgtccagcttcacctgttcattacaagtataatcnagtcaaggctatcaaaggcaaatgtaatggggnactctcaaatatgttggggccttncaaaaaaagtttggggcaaagtttttt

SEQ ID NO: 88862 - DNA, 625 bp, Arabidopsis thaliana columbia
  unsure (1)..(625): unsure at all n locations
cagctannnnnnnnnnnnnnnnnnnnnnnnnnnnnnnnnnnnnnnnnnnnnnnnnnnnnnnnnnnnnnnnnnnccacgcgtccgcccacgcgtccgattgtattttctcttttagggattgtttttttaacaatttttgccttgccataagcaatacaaccatggcaaggatctctctgttgttctcattagcctttgttttagccctcggctcagtgttcctttccgtttccggtcacgctcctcccgtgacaccgagaaaatcagcatgtccaaaaacagtatccgaactccagaccttaccttttaccgaaatcactgagatcctaaaccgaaaagagcggtctgccccgaaaacccctgagttcaaggcaatgttcacaatgtgcaaaggctacgtgacatacctcgagagcctctacaagtttgagaatcccattgtagatgttttaggaattgccaagaccagatacaccctgatgaacaaggcaattcttgctgcgcaagctagtgttggcggtaaagtcaataagaaaacttctttgaagctaaagaaaagctatgctgatttgacaaaagggtttctccgaattaaagaaactattgtaaagatatcagccaaaca

SEQ ID NO: 88863 - DNA, 643 bp, Arabidopsis thaliana columbia
  unsure (1)..(643): unsure at all n locations
gagcttcaaatctagttacttgttcttctacagtacatcatcaaaagtcaaaaccatggactcgagatgttttggcttcttctttactttgttatctctaaatgtgattgttcttgcttacgatcctgacacacttcaagatctctgcgttgcggatcgcacttcagggataaaagtgaatggtttcacatgtaaacccgaatcaaacatcaccgcttcagattttttcttcgccggaatcggaaaacccgccgtcgttaacaacacagtcgggtcagccgtcacgggagcaaacgtagagaagatcgcagggcttaacacgctcggagtctcactcgcgcgtatcgactacgctcccggaggtttaaacccgccggacacgcatccacgcgccaccggagtgatcttcgttttngaaggcgagcttgacgttggattcataacgacggggacaagctctttcgctaagacggtgaagaaaggagaagttttcggcttcccaagaggnttnttcatttccnggaaaanaaggnaaagggaccggggtgggnatccttgggttaaaagtaatttcggggnaaaattnnttgnggccggtttttanncccccgggggttcgggnnnnttttannngggttttaat

SEQ ID NO: 88864 - DNA, 801 bp, Arabidopsis thaliana columbia
aggcgcctgccgtaccggtccggaattccccgggccgacccacgcgtccggtgattgttcttgcttacgatcctgacacacttcaagatctctgcgttgcggatcgcacttcagggataaaagtgaatggtttcacatgtaaacccgaatcaaacatcaccgcttcagattttttcttcgccggaatcggaaaacccgccgtcgttaacaacacagtcgggtcagccgtcacgggagcaaacgtagagaagatcgcagggcttaacacgctcggagtctcactcgcgcgtatcgactacgctcccggaggtttaaacccgccgcacacgcatccacgcgccaccgaagtgatcttcgttttggaaggcgagcttgacgttggattcataacgacggcgaacaagctcttcgctaagacggtgaagaaaggagaagtgttcgtcttccctagaggattgattcattaccagaaaaacaacgacaaagcgaaaccggcgtcggtgatctctgcgttcaacagtcaattaccgggaacacaatcgatcgccgccacgctattcacagccactccggcgattccggatcacgttttaacgacgacgtttcaaatcggaacgaaagaaatcgaaaaaatcaaatctaagtttgctcccaagaaagtctaaaaatcgcgtcgttatatatatatattttaaattttattaattggtttttaaattttaataaaggaaaaaataaaccttgttcattaaaaaaaaaaaaaaagggcggcccggtcttaaagatccaagcttacgtacg

SEQ ID NO: 88865 - DNA, 400 bp, Arabidopsis thaliana columbia
cggacgcgtgggcggacgcgtgggatcgccgccaacgaacccatcctttgcctgatctgggagcagattgccattctctacaccggatcgcttgaagaccgctctgatgccgccgcctcgctggtatctctggcccgtgacaacgatcgctacacgaagcttatcatagaggaaggaggtgtggtgcctctccttaaactgctcaaggaagggaagcccgaggggcaagagaacgcagcgcgtgcgttagggttactgggacgtgatcctgagagcgtggagcacatgattcacggcggcgcttgttccgtcttcggcaaattcctcaaagaagggcctatgaaagtccaggcggtggttgcgtgggctacgtcggagcttgtgtccaatcaccccaagt

SEQ ID NO: 88866 - DNA, 525 bp, Arabidopsis thaliana columbia
tcgaggtgttagtgatcggctacatcgagttccagcgcaacgccgagcttgattcggagaagcgtttataccccggaggcaagttctttgacccgctaggtttagcggctgacccggagaagactgctcaacttcagttagctgagatcaagcatgcacgtcttgcgatggtcgccttcttgggattcgcggttcaagcggctgcaacaggtaaaggtccactcaacaattgggctactcacctcagtgatccactccacaccaccatcatcgataccttctcctcatcttaaaatcattatcatgtgagattctatttgtaacttatgtaaaaacagagctatgatgatactgaatcgactttgggcttttgcttgtttggtttatttacatgtttggcccatgacattaaattgggcttctccttaattaataaaaaaaaaagagaataaacataaaaataaaaaaaaaaaaaaaaaaaaaaaaaaaaaagggggcggccgttttagaggatccaagcttacc

SEQ ID NO: 88867 - DNA, 983 bp, Arabidopsis thaliana columbia
  unsure (1)..(983): unsure at all n locations
gagaagtatagagaagtaatataaaggtagaaaaattggtatagatctaacggacggctaggatcttacaaagccagacataacccgaggaacaaagaaaataacccgcagaaacaccccacaagtattgcggatgggagaacgaggggaccgtttacaacgttacgaggacaagggtgaggcgaaagtttttccggtccacgttaaaaaaaaaaccactgggcgccaaaccaaaccccctcctccgggggtggccgaattttaaacaatggcacgccgggttccccatgaaaaccgcaatgggcccaccccattaaagttggtggccccctcnnnnnnnnnnnnnnnnnnnnnnnnnnnnnnnnnnnnnnnnnnnnnnnnnnnnnnnnnnnnnnnnnnnnnnnnnnnnnnnnnnnnnnnnnnnnnnnnnnnnatgaactctagcgctctacgactcactatttggaaagctggaccgcctgcaggtaccggtccggaattcccggggcgcacccgacgtccggttaggtttagcggctgacccggagaagactgctcaacttcagttagctgagatcaagcatgcacgtcttgcgatggtcgccttcttgggattcgcggttcaagcggctgcaacaggtaaaggtccactcaacaattgggctactcacctcagtgatccactccacaccaccatcatcgataccttctcctcatcttaaaatcattatcatgtgagattctatttgtaacttatgtaaaaacagagctatgatgatactgaatcgactttgggcttttgcttgtttggtttaaaaaaaaaaaaaaaaaaaaaaaaaaaaaaaaaaaagggcggccgctctagaggatccaagcttacgtacgcgtgcatggtacgtcatagctagtctatagtnnnnnnnnnnnnnnnnnnnnnnnnnnnnnnnnnnnnnnnnnnnnnnnnnnnnnnnnnnnnnnnnnnn

SEQ ID NO: 88868 - DNA, 599 bp, Arabidopsis thaliana columbia
cacaaaacccaattagccggagatggccgcaacatccgccgctgctgcagctgcttcttccatcatgggtactcgggtggctcccggtatccatcccggttcaggtcggttcacagccgtgttcggtttcggaaagaagaaggcagctcccaaaaagagtgccaaaaagacggtgactacggaccggcctctttggtacccaggcgccatttctcctgactggcttgatggttccttggttggagattacggttttaatcccttcggtttaggcaaaccggccgagtatcttcaattcgatatcgattcactagaccagaatctggctaagaacttggccggagacgtgatcggaacccgtacggaagctttccgacggcaaatcgacggcgttttaagccgtacaagtgaggtgttcgggaatccagagatttaaggggattcggaccttttccacgggcggttggcgttttttcgttaattttgggggttttttcgtcgggaatggtttcccggggttaaatggaaaacgttgaaagtgggtttaagtgatcgcctcttggggagcataactttttctgaattatgtgggtggtgtc

SEQ ID NO: 88869 - DNA, 1079 bp, Arabidopsis thaliana columbia
  unsure (1)..(1079): unsure at all n locations
aatcgatccaacggtcataatcgtctttccaagataggccagctccgaaactcacctccacgcatctataatcgtgtatcaagaaacggatctttcttctctatcttctgaatatcacaaaacccaattagccggagatggccgcaacatccgccgctgctgcagctgcttcttccatcatgggtactcgggtggctcccggtatccatcccggttcaggtcggttcacagccgtgttcggtttcggaaagaagaaggcagctcccaaaaagagtgccaaaaagacggtgactacggaccggcctctttggtacccaggcgccatttctcctgactggcttgatggttccttggttggagattacggttttgatcccttcggtttaggcaaaccggccgagtatcttcaattcgatatcgattcactagaccagaatctggctaagaacttggccggagacgtgatcggaacccgtacggaagctgccgacgccaaatcgacgccgtttcagccgtacagtgaggtgttcggaatccagagattcagggaatgcgaactcatccacggacggtgggcgatgctcgctactctcggcgctctctccgtcgaatggcttaccggcgttacatggcaagacgctggcaaggtggagcttgtagatggatcgtcctacttggggcagccattacctttctcgatctcgacattgatatggatcgaggtgttagtgatcggctacatcgagttccagcgcaacgccgagcttgattcggagaagcgtttataccccggaggcaagttctttgacccgctaggtttagcggctgacccggagaagactgctcaacttcagttagctgagatcaagcatgcacgtcttgcgatggtcgccttcttgggattcgcggttcaagcggctgcaacaggtaaaggtccactcaacaattgggctactcacctcagtgatccactccacaccaccatcatcgataccttctcctcatcttaaattaaaaatcatttatcaatgntgnganttcttatttngaaaccttaaggnnaaaaanaagggnntntg

SEQ ID NO: 88870 - DNA, 365 bp, Arabidopsis thaliana columbia
  unsure (1)..(365): unsure at all n locations
atatccgttttccgatttagggcaccaaattgaatcaaaatctccgcttcttcccaatttacgaaacttcacgaaaaatcttcttcggattcttcttaaccctttctctcaatttttcttccagagttttctaattgggcactgtttctcttcttcttcttcttcttcctccattgtaggcggtttcgcgtcttgtcaccgaatgatacattgtctcacgtgagattgtcagtcagttagtgcaatgtcaaaccttcattcatctctcaatggttcagcttcgaatttaccagatggttcgggcagatcgtttactgcttcttattctggacaatctggtgcaccgtctcnctcttttcatcata

SEQ ID NO: 88871 - DNA, 530 bp, Arabidopsis thaliana columbia
ggaagaggcttcgcttacttgctgagaaaaaagctccaaactttctcttattgggtttttgatcagctccggagataaaaaaaaaaagtattttcttgaaatcgaaatctgatctccattgagagtcttgctacttgatttggattccgatttaaggttttctcgagaattcttttgctgcagttattagattttgacgagccgttgatctggacggagttccagatctccgggtcgtggtaccaaggaattagggttttagcacaaagttctcgtttttctgtgtattcgagggatgaaggagttttcgggtcgatgttcgctgctctaacatttggagtatgaagatgaacatgaagaaatttctcaaaaagcttcgtatcacgcccaatcaacgagacgatggtgaaggttcagtctctaacagaagcaataagtctagtgatgcagaaccatctccttctgattcattgaggtctcaagataactctgaattcaaaccctttttgggtttatcaaattggttaagc

SEQ ID NO: 88872 - DNA, 1061 bp, Arabidopsis thaliana columbia
  unsure (1)..(1061): unsure at all n locations
nnnnnnnnnnnnnnnnnnnnnnnnnnnnnnnnnnnnnnnnnnnnnnnnnnnnnnnnnnnnnnnnnnnnnnnnnnnnnnnnnnnccacgcgtccgcccacgcgtccgaaaaaaaaaaaaaaaaaaaaatctttacttctttatataccaaagatcacaataatgtcacaatcatcaacaccgattcatcgtcatcttcaactcggtcttgatcttcgtctttctaccgacatctaatttgtttgtctgaagattcgtaaaaaaaatctctttgctttctattaaggaaaagaaaagtttgcgactttgattggtttcgatgaagcttcgacaaacacagggttttgtctgaatccttttggtttatttccgagagaatttgtgttttttactttaagggtttgaaagaagaagcaagaacataaatgggttgtgctggatcgacacagtctcaagcagatgggtcagtgaagaaaattaggaagccgaaaccgtggaagcatacccaaccgatcacgaaagctgagcttatgaaacttagagaagagttttgggacactgctcctcattatggtggtagaaaagagatatgggacgcacttcgcgctgctgcagaagctgacatatctcttgcacaagcaattgtggacagtgcaggagtcattgttcagaacacagatctcacagtctgctatgacgagagaggtgctaagtatgagctacctaagtatgttctaagcgagcctaccaacttggaggaagaaaattgatttaagatcaagaatattcgaaaagacaagaaaagaaaagaaccaaatgtaaatcttgtgtgtaagtagttacattaggattctctgcttttgtctatttaaacacttattaaaaagattgattcccacatctctctccctctgacttgtacttacttagattgcttctgaaatgctaaagacagttttttgggtttcaaaaaaaaaaaaaaaagaaaaaaaagggcggccgctctagaggatccaagcttacgtacgcgtgcatgcgacgtcatagctcgtctagagtnnaa

SEQ ID NO: 88873 - DNA, 617 bp, Arabidopsis thaliana columbia
  unsure (1)..(617): unsure at all n locations
cccacgcggccgcccacgcgtccgcccacgcgtccgcccacgcgtccgactctgtgagctttatccgcttccaatggcgtcttccgccgcttctccttccttatctctactctcattcacctcgaagccaccttatccctccggctctcagcggctatttgcgtcattcagaacggacggtcttttcgcgcctttaacactgaaatcccgacgcggccgtggtatagtcgttaaagtagatgacgtcgatgctgatggaggtggagcggacgagtatgatatggatgatgaggaggtagaggaagttgacaacaagaaggactatgatgtcgagtatgaccccttggccgccgcgatagccgctgcaggcggtggtggtgatggagatatcgcttttgttcagagtaagagttttatatcgacacaaggattgggattcggatatggtgggttgattatcggataaacgaagatgacgtttcataaactcagcttaattggacctgtnatttctttttcaggaaaacctcctgatccagataattantgttantnattttcagaggggntnntgtnncnccccggttacaggtttttnctcaattnccgggggtctt

SEQ ID NO: 88874 - DNA, 458 bp, Arabidopsis thaliana columbia
  unsure (1)..(458): unsure at all n locations
atgtatgccnnnnnnnnnnnnnnnnnnnnnnnnnnnnnnnnnnnnnnnnnnnnnnnnnnnnnnnnnnnnnnnnnnnnnccacgcgtgcggccagtactactcgtgatgtatctagtgcagtacatgccttcccttggcttctggctcatggacaaggttggaggaaagcgtgtggaggtcgcggaaaagaaaggcaacacatactcgtgggatttactgttcgggaagaagactaaaacaaactgaagctgattctctagaagatacacatagatgtggttggttgagccttagtccgtaaatgtggttggtgtttgtttgctagtttgattgttaaataactaccaaagcgtcgaaaaatgttttgttgccttgtgaggtgctcaataagtaagaaaagatgtgatcaaaaaaaaaaaaaaaaaaaaagggggggggcgttctagagggatcaagct

SEQ ID NO: 88875 - DNA, 609 bp, Arabidopsis thaliana columbia
taatacgactcacttagggaaagctcgtacgcctgcaggtaccggtccggaattcccgggtcgacccacaggtgcgcttcttctccactattttcaatggctttaacattgtcaaccacaaagaccttcactaacataaactgctcaaacaatacttccaacataaccacctttaagcctctcaagcttcctcttttctggccatggcaaaaggtcaaaatgggtcctttaagtgtttctcctatgggttttgggacatgggcttggggtaatcagcttctttggggttatcagacttccatggatgatcagcttcaacaagcttttgaattggctttggaaaatggaatcaatttgtttgatactgctgattcttatggcactggtaggcttaatggccaaagtgagagacttttggggaaattcattaaagaatctcaaggacttaaagggaaacaaaatgaagtagtggtagctacaaagtttgccagcttatccaggaggttaacttcaggacagtttgtgaatgcctgcagagcttctttagaccggcttcagatagaccagctcgggattggacagcttcactggtcaactgcaagctacgcg

SEQ ID NO: 88876 - DNA, 660 bp, Arabidopsis thaliana columbia
  unsure (1)..(660): unsure at all n locations
caacatggctagatccttgttgctctcgctaaccctcgcattcctcttcgccggaatggtctcagctcgtgactggaacatcctgagccagctcaaaggaaccacaaccaccacgaagactagccaaaccggcgtcacatctttgaaagctcccaacctaaacggatactgtgagagctggagagtcaacgtggagcttaacaacataagggactttaaggtggtgccacaggaatgtgtatggttcgtccaaaagtacatgacctcatctcaatacgaagatgacgtggagagagccgtcgatgaagccatcctctacctcggaaaaacttgttgcgagaagaagncatgcgattggcatggatgcttggttcttttgacattgatgacacttcttcttttcaacccatttcccttaccacaaggggcaacgggttgttttcgggtgggtgagcaactttccacggcccaaggttcgggggattggcaaaaatttgggnaaggaacccagcgggttccacacaattggggaagggttttccctgggtctagggggccggggttaaaggtttttttgacctttctccggaaggggttttagcttccccgtggaanttttgggcggtccnagtggtaccnctttggggngttnaaaantta

SEQ ID NO: 88877 - DNA, 455 bp, Arabidopsis thaliana columbia
  unsure (1)..(455): unsure at all n locations
gaattncccgggtcancccactgcngtccggtaaactcaacactggctagatccttgttgctctcgctaaccctcacattcctcttcgccggaattgtctcagctcgtgactggaacatcctgagccagctcaaaggaaccacaaccaccacgaagactagccaaaccggcgtcacatctttgaaagctcccaacctaaacggatactgtgagagctggagagtcaacgtggagcttaacaacataaggggctttaaggtgggttccacaggaatgtgtatggttcgtccaaaagtacattgaccttcatcttcaaatacggaggttgacggttggagaggagcccgtcggcttgaaagccaatccctttcccccggggaaaaactttttttcccggggaagaaggtcattncnggttgggnaattgnnttncttttggtttnttttgaaaattt

SEQ ID NO: 88878 - DNA, 876 bp, Arabidopsis thaliana columbia
gccggaattttcgggtgcgactccacccgtacgcgatgaagccatactctacctcggaaaaacttgttgcgagaagaagacatgcgatggcatggatgcttggttctttgacattgatgacactcttctctcaaccattccttaccacaagagcaacggttgtttcggtggtgagcaactgaacacgaccaagttcgaggaatggcaaaattcgggcaaggcaccagcggttccacacatggtgaagttgtaccatgagatcagagagagaggtttcaagatctttttgatctcttctcgtaaagagtatctcagatctgccaccgtcgaaaatcttattgaagccggttaccacagctggtctaacctccttctgaggggagaagatgatgaaaagaagagtgtgagccaatacaaagcagatttgaggacatggcttacaagtcttgggtacagagtttggggagtgatgggtgcacaatggaacagcttctctggttgtccagttcccaagagaaccttcaagctccctaactccatctactatgtcgcctgattaaatcttatttactaacaaaacaataagatcagagtttcattctgattcttgagtcttttttttctctctccctcttttcatttctggtttatataaccaattcaaatgcttatgatccatgcatgaaccatgatcatctttgtgtttttttttccttctgtattaccattttgggcctttgtgaaattgattttgggcttttgttatataatctcctctttctctttctccaaaaaaaaaaaaaaaaaaaaaaaaaagggcgtccgctctagaggatccaagcttacgtacgcgtgcatcatacgtgatagatagtg

SEQ ID NO: 88879 - DNA, 864 bp, Arabidopsis thaliana columbia
  unsure (1)..(864): unsure at all n locations
cactatagcgatagctggttcgcctgcaggtaccggtccggaattcccgggtcgacccacgcgtccgaaactcaacatggctagatccttgttgctctcgctaaccctcacattcctcttcgccggaattgtctcagctcgtgactggaacatcctgagccagctcaaaggaaccacaaccaccacgaagactagccaaaccggcgtcacatctttgaaagctcccaacctaaacggatactgtgagagctggagagtcaacgtggagcttaacaacataagggactttaaggtggttccacaggaatgtgtatggttcgtccaaaagtacatgacctcatctcaatacgaagatgacgtggagagagccgtcgatgaagccatcctctacctcggaaaaacttgttgcgagaagaagacatgcgatggcatggatgcttggatctttgacattgatgacactcttctctcaaccattccttaccacaagagcaacggttgtttcggtggtgagcaactgaacacgaccaagttcgaggaatggcaaaattcgggcaaggcaccagcggttccacacatggtgaagttgtaccatgagatcagagagagaggtttcaagatctttttgatctcttctcgtaaagagtatctcagatctgccaccgtcgaaaatcttattgtaagcccggttcccccacaagcttggtcttaacctcctttcggagggggaggaaggattgttgaaaaaggaagagttttgtgccattcaaaagnagttttttnggccantggcttcaaagnntttggnnccaaggttttgggggttatttggggnccaattgggccantttttttggttgccca

SEQ ID NO: 88880 - DNA, 515 bp, Arabidopsis thaliana columbia
  unsure (1)..(515): unsure at all n locations
atgatactccnnnnnnnnnnnnnnnnnnnnnnnnnnnnnnnnnnnnnnnnnnnnnnnnnnnnnnnnnnnnnnnnnnnnnccacgcgtgcgggaggatcaaagaagctatggcttccaatttctggacttcgacgcactacaaagagcttaaggacccacaagaggttaatgttgttcatcctcttgatgctcagagaggaatctctgttgaagatttcagactcattaagcttcatatgtctaattatatatcgaaactggcacaacacattaagattaggcaaagagttgttgcaactgcagtaacctatatgcgtcgtgtttacacaagaagagtttgacggaatatgagcctcggcttgttgctcctacatgcttggatttggcttgcaaagcaaaagagagtgtggtgcatgccaaacttcttgtcttctacatgananaactttatgcggatgaaaagtttccatttgagattaaagattttctggaaatggagatgaaggtcttggaac

SEQ ID NO: 88881 - DNA, 758 bp, Arabidopsis thaliana columbia
gcaaaaactctctatttctctttcgccggagataatgggagaagggaaggcctccactctggttttcatcctcgtcgtcgctcttagtttagtagccttcggcttctccatcgccgccgagcgccgccgcagcatcgggaaatctattcaagacccaataacaaacacaacgttctgcgtttatgactctgatgtagccactggttatggagttggagctttccttttcctcctctctagtgaatcattgcttatgagtgttaccaaatgcatgtgttttggaagacccttagcccctggaagtgaccgtgcttggtctattatctatttcatctcttcgtggatgacatttctggtagcagaagcttgtgtaatagcaggagcgaccaagaacgcataccacacaaagtacttaagttcgcaaaccttttcgtgtgcatcattgcgtaaaggaattttcattgcaggtgcagtctttatagttgctactatggttcttaatgtctactactacatgtattttaccaagtccgtctcttcgccgcctgctcacaaagccaaccgctctagttccaatattggtatggcgggttatgcataaatgtcaaaaagaggaaatggttagtcatttgcattgtagatgtaagaaaggaaagagattgttgcattgttacaacacttggttactcttatatcttttgcttatatatctcttacttatttatgaaaaaaaaaaaaaaaaaaaaaaaagggcgccc

SEQ ID NO: 88882 - DNA, 773 bp, Arabidopsis thaliana columbia
catcgactcacatagggaaagctggtacgcctgcaggtaccggtccggaattcccgggtcgacccacgcgtccgtacggctgcgagaccacgacagaaggggaattcagacacctgactcgtcttctcatcctacccccaattcaatattcgtcgccaatatgccgcaaagacactcgaagaacaacaatgatcttgcgtatttcacttacgacgagaagaagaagttaggttatggaactcagagagagagagattggggagagactcgatcaaaccctttgatgcttgttctctctgcttgaagcctttcattgatccgatgtgttgccataagggtcatgtcttttgcagagagtgtatacttgaatgtttccttgctcagaagaaagatatccaaaggaggcttgctgcacattcgtctcaaaagaagcaagataaggatgaagaagaagagaggctaatgttacaaaaggcgagagagctcgacgaatttgatcagcaaaaccatagtgcaatgcctcgaaacagtgacaagaatcacaacgaagataagaatggttttcatggggcaaacagtgtgaagacgacttcctttgaagaagaagcgcttaggacaatgaaagccttctggctcccatcagctacaccagcagcttcggtcagagtagatgctccagaaactcacacagtctgtccagagggcaaagagaagctcaagcttaagaacctctttgcaattcgtttcacagaagacaacagcgaagaggaaga

SEQ ID NO: 88883 - DNA, 523 bp, Arabidopsis thaliana columbia
  unsure (1)..(523): unsure at all n locations
atgattctccnnnnnnnnnnnnnnnnnnnnnnnnnnnnnnnnnnnnnnnnnnnnnnnnnnnnnnnnnnnnnnnnnnnnnnccacgggtgcgggatgtgaacacatcaaatgattttaacaccaatccaaaggagacagtggtattagatgagaactctatggaatctgaagattcatcgggtgaagtatacgaaaccgggtgtaatgaaattacttatgcaattgaggaggatgaagaagatttttcagagagggaatatgtcgaaaatgtggagaatttctctaacataacctctactcctctacggtcacagccagaaagaatgcagaaattggagtctcgagcaaaaacacaatgtgtgtttgaagatgaggatctgagtagtgacagtgacaacaaacttccagaagctgagacttcaaaagaaggaaatgggttgggagagggtcatgttgtatctaacctagtcgagtcttttgaaaagaaaacctcgcatggggttatggttgagtgtgatgataa

SEQ ID NO: 88884 - DNA, 957 bp, Arabidopsis thaliana columbia
  unsure (1)..(957): unsure at all n locations
nnnnnnnnnnnnnnnnnnnnnnnnnnnnnnnnnnnnnctgcaggtaccggtccgggattcccggttcgacccacgcgtccgtgggatactatcactctctcttgctccaagagataaccatgaagctcaggttcaatttgctcttgaacgtggaattcctgcgattctcgggatcatctctacgcaacgtctcccttttccttcaaatgcatttgatatggctcattgttcaagatgtcttattccctggacagaatttggtggaatctatttacttgagattcaccgtatagttcgacctggaggtttttgggttctttctggtccacctgtgaactataatagacgatggcgtggatggaacacaaccatggaagatcagaaatctgactacaacaagcttcagtcacttctaacctccatgtgtttcaaaaagtacgctcaaaaagatgacatagccgtgtggcagaaactctcagacaaatcttgctatgacaaaatcgctaagaacatggaagcttacccgcccaaatgtgacgacagtatagaacctgattctgcttggtacactccactccgtccttgcgtggttgccccgacacctaaagtcaagaagtctggtctcggatcaatcccaaaatggcccgagaggttacatgtcgcgcccgagagaatcggtgatgttcacggagggagtgcgaacagtttgaaacacgatgatggtaaatggaagaacagagttaagcattacaagaaagttttaccagctcttgggacagacaagataagaaatgttatggatatgaacactgtttatggaggtttctctgcggccctcattgaggatcccatttgggtcatgaacgttgtatcatcgtacagcgcaaatncgnttccggtggtcttnaatccngggnttatcggggccttncccangcntngntccgaaanttttnt

SEQ ID NO: 88885 - DNA, 688 bp, Arabidopsis thaliana columbia
ataagctgcagattctatctttttggttggatatgtctctgtttgaagttatatatttatagttttgaattcataggatgtggtgatacgtttgtaatctcgtgccatatctttggtttgtcaaagagagtgtgttttaatgtcaatttctgggtaaccaagtttgagcttattccttttgattctgcccggctctctgattttttaaggtgagattcctaagcatgtcaattactttttttttttttttaacattcgcaattttcttgagttggtgacgttttcgagattttgttgattagtgcaagacgacaagtgatgaaaagatagagacaaagaaaggcttcaagtttgttgataactgctgtctaaagagttcgttcccttgagagattctgactctgacagaagagttcccccaaccggaagagaaattcaaagatcagaaaacggtgaaagatgcgacgacgaccaggaattggaggattacaaaaggccgcagctgctagggatcagtaccggttactaggagaaaatgtagccaagttacggactgatatgatgaaagaacagctctccacgttccgttcccagcttgaagagttcgctcgtaaacacaagaatgacattcgtaagaatcctgccttcagggctcagttccatgaaatgtgtgctaacattggtgtgg

SEQ ID NO: 88886 - DNA, 353 bp, Arabidopsis thaliana columbia
gcaaatttctccgttcgagatcaattccgtcgagatctcaagctctctcactcgtagtaaaaaaatggcggcggtagcggcaccgatggcttcgaagccccgcggttctaaagctgaatcgttcgtagacaacaagcggagagaagatatccgattcgcgaacatcaactctgctcgagccgtctctgacgccgtccgtactagtttgggaccgaaaggaatggacaagatgatttccacggcgaacggagaggtaatcattactaacgatggagctacgatccttaacaagatggaggttttgcagccagcggcgaagatgttagtcgagctttccaaatctcaagattcag

SEQ ID NO: 88887 - DNA, 728 bp, Arabidopsis thaliana columbia
  unsure (1)..(728): unsure at all n locations
nnnnnnnnnnnnnnnnnnnnnnnnnnnnnnnnnnnnnnnnnnnnnnnnnnnnnnnnnnnnnnnnnnnnnnnnnnnnnnnnnccacgcgtgcgagaaaaaagagaaaaaaatagtgaatcaagctgtctcgtagcagtctttatagatcaaacgataatcgaatccaacgacccattttttttttttttgggctctgatttcgtctctctttgttcttttcaccttttttttttgttttggttttgtctcttccgtttcattttgtgtttcttcaatctgatctaaagcttttgtctgaaaaaaagtgtcagactttctatgaagatgttgttggtcaatgggtgatttttagtttgtgttaaagcagaagcataagattacttggtgaatcgattacaattttgatttgattcagatatttgaagggttcttactagaatttgaattggggatctttgaattccgatcaggcttttagagaggtagggaacattgaattgagatctggggcaacttttggttttgttggggattagttgttttaagagatcgaagaaaggaggaaactttttgattcggtaaccatggatcgagtggttggtggtaagcctaaagcttggacgtgatactaggaagttggtacctcttggaggactttttctatgatgttatatgtcaatgctgtaaaaaaagtttctaatattcttgtaccttttgtagctagccag

SEQ ID NO: 88888 - DNA, 907 bp, Arabidopsis thaliana columbia
  unsure (1)..(907): unsure at all n locations
nnnnnnnnnnnnnnnnnnnnnnnnnnnnnnnnnnnnnnnnnnnnnnnnnnnnnnnnnnnnnnnnnnnnnnnnnnnnnnnnnnnccacgcgtccgggcaatttggcaattacacagaactcacatcctcttcaaattagatttgggagtatcgatgttgtgaacgagacatcaagtggttcgttggctgttgaaaatagtgatgccgagttgagtggttcaaatcttgtggatgagatatcaaagggctctttggccgatgaaaatggtgatccagagctggatggtgctgttagctctgttggtaacagatcaacccagggatgcaacatggtccaccttgaacagatcattgaagatgccaaaagtaacaagagaaccttgttcactgtgatggagtcgattatgaatctgatgagagaagttgaacttcaagagaaggaggcagaaaaggcaaaggaagatgctagtataggaggctttgatactcttgacaaggtggaggagctgaagaagatgctggaacatgcgaaggaggcaaatnacatggctgctggagaagtttatggggagaggtcaattttnaccactgaagttaatgagcttgaaaatcgcttgatcagcttatcagaagaacgagacaactctctctctgttcttgatgagatgcgtgtagatcttgaaataagactagcgacacttttggggntaaaaaatnctgctnagcanggaaaacaggnaaangaagggtctttcacgcaaggcattttctgaaccaagnagcggtccatgggtgagggttttcccagnntcccaaggtttttccagcaggngggcagtgggaanctccncngnttccggggggttcccnttgggtccatgggccggntttttttggttnccctccaa

SEQ ID NO: 88889 - DNA, 612 bp, Arabidopsis thaliana columbia
  unsure (1)..(612): unsure at all n locations
tgattctgccnnnnnnnnnnnnnnnnnnnnnnnnnnnnnnnnnnnnnnnnnnnnnnnnnnnnnnnnnnnnnnnnnnnnnnnccacgcgtccgggacagttgaagatacaatacgaatgttcatcttcgcttgtggatgtgaccgagcttgaaaaccaagtagagagtctggaagctgagctcaagaagcagtccgaagagttttcagagtctttgtgccggattaaagaacttgaatcacaaatggagacattggaagaagagatggagaaacaagctcaggtattcgaggcagacattgatgctgtcacacgtggtaaagtggagcaagagcaaagagctatccaagccgaagaaactctaaggaaaacgaggtggaaaaacgctagtgtagcaggaaaactccaggatgaattcaaaagactctctgagcagatggattcaatgtttacatcaaatgagaaaatggctatgaaagcgatgacagaagctaacgaattacgaatgcagaaacgtcaactagaagaaatgatcaaagacgctaatgatgagctccgagcaaaccaagccgagtacgaggcaaagctccacgagctttctgaaaagctgagtt

SEQ ID NO: 88890 - DNA, 894 bp, Arabidopsis thaliana columbia
  unsure (1)..(894): unsure at all n locations
nnnnnnnnnnnnnnnnnnnnnnnnnnnnnnnnnnnnnnnnnnnnnnnnnnnnnnnnnnnnnnnnnnnnnnnnnnccacgcgtccgcgggatgaagtatttagaacgtgctgagctcaccaatttcactttccaaaatgatattctcaaaccgttcgttattatcatgcggaatactcaaagtcagaccataaggagcctaattgttgactgcatcgttcagatgataaaatctaaagttggaagtatcaaatcgggatggaggagtgtttttatgatatttacagcagctgcagatgacgaagttgaatcgatagttgaaaaatcatttgagaatgttgagcaagttattctggaacactttgaccaggtgataggtgactgcttcatggattgtgtcaattgtctcatcaggtttgccaataacaaagcttcagaccggataagcctgaaagctattgcccttctcagaatatgtgaggatcggcttgcagagggactctatacccggtggtgttcttaagcccgttgatggcaatgaggatgaaacttttgatgtgacagagcattactggtttccgatgcttgccggtctatctgatctcacatctgattataggcccgaagttagaaactgtgcttggaaggtgttgtttgatttgctaaatgaaaggggaaacaagttcttcacacctttctgggagagtatcttccattcgatcttgtttccaatttttgatcatgtgagtcatgctggaaaggaaagctaatatcttccggggatggtaaatttcgtgaaacaagcattcatttcctttcagctctctgcatctctttcttnnantacgggnttcaangnagggnttgtttnttnnctgccnccnctttaaangttt

SEQ ID NO: 88891 - DNA, 846 bp, Arabidopsis thaliana columbia
  unsure (1)..(846): unsure at all n locations
tgatactgccnnnnnnnnnnnnnnnnnnnnnnnnnnnnnnnnnnnnnnnnnnnnnnnnnnnnnnnnnnnnnnnnnnnnnnnccacgcgtgcgcgtgactcttcttcaattcgaagaatcttttaaaccctaatcctctttctcgcttcatttctctcaaatctaacttcctccctaaattatctccgagatcgatcactagtcacaccttgaagctcccatcttcgtcaacctcagctttaagatccatttcctcttccatggcttcttctttcaaccctgaacaagctagagttccctctgctcttcctctcccagctcctccgttgaccaaattcaacatcggattgtgtcagctatctgttacatctgacaaaaagagaaacatctctcatgctaaaaaagccattgaagaagctgcttctaaaggagctaagcttgttctcttacccgaaatttggaacagtccgtattccaatgatagttttccagtttatgcggaggagattgatgcaggtggtgatgcttctccttcaacggcaatgctttctgaagtttccaaacgtctcaagattacaatcattggtggatctataccagaaagagttggagatcgtttgtataacacttgctggtggcttttggttccgttggagagctaaaaagctaagcattcgggaggtaccatttttttgatattagacaattccccggggaaggttaccttttacttggggtcccaaaaactcttactgctggagagacaccaacaatcgttgacacagatgtaggggcgtttggaataggcatctgttatgatatcaggttccagggagtagctatgata

SEQ ID NO: 88892 - DNA, 958 bp, Arabidopsis thaliana columbia
  unsure (1)..(958): unsure at all n locations
cccttgagccatccctttcnttgcacccaggttgnccctggncctttntnccccccagggaggaagaagggattcttttgaccaccattagggttccagngtnttcggaangcgngncgnnccaatgctgacnagcaactgctcggaggncncnttgaccccattaagtctattgtcccctcgaagcctctggttctctcacttggtctcaaagatcattcttcggagacgttgaaggaaatagtagcgncagtgattgagaatcncctttggtaatacatattgttgtccatgttaaaaggagaacgagaagatgttttatgttttagtcttggttgatataattagcatggagttgtggaatcttttcttgtttatactgaaaacattgtttttgagataaaagttaacaacaagtacacatttttttcacacagaaacataattaaacaatagtattttgtttacatagcatatcataaaacacaaataagtaaaaaagaaaagtggggaaaacttccccaaaaataagaaaatcactgtagtagttgtcacataatataaacctgtcaaacaaattacacccaatagaaatataaagcacacaaatcttctctatttcttctttttgccttgaaagggaattttgtgtttttttaactcaagatccccagttgtatctctcagccttgtctcgatggcttttgagactcaatcatttctgtgtgttaatgcgttcaactgattctccaactgcccatttttctgcttctgtttctttagttcttctgttaggctggaaaagctttgttgtagtagctggctgggccggaggtccccccccgggggttcaggggggcngcaaanggaacggggnggcnaggggncaggtgntggaaggntnccagattggtagccaaacncccggggaaatttgggaaccgccnatntgggggtt

SEQ ID NO: 88893 - DNA, 800 bp, Arabidopsis thaliana columbia
gagacgaaggcgtttccggttctcttctctcgtcggagttctgaggtaaaaaaagaataaggagaagaagaaaagcaaaagcataaaagagagtagcaaagactgagaatggaaagcttggacactaattttcctgtgcgccatagaaaggtctcgtttgaaagtaagggaaacaagacagagattgtgatctgcagctatgaagatcatatccttatcatagcaacacagattggtgccatgggaactatattgcacgcaaggaaggaagaagggatgtctgttgaaccaacatttagtgtttcagtgatattcggaaagcgagacgagccaatgctgacagcaactgctcgaagactcattgaacacataagttctattgttccctcgaagcctctggttctctcacttggtctcaaagatcattcttcggagacgttgaaggaaatagtagcgccagtgattgagaatcgcctttggtaatacatattgttgtccatgttaaaaggagaacgagaagatgttttatgttttagtcttggttgatataattagcatggagttgtggaatcttttcttgtttatactgaaaacattgtttttgagataaaagttaacaacaaggacccatttttttcccccagaaacataattaaacaaaaggattttgtttaaaaaaaaaaaaaaaaaaaaaaaaaaaaaaaaaaaaaaaaaagggcggccgctttagaggaacccagcttacgtacgcgtgcatgcgacgtcatagctcttctataggacacgcaatccaaccgggg

SEQ ID NO: 88894 - DNA, 387 bp, Arabidopsis thaliana columbia
tctgcaggtccctggtctttcatgattttgttgcaaagtgcctcacaaaggaaccacgtcttcgcccaactgcagctgagatgcttaaggtaactataatagtcttctgcatgtacgccagagatcgttagtatgtgtatctcaatactctcttttttccttcttacttttttcttttcagcttaactgtaactctatcttgtcaatactaggatatcttcagctttagttgtcagaattaccatcactttcatagctggcatgcaatttagtgtttatattctctgtgttcttctaatgccatttactctttcgtactaaattcagcacaaatttgttgagagatgtaaaactggggcttctgcaatgtcgccaaagattgagaag

SEQ ID NO: 88895 - DNA, 2795 bp, Arabidopsis thaliana columbia
aaattatttgtcatcattaattttaacgacgagacgcattactctttgcctgactctctttctctctctcccggcgacgacggtttagagtcgccatagatggatcataactcgccgaaatctcgtcggagccggaaaccggagcccaaacctgacatatactccactttcgtagtccactccgactctgattctgatcaaggtcgagatcgagacaaacgtaaagccaaacctgaggaagacgaaaatgtcgatttatacgctacaatggtctacaaaggcgatagtgacggagaaggagaggaagatgatgatgacgattctatgcttcctcctcttctcaagcgtcttcccaaggatttcggaggcggcgcgtcgctcgattacgacgacgacgacggtgatgaatctggagatttcggtacgatgattgtgaaaacagatcggagtagtcatagtaagaagaacagtccgtactcgtccaaaccgcgaatgggagttagtcctaggaggagagcgagaggcggagatgaggaatcttctgatgaagaagacgaagaagaagatgatgatgacgacgacggagactacggtacgtttgttgtgaaatctaaggataaaaagggaaagaagaaagacaaggagattgatatgacaactatgggaagagctgttgcgagtatgcagaaatcaaattttggtggtaagactcggaaattggatccttcctcttcttcttcgaaacttcacggtgaagataatcggaaaatgcagcagcaaaacagtaagatgtcgactacgtctcttccggatagcattactagagaagatccaaccaccaaatacgaattcctcaatgaacttgggaaaggatcatatggatctgtatacaaggcaagagatttgaaaacatcagagattgttgctgtgaaagtcatatcacttactgaaggggaggaggggtatgaagagatccggggagaaattgagatgctgcagcaatgtaatcatcctaatgttgtccgctacctagggagttaccaaggagaagattatctttggatagtgatggagtattgtggaggtggaagtgttgctgatcttatgaatgttactgaggaggcgttagaggagtatcagatagcatatatatgtcgggaggcgttgaagggccttgcatacttgcactcaatatataaagtccatagagacattaaaggtggaaatatcttgttaactgaacaaggagaggtcaagttgggtgactttggggttgcagctcaacttactcgcactatgtcgaagcgaaacacgttcattgggactccacattggatggccccagaggttattcaggaaaatcgttatgatgggaaggttgatgtatgggctcttggtgtttcagctattgagatggcagaggggctccctccaagatcatcagttcatccgatgagggttttgttcatgatatccatcgagccagctccaatgctcgaggataaagaaaaatggtccctggtctttcatgattttgttgcaaagtgcctcacaaaggaaccacgtcttcgcccaactgcagctgagatgcttaagcacaaatttgttgagagatgtaaaactggggcttctgcaatgtcgccaaagattgagaagtccagacaaatcagagctacaatggctctgcaagcgcaaagtgttgtcgcaccttctttggaggacacttcaacactgggtccaaaatcaagcgaggagcttggaattactgttccatctaaacctcctcaaaattcgaccgaagcacctctaaccagcaccctgaatcggcagcatattactggcaacactgtgttggctggagaaggtggtgacttcggaactatgatcgttcatggtgaggatgagacagaggagagtgactccaggtctcagcttgtcagagaaaaagaatcttcatcttctcagtttgaaggtgttcctcgcgaattcccaggagaagaattacctgactcatggatacatgacaaaaagaagcctccggctattgatcttccagttgaagcttcgatttcacagagcatgcaggcaagttcatctcatgagcatagaaccaagctacataacatagctggaacacagatggaaggtggcagtgatgcaagtggtagtaccttgaaaaatgaaactgttggcaggaaagcttttgctttgcaagataagttatggtcaatctacgcagctggaaacacagtaccgataccgttcttgagagcaacagatatatccccaatcgcactcttgtcagagaacatgatcggaggcatgcaacaagatgggaatggaactgtagccgtcgaagcacttcaggagctcttcacttcttctgatccccaatccaaaaagggccgacgtggacaaaacgagatgcctcttcctccaagcgtataccaaagactgacaacaagctcttctctgatgaaccttgcacaagttttagcctaccacagagcgtgttacgaggaaatgccgctgcaggaattgcaagcaacgcaggagcagcaaaccattcagaatctgtgcgatactcttcgcactattctccgcctctaaatagtcttgtgttcatatctgttgctactcttgtattagtataggtcgtctcagcaagtacatgtttattttcctagaagtttttattaaaaaccaatcaattttgtctcctcttagcacaattgctagaagattgaatggaacaaacggattttgtaacactcgtataaatagtatccccttag

SEQ ID NO: 88896 - DNA, 523 bp, Arabidopsis thaliana columbia
  unsure (1)..(523): unsure at all n locations
atgannnnnnnnnnnnnnnnnnnnnnnnnnnnnnnnnnnnnnnnnnnnnnnnnnnnnnnnnnnnnnnnnnnnnnnnnnnnnnccacgcgtccgatttttatgcgatttgcactaggtgggaagaacagtacggatagatctttgataacagaaataatgtgttgggtttcacagaatccacctccagctcatctcttccttatctctagtgatagcgatttcgcgaatgtgctacatagattgaggatgaggaattacaacattttgctcgcgtgctacgaagaaacgacgcttggtgtattgtgcagtgctgcttcgattatgtgggattgggatgctttagttagagggcaaaatccaactgctaaacattttaatcagccacctgatggtccttatcattcttggtatggtcactatacaactcctcttcttgacccatttgccacatctaccaataataagcagatatcttctactagtgtcaaaaccgtagagttgctccaattgggttcttctaagt

SEQ ID NO: 88897 - DNA, 400 bp, Arabidopsis thaliana columbia
atcccaaggaaggctcttgtgatattactcttaagctaccacattctcttcctcgtattttcccatcagatcaagaaaatatggaaggttaccatacatatcgtgggggattctggaattacttcagcttgggaatggatgctcaagtatcttatgcatttcattcccagagaaaactgcacccggaaaggtttaaaaatcagctagttaatcagagcacatatctaaagcttagttgcacacaaggatggttttttgcctctctttttcacccttcttcacaaaacatagctaagcttgcaaaaattcagatttgtgatagaaatggccaatggaatgatcttcatattccccaaagcataaggtccatagtatgtgtgaatcttcctagtttttctgg

SEQ ID NO: 88898 - DNA, 890 bp, Arabidopsis thaliana columbia
  unsure (1)..(890): unsure at all n locations
gaaatcgacctctccggcgactcgagtcaccgaacctcctcctgctgctacttcatctcttcgagcacaagctcctccgcttcctacatctgcagatcagagatcagctgagttaccttcgcctgctcagacagctcagatgactgcgcctccgtcgacagttaccacagatccgtcgtccaggggaagaaagcgagcgctggaagcgaatcttcagatcgagagctccaactactacaagatgcgtctccttgtcaaagatcttcgccctcacgttctcgaggttttacgaactccagacttgaggaactctaaggcagttatcgagattcaagagaagatgaagcttatgcttcaactgtacgaagagatgattggagagtctcccaaacgtgagaaaacagctaagagcgactctttatccaacggaaaggcgactactactactactactactactagtgtactgagatcatctgaaactgagaagcacagctctgatggagatggcgacaaggtggttggagggtcggcatttggctggaacttcataacctctggagggccaggcactgaacctgtttattctggaatgtcaaaggaagaatacagaagctctcacccaattatgcaagtggaggcagagcttgagttgcccaacacattctaagctttgttagtggtgtttgtataatattattcactttggtatccgttcatcccaatgttttatatgtatcaactgaaacaatggattagcttctacccatgaagccttaattagtacacaatatgcttaacaaaaaaaaaaaaaaaaaagnnnnnnnnnnnnnnnnnnnnnnnnnnnnnnnnnnnnnnnnnnnnnnnnnnnnnnnnnnnnnnnnnnnaac

SEQ ID NO: 88899 - DNA, 659 bp, Arabidopsis thaliana columbia
  unsure (1)..(659): unsure at all n locations
cgagaatacgacagaacggggattcgaagctgcagagaacgcgaaacagtgagagagacagagagaagatatagagatgggtgtggagaagcaagtcatcagacccggcaacggtcccaaacccgctccgggccaaaccgtcaccgtccattgcaccggattcgggaaagatggtgatctatcccagaagttctggagtacaaaggacgagggacaaaaacctttctcgttccaaatcggtaaaggtgctgtgatcaaaggatgggatgaaggcgttatcggaatgcaaattggagaggttgctcgcttgcggtgctcatcggattacgcatatggcgctggtggatttccggcatgggggatccagccaaactctgttctcgactttgaaatcgaagtactgagcgtgcagtaatgatctccccagctcctaaactgtgggtagattattaaacaaccctttatgtttattgcttctgggatctttatgcaacaaaaactttgtgatgtcattgctcttctaaaactcttggacaacgtttttatctaaataaaacaaaagacccgtctcgtgtttccagttggnaatgtttgtacctatattatgatattgttcccgttttttattttnnnnnnnnnnnnnnnnnnnnnnnnnnnnn

SEQ ID NO: 88900 - DNA, 645 bp, Arabidopsis thaliana columbia
accacgcgtccggcttcctagagcaaaggagaaaaaaaatggtgaactatgtgctcaaaatcaccgctgatctcgagaatctcactaatctccagccttccggtggctgcgacgattccaacttcccttacctcttcaagttgaaatgtgaaagatgtggagaggtgactccgaaagaaacatgtgtgactttgaatgagacttttactcctccgggaggtaggggtacttgtcatcttgttcagaagtgtaagttctgtggaagggaagggaatgtgactatgattccgggcaaaggtcgacctttaactctggaagattctgaggctggagaacatgcccctcttatggtgtttgactgtcgtggctatgaacccattgatttcggatttggtggatattggaaagctcaagctgaatctggaaccaaatttgatgagattgatttgtcgagcggggaggaattcacagagtacgatgagaagggagaatgcccagtaatgatatcgaatttccgtgcaagcttcagcgtcaccaagtgaagttggtctctgttgtctattttctgattccctacacacttggtgtatgtaaaaaccatggggattatcatttctcaagttctaataaaattctctttttact

SEQ ID NO: 88901 - DNA, 589 bp, Arabidopsis thaliana columbia
  unsure (1)..(589): unsure at all n locations
nnnnnnnnnnnnnnnnnnnnnnnnnnnnnnnnnnnnnnnnnnnnnnnnnnnnnnnnnnnnnnnnnnnnnnnnnnnnnnnnnnnccacgcgtgcgcgtttaaggatttgctcttctgatatgtgagtcttctcaagagacttgccgatctttttctcccacaaggtgaccatttcgttcatcgataaaatgttgttaggaggactaatgtagagggttttgttcagagtccttagatcatccaccgccttgatcatgaggaacatttttgtcgccaaagatgatggccttgtctctagtatgagaaatgagaccagactcgaactgaagtaacgtacgcaagtaaaaaccggcagagcaattgctaacaacgtaagtgtatggtattccttcagcttcaatggctctcctgatctgtaccttccctgcaaataatgattttgccggctcaaccgcactggtcctctcaacgtctatcccaaactcagccggcaagaatctctgcaaagcaaaaactataaatctagtttggatcaaataccaaccttgacgttaccagcttctttaatggcggaaatgatcttggtttga

SEQ ID NO: 88902 - DNA, 483 bp, Arabidopsis thaliana columbia
  unsure (1)..(483): unsure at all n locations
nnnnnnnnnnnnnnnnnnnnnnnnnnnnnnnnnnnnnnnnnnnnnnnnnnnnnnnnnnnnnnngaagcaaaataagagggaatattaagatgacatcttctatggtctcttccatggctctctttctccttcttcttcttgtgtttccgcatatggataaagcccttggcgcacaagaggaagcccagaaacaaaggattcctcgtttcagatgttctccacgaatccccttttgtacaaatccaaacctaccttctcctccgccccacaggtctttcaaaggcacactcgaacctggtcattgacttcactctagcttcgaatgcgtgtgaacgtgtgcatgtttcttacattgtgctttggtttgtggtttctatccttgtttatctttgcatgtgtttgtcatattttacagttttatcggaaccgtcgcttgaataaataaatttgcatgtccttttatgtttaaaaaaaagtataaaa

SEQ ID NO: 88903 - DNA, 542 bp, Arabidopsis thaliana columbia
ttaggtgcactatagaagagctatgacgtcgcatgcacgcgtacgtaagctcggaattcggctcgagcacaaaagaaaaaaacacaagtttcctgattcctctcttctctgcgattttagctctagggatcgatttcggcgtcaaacgtcgtcgttttcgaccatctcctacttactactactcagctgcttctgccttctagggttctttctccgttcaccctccgccgcacgagttgtccagctccgccgcattcttctgtctcccagatcaccggctttaagcaaatccggctgcttttcactctaattcgtaaaccacttgtgggatttgagcatcttttacattctccaaaatctctgctttctagggttttgtgagttttggtgggatgagtagtgtgttcagtgatcagatcctgattgataagctcgctaagctcaatagcagtcaacagtctatcgaaactctgtcacattggtgtatattcaatcggagcaaagcagaattgatcgttacgacatgggagaaacagtttcac

SEQ ID NO: 88904 - DNA, 528 bp, Arabidopsis thaliana columbia
  unsure (1)..(528): unsure at all n locations
cnnnnnnnnnnnnnnnnnnnnnnnnnnnnnnnnnnnnnnnnnnnnnnnnnnnnnnnnnnnnnnnnnnnnnnccacgcgtgcgggcttggtagactaaagaatgtagccggaaatgtgaatcagagttttgttcagtgcctccatttctgaggtatgggaagtactgtggactactttacagtggatgtcctggtgagagaccttgtgatggtcttgattcttgttgcatgaaacatgatgcttgtgtccaatccaagaataatgattatctaagccaagagtgtagtcagaagttcattaactgcatgaacaatttcagccagaagaagcaaccgacgttcaaaggtaacaaatgcgacgctgatgaagtgattgatgtcatctccattgtcatggaagctgctcttatcgccggcaaagtcctcaagaaaccctaactatttatatatattctcctatattgccaaggtacaatgggttcccctttttttccccctcagggacatttgtcttaatttatcaaaatac

SEQ ID NO: 88905 - DNA, 802 bp, Arabidopsis thaliana columbia
ctcaaacccaatcttccgccgcataaaccgaccatcatcgcctcctccgtatctccgcctcttcctcctccacgtcgcaaccacctcctccgccgcgatttcctctccctggcggcaacatccacgcttctaacacaatcgattcagtttctagctccggcgccggtctccgccgctgaagatgaagagtatatcaaagatacgtcggcagtgatcagtaaagtaaggagtacgctttcgatgcagaagacagatccgaatgtggctgatgcggtggcggagtgagagaagcgtcgaattcttgggttgccaagtaccggaaagagaaagctcttctcggaaaagcttctttccgggatatatactcggcgttgaatgctgtttcaggtcattatgtgagttttggtccgacgggttccgattccggcgaagaggaaggcgaggattcttgaagagatggaaacttctgagaaagctctcacaagagggagatgaaaaaactgcagtcaggccttcttctccattttcttgttgatgaaaattttattttcctaaaaatgccaatcgaattatatgagaagagaaacttgaattggctcgcctgctttttttttttcattcctgtaaaatacttaatgttctgcatgataattgcttaattatcattatcagagatacttatataacttatatcgaattccattttctcaaaaaaaaaaaaaaaagggcggccgctctagaggatccaagcttacgtacgcgtgcatgcgacgtcatagtctatctatagttcgtctcaatt

SEQ ID NO: 88906 - DNA, 809 bp, Arabidopsis thaliana columbia
tctatacgattcacttagggcaagctggtacgcctgcaggtaccggtccggaattcccgggtcgacccacgcgtccgtccagagttccgacaatggcttcagcatcagcgacagctactcttctcaaacccaatcttccgccgcataaaccgaccatcatcgcctcctccgtatctccgcctcttcctcctccacgtcgcaaccacctcctccgccgcgatttcctctccctggcggcaacatccacgcttctaacacaatcgattcagtttctagctccggcgccggtctccgccgctgaagatgaagagtatatcaaagatacgtcggcagtgatcagtaaagtaaggagtacgctttcgatgcagaagacagatccgaatgtggctgatgcggtggcggagctgagagaagcgtcgaattcttgggttgccaagtaccggaaagagaaagctcttctcggaaaagcttctctccgggatatatactcggcgttgaatgctgttaaaggcattatgtgagttttggcccgcgggctccgattcggcgaagaagaaggcagggttctcgaaaaaaggaactgctgaaaagctctacaagaggagaagaaaaaccgcagcgggccctcttctcattttctggtgatgaaattttttttccaaaaaggccaaccgatttttgagaaagaacctgaagggctccccgcttttttttcttcctggaaaaaccaatggccggcggataacgcctaattcatttcagaagaccttttaccctatggattcctttcccaaaaaaaaaaaaggggg

SEQ ID NO: 88907 - DNA, 471 bp, Arabidopsis thaliana columbia
  unsure (1)..(471): unsure at all n locations
tgannnnnnnnnnnnnnnnnnnnnnnnnnnnnnnnnnnnnnnnnnnnnnnnnnnnnnnnnnnnnnnnnnnnnnnnnnnnnccacgcgtcgcggcgaaagcaaaactgccgataaaagttcgttaactcggaagctgaagcatgatgttatcgaaggagtgaatcaacttattcaagagattgctggttgtcatgagcagatcgctgaacaagctatagagcatatacatcaaaatgaggtgatcctaaccctgggtagctcaagaacagtgcttgagtttctgtgtgctgcaaaggagaaaaaaagatcttttcgtgtatttggtgccgaaggtgctccaagatatcagggccatctattagcaaaagaattggtagctagaggtaagcagacaactgtgatgaccgactctgcagtgcttgctatgatatctcgagtgaatatggatataattggagctcatgcagtgat

SEQ ID NO: 88908 - DNA, 521 bp, Arabidopsis thaliana columbia
  unsure (1)..(521): unsure at all n locations
nnnnnnnnnnnnnnnnnnnnnnnnnnnnnnnnnnnnnnnnnnnnnnnnnnnnnnnnnnnnnnnnnnnnnnnnnnnnnnnnnnnccacgcgtccggaaaaaaatcagaagaaacaacagcaacaaggtcattttcttcttcttcttcatcttgtgatttgtttattgtttatgttctcttctagagatttgcgtcttattttgtaaaaaccaaagcttttctttttcataaatataatttatttcaacacttgcttactgttttttctctgtgaaaattgtcacggatccttcgtttttttttatatactcatagcaaaaataatctcatccccagatttcttacccatctatctatcttcttctctgtctcttaagggttctgggttttagctgcttgggttttatttggtttcgtttctcacttattggtttgtcttttccaagaacaggaacagtgaaaggttcggttttttgggtttcgatctgataatcaacaagaaaaaagggtttgatttatgtc

SEQ ID NO: 88909 - DNA, 317 bp, Arabidopsis thaliana columbia
gggccccccctcgaggtcgacggtatcgataagcttgatatcgaattcgcggccgcctcgcccaatgaagggtatgcttactggtcccgtcaccattctcaactggtcctttgtcaggaacgaccagcccaggcacgaaacctgttaccagatcgctttggccatcaaggacgaagtcgaggatcttgagaaaggtggaatcggtgtcattcagattgatgaggctgcacttagagaaggactaccactcaggaaatccgagcatgctttctacttggactgggccgtccactccttcagaatcaccaactgtggac

SEQ ID NO: 88910 - DNA, 422 bp, Arabidopsis thaliana columbia
gtttctttgaaggtcaagtgaagatgcactcaagattggaggaagaagaagaagctaaagcagctctaatgagtagaatccaaaagcttacaaagctcatacttgtctctaccaagaattctattcctggatatttaggtgacacaccagctcattctcgcagcatttctgctggtcaagatgataagctagactctctgctcttggatagtgataatctggcatctccatcttcgactctctctctagcatcagatgcgcgacggtcttccagcaagtttaaggatgaaaactctccagttggtctcaacctcctgctctcttctccacaccgctgttgatcttatcaatgagactaagcttgatgatgaaatcaagtcatggttggcgtttgctgcccagaaggtcgttgaagtgaacgc

SEQ ID NO: 88911 - DNA, 574 bp, Arabidopsis thaliana columbia
gtgaaattcgaagagcgaatcaaagaggaagaagaagaaggaggaggtatagcaatgggggtcgattattacaaggttcttcaggtggatcggaatgcgaaagacgacgacttgaagaaagcttatcgcaaactcgccatgaagtggcatccagacaagaaccctaacaacaaaaaagacgccgaagccaaattcaagcagatctccgaagcttacgatgttttgagtgatcctcaaaagagagccatctatgatcaatatggagaagaaggtctaacaagccaggctccgcctcccggagcaggcggcgggttttcggatggaggggcttcgttccggttcaacggtagaagcgcagatgatatcttctcggagttctttggcttcacaagaccatttggtgactcacgtggtgcaggtccctctaatgggttccggttcgcggaagacgttttctcgtcaaatgttgttccaccgaggaaagctgcccctattgagagacaacttccttgtagtttggaagatctctacaaaggagtcagtaagaagatgaagatctctcgggacgtcctcg

SEQ ID NO: 88912 - DNA, 865 bp, Arabidopsis thaliana columbia
  unsure (1)..(865): unsure at all n locations
actacgactcactactgggaaggctgaccngcctgcaggtaccggtccggaattcccgggttacccacgcgtccgagaacattgagtgagtgagagagagagagagagagaagatgggggttgatttctataaggttcttgaagttgatcgaagtgctaatgacgacgagcttaagaaagcttatcgcaaactcgccatgaaatggcatcctgataagaaccctaacaacaaaaaagaagccgaagctaaattcaagcagatctctgaagcttacgatgttttgagtgatcctcagaaacgagcaatctacgagcaatacggagaagaaggtttaaaccaagccccacctcccggcgccggtggtggctatcctggaggatcagacgccggagcttctttccggttcaatcccagaagcgctgatgatatcttctccgagttctttggtttcacgaggccttcttttggtacgggaagcgactcacgcgcaggaccttctggctttaggtatggcgatgatatcttcgcttccttcagggctgctactaccggaggagaagcctccattccttctaggaaatctgctcctattgagagacaattgccttgtagcttggaggatttgtataaaggtgtctccaagaagatgaagatctctcgtgatgttcttgactcttccgggaggccaacaccggttgaggagatcttgacgatagaaattaaacccggttggaaaaaaggaacaaagataaccttcctggaaaaaggtaatgagcatcgtggagtcataccatccgatctcgttttcatcgtagacgagaaaccgcatcccgttttcaaacgagacgggaatgatcttgtggt

SEQ ID NO: 88913 - DNA, 514 bp, Arabidopsis thaliana columbia
accacgcgtccgagaaatgacacagagcccaacgatgatgtatctcgtttattttcgctataaataaactcacacagcccactcttcttcctcgctctctctttcgccttctcttagcctaccctttttccttcctcctctccgattcttcctccgtcagtaaaagaacattcaaaatggcttcacacattgttggataccctacgtatgggccctaagagagagctcatagtttgcattggaatctttctgggatggtaagagcactgctgaggatcttcagaaggtgtctgctgatctcaggtcatccatctggaaacagatgtctgccgctgggactaagttcatccctagcaacacctttgctcactacgaccaggtgcttgacaccaccgccatgctcggtgctgttccacctaggtatggatttacactggtggtgagatcggcctcgatgtttacttctccatggctagaggaaatgcctctgtgcctgccatggagatgaccaagt

SEQ ID NO: 88914 - DNA, 898 bp, Arabidopsis thaliana columbia
  unsure (1)..(898): unsure at all n locations
ctcgactcacttagggaaagctcgtacgcctgcaggtaccggtccggaattcccgggtcgacccacaggtccgcccacgcgtccgggaacatctgggccaacgactttgctgcgtccctaagcaccttgcaggcacttgaaggcattgttggtaaagacaagcttagtggtctcaacctcctgctctcttctccacaccgctgttgatcttatcaatgagactaagcttgatgatgaaatcaagtcatggttggcgtttgctgcccagaaggtcgttgaagtgaacgctttggccaaggctttggctggtcagaaggacgaggctcttttctctgccaatgctgcaggtctggcttcaaggaaatcttccccaagagtaaccaacgaagggtgtccagaaggctgttgctgctttgaagggatctgaccaccgtcgtgcaaccaatgttagtgctaggctagatgctcagcagaagaagctcaatccttccaatcctcccaaccacaaccattggatccttcccacagaccgtggaactcaggagagttcgccgtgaatacaaggccaagaaaatctntgaagaggattacgtcaaggccatcaaggaagagatcaagaaagttgttgacatccaagaggaccttgacattnatgttcttgttcacggagagcctgagagaaacgacatggttgagtactttggagagcaattntnaggtttcgcattcacagcaaacgggatgggtgcaatcctatggttctngctgtgtgaagccaccagttatctatgggtgacggtgagcccgccccaaagccaattncaagnctttctggtccttaaacaggtnannggattgcccaanggtccaatnnaggggttttntttaaagggcccgt

SEQ ID NO: 88915 - DNA, 665 bp, Arabidopsis thaliana columbia
  unsure (1)..(665): unsure at all n locations
aaaaccgggccgacccaagcgtccgttactttaaagccattaatgtaagagattttgtattagacgccgacctccaagaggaacgggacggctatgttcttgtccacggagagccaaanagaaacgacatggttgagtactttggtgagcagttgtctggtttcgccttcactgcaaacggatgggtccaatcctatggatctcgctgtgtgaagccaccagttatctatggtgacgtgagccgccccaagccaatgaccgtcttctggtccgcaacggctcagagcatgacctctcgcccaatgaagggtatgcttactggtcccgtcaccattctcaactggtcctttgtcaggaacgaccagcccaggcacgaaacctgttaccagatcgctttggccatcaaaggtcgaagtcgaggacctcgagataaggcggtatcggtgtcattcagatcggtgaggccgcacttaggagaaggattgcctcttaggaaagccggacaatntttttanttttggactngggctnnttcactttttcaggatttaccaacttttgggncccaangnaagccttncagtttcacaacncaaaaggtntttncttaaattttaanggtttttccccctnaanttttttnaaagggcgggttttntannccc

SEQ ID NO: 88916 - DNA, 642 bp, Arabidopsis thaliana columbia
  unsure (1)..(642): unsure at all n locations
nnnnnnnnnnnnnnnnnnnnnnnnnnnnnnnnnnnnnnnnnnnnnnnnnnnnnnnnnnnnnnnnnnnnnnnnnnnnnnnnnnnccacgcgtccgcccacgcgtcccctaccctttttcccttcctcctctccgattcttcctccgtcagtaaaagaaaatcaaaatggcttcacacaattgttggatacccacgtatgggccctaagagagagctcaagtttgcattggaatctttctgggatggtaagagcactgctgaggatcttcagaaggtgtctgctgatctcaggtcatccatctggaaacagatgtctgccgctgggactaagttcatccctagcaacacctttgctcactacgaccaggttcttgacaccaccgccatgctcggtgctgttccacctaggtatggatacactggtggtgagatcggccttgatggttacttctccatggctaagaggaaatgcctctgtgcctgcccatggaaatgaccaagtgggtcgacaccaaataccattaaacgtcccngaagtnggccctgaggtnaattcnctangganccanaaggggngatggtcangggncaaggcttgggtaaacggcccgaatgttgccacctnatggggtcaaggggnagt

SEQ ID NO: 88917 - DNA, 856 bp, Arabidopsis thaliana columbia
  unsure (1)..(856): unsure at all n locations
aaantnaaaacccccccngtnnntgtncnttnccccttgggggnaggccaaaccgcccngnttaaggaanttctttnccgcacaggaaagtaaaccccgggttggaaaaaaaagggaaccagagattacccttccatggaaaaaaaggttaatgacccatccggtggaggcaataccatcccgatctcggtttttcatccgtagacgagaaaccgcgtcccgttttcagaacgagacgggaatgatccgtgtggtaatgcatgagattctctctagtggatgctctcacaggttacaccgcacaggtcactactcttgacggaagaaccttaacagttccggtaaacaatgtgatcagtccgtcgtacgaagaggtggtgaaaggagaaggcatgccgatccctaaagatccgtcaagaaaaggaaacttgagaatcagattcatcatcaagttcccttcgaagctaaccactgagcagaaatcagggatcaagcggatgttatcaccttgaatgtccaaagattgaagcatctcgtttcagttttttcaatctgctagcttttttggaatcttttagaagcagaatatgtgcttatggtttttttaatttattttggttgcattttggtaaggtttttaagggncatcttcctaccagcagaaccggtttagttagtaatgactgccgactagtgaagtaaagtctctccttatatctctatgctaaaagcttcaatatttgtttaatagtaaacattgtccacagatttggaaagactaaatcaacgtttatcacaaaaaaaggattatcccccccnaaggaaggccgctctagaggatccaagcttacgtacg

SEQ ID NO: 88918 - DNA, 2796 bp, Arabidopsis thaliana columbia
  unsure (1)..(2796): unsure at all n locations
ctaatacgactcactatagggaaagccggtacgcctgcaggtaccggtccggaattcccttgtcgccttctcttagcctaccctttttccttcctcctctccgattcttcctccgtcagtaaaagaaaatcaaaatggcttcacacattgttggatacccacgtatgggccctaagagagagctcaagtttgcattggaatctttctgggatggtaagagcactgctgaggatcttcagaaggtgtctgctgatctcaggtcatccatctggaaacagatgtctgccgctgggactaagttcatccctagcaacacctttgctcactacgaccaggttcttgacaccaccgccatgctcggtgctgttccacctaggtatggatacactggtggtgagatcggccttgatgtttacttctccatggctagaggaaatgcctctgtgcctgccatggaaatgaccaagtggttcgacaccaactaccattacatcgtccctgagttgggccctgaggttaacttctcttacgcatcccacaaggcggtgaatgagtacaaggaggccaaggctcttggtgttgacaccgtccctgtacttgttggcccagtctcttacttgctgctttccaaggctgccaagggtgttgacaagtcattcgaacttctttctcttctccctaagattctcccgatctacaaggaagtgattaccgagcttaaggctgctggtgccacctggattcagcttgacgagcctgtccttgttatggatcttgagggtcagaaactccaggcctttactggtgcctatgctgaacttgaatcaactctttctggtttgaatgttcttgtcgagacctacttcgctgatatccctgctgaggcatacaagaccctaacctcattgaagggtgtgactgcctttggatttgatttggttcgtggcaccaagacccttgatttggtcaaggcaggtttccctgagggaaagtacctctttgctggtgttgttgatggaaggaacatctgggccaacgactttgctgcgtccctaagcaccttgcaggcacttgaaggcattgttggtaaagacaagcttgtggtctcaacctcctgctctcttctccacaccgctgttgatcttatcaatgagactaagcttgatgatgaaatcaagtcatggttggcgtttgctgcccagaaggtcgttgaagtgaacgctttggccaaggctttggctggtcagaaggacgaggctcttttctctgccaatgctgcggctttggcttcaaggagatcttccccaagagtcaccaacgagggtgtccagaaggctgctgctgctttgaagggatctgaccaccgtcgtgcaaccaatgttagtgctaggctagatgctcagcagaagaagctcaatctcccaatcctaccaaccacaaccattggatccttcccacagactgtagagctcaggagagttcgtcgtgagtacaaggccaaaaaggtctcagaggaggactacgttaaagccatcaaggaagagatcaagaaagttgttgacctccaagaggaacttgacatcgatgttcttgtccacggagagccagagagaaacgacatggttgagtactttggtgagcagttgtctggttttgccttcactgcaaacggatgggtccaatcttatggatctcgctgtgtgaagccaccagttatctatggtgatgtgagccgtcccaaggcaatgaccgtcttctggtccgcaatggctcagagcatgacctctcgcccaatgaagggtatgcttactggtcccgtcaccattctcaactggtcctttgtcaggaacgaccagcccaggcacgaaacctgttaccagatcgctttggccatcaaggacgaagtcgaggatcttgagaaaggtggaatcggtgtcattcagattgatgaggctgcacttagagaaggactaccactcaggaaatccgagcatgctttctacttggactgggccgtccactccttcagaatcaccaactgtggagtccaagacagcacccagatccacactcacatgtgctactcccacttcaatgacatcatacactccatcatcgacatggatgctgatgtcatcaccattgagaactccaggtctgatgagaagcttctttccgtgttccgtgaaggagtgaagtacggtgctggaatcggtccaggagtctacgacatccactctccaagaataccatcttctgaggaaatcgcagacagggtcaacaagatgcttgctgtcctagagcagaacatcctttgggttaaccctgactgtggtctcaagacccgtaagtacaccgaggtcaagcctgcactcaagaacatggttgatgcggctaagctcatccgctcccagctcgccagtgccaagtgaagaaaagcttgatttgaacaaggaaacgtttttttttctctaaaatggttgtgttttatttggtttaataactttcttaaaaatatttttagtcgaaggtagatttgatgcatatggtttctttcttgttgagagagagaaaggctatagcatcctttggatttgatgcaatgtttgtgattttctttttgtctccaatatatttctctgatggaatgtcttttttctaaagtatcttgaaaaggaataagaggattgattcttatacaaaaaaaaaaaaaaaagggcgcccgctctagaggatccaggcttacggacgcgtgcgtgcgacgtcatagtcttctatagtgcacctnnnncattc

SEQ ID NO: 88919 - DNA, 409 bp, Arabidopsis thaliana columbia
agtaaataatcgggatcaattgtagaagagctcatcgagaaaagagagaacctaaactttaaattcaattctgtattgttctcaaactcgaacccgaaactttaaatccttccttatttgttttctggagttcttgtttagaactgttttggatttgttttttttgaggagatgctttagttaactaggtttgcttcgagctgatcgctgtgtggcataaaccctaatttcgtggaaactgtgctcttttagaaccggtccagtgagtaagggaatccaattggtgaagatgccgcaagttaagatcattgctaaaaatttcatggacatggtggcgtcacttccagccatcaagcttgacaaactctacaacaatgtctttatctgcgaagccattctcaggtctttg

SEQ ID NO: 88920 - DNA, 671 bp, Arabidopsis thaliana columbia
  unsure (1)..(671): unsure at all n locations
cacacgcgtccggagaagaataagattaaagttactctctcggtgtgggtatgacgacgaattgacttaaaattttcgttagtcatcttttgtcaatttcgtttcaatcatttttgacacaaaaagtatggaacttcaagtccttgttcttcgtccaatcttcttcttcttcttcttcgtcttcttgacaattctacaacaatcctcttctgctcgggttcttacaatcaccaagcctgatagacatgactacgccgcaagtgctcgttggcttgtctctcagaattcttggggtgttcttagcacactatccgttgatcataaaggcgctcccttcgggaatgttgtatcgtttagtgatggtttacccgagaaaggtaacggtataccttacttttacttaacaacacttgatccaactgcaagaaacggacttaaagnccagagagcttcacttgcaattagtggatctcctcttgggacttgtacaagngntccaatgaatcctntttgctctaaactaaccctacccgggaggttctgatattggaggagggtctnnggnagcagaagtagccaaaaagggttntttcaaagnatncagggttgtggttgcctaggccagnttncgttttaactgggcacggnanttcnacaatggtnggggngnc

SEQ ID NO: 88921 - DNA, 592 bp, Arabidopsis thaliana columbia
  unsure (1)..(592): unsure at all n locations
gcccccncgggatntgnccggttnggggggntncccgggaaggntccggtccccttcttttcnttccacncttggcccacttnaagnacccncttaaaggcccggngggctccccttgcatttgggaacccccnctgggacttgtccagggntcccaatggacccntccttgctctaacttaccccttacccgggaagttgctggatattggaaggaggatctggggaagcagaagttagccaaaaaggctttattcacaaagcatccagagatgatggattggcctaaggatcatgattcccgcttctttaaactcgagatcatcgatatatttctcatcaattggtatggtggagctaaacctatcactgtagatgaataccttcatgccaagtcgtaagtacattgcgtgaacccttttaaaaacatcggatcaaactcgcttcctttttataataactcacaagaatcaagcaaatggtgaagcaagaaaatgtatattggatgaacaataaaaagtgtgtaactgtttctgtaaataactctttgttttggaccataatagatattaaaatctcttgtaaattaccg

SEQ ID NO: 88922 - DNA, 967 bp, Arabidopsis thaliana columbia
  unsure (1)..(967): unsure at all n locations
cccgccggnaccggnccggaanncccgggttgacccaggcgggggaacccctgcgagagacgacagaagggggacacaaagggggnggaacnncaagncccggggcnncggccaancnncnncnncngcttctttgtcttcttgacaatgctacaacaatcctcttctgctcgggttcttacaaacaccacgcctgccagttttgactgatgccgcaagtgctcgggggcttgtctctcagaaaacccgccgcgttctgagggcacgggggcgcgatcataaaggcgctcccttcgggaatgttggtatcgttgagtgaggggggtacccgagaaaggtaacggtatcccttacttttactttacaacacttgatccaactgcaagaaacgcacctaaagaccagagagcttcacttgcaattagtgaatctcctcttggaacttgtacaagagatccaatgaatcctacttgctctaaactaacccttaccgggaagttgctgatattggaaggaggatctgaggaagcagaagtagccaaaaaggctttattcacaaagcatccagagatgatggattggcctaaggatcatgatttccgcttctttaaactcgagatcatcgatatatttctcatcaattggtatggtggagctaaacctatcactgtagatgaataccttcatgccaagtcgatcaaactcgcttcctttttataataactcacaagaatcaagcaaatggtgaagcaagaaaatgtatattggatgaacaataaaaagtgtgtaactgtttctgtaaataactctttgttttggaccataatagatattaaaatctcttgtaaattcccccgnnnnnnnnnnnnnnnnnnnnnnnnnnnnnnnnnnnnnnnnnnnnnnnnnnnnnnnnnnnnnnnnnnnnnnnnnnnnnnnnnnnnnnnnnnnnnnnnnnnnnnnnnnnnnn

SEQ ID NO: 88923 - DNA, 899 bp, Arabidopsis thaliana columbia
  unsure (1)..(899): unsure at all n locations
nnnnnacgcgcaannnnnnnnnnnnnnnnnnnnnnnnnnnnnnnnnnnnnnnnnnnnnnnnnnnnnnnntccacgcgtccgcccacgcgtccgtacggctgcgagagacgacagaagggggacacaaaaagtatggaacttcaagtccttgttcttcgtccaatcttcttcttcttcttcttcgtcttcttgacaattctacaacaatcctcttctgctcgggttcttacaatcaccaagcctgatagacatgactacgccgcaagtgctcgttggcttgtctctcagaattcttggggtgttcttagcacactatccgttgatcataaaggcgctcccttcgggaatgttgtatcgtttagtgatggtttacccgagaaaggtaacggtataccttacttttacttaacaacacttgatccaactgcaagaaacgcacttaaagaccagagagcttcacttgcaattagtgaatctcctcttggaacttgtacaagagatccaatgaatcctacttgctctaaactaacccttaccgggaaagttgctgatattgaaggaggatctgaggaagcagaagtagccaaaaaggctttattcacaaagcatccagagatgatggatnggcctaaggatcatgatttccgcttcnttaaactcgagatcatcgatatatttctcatcaattggtatggtggagctaaactatcactggagatgataccttcatgccagtcgatcaactcgcttcttttttaatactccaaaatcangcaatgggaagcagaaaagatttggatgacaataaagggtgactgttctgaatactcttgtttgacctataatattaatccttgaattccccgaaaaaaaaaaaaaaaaaaaacggcctttaagac

SEQ ID NO: 88924 - DNA, 1537 bp, Arabidopsis thaliana columbia
tacacttccccacgcgtccgacacagcgagacgaagaaaatcgagatctcgaataatgcgaatctgaaggatctttacgaattccataatcttcagatcgaaaggtttctatcgattcgttggtcaagaggagattgtgcgtgtgattcgtgagcatgggctgttcgttttcaggattgaacgcactttacgacgccgtcaacggtggaggtgacgtatggatcaatgagaatcgattcaggatcgtgaggcagctcggcgaaggaggtttcgcattcgtctttttggtcaaggaaattgtcgccgacgcttcctccgccgcatccggtggtggtctagctaagaaagtcaaggatccggctcatctctccgctgacggaacttatgctatgaagaaagttttgattcagaacaaggagcaattggaattggtgcgtgaggagatccgtgtttcttcattgttcaatcaccctaatttgcttccactccttgatcatgccattatttctgttaaggacggccaagagggagcttggaaacacgaggccttcttgctgtttcctgttcacttggatgggaccttgctggataatttcactttgatgaaggctaaaaaagaaactttctcaacaactgatgttttgcacatattccgtcagctttgtgatggacttaaacacatgcactctctggagccaccatatgctcacaacgatgtcaaacctggcaacgtccttttaacacgtagaaaaggacagcctcctcttgcgatattgatggactttggaagtgctcgcccatcacggaagcaaatccgttcccgtcaagaggccttacagttacaggaatggacatctgagcattgctcagcaccgtttcgagctcccgagctctgggattgcccaagccatgctgatattgatgagagaacagatatctggtcactaggctgcacattatatgcaataatgtatggtgtgtctccattcgagtatgcgcttggagaatctggtggaagtcttcagcttgcaatcgtgaacgctcagatcaaatggccaaacactggaccaaaagcttcttaccctgaagctcttcaccagttcgtaacttggatgctgcaaccacaagctgctgttcgaccgcgcatagacgatatcatcatccatgtcgacaaattgatcgctaaattcaccaaatgattcccgaattatgttggttttcaaaaaaaggtgaaaggaaagaaaagaagactctttatacattgctttgtctctttttttttctaatatccttagctgttttcaaaaatcccatattagatacatatatttaatagtattacattgctcttcgtaatgtattttgaactttttaggattcggggttttctttttgactatggaagttgtgaacccataaatttacttaaggcagtatatctcgtaggtgtcctaaatctggtccaaaaaaaaaaaaaaaaaaaaaagggcggccgctctagaggatcccagcttacggacgcgtgcaagcgacgtca

SEQ ID NO: 88925 - DNA, 437 bp, Arabidopsis thaliana columbia
tgtttatattttcaaaaagcaaatcgagttattttctctctcaattcatcccaaaccgtcgtaaccattctctttcgtttcgtttcgtttcttctcttttaaaaacctttcttcgaaaagatgacgatctctgttgagaagccgatttttgaagaggtttctgcattcgagaagagtggggacaatatcggagagttgaaattggacggaggattttcgatgccgaaaatggacaccaatgacgacgaagcttttttggctcctgagatgaatgcatttggccgccaattcagggactacgatgttgagagtgagaggcaaaagggcgtcgaagagttttacagattacaacacatcaaccaaactgtcgactttgtgaaaaagatgagggctgaatatggaaaattagataaaatggtgatgagcatttgggaatg

SEQ ID NO: 88926 - DNA, 992 bp, Arabidopsis thaliana columbia
  unsure (1)..(992): unsure at all n locations
cggcaggaccgggttcggatttccggggtcgacccacgcgtccgcgcagattcacataggagggaaggtaccaggtactgttaaaactgaaccaagggccctctctgttctctctgcttatctttccacaaggaccatcacgccattcagataagaggatcatcatatcacgatgttataggagggtcggagattcagaagtttctggacataacaggagttcagacatatgtgatcaacagtgctaaggttgtgttcttgaacgagagacctcagcctcgaccaggcaaaggtgtgatcaatacttgagaagtctgttatcgaagcctcgttgattccttcagattctgctctcttggttgcaaagatcttctggaatatcgaagaagaagagaagggaatggacgaacaattctttcggattctgatgattcgtatagcagtacgagtatcggaaggctcaagaagaatgatgacattatgaataatagtttcacaccatcaacaccgcctttatcagccgtgaatcgtcgaattgcaaagcgaaggaagggaatcccgcatcgtgctcctttcggaggactaatcatagaatactaagaaatggtaatgtatagtcttatgctaataaccatcactagtagtttcggggtacatatatgtatatatatatatatctataatggtatataaagcaatgtaaaataaaagcttaacatcatagtattgtgtagatattaaaggggtaaaaaatgttgggaagatgatagaatgaggcatgaaatgaatacttgtgcctgtatattttgagctcaatggacaaatatgtaaatgtagaatagtgttgtggacaagacaatagtgataagtatgtgatgaatgtgaatggaataaaggtcatttaaaaaaaaaaaaaaaaagnnnnnnnnnnnnnnnnnnnnnnnnnnnnnnnnnnnnnnnnnnnnnnnnnnnnnnnnnnnnnnnnnnnnnnn

SEQ ID NO: 88927 - DNA, 917 bp, Arabidopsis thaliana columbia
actgtctgtcctcactctctttcctctttctctcactaaagaaaaaactagcgatcgaagagaatcatcatcaagaagctactatcagagaaatcaaagccctacaacacaagaatcaacatgggagctgaagaagaaaccaataagacatatcctcattggctaaaacctctgctacgagaaaagttctttgtacaatgcaaattacacgcagattcacataagagtgaatgtaacatgtactgtttagactgttccaatggtcctctctgttctctctgcttatctttccacaaagaccatcacgccattcagataagaagatcatcatatcacgatgttataagagtgccggagattcagaagtttctggacataacaggagttcagacatatgtgatcaacagtgctaaggttgtgttcttgaacgagagacctcagcctcgaccaggcaaaggtgtgatcaatacttgtgaagtctgctatcgaagcctcggtgattccttcagattctgctctcttggttgcaagatctctggaatatcgaagaagaagagaaaggaatggacgaacaatctttcggattctgatgattcgtatagcagtacgagtttcggaaggctcaagaagaatgatgacattatgaataatagtttcacaccgtcaacaccgcctttatcagccgtgaatcgtcgaatcgcaaagcgaaggaagggaatccccgcatcgtgctcctttcggaggactaatcctagaatactaagaagtgggactgtatagtcctatggctaataaccatcactagtagtttcggcgcaccatatatgggttatacaatatttaacctataacgggattctaaaagccaactgtccaaataaaaagcttcaaccttcattaggcattggggtagcatc

SEQ ID NO: 88928 - DNA, 532 bp, Arabidopsis thaliana columbia
  unsure (1)..(532): unsure at all n locations
nnnnnnnnnnnnnnnnnnnnnnnnnnnnnnnnnnnnnnnnnnnnnnnnnnnnnnnnnnnnnnnnnnnnnnccacgcgtgcgggcacgcgtccgcttccaggaagaacagacaacgagatcaagaacttatggaacactcatttgaagaaacgtcttttatctatgggtcttgatcccagaactcatgagccattaccttcatatgggttagctaaacaagctccatcttcaccaacaactcgccacatggctcaatgggaaagtgctagggttgaagctgaggcaaggctttctagagaatcaatgctctttagcccttctttttactctggtgtagtaaaaactgaatgtgatcacttcttacgcatttggaattccgagattggtgaagctttcaggaatctcgctccattagatgaatcaactattactagtcaaagcccttgctcgagggcaacatcgacctcatctgcacttctgaagagctcaacaaattcttggggagggaaagaggttactgtggcgattcatg

SEQ ID NO: 88929 - DNA, 1180 bp, Arabidopsis thaliana columbia
gagagtctcaaaaattaaaccaacaaatttaaagatgaattgcttgatagctatagctctttcagtctctttctttcttgtgggaattgttggaccgatccaagctcaattgcagatgaatttctatgccaattcttgtcctaatgctgaaaagattgttcaagattttgtttcaaaccacgtttctaatgctccttctcttgctgctgctctcattagaatgcatttccatgactgttttgtccgaggttgtgatggatcagtgcttataaactcaacgtcaggaaacgcagagagagacgcgactcctaacctaacggttcgagggtttggcttcatcgacgcaattaaatctgtgcttgaagctcaatgccctggaattgtctcttgcgctgatattatcgctctagcttctcgcgacgctgtcgttttcaccggaggaccgaattggagtgtaccgaccggaagaagagacgggaggatatcaaacgcagcggaggcattagccaacattcctcctccaaccagtaatatcaccaatcttcagacactctttgcaaaccaaggacttgatcttaaggacctcgttttactatccggggctcacactattggtgtatctcactgctcgtctttcacaaaccgtctctacaattttacgggtcgtggaggccaagatccggctttggacagcgagtacgcagccaatctcaagtctagaaaatgtcctagcctcaacgataacaagaccatcgtagagatggatccagggagccgcaaaacatttgatctaagttattaccagctcgtactcaagcgtagaggtctgtttcaatcagactctgctctcaccactaaccccacaacactttcaaacataaaccggatcttgacgggttcggtggggagtttcttctctgagtttgccaagtcaatggagaaaatgggtcggatcaatgtcaagactggttcagctggagtggttaggaggcaatgttccgttgcaaatagttaaggggtggaaatgtaaaagatttgggagcttgtgggggtagttgtgataataattaataaggatgattgtgaatttatgatgtggccttttgggatttgtgtgtatggattttgttacagacttcgtcaataaagaaataaaaagattttactgcttaaaaaaaaa

SEQ ID NO: 88930 - DNA, 787 bp, Arabidopsis thaliana columbia
  unsure (1)..(787): unsure at all n locations
cccccctcgatgtcgacggtatcgataagcttgatatcgaattcgcggccgcgcggtcgcgggagattgaacaagacgatgcagcggcggagacggtggattcctccaccgttaaattcggtacaccggaagcactggagtatgtacggtcgctcacggacgttggcgcaatgacacgtcttcttcacgaatgtatcgcttaccagcgaagcttagactcagatctcgacacgcttctatcgcagcggacggagcttgatcggaatctcgttcagcttcagagatcggcggagattctcgatatcgtgaaagcagatgcagatcacatgctcggaaatgttcgatcgacttgtgatctcgcggatcaagtcagtggcaaggtacgagagctcgatcttgctcaatctcgtgttaatgttactctctcccggcattgacgcgattgttgagcgagggaattgcatcgaaggcgtgaagacttgctttggaatcccgaggattaccgaatcctgctggcgaaatttgtacaagagatttcccccagaattgatttgcaggnccaagggatcttgggtcccggtcaagaaccgaacaagcttcaacgcggccgaaaggngggaacctttaaagggaattcccnaanaannaaccccnttnggaggnaaatggccnngggggggnancccacaaatttttgggacccggggngctggatncccccctggggattgggncaaaaagggnnaacgttttnggtgggncccnttaaaaaggnnantccggtttc

SEQ ID NO: 88931 - DNA, 805 bp, Arabidopsis thaliana columbia
cgccccccctttgaaaacccgtagtgaccactgcggcccccccttgtggtcgactgtatcgataagcttgatatcgaattcgcggccgcggcggcggagacggtggattcctccaccgttaaattcggtacaccggaagcactggagtatgtacggtcgctcacggacgttggcgcaatgacacgtcttcttcacgaatgtatcgcttaccagcgaagcttagactcagatctcgacacgcttctatcgcagcggacggagcttgatcggaatctcgttcagcttcagagatcggcggagattctcgatatcgtgaaagcagatgcagatcacatgctcggaaatgttcgatcgacttgtgatctcgcggatcaagtcagtggcaaggtacgagagctcgatcttgctcaatctcgtgttaatgttactctctcccgcattgacgcgattgttgagcgagggaattgcatcgaaggcgtgaagactgctttggaatccgaggattacgaatcttgctggctgcgaaatttgtacagagatttctccaaggattgatttgcagtacaaggattctggttccgatcagagcgaacagcttcacgcgtcgaaggagcagcttgaaggtattgcgaagaagaagctcttggcagcaatagaccagagagatcatcctacaattttgagattcgtgagactgtattccccactgggaatggagacagaaggtctacagctttacggtggttactttgaaaaaggtcattgcgttgagaggcaagatggaatattgaaaatgttgctgagc

SEQ ID NO: 88932 - DNA, 402 bp, Arabidopsis thaliana columbia
ggtatcggtaccggtgttaggaaaatcaatccgtccaattcataattaatggcgaccaccggcgcggcggccaccaccgagattggcaatccagaatataaacagcctcgatcgatatttgacttgacggcggatttctttgactcgcgtcggctgtcgaatccttcggagactcaatcggcattcggaccacccaaaactttcgatccagaggaggcggaggaggataagagttccaaggacggcgtgattttggacagatggacctgtaatacttgtaaaattgagttcctgtctcttcaagatcaacgctaccacttcaagtccgatattcatcgccttaacatcaagctgagtgttgctggcaaggctatattaaaagaggaagatgttgatgagttg

SEQ ID NO: 88933 - DNA, 652 bp, Arabidopsis thaliana columbia
  unsure (1)..(652): unsure at all n locations
atgannnnnnnnnnnnnnnnnnnnnnnnnnnnnnnnnnnnnnnnnnnnnnnnnnnnnnnnnnnnnnnnnnnnnnnnnnnnnnccacgcgtccggttctcttggattcacgtggatgacttggtgaacttaatttacgaggccctcactaatccatcttataaaggagttattaatgggactgcgccgaatccggttaggcttggggaaatgtgccagcagctaggcagtgttcttagccgaccatcgtggctaccagttcctgactttgcactcaaagctttgctcggagaaggtgccactgtagttctggagggacagaaggtattacctgtaagagccaaagagcttggttttgaattcaagtataaatacgtgaaggatgcactcagagccattatgcaataaggtgacacacataagcatctttgtaaaattggttttgatcacagaaaatccccagaaaaacaagatattcttttcttttcgtctctatatctttctttttgagtaaaactcgagaaatgtatttatggtaaaaagtgttttcggtgttatctcagaaaccagagatcccagatgtgttgaggatattataactcagacatagcatctttctcatctnnnnnnnnnnnnnnnnnnnnnnnnnnnnnn

SEQ ID NO: 88934 - DNA, 585 bp, Arabidopsis thaliana columbia
  unsure (1)..(585): unsure at all n locations
tgatactccnnnnnnnnnnnnnnnnnnnnnnnnnnnnnnnnnnnnnnnnnnnnnnnnnnnnnnnnnnnnnnnnnnnnnnccacgggtgcggggatttcaaacaaacctttaccagctcttctacagcacggagagattcgtcggagatagcaaacatggagaagaaacgcgaaggagtaatcgaaggaatgagtcggatcgtatcagatccttactacttcctccatttcatggcctttttctcttacctcccgattcgtagctccgccgcaccgtacacttctcatcgactcttcgacagagaaatccaagcatttctagcgtttcttatgttttccgccattaagatggtgagggaggaaacatgggaagctttcgttgctgatagtttactctatgctaagatctttcttattgcggtttcgttgattatggattatcgagtggcggtctgggttagtatcatattttcaggtatatatctattagctcaacaaccagcatttagtaaactaggaactgcgaagaagctaacacctatgcagttggaggatttgttatcagaagggaacacaacaaaatact

SEQ ID NO: 88935 - DNA, 757 bp, Arabidopsis thaliana columbia
  unsure (1)..(757): unsure at all n locations
aacacttctatttctccctctccttgtcacaaggaaagggcgtagaagaaccaaaacctaaacaaaagagcaataataactcattaaaaaaccaaaaccaaaaaaaaacaaaacgggtgtcaaaatgttattaatctttggtctcttgatcttagctatggtagctaaatccgtcaatgcaacctaccctttaaccaaatcttgcatcaacgggcaaggttgcatcggggaagacgatgagctcgaatctctaatggattcagagacaaaccgtcgtcaactcgcaagaggacgtcgttacattggctacgatgctctcaaaaagaacaatgtgccttgcagtagacgtggccgatcctactacgattgcaagaagagaagaaggaataatccttacaggcgtggatgcagtgccatcacgcattgctataggtacgctcgctaaatgatagagaggaagagatttgattcaacaacgtacgttcgtatcttcattcttctttcttgatcgttaatattaattgcctctccttacttccatcttttttttttttcattctttcttaacgtatcctatgttatacgtatgatctatatattcttttttgttctttatataatcatcatgatgcatataagcttttgattcattggtatatcacttacttttccttttaaaaaaaaaaaaaaaaaaagnnnnnnnnnnnnnnnnnnnnnnnnnnnnnnnnnnnnnnnnnnnnnnnnnnnnnnnnnnnnn

SEQ ID NO: 88936 - DNA, 500 bp, Arabidopsis thaliana columbia
  unsure (1)..(500): unsure at all n locations
atgatctccnnnnnnnnnnnnnnnnnnnnnnnnnnnnnnnnnnnnnnnnnnnnnnnnnnnnnnnnnnnnnnnnnnnnnccacgcggtccgcttcaaaacaaaaagaagaaccatctcttgttaaacactccaaaatcagctacaatgtcaatttcaagagtttatctctgtctaatctttctcacattcgtcagttccccacttgtgctctgctctcgcagcccgaaactcgcagcagcatcagcggcaataggggagaagcatgggaaagaacatgttcattctccggcaatgcttttttctgaattcccgaaggttgattcatcatcctccatgacacatattgatgagcctgccacaaagtctgcaatagccggttttttcaggtatagactcccattcccgggatggcctttcccccagggtgctcctttcccaatgggtacacctacgaatccttccgttcctgtgacttcaacaccgtcttctggagctgctgc

SEQ ID NO: 88937 - DNA, 652 bp, Arabidopsis thaliana columbia
aaacagctacaatgtcaatctcaagagcttttctctgcttaatctttttcacattcgtcacttccccactcgtgctctgctctcgcgcccaaaactcgcagcagcatcagaagcaatagggaagaagcatgggaaagaacaggttcgttctccggcaatgcttgtttctgaatcccccaaggttgattcatcatcctccatgacacatattgatgaccctgcatcccccaagattgattcatcatcctccatgacacatattgatgagcctgcaacaaactctgcaatagccggttttttcaggtatagactcccattccagggatggcctttccacaagtatgctcctttcccaacggctacaccttcgaatccttccgttcctgtaacttcaacaccgtcttctggagctgctgctgctgaggaagaggaaaccgagaaggtgccttctgcgccaagcaaaggaaacagagatggaggcaatgcgtaatgaatcaagacaagatatgttttctactagaaccttattgtgttttaatgactgtggaatctttcctctagttttacatgttgtatcaaataaaatgtaccatgtattatatatgctatgtgacatttacatggaccaatgaaatgaatacaatttctcttt

SEQ ID NO: 88938 - DNA, 525 bp, Arabidopsis thaliana columbia
  unsure (1)..(525): unsure at all n locations
tgatactgccnnnnnnnnnnnnnnnnnnnnnnnnnnnnnnnnnnnnnnnnnnnnnnnnnnnnnnnnnnnnnnnnnnnnnnnccacgggtgcgcgcacgcgtgcgagaacaacaaaacagaggaagaagaagaagaagatgaagcttctggctctgtttccatttctagcgatcgtgatccaactcagctgttgggagctaggaacagatgcattaccgagcggtgggttcgtgaggacgaaaggtgttcagtttagtctcaatggctatccatattacgctaatggcttcaatgcctactggctcatgtacgtagcctccgatccatcccaacggtctaagatctccaccgctttccaagatgcttctcgccatggattgaccgttgctcgaacctgggctttcagcgatggcggttacagggctcttcagtattcccctggctcctacaacgaggatatgtttcagggtttggattttgcgttagctgaggcaagaaggcatggtataaagataatactcagct

SEQ ID NO: 88939 - DNA, 513 bp, Arabidopsis thaliana columbia
  unsure (1)..(513): unsure at all n locations
atgttctccnnnnnnnnnnnnnnnnnnnnnnnnnnnnnnnnnnnnnnnnnnnnnnnnnnnnnnnnnnnnnnnnnnnnnccacgcgtccggggatagagatctanagagagagagaggatgggtcatcactcatgctgcaacaagcaaaaggtgaagagagggctttggtcacctgaagaagacgaaaagctcatcaactacatcaattcatatggccatggatgttggagctctgttcctaagcgggcgggtttgcagagatgtggaaagagttgtagattaagatggataaattatctaagacctgatcttaaacgtggaagcttctctcctcaagaagctgctcttatcattgagcttcacagcattcttggtaacagatgggctcaaattgctaaacatctaccctggaagagcagataacgagggcaagaatttctgggactcgagcattaaaaagaagctcatgtctcaccatcatcacggggatcatcattatcatctctttttcca

SEQ ID NO: 88940 - DNA, 472 bp, Arabidopsis thaliana columbia
acgtaataaagtcattgactcagtgaacggcttttattataatcgtacaagacacacaaataagctcgaattgtagaacattcagttcctttgtgttgaacttaagaccctagagataaagatttggatcggacaaccttagaacgggcgtggcaacaagtggattctttagctccaacacgatcccaaacttctcctcgacctccactctctctccttgcggaattttccaatcaaaagaatgcaaaaacgtagcgagattgtaaagaacaaccctctcgcccatagccattcccacgcatatcctacgaccagacccaaacggtagataattgaagtcatttcctttgaagtcataagacatatccagaaacctgtcgggatcaaacttcagtggattctcccatacattcgggttcctatggattgcccacgcgttgatgaaaatttttgaattttagggatggtgaag

SEQ ID NO: 88941 - DNA, 500 bp, Arabidopsis thaliana columbia
  unsure (1)..(500): unsure at all n locations
accacgcgtccggagagaaatgtacagacagctattaaagaagctgcacagaggaatgatatggtctctgctaaggcacttgctaaggaaattgtgagttcgagaagaacagtgaaccggttatatgagaataaggcacagatgaattctatatcaatgcatcttggagagagtgttgcgattgctcgaacagttgggcatttgtcgaagagcgcagaggttatgaagcttgttaataatctcatgaaggctccacagatggctgcaacaatgcaagaatttagcaaagagatgactaaggccggagttattgaagagtttgtgaatgaggccattgacaatgctctanattcagaggatatggaagaagagattgatgaagaggttgataaagtattgacagcaattgctggagaaaccgctgcagagctcccagtanctgttangaaggagaggataaaggtacctgcacagaaggcgaacacttcacgtgaggaaga

SEQ ID NO: 88942 - DNA, 678 bp, Arabidopsis thaliana columbia
gggcgaagtaaggagtcgtaataaccctaaaaagcgtgccctctttttcgccgccggctaaagctatgaaggtttttaatcttgaccgtggaaacactctctctgatttcctcttctccggtgtcaccaactccaaggagctcttgaattcaatgcttgacggaagtctgaagctggaggtctcatttctcaatgcatcacttattccagacatttttcctctattggctgctgctcagaaagcacttatctccaaatcacgcgattccttatcaaccagaactcttcattctgagcttgtctacaattactcaggatctaagcacattacagaatcattgaaacgatgtgggatttctgagaacactacttacattctagctgcccggttcaatgcttctcccgttgagatggcgcagccggcgaaattgatcaccgggaaggagattgatttgggggaattggagacacatgcaaatcaagccaatatactaaagcattacaagataactagccaagagctcggaatttcctctctgggagatgccattgtttgtcgaatagctgcacgcaatgctttgtaggagtagacatcttttctttatgtcttttgtcaccaattatagttttcccctttataaacaaaattgacccccacgtttataattcgggccccag

SEQ ID NO: 88943 - DNA, 596 bp, Arabidopsis thaliana columbia
  unsure (1)..(596): unsure at all n locations
nnnnnnnnnnnnnnnnnnnnnnnnnnnnnnnnnnnnnnnnnnnnnnnnnnnnnnnnnnnnnnnnnnnnnnnnnnnnnnccacgcgtccgctctggccctctctctcttctctctctcaaaattttcagagagagaatcaaaccaaaattttcgacgacggtaaattgatgtcgtcggtgatggttgaattgccgtccggtgtagtatccggctttcgtctgacatatattggcttccacagcagtacatggtcggcccttgtctagcatcatcggctctttcagcggtgatggctagctcacggtgttaatccggcgtagttcggttttcttttccttttggtttatatcacggttacgtttcgaccgttgattgtctttagatcagaattcattgggtatgtgtgttggtgatggcgttggttttcagtccaagcttgcttaattagatctaattccaacctatcctttgagtttaaggtttacggataataattaggcagtttgcgtttttgagatgaagattcaaagctctttcctcagcttattatgattgcctttagctgtatctcttatattcaagcttcgattgggtct

SEQ ID NO: 88944 - DNA, 751 bp, Arabidopsis thaliana columbia
  unsure (1)..(751): unsure at all n locations
gacctcccttgggttaacccggtncgtncnccgtgatgncttaaaccagatncatgggnngngtgtggggatgcccgtggtttncagcccaaggctggctaattagaccaaatcccacccnccccttgggggttagggtttccggataataacttagccagtttgcgtttttgagatgaagattcaaagctctttccgcagcttattatgattccctttagctgtatctccttatattcaagcttcgattgggtctaagtaacagaggtggttaatcgaagatcttttttctcttttgagattaatagatccgtattagatccttacttctgttttgtagttgttggaaaaattcagatgaagctaatcttcgagtttcattcgacttagtttcagtttccggcagaatcgatggcttcacggcgaaggatgatagatggaaaactttcgtctcctcaggttacatgtgtattcgatgctaacacgtgtctgagatatattagcttgatccaatcttcttctctaaatgtaatgttgggccagttggacttaaaatagtctctgtaaaccgttttatgttgttgggcttttgctcgttcgttgtatgttatgttcatcttaataaaatcgtcacttgtggaaaaaaaaaaaaaaaaaaaaaaaaaaaaaaagnnnnnnnnnnnnnnnnnnnnnnnnnnnnnnnnnnnnnnnnnnnnnnnnnnnnnnnnnnnnnnnnnnnnnnntatccatc

SEQ ID NO: 88945 - DNA, 587 bp, Arabidopsis thaliana columbia
  unsure (1)..(587): unsure at all n locations
nccggcactaatacgactcactanagggaaagcacggtacgcctgcaggtaccggtccggaattcccgggtcgacccacgcgtccgcgcacgcgtgggtttgtatcgcggaaagtaaacctagccgagcagatctacctctctctctcagtactcagagatggccaagtcgaagaatcacacggcgcataaccagtcggcgaaagcccacaagaacggaatcaagaagccaaggagacaccgtcacaccccaaccagaggaatggaccctaagttcctgaggaaccagaggtacgcaaggaagcacaacgtcaaggccggcgagaatgctagcgctgaagaataagtgttttgattatctgtgagacattttgaagtttttttttaatgaatttaagactttcttagacaaaggaaccaatttactttgcgcttttgatcatgtttacgcaattgtggtttgtgtactctcttatcctggccttaatttaatatcagcagttttctaatcaaaaaaaccaaaaaaaagggcggccgctctagaggatccaagcttacgtacgcgtgcatgcgacgtcataactctct

SEQ ID NO: 88946 - DNA, 445 bp, Arabidopsis thaliana columbia
tttctaaagagtaaagaagcagaagatagaagaagaacaacaacacacgcgagaaatttcagatctttcctctctccgcatctccctttttgcatcctcgtgtaatcatcgtctaagaagaagaagaagaatccttttgcttgttgctttactttctctgcaaactttcgtatctttgcgtgtttgagaatctctctatctttctcggatttggagagttatcgaagagatcgtgtcacattaaggattgaagacaagtctttaatgcagagaaatcgtgtgaaaatggattcttaagccccacttttagttgcagatctggagctttttactgggtttctgctaatttatcgacaagaacaaaaaaaggtttgttttgtctcacaagtgatggtcgtatgactcacatgcatgtcctctgagctcgtttagcatcaataagctt

SEQ ID NO: 88947 - DNA, 928 bp, Arabidopsis thaliana columbia
  unsure (1)..(928): unsure at all n locations
agaaatcaaaaccttgtaaggtttcttagggtttcaatcgaagcgggagagaaaatctcagaagagaagccatggatgaagctttgacgaacgcttctgcaatcggtgaccaacgccagaaaatcgaacagtacaaactcatcctctcctctgttctctcttccaacgatcttctccaagctcagagattcatcgatcacattctttccgatgatgtcccgttggtggtttcgaggcagcttttgcagtctttcgcacaagagcttgggagattagaaccggagacgcagaaggagattgctcaatttactcttacccagattcagcctagagttgtttcctttgaggaacaggcacttgttatcagagaaaaacttgcgggtttgtatgaatcagagcaggaatggtcaaaagcagcacagatgttgagtggaattgatctggattctggaatgagggccgttgacgacaacttcaagctttcaaagtgtatccaaattgctcgtttgtatctcgaggatgatgatgctgtaaatgcagaggcttttataaataaagcttctttcttagtgagcaatagtcagaatgaagttttgaatttncagtacaaggtctgctatgctagaattttggacatggaaagaaagnttttagaggctgcacttcggtattacggcatatctcagattgagcaacgccaaataggggatgaagngnttgatgaggatgctttagagcaggcccctatcagctgctgtcacatgtacccctattagccttgngcttggccccagcggtcccggggtccttgcaactttnttcaaaggtggccgttnnnccaggttnagggttntccnnnccccagaagggttttctggaanggtttaaggggnccccgggtttttcccttccnggggcctnggcccct

SEQ ID NO: 88948 - DNA, 587 bp, Arabidopsis thaliana columbia
cggacgcgtgggcggacgcgtgggctgcaaaaaaaaaaaaaaaaaattcttcttttatggcattaaccccttttgtctcacgaattatctgacctctgtatcggtaagccacctttacggtgtctctccgtcgccacagccaccgtagctgacgccatcgccgctctcaaatcctctgacgaaccgttcctcaccgtatggagctgtaatcacgatgagaaaacagatgataatgataagtgtgagtgtttgggtaagatctgtatggctgatgtaatctgttacctatccaaattcgacaacaatgttttgtctctttcctctgctttcgacgcatctgtctctgttcttcttcccaaatctcgtgccctcgtcgtccatgttcaatcttcttgcagtttgattgaagctattgatctgataatcaaaggagcacagaatctgattgttccgattcatacgaaatcaatcacaaagagaagacaacaacaaaaacttctgaaacgaaacgtcgtcgtttcactcaccaacgcaacttcaacaacccacaaaaacagccgagaattctgctggatcacacaagaaga

SEQ ID NO: 88949 - DNA, 502 bp, Arabidopsis thaliana columbia
cggaacggaaggtccggcgccagagcgacgcgttcgagcgatatgaaccaatggaaccagtttaggttggtttggaagagccactcaagcaggttcgcgaagatcaggattactgtctcctccaaaaatgtcaagaaccttgagaaagtgtgcactgatttggttcgtggagctaaggacaagagacttagagtcaagggaccagtgagaatgcccactaaggttctcaagatcactacccgaaaagctccctgtggtgaaggaaccaatacatgggacagatttgaacttagggtgcacaaggcgagtgattgatctcttcagctctcctgatgtggtcaagcaaatcacatccatcaccattgaacctggtggtgaggttgaggtcaccatcgccgactcgtagatcgactctcttacttctgtttttgctctttctcttttaagaaacaaatgttttgttgtactgaaaactcaagttcttttgttttcttaattgaat

SEQ ID NO: 88950 - DNA, 783 bp, Arabidopsis thaliana columbia
  unsure (1)..(783): unsure at all n locations
tccttaaatagagggcttcaactaaaaaggggaaaatcttgggtacggccctgacagggtaccgcggttccggaaatttccccggggtcgaccccccaagccgttccgcccccaattttaacacaaccgcaaaaaatcctctcccggcttaaaaacgagtgataaagaggtgtaacaaaacatggcgtatgaaccgatgaagcccacgaaagctggtttggaggctcctctggagcagattcataagatcaggatcactctctcttcaaaaaatgtgaagaacttggaaaaagtgtgcactgatttggtccgtggagctaaggataagagacttagagttaagggaccagtgagaatgcccactaaggttcttaagatcactaccagaaaggcaccttgtggtgaaggtaccaatacttgggacaggtttgagctcagggttcacaagcgtgtcatcgatctcttcagctccccctgacgttgttaagcaaatcacgtctatcaccattgagcccggtgttgaggtcgaggtcactattgctgactcttagacacttgttccaaaaccgcttcaaaagaatgtattttatcgtttctggtcctccatttttgttcgcaaccttgtttcttgggttttgatagttctgaggtggtttttgtctatcgaatttttttcatctattagaggccgtaatgaaaaaaaaaaaatanaaagggcggccgctgtacaggatccaagcttacgtacgcgtgcatgcgacgtcatagctcgtctatagtgta

SEQ ID NO: 88951 - DNA, 821 bp, Arabidopsis thaliana columbia
  unsure (1)..(821): unsure at all n locations
atgannnnnnnnnnnnnnnnnnnnnnnnnnnnnnnnnnnnnnnnnnnnnnnnnnnnnnnnnnnnnnnnnnnnnnnnnnnncgcccacgcgtccgcccgcgccgtcaggttcgactccttccttccttgcagcaaaaagcaatccgccgtcgagcttcgttcgtctctcagaagaagctgcaaatatggcgacagcgtatcaaccaatgaaaccagggaaggctggtttggaagagccactcgagcagattcacaagatcagaattactctctcctccaagaatgtcaagaacttggaaaaagtgtgtactgatttggttcgtggagctaaggacaagagactgagagttaagggtccagtcagaatgcccaccaaggttctcaagatcactacccgtaaagctccttgtggtgaaggaaccaacacatgggacagattcgagcttagggtacacaagcgagttatagatcttttcagctctcctgatgtggtcaagcagatcacctccatcaccattgaacctggtgttgaagttgaggtcaccatcgctgactcgtagatcaacccttctgtggctttggtatctcttttcaaattctcttaagaaacaatcttcttttcccgtaacgacattccttttgagttaaaaaaaaaacaaatgttttgttgtagtgaaacccaagttcttatgttttcttaatttaatagattttgaattttttaaaaaaaaaaaaaaaaaggaaaaaagggcggccgctctagaggatccaagcttacgtacgcgtgcatgccacgtcatagctggtctatagtgtnnnnnn

SEQ ID NO: 88952 - DNA, 475 bp, Arabidopsis thaliana columbia
  unsure (1)..(475): unsure at all n locations
ccggaaattncccggcgtcgtacccacgacgtccgaagccaaggcatgagttcaccgagtcccttggtggtgaagaaatcgcaagtggttatagtgaaaccctcaaaggctacacctgatgtctctctttctctctccacactcgacaacgatccttacctcgaaaccctcgccaaaaccatctatgtctacgctccaccatccccaaacgaccacgtccacgatccagcttccctttttcagcaagctctctctgacgcccttgtctattactaccctctcgctggaaaacttcaccggggatcccacgaccatagactagagttgaggtgcagtcccgcggaagggagtccccttttgttagggcaaccgcagactggaattttttttttccctaaacttttttnnanggncatgggccattgctttaaaccaattggnacctttnnaatnagggtngnccnttttgggggtt

SEQ ID NO: 88953 - DNA, 465 bp, Arabidopsis thaliana columbia
tgaaaaccacaagaagatgtgtctgacaacttcagagccaccattcccagacactgacacaccaactatgagatctgcttcgtaccatatcaaacataaatctaagacacaaacccatcttcgtatccttaatctcaccaggaggagaagattactgaaggaacagaaggagatggagatgaggaacttgaagcttttcgtagagaatcaaagcatcatacgagagaatgaagctttaaaaaagaaagctcttcttctccaccatgaaaacaatgctctgtttgctctgcttcacccaaaatactcccctgtttcaacctccttgcttcagtgatcttcgtgaactttgtttattgattcttctcgtcttcttctttccttttccaacctttaatggtactaaaataaaatcaaactaatgatttatgggtgatttactcttctatgaaagctttgattattctt

SEQ ID NO: 88954 - DNA, 793 bp, Arabidopsis thaliana columbia
  unsure (1)..(793): unsure at all n locations
tgatacttcnnnnnnnnnnnnnnnnnnnnnnnnnnnnnnnnnnnnnnnnnnnnnnnnnnnnnnnnnnnnnnnnnnnnnnnccacgcgtgcgctagtttccgggttctgtaaaaaaggagatacttcaggagcagctaagatggttaaggagatggaagagagagggattaaaccgtcgaaagtaacatacacgatacttatcgacacatttgctcgttcggataacatggagaaagcaattcagcttcgaggctatcaatggaggaactaggattagtcccggatgttcatacctatagtgtattgattcatgggttttgcatcaaaggtcaaatgaatgaagcatctaggctttttaagtcgatggtcgaaaagaattgtgaaccgaacgaggttatatacaatacgatgattcttggttattgtaaggaaggtagttcttatagagcattgaagttgcttaaggagatggaagagaaagagttggctccaaatgttgctagctacagatatatgattgaagttctttgtaaagaaagaaaatcgaaagaagctgagcgtttagttgagaagatgattgattcagggattgatccatctacttcaatccttagtttgatctctagagccaaaaacgattcacatgtaagctcaaaataatgattagagcagttttaattttaaaaaaaaaaaaaaaaccaacgctcaaagnnnnnnnnnnnnnnnnnnnnnnnnnnnnnnnnnnnnnnnnnnnnnnnnnnnnnnnnnnnnnnnnnnnnnnnnnnnnnacaat

SEQ ID NO: 88955 - DNA, 511 bp, Arabidopsis thaliana columbia
  unsure (1)..(511): unsure at all n locations
gannnnnnnnnnnnnnaatacgactcatatagggagagctggtacccctgcaggtaccgggccggaattcccgggtcgacccacgggtgcgcgcacgcgtgcgaaaatcataatccacttttatgtgatcgagaaagagattctaagcccagaaaacaccaaaaccttccattttcattggttcccatttttttttctttgtagctcgaattctctgctgccactactcgtaagtgaaattggaggggggaatagatctttgggtgcttctgtagtctcagaatggcagcttatgtttctccctgtttaactcctccggattctcgggtactcactgttcttagaaagagtgtgttacctgatcatcatctaggcacgagggttggttgcttaagaatgagtgaaggtactactaaaagatatcggggtggtgcttctcataagtacgagtcttcgtcaatcagaaactctttgaattctcatagtacaagccatttccaaagccaagact

SEQ ID NO: 88956 - DNA, 603 bp, Arabidopsis thaliana columbia
  unsure (1)..(603): unsure at all n locations
nnnnnnnnnnnnnnnnnnnnnnnnnnnnnnnnnnnnnnnnnnnnnnnnnnnnnnnnnnnnnnnnnnnnnnnnnnnnnnnnnnnccacgcgtgcgcggacgcgtgggatcgaattagataatgccactccaaaaaacgttactttaccttacctatctcgctgacgtcagatcccaccgttagagcttacacttgtaacgccgtttcctgcattttccacaagcaaggtaaaaaaaagctttgtgcagagagagagagaagaagaaaaatgggtttgcttacgaacaagattgagagagaagagctaaagccaggagatcacatctatacttacagagcaatcttcgcttattctcaccacggaatctttgtcggtgggtccaaagttgttcatttcagacctgaacacaaccgccatggattcatcaacatcatcaatatcatcatcttcctctgaagatatctgttccatatttcctgattgcggtttcagacaaccggacagtggagtagtcctttcttgcttagactgtttcctcaagaacggctcactctactgcttcgaatatggagtcagtccatcggttttcctaaccaaagtccg

SEQ ID NO: 88957 - DNA, 571 bp, Arabidopsis thaliana columbia
  unsure (1)..(571): unsure at all n locations
ccnnnnnnnnnnnnnnnnnnnnnnnnnnnnnnnnnnnnnnnnnnnnnnnnnnnnnnnnnnnnnnnnnnnnnnnccacgcgtgcgggttttttcctagagacctctgctgcaatggcggggatcataagccctagccctacggctctttatttcaccagtaatgtcggtgggaggcgactgaaagcagtgagctgggcgggaaagagtgtctccgggaacgttatccgccggagaagcttgagaattgctgcggagctgaaattcgtgaatgcagaagaagcaaaacagttaatagctgaagaaggttactcggtggtggatgtaagagacaagactcaattcgagagagctcatataaaatcttgctcccatattcctctcttcatttacaacgaagacaacgatattggcacgatcataaagaggacagtgcacaacaatttctcagggctcttctttggtttacctttcacgaaagtgaatccggaatttcttaaatctgttagaaacgagttttctcaagacagcaaacttttacttgtttgccaagaaggtctcagatctgcagctg

SEQ ID NO: 88958 - DNA, 579 bp, Arabidopsis thaliana columbia
  unsure (1)..(579): unsure at all n locations
atgannnnnnnnnnnnnnnnnnnnnnnnnnnnnnnnnnnnnnnnnnnnnnnnnnnnnnnnnnnnnnnnnnnnnnnnnnnnnnccacggcgtgcggtacaaattccatttcgattttaaaacttttgagaagacgatatacaataatgaacggaacatcgtgggctgaccagtgggacaatagcggcgactctgccaaaggaggccgaatcggcagcggcgccgtcgtgagaagcagcggaagtggagcaacgtcaaacacgaccaagtacaaggagaaaatgggacaagggttagacaaaaccaaagctgtagcttcttctggttttaagaagctcaagactggttctgctattggttttcgttgggtcaaggacaagtatcacaaaaccacacacaaacaataaagatttctgtaaactcctttgtatatgagtattagtaatttattcacttgccaaatactgtattatgtctgatctatatttttctaagcttgtttgatttgaatgctttgtttactgtggtaaattgttccagtttgggtgggttcatggattacccaaattgtttttctcttt

SEQ ID NO: 88959 - DNA, 1020 bp, Arabidopsis thaliana columbia
  unsure (1)..(1020): unsure at all n locations
actgagcaacacaaaactggcgaaccaacgtgactctaacgaagaaaccggcaatggccagtatcactacaatgccgaagaaataacaagaatcataaacgagccagaatattatcccccgggttacaacttgtctaccaccgcaatttcaaacatggtgtctatgctgactaatgttgtctctggtgagaccgaaccctcggcatctgcgacatggacgatgggtcataagagagaaagagaagagttttctttgcctcctcaaccattgattaccggttcagctgtgactaaagaatgtgaaagctcaatgtccttggagaggccaaaaaaatatagaggagtaaggcaacgaccatggggaaaatgggcggcggagattcgagacccacacaaggcgacacgtgtatggcttgggacattcgagacagccgaggccgccgcaagagcctatgatgcggcagcacttcgctttagaggaagcaaagcaaagcttaatttccccgaaaatgttggaactcagacgattcaacgaaattctcatttcttgcaaaactctatgcaaccttctctgacatacatcgatcaatgtccaactctattatcttactctcgatgtatggagcaacaacaaccattagtaggcatgttgcagccaacagaagaggaaaatcactttttcgaaaaaccatggaccgaatatgatcaatacaattactcctcttttggttaactaacatattgtcaacgctttgtatttctacttattcgatctaccaattttttctctcccaatacaacttcagtctgattattgccttcttagatatgtcttcgaatgttatgactatacatgggtgtatataaaatttgtgatcaaagtcttgtaattagcgtgtgnnnnnnnnnnnnnnnnnnnnnnnnnnnnnnnnnnnnnnnnnnnnnnnnnnnnnnnnnnnnnnnnnnnnnnnnnnnnnnnnnnnnnnnnnnnnnnnnnnnnnnnnnnnnnnnnnnnnnnnn

SEQ ID NO: 88960 - DNA, 871 bp, Arabidopsis thaliana columbia
  unsure (1)..(871): unsure at all n locations
nnnnnnnnnnnnnnnnnnnnnnnnnnnnnnnnnnnnnnnnnnnnnnnnnnnnnnnnnnnnnnnnnnnnnnnnnnnnnnnnnnnccacgcgtgcgcgcgtgagaacgttacgtctcatcttcaaaagtataggctttacctcaaaaggatgcagggattgactaatgaaggtccctctgcttcggataagctcttctcttcaacacctgttcctccacagagcttccaagatatcggtggcggtggcggtagcagcggtaatgttggagtgccgattccgggggcgtatggaacgcaacagatgatgcacatgccagtttatgcacatcatatgggtatgcaaggatatcatcatcaaaatcataatcatgatccttatcatcagaatcatcgtcatcatcatggagctggtggaaatggtgcgtttgagtcaaatccttatatgatgcagcagaataagtttggatccatggcttcttatccttctgttggaggtggaagcgcaaatgagaattaaaaagagtctatagatggattcaatgggggaggaagagataggtgagcttgttattgctcgtggaactgataattgattgtcaagtttctgtttttttaagtacagtacagttataattcttactcgatttgatcgaaattttcatcaagtttctgtcttttactataaatggtatacaataaagtcttaataatcacttgtttggtgatgttgacagagttaatataatcaactaagttgaatttggaaaaaaaaaaaaaaaaaaaaaaacccnanannnnnnnnnnnnnnnnnnnnnnnnnnnnnnnnnnnnnnnnnnnnnnnnnnnnnnnnnnnnnnnnnnnnnnnntacaat

SEQ ID NO: 88961 - DNA, 461 bp, Arabidopsis thaliana columbia
gtgaatcttccggtccataaccaaggaaagcattagtatacttataattatggagttgacaagtatgacattggggctggttttggtcactttggtattgcggtcgatgatgtggcgaaaactgtagagcttgtgaaagccaaagggggaaaagtaagccgggagcctggtcctgtcaaaggtggcaaaactgtaatagcattcattgaagatcctgatggttacaaatttgaactcttggaaagaggtcctacaccagaacctctttgccaagttatgctccgtgttggtgatctcgatagggccataaagttctatgagaaggcttttggaatggaacttctgcgaacaagagacaacccagagtacaagtacacaatagccatgatgggatatggtccagaagataaatttcctgtcctagagctgacatataactatggtgtcactgaatatgataa

SEQ ID NO: 88962 - DNA, 507 bp, Arabidopsis thaliana columbia
  unsure (1)..(507): unsure at all n locations
cannnnnnnnnnnnnnnnnnnnnnnnnnnnnnnnnnnnnnnnnnnnnnnnnnnnnnnnnnnnnnnnnnccactgtttgcggccgcgtccgaatctttttagtgagagagaaatcttagagctgagctaagaaaaatgtcaaaagaagtgagtgaagaaggaagacatggcaaagactacgtggatccacctccagctccacttctagacatggctgagcttaagctctggtctttttacagagctatcatcgcagagttcatcgccactctcctcttcctctatgtaaccgtagctacagtcattggccacaagaaccaaaccggtccttgtggcggtgttggtttactcggcattgcgtgggcctttggtggcatgatctttgtcctcgtctattgcaccgccggtatctccggaggtcacattaacccagctgtgacatttggtctgttcttggctcgtaaagtgtcgcttccctagagcagttgcttacatggtggctcagtgt

SEQ ID NO: 88963 - DNA, 647 bp, Arabidopsis thaliana columbia
ctgcaagtaccggtccggaattcccgggtcgacccacgcgtccggaagaaggaagacatggcagagactacgtgggtccacctccagctccacttctagacatggctgagcttaagctctgggctttctacagagctatcatcgcagagttcatcgccactctcctcttcctctatgtaaccgtagctacagtcattggccacaaaaaccaaaccggtccttgtggcggtgttggtttactcggcattgcgtgggcctttggtggcctgatctttgtcctcggctattgcaccgccggtgtctccggaggtcacatttaacccagctgtggcaatttggtctgttcttgggctcggaaagtgtcgctccctacagcagttgcttacatggtggctcagtgtctcggagccatttgtggagtcggactcgagaaggcctttatgatgactccatacaaacgtctcggaagcggagctcacaccgagtctggtggctatagcaccggaactgctcttggagcggacattatcggctcatttgtctgggtttacactgtcttgtctgacactgaccccataagaagagcccgtgactctcacgtccgggggtaggcttcgttacctataagatttgctgtggccatggtg

SEQ ID NO: 88964 - DNA, 418 bp, Arabidopsis thaliana columbia
gtccgaccacgcatccggagccatcaacagtcgttggcgaatcgcatccaatggatgtcgaggagccacttgagcagaagacatctgttggaggtggggatgacagcaatgctgcaaacgcagatatgatcaaagaaaataatattatcgatgcaggcgactcagaaaagttgaatttagatagaagttctggtgatgagtctatggaggatgagccggagacaaagcaatccgagtcaattacatctgatgataagagtgcaaaaattgaaatgctttctaaggaggaaagccgtgctgatatggatgcggggaaagggaaatcccctgaaaataaaagtcacccactggtggcttctgacaaaagaaagcttcctgctaatgatcaagaagctgttggaaacaatgaacctgcaaa

SEQ ID NO: 88965 - DNA, 765 bp, Arabidopsis thaliana columbia
  unsure (1)..(765): unsure at all n locations
ncnnnnnnnnnacgactcactttagggagagctggtacgcctgcaggtaccggtccggaattcccgggtcgacccacgcgtccgcgcttcacaatcccaacgcacctctctctctatctctcacttcttcttcttcctctccctcttcaccaatgccacgtaaccctagattctgcttcttcctcttccttctttttcactcctctcttttcttctccatcccctgtttttccatagacgaacagggtctagctctcctctcatggaaatctcagttgaacatctccggagacgctttatcttcttggaaagcctccgaatcgaatccttgtcaatgggtgggaatcaaatgcaacgaaagaggtcaagtctcggagatacaactccaagtcatggattttcaaggtccgttaccggcgacgaatctccgacagataaagtctctgactttgctcagcttaacctccgtgaatctcactggttcaatccctaaggagcttggagacttgtcggagctagaagttcttgatttagctgataattctctctctggtgaaatccctgtggatatcttcaagctcaagaaactaaagattctgtctctcaacacaaataatctcgaaggtgtgattccatcggagttagggaatctcgttaacctcatcgagctcactctcttcgacaataaactcgccggagagattcctagaaccatcggagaactcaagaatctagaaatcttccgtgcangtggtaacaagaatc

SEQ ID NO: 88966 - DNA, 592 bp, Arabidopsis thaliana columbia
  unsure (1)..(592): unsure at all n locations
nnnnnnnnnnnnnnnnnnnnnnnnnnnnnnnnnnnnnnnnnnnnnnnnnnnnnnnnnnnnnnnnnnnnnnnnnnnnnnnnnnnccacgcgtgcgctttctctcactttctctattcatgcgacccaaaaaatggaatctttaatgagactcgtcttagttctgtttccgttcttcgtcgtcttcttcgtacctcttgatcacgtttcttcagaatctatcagcagagcaaattttccagatggatttgtattcggaacagcttcttcagcttaccagttcgaaggagctgtgaaagaaggaaacaaaggagaaagcatatgggacactttcacgaaggagaaaccaggaaagatactggatttcagcaatgcggatactacggttgatcaatatcataggtttcacaatgacatagacctgatgaaagatctgagaatggatgcttacagattctctatatcttggtcaagaatattccctaatggaacagggggaagtaaacccagatggagttaagtactataacagcctaatagatgctctnttagccaaaggaatcaaaccttatgtgacattgtatcactgggatct

SEQ ID NO: 88967 - DNA, 705 bp, Arabidopsis thaliana columbia
gcgcagagagagctaaagctacagtgtacagaagaaaatgagaggactctccagaaactccggcgcggcggcgatattcgcgattctactcattctcgccgttcataactggtccgtcgccgtatcttctcaatccaccgaattcgccggagatttccctccattcgaaacagagtgccgcggtacaattgccgagtgctctgtttccgccgccctcggagacggaggagatctattctacggcggaggagaaatgggagaggagttcgagatggactcagagatcaaccggcgcatattagctacgaggaggtacatcagctatggtgcgctgaggagaaacacaattccgtgctcacgtcgcggcgcatcttactacaattgtcgacgtggcgctcaggccaatccttactctcgtggctgcagcgccatcactcgctgccggcgctcatgaatctatcactgtcagtctcactgtaattcttttttcttttctttttctgatatataatttttcagaaatttctcttttcttttgttaccggtttatatttctaagttcattgcggattattagagtttcatacacatgtaaatgtttctgggaatttatctctgttattgatgtaagtttgtttacataaaccagcaaaaaaactatggaataaatacattataattaatagtatcatcactcataagcgg

SEQ ID NO: 88968 - DNA, 566 bp, Arabidopsis thaliana columbia
  unsure (1)..(566): unsure at all n locations
atgannnnnnnnnnnnnnnnnnnnnnnnnnnnnnnnnnnnnnnnnnnnnnnnnnnnnnnnnnnnnnnnnnnnnnnnnnnnnnccacgcgtgcgagaatatttacctagagaggatcatgaagggttgcagcttagatcttcacctatctccaatggcctctacgcttcaatcttgtcatcaagattctacagttaatgatcgttcttcaaccataagatctaaggaaatcaatgcattttatagtgggagattaagtgagtacgatcttgtagagatccagatgagagcaataatagagatggcgagcaaggatcgtgaagtaacagcgttagagttagtgccggtgagactggaatcaccgttaggatgttcggtgaagagatctgtgaaaaggttcttggagaagaggaagaagagaagcaaatcttttacacttacacctaattacacctcaagtacttcctcatcatcctcctctcttcataatttctaatcataattttattatgttttccttctagttatcaatcaaaacaaaaaaatctttgtttctttcttttttctt

SEQ ID NO: 88969 - DNA, 893 bp, Arabidopsis thaliana columbia
  unsure (1)..(893): unsure at all n locations
caatggcgaattcagagtcctcctcctcaccagtaaacgaagaagagaacagccagagaatctcaacactccatcaccaaaccatgccttccgatttaactcaagacgaattcacccaactctcccaatcaatcgccgagttccacacgtaccaactcggtaacggccgttgctcatctctcctagctcagcgaatccacgcgccgccggaaacagtatggtccgtggtgagacgtttcgataggccacagatttacaaacacttcatcaaaagctgtaacgtgagtgaagatttcgagatgcgagtgggatgcacgcgcgacggtgaacgtgataagtggattaccggcgaatacgtctcgagagagattagatctgttggacgatgatcggagagtgactgggtttagtataaccggtggtgaacataggctgaggaattataaatcggttacgacggttcatggttttgggaagggagaagaagaagaaaggatctggaccgttgttttggaatcttatgttgttgatgtaccggaaggtaattcggaggaagatacgagattgtttgctgatacggttattagattgaatcttcagaaacttgcttcgatcactgaagctatgaaccggaacaacaacaacaacaactcttctcaggttaggtaatgatgaaatttgggggaaagaaaaatgtttctaaattgggggagttttaatttttattttgatttgtaaaacgttttttttcttctcttgaattgtaatttccttgtttgattttatggttatgttttattttttaaaaaaaaaaaaaaagnnnnnnnnnnnnnnnnnnnnnnnnnnnnnnnnnnnnnnnnnnnnnnnnnnnnnnnnnnnnnnnnnnnnnnnnn

SEQ ID NO: 88970 - DNA, 419 bp, Arabidopsis thaliana columbia
ttaagaccagaacttattgactctgttatcaaaccaatgcttgacttcttacgtgaaactggttcaagacttatgatcaatgtctatcctttctttgcttatgaaggaaactctgacgtcattcctttagattatgctttgcttagagagaatccaggaatggttgattctggtaatggtttgagatactttaatctcttcgacgctcaaatcgacgccgttttcgcagcaatgtcggctttaaagtacgatgatatcgaaatcattgtcacggaaactggttggccgtcgaaaggagatgagaatgaagtcggagctactctagctaacgcagcttcttacaacggaaacttaatccgtcggatcttgacacgtggaggtacaccgttacgtcctaaagcagatctaacggtctatct

SEQ ID NO: 88971 - DNA, 2629 bp, Arabidopsis thaliana columbia
gccaaatttccgattttctcctcactgaatctcggcgcgcccgcgttgattcaaactcattttccgatcaaacggcatatttttccctctcgagagagcgataatgtggaaactgaagatcgcggaaggaggtagtccatggcttagaaccaccaataatcacgtcggaagacagttttgggagttcgatccgaatctcggtactcctgaggatctcgccgccgtcgaagaagctaggaagtctttttcggataatcgattcgtgcagaaacatagcgccgatctgcttatgcgccttcagttttcaagagaaaatttgattagcccagttttacctcaagtcaaaatcgaagacactgatgatgttacagaggagatggtggaaaccacgttaaagaggggtctagatttctattcaactatacaggcacacgacgggcactggccaggtgattatggtggtcctatgtttcttctcccaggactgataattacactctccataactggagcactgaatacagtattgtcggaacaacataaacaagaaatgcgccgttatctctataatcaccagaatgaggacggaggttggggtttacatattgagggccctagcaccatgtttgggtctgtgttgaactatgttactctaaggttgcttggagaaggacctaacgatggagatggagatatggagaaaggacgagactggatactaaatcatggtggtgctaccaatattacatcttgggggaaaatgtggctatcggtacttggagcttttgaatggtccggaaataacccactgccacctgagatatggcttctcccatatttcctgccaatacatccaggaaggatgtggtgccattgtcgaatggtgtacttgccgatgtcgtatttgtatggaaaaaggtttgtgggtcccataacgtccactgttttatcactgagaaaggagcttttcacagtaccatatcatgaagtcaactggaatgaagcacgcaacctttgcgcaaaggaggatttatactacccacatccacttgtgcaagatattctttgggcatcacttcataagattgttgagcctgttctgatgcgatggcctggtgcaaatttgagagaaaaggctataagaaccgcaatagaacatattcattatgaagatgagaatactaggtacatctgcataggtcccgtgaacaaggtattaaatatgctttgctgttgggtagaagacccaaactcagaggctttcaagttgcacctaccaagaatccatgactttctctggttagctgaagatggaatgaagatgcagggttataacggaagccagctatgggatacaggttttgctattcaagcgattttggcaactaacctcgtcgaagaatatgggcccgttttggaaaaagcacattcatttgtcaagaattcccaggtgttagaagactgccctggagatctgaattactggtatcgccacatttctaaaggggcttggcctttctcaactgcagatcacggttggcccatctctgactgcaccgcagaaggactgaaagctgctcttttgctatccaaagttcccaaggagattgttggtgaaccaatagatgcaaaacggttatatgaagctgttaatgttatcatttctttacagaatgcagatggaggcctcgcaacatatgagctcaccaggtcatacccttggttagagctaatcaacccagcagaaacctttggcgatattgttattgattatccttacgtggaatgtacatcagctgctatccaagctttgatatcatttcgaaagctgtatcctggtcatcgaaagaaggaagtagatgagtgcattgagaaggcggttaagttcattgaatccattcaagcagcagatggctcatggtatggatcatgggctgtttgcttcacgtatggtacgtggtttggagtgaaagggctggtagctgttggaaaaacattgaaaaactctccacatgttgctaaagcttgtgaatttctattgtcgaaacaacaaccttcgggcggctggggagaaagctatctttcatgtcaagacaaggtctattcaaaccttgatggcaacagatctcacgtcgtgaatacagcatgggctatgctcgcactcattggtgctgggcaagctgaggtagaccggaaaccactacaccgggctgcaagatacttgattaatgctcaaatggagaatggtgattttccacaacaggaaataatgggagtcttcaataggaactgcatgataacatatgccgcgtatcgaaacatttttccgatatgggctttgggggagtaccgttgtcaggtattattgcaacaaggagaatgaattaagtgttcaaattagttatttctctagggaaggaactgtgtagcttccatgctttactctttccaaagttgtgttatccgtaatggatctgctctgatggttacgtgaaccaatctttgtgtaattgtttcaaactcaaatcttggttgcagattttgttgggttctcttgaataccccattttaggataatgtcttgttttgtgaaaacagacatttttcttgtatttgtttttttaattcc

SEQ ID NO: 88972 - DNA, 457 bp, Arabidopsis thaliana columbia
accacaaaactgatcgggagataagagcggtaaaaaccaccgagtcacgactcagtgactcaaatcgttcttcccacacaaaaaaaatggttactgcgacagcatcaactccattttcactctcgtcgtccgtggttttcacgcgccgtcgtaatttcaaacgttttccagtttgcgccagtctttctccggaggtttctcctcttctcagagcagctcatcacactgtggataattatgtaaagagtgggatgattattggtttaggatctggagaagcttcagattttgctatacgttatttgggtcaacaacttggttctggttctttacataatgttgttggtgtaccaatgtctgctcgaagtgcgagtgaagcagcaaagtatggaatccccttggaatattaccgggatggtgttcagattgattttgcatttcatgatgctgatgctgt

SEQ ID NO: 88973 - DNA, 405 bp, Arabidopsis thaliana columbia
tgttttgtctttcaatgttgtagttggacgggactttgttgtgcctgcatactcaaaggtttccctacttcaacagccaacgacagaagacagtgatgaagagctggaatatgctgatagtagcagcgggactgcggatcatttgtcaggcctaaatctgcaaatggagtccaaagcatctgagcttggtcctgatggagcaggttacatatgggaagtatgtgaaggggctcatgatgaggagtggaagcattctgttgcaccaatccccaaggataaactttctgagattactcaggccatagacgatgatgacacagatgatgaaagtgtcgtcccgacttctggagagttgaaatctgatgctgatagtattaacactgatgtgaatgatcccaatgatga

SEQ ID NO: 88974 - DNA, 634 bp, Arabidopsis thaliana columbia
  unsure (1)..(634): unsure at all n locations
ggttncctttctccgccgttttnttgatttggcggtaccattccccggnacacttnccctgntccccnagtntatcgctcccttggggaagctggtccccctcagtcccgtccggattcccggtcgccccaagataaggaaaccatgtctgtgtcagcgatctttggtaccggaatcgtcaccgttgctgcttctccggttctccgccaatttcaagttccaaaattgggtaatggaggaggattagggatggtgatagagtgttcgtcgaggccacagaagaaatcgacggctcatcacaggaagacgaggccgaagaagactcagccttgggacattaagagaaagcctactgtttacgctcctcttcctcctcttccggcggaatggagtccgttcactctcgcttctgacgacggtggtgctgccactgctgcgggagatttggtttcaggcgctgcctagttggtatgagttatctgctgatttggttgtaatctacgtttgagaacttttgttgttgtttactgtgttttcagttttctgatgtttgttgttgggtttgtttgtgtttgattggtgaaatgaatggaccaaatttgcggtttataaaagcttcaaccctttccccccc

SEQ ID NO: 88975 - DNA, 452 bp, Arabidopsis thaliana columbia
gacttttgttgagaatgctgatgtctatttgcatggaatcaaaggctttgaagaatttgaagtgagtcattctgtgaatccttttcttcctgagacatctaagggagaagaatgtgaaatagatacacttactgaggcagagaatttaggaattaagcctgaaggcttaagtattggctcagaggtttcttcatcagacaagcttctcgctggagacaaaactgaacctcaaggccaaaccgatttggttgcggtcaaggaatttcccagtgcagagaacatactgatatctaagattaactctgaagatatcggaatgaaagctgaagagggtaaatcatcattagggaatgcacaaactgttgaatcagaaaccttgagagtttctctacctgctgtagattctgtagttggtgactcaaatgctgatatgagcagtgcagcgaacaaaa

SEQ ID NO: 88976 - DNA, 410 bp, Arabidopsis thaliana columbia
atttatctctccactcacaaatattttgatttgttttgtaactgtttctctttctctggagctttcttcttcttcttcaataatcgatttaggtttttcaaagctaagtgtttgtgttgtgataatgactagtagcgaggaagtagttgaagtgacggtggttaaagcacctgaagctggcggaggaaagttatcacgtcggaagattcggaagaaagacgccggtgttgatggtttggtgaagtgggagagatttctcccgaaaatcgcgcttagagttttgctcgttgaagctgatgattctactagacagattatcgctgctcttctcaggaaatgtagttacagagttgctgcagtacctgatggcttaaaagcttgggagatgctaaaaggaaagcctgaaagtg

SEQ ID NO: 88977 - DNA, 495 bp, Arabidopsis thaliana columbia
  unsure (1)..(495): unsure at all n locations
tgannnnnnnnnnnnnnnnnnnnnnnnnnnnnnnnnnnnnnnnnnnnnnnnnnnnnnnnnnnnnnnnnnnnnnnnnnnnnccacgcgtgcggggaactccacaaagactcgatttttatagacggagataacagtagaagcgatttcaggcgagagacaatcaatctgatgaaagctcttctaaatcctgaatcttccttttgtctttcttcgatttcttcctcacagatcaagaggtctttacacggggacggattgagttcttcatgtctccggtttcctttaaccgattttgccggacgtttacggcggcggaagctcactggtggggtgtgtataaaggcagttttggactctgcaatgatggagcagttagggcttaaggaatcagatgttaagaatccggctttatcttctacttatcggggatcggggattccgaagccaaaccttactggtcttgatgctcaagctagggtttggccggtcccactc

SEQ ID NO: 88978 - DNA, 519 bp, Arabidopsis thaliana columbia
  unsure (1)..(519): unsure at all n locations
cagcgtcnnnnnnnnnnnnnnnnnnnnnnnnnnnnnnnnnnnnnnnnnnnnnnnnnnnnnnnnnnnnnnnnnccacgggtccgcgcacgcgtacgatttctttccttatcgatttttctctccgcgaattgttcgttgttttcttctggcacctgattctcatcttctttcttgtggaatctgggttttgttgcggagttttcgaggttcctcattcgttgcttctgttgaaactctcttttttttttgggtggtttactttgtttttttgttgttgttgctttcaacctttaaatgccctaattttgaggttctagttgtggtttttaagattaggagcagaagccctttcgactaaagttcatgttagctgcaatttgctgaagtattcacagttttgttctgttggaagctctatgtgtttccttctgtgattgaaacacagagagaatgattttaccaaagcagtattgttgcacacactcgccgagctgccaaggcaccaaaaggccatttaaa

SEQ ID NO: 88979 - DNA, 627 bp, Arabidopsis thaliana columbia
ccaaatcacaacaaagacccacaaaattcttttttttttcctttttcaaatcccattaataaaaaccttaccaacccatgaagtaaagtaaactcctttcttataaactctcttttgttctttttttttcaacttcatcagtctcttaactcaccatcacaagaacaagaaagatgaagagaggatacggagaaacatgggatccgccaccaaaaccactaccagcttctcgttccggagaaggtccttcaatggcggataagaagaaggctgatgatgacaacaacaacagcaacatggatgatgagcttcttgctgttcttggctacaaggttcgatcttctgagatggctgaagtagcacagaagcttgaacaacttgagatggtcttgtctaatgatgatgttggttctactgtcttaaacgactctgttcattataacccatctgatctctctaactgggtcgagagcatgctttctgagctgaacaacccggcttcttcggatcttgacacgacccgaagttgtgtggatagatccgaatacgatctcagagcaattccgggtctttcggcgtttccaaaggaagaggaagtctttgacgaggaatctagcagcaagagga

SEQ ID NO: 88980 - DNA, 641 bp, Arabidopsis thaliana columbia
  unsure (1)..(641): unsure at all n locations
tggatctaacccgacccgttaatccacttgtggaggcttttgacaccgctgctgagattagtgctcgccgtgccacggagcctatttacgctgtttggaaaacgaagcgtgtgttgaacgtgggaagcgagaggaagcttagggaagcgatcaggaccgtgcacgtgttggtctctgagattgtcagagctaagaagaagagtcttgagatcggaaccggagcagaagcaaagcaagatcttttgtcgaggtttctagccgccggccacaacggcgaagcagtgagggacatggttattagttttatcatggcgggaagagatacaacgtcagcagcgatgacgtggctgttttggttgttgactgagaacgatgacgtggagcggaagattttagaagaagtggacccgttggtgagtttagggttagggtttgaggatttgaaagagatggcttacacggaggcttgtctatgtnaagccatgaggctatatcctccagttttcgtgggcctctaaacatgctgcaaacgncgncggttttncctgattgggcancgtttcaagaggaggnggcaaaagtgcccnttttncccctaacgggnnttggnaggtttngnnnccntttttggggaccgggtt

SEQ ID NO: 88981 - DNA, 1345 bp, Arabidopsis thaliana columbia
  unsure (1)..(1345): unsure at all n locations
acccacgcgtccgaacaaaacaaaaaatgggtttcattggtaagagtgtattagtgagtctcgtagcactttggtgcttcacttcctctgtcttcactgaagaagtgaaccataagactcaaaccccttctctagctcctgctcctgctccttaccaccacggccaccaccacccacaccctcctcatcaccaccaccctcaccctcaccctcacccccacccaccggccaaatctcctgttaaacccccggttaaggcaccagtgtctccaccagccaaacctccggttaagcccccggtttacccacccaccaaagccccggtgaaacccccaactaaacccccggtcaagccacctgtttccccaccagccaaacctccggttaagccaccagtttaccctccaaccaaagctccagttaagcccccaactaaacccccagtcaagccaccagtttaccctccaaccaaagccccggttaagcccccaactaaacccccggtcaagccaccagtttccccaccagccaaacctccagttaagcccccggtttaccctcctaccaaagctccggttaagcctccggtttctcctccgaagaagccacctgttacaccgcgtgtttatccgcctaagttcaaccgtagtctagtcgccgttcggggcacggtttcctgctaaaggctgcaagtacgctgctttcaacacactcttagacactaaacccatcgaagctgctacggtccaattagtgtgtaagagcaagaaccacatgtcagcgtagctactccacacaagatcgtatatcttctcttgttggctcataaccaggtccagcacttcggtttcagaggatgtcgcgttatctgtgtcaaatcaaagagcccccatctcacccaagtctcaaatctcttcggtagagatgtcggcatctatcttaagcctaacaccaatcttgtaaaatccccggtggtcgtcaacaagatggtatacggtctagttaaggatggtcccttggcctttaaaccgtctaaccccaaattaagatgatttgatgctctgcatacaatcttaagtggttcatgtttaaaacgattgagagagagtgttgttattcgtctgctgtacggttcaattttaatacaatgttagctagtctcttaagataaatgcatcggtattatgttgtatctctttaagtggcgtcgtcttattttcgtccgaataaaaataacagctttccattccatttcaaaaaaaaaaaaaaaaaaagnnnnnnnnnnnnnnnnnnnnnnnnnnnnnnnnnnnnnnnnnnnnnnnnnnnnnnnnnnnnnnnnnnnnnn

SEQ ID NO: 88982 - DNA, 808 bp, Arabidopsis thaliana columbia
  unsure (1)..(808): unsure at all n locations
gctacacatatgacaaacacaagaaagcaccaaaagaccacatatccttccaatggccccccttcaacgcaccatctcggatatttcacaccacatttcaatagacaacactctaacaaaagaaccatctccaaccgcaaccgcaacaactttgttatccttatcagcgatatccgaagtggaagatgcaaagtgtgagtgttgtggcatgtctgaagagtgcacgccggagtacatacaccgtgtgcgttcaaaattctcagggaagctgatttgcgggctgtgcgaaaaagcggtggagggggagatggacaagatgaacaacagtgaagtgctgatggacaagcggcgagaagaggcagtgaaggtacacatgagcgcatgttcccggttcaacaggctaggccggagttatccagtgttgtccaagcagaagcggttaaggaaatgctgaaaaagaggtctaagaagatggttggagccaccaagcctgaaaaaggtggcctcgctaggagctctagctgcatgccggctttagctaaggagcttaaagatcgtaccttggttaattagcttataagtatactcacgtacacgtatgttatgttcatatatagatttgaatttacatgcagacggagatgtgtattaagtgagttatatatgtagttaaaaaccgaatggaagttttacgtgtgtaaattgtaatgtataatatttnttcgtcaaaaaaaaaaaaaaaggannnnnnnnnnnnnnnnnnnnnnnnnnnnnnnnnnnnnnnnnnnnnnnnnnnnnnnnnnnnnnn

SEQ ID NO: 88983 - DNA, 571 bp, Arabidopsis thaliana columbia
atgatacttcagctctccacgactcactattgggaaagctggtccgcctgcaggtaccggtccggaattcccgggtcgacccacgcgtccggaaaaaacaacagatccgaattttatctttaatcagccggaaaaaatggagaaagcgatcgagagacaacgcgttcttcttgagcatctccgaccttcttcttcttcttcgcacaattacgaggcttctctatctgcttctgcttgcttggctggggacagtgctgcatatcagaggacctctctctatggagatgatgttgtcattgtcgcggcacataggactccactatgcaagtccaaacgtggcaatttcaaggatacatatcccgatgatttgctcgcacctgttttgagggcattgatagagaagacgaatctaaacccaagtgaagtaggtgacattgttgtgggtactgttttggcacctggatctcagagagccagtgaatgcaggatggctgcgttctatgctggtttccctgaaaccgtggctgtcagaactgtgaatagacagtgctcatctgggcttcaggctgtt

SEQ ID NO: 88984 - DNA, 781 bp, Arabidopsis thaliana columbia
gttccaatttaccaaaccatagagacttgaattaatgagaatctctcaactctcaaccaaaccgtaagaaatccacagccgagagatatctttataaactctgtcctcactaatggttctttaaccaacttacaagagctctatcttgccgcagtccgtccttttcaaagcatatcaatgtctacattgtgtctatataattataaaacgctcatgaacagttgctacttgttaaaactctcacaggagcgcgttgtgttgctacattgttgcacgagatgaaacgccgtggtaaagactgccgttttggagtagtgtcaatgtgcattgggacggggatgggtgcagcagctgtgtttgagagaggagatggagttgatgagcttcgcaacgcaaggaaagttgaagcgcaaggtcttttgtccaaggacgctcgctagagaggaccatgcaccaaaaccgtttttcacctcacctctctcttttctggtcttcttgtcactttcttcagatattattatagtttcgaataaagcacacaaccaatgtttgcctgagtcttgtgttgttcttcaccaggtcatgtgtttacgtatttgttttaacgtgaaggggggataggctttaaatcttttatatctaagaatattgttcttctcgaatttcatcagttgttgcttccttagaaattttagattttttggggtggcagccatttctatatttcgatgggtaagtcaaacggtcataaagtcaaagggtccttcctttgtttgtggtt

SEQ ID NO: 88985 - DNA, 541 bp, Arabidopsis thaliana columbia
ttaggacaactatagaagatctatgacgtcgcatgcacgcgtacgtaagctcggaattcggctcgagcgaaaacaatggaaaaagcaacggagagacaaaggatactgcttcgtcatcttcaaccttcgtcatcttccgacgcctctctctctgcctcagcttgcttgtccaaagacagtgctgcatatcaatatggagatgatgttgtcattgtcgcggcacaaaggactgcactttgcaaggcaaaacgtggcagcttcaaggatacatttccagacgagttgcttgcctctgtattgagagcattgatagagaaaactaatgtaaacccaagtgaagttggtgacattgtagtgggtactgttttgggaccaggatctcagagagccagtgaatgcaggatggctgcgttctatgctggtttccccgaaactgttcccatcagaaccgtgaacagacagtgttcatctgggcttcaggctgttgctgatgttgccgctgccataaaagctggtttttatgacattgggtttgaagctg

SEQ ID NO: 88986 - DNA, 1902 bp, Arabidopsis thaliana columbia
gaaatattacgaaaaagagatattttttatttttacttattttgggattatcatttacccggaacgggcaaagcggtgagtcatcttaccttataaatgatcacaaacccgaggactgtgagttttcgtgtagaacaaatccttctctgagaaaaaacaacagatccgaattttatctttaatcagccggaaaaaatggagaaagcgatcgagagacaacgcgttcttcttgagcatctccgaccttcttcttcttcttcgcacaattacgaggcttctctatctgcttctgcttgcttggctggggacagtgctgcatatcagaggacctctctctatggagatgatgttgtcattgtcgcggcacataggactccactatgcaagtccaaacgtggcaatttcaaggatacatatcccgatgatttgctcgcacctgttttgagggcattgatagagaagacgaatctaaacccaagtgaagtaggtgacattgttgtgggtactgttttggcacctggatctcagagagccagtgaatgcaggatggctgcgttctatgctggtttccctgaaaccgtggctgtcagaactgtgaatagacagtgctcatctgggcttcaggctgttgctgatgtagccgctgccattaaagcgggattttatgacattggtatcggggctggtttggagtccatgactaccaatccaatggcatgggaagggtcagtcaacccagcggtgaagaagtttgcacaagcgcagaattgtcttcttcctatgggtgttacgtcagaaaatgtagcacaacgctttggtgtctcaaggcaggagcaagatcaagctgctgttgactcgcacagaaaggcagctgctgctactgctgctggtaaattcaaggatgagatcattcctgttaagaccaagcttgttgacccgaagactggtgatgagaaacccattacagtttctgttgatgatggtatccgaccaaccacaactcttgcttctcttgggaagctgaagccagtgtttaagaaggatggcaccactactgctggaaattccagccaagtaagtgatggtgcaggagcggttctcctaatgaagagaagtgttgcaatgcaaaaaggacttcccgttcttggtgtattcaggacatttgctgcagttggtgttgaccctgcaatcatgggtatcggtccagcagttgccattcctgctgcagttaaggcggctggtttagaacttgatgacatcgacttgtttgagatcaatgaggcatttgcatctcagtttgtttattgccgtaacaaattgggacttgacccagagaaaatcaatgtcaacggaggtgcaatggccataggccatcctttgggcgctacaggagcgcgttgtgttgctacattgttgcacgagatgaaacgccgtggtaaagactgccgttttggagtagtgtcaatgtgcattgggacggggatgggtgcagcagctgtgtttgagagaggagatggagttgatgagcttcgcaacgcaaggaaagttgaagcgcaaggtcttttgtccaaggacgctcgctagagaggaccatgcaccaaaaccgtttttcacctcacctctctcttttctggtcttcttgtcactttcttcagatattattatagtttcgaataaagcacacaaccaatgtttgcctgagtcttgtgttgttcttgaccaggtcatgtgtttagtattttttttaagtgaagggggataatctttaaatcttttatatgtaagaatattgttcttctcgaatttcatcagttgttgcttctagaaattttagattttttgggtggcagccatttctatcggccgctctagaggatccaagcttacgtacgcgtgcatgcg

SEQ ID NO: 88987 - DNA, 417 bp, Arabidopsis thaliana columbia
attctttctttctgatattataaacctccgatttggtttagttcaaaactagaagcagcaaaattctgaacacgtaaagctttgtttcactcagtgtttcccgatcagatccaatggagagaggtggttatcgaggaggtcgtggtgatggccgtggtatgaggtggccgtggttatggcggaggcggaggaggaggagaacaaggtcgtgatcgtggctacggcggcggagaacaaggtcgtggtcgtggtcgtggctcagagcgaggcggcggaaatcgtggtcaaggtcgtggtgaacaacaggattttcgaagccagagtcagcggggacctcccccaggtcacggtggccgtgggacgacgcatgttcaacagcctcgaccacaggtggcttcgcagcctacgcaggctccg

SEQ ID NO: 88988 - DNA, 488 bp, Arabidopsis thaliana columbia
cacaattatttggaagagaaggcgtagaatcgattcagaatctgtgaattacgaatccatagagagaaaggttttgcatttgcaacctttctcaaattgggttctgtgcatttccttgcactttggataataggaactaaatctctttctctggttcatcaatggcggatcaaacgaagaagagatacgttacaagcgaggatttgaaaaaacacaacaaacctggagatttatggatttcgattcaaggtaaagtttacgacgtttccgattgggttaaatctcatcccggaggcgaagcagcgattctcaatctcgccggccaagacgtcaccgacgcgttcatcgcttaccatcccggaaccgcatggcaccacttagaaaagcttcacaatggctatcacgtgagagaccaccacgtgtcagacgtctcacgtgactaccgtcgtttagccgccgagttctccaaacgcggcctcttcgacaaa

SEQ ID NO: 88989 - DNA, 524 bp, Arabidopsis thaliana columbia
  unsure (1)..(524): unsure at all n locations
tgannnnnnnnnnnnnnnnnngactcactatagggaaagctggtacgcctgcaggtaccggtccggaattcccgggtcgacccacgcgtgcgcgggtgacattggcaagtacattcagatatgacaaagataggactgatgcagaagtagctactattgaggcggctatgctacgtgaagccatagagaagaaacaattagatcatgaccatgtcctgtacatattaggaacgcgtagtatctatcgggggaggagaaacttttggtgcttacaagaagaattatggggtcacaattgataaggatgttgatggatgtccaggagatgctgatctgagaagtctattgaaggtggcaatcttttgtattgatactcctgagaaacactttgcaaaggtggtaagagattcgattgagggttttggaacagatgaggattcgttgacgagggcgattgtgacgcgtgcagagatccatttgatgaaagtaagaggagagtatttcaacatgtataatacaagcat

SEQ ID NO: 88990 - DNA, 689 bp, Arabidopsis thaliana columbia
  unsure (1)..(689): unsure at all n locations
cgtttccggaatatcccgcgtgccgacccacgacagtccgctttggactcgcaacccaagggctcattttactttaagctcggaaacatacccacatgtgtcaagggtatggctacaaggcgcgagtagcgaacagccacatgaagaacaattttcatnatggatttggactccgagggttatttgcttcaaggcttttgaagattcgatcttcaagacagcgcagcatacttcagaaccaagatgacaaccgtggaaacattgtccgagtccaaggcccgttcggtgtcattaggccgcctttgaggggccagagacctcaggaggaggaagaagaagaagaaggacgacatggacgactctggtaatggcttagaggagaccatctgcagcgccaggtgcaccgataacctcgatgacccgtctcgtgctgacgtgtacaagccacaggtcggttacataagcactattaacagttacgagctgtcgatgcttcgttacaaccgattattaggccttcaagcatccattctttaaaaaacgttggtgcttttacatgttgtatctatatggcaacgttattgtttaatggcttaagtgattaacctaagttattatatcttgaaagctgtttttttctagtgttatgtttcaatactgtttctgtataattcatttgaatgtttttt

SEQ ID NO: 88991 - DNA, 521 bp, Arabidopsis thaliana columbia
  unsure (1)..(521): unsure at all n locations
gaaaacgcaatgatcagcactttggcgggtagaacctatctcttgtgggcattggcctctctggagcctctcgaagggctacactgcccaacagtggccctacgagagccaggtcgaccaactcactgcgctcgaaccatcccaaatcatccagagcgagggtggtcgcaccgtcgtcgcctgggaccaccacgcaccccagctccgttgctccggctttgcctttgagcggctcgtcattgagcctcacgggtcttttcttgcccactttcttgaacgccggcaaactcacgtttgttggttcacggaaggggcctaatgggaaggagttgtttccggcctgcgccgagactgttttggatttacctggttttttagaatgtttaggttattggtcatttgtttagggtttttgtgtttttccacttttaagttatatcttcttattttgtgtgannnnnnnnnnnnnnnnnnnnnnnnnnnnnnnnnnnnnnnnnnnnnnnnnnnnnnnnnnnnnnnnn

SEQ ID NO: 88992 - DNA, 304 bp, Arabidopsis thaliana columbia
ccagctcgaccagctcaatgcgctcgagccgtcacacgtactgaagagcgaggctggtcgcatcgaggtgtgggaccaccacgctcctcagctccgttgctcaggtgtctcctttgcacgttacatcatcgagtctaagggtctctacttgccctctttctttaacaccgcgaagctctctttcgtggctaagggacgaggtcttatgggaaaagtgatccctggatgcgccgaaacattccaagactcatcagagttccaaccacgcttcgaaggtcaaggtcaaagccagaggttccgtgac

SEQ ID NO: 88993 - DNA, 546 bp, Arabidopsis thaliana columbia
  unsure (1)..(546): unsure at all n locations
aacggancggaaataccgggggggacccacgcgtccgggcgaacagttcaagtggatcgaattcaaaacaaacgaaaacgcacaggtcagcacactcgcgggtcgtgcgtcantcatgaaaggtttgccgcttgaggttataaccaatgggtaccagatctctcccgaagaagctaaacgagtaaaggtttagcaccatggagaccaccctgacccataccagtcccaatgagctacggaaggcctagggcttgaggcttgatgaccgcgtggtggaatagcgtttgaatctaaagttcggtttggtccgccttgtaatatgaaccccctccatgtccaaagaagttctccccttaagggcactgttttgttttgagctttgtattaggacgtctagtgtaccccaccgacacgtcgtgtataagcgatcgttgactctgcacatgaaactctttcctgaataaaaaatctttaagtccttaaaacaaaaaccaaagggcgcccgctctagaggatccaagcctacgtacgcgtgcgtgcgacgtc

SEQ ID NO: 88994 - DNA, 429 bp, Arabidopsis thaliana columbia
  unsure (1)..(429): unsure at all n locations
tgatccagatgcaaccagctcacatgtccgactcggagccgtcacacgtacttaaggctgaggctggtcgcatcgaggtgtgggaccaccacgctcctcagctacgttgctctggcgtctccttcgtacgttacatcactcgagtctaagggtctctacttgccctctttctttagcaccgcgaagctctccttcgtggctaacggacaaggtcttatggggagagttgttccctggatgcgccgagacattccacgactcattcagtgttccaaccaggcggtggtagccccttcggagagaaggccagggccagggacaacaaggtcagggccaaagccagcagggtcaaagccagggacaacagggccagggccaacagggtcaaagccagggcttncgtgatatgcaccaaaaagtggagcacat

SEQ ID NO: 88995 - DNA, 597 bp, Arabidopsis thaliana columbia
gtaaacataaatattatgttactataacctagtaaaatatgcatgcctgatgcatgttaatatgtccatttctatatttaaacatgactcttgaaacgtgtgtgtagaacgcaatggtgcttccacagtggaacgcaaacgcgaacgctattctttacgtgacagacggggaagcccaaatccagatcgtaaacgacaatggttacagagtgtttgacggacaagtctctcaaggacaagctcatagccgtaccacaaggtttctcggtggtgaaacgcgcaacaagcaaccgattccagtgggttgagttcaaaacaaacgcttacgcgcaaatcaacactctggcgggacgaacctcagtcttgagaggtttaccacttgtagtcataaccaatggggttccaaatctcacccgaagaagcaaggagggtcaagttcaacacgctcgagaccacactgacccatagcagtccaatgagctacggaaggcctagggcttgaggcttgatgagcgcgtggtggaatagcgtttgaatctaaagtttcgtttggtacgacttgtaatatgaaataataatgtacaaagaagtctacgc

SEQ ID NO: 88996 - DNA, 618 bp, Arabidopsis thaliana columbia
taccgaaccggagggccgggctagacccacgcgttcggatactctcatccttcgcttcatccgtctctcagtcctccgtggatctatccgtcaaaacgcaatggtgcttccacagtggaacgcaaacgcgaacgcggttctctacgtgacagacggggaagcccatgtgcaggtggttaacgacaacggtgacagagtgttcgacggacaagtctctcaaggacagctactttccataccacaaggtttctccgtggtgaaacgcgcaacaagcgaacagttccggtggatcgagttcaagacaaacgcaaacgcacagatcaacacacttgctggacgaacctcggtcttgagaggtttaccattagaggtcatatccaatgggtaccaaatctcactcgaagaagcaagaagggttaagttcaacacgatcgagaccactttgacgcacagcagtggcccagctagctacggaaggccaatgagaaggctgatgcttaagagcttacccagctcagtgaacctctactgtaaaaggaagttaaatagtaataaaaaaaaagagtgataataatgtacgcaaatgtgactggttttgtagaggttttagaatgttta

SEQ ID NO: 88997 - DNA, 1785 bp, Arabidopsis thaliana columbia
  unsure (1)..(1785): unsure at all n locations
tatttttatttttaaaagaactctttacaacaagtctcctataaatacataaactccataacccacacggcgcgcccccccgccaataaagaggaagaaaaatgggtcgagtctcatctattatctctttctctttgacactcttgatcctcttcaatggctacactgcccaacagtggcccaacgagtgccagctcgatcaactcaatgcgctcgaaccatcccaaatcatcaagagcgagggtggtcgcatcgaggtctgggaccaccatgcaccccagctccgttgctccggctttgcctttgagcgtttcgtcattgagcctcagggtcttttcttgcccactttcttgaacgccggcaaactcacgtttgttgttcacggaaggggtctaatgggaagagttattccgggatgcgccgagacgttcatggagtcaccggtatttggagaaggtcaaggtcagggtcagagtcaagggttccgtgacatgcaccagaaagtagagcacctacggtgcggtgacaccattgcaacaccatctggtgtagctcaatggttctacaacaatggaaatgagcctctcattcttgttgcagccgcggatctcgccagcaaccagaaccagcttgaccgcaaccttagaccatttttgatagccggaaacaacccacaagggcaggaatggctacaaggccgaaagcaacagaagcaaaacaacatcttcaatggcttcgcacctgagatcttggctcaagccttcaagatcaatgtcgagacggctcagcagctccagaaccagcaagataaccgtggcaacatcgtcaaggtcaacggacctttcggcgtcattaggccacccttgagacgcggcgaaggcggccaacaaccacatgaaatagctaatggtttagaggagactttgtgcaccatgcgatgcactgaaaacctcgatgacccgtcggatgctgacgtgtacaagccatcactcggatacattagcacacttaacagctacaatcttcctatcctcagacttctccgccttagcgctcttcgtggctccatccgtaaaaacgctatggtgctaccgcaatggaacgtaaacgcaaacgcggcactctacgtgacaaacggaaaggctcatatacaaatggtgaacgacaacggagaaagagtgttcgaccaagagatctccagcggacagttactagtcgtgccacaaggcttttcggtcatgaaacatgccataggcgaacagttcgagtggatcgaattcaagacaaacgaaaacgcacaggtcaacacactcgcgggccgtacctcagtcatgagaggtttgccgcttgaggttataaccaatgggtaccagatctctcccgaagaagctaaacgagtaaagtttagcacgattgagaccacactgacccatagcagtccaatgagctacggaaggcctagggcttgaggcttgatgagcgcgtggtggaatagcgtttgaatctaaagttcggtttggtacgacttgtaatatgaaataataatgtacaaagaagttctacgcttaagggaactgttttgttttgagctttgtattaggacgtctagtgtacaacaacgaacgtcgtgtataagcgatcgttgactctgcacatgtaactctttcctgaataaaaaatctttaagtctttaaaatctaaaaaaatgtaaaaaatttataattatttaaatttataaataataataatnnnnnnnnnnnnnnnnnnnnnnnnnnnnnnnnnnna

SEQ ID NO: 88998 - DNA, 1740 bp, Arabidopsis thaliana columbia
ctcgatcaatttatccccaaaaaccctaaacactttcccgaataaatccctttataaatagcttcacataaatcaagtgagaaaccccacgcctcaagaaatataagaaataacaaaatggctcgagtctcttctcttctttctttcttcttaacacttttgatccttttccatggctacgcggctcaacagggtcagcagggtcagcagtttccgaacgagtgccagctcgaccagctcaatgcgctcgagccgtcacacgtactgaagagcgaggctggtcgcatcgaggtgtgggaccaccacgctcctcagctccgttgctcaggtgtctcctttgcacgttacatcatcgagtctaagggtctctacttgccctctttctttaacaccgcgaagctctctttcgtggctaagggacgaggtcttatgggaaaagtgatccctggatgcgccgaaacattccaagactcatcagagttccaaccacgcttcgaaggtcaaggtcaaagccagaggttccgtgacatgcaccagaaagtggagcacattaggagcggtgataccattgccacaacacccggtgtagcacagtggttctacaacgacggacaggaaccacttgtcatcgtcagcgtcttcgatctagccagtcaccagaaccagcttgaccgcaacccaaggccattttacttagccggaaacaacccacaaggtcaagtatggctacaaggccgagagcaacagccacagaagaacattttcaatggatttggacccgaggttattgctcaagctttgaagattcgatcttcagacagcgcagcaacttcagaaccaagatgacaaccgtggaaacattgtccgagtccaaggcccgttcggtgtcattaggccgcctttgaggggccagagacctcaggaggaggaagaagaagaagaaggacgacatggacgacacggtaatggcttagaggagaccatctgcagcgccaggtgcaccgataacctcgatgacccgtctcgtgctgacgtgtacaagccacagctcggttacatcagcactctcaacagttacgatctccccatccttcgcttcatccgtctctcagccctccgtggatctatccgtcaaaacgcaatggtgcttccacagtggaacgcaaacgcgaacgccattctttacgtgacagacggggaagcccaaatccagatcgtaaacgacaatggtaacagagtgtttgacggacaagtctctcaaggacagctcatagccgtaccacaaggtttctcggtggtgaaacgcgcaacaagcaaccgattccagtgggttgagttcaaaacaaacgctaacgcgcaaatcaacactctggcgggacgaacctcagtcttgagaggtttaccacttgaagtcataaccaatgggttccaaatctcacccgaagaagcaaggagggtcaagttcaacacgctcgagaccactttgactcacagcagtggcccagctagctacggaaggccaagggtggctgcagcttaagagcttaaaaccgcggcttaacaatgaacctctagtactgtaaaaggaagttaaatagtacgtagtaataataataatgtacgaaaatgtgacaagttttgttgaggtttacctgtaaaatgccactccttttctgaataaaatctttttttccgttcataaaaaaaaaaaaataatatataatattatatatttatttt

SEQ ID NO: 88999 - DNA, 756 bp, Arabidopsis thaliana columbia
  unsure (1)..(756): unsure at all n locations
nnnnnnnnnnnnnnnnnnnnnnnnnnnnnnnnnnnnnnnnnnnnnnnnnnnnnnnnnnnnnnnnnnnnnnnnnnnnnnnnnnccacgcgtgcgtgctttgagaattctttgcattctttacagttctttgatcagctcggaggcgtgttctcaatagtgaaacgggtaatgacacaaggggctctacacgatatcagacagttgcaatgtatgcttagaaacctcacaagcaatctcacattccaagaagcttatgacatgacaggaaggattctcgggatcaccgtttgctccccaagaaagcatgaacctcctcggtgtcttaactatttgacttcgcctcatgtggttatatggagcgcagtgactgcttcttgtgcttttcctggtctctttgaagctcaagagctaatggctaaagatcgaagtggagagatcgtaccgtatcatccacctttcaatttggatccagaagtaggcactaaatcatcatctggacgccggtggagagatggtagtttggaggttgatttaccaatgatgcagcttaaagaactgttcaatgtcaatcattttattgtgagccaagccaatcctcacattgctccattactgcgtctaaaggatttagttcgagcttttggtggttgtttcgtagataaactagcgcatctagtggagtttgatggcaaacattgatgcacccaggtttttattgcttggttattctctatggtttaatctaaaatccttttt

SEQ ID NO: 89000 - DNA, 559 bp, Arabidopsis thaliana columbia
  unsure (1)..(559): unsure at all n locations
aataaaaaaataagagccatcgtgacttcgagagaagaagccagcaaggaacgatggagattattacccggcatcccatcatcattcatcttatcatcccatttggaacaattaggctgtgtgtgttgtgtgatttcgctttacgagggaaaatgtgaccaagtaccgcgagcttccgttaaagacccatcggtccgctgtggaattttgtgaggtgtgcgaggcttcatgccagagtcaaaaaccctccaaggaaccctcgtttgctttatgtaagtacatcgagccgttcggacctaccagatttgttgagaacccgtggcgaggaggagaaattattataccccagatcactccctcgtcatcccannatattatccggtttaaaggagnggtggttttgacaaaccaacgcacatcgccatttgctatggaatatgnctgctggcggtgaggctantttgagcgtatantgtagcgctgtgaagattcaagtgaggatganggcaggatacttttttccagcagctntatctcaggagtcagctattgtcatgct

SEQ ID NO: 89001 - DNA, 557 bp, Arabidopsis thaliana columbia
agctagaagccagcaaggaacgatggagattattacggcatcatcatcatcatcatcatcattgtaattcgtaatcatatctgcttttggaatttcttcacggataagaaaaaaggatatcgacaatttcgcttttgctttcaaaatctcattctatcactttgtgccttttttagccatcgcgaaaaacctctgaatcgcatcccttgattttctgggtttgtgactttgtgtagtggaaattaggcttgttgtttgatttcgctacgagaaaatggacaagtacgagcttgttaaagacatcggtgctgggaattttggagtggcgaggctcatgagagtcaaaaactccaaggaactcgttgctatgaagtacatcgagcgtggacctaagattgatgagaacgtggcgagagagattattaaccacagatcacttcgtcatcccaatattatccggtttaaggaggtggttttgacaccaacgcacatcgtcattgctatggaatatgctgttgccgggagctattttagcgtttttttgcgctggagaatca

SEQ ID NO: 89002 - DNA, 527 bp, Arabidopsis thaliana columbia
  unsure (1)..(527): unsure at all n locations
atgattctccnnnnnnnnnnnnnnnnnnnnnnnnnnnnnnnnnnnnnnnnnnnnnnnnnnnnnnnnnnnnnnnnnnnnnnnccacgcggtccgcgaaatcaagacaacgacatggttactacgtttgcttcgagatctcattctctctctgttccatttcttctataaagacagtcctcatcttcatcttatctgcaaatgcaaattcgtctgaaacctgattattccttcttcatcgcctcttcctcaacgatggcttcgacttcttctttgggaccttctacactactctcttacggttctccttctcgtcagtttcctgattttgggttcagattgatttcgggtcacgaaagtgttcgaattccatcattccggcgatttcgggttcactgcgagtcaaaggaaaaagaagtgaagccgtcttctccatttcttgaaagctcctcgttttcgggagatgctggtttgcgctctagtgaatggaaggctggtcctgatatttggagatcatctgcaaaaaagat

SEQ ID NO: 89003 - DNA, 481 bp, Arabidopsis thaliana columbia
  unsure (1)..(481): unsure at all n locations
tgattactttnnnnnnnnnnnntctatggcaaaggcagactttttccgatccttcaccgtctcggatttagttttctnaccattgaagatctaattttcctacctttctccatgagacgctttcctttaggtctcggggtgctgattttgcttcaccgccgttcgtggtaaggagtattttggttttgtttccttttgtgagagtttctagtctcagatctgttgattctatgtttgttttacactttgtatttctggttttgaatatcaggattatgagtccggaaagtatttcttcagatatgatgtatttgtagcttgggttttttcccctttagtttgatcttgtattcgggagttttcatttgcttgccgactttaatctctacaaggattgtttccttgtcggcctttgtaatcatgtgactctaaattttatcaaataaatccttattctacttnnnnnnnnnnnnnnnnnnnn

SEQ ID NO: 89004 - DNA, 1093 bp, Arabidopsis thaliana columbia
  unsure (1)..(1093): unsure at all n locations
atgannnnnnnnnnnnnnnnnnnnnnnnnnnnnnnnnnnnnnnnnnnnnnnnnnnnnnnnnnnnnnnnnnnnnnnnnnnnnnccacgcgtgcgcgggccttgcatgagataaccttttccacagaagacaagcctaaactcctttttcagttaactgccttgcttgctgagcttgggctgaacattcaagaggcacatgctttctctacaactgatggctactcactagatgtttttgttgttgatggctggccgtacgaggaaacagagagacttaggatatcattggagaaagaagcagcaaagatcgagttgcagagccaaagctggcctatgcagcaatccttctctccggaaaaggaaaatgggcaaacaggtgccagaacgcatgttccaatacccaatgacggaactgatgtttgggaaatcaaccttaaacacctaaaatttgggcataaaatagcgtctggttcttatggagatctgtataaaggtacatactgtagccaggaagttgctatcaaagtcctaaaggccagagcgtctagactcagatctagagaaagagtttgcccaagaagtctttattatgaggaaagttagacacaaaaatgttgttcagttcattggtgcttgcaccaagcctccacatctgtgtatcgttacagaattcatgcccggtggaagtgtatatgactatctacacaagcaaaagggcgtctttaagcttccaactttgtttaaagtagctagatatatttgcaaagggatgagctacttacaccaaagtaacataattcacagagatttgaatgctgccaacctcttaatggacaagaatgaagtggttaaggttgcacactttggggtggctatagtgaaagcacaaactggagttatgacagctgacactggaacatatctctggatggctccacacgtgatagaacacaagccatattatcacaaggctgacgtagtcagctactggattgtgttatgggagttatttactgagaagcttccagatgaatacatgactccgttacatgcaccaatctgggttgtccaaaaaggattaaagccaacaata

SEQ ID NO: 89005 - DNA, 525 bp, Arabidopsis thaliana columbia
  unsure (1)..(525): unsure at all n locations
nnnnnnnnnnnnnnnnnnnnnnnnnnnnnnnnnnnnnnnnnnnnnnnnnnnnnnnnnnnnnnnnnnnnnnnnnnnnnnnnnnccacgcgtgcgagacagcattattgattttcagaagacttacgaggctcagtcaaaatctgatacagataaacttattgcagatttaactaacctagtctcaagtcacattcgtcgccaacacgaattggttgattcaagactccataactttaaagatgccgtctcttccaacaaaactttcttggacgaacatgtctctgctgttaataatctgacgaaagacgcaaaaagaaagtgggagacattttccatgcaagctgagaatgaagccagagaaggtgctgatttctcggctgcaaaacattgtcgaatggagttactgcttcagcaatctgtgggtcatgcggaatcagctttcaaacactgcaagagtactcatgaatctctaaaggagatgaccagtaagcaagtcacagatgtctcttcacttggtaggtctgc

SEQ ID NO: 89006 - DNA, 522 bp, Arabidopsis thaliana columbia
cagcactatacgactcacttagggaaagctggtacgcctgcaggtaccggtccggaattcccgggtcgacccacgcgtccgcccacgcgtccggatttcaaacgatcaacaaacatttttatcataatcataatcagaaaaaagtgttaaactttctcgtgagtttatatactctgctaacaatgctgtttataatggtttttggttgtttcttaagtttctgtttaaatttcggattcttctatctggatcgttgttgttagcttctcaacatctaaaaagatggattcttcttactcctttgccttggggacaagtagttctattttgccaaaactcagtttcaggaatgtagagaacagattttatggtgagaagaacaacaacaatggtttgtgtaaacgttttggatcagatttgggctccaggaagtttaggaatcaaaagttcaagcacggtgttgtttacgctgttgccacttcagataatccaaaaaaggctatgacagtaaagacttccatg

SEQ ID NO: 89007 - DNA, 419 bp, Arabidopsis thaliana columbia
gcgtccgcgacgaccatcggcggagttccggtggtgattgctcagtctcggaggattccaacgagcctgagatgcttctctgccaccgcaaattctgaccttcttcgctcccagcttgatcggcttcacgcggaggcagagtccactcgtgccaaagcaaacagtaataggttgagacttttgagattatctgaggctgcagagaatctacgggaacaagcagctgtcaatgttcgaacagggaaagagaatgatgccagagatctacttcttcagaagaaaaaagttatgcaagctttggacaaggctaaagctcgtatcgagttgctcgatacgctttcttccaaacttaacgaggcaatatctgtcaaggaaacacagctgataggcaatatatctttggatctcgaagaggatgg

SEQ ID NO: 89008 - DNA, 1230 bp, Arabidopsis thaliana columbia
  unsure (1)..(1230): unsure at all n locations
nnnnnnnnnnngccggacctatacgacttacttagggaaagctggtacgcctgcaggtaccggtccggaattcccgggtcgacccacgcgtccgacaaaaccctagttttggtttctctggatctgaagaatctccatgactattctcatagatcgccactctgatcagaacgatgcaggagatgagattgtagagaagaatcaggggaatggtaaagaggaagaaacagagttggtgttagatgcaggtttcgaggctcctcacaccaactcttttggtcgcaccttcagggattatgatgctgagagtgaaaggagaagaggtgttgaggaattttacagagtcaatcacattggccaaaccgttgatttcgtgaggaagatgagagaagaatacgagaagctaaatcgtacggagatgagcatttgggaatgttgcgagcttctgaatgagtttatcgacgagagtgatcctgatttggacgaacctcagatcgagcatctgcttcagacagctgaagccatcagaaaagattaccctgatgaagactggctccatctgaccggtcttatccacgatcttggaaaagttcttcttcactcttcatttggtgagctccctcagtgggctgtcgtcggtgatacatttccagtgggatgtgcttttgatgaaatctattgtcaccacaagtacttcaaggagaatccagactatgataacccgagttacaactctaagtatgggatatacactgaaggctgtggggctcgacatgtgttaatgtcttggggacatgatgattacatgtaccttgttgcgaaggagatcaaactactttacatcagccggtcttttatcatcagatacattcgttctacgctctcacaatcagaagctacaagcatttgtgaccatgagacagaagacatgagagaacatgaagtggcttaaagtgttcaacaagtatgatctctacagcaaaagcaaagtccgcgtaaacgttgaggaagtgaaaccatattatctctcccttaccaacaagtattttccgtccaagctaaaatggtgaaaccctacaagcagaaagctttctaataaaatggattagagaatgcgaccaaaataaaacctttcaacaaaaaaacaaaaaaagggcggccgctctagaggatccaagcttacgtacgcgtgcaggcgacgtcatagatcttnctatagtggtacctaaa

SEQ ID NO: 89009 - DNA, 522 bp, Arabidopsis thaliana columbia
  unsure (1)..(522): unsure at all n locations
nnnnnnnnnnnnnnnnnnnnnnnnnnnnnnnnnnnnnnnnnnnnnnnnnnnnnnnnnnnnnnnnnnnnnnnnnccagtgtgtgcgaagaaacaaagcccaagtttgagttttacacttactcactcaccataatctctggttctttctttactcagtttttcttagatgaaaagattattatacatacacaaatccataggccttttcagtaacggcgtacactagttgtcgatagaagtactcggctctgtttcttccctctcttaccgggctctttgacggttggtgccattggtgttgttgttcttgaagctacactcgcaaaggatgttatgtttgtgtttcttgcacctgaaaccatgtttagaggtcatccgagaatcctatttagaatttgcagagctaaaaacaggggttacctggggttgcgtttgagacctcactgctgctgctgctgctttgaacggtggtgggctcttattcagggttggggagtctgaacaccttaaaaacccaccttg

SEQ ID NO: 89010 - DNA, 564 bp, Arabidopsis thaliana columbia
  unsure (1)..(564): unsure at all n locations
gattaannnnnnnnnnnnnnnnnnnnnnnnnnnnnnnnnnnnnnnnnnnnnnnnnnnnnnnnnnnnnnnnnnnnnnnnnnctttttttttttttttttttagtagtaatgagagacaccttctttatcagtcacatgggttgcaaaaagaaacaaagcccaagtttgagttttacacttactcactcaccataatctctggttctttctttactcagtttttcttagatgaaaagattattatacatacacaaatccataggccttttcagtaacggcgtacactagttgtcgatagaagtactcggctctgtttcttccctctcttaccgggctctttgacggttggtgccattggtgttgttgttcttgaagctacactcgcaaaggatgttatgtttgtgtttcttgcacctgtgggttgcgtttgaagacttcactgctgcctgctgctgctttgaacgtttgttggctcgtaatccagggttgggggatccnngacaagcngngnaaacgagcctngcaaannggagaaggaanttccccnccanggtggnggggctaa

SEQ ID NO: 89011 - DNA, 333 bp, Arabidopsis thaliana columbia
ggagtccaagagtagtggtgaaggtggatttgaagaagaagccatggcagcaggaccagccattgcacaatagatggcatccggagataccaccagcagcagaggtcaaggctggtgagtttttccgggtagaaatgattgatgcaatgggaggcgttatcaaagacaatgactctgcaagcgatatcaagaacctagtcctaactactggttgtagatgaggaaggtattgcagctaaagcaggtgatcttcctgctgttgagatatgcaacttgggtcctcttccaggagatgaatggggattcactggttcgtctgatagagagaatggt

SEQ ID NO: 89012 - DNA, 613 bp, Arabidopsis thaliana columbia
atgatactccagctctctacgactcactattgggaaagctggtcacgcctgcaggtaccggtccggaattcccgggtcgacccacgcgtggcggagaaaacaaaagagttatacagagagaaaacgtgaatagagagatcactgtacttattgggttttgatctttgatggctccactgagtccaagagtagtggtgaaggtggatttgaagaagaagccatggcagcaggaccagccattgcacaatagatggcatccggagataccaccagtagcagaggtcaaggctggtgagtttttccgggtagaaatgattgatgcaatgggaggtgttatcaaagacaatgactctgcaagcgatatcaagaacctagtcctaactactactcatcacctaagtgggccgattagggttgtagatgaggaaggtgttgcagctaaagcaggtgatcttcttgctgttgagatatgcaacttgggtcctcttccaggagatgaatggggattcactggttcgtttgatagagagaatggtggcggtttcttgactgaccatttcccttgtgcgaccaaagctatttggtactttgaagggatctatgcctactctcc

SEQ ID NO: 89013 - DNA, 533 bp, Arabidopsis thaliana columbia
  unsure (1)..(533): unsure at all n locations
nnnnnnnnnnnnnnnnnnnnnnnnnnnnnnnnnnnnnnnnnnnnnnnnnnnnnnnnnnnnnnnnnnnnnnnnnnnnnnnnnnccactgtattcgggaaaatcaagaaaaatggtatcgtgtcgcatcgaggacttattacgtatggcgagagagctcaaaccaaaagatcaccgcctcgactgattcatcttttctcctgattcttggcaggcttctcttggtctaagtgaatttggagttatgcttctgtcagcacttttaacttcagtgggaatcaatcttggcctctgttttctcttcttcactttgtattcaatattgagaaagcagcctagtaatgtcactgtatacggtccacgtcttgttaaaaaagatggcaagtctcagcagtcaaatgagttcaacctcgagaggcttttgcctactgctggttgggtcaaaagagcattggaaccctccaatgatgaaatccctccccatttttggttaaaccctttgggcttcattcggggctttggcttcagggtaattg

SEQ ID NO: 89014 - DNA, 451 bp, Arabidopsis thaliana columbia
  unsure (1)..(451): unsure at all n locations
ccggnccgaattccggggcgcccacgcgtccgaaaacgttgtgcagattgattctgggtttatcagttccttaccaccataagtcttggcaggcttctcttggtctaagtgaatttggagttatgcttctgtcagcacttttaacttcagtgggaatcaatcttggcctctgttttctcttcttcactttgtattcaatattgagaaagcagcctagtaatgtcactgtatacggtccacgtcttgttaaaaaagatggcaagtctcagcagtcaaatgagttcaacctcgagaggcttttgcctactgctggttgggtcaaaagagcattggaacctaccaatgatgaaatcctctccaatcttggcttagatgctttggtcttcattcgtgtctttgtcttcagcataagagtgtttagctttgcatctgtggttgggatcttcatact

SEQ ID NO: 89015 - DNA, 738 bp, Arabidopsis thaliana columbia
ttgaccacgcgtccgtttgttttgaactttttgaccaaaaacacactcgtgagcttataaaaaaaaatcaacaatgaagattcctctcttggggttacttttactaataagtcttgtcggctctccgacaagggctgaagaaggacctgtttgcccgaagaccgaaactcttagccgtgcaagttttccggagggctttatgtttggtactgcaaccgcagcctttcaggtggaaggtgcagtaaatgaaggttgcagaggtccaagcctgtgggacatctacaccaagaaatttccacatagagttaagaatcacaatgctgacgaggccgtcgatttctaccatcgctacaaggaggatatccagttgatgaaaaagctgaacactgatggttttagactttctatttcgtggccaagaatatttcctcatgggaggatggagaaaggaataagcaaagaaggagttcaattttaccacgatcttattgatgagctccttaaaaatgacataacaccattagtaacggtttttcattgggatactcccgccgatttggaagatgaatacggtggctttttaagcgaacgtattgtgcctgattttgtggagtatgcaaacttcacgctccacgagtatggggacaaagtgaaaaactggattacgttcaacgagccatggctctttagccgctcggtctacgacgttgggaagaaagcaccaggacgttgctctcc

SEQ ID NO: 89016 - DNA, 260 bp, Arabidopsis thaliana columbia
tctatttgtacaatcaagttggaggatctagaggccgggcttcgagttttctcgcagtgaaaagaaacttctgatggctaataattggttagtattacaaattgtattgattcaattctttacatcatatattctttatgtttttgtccccctcaagatcttgtaggaggagaggctttggtttcaacttccattgtttgatcaaatctatttctgttgtataaaactatattgatattttgtcttttcacttttctcat

SEQ ID NO: 89017 - DNA, 345 bp, Arabidopsis thaliana columbia
ctttacaatcagtcttgaaattcgaattgaatgaatttacaacctccagctaccttggcatttatcttcaggagaacattggtgagatactgatcgttcagtctggtgggagcaatgcactgagtcacaattccaagatcaacaagattcgtttttttccaagggcctaaaaaatttcagacacatgaaaagttaaacatttacattcaagggggaaaacaggccatattcaagaatgtaaagtgtgatgtgatgtaccataaacatcagagtttttcctttcagcgagtatgcaaagaaggaacagaggcggctttgggagtttggattttatctgctcaaaca

SEQ ID NO: 89018 - DNA, 497 bp, Arabidopsis thaliana columbia
atacgactcactttagggaaagctcgtacgcctgcaggtaccggtccggaattcccgggtcgacccacgggtgcgcgacgatgctctcaatctcgcagctgccgagtttctcgttaaccaccgccaaatctcttcgttatccttcttctccttcgtcgtctctctctatcttcttctccttcttccctaaggtttctaatttcgtcagagcaagttccggaatccccaatttggtcgcctgtagtccgacagagattatcatccccagagttaataacgccggactcagaatcgaggagatagtagacgccgcgaaaggcaaaattcgtcttgattcatggatctcttctcgtatcaatggcgttagccgagctcgtgtacagtcgagtatacgattgggactcgttaccgtcaatggtcgtgtccttgataaggtttcacacaatggcaaatctggtgatgagggtaattgtacgatatcagagcttcaacctttg

SEQ ID NO: 89019 - DNA, 898 bp, Arabidopsis thaliana columbia
  unsure (1)..(898): unsure at all n locations
ccgnnnnnnnnnnnnnnnnnnnnnnnnnnnnnnnnnnnnnnnnnnnnnnnnnnnnnnnnnnnnnnnnnnnnnnccacgcgtccggtaatctcactttcacagtttgtgtctgtgcgataatggccatggcagagctctcaacccccaaaacgacgtcgccttttctcaactcttcgtctcggcttcgtctctcttcaaaattgcacctttcaaaccactttcgccatcttcttcttccacctctccacacaacaactcccaactccaaaatctcttgctccgtttctcaaaatagccaagctcctgttgctgtgcaagaaaatggattggtgaagacgaagaaagagtgttatggagtgttctgcctcacctatgatcttaaagctgaagaagagacaagatcatggaagaagttaattaatattgcagtttcaggtgctgcaggaatgatttctaaccatcttctcttcaaacttgcttcaggggaagtatttggtccagatcaacccattgcattgaaactgctaggatcagagagatcaattcaagctcttgaaggtgttgcaatggaactggaggattcattgttcccattgttgagagaagttgatataggaccagatccaaatgaagtgttccaagatgtggagtgggctattctgattggagcaaaacctcgaggccctggaatggaacgtgctgacttgttggacatcaatggccaaatctttgctgagcagggcaaagctctgaacaaagctgcctctcctaacgtcaaggttcttgtagtgggaaacccttgcaacaccaatgccttgatttgtcttaaaaatgctcccaacattcctgcaaagaacttccatgccctcacgaggttagacgtaaatcgtgccaaatg

SEQ ID NO: 89020 - DNA, 660 bp, Arabidopsis thaliana columbia
atgattcgccgaggcgtatacgactcatatagggaaagctggtacgcctgcaggtaccggtccggaattcccgtgtcgacccacgcgtccgcagctcttgaaggtgttgcaatggaactggaggattcattgttcccattgttgagagaagttgatataggaacagatccaaatgaagtgttccaagatgtggagtgggctattctgattggagcaaaacctcgaggccctggtttggaacgtgctgacttgttggacatcaatggccaaatctttgctgagcagggcaaagctctgaacaaagctgcctctcctaacgtcaaggttcttgtagtgggaaacccttgcaacaccaatgccttgatttgtcttaaaaatgctcccaacattcctgcaaagaacttccatgccctcacgaggttagacgaaaatcgtgccaaatgccagcttgctcttaaagccggtgttttctatgacaaagtgtctaatatgaccatatggggaaatcactccacgactcaagtgccagactttttaaatgccagaattaatggccttcctttgaaagaggttattacagatcacaaattgttataaaaaggattcactttaagtgtgcataaataaaggttggtttttatttattaattggttctatcc

SEQ ID NO: 89021 - DNA, 522 bp, Arabidopsis thaliana columbia
  unsure (1)..(522): unsure at all n locations
nnnnnnnnnnnnnnnnnnnnnnnnnnnnnnnnnnnnnnnnnnnnnnnnnnnnnnnnnnnnnnnnnnnnnnnnnnnnnnnnnnccacgcgtgcggacaattccgtcccctctctctctctctttccgcagctcgccggatctcctttgtcttcttcccctgggttccgtttagctcaatccctttttaggaaagactccgtggctcgatcctagtcttggcgatcgcctctaccctttttgactctattcttcttcttcttcattcatttcccctcttattcattgcctttagggtttcttacacgatatgagctaaatacgattttgatttcaccctaagctttcttctattgcttctcgtcgttgcagggttttcttaaatggaaacgcccggcgccagtcatgattcatttaggggttctcctcgtagaaactccatcctctctgcttctaacatcatccaggcccctatttctaccttggtagagtattcgggtctctttcgagctaggccaagtccta

SEQ ID NO: 89022 - DNA, 563 bp, Arabidopsis thaliana columbia
  unsure (1)..(563): unsure at all n locations
aaaactcttgttcctcttcctcttcaacgtgaacacttctatttctcagagaacattcacctatatgtntttcttcaaggagaagtcttcctctttccagttcagatgaacactcttcagatgccttgtgccttattgatccagattcgaagtacccaactttactctctagacctttttcatggcagccactcccacacacttctctgtctcccatgatcctttttcttccacgtctctccttaatctccaaactcaagcgatctttggtcccaatcacagtttaaagacaacccagttgagaattccagcttctttcagaagaaaagctacaaacttgcaagtgatggcttcaggaaagacacctggactgactcaggaagctaatggggttgcaattgatagacaaaacaacactgatgtatttgacgacatgaaacagcggttcctggccttcaagaagcttaagtacatgggatgacgttggaacactgcacagatctgggcagcatgcttcaagctccaaagtttctggtgactgcatgtgcagactctagagtttg

SEQ ID NO: 89023 - DNA, 621 bp, Arabidopsis thaliana columbia
  unsure (1)..(621): unsure at all n locations
cgccccaagagcattctcaagcccatggggcggtcaaccgtagacttggaccggaatggcaaggccttgttgctagggacggcgggagccatggagaacatagcagcgttaaaggtggccactgtgatggttttgtccgggtttgggtggatggccccaagagcattctcaagcccatgaacgccgccgcatctcctactcacgactctagaaagcaacagaggtttgccaaatccaggcctaggagagtctccatcaatctccccgacaacgagatcagccgccagctcagcttccgggaggatccacagcactctcccctcaggcccggcgagatcggtctccggagcaccagaacggctctggaagtgctgagtgagctagacgcagacgtgctggctcttcaagacgtcaaggcggacgaggctgaccaaatgagaccgctctccgatctngctgcggcgctggggatgaattacgtcttcgccgagagctgggcgccggagtacggnaacgccattctctctaagtggcccatnaaaagctccaaatnttctaagaatttttcgaccacactgattttcanggaacgtntttgaaggcgngcatagaaggtttccc

SEQ ID NO: 89024 - DNA, 518 bp, Arabidopsis thaliana columbia
  unsure (1)..(518): unsure at all n locations
atgatacttccnnnnnnnnnnnnnnnnnnnnnnnnnnnnnnnnnnnnnnnnnnnnnnnnnnnnnnnnnnnnnnnnnnnnnncccacgcgtccgcaggtggattcttcttgatgaaagccttaacagaattcaggatcttctcattcttggcttgatcagaccaggaaggtaagagaccgggagtgtcaatcacccgtaccttaattccctgaaccaaaccctcaacatcttgaaccctctttgtccccatctggaatgcatcagtacaaaatttcacttcatcaaatatagaattgatcgttgcacttttaccaaccccactttttccgagaaccataatcgtacaagaaaaatcaagtggatcctgtccagcagcctcaagctgttctgccatggcactggcgcgatcaaaaaaaaaagnnnnnnnnnnnnnnnnnnnnnnnnnnnnnnnnnnnnnnnnnnnnnnnnnnnnnnnnnnnnnnnnnnnnnnnnnnnnnnnnnnnnnnnnnnnnnnnnnn

SEQ ID NO: 89025 - DNA, 658 bp, Arabidopsis thaliana columbia
tttaggacgcactatagaagatctatgacgtcgcatgcacgcgtacgtaagcttggatcctctagagctgtccgcccttttttttttcttttttttttttggaccacaaaacaaactccagtttatgtatcccattctcgttctcaccaaattaaatacatttcgacaagcaaacattgaaatttcaagaagaagagacagtcttgaaggagtcgcgaaggtgggttaatgtatcgtggtcgcggttccactcgggcgcaggggcgtttacgaaatgggcgtagagcttgttcttggagcaagtgactgtgatcaggctgtgctttccaaccccatctatctcgtacagatagtagacctggcccttgtctcgtccttcctcctcctccgacaccgactttgtccgcgccgggctaatcaaaatcctgcagctccacgtccgacaaggcaaggttgttcagaatcacatccctcggcgccagctgtctgaatcccgccaggaatgtcaggtactccttctccgtcttcttcttcgggttatagaattcgctgactgttccgtttgtccccttctccaccttcgacaccagcctctccttccacccttccggcacatcgtacacgtactccgccgatgtcttcctggctgaattccccc

SEQ ID NO: 89026 - DNA, 629 bp, Arabidopsis thaliana columbia
  unsure (1)..(629): unsure at all n locations
ggncaaaggnaatttgcctaacnanatgcttantttatttaaaccctataattaggaatttgatgaataattaaaggaatcacaaaaacaaaacctccagtttatgtatcccatcctcggtcctctccccaaattaaatacatttcgacaagcaaacattgaaatttcaagaagaagagacagtcttgaaggagtcgcgaaggtgggttaatgtatcgtggtcgcggttccactcgggcgcgcaggggcgtttacgaaatgggcgtagagcttgttcttggagcaagtgactgtgatcaggctgtgctttccaaccccatctatctcgtacagatagtagacctgccctgtctcgtccttcctcttcctccgacaccacttttgtccgcgccggctatcaaatcctgcagctccacgtccgacaaggcaagggtgttcagaatcacatccctcggggncaantgtctgaatcccgccaggaatgtcagggnanccttctncggcttcttcttcggggtnanaaattcgctggntgttcggctcgtggcgnatnctgaagccggggggnncncnagttcnaaanggcgnaaccggggggggcccactttntccctaggagggaattcngt

SEQ ID NO: 89027 - DNA, 836 bp, Arabidopsis thaliana columbia
  unsure (1)..(836): unsure at all n locations
tnatggaatttggggaaaaaacccagttttgaccatccggtcccaaattaaacattcggaagaaacatttgatttaaagaaaaaagaactttaaagagcccaaagggggttaatgaaccggggcggggtcaattgggccaaagggcgtttacaaaatggccgaaaactttgttcttggagaaagtgacttttgataaggctggtgctttccaaaccccaatctatcccggtaaagatagtagaccttgcccttgtctcgtccttcctctcctccgacaccactttgtccgcgccggctatcaaaatcctgcaagctccacgtccgacaaggcaaggttgttcagaatcacatccctcggcgccagctgtctgaatcccgccaggaatgtcaggtactccttctccgtcttcttcttcgggttatagaattcgctgtctgttccgtttgtccccttctccaccttcgacaccagcctctccttccacccttccggcacatcgtacacgtactccgccgatgtcttcctgtctgaattccccccgtatcctccgtagttcgccgcgctcgccgccgtcccgtagtaaattttgtacgtctggttcccctcgcctgccgccggcagcaccggaaccatagtcagcacggaagtcgcggccaacgcggcggccagggaggtgcctagacgtgatgctatcgcctttgggacgatcggcgttctggtggcggagataacgggagatgccaagaagattttcgtgcggacgcgtggctcgccattatactnnnnnnnnnnnnnnnnnnnnnnnnnnnnnnnnnnnnnnnnnnnnnnnnnnnn

SEQ ID NO: 89028 - DNA, 924 bp, Arabidopsis thaliana columbia
gcgtccgaaacaaaggtattgaaatacaattaattaatagattctgtatcacgcatatacccttagtactaaaatattaagaatttaattcatataataacatataattcgtctatatctatatatacataaaagagaaagaacatgttgattatatcaaaattatagaacaataaggaattttaacttatcatggggaaagacaccattgctgatataataacctctatacgaaatgctgacatgaatagaaaaggaacggttcggataggatcgactaacatcacggaaagtattgttaaaatccttttacgagagggttttatcgaaaacgtaaggaaacatcgcgaaaacaaccaatattttttgattttaaccctaagacatagacgaaataagaaagaatcctacaaaacgattttaaatttaaagagaataagtcgaccgggtctacgaatctattctaactctcaacgaattccacgaattttaggcggaataagaattgtaatcctttcgacttctcaaggtataatgacagaccgagaagctcgactaaaaagaatcggcggagaaattttgtgttatatatggtaatccttctaatataaaaattagatatctgtaacttacaatttgtgaaaaaagggggttgtgtaataccacccctgttcaaaaaagtttcggatgttttacttcgaatgaaattaaagaaaaaatgaattaataaaagttttctttcttaatcacttccgaacggcatggttcgattttgtttagatactaaagatttttttttcgttcatgcttttgaaaggattcgacatatttttgtataggtatacctataggataaaaaggtaaaaattttgagtaagttcttacgtataagttaataaggggacagccattttgtagactcca

SEQ ID NO: 89029 - DNA, 472 bp, Arabidopsis thaliana columbia
cttcaatccccttttttttttcgtttcgtcgtttgttcgttttctctatcgctctcgttcatctacgcaatctctctcactaggtacagttttaaatgggtaagaagaagtcagacgagagtgctgctaccacaaaggtgaagccaagtgggaaagatgcttcgaaagattctaaaaaagagaaattgtcagtctcggctatgcttgcaggcatggatcagaaagatgataaaccgaagaagggctcatcatctagaaccaaggctgctccgaaatctacatcttacactgatggcatagatcttcctccttctgatgaagaagacgacggtgaatctgatgaggaagagagacagaaggaagcaaggaggaagctgaagagtgaacaaaggcaccttgagatatctgtgactgataaggaacaaaagaagcgagaggcgaaagaaagattagctcttcaggctgcagagtc

SEQ ID NO: 89030 - DNA, 825 bp, Arabidopsis thaliana columbia
  unsure (1)..(825): unsure at all n locations
nnnnnnnnnnnnnnnnnnnnnnnnnnnnnnnnnnnnnnnnnnnnnnnnnnnnnnnnnnncaaacacccacgcgtccgaagctcctagaggaaatctgagagcggtggctcttatcgccggcgataacaacgtccgaggctgtcttcaattcgtacaagacatttccggaactactcatgtcaccgggaagatctcaggactctctcctggcttccatggatttcatattcactcttttggtgataccacaaatggctgcatctctactggacctcacttcaatccattaaatcgagttcacgggccaccgaacgaggaagagcgtcatgctggcgatttgggtaacattcttgcaggatcaaacggtgttgctgaaatcttaatcaaagacaaacatataccgcttagtgggcagtattccatactcgggagggcggttgttgtgcatgcggatcctgatgaccttgggaaaggagggcacaagcttagcaaatcaactggaaacgcaggctcgagagttggatgtggtatcatcggacttcaatcatctgcggatgctaaactatagcttttgagatcaacggacagagccacactcagtttttcatcagtagatgtacattagagatcatcgtacgaagtgacattgtatattgacatcctgttactttttaagacatgagttataatgtaaaccagaacgtaatttccagttttcattggaaaagnnnnnnnnnnnnnnnnnnnnnnnnnnnnnnnnnnnnnnnnnnnnnnnnnnnnnnnnnnnnnnnnnnnnnnnnnnnnnnnnnnnnnnnnnnnnnnnnn

SEQ ID NO: 89031 - DNA, 451 bp, Arabidopsis thaliana columbia
tgcaatcatatacggaaagagggcaactacagtttgctgataattctgaactagcactcattgaagcaaaattgtcatggattgttcacattgttgccgctattgttaaaataaagcagtgcagtggttgtagtgtggagacgcaagaggtgcttgatgctggactctccgctcgtgttttgcggcttagtaaaatgttatggacaagtggacctgcataggcagagatatgggtgcaaataaggtaaccaaagggctttgatcgtggccattcttacccctttcttccaaaattttcccggaagtcttacgttggtgatcaggccatgcattcatcaaaacagttgtatgccagattgaaagaactccttggactgcatgatcatcttgttctgttgaacgttattgttggcaagattgctacaaacttaaaatgttatacagagagtga

SEQ ID NO: 89032 - DNA, 385 bp, Arabidopsis thaliana columbia
gtcagctttatcagagaaagtttcccccattggtgaaaatttgtaagagatggacaaggaaaaggagcaaactttggagtggaacgaagcacagaagatagatataagcgttgaccttttggctgcagccaagaaacaccttctcttcctcggagctgttgatcggaaccgttgtctctacgatggccctgcactccaaagagccatctacagatacaatgcttattggcttcccttgcttgctcaatacaccgagtcttcttctatctgtcaaggaccattagtccctcctcttgactgtgaatgggtttggcattgccacaggcttaatccggcgaggtataagactgattgtgagcaattctatgggagagttctggacaat

SEQ ID NO: 89033 - DNA, 767 bp, Arabidopsis thaliana columbia
  unsure (1)..(767): unsure at all n locations
nnnnnnnnnnnnnnnnnnnnnnnnnnnnnnnnnnnnnnnnnnnnnnnnnnnnnnnnnnnnnnnnnnnnnnncttattttcgatccgcgcgtgcgaaaaatatttgtgttatcattattttctatttacgtcctctcatcagcggctgaaaaaaatacatcattttctgcgctttttgcttttggtgattcagtcttagatacgggaaacaataattttcttcttactcttctcaaaggaaattattggccatatggtttgagttttgactataaatttccgacgggaagattcggaaatggaagagttttcaccgatatagttgccgaaggtttacagatcaaaagacttgtaccagcttatagcaagattcgtcgcatcagttctgaagaccttaagactggcgtttgttttgcatcaggtggttcaggaattgacgatcttacatcccgaacactgagagttttatcggcaggtgaccaggtaaaagactttaaagactatttggagaagctaagaagagtagtgcaacgtaagaaaaaagtcaaagaaatagtttcaaacgctgggtttcttttttctgaaggaaataatgatcttggatactttgtcgctcccgcacttcttcgatgacagtccacaacaacatacaccagtagaatggttgtttggaccacaaagtttctaaaacatttatacgatcttggagcgagaaaatttgcggtgatgggagtgatgcctgtgggatgtttgcctagccatcgagcc

SEQ ID NO: 89034 - DNA, 516 bp, Arabidopsis thaliana columbia
  unsure (1)..(516): unsure at all n locations
nnnnnnnnnnnnnnnnnnnnnnnnnnnnnnnnnnnnnnnnnnnnnnnnnnnnnnnnnnnnnnnnnnnccaggggtgcgggcacgcgtacacccacgcgtccgggaaatggaggagttaagcgatagtttaaaccatgtaagagggtttatgtacgagaaagatgtgacgtatatggatttcctaaaccgagttcgaaccggagagctaaacctgaaatccaaaggccaatgggatgttccacatccatggcttaatctcttcgtaccaaaaactcaaatctccaaatttgatgatggtgtttttaagggtattatcctaagaaataacatcactagcggtcctgttcttgtttatcctatgaatcgcaacaagtaagtttaactcgatattgcaaaatttactatctacattttcgttttggaatccgaaattttcttacaggttaatttatgcggggtttttaggggggaatgatcggatggtctgccgcttaccccgggaagaggtttttttgc

SEQ ID NO: 89035 - DNA, 581 bp, Arabidopsis thaliana columbia
ggaaaagattagggtgaatgtggtacccaatgcaaggtctggtgttgcggctttcagagatagcaggatgttcatgggaaatgatgatacagagtcggattcatcccatggctatgatgatgaggaggagagaaatcgcttaatgcggaacaaatcttctgtctcagttggtgggttgaataattctcattttccaatactcaaatccagacaagatattaaaaagagcaaatccagaaagaaagatatgcaggagaatgaattgcttgatggacggagtgcgtacttgaaatatttaggcgtatctggagaacacatctatgcgccagggacagagaagcactccttcaagtcaaaacagaagggtaagatgcgtgacaggagtcccttagagaacttttcctctcgagattttgaagatggcccgatcacaagcttgagtgagtttcaggacagaaacaacaggaaggagtttttcaggtcaaacaggaatagccagacaagagagcaaatgattgatagaacactatttcagagaccatctgcaaaaccaaatttgtctgggagaaaaagagtctttg

SEQ ID NO: 89036 - DNA, 761 bp, Arabidopsis thaliana columbia
  unsure (1)..(761): unsure at all n locations
annnnnnnnnnnnnnnnnnnnnnnnnnnnnnnnnnnnnnnnnnnnnnnnnnnnnnnnnnnnnnnnnnnnnnnnnnnnnnccacgcgtgcgcgcgtctttgcctttcgtctcttctctgctcgccgatcgttactccgtcgaaatcaccatggcgccaaagaaggataaggttccaccaccgtcatcaaagccggccaaatctggaggtggaaaacagaagaagaagaagtggagcaagggaaagcaaaaggagaaggtgaacaacatggtgttgtttgatcaaggcacttatgacaagcttctcactgaagctcccaagttcaagctcatcactccatcaatcctctccgaccgtatgaggattaatgggtctcttgcgaggagggcgattagggagctaatggcaaaaggtttgatcaggatggtctctgcacactcgagccagcagatctacactcgtgccaccaacacctaaaaagcgtgacctttcaatggtttggttctcgactcttttcttggtttttgtcttttgatgtatacattaatcatcagaactcttatagttcttttttggttctcgttactttgtgctccagaacctctttagaatgttgttttgagatattgtctctttaatcggagttgctttttccccnaaaaaaaaatattttaaacccccaaagcttaagggcggccgctctagaggatccaagcttaggtacgcgtgcatgcgacgtcatagtcttntagagtggacctaa

SEQ ID NO: 89037 - DNA, 513 bp, Arabidopsis thaliana columbia
ctttgaggcaatggcgctcgatagttctgttgctctgtcacctcgccggcggcatggcttgttgcgagatcaggttcagcttataaaaagaaaggactctggaagatatgagatagttccaatagaggatccattgtcttttgaaaaaggtttctacgctgttattcgtgcttgtcaattattggctcagaagaacgatgggctcattttggttgggttagctggtccttctggagctggcaaaaccattttcactgagaagattctcaattttatgcctagtattgctatcattaacatggacaactataatgatggtactcgtgttatcgatggaaactttgatgatccaaggttgactgactatgatacacttcttgacaatatacatggtctaagggatggaaaacctgttcaggttccaatatatgacttcaagtcgagttctcgaataggttacagaacgcttgaggtgcctagctctcgcattgttattctagaatgcatatatgc

SEQ ID NO: 89038 - DNA, 429 bp, Arabidopsis thaliana columbia
tcgtataatctcaatttcaacctcttaagtctctccaaagtcccataaaccctaaaacaatgtcgagacgtttcaatccgttagaagatccgccgagtgcttcttcaagcgacgaagaaggtaaagaaatcgcacgagactcttcttcggatgatgaagatgacgtttcctctgaaaacccatcacctttgaagacgactctcgacgccgtttccgattccgaatctggttcggatgaagaaaccgattcagactctgaactcgagaagaagaaagatcaagttgtgacgaatcctgtggatgtgaagagggctaagaaggtgaaaacctccgagaaatctggggctaaacgttctcttgaagtggatgaagcagcagtgtctatggatgtgaagagggctaagaaggtttcaggggaagaggagaaga

SEQ ID NO: 89039 - DNA, 325 bp, Arabidopsis thaliana columbia
cgcgtccgaggacgcgtgggctccaatggcgcctcagcttctctcctccagtaacttcaaatctctctttgactctgtcgatacgttcctcttcgactgcgatggtgttatatggaagggtgaaacgctcatcgatggcgtctcccaaactctcgaccttatccgttctaagggtaaaaatgttgtctttgtgaccaacaattccgtaaaatcgaggaggcaatacgctgaaaagttccgatctttgggtgtcacttctattactcaggatgagatcttctcttcgtcatttgcggcagctatgtatctcaaagtcaataacttt

SEQ ID NO: 89040 - DNA, 1562 bp, Arabidopsis thaliana columbia
  unsure (1)..(1562): unsure at all n locations
nnnnnnnnnnccnnnnnnnnnnnnnnnnnnnnnnnnnnnnnnnnnnnnnnnnnnnnnnnnnnnnnaccacgcgtccgagaataccacgtagtaatattagtagtaatttttttatttttttggggaaaaaatgggtggatattttggagtttctacaatttttattatctgtttgttgggaatttcagccaatgctgaggtattcaccattggttcttcatcaggttctgatattactcaggcacttctgaaagcattcacatcggcatgccaatcttcgtcaccaagcaaagtggtgatcccaaaaggagagttcaagcttggtgagatcgagatgaggggtccatgcaaagctcccattgaggtcacccttcaaggtactgtcaaagctgacggtaacgctatccaagggaaggaaaaatgggtcgtcttcggcaacattgatggctttaagttgaacggaggaggagccttcgacggtgaaggcaatgcagcttggagagtcaataactgtcacaagactttcgagtgcaagaaacttcccatcagtataaggtttgacttcatattgaactctgagatcagagacatatcctcgatcgatgccaagaacttccacatcaacgtgttgggagccaagaacatgaccatgaataacatcaagatcgtcgccccagaagacagtcccaacactgatggaatccatttgggaagaagtgacggaatcaagatccttaactctttcatctccaccggagacgattgtatctccgtcggagatgggatgaagaaccttcacgtggagaaggtcacatgcggtccgggacacggaatcagtgtcgggagtcttggaaggtacggacacgagcaagatgtcagcggcattaaggtcatcaactgcactcttcaagagactgacaacgggttgaggatcaagacatggccctctgcagcttgctccaccaccgcatccgatattcatttcgaggatattatcctcaaggacgttagcaacccaatcctcatcgaccaagagtactgcccttggaaccagtgcaacaagcaaaaagcatcaacaattaagttggtgaacattagcttcaagaacatcagaggaacatcagggaacaaggacgcggtgaagctactttgcagcaaggggtatccgtgccagaacgtggagattggagacattgatatcaagtacaatggagcagatggtccagccactttccattgctcaaacgtcagtcccaaaatcttgggatctcagagccctaaagcatgcagcgctccagcagcctaaatgtagaagctctaaaacaattaattaatcaaacactcattcaattcaattttatatatgaatttcttctacacagtaactatatacgatgtatgctctcatttaattcaacaatgaatgcatcatccattatttcttggtgaaaaaaaaaaaaaaaaaaaaaaaaaacaaagggcggccgctctagaggatccaagcttacgtacgcgtgcaggcgacgtcaagatcttctatagtggtacctaanngtaaatcg

SEQ ID NO: 89041 - DNA, 323 bp, Arabidopsis thaliana columbia
tgcttcaaaggcaagaccgttacaaatctgacaagataagaatcatctatacaactgcactaaatgttcttggtaaatcaaggaggcctgtggaagctctcaatgtattccacgctatgctgttacaaatttcatcatatccggatatggtagcataccgttcaattgcagtcacacttggacaagctgggcatatcaaggaactcttctatgtgattgacacaatgaggtctccacctaaaaagaagttcaagccaacaacacttgaaaaatgggatccccggcttgaaccagatgttgttgtttacaatgcggtgctcaac

SEQ ID NO: 89042 - DNA, 303 bp, Arabidopsis thaliana columbia
gccaggcgtccgtactcttgaacatcatccagcccattctatctggggtagcaattggagcagggatgcagagtatggtagcattagtgaacttagcatcttattatgcaattggtgttcctttaggtgtcctccttgtttacgttttcaattttgggattaagggactctggtccggaatgttggctggagttggtatccaaacgttgatattgtgttatgttatttacaaaactgactgggaattgggggttaagaagacaaacgagcgtatgagaacgtggactctaaatttacctgctg

SEQ ID NO: 89043 - DNA, 648 bp, Arabidopsis thaliana columbia
  unsure (1)..(648): unsure at all n locations
nnnnnnnnnnnnnnnnnnnnnnnnnnnnnnnnnnnnnnnnnnnnnnnnnnnnnnnnnnnnnnnnnnnnnnnnnnnccaggcgtgcggaactactaaacaacactcacaccaaaaagacgacgatggtttcgtttcgcttccctttctcgttttctcagcccccgcgtgccaccacgtcattctccggattctccatttccgctgtcgctgtctccgtcaccgttggcgccgcagccgccggagctgcgatcgcggcgtcccggaatcccagccatccgattctagagtgggccttctcctctcaccgttcgtctctttcaccatggggatctataactctagcagacgaatccgttgtcgaacctaagaccggtttctcgtttcccgcttcaatcggagattcccggcgattactcggcgtcggcctgaggaagaagagcttactgggattgaagaacatcgatgtctacgccttcggcgtgtatgctgattgtgatgatgtgaagaaacttgtgggagacaagtacgcaaatcttccagcttcagagatcagggggaacaagtcattcatggatgatctcatgggaagccgatattaagatgacgataaggctacagattggctacggcaaactcaacatccgatcc

SEQ ID NO: 89044 - DNA, 721 bp, Arabidopsis thaliana columbia
  unsure (1)..(721): unsure at all n locations
cagctaccatacgactcactttagggaaagctcgtacgcctgcaggtaccggtccggaattcccgggtcgacccacgcctccgccggggtttgtcaacagttgtttgtgataacaaagctcattggccgaaccaaaaacatactactgccgcctttgtagccagcaatggttctcagtccagcgtttcaaccaatcctttgaaggaaccagagggtttgcagcccgtgtggtgccaagtctgccagatcagctgcaacagcaaggttgcatttgcaagtcacacatatgggaaaaaacaccgacagaacttggaatcacaatcagccaagaacgaaactatgtctactggaccaggcaagctttctaaagattatggagaaaaaacgaagaaagtatcatgcaaaaaccaaaccacatttgattctcaactgaagagtcagaaccattataccatggcgaaggagcttgtagagaaggcatttgtctccgcatttgagcatgtctccgcattggagcagttcagtattgttgactcaaggacaatccgngaagncaccgnccaagaaaaagaagcaacaaaggngcagacacttgtaaagatggatggtaaatgggtttcgaggggaccngaagntaaagtgggattttaccccngggaaaacctttggggtggcncttngngcagttcngtatttncctcaaggggtnttccccggggng

SEQ ID NO: 89045 - DNA, 376 bp, Arabidopsis thaliana columbia
tgttgatcgatattttcagttaacaaacaaaagcccaaatggcgcgtaatcggagtgtcctaattttgtcggcggacacttcattctaataaacggcggcagaaaatgaactctctgttcaccgccttccgccgcaacctcctcttaaaccctaatcctcaccgcaacttctttcttcatagattgttatcatcatctcgccgttcatccccgctcattcccgtcgagcctctcatccagcggatacagtcacccgccgtacccgattctacatgtactccaccgcaacaaaacaccgtctcgaaaaccgatctctctactatatcgaatcttctcgagaacactaatgttgttccccggtcgagtctcgagtcag

SEQ ID NO: 89046 - DNA, 1089 bp, Arabidopsis thaliana columbia
  unsure (1)..(1089): unsure at all n locations
cttctttctcaaattagcttttctttatcgtcttcctcaagcgtgagattcgttgtggatatagtttttctccttgattctctggttctttccatgatccaattttaagggtttcacggcttcgtttttttgggtatatctagctctatcgttcgtggtggttttctttctggatcaaagttttctgagatctctgcgatttctgggattcgaaaattggagaattagggcttttttacggtaacagggtttcgaagagcataagataagaatgccttcggtgccctctaagcttcttcctctcctgtctttgattccttcgttgactccttatcattctggtttgagttctaatcgtttgaaacctcttgaaaagtgtgattggcgtggtaatcttagttaacatttcctttccttcttctctcctttttaccctttcttctctcgccctcgtttacttcttgagattttcttagctcgatttgatctttggtgctttaacttctggcggtgtttgatttgcagcacaaaaagttactactactactgtgattaccttgtactgttagttggatatgagctctgtttgtggtaagttggatttcaaagatgcagactttgacatctctacttcgagtcccacacaatgttctaaaggctcggagcatacctcgtttactggctctgaagattctcaggagtctgatggagatgaaactggttatatagacccaactgtgaatgatgaaaccgctgttcaggatttcggcaaatctgttttaagtcctaactcttctgatgatgaagacaaggatgagaaccttatgactcagacaccaattggtcctatcccagccataaaaggcagtcgagagaagtttggcttgtcactgaggaagtcgagtgtttcatggggggctgatgtgtatgaacctccttccctcggtagcctcccacaacagtcacacgaggcaggaacagcagcagaattccagggcaaggcaccccaggagccggaagaaaggccnaagntaanaaacctcccncggggggancnaagnagagaagtttcgaaanagngggaattgt

SEQ ID NO: 89047 - DNA, 509 bp, Arabidopsis thaliana columbia
  unsure (1)..(509): unsure at all n locations
cggacgcgtgggcaacttcatcgtctttttcagttcaacaacttcatcgtctttttcagttcaacctccgacatctctcgtctccaggtgattgatcccatcgaagggtctatggaagagaacaacaagcgccgggagcgattccgactctaattccgtcgaagattcacaagactattacgaaccgatctcagccgtcgatttatataactccaacgacgatgaagaagacagttatcttccgatcggtggagatggtctctctaacggccattgtatgattccggatgcagaggtaggaatctnttctattagtataaacgntaacacagacagcgaagaagagacaagagancgggacttngaccngngatccgtagagcggtttttaggagggacgnaccggcggagaagatnnnccgttaatttgggggngaattccccttaggggttattgnggcaaatncgggccattttatttccctngancgggtncttatttggncncc

SEQ ID NO: 89048 - DNA, 463 bp, Arabidopsis thaliana columbia
taccggtatttcatggctggacccacgcgtccgcccacgcgtccgctcattttgttttcttttctcgcacaactaaaaaaaaagaacattggaagcttcttcttcctattcttcttctgccaaacaggaatcggtccttctttgcgcacaagcaaaaatccaagagacatcgagatatgagagagatctcgatctcgacgattactctttcatggtcgcatcttctactctgcgcttcgatttgtcgccacttcttcttaggtatatctggtgatcccaatagttcaagtactggagcaaaggctgaatctcatacttcttccagcaaaacaggcacgagagtgatctttagactgctcgggtttggtgctgtagcgggactttcgttcttcttgtacaaactgtggcaaaagaagaaaagagatgagcagtatgctcggctattgaaactgtttgaggaaga

SEQ ID NO: 89049 - DNA, 519 bp, Arabidopsis thaliana columbia
  unsure (1)..(519): unsure at all n locations
acaaggnctagcccanaccnnttnccgnattnccctngncccnctctnnttggccagcgtcgntccncnccggnnccgcttacccccatggatctnccaaggttgcttctggaaaccagcccacgaacccaggaaactggaaagaggagcattttgtgcttatttctctgtctggctggggcttacttttctacagtggatacaagctcgccactgggggaaaaaaagagacgcctgtggagagtacacaatgagtttcattgtcaccaggaagaccttttatggagagacctctcattctcatgcactttgttttcccttttagcagattgtgactggtcttgtgtttcattttgaaaataatttgcatcacttttgagatctgatgatgtctgcaatggataaattcttgacagttttgtgtttcataatatcctatgtttgaaacagacaggatttaagcaaatcattgtctcactacgtatgttgatatatgctttcgagctatttccttcaacc

SEQ ID NO: 89050 - DNA, 750 bp, Arabidopsis thaliana columbia
  unsure (1)..(750): unsure at all n locations
atgatactccnnnnnnnnnnnnnnnnnnnnnnnnnnnnnnnnnnnnnnnnnnnnnnnnnnnnnnnnnnnnnnnnnnnnnnccacgcgtncgcccacgcgtncgcccacgcgtncgcggacgcgtgggctggaaacattagggagcctctcagatcctcaagaaaaccctaaatcanaagtcgagatcgatggcgtccttcgctcgccgtgccatgagcttagctcagatcccatctgctcgtatttcctctggagccgcttctattggtcagcgtcgttgcctcgccggcgccgctgatcaccatggatctaccaaggttgacttctggaaacagcccacgaacccaggaaactggaaagaggagcattggatacaagctcgccactgggggaaaaaaagagacgcctgtggagagtacacaatgagtttcattgtcaccaggaagaccttttatggagagacctctcattctcatgcactttgttttcccttttagcagattgtgactggtcttgtgtttcattttgaaaataaaaagcatcacttttgagatctgatgatgtctgcaatggataaattcttgacagttttgtgtttcataaaatcctatgtttgaaacagacaggatttaagcaaatcattgtctccaaaaaaaaaaaaaaaaaaaaaaaaaaaaaaaaaaaaaaaaaaaaaaagggcggccgctctagaggatccaagcttacgtacgcgtgcatgcgacgtcatag

SEQ ID NO: 89051 - DNA, 635 bp, Arabidopsis thaliana columbia
  unsure (1)..(635): unsure at all n locations
ccgtcacttgattctctcttccttcatcaatcaatctcgtctcctggaaaacattagggagcctctcagatcctcaagaaaaccctaaatcaaaagtcgagatcgatggcgtccttcgctcgccgtgccatgagcttagctcagatcccatctgctcgtatttcctctggagccgcttctattggtcagcgtcgttgcctcgccggcgccgctgatcaccatggatctaccaaggttgacttctggaaacagcccacgaacccaggaaactggaaagaggagcattttgtgcttatttctctgtctggctggggcttacttttctacagtggatacaagctcgccactgggggaaaaaaagagacgcctgtggagagtacacaatgagtttcattgtcaccaggaagaccttttatggagagacctctcattctcatgcactttgttttcccttttagcagattgtgactggtcttgtgtttcattttgaaaattatttgctggaatcaacttttcggagatcttgntgnntgtctgcaaattgggntnaatttctttgnnaagnttttggtgttttcataantatccnnatggtttgaaaccagnccagggntttaanggaaaatcaattgtct

SEQ ID NO: 89052 - DNA, 323 bp, Arabidopsis thaliana columbia
  unsure (1)..(323): unsure at all n locations
nnnnnnnnnnnnnnnnnnnnnnnnnnnnnnnnnnnnnnnnnnnnnnnnnnnnnnnnnnnnnnnccacgggtgcgggtgccttgttgtggccattacatatgttggccaaaaagcttatctacaagaaaattcattcgtctattgggatatcgaaggctggtattagcggaggtggtagtttacccattcatgttgacaagttttttgaggccatcggtgtgattctacaaaatggttatggtttgacagagacctcacctgttgtctgtgcacggacacttagctgcaatgttcttggctcagcttggcatccaatgcatggt

SEQ ID NO: 89053 - DNA, 1024 bp, Arabidopsis thaliana columbia
  unsure (1)..(1024): unsure at all n locations
tacgactcactataggggaagctggtcgcctgcagtaccggtcccgaatttccgggtcgaccacgccgtccgccacgcggtccggaagaagcttagcttataatcgaatctaagccgtttcgggaaattctgtttgtaggtgacaaaatcctcttatagggttattcttagctatgaatttcctctgcaatttctttttttccccgccaaaatttctcctgaagcaaatgtagctttttacttgctgaactagggttttgttcgattttgttcctctttcctcgctgattttgtcggaatttctgggtttgggaagagaaattggagtcgttattgattgaaatgaagaagcttttaggaggtccgggaactgtgtgtggtctgttactgagaatcggacaatgtgcttcagctgctgcttcaatcggcgttatggtctctgctaaagagttctctgttcacactgctttttgctacttgattgcgtcattgggtcttcaattgttgtggagctttgggctagcatgtcttgatgtttatgctctcaggggaaagaaagatctccaaaaccctatcttggttagcttattcgtcgttggtgattgggtgacggcaatgttatctcttgcagctgcatgttcatcagcaggagttgtagtcttgtatgaaaaagatatcaagtattgcaatactcaaagccaatatccatgtcttaggtatgaagtagcggtggcgctttctttcgtcactgggatccagatggcggtttcttctcaggtcacattttggatcttagcctcggtttagttagtttcgcaaagaactcccaactttttcttcttcttggaatgttgagacatctttgtagcttttgatgacgttaacaatctgcttctaatcgaatctatcaatgtttcttgcaaaaaaaaaaaaaaaaaagnnnnnnnnnnnnnnnnnnnnnnnnnnnnnnnnnnnnnnnnnnnnnnnnnnnnnnnnnnnnnnnnnnnnnnnnnnacattccgca

SEQ ID NO: 89054 - DNA, 978 bp, Arabidopsis thaliana columbia
  unsure (1)..(978): unsure at all n locations
atgaactccnnnnnnnnnnnnnnnnnnnnnnnnnnnnnnnnnnnnnnnnnnnnnnnnnnnnnnnnnnnnnnnnnnnnnnccacgcgtccgcggacgcgtgggtgatgattcatttgcgctagttgatgcattactcgctgatcgcaccaaccttatagagcacaaccctaagatttgtatggagattggatgcggaagcggatatgtcataacttcacttatacttcttcttcaaaacgaagttcctggtgttcattatctcgccattgacactaacccgatagctacaagagtgacaaaagaaactctagaagcacatggagttaatgctgatgttatctgcgcagatttagctactggtctagagaagagacttgctggctcagtcgacgtgattgtggtgaatccgccttatgtgccaacacctgaatatgaagttggaatggaaggtattgcctctgcttgggcaggagggggaaaatggccggacagtcatcgataaaatcttgcctgtggttgatcttttgctatcagaggaaggatggttctacttagtgacattaacttcaaaatttcccagcagaggatttgtcttgatgatgagaaagaaaggttatgcctcgcggagcgtcgttcagagatcaacagaagaggagaatctcgttatcctaaagttctggagagacaaggatgaggagagccaggacaaagagacatcatcatcatcgtttgtttcgcagttttcgaaatccttatcttcgcttatggagaaacaatggcgctgatactacaaagatggctagagatctcataagcatgctttgtttaaccaagaattctctagtgttttaatttttatgaaaatcatgttttgtgttggtggtgtagtcgtaacagtgatttgatttagtggggttattggttagtggattttaactgatgtgaaactttgattttcaattccacattatgtgatat

SEQ ID NO: 89055 - DNA, 618 bp, Arabidopsis thaliana columbia
  unsure (1)..(618): unsure at all n locations
atgatctccnnnnnnnnnnnnnnnnnnnnnnnnnnnnnnnnnnnnnnnnnnnnnnnnnnnnnnnnnnnnnnnnnnnnnccacgcgtccgcgcgagtctcgacggctgcggaaatcggaaaatcacgattgaggactttgagctgccacgaagatggcgatgaggttgaaatcaatggcgactttgccgaaattgattcaaagtatgagaaaagaagttccgaagcattctaatcctgttttgccctctctgagacgagctttttccctctatgatcagatcaatctcattgacaatgttcctgaagaccagcttcgcttccaagaatttaatgatacgagtttcactgtgaatggagtcaaatacgaaggtagcttactctgtgttgggaatctgttaatgtcatggagtcctcgtaaattttcagagatcaccactgatagcttgtctatcttccagacagttcgacctattccagagctcttgattgttggttgtggaagagacattcacccggtaactcccgaggttccgtcagtcttgtcaacgccccttggcattgaaactagaaacagttgattctagaaatgctgcatcaacgtacaacattctgaatgaa

SEQ ID NO: 89056 - DNA, 525 bp, Arabidopsis thaliana columbia
  unsure (1)..(525): unsure at all n locations
cccnnccagattatgtcgnttcctggatgngncaatcgaggtgcttcncgtgtggnatctgttatgtcangngccccgtaaattttcnggatcnccactgatagcttgtctatcttccagacagttcgacttattccagagctcttgattgttgnttgtggaagagacattcacccggtaactcccgaggtccgtcagtttgtcaagtcccttggcatgaaactagaaacagttgattctagaaatgctgcatcaacgtacaacattctgaatgaagaaggaagagtcgttgctgcggcattgcttccatatggagttacatcctaaagaaaactaacaactcgagctctggctttctaaactgtaaatggtttttgagaccttccgaaaataaaccgaatttcatcggagtttttattgcgtttgagctatataacaaacgttgtaacatggtgcgactttatctcgcatttctcatccttccaaagatataatatctccagnnnnnnnnnnnnnnnnnnnnnn

SEQ ID NO: 89057 - DNA, 697 bp, Arabidopsis thaliana columbia
  unsure (1)..(697): unsure at all n locations
atgaactccnnnnnnnnnnnnnnnnnnnnnnnnnnnnnnnnnnnnnnnnnnnnnnnnnnnnnnnnnnnnnnnnnnnnnnccacgcgtccgcggacgcgtggggtccgaaaaatctgacaaggatgaagcaatcaagtgtcgtcgatctgttacttcttctcctggcgatcgctcttcttgcgacgccggcgttctccgatctggttttatccaaagtcgaacgtcgtatcgatgtgacttcacagattgctcgtgttactaagacccttaaggttgtaaattctggctctgaatcagtttctgagtttgctttgacattcccaaagtttcttggtaacaacttggcttatctatcggttgctcctagtgagggaaaggggaaatctaaacgaactttagtgaatctctctgtgagagaagctgatcagaaaggtttacctgattcaattagtggttactcagttgcattacccaaaccactgagtaaaggcgatactttgacgctggaggtagttgctgcattcaccaatgttcttcagccatttcctgaaaagataactcggggtgaaacccatcttgttatgctcccagaaggcgcacaatttctctctccttacgcggttgagtctcagtcattgtctatcaaactaccgaatgccagaatcgaatcttacaccaaattcgagaatacaaagct

SEQ ID NO: 89058 - DNA, 631 bp, Arabidopsis thaliana columbia
  unsure (1)..(631): unsure at all n locations
gtatgnnnnnnnnnnnnnnnnnnnnnnnnnnnnnnnnnnnnnnnnnnnnnnnnnnnnnnnnnnnnnnnnnnnnnnnnnnnccacgcgtccgcggacgcgtgggcggacgcgtgggttctggaactggagtccactgtttaagcttcactgtctctgaatcggcaaagctttagaagaaaatggcatcaggaggtaaagccaagtacataatcggtgctctcatcggttctttcggaatctcatacatcttcgacaaagttatctctgataataagatctttggagggactactccaggaactgtctctaacaaagaatggtgggcagcaacggatgagaaattccaagcatggccaagaaccgctggtcctcccgttgttatgaatcccattagccgtcagaatttcatcgtcaagactcgtccggaatgagaaaataataagttcaatgctttgattttcagaataagatgaacgatgacgatgttttctaaatccgagcttgtactaaataacaatacattacaacacggtttgcgtaactaaacccaaaactaaagnnnnnnnnnnnnnnnnnnnnnnnnnnnnnnnnnnnnnnnnnnnnnnnnnnnnnnnnnnnnnnnnnngaccta

SEQ ID NO: 89059 - DNA, 519 bp, Arabidopsis thaliana columbia
  unsure (1)..(519): unsure at all n locations
atgatactccnnnnnnnnnnnnnnnnnnnnnnnnnnnnnnnnnnnnnnnnnnnnnnnnnnnnnnnnnnnnnnnnnnnnnnccacgcgtgcgcgttctcgccggacatgctagaagataacaatccacacccaaacttacccagagagacaatctctgattcacgtccactacaattaccgaatctctccgaagccaccgatcacctacgctagtttcagtggcaattcgaagcttccaatgagtttgttctgtaattcaatcgaaaccctttatccaaaaccattcctttcacacaaatctcacttctttaccttctccaattccaaattccaaaaccctaaattcacaagcttcccacttcgtcaccaatggcggatcgaatcatgtctgaaatcagcatcttcatcagaaatcgatatggtaagaaacaaagaaggtatctttgcaccaaaggagaagaaagttgtagtcttatgggacttagacaacaaaccaccacgaggtccaccatacgaagc

SEQ ID NO: 89060 - DNA, 380 bp, Arabidopsis thaliana columbia
cgccattgttacccaattttgctctgaattctattaagtctcatcggaattattcaaatgccttccataaatttcgaaatgacagagcgtggagctatggtggtatcggcttctacctgttacgttccttttcgatgtcctcaagcaagaaaagattttgctttcgtcgagccgagtaagaagctaaaccctaatcgtgtattgataaagcctccggtttacacgtattctccggcactgacggcggcgaaatgtaacatttttgattacgcggaaactggtgagaatttggtcggcgataagcaatttgtgcggtggtttcgtgaagcttggccttatttgtgggctcatcgtagctgtaccttcgtcgttactatctc

SEQ ID NO: 89061 - DNA, 626 bp, Arabidopsis thaliana columbia
  unsure (1)..(626): unsure at all n locations
nnnnnnnnnnnnnnnnnnnnnnnnnnnnnnnnnnnnnnnnnnnnnnnnnnnnnnnnnnnnnnnnnnnnnnnnnnnnnnnnnnccacgcgtgcgagtaacgagatctagcacaaactcgtagtgtggtgtagaagaagacaaaagcaaggagcttcataataaaaccctagagatatttgtttctccaatttcaaaagacgagacgtgaagaagacgatcgaagatgaacattttcagattagctggtgatatgactcacctagccagtgttcttgtcttgcttctcaagatccacaccatcaaatcctgcgctggtgtttcattgaagactcaagaactctatgccattgtctttgcgacgcgttatttggatattttcacgagttttgtgtctctgtacaacacctctatgaagttggtgtttttaggaagttctttttcgattgtgtggtacatgaagtatcataaggccgtccacaggacttacgacagagagcaagataacgtttcggcattgggtccttgtgcttccttgctttctcttagcncttttgntacatgaaaagttaccttcttnaggattgtgncgcctcattgacttgaggctgtgcaaatacccagctgct

SEQ ID NO: 89062 - DNA, 626 bp, Arabidopsis thaliana columbia
gatccgaagaggaaatcccgggttcaagaagcgcttaattactatttgatcgagtcatccgtcgcacttttcatctccttcatgattaacttgtttgtgactactgtctttgcaaaggggttttatggaactgagaaagctaataacattggcctagttaatgctggtcagtatcttcaagaaaagtttggaggcgggcttcttccgattctttatatctggggtatcgggttgttagcagccggacaaagcagtacgataactggtacatatgctggacagtttataatgggcggttttctgaatctccggcttaagaaatggatgagggcagtaataacaagaagctgtgctattgtgcctacaatgattgtggcaatcgtgttcaatacttctgaagcttccttggatgttttgaatgaatggctcaatgtccttcagtctgtacaaattccttttgctcttctccctcttctaaccttggtatccaaagaagaaattatgggagacttcaagattgggcctattctccagagaatagcttggactgtggctgcacttgtaatgatcatcaatgggtatcttctgttggatttctttgtatcagaagtcgacgggtttctgtt

SEQ ID NO: 89063 - DNA, 535 bp, Arabidopsis thaliana columbia
ccgcgatcgagaaagacgtaatttgatcatcggagtaaaagatattgttcgacagtgggactcccgggaacgaagatggcgatggcatcattcgggcagctaaatctcgaggaacctcctccaatctggggatctcgcagcgttgattgctttgagaagctcgaacaaattggtgaaggcacttacggtcaagtttacatggctaaagaaatcaaaactggtgaaattgtggctctcaaaaagatacgtatggacaatgaaagagaagggtttcctataacagctattagagagataaagattctgaagaagcttcatcatgaaaatgtcattcagctgaaagagattgtgacttcaccaggtcgggacagggatgaccaaggaaagccagataataacaaatacaagggtggcatctacatggtttttgagtacatggatcatgatttgactggactagcagatcgtcctggactgagatttactgttcctcaaattaagtgttacatgaagcaattgcttaccgggcttcact

SEQ ID NO: 89064 - DNA, 700 bp, Arabidopsis thaliana columbia
tcggggaattttcagtggtactttaagtgacctcttcaacaactttgtcggcaccagaagcttcagtgaagttgtagcagaagcaaagcaagcaggtttcacagaaccagatccacgagatgatctatctggaacagatgttgccagaaaagtaacaatccttgccagagaatcaggcttaaaattggatcttgagggccttccagtccagaatcttgtgccaaagccgttacaagcttgtgcatcagcagaagagttcatggagaagcttcctcagtttgatgaagaattatccaaacaaagagaagaggctgaagcagcaggagaagtcttgagatacgtaggagttgtagatgcagtagagaaaaagggaacagtcgaggtgaaacggtacaaaaaagatcatccgtttgctcagctatcgggtgctgataacatcaatcgctttcacaaccaaacggtacaaagaacagcctctgattgttcgtggacctggtgctggtgctcaagtcacagccggtggaatcttcagtgacattcttcgccttgctttctatctcggggctccgtcttaaagcacactctacatgctagcatatgtattttggatttcagagattttgatttctatagatgataccaaacttcaaggtaataaaacattctaggaaaaaatctcaataaagactgttggtattag

SEQ ID NO: 89065 - DNA, 468 bp, Arabidopsis thaliana columbia
  unsure (1)..(468): unsure at all n locations
ccgactagccgaatccgccatgaactctgtgtagttgtcgagnnccttggaaacgtccctggactcttgaaattaccgagctcttctctgaagaaaattgctcaagttgttgtgccgaaacgttacgggaaaggggattatgtggttcgtgaagatcaaacttgggatggatgttattttattttgcaaggagaggctcaggtttccggaccagacgaagaagataaccgttccgaattcctcttgaaacagtatgattacttcggcgttggtttatctgggaacgttcattcagcagacattgttgctatgtcccagcttacgtgtttggtgttgccgcgtgatcactgtcatttgcttgagactaattccatctggcaatcggatacgtcacttgacaaatgctctttagtggaacgcattttgcaactcgaccctttagaattgaatatcttcacggggatcaca

SEQ ID NO: 89066 - DNA, 829 bp, Arabidopsis thaliana columbia
  unsure (1)..(829): unsure at all n locations
atgattctccnnnnnnnnnnnnnnnnnnnnnnnnnnnnnnnnnnnnnnnnnnnnnnnnnnnnnnnnnnnnnnnnnnnnnnccatcgcgttcgcccacgcgtccgcggacgcgtgggtttaactctttgagttatttatttccagaagcttcatagtttctggaaaatgctaatccactagcggaataaaagacagatctttaatccactttagaaaccgcgttttctgaaaatgcggttgcgttttccgatgaaatctgccgttttagcgtttgctatctttctggtgtttattccactgttttccgtcggtatacggatgattccgggaagactcaccgccgtatccgccaccgtcggaaatggctttgatctggggtcgttcgtggaagctccggagtacagaaacggcaaggagtgcgtgtctcaatcgttgaacagagaaaacttcgtgtcgtcttgcgacgcttcgttagttcatgtagctatgacgcttgactcagagtacttacgtggctcaatcgcagccgttcattccatgctccgccacgcgtcgtgtccagaaaacgtcttcttccatctcatcgctgcagagtttgacccggcgagtccacgcgttctgagtcaactcgtccgatctactttcccgtcgctaaacttcaaagtatacattttccgggaagatacggtgatcaaccttatctcttcttcaatcagacaagctttagagaatccattgaactatgctcggaactacctcggagatattcttgatccaggcgtagacagagtcatttacctagactcggacatcatcgtcgtcgacgaca

SEQ ID NO: 89067 - DNA, 567 bp, Arabidopsis thaliana columbia
  unsure (1)..(567): unsure at all n locations
gacaacttccagcattgtactattaccattttttttatagaaaaagatgaacttcactttagagcaataacaatccctcgagtctcccctatataaagattccaactctttaacgattcatctattgaaaaccccccctccccaaaaatatcagatatctcaaacaatgtcttcagtttttggatctgtccatatcttggccatgatagccatacaactcctccttatacacagtgtttcgtctctgaaccttacaaatgcgtatctgcaccacaaatgcagcaacactcaaggaaaatataagcaggggagtgcgttcgagaaaaatctcaacttagtcctcagtaccatcacctcgattggaaattttcgtgacggtttccgctacaccgaagaaggtgaggatcccaataacgtctttgtcatgttccagtgtcgcggcgactcctactggtccaagtgccccccttgcattagcaccgctgtctctgggcttcgtaggagatgtccaagaaataagggagcaataatatggtatgaccaatgtctnttaaagatatcttcagg

SEQ ID NO: 89068 - DNA, 821 bp, Arabidopsis thaliana columbia
gcgagctcatgaggctgaaacgaaaatccgctcttgtagaaagagaacaagagccgtccaagaaaccacggctggggaaaagttcgaaaagggaaaatgtatttgctgtgctatgttcgacactgagccatgcagtgcttacgggtaagaaaagtccaggccccgctggatcagcagcccggtcaatagtagcgaaaggagctgaggattcaaaaagtagtgaagagaataatagcagcagttcagatgatgagaatcataaggatgatggagtatcgagttctgaacatgaaacatcagacaatggaaagctaaatggggaagaatctctggtagtagctccaaaatcatcacctgaaatggctgtaaatggatcctgagattttaacactctggactctttagttgtggctggggatggaaggcactctcatgggtgcaaataaaaccttcagagtgcagactgagacatgataaaccgcaaaagaaaagctttgggcaaccaaacggaggaagaaatgtatagtgagccccatttgagaggaggtaacgggttcttcgtccgtagtgtttgcacccgttttttttaataatattcatctttgaaaaaacttagcagtctctggtctggtcaattgcatattgtaagacatggtctatcagcaactaactcttcttaattcaagttcctaatggtttcctttaaaaaaaaaaaaaaaaaaaaaaaaaaaaaacaaaaaacaaaaagggcggccgctctagaggatccaagcttacgtacgcgtgcatgcgacgtcaatagctcatctagagtgtccacc

SEQ ID NO: 89069 - DNA, 508 bp, Arabidopsis thaliana columbia
ttgaggaagaggtaagagagcttggtgataagttaaaatctgcagacattgcgaactttcagcttcaagttgtgctagagaaatcgaatgccgaactactctctgccagatcagccaatgttcatttggaacatgaaatagctaatgtgaaggttcagaaggagaaagagcttttagaagcaatgctgatgatctccatcatgcaaaatgaaaaatctgaattatctaaggcagtggagggtttagaatgtagatacaaggaagctaaagcgatagaagaggatagggataagcaggtcttgagactccgtggagattacgatgagcaggttaagaagaatagtcattcgaacgaagctaatctgaaattggaagctgacttgatgaacttactcatggaactcgaagaaatcaaagtggagaaggaaaatctgaaccaggagctttttacagaaaggaatgagattgaactatgggagtctcagtctgcaacattgtttggagagtt

SEQ ID NO: 89070 - DNA, 503 bp, Arabidopsis thaliana columbia
agcgtctttttgatgtgtgtatcatgttggcgcctggacctcgcccgccacatatggaataaatgccctacagagattttcgttgctctgcaattgttatcatcagctgtatagcctgtattgcaatggatggttaccaaaatgccacttctctccttgttgctatgttgaacaacataatgtgatgtgttctaaaagcatgtgccttgatttcagatttaacatcagggaagcaagttcactccctctgccacaaatttgtatctttcttccacttatgttagtgatggggctagattttggaagcgagtgcatgtgaattccataaagctcgggtttgaatcaaatggtttgatacaaagtgggctgattgatatgtacaggaagtataggttggtgataaatgcagagaaggtgttcagagctatggagggtcagacagttttaactgttggaggctatggtttcgagtattatgcagaatggttttcgcattgaggaca

SEQ ID NO: 89071 - DNA, 1036 bp, Arabidopsis thaliana columbia
atgattctccaggtctctacgactcactattgggaaagctggtccgcctgcaggtaccggtccggaattcccgggtcgacccacgcgtccgcggacgcgtgggaaaatacccatctggttatttattacgcatagatctctctcttctctctttctctatttagattacttaaagcagagaggtccgaacatcatcaatcaaacccattcacaactactacgacaatggactacgaatacggaggaggagagtactgtcggagaggacacgtgccagcttttggaagctgggattggaacgacgccgttccattcactcagtgtttcgagacagcaacaactcaacaaccagcttttcttcactatgcttcttaccctcaagatcgtgatctttacctcgccggtgatctctacgacaaccaccaccttgtagctccggccgttatcattgtccctcgtcgccgggctaaagtgggtcaagaaccagcggagaagaagagaaatgtctcgaagcagcaacacaactataagacggaggcgcgtgagtttaacgcgccggtaagctgtccaacaccggttgtgaagcggaggatgaaggcaccaaagcctgtggatgaagacttgtacaaagtttccccacaacttctctcagtcaaatccaaaaggaaaagaggaggaggtgggtttgggtgcatttcaaggtgttttttgccaacacgggtgctttgaagaaacaagcgtgagagacttgagtcagaagaacactttgtttttttttcttttctttttctaatcctattatatatatcaaaagactatgcttgtgagagtatgtatttatgaatgcgtaggaaaaaaaaagatgaatgctaaaagatagtagaccaatgtagcttttgcgaaaagtttagctatattatattaattaaactataaatgagacttggttttgcaaaaaaaaaaaaaaaaaaaagggcggccgctctagaggatccaagcttacgtacgcgtgcatgcgacgtcaaagctcttctat

SEQ ID NO: 89072 - DNA, 1061 bp, Arabidopsis thaliana columbia
gattcgtttattgaattcaagaaccaacggaaacgttcatcacaagtctccgaaactagctctattcgcaacaaacgtcgcaaattcggagttcgacagagctaaatccgcaggatttgcagatacggtaataatgaaaccgttaagagcaagcatgattggggcgtgtctgcaacaagttctcgagctgagaaaaacaagacaacaacatccagaaggatcatcacccgcaactctcaagagcttgcttacagggaagaagattcttgtggttgatgataatatagttaacaggagagtagctgcaggagctctcaagaaatttggagcagaagtggtttgtgcagagagtggtcaagttgctttgggtttgcttcagattccacacactttcgatgcttgcttcatggatattcaaatgccacagatggacggatttgaagcaactcgtcagataagaatgatggagaaggaaactaaagagaagacaaatctcgaatggcatttaccgattctagcgatgactgcggatgtgatacacgcgacctacgaggaatgtctgaaaagtgggatggatggttacgtctccaaaccttttgaagaagagaatctctataaatccgttgccaaatcattcaaacctaatcctatctcaccttcgtcgtaatccaatcttccggcgagtttttttctccccgcagccggaagaatggactgcttctgctgatttgattgggatacaatatgcattttggtttctgtacatatagtaggttcacaatctagagattttgaaggttttttttaatttctcacttaagtaatgtagcttgccatgactagtgtatgttgttaaacgacgacgtctaagatggttcagtgttgatcttagcgtaagtattaatcccatgggaatcggttgtactgtatcagatttggttagtcgtttaaacattgtaatgttctaataatcactttttcataaaaaaaaaaaaaaagggcggccgctttaaaggatccaagcttacgtacgcgtgcatgcgacgtcatagttctttaaa

SEQ ID NO: 89073 - DNA, 505 bp, Arabidopsis thaliana columbia
tttcggacgcgtgggtttgcttcttcgtcttcttctctctttaggttcttcaagttcgcaatcctggtttgggtttaggacaaatcagagaagaagatgatgtttggtttagagaaaacgatgactttggagcatgaaattctgaaggagaatcatgagactctgttgaaagattatgagagtcttcaggagaggattaagcatgctgaggaagcttatgaggctattaagttgcatcatgagaacaaagctaaggagcttgaagtgagtaacaaacgcttgcttgaggaatgtatgaaagagagaagggagaaggctaaggttaggaagacttttgaggagatgaagaagacaatggagagtgagagaactgctattgttgatgagttgaagtcgaagaatcaggagcttttgttggggaagaagaaagaggaagaagagttagtgaagatggagaataagtatgttgagttagctgagaagtttgatgttgttgaaaaggaat

SEQ ID NO: 89074 - DNA, 668 bp, Arabidopsis thaliana columbia
  unsure (1)..(668): unsure at all n locations
cnnnnnnnnnnnnnctcactatagggaaagctggtacgcctgcaggtaccggtccggaattcccgggtcgacccacgcgtccgcggacgcgtggggtgggaaagtctggaaacagctgtatctaactttttcccttttctctatgattctgttgtgaataatgcagagccgccgtgagctcaggcgccaccgtaacgaagaacaaacctgaaggagaaaaataagccatgggatgtgcggcgtccaagctcgataacgaagatgctgtacggcgttgtaaggatcgccgccgtctgatgaaagaagctgtctacgctcgtcatcatctcgccgccgctcacgccgattactgccgatcgcttcgtatcactggatctgctctttcctcattcgcctccggtgagcctctctctgtatctgatcaaactccggctgttttcctccatactccccctcctccgctttctgaacaatctccggctaaatttgtccctccacgtttttcgccgtcgcctgctccttcttctgtttatcctccttcgacgtctcctttccgtcgcagttctaagcagccttcagtcatgtccacctcttccaatcgacgccggaaacagcaaccaaaacctagactgcctcatattctctcggagtcaagtccttcttcttct

SEQ ID NO: 89075 - DNA, 517 bp, Arabidopsis thaliana columbia
tctctcttgttgaccttctaattatgccatctccgattatcgatttttgtagagcaatcgtattttatcgaagcccttgtttctggttttagtctcttgtctgaaatcaatctcaaaaaggttctgttttttcggggaaatgtgcagcttttgattgtttcattttccgattgtttcagaagaactggaatcgccgtaaagttcgaatttttttttgttagattgtacaaaagggtgttgtgattaaggaagaagaagaagaagaagataaaaaggttttttttttggctgttgttgtaatctgggaaagtttgggattttgtatcgatctcagatggtgaaaagacgaagaagtgtgattgttttggggatatgattaaagaacctgaattgttctggtgttgagaataagaaactatgtggaaacagattctaagtaagcttcccccaaaaagtcttcaaagcacgaacatcgtggacgtgaacacggtggccattcttcttcatcttctcatac

SEQ ID NO: 89076 - DNA, 470 bp, Arabidopsis thaliana columbia
  unsure (1)..(470): unsure at all n locations
atgttctccagctctaatcgactcacttagggaaagctggtacgcctgcaggtaccggtccggaattcccnggtcnacccacggctccggaagaacgccagcggcgatggcgacggtggcgccgatggcgcgtcagttaatgtcggagatgaacctgattcgtttggtggtcgaataggatctccgaggaggatattcttgttctgcttggcgtttcgtgtggtaaatgcattgttgattcagacttatttcaatcctgacgaacattggcaatcacttgaagtagctcaccgcaccatatttgggtatggttatatgacatgggagtggaaaagaggaatacgaagctatttgcatccaatgttgttcgcattcttgtataaacttctacaagttactggccttgatactccctacataaggatcaaagccccacgtcttatgcaatccatattttcagctattgggga

SEQ ID NO: 89077 - DNA, 826 bp, Arabidopsis thaliana columbia
  unsure (1)..(826): unsure at all n locations
accaacctgatttcacagctccatctggagaatcactgaggcaagtagagtttcgaatggttcagtttctaaacgggacagtctcaggagttgcagagaagcttaggtcagattattcttccactacgaatcacaatgaaactcatgagcgtgatggtggtgtgtcacttgcttcgactaactgggacttactacacaagcatcgtcccagtcttacaaggaagaaatctggtaaaagcaggcttcaagtgatgactaatcacgaacctgacgatggaaactccccaagggaagaagttaatcataatcacactgacctaagtgattcgtcttccttaatctcgaattgtgtcggggttttcacgcattctttgcctataaagtgtcttttaaccggaatcctcggttgcagtccggtaatgactcataagatctgtgtagaagactcttcagtgactgtgttacaacattcatggagaaacgggtggcagatcaaacgaatgaatgatactgctcatcttagattggtgtaactttatttaccgataaattatttggaaaaacgaggattcatatatgtttacaccatgaatctgcacaagctcaagaacaaaggttcggcagataatgaaatgccacggcctctttgtaatgttttgtctgtgacatgaggaaaaaagataaacaaaatggattcattgattttgatttgaaatttgttcttgtctgatnnnnnnnnnnnnnnnnnnnnnnnnnnnnnnnnnnnnnnnnnnnnnnnnnnnnnnnnnnnnnnnnnnnnnnnnnnnnnnnnnnnnnnnnnnnnnnn

SEQ ID NO: 89078 - DNA, 527 bp, Arabidopsis thaliana columbia
ccaagccatccggcctgcactgtgtttaaaccgatcgagccctaaatgtatcggtgactgatgagttaatgagaccgcccccccgcaacggttcaacaaaacggaccttcttcatcttcttccccaacaattactcaattctaaaaaggaacgatctttcgaaaacagataatggtgaaagcagtggttggagaagatactagacttacttctgttgaagatcgtctctctcactcagctattcctgctgaagtgggtcttgtgatagggaagcttagctctgttctggatcgtggatttgtctttgatttgattcctacaccaagtaacgatgatggtgaaccagcatgcgcggttttggagaccaaagatgataaaaggaagccttctaagtctaaatctcagtcatctgagtcgtcttctttatcgattgattcagattgggttgcagaacatgctcgacaggtatcgagaaatgctgtgggtggcatgaaggttgttggtatctatgtatgggctagtgacat

SEQ ID NO: 89079 - DNA, 505 bp, Arabidopsis thaliana columbia
  unsure (1)..(505): unsure at all n locations
agctcccatacgactcacttagggaaagctggtacgcctgcaggtaccggtccggaattcccgggtcgacccacgcgtgcgcggacgcgtacgcccacgcgtccggtttttccggttgtccatcggcgttggagcttgctgctttatggggacttgatttggagcaagggaggaaagatgaagagaatcaagttccgatgatggcgatgatgatggataatttcgggatgcagttggattcttgggttttgggatctaatgaattgattgttcccagcgatacgacgtttaagaagcgtggatcttgtggatctagttgtgggaggtataagcaggtattgtgtaagcagcttgaggagttgcttaagagtggtgttgtcggtggtgatggcgatgatggtgatcgtgaccgtgattgtgaccgtgagggtgcttgtgatggagatggagatggagaagcaggagaggggcttatggttccggagatgtcanagagattgaaatg

SEQ ID NO: 89080 - DNA, 891 bp, Arabidopsis thaliana columbia
  unsure (1)..(891): unsure at all n locations
cnnnnnnnnnnnnnnnnnnnnnnnnnnnnnnnnnnnnnnnnnnnnnnnnnnnnaaacaaaggaactgggtttggagataagaagtgggaacttgaatggcttccttatccacttccgttgtagcttcggcttcgtcgcgtttatggaatcctgctgcctccaacggcaagatttgcgttccttctgcttcgctttctctgcgtacgggttgtagacggagttcgtcctctctcacttcttccgcttcttcgcaattgcttcattgctcgtttctctcgtcgcctgtttccctagcgtctccattttctggtttgtccattgcgtttgatctcagcagtcaaactagtggactgaatggccagagacgcagaggccttgtggttagagctggaaaagctgctctgtgtcaaactaagagaagcagatcaagaaaatctctagctaggactcatggtttccgtagaaggatgaggaccactagcggtagagcaaccataaagcgtcgacgtgccaagggacgttggaacctctgtcccaagtccaaccctagcagcggcaaacgggcttgaagtttgtttctctcttcactctatctgtaatcttgtttcatgtgctttttttccaccagaagatacaatgagaaacatggttcgttgagctcttttctgcgttttaactctcttgcatccttgattcgtttataaatcaatgttcttggaattcatcacatgtactactatactacttgcttcattgaatttgttactactcgaaaaaaaaaaaaaaaaaaaggnnnnnnnnnnnnnnnnnnnnnnnnnnnnnnnnnnnnnnnnnnnnnnnnnnnnnnnnnnnnnnnnnnnnnnnnnnnnnnnnnnnnnnnnnnnnnnnnng

SEQ ID NO: 89081 - DNA, 636 bp, Arabidopsis thaliana columbia
  unsure (1)..(636): unsure at all n locations
acccacatcttgaaacccncccaccaaatcccccancncaccgcnccgtgaaaatgaaccccaaaggaaggaccatgtggcccgtgtttagngccccgtggattaagtgaatagttattctgatttgaccaaatcaaccttcctttttgtgcatatggttgtacagcggtgactcaaggagtcagcaccgttagggatggtccgatggagtgtgacatgcgggtgatgtaaatatggtgacctgatcttccgccaccttactttgttttttttatattgtttttgtgtactttatcagagtggataaagtgacggggaatgtttttcttttgtacaaaaaactgtcttcccacctaagcaatgtgtgttagtttctgttttgggctgtgttttgcaagtttttgtatttcagagttgtgtagtgtagttgcaagtggcggttggatctttcactatcttgttggattttgatgatggttgatgcttttgctttaatgttaaataaataagcatacttttgctaaaaaaaaaaaaaaaaaggnnnnnnnnnnnnnnnnnnnnnnnnnnnnnnnnnnnnnnnnnnnnnnnnnnnnnnnnnnnnnnnnnnnnnnnnnnnnnnnnnnnnnnnnnnnnnnn

SEQ ID NO: 89082 - DNA, 786 bp, Arabidopsis thaliana columbia
  unsure (1)..(786): unsure at all n locations
nnnnnnnnnnnnnnnnnnnnnnnnnnnnnnnnnnnnnnnnnnnnnnnnnnnnnnnnnnnnnnnnnnnnnnnnnnnnnnnnnnnnnnnnnnnnnnnnnnnnnnnnnnccacgcgtccggattaagtgaatagttttattctgatttgaccaaatcaaccttcctttttgtgcatatggtataatatcattaactctttaaccttcatggccaaagttttagagtgctaatcacagccgttgtttttttcttctcagtattgagatttgagattgttgatcggatggttcagatcacgagttgttggttcactaattgaccgcacgtggggtgtttgcaggttgtacagcggtgactcaaggagtcagcaccgttagggttggtccgatggagtgtgacatgcgggtgatgtaaatatggctgacctgatcttccgccaccttactttgcttttttttaatattgtttttgtggacctttatcagagtggataaagtgacgggggaatgtttttcttttgctacaaaaaaactgtcttcccacctaagcaatgtgtgttagtttctgttttgggctgtgttttgcaagtttttgtatttcagagttgtgtagtgtagttgcaagtggcggttggatctttcactatcttgttggattttgatgatggttgatgcttttgctttaatgttaaataaataagcatacttatgctaaaaaaaaaaaaaaaaaaaaagggcggccgctctagaggatccaagcttacgtacgcgtgcatgcgacgtcatagt

SEQ ID NO: 89083 - DNA, 572 bp, Arabidopsis thaliana columbia
  unsure (1)..(572): unsure at all n locations
ccacgcgtccgaaatcattgaagatctacccaaaaaaaaaaaaaaagagatggttctgctagagaagctttgggatgatgttgtggctggacctcagcctgaccgtggccttggccgcctccgtaagatcaccacccaacccattaatatccgagatataggagaagggagcagcagtaaggtggtgatgcataggtcgttgaccatgccggcggcagtgagccctggaactccaacgactccaaccactccgacgacgccacgtaaggataacgtgtggaggagcgtctttaatccgggaagcaacctcgccactagagccatcggctccaacatctttgataaacccacccatccaaattctccctccgtctacgactgcgttgataatgaagctcaaaggaaggaacatgtggcactgtgtttagtgggcgcgtggattaagtgaatagttttattctgatttgaccaaatcaaaccttcccttttttggtgcataattggttgtaaaccggtggctcaaangggctnncacccggtatggggttgggcccaatggnnntgnncaantc

SEQ ID NO: 89084 - DNA, 576 bp, Arabidopsis thaliana columbia
  unsure (1)..(576): unsure at all n locations
agcaaaagtatgctggatgggtttatcattaaagcaaaagcatcaaccatcatcaaaatccaacaagatagtgaaagatccaaccgccacttgcaactacactacacaactctgaaatacaaaatcattgaagatctacccaaaaaaaaaaaaaaagagatggttctgctagagaagctttgggatgatgttgtggctggacctcagcctgaccgtggccttggccgcctccgtaagatcaccacccaacccattaatatccgagatataggagaagggagcagcagtaaggtggtgatgcataggtcgttgaccatgccggcggcagtgatgccctggtactccaacgactccaaccactccgacgacggcaaggtaagggataacgtgtggaggggcgtcttaaatccgggaggnaaccttgccacttagagccatcggttccaaacaattntttgnttaaacccacccatccaanttttccctccgttttcggcttggtttttanaaggggnnncntnaaagggggttaagcncccttagggnttggnccctttggggtttttanaatgnggg

SEQ ID NO: 89085 - DNA, 930 bp, Arabidopsis thaliana columbia
  unsure (1)..(930): unsure at all n locations
taggaacactatagaagagctatgacgtcgcatcgcacgcgtacgtaagctcggaattcggcgtgagtgaagatctacccaaaaaaaaaaaaaaaaagagatggttctgctagagaagctttgggatgatgttgtggctggacctcagcctgaccgtggccttggccgcctccgtaagatcaccacccaacccattaatatccgagatataggagaagggagcagcagtaaggtggtgatgcataggtcgttgaccatgccggcggagtgagccctggaactccaacgactccaaccactccgacgacgccacgtaaggataacgtgtggaggagcgtctttaatccgggaagcaacctcgccactagagccatcggctccaacatctttgataaacccacccatccaaattctccctccgtctacgactggttgtacagcggtgactcaaggagtcagcaccgttagggatggtccgatggagtttgacatgcgggtgatgtaaatatggtgacctgatcttccgccaccttactttgttttttttaatattgtttttgtgtactttatcagagtggataaagtgacggggaatgtttttcttttgtacaaaaaactgtcttcccacctaagcaatgtgtgttagtttctgttttgggctgtgttttgcaagtttttgtatttcagagttgtgtagtgtagttgcaagtggcggttggatctttcactatcttgttggattttgatgatggttgatgcttttgctttaatgttaaataaataagcatacttttgctaaaaaaaaaaaaaaaaaaaaaaaggnnnnnnnnnnnnnnnnnnnnnnnnnnnnnnnnnnnnnnnnnnnnnnnnnnnnnnnnnnnnnnnnnnnnnnnnnnnnnnnnnnnnnnnnnnngtagctggcagtatcat

SEQ ID NO: 89086 - DNA, 621 bp, Arabidopsis thaliana columbia
cggacgcgcgagcgctcgattaagcttgaacttggaggatcaatggccgacgttcgcacacactcgcaccagcttcaagtgcaccctcaacgccagcatgaaggaggcatcaaagtcctttatcctcagagtggcccttcttccactcaggtgctagccgtgtttgtcggtgtaccgataggaggaacgctgctgactatagccggtttgacattagccggttcggttataggactaatgctagcattcccgttgtttctcatctttagtccggttattgtaccagcagcctttgtcatcggtctagctatgactggattcctggcttcaggggccataggtctcaccggactatcatccatgtcgtgggtactcaactacatccgccgggccgggcagcatatcccggaggagcttgaggaagcgaagcatcgtttggctgacatggccgagtatgtgggacagaggactaaagatgctggacaaaccatagaagacaaagctcatgatgtccgagaggccaagacttttgatgtccgagaccgagacaccaccaagggtactcataatgtccgagacaccaagactacataaagcgtgtgttttgagtgaaccatgttg

SEQ ID NO: 89087 - DNA, 750 bp, Arabidopsis thaliana columbia
agaattccggggacaactcacccgtccgtcaaccaccctgatttcaaatctccccaagcacaacaatggcgaaatcaatgagatgcaagagggtgaagagattgagagcaataagaagagaaatagtggagaaggaatcattcactctaacgagagaagacgccaaatccgccgctattgaagccgcactcgctgctccgaagttaccagttcgtcaagccccagtttctccgtttatggaagttgcgacgccttcctctgagtctgcatctgcctccactacaatcgccaacgatagtgatgaggaaatggatgatgagaagaaaaacaagtcgctaaaacctattgggaagaagttgaagaagaagtttaagctggggatgaagaatcgtcgtagtaagggtgtccttcgaggcaaacgaaactaaaactggtcttggctttcttctactgggtttgttttctacttgcataatttatgttctctcttaattttggggttcttcaatgtcttagaatatagcatcttttgtactgtgttttttccatgagtttcagtactatagaaaccctaaaaacgtgatcgcgtcttgtggaaatatgatttctttggcttgttcttttcgtgggggggcgttctaagaggaaccaaagccttacgtccgcgtggcattgccaacgttcataaccttgtgctttttggggggggcgccttaaatcttcaaatttcactttggccccggggaggat

SEQ ID NO: 89088 - DNA, 414 bp, Arabidopsis thaliana columbia
gacacaaattctacaccaaaagcttaaccagatttttcccaagaaaaaacccatccatgaaaccatcatcagcttcgggattttctttaactttctcacactttctcacactctactgtcttctcacacaaacacatgtagctcaaggatctcatcaatggcaatcaccaatcaaaaccgtcgtcgttttagtgttggagaatcgatctttcgatcatctcttaggatggatgaagaactcagtaaacccgacaataaacggtgtaacgggtcaagaatgtaacccggttccgaattctacacaaactatatgtttcactagtgatgctgagtttgtggatccggatccgggtcattcgtttgaagctgttgagcaacaagtattcgggtctgggccgggtcagatcccgtcca

SEQ ID NO: 89089 - DNA, 522 bp, Arabidopsis thaliana columbia
  unsure (1)..(522): unsure at all n locations
atgannnnnnnnnnnnnnnnnnnnnnnnnnnnnnnnnnnnnnnnnnnnnnnnnnnnnnnnnnnnnnnnnnnnnnnnnnnnnnccacgcgtgcgagattctacaccaaaagcttaaccagatttttcccaagaaaaaacccatccatgaaaccatcatcagcttcaagattttctttaactttctcacactttctcacactctactgtcttctcacacaaacacatgtagctcaaggatctcatcaatggcaatcaccaatcaaaaccgccgtcgttttagtgttggagaatcgatctttcgatcatctcttaggatggatgaagaactcagtaaacccgacaataaacggtgtaacgggtcattcgtttgaagctgttgagcaacaagtattcgggtctgggccgggtcagatcccgtccatgatgggtttcgttgagcaagcgctttccatgccgggaaatttgtcggagactgtaatgaaaggctttaggcctgaagctgttccggtttatgctgagctg

SEQ ID NO: 89090 - DNA, 461 bp, Arabidopsis thaliana columbia
ttgcaactttcgtttgtttaggatctgtattagctctttgtttcctcgaatttgagcttctttcgtcaaatctatattggaatctggcttatacttatgtccctgaggattctggctttgtttgatttcgtagtttgtatagtgaatgcatcgatgctatggtgatatgtgactcttgtttctgatgcttatcgccgtttgttgtcgcacgacatcaatggcaccgaagttgggagttttagtggcttcaaagaagaagccggagaaagttaccaacccattgtttgagagacgcccaaagcaattcggtattggtggcgctttgcctcctaagaaggatctttctcgttacatcaaatggcctaagtcaatccgtcttcaaaggcagaagcgtatccttaagcagaggttgaaggttcctccagctcttaaccagttcaccaagacccttgataagaacc

SEQ ID NO: 89091 - DNA, 670 bp, Arabidopsis thaliana columbia
  unsure (1)..(670): unsure at all n locations
caagacagctaaatactggcctaacatttgcaagttctttcaagtgggtgaatgccccttgcggagcaccatccctttattccctccttactaatcgattccaaacaaaaaccctcgagcgtatgagagtgtggctgatgatacatgttaacaccacaccttatcgtgtatgaaagtgcactgtcactacatgatgtggcccagatccattgcgtcttcacaggcaacagaatgattctgagcataggttgttggtccctccagctcttaaccagttcaccaagacccttgacaagaatcttgccaccagcctcttcaaggtccttctgaagtacacgccagaggacaaagccgccaatgaacgagcgccttttaaacaaggctcaagctgaggcagaaggaaagcctgctgaatccaagaagcccattgttgttaagtatggtctcaaccatgtaacttacctcatcgagcagaacaaggcacagcttgtggtcattgcacacggtgttgaccctatcgagttggtggtctggttacctgcaattttgcaggnaaatgggagtnccctacttgcaattttttaaaggggaaatttggtntttgngnnggttntttacccaaangcnttttttttccccttnggntttaccccttttaanaanccggggg

SEQ ID NO: 89092 - DNA, 414 bp, Arabidopsis thaliana columbia
agaaaacatacacaaatagcaaaacatggctttcttgctcttcctcgtctgcgcaacgctccgccctctgcttcctcctcaccaacgcttccatctaccgcaccggtgtcgaattcgaagaagatgacgccagcaaccccgtaggtccaagacagagatgccagaaggagtttcagcaatcacaacacctaagagcttgccagagatggatgagcaagcaaatgaggcaaggacgcggtggtgggccttccctcgacgatgacgctcgatttcgggggcccccagcagggataccagctactccagcctgtgctgcgacgagcttcgccaggaagagccagcttgccttgtgccccaccttgaaacaagctgccagggcctgttgcccccccgggccagtacggaccatttcaa

SEQ ID NO: 89093 - DNA, 533 bp, Arabidopsis thaliana columbia
  unsure (1)..(533): unsure at all n locations
ccgtccgtactcccggtcgaccacgcgtccggacgcccaaagcaattcggtattggtggcgctttgcctcctaagaaggatctttctcgttacatcaaatggcctaagtcaatccgtcttcaaaggcagaagcgtatccttaagcagaggttgaaggttcctccagctcttaaccagttcaccaagacccttgataagaatctcgccaccagcctcttcaagattcttctgaagtataggccagaggacaaagccgcaaatgaaggaacgcctttttgaacaaggctcaagcctgtggcagaaggaaagcctgctgaatccaagaagcccattgttgttaagtatggtctcaaccatgtnacttacctcatcgagcaggacaagggacagctttgtggtcattgacacggtgttgaccctatcgngnttggnggctgggtacctgactntncagggaaattggaggccctactgnatttttaangggnaatttggntttggggggttgttancnaaggctttttnttcctttg

SEQ ID NO: 89094 - DNA, 870 bp, Arabidopsis thaliana columbia
accggggttgaaaaaccgggccgaccacgcggccggaaacagacacacatagcaaaaaagggcaaacaaggtggtgctcgtctgcgcagcactcgctcggcttcctcctcaccaacgctcccatctaccgcaccgccgttgagttcgaagaagatgacgccactaaccccataggcccaaaaatgaggaaatgccgcaaggagtttcagaaagaacaacacctaagagcttgccagcaattgatgctccagcaagcaaggcaaggccgtagcgatgagtttgatttcgaagacgacatggagaacccacagggacaacagcaggaacaacagctattccagcagtgctgcaacgagcttcgccaggaagagccagattgtgtttgccccaccttgaaacaagctgccaaggccgttagactccagggacagcaccaaccaatgcaagtcaggaaaatttaccagacagccaagcacttgcccaacgtttgcgacatcccgcaagttgatgtttgtcccttcaacatcccttcattcccttctttctactaaatctcaaacaaaccctcaaagcgtatgagagtgtggttgttgatatatacatgttgacacttgacacataccacacctcatcgtgtgttttatgataaatgtaagcttttggatgtttgagggtaatgtaagcactacttaataaataagagtttttttttttttttaaaataaacaaatatatactcaaatctacacaaaatagccaaaacaaaatttgtgacaaaatatatgcaataatagatgaaatatccgaaaataggtatacagtaattaatactttttgggtatatatgtaagttgattgtagttcaaactt

SEQ ID NO: 89095 - DNA, 713 bp, Arabidopsis thaliana columbia
gacgaaatgggctccttcagctgctcccgttgtgctaaaagcccagcacgatccacatgcactttgattcttaacctcagtaaccccccccttctccctccagtcaaaatcttcaggcaatccatcaacctcaaccataggtgcctccgctccaaccgtaccgccacggctgccgccaacatcggctactccagtgtacatccgcttgaactcctcttccgtgaggtcagagaactgtgtgactccgtggacggcggaggggtccatcatctggtgctctgcggccttaaggacgtttttggcaaatattccgaggcggtggatgtactcctccctcgtggagtagttcttgccgtaatcggacatgaaaagccggaatttactctctgtgtgagtcccgagaagattcgggcgaattcgccgattgtcggccgtgacttggcgtatggtgaggtcttctacggaagctacaacgtggcagaataagatgatgcatgttatcagctgtgctaaggctttagccaccatgatcgctgttatcgatgggtcttgtttttgacgcacgcgccctcgagcgtatgagagtgtggttgttgatacatgttaacaccacacctcatcgtgtcttttatgaaaatgtaagttttggatgtttgaggctcaatgtatttagcacaagtccttaataaataagagttttttttttgaaacat

SEQ ID NO: 89096 - DNA, 1514 bp, Arabidopsis thaliana columbia
  unsure (1)..(1514): unsure at all n locations
ccggacggaaggccggcccgccgacaaaacatacacaaatagcaaaacatggctaacaagctcttcctcgtctgcgcaactctcgccctctgcttcctcctcaccaacgcttccatctaccgcaccgttgtcgaattcgaagaagatgacgccagcaaccccgtaggtccaagacagagatgccagaaggagtttcagcaatcacaacacctaagagcttgccagagatggatgagcaagcaaatgaggcaaggacgtggtggtggtccttccctcgacgatgagttcgatttcgagggcccccagcagggataccagctactccagcagtgctgcaacgagcttcgccaggaagagccagtttgcgtttgccccacgcgtccgtacggctgcgagaagacgacagaaggggatactcttgggctcagccgtcctttcgcagaaaccatttggagttggagctttggacgacgacaatggccccgaagaaaggagtgaaggtagctgctaagaagaagaccgcggagaaagtttcaaaccctctattcgagaggaggcctaagcaattcggtattggtggagctttacctcctaagaaggatctctctcgctacatcaaatggcccaaatccatccgtcttcaaaggcaaaagaggatcctgaagcagaggttgaaggtccctccagctcttaaccaattcaccaagactcttgacaagaatcttgctaccagcctcttcaaggtccttctgaagtacaggccagaagacaaagctgccaagaaggagcgtcttgtaaagaaggcccaagctgaagctgagggaaagccttctgagtctaagaagcccattgtagtcaaatacggcctcaaccatgtgacctacctcattgagcagaacaaggcccaacttgttgttattgctcatgatgtcgacccaattgagttggttgtctggttgcctgctctgtgcaggaagatggaagtcccgtactgcattgtcaagggcaaatctcgtcttggagcggttgttcaccagaagactgcttcttgcttgtgtttgaccactgtcaagaacgaggacaagctagagttcagcaaaatcctggaagctatcaaggccaacttcaatgacaagtacgaggagtacaggaagaaatggggaggaggcataatgggatctaagtctcaggcaaagaccaaggcaaaggaaagagttattgcaaaggaggctgcccaaaggatgaattaagaggctagcttcttttgtttgtggtttgctcggattcgtaaaacttaatagagctttttgtttagctggttcttgaagtacctcttttttagttgaaccctttattatggatgttttgcaatttcttgggacagtttcaatgttattcaagctgctggatcaaaaaaaaaaaaaaaaaaaagggcggccgctctagaggatccaagcttacgtacgcgtgcatgcgacgtcaagatcttctataggtnnnnnnnnnnnnnnnnn

SEQ ID NO: 89097 - DNA, 792 bp, Arabidopsis thaliana columbia
  unsure (1)..(792): unsure at all n locations
ggaatccggtcgaccacgcccgccagaaaacatacacaaatagcaaaacatggctaacaagctcttcctcgtctgcgcaactctcgccctctgcttcctcctcaccaacgcttccatctaccgcaccgttgtcgaattcgaagaagatgacgccagcaaccccgtaggtccaagacagagatgccagaaggagtttcagcaatcacaacacctaagagcttgccagagatggatgagcaagcaaatgaggcaaggacgtggtggtggtttccctgacgatgagttcgacagggcccccagcaggaaccagctactccagcagtgctgcaacgagcttcgccaggaagagccagtttgcgtttgccccaccttgaaacaagctgccagggccgttagcctccagggacagcacggaccattccaatcaggaaaatttaccagtcagctaagtacttgcctaacatttgcaagatccagcaagttggtgaatgtcccttcaacatcccttcttccctccttactactagatccaagcccggcctagcacgatgatcatgagtgttgctattgatgtatgttaatactatacacagtcatcgtgtgtgttttataaaactgtaagcttaggatgtttgaggctaatgtaattagcactacaccgtaataaatgagaggtttactttaaaaaaaaaaaaaaataannnnnnnnnnnnnnnnnnnnnnnnnnnnnnnnnnnnnnnnnnnnnnnnnnnnnnnnnnnnnnnnnnnnnnnnnnnnnnnnnnnnnnnnnnn

SEQ ID NO: 89098 - DNA, 813 bp, Arabidopsis thaliana columbia
  unsure (1)..(813): unsure at all n locations
ggaacgcgtgggcgccgacccacgcgtcatcacaaacgagtaagaatacaaatacaaatagcaaaaaaaatggcaaacaagctcttcctcgtctgcgcaactttcgccctctgcttcctcctcaccaacgcttccatctaccgcactgttgtcgagttcgacgaagatgacgccagcaaccccatgggcccaagacagaaatgtcagaaggagtttcagcaatcacagcacctaagagcttgccagaaattgatgcgcatgcaaatgaggcaaggccgtggtggtggtccctccctcgacgatgagttcgatttggaagacgacatcgagaacccacaaggcccccagcagggacaccagatcctccagcagtgctgcagcgagcttcgccaggaagagccagtttgtgtttgccccaccttgagacaagctgccagggccgttagcctccagggacaacacggaccattccaatccaggaaaatttacaagacagctaagtacttgcctaacatttgcaagatccagcaagttggtgaatgccccttccagaccaccatccctttcttccctccttactaatagattccaaacaaaaaccctcgagcgtatgagagtgtggttgttgatacatgttaacaccacacctcatcgtgtcttttatgaaaatgtaagttttggatgtttgaggctaaatgtatttagcacaagtccttaataaataagagttttgtttatgtttcaaaaaaaaaaaaagnnnaagggcggccgctctagaggatccaagcttacgtacgcgtgcattcaaagtcg

SEQ ID NO: 89099 - DNA, 1517 bp, Arabidopsis thaliana columbia
  unsure (1)..(1517): unsure at all n locations
atgatactgccnnnnnnnnnnnnnnnnnnnnnnnnnnnnnnnnnnnnnnnnnnncaccgccgtaccgaacgggagggccgggccccgcgcacaagaaaacatacacaaatagcaaaacatggctaacaagctcttcctcgtctgcgcaactctcgccctctgcttcctcctcaccaacgcttccatctaccgcaccgtcgttgagttcgaagaagatgacgccactaaccccataggcccaaaaatgaggaaatgccgcaaggagtttcagaaagaacaacacctaagagcttgccagcaattgatgctccagcaagcaaggcaaggccgtagcgatgagtttgatttcgaagacgacatggagaacccacagggacaacagcaggaacaacagctattccagcagtgctgcaacgagcttcgccaggaagagccagattgtgtttgccccaccttgaaacaagctgccaaggccgttagactccagggacagcaccaaccaatgcaagtcaggaaaatttaccagacagccaagcacttgcccaacgtggcttcaaagaagaagccggagaaagttaccaacccattgtttgagagacgcccaaagcaattcggtattggtggcgctttgcctcctaagaaggatctttctcgttacatcaaatggcctaagtcaatccgtcttcaaaggcagaagcgtatccttaagcagaggttgaaggttcctccagctcttaaccagttcaccaagacccttgataagaatctcgccaccagcctcttcaagattcttctgaagtataggccagaggacaaagccgcaaagaaggaacgccttttgaacaaggctcaagctgaggcagaaggaaagcctgctgaatccaagaagcccattgttgttaagtatggtctcaaccatgtgacttacctcatcgagcagaacaaggcacagcttgtggtcattgcacacgatgttgaccctatcgagttggtggtctggttacctgcactctgcaggaaaatggaagtcccttactgcattgttaagggaaaatctcgtcttggagcggtcgttcaccagaagactgctgctgccttgtgcttgaccactgtcaagaacgaggacaagcttgagttcagcaaaatcctcgaggccatcaaggctaacttcaacgacaagtacgaggagtacaggaagaagtggggaggtggcataatgggatccaagtctcaagccaagaccaaagctaaggagagggttattgctaaggaggctgcccagagaatgaactaggcatcataccttatgttctctgctatgaaacatatgataatggttttgttgtttagcgatattttgaaaccttgttttattttaatttctatgctctttcggatgttaccaccctcttcagaattttatgcagttttggcggccgcgaattaaagcagaccgggggatccactagttttagaacggccgcccccccggtggaggttcaggttttggtaacttt

SEQ ID NO: 89100 - DNA, 728 bp, Arabidopsis thaliana columbia
  unsure (1)..(728): unsure at all n locations
ggtaaagctggtccgcctgcaggtaccggtccggaatttcccgggtcgaccccccaccgcgtcccgtctcaaccatgtgacttacctcatcgagcagaacaaggcacagcttgtggtcattgcacacgatgttgaccctatcgagttggtggtctggttacctgcactctgcaggaaaatggaagtcccttactgcattgttaagggaaaatctcgtcttggagcggtcgttcaccagaagactgctgctgccttgtgcttgaccactgtcaagaacgaggacaagcttgagttcagcaaaatcctcgaggccatcaaggctaacttcaacgacaagtacgaggagtacaggaagaagtggggaggtggcataatgggatccaagtctcaagccaagaccaaagctaaggagagggttattgctaaggaggctgcccagagaatgaactaggcatcataccttatgttctctgctatgaaacatatgataatggttttgttgtttagcgatattttgaaaccttgttttattttaatttctatgctctttcggatgttaccaccctcttcagaattttatgcagttttgttatcaatttcacatataaacttttatttgcaaaataaatccttactttaaaaaaaaaaaaaaagggcggccgctttaaaggattccagcttacggaaggtggcaagggaagtcaaannnnnnnnnnnnnnnnnnnnnn

SEQ ID NO: 89101 - DNA, 364 bp, Arabidopsis thaliana columbia
aaactctctctccgtcttcaatggtttacacgatttcaggcgtacgttttcctcatcttccatcgattaagaagaagaattcgtctcttcacagtttcaatgaagatctcaggagaagcaacgctgtctcattctctctgaggaaggactctcgttcttctgggaaggtttttgctcggaagccatcgtatgattctgattcgtcttccttagctaccactgcatctgagaagctccgtggccatcagagtgatagctcttcatctgcctctgatcaagtacaatctcgggatactgtctctgacgatactcaggtgctcggcaatgtagacgttcagaaaactgaagaagcccaggaaacaga

SEQ ID NO: 89102 - DNA, 707 bp, Arabidopsis thaliana columbia
aatctcttcaccgaaacatcttcaaccttcaataggagaaaccaattctcaattgctacaaaaatataaatattttgaaaaatgaaactggagctggtgttcataccatcacctggtgacggacatctccggccattagtggaggtagctaagcttcatgttgaccgtgacgaccatctctccatcaccatcatcatcatccctcagatgcatggatttagtagcagtaactcttcttcttacatcgcttctctctcctctgattctgaagaacgtcttagctacaacgttctctccgtccctgataaaccagactccgatgacaccagaccacattttttcgattacattgataacttcaagccgcaggtcaaagccacggtggaaaaacttactgacccgggtccaccagattcgccgtcgcgtcttgctggattcgtggtggatatgttttgcatgatgatgattgatgtcgctaatgagtttggtgttcccagttacatgttttacacatccaacgcaacgtttcttggattgcaagttcatgttgaatacctttacgacgttaagaactatgacgttagtgacctcaaggactcggacactactgagctggaagttccttgtttgactcgtcctttaccggttaagtgtttcccctcggttctattaaccaaggagtggttaccggttatgtttagacaaac

SEQ ID NO: 89103 - DNA, 501 bp, Arabidopsis thaliana columbia
  unsure (1)..(501): unsure at all n locations
annnnnnnnnnnnnnnnnnnnnnnnnnnnnnnnnnnnnnnnnnnnnnnnnnnnnnnnnnnnnnnnnnnnnnnnnnnnnnccacgcgtgcgcggacgcgtgggcggacgcgtgggtttttttctagtcttggtgacttaaaaagctcctaggcaccgaaatcgagacactctcgacaaccatgctctctgacgccgggggtggttccgattgccggcgtcgggacttatcaactcccatcaaccttcatgtgttctatataagctttatcttcattgaatcttcctccgttatctcaaatctctcaaaatatctaaatctccttttttatgtgagcttcttcactgaaagttttctttgtgacggaagagtatatcgatgctctattggctccgatctgactcagatcttggatgcatctctgtcttcgaacccaaaacaagaaaattcacaacagtccaacagctcctcttctcaaacatcagagcaagacttcatcagct

SEQ ID NO: 89104 - DNA, 542 bp, Arabidopsis thaliana columbia
  unsure (1)..(542): unsure at all n locations
caaaagcactctaaattggggtgaaaaagcattaccaaacaccaaataaatatgtctgatctgaataactcatcatcactcattctaataactttgattttggccacatcagttctagtctccgagagccgggtcgcaagaaaagacttgggtttggaccttggagggatcggtgctggtataggcataggcataggtatcggtggaggtggatccggatccggagctggtgccgggtctggatccggaggaggaggatcaagctcttcttcctcatctagctctagttcttcttctagctccggtggtggtggaggtgatgcaggatccgaagctggatcatacgccggatcacatgccgggtctggttcgggaggacgttccgggtcaggccgtggaagaggaagtggagaaggacggggtcaccgtggagaaggtgaaggagaaggggtnaaaggtgaagaagtgatnccgtaacggnaagntaccgtnaagccgtganattgtgagaattgtgtgcacactnataaaaattcntctgc

SEQ ID NO: 89105 - DNA, 422 bp, Arabidopsis thaliana columbia
ctcatagccgtcgtcgtcgtctctgtcgttcttatttcaaaaaaaaaaaaaaaaaaaggagacaaagaaaaagtaaagagaagtgcgctctctcttactctcagcgattttacaaaatatcagccatctccaaattacagagttctttctcaaacccaggttatcattttccaaagtttgaaggtgtgttcctgtccctgcagagatggcttggtacttatgaatgtgtttatactaatcactaaactcggggattttggctgtataatcaagaatttcatttattaacattgtttggccttgaaagcggtgaggataaaccagagctcaaaacgggtgcactctgttgtattgtggcctcaaggccactggttacaacataatcttcaccccacagcggaagggatattcctcaatcaagt

SEQ ID NO: 89106 - DNA, 428 bp, Arabidopsis thaliana columbia
cacttttcatgatcccgaggacatcttagaccccaaatgttcttcgtcgatgttctttggaaactggttcctctatacgggtgcggatcagaaacaaaggctctctcagcaacagagtccattttgcagatagttcctgaggcaatggctgctacttcatctaacgtcctttgcaatgctagcgagtcagatccttgtcgtgatgattccgctgcatttctacttaaatttgtagccattgcttcgattctcttagctggagctgctggtgtaactataccactcattggcaggaaccgtcgtttccttcaaactgatggtaatctctttgtgactgctaaagcttttgcagctggtgtgattctcgccacgggttttgttcatatgttggcgggtggcactgaagctttgaagaacccgtgcttacc

SEQ ID NO: 89107 - DNA, 419 bp, Arabidopsis thaliana columbia
accacgcgtccgcggacgcgtgggcggacgcgtgggcgccaatcccacatggccctaacctctttcttctgcatcaaatgtcaaccgccaccctcggcggcggccctcctccacctccgggccctatccctacctatataactagcctcggccttggctactccatagccatagctctaggtttcctcgttcttatctccacaatcattctctcttcttacatctgttgccgcgcctcacgcctccgcttctctgcctccgccgcaaacgcaaacgcaaacgcatcgtttagcgaccgtggcgttatcgtcccaagaatcatattcgtagctgaagacgacgatcttgagtctggaaacgacttctttggaggacttgatcattcagtcattaaattcttaccctaaattccattttac

SEQ ID NO: 89108 - DNA, 412 bp, Arabidopsis thaliana columbia
gggtcttgtggttcctggaatctactactcagacgacaagctgctccagtgtaggatctttgcttatggtgacactcagacacatcgccttggaccgaattatttgcagcttccagtcaatgctcccaaatgtgctcaccacaacaatcaccatgaaggttttatgaacttcatgcacagagatgaggaggtacgtcttagtacaccacttgagctaccattgttagtctttttacttgggaatcaaaattctcatttggtttgtactttttacagatcaattactacccctcaaagtttgatcctgcccgctgcgctgagaaagtccccccccctacaaactcctacactggaattcgaacaaaggtccgattcctgccatgccttctctaaatcttcacccacgcgtccg

SEQ ID NO: 89109 - DNA, 553 bp, Arabidopsis thaliana columbia
  unsure (1)..(553): unsure at all n locations
cacacgcgtccgcggacgcgtgggcggacgcgtggggcctatcctatttgggggatcatcaaccttctatcatcaccatggatccttacaagtatcgtccttcaagcgcgtacaacgccccattctacaccacaaacggtggtgctccagtctccaacaacatctcttccctcaccatcggagaaagaggtccggttcttcttgaggattatcatttgatcgagaaggttgctaatttcaccagagagaggatccctgagagagtggttcatgctagaggaatcagtgctaagggtttctttgaagtcacccatgacatttcaaacctcacttgtgctgattttctcagagcccctggtgttcaaactccggttattgtccgttttttccaaccgttgttccacggaacgtggccagtccctgaaaccatggaggggntattcgtgggtcttccctggcaaggttttacccccagggagggggaaacttttgattttttttggggacaaaaacacccgggggttaaccggggggggttaaattcccggntttt

SEQ ID NO: 89110 - DNA, 888 bp, Arabidopsis thaliana columbia
  unsure (1)..(888): unsure at all n locations
tcaaactccggttattgtccgtttctccaccgttgtccacgaacgtgccagtcctgaaaccatgagggatattcgtggttttgctgtcaagttttacaccagagagggaaactttgatcttgttgggaacaacactccggtgttcttcatccgtgatgggattcagttcccggatgttgtccacgcgttgaaacctaacccgaaaacaaacatccaagagtactggaggattctggactacatgtcccacttgcctgagagtttgctcacatggtgctggatgtttgatgatgttggtattccacaagattacaggcacatggagggtttcggtgtccacaactacactcttattgccaaatctggaaaagtcctctgtgtgagggtccactggaaaccaacttgtggggatcaagaatctgacctgatgaaggggccaaggttgtttgggggggccaatcacagccacgccactagggatctccacggtgccattgcatctggcaactcaccccgagtggaaacttttcatccagaccatggatcctgcagatggggataagtccttgcctttgacccacttgatgtgaccaagatctggcctgaggatattttgcctctgcaaccggttggtcgcttggttctgaacangaacattgacaatttcttcaatgaaaactgaancagctttgcgttccaaccccgggttctttgttggttccctggaaatctactaactccaaaagaacaagctgctcccagtgttaggatcttttggctttatgggtgaaccctccnaaaaacatcncccttnggaccgaaattatttngcagcttccccaattccaatggctccccaaatttttctccccccccaaccaatccncc

SEQ ID NO: 89111 - DNA, 599 bp, Arabidopsis thaliana columbia
  unsure (1)..(599): unsure at all n locations
ccttncntgttccagctgattcccncctagggncaaanntggncncccggntggccctntaactgngnccccnggttcaggattccgccccaatnctcccttaaagttnnccctgtcccgcgctgagaagttccaccccctncaaactcctncactggaattcgaacaaagtgcgncatcaagaaggggacaacttcaaaccaggctggagacagntacagatcatggccaccagacaggcaagacaggtttgttaagagatgggtggagattctatcggagccacgtctccacccacgagatccgccggcatctggatctcttactggtctcaggctgatcgatccttgggccacaaacttgcaagccgtctgaacgtgaggccaagcatctacaggccaatctccatataagctcagtctatgtgaggcacaatcaatctcatcgatctatcatcgcttggtcgttaaatccgtcaaaaagataatcccatgtgttgttgtttcttgtctatataataacaccgcttgtaatcccaaatactcatgtttccttcctttctcctctcactgaaaaaaaaaaaaaaaaaaaagggcggc

SEQ ID NO: 89112 - DNA, 946 bp, Arabidopsis thaliana columbia
gacaataaccggagtttgaacaccaggggctctgagaaaatcagcacaagtgaggtttgaaatgtcatgggtgacttcaaagaaacccttagcactgattcctctagcatgaaccactctctcagggatcctctctctggtgaaattagcaaccttctcgatcaaatgataatcctcaatcgaagatcgcggcccgcaccttctatcatcaccatgcgatccttacaagtattcgtccttcaagcgcgtacaacgccccattctacaccacaaacggtggtgctccagtctccaacaacatctcttccctcaccatcggagaaagaggtccggtccttctcgagcgattgtcatttgatcgagaaggttgctaatttcaccagagagaggatccctgagagagtggttcatgctagaggaatcagtgctaagggtttctttgaagtcacccatgacatttcaaacctcacttgtgctgattttctcagagcccctggtgttcaaactccggttattgtccgtttctccaccgttgtccacgaacgtgccagtcctgaaaccatgagggatattcgtggttttgctgtcaagttttacaccagagagggaaactttgatcttgttgggaacaacactccggtgttcttcatccgtgatgggattcagtttccggatgttgtccacgcgttgaaacctaaccccaaaacaaacattcaagagtactggaggattctggactacatgtcccacttgcctgagagttggtcacatggtgctggatgtttgatgatgttggtattccccaagattacaggcacatgggagggtgttcggtgtcccacaccctacacttcttattggcccaaatctggaaaaaggttcttcttttgggaaagtttccactgggaaacccaacttggggggaatcaagaaatctggactggag

SEQ ID NO: 89113 - DNA, 768 bp, Arabidopsis thaliana columbia
  unsure (1)..(768): unsure at all n locations
agcatctaaaggccaatctccatataagctcagtctatgtgaggtacaatcaatctcatcgatctatcatcgcttggtcgttaaatccgtcaaaaagataatcacatgtgttgttgtttcttgtctatataataataatgcttgtaatcccaaaaactctcgttgccctcaatttccaagcagagatgacggtgaagataaggctcgcgcgtcttggttgtaaacaccgacccttctatcgtgtagttgtcgccgatgaaaaatcgcgcagggacggtaaacaaatcgaggtgttaggcttttatgatccactccaaggcaaagaagatgcggatagagtgagcctcaaattcgacagaatcaagtactggttatctgttggagctcaaccaacagacacagtggaaagcatgcttttcagggccggtttgataccaccaaagcctatggtagtggtcggttcgaaaaatgggcagaagtctacgagccaacatgtttcacccattacaggtgaaatcttgaactaagagtgttgatgcgttgagcaagaaagagccttttgtgtctgtgtgaaaggagtttatgtaatgttgtttaagacttttctgtttatgtgaaaggagttaatgtaatgttgtttaagacttttgctttctatgtgaaagcagtttaatgttatgttggttaagacttttctgcaacggagtttcgtgaatttttattctttaatatgagcatgcctttttacnnnnnnnnnagagtgatttt

SEQ ID NO: 89114 - DNA, 2054 bp, Arabidopsis thaliana columbia
  unsure (1)..(2054): unsure at all n locations
nnnnnnnnnnnnnnnnnnnnnnnnnnnnnnnnnnnnnnnnnnnnnnnnnnnnnnnnnnnnnnnnnnnnnnnnnnnnnnnnnnnnnnnnnnncggccgccaattatgcatatgcaatgaaaatgaaatttattaatttttcattccattaacttgggaccatatgaaaattttgttcatgaatcatccgcccacgccaccaaaatcctcaaaagcctatttgggggatcatcaaccttctatcatcaccatggatccttacaagtatcgtccttcaagcgcgtacaacgccccattctacaccacaaacggtggtgctccagtctccaacaacatctcttccctcaccatcggagaaagaggtccggttcttcttgaggattatcatttgatcgagaaggttgctaatttcaccagagagaggatccctgagagagtggttcatgctagaggaatcagtgctaagggtttctttgaagtcacccatgacatttcaaacctcacttgtgctgattttctcagagcccctggtgttcaaactccggttattgtccgtttctccaccgttgtccacgaacgtgccagtcctgaaaccatgagggatattcgtggttttgctgtcaagttttacaccagagagggaaactttgatcttgttgggaacaacactccggtgttcttcatccgtgatgggattcagttcccggatgttgtccacgcgttgaaacctaacccgaaaacaaacatccaagagtactggaggattctggactacatgtcccacttgcctgagagtttgctcacatggtgctggatgtttgatgatgttggtattccacaagattacaggcacatggagggtttcggtgtccacacctacactcttattgccaaatctggaaaagttctctttgtgaagttccactggaaaccaacttgtgggatcaagaatctgactgatgaagaggccaaggttgttggaggagccaatcacagccacgccactaaggatctccacgatgccattgcatctggcaactaccccgagtggaaacttttcatccagaccatggatcctgcagatgaggataagtttgactttgacccacttgatgtgaccaagatctggcctgaggatattttgcctctgcaaccggttggtcgcttggttctgaacaggaccattgacaatttcttcaatgaaactgagcagcttgcgttcaacccgggtcttgtggttcctggaatctactactcagacgacaagctgctccagtgtaggatctttgcttatggtgacactcagagacatcgccttggaccgaattatttgcagcttccagtcaatgctcccaaatgtgctcaccacaacaatcaccatgaaggttttatgaacttcatgcacagagatgaggagatcaattactacccctcaaagtttgatcctgtccgctgcgctgagaaagttcccacccctacaaactcctacactggaattcgaacaaagtgcgtcatcaagaaagagaacaacttcaaacaggctggagacaggtacagatcatgggcaccagacaggcaagacaggtttgttaagagatgggtggagattctatcggagccacgtctcacccacgagatccgcggcatctggatctcttactggtctcaggctgatcgatccttgggacagaaacttgcaagccgtctgaacgtgaggccaagcatctagaggccaatctccatataagctcagtctatgtgaggtacaatcaatctcatcgatctatcatcgcttggtcgttaaatccgtcaaaaagataatcacatgtgttgttgtttcttgtctatataataataatgcttgtaatcccaaaaactcatgtttccttcctttctactctcactgtctttgtaatctctttttacaataaatcaatgtttcttgaagcagtaaacaatttctaagaaaaaaaaaaaaaaacggccgctctagaggatccaagcttacgtacgcgtgcatgcgacgtcatgctgttctatagtgtaactgtcctaa

SEQ ID NO: 89115 - DNA, 503 bp, Arabidopsis thaliana columbia
tttaggaccactatagaagatctatgacgtcgcctgcacgcgtacgtaagctcggaattcggctcgaggcctttgtccgaatttagggtttccatttttctttccgttcttccttcaatcaaatactcgaaaccctaatctcttcttgatcaggccttgtcgatttactgtcccttgtatcaacttaaggttcatgtctgatcttgaagttcaagtccccactgcctttgatccgttcgctgatgcaaatgctgaggactctggggcgggaacaaaggaatacgtgcacattcgtgttcagcagcgtaatggtagaaaaagcttgacaactgtccaggggcttaagaaagagtatagctatagcaagatacttaaagaccttaagaaagaattctgctgcaatggcaccgtcgtccaggactctgaattaggacaggttattcagcttcaaggtgatcagaggaagaacgtatctacgttccttgttcaggctgggcttgtga

SEQ ID NO: 89116 - DNA, 991 bp, Arabidopsis thaliana columbia
  unsure (1)..(991): unsure at all n locations
nnnnnnnnnnnnnnnnnnnnnnnnnnnnnnnnnnnnnnnnnnnnnnnnnnnnnnnnnnnnnnnnnnnnnnnnnnnnnnnnnnnccacgcgtccgtgtagctcttcctctcgtaatttcctcttcttcttctttcagacagaagcttgcctttgtccgaatttagggtttccatttttctttccgttcttccttcaatcaaatactcgaaaccctaatctcttcttgatcaggccttgtcgatttactgtcccttgtatcaacttaaggttcatgtctgatcttgaagttcaagtccccactgcctttgatccgttcgctgatgcaaatgctgaggactctggggcgggaacaaaggaatacgtgcacattcgtgttcagcagcgtaatggtagaaaaagcttgacaactgtccaggggcttaagaaagagtatagctatagcaagatacttaaagaccttaagaaagaattctgctgcaatggcaccgtcgtccaggactctgaattaggacaggttattcagcttcaaggtgatcagaggaagaacgtatctacgttccttgttcaggctgggcttgtgaagaaggataacataaaaatccatggtttttgagcaattctagagatactccttgttcagcttgtatttacgggatcagccagtcccaaaaggaatttataaaccattacttaaatgtattaatgcttttattatgtattgtgtcaaaaaaataatctaatagtttgcttatgagcgtatatataaatgtatcaacttttggtatgcatttgtacttgtagtgtgagtttatcaataaaatttgctttgtgatgaaaaaaaaaaaaaaaaggannnnnnnnnnnnnnnnnnnnnnnnnnnnnnnnnnnnnnnnnnnnnnnnnnnnnnnnnnnnnnnnnnnnnnnnnnnnnnnnnnnnnnnnnnnnnnnnnnnnnnnnnnnnnnnnnnnnnnnnnnnnnnnnnnnnnnnnnn

SEQ ID NO: 89117 - DNA, 508 bp, Arabidopsis thaliana columbia
atactccaggtccctacgactcatttagggaaagctgctacgcctgcaggtaccggtccggaattcccgggtcgacccacgcgtgcgggatctgttactaaaacaaagtcgctttactcagatctgaataagaagaagaagaagaaacatagttgaagtctctgttaatatgtcttcaacaacaacagattctacagaattgcaaaatctgatcaaactgtttcaaaattgccaaactcatcctcgtcaacattttcctgcaaaatcttcagctgtattagtttgtctataccaagaacacagagaagacaaaaacgagctacgcgtaatcttaaccaaacgatctactactctctcttctcatcctggggaagtagcattgcctggaggaaaaagagaccaagaagataaagatgatatagctactgcggttgagagaggctcgtgaagaaatcggtttagatccttctcttggtacaatcatttctggtcttgaaccatttggtaa

SEQ ID NO: 89118 - DNA, 382 bp, Arabidopsis thaliana columbia
agggaaactgatagttcgagacgatgcggaaacaatacagcaagtggaaggcatggtgaaagcgatgaaatgggaagttcgaatgacttattctaaggaaaaagaaggtttgctctctgttcaaaaatcaatctggcgacccagtgaagtggaaacactcacttacgctatcggttgagaagacttacttcaagtcccactcttttttgtacgtataaaaacactcttattaactccatatcatccctttttttgttggttcgtcttttaggaagttctttttttttagctgttgagtcatttgtttgtactattcgcacatttttgtgttcttgaaggtgaagaactctattgaggttctttggtaaagttagattacacc

SEQ ID NO: 89119 - DNA, 538 bp, Arabidopsis thaliana columbia
  unsure (1)..(538): unsure at all n locations
catctgtnagaaatgtgatggacatgagagccgtttatggaggttttgcggcactctaagagatctgaaagtgtgggtcatgaatgtggttccaatagattcaccagacacacttgcaataatctatgaacgaggactctttggtatctaccacgattggtgcgaatctttcagtacatacccgagatcatatgatctccttcacgccgaccatcttttctccaaactcaaacaaaggtgcaatcttactgcggtgatagcagaagtggatcgtgttttgagaccggaagggaaactgatagttcgagacgatgcggaaacaatacagcaagtggaaggcatggtgaaagcgatgaattgggaaggttcgaatgacttattctagggaaaagaaggtttnctctcttttcaaaatcaatttggggccccttaagtggaanactcactttacgntttcggtttagaagccttctnaagnccccnttttttgtcggtaaaanctcttttacncntanancctttttgnnggcgctttttt

SEQ ID NO: 89120 - DNA, 488 bp, Arabidopsis thaliana columbia
  unsure (1)..(488): unsure at all n locations
ctcnnnnnnnnncgctcaacatgcaagtgcactatatatcgttctctgcttatgcagattacgcgcccacgcgcgcgtgcacgcgtgcgctcatgcctcctaacatcatccttgttcacggtgaagctaacgagatgatgaggctcaaacagaagctcttaacagagtttcctgatggaaacacaaagatcatgaccccgaagaactgtgagtcagtggaaatgtattttaattctgagaaattggcgaaaaccattgggagattggcggaaaagacacctgatgttggcgatacagtaagcgggattctggtgaagaaagggttcacttatcagataatggcacctgacgaactccatgttttctcacagctatcaacagcaactgtaactcagcgaattacaatcccgtttgtaggagcttttggtgtgataaaacatcgcctggagaagattttcgagagcgtgggaattttcaacagatgagga

SEQ ID NO: 89121 - DNA, 481 bp, Arabidopsis thaliana columbia
cgcctgcaggtaccggtccggaattcccggggggacccacgcgtccgcccacgcgtccgcccacgcgtgcgtacggctgcgagaagacgacagaaggggctctcgagagcagaaacagagtcaccggtaaactcatctccggcgacataaaaacacaaaagttcatatatttagattctggtgattctctgctctaatgggtcaatctcaagtttctctctttcttcttctaattcttgttttcatctatggagtttcctccaccactttcaccatcgttaaccagtgtagctacaccgtctggcctggacttctctccggcgccggaacctctcctttacctacaaccggattctccttaaaccctaccgagacacgagttatcccgatccccgcagcttggtccggtcgtatttggggtcgtactctctgcacacaagacgcaaccaccggaagatcacctgcatcaccggggacgggg

SEQ ID NO: 89122 - DNA, 578 bp, Arabidopsis thaliana columbia
  unsure (1)..(578): unsure at all n locations
gannnnnnnnnnnnnnnnnnnnnnnnnnnnnnnnnnnnnnnnnnnnnnnnnnnnnnnnnnnnnnnnnnnnnnnnnnnnnnccacgcggtgcgcgtctgctcagaagtgggattatatcggttgtgtaagggctcatacacatgatatcagggctctaactgttgcagtgccaataagttgggaaggttccattccagataggaatgcaaaagtaacaagtcctaaacagcgcaggaaggagccggctggtttcagttaccataaatgggcacatttgggggttccgatgctcatttcagctggtgatgatgccaagctttatgcatactcggttcaagagtttactaagttccctccacatgatatatgtcctgcgcctcagagagtgcccatgcagatggtacataatacagtgttcaatcagacttctcttctcttggttcaggattcttgttctttagatattcttcgtattcacataagcaatgattctaggggggcgggtctccactaagccattggttcgtgttaaaagtaaagatgctcggaagatcatatgcagtgcaatttctaacaca

SEQ ID NO: 89123 - DNA, 531 bp, Arabidopsis thaliana columbia
  unsure (1)..(531): unsure at all n locations
nnnnnnnnnnnnnnnnnnnnnnnnnnnnnnnnnnnnnnnnnnnnnnnnnnnnnnnnnnnnnnnnntctcatcatcatcttctctatgattcttcagaaaacgatgcaatcaccatttcttcatctctgtaaaagcttcacttcttcttctccactttcatgtcacaaccacaatatatgctttggatttcataatgctctgttatctccttcaatctgcaatttccagcgacgaaacaatgtcaacgggagaaaaatcgttgcgcagggatcaagactaaacgacggaaatagccgtccggcgggaaacaaagggaaagtaagtctgaaaggtaacaaagagaatatatggagcgttgacaacgaaatggcggagaaggataagcgtaaggtgaagccaaaaggaagaaaaagcgggaagagattaggtggaggaagaaagggtaaattcggtagagttttggtttcagggacgatgttgatcgaatccgaaactgttcttcaaactcaggagcctgtgataaaaccaggt

SEQ ID NO: 89124 - DNA, 550 bp, Arabidopsis thaliana columbia
  unsure (1)..(550): unsure at all n locations
nnnnnnnnnnnnnnnnnnnnnnnnnnnnnnnnnnnnnnnnnnnnnnnnnnnnnnnnnnnnnnnnnnnnnnnccacgcggtccgccgccgcgtgcgaacgatccatagatctcaagtctctctctcttagtgaataaattagggttcgttgattctctgttcttaagctcagtaatcgaggagaagaagaaaagggaagatcgggaattgggaaactgagaagtcaaaaaggcaaatgcgagtggaggagattgagttttagaattccaatgtcttgggctgctcctgatgatatcttcttctccacttctcttgctgcttacctagacaagaaacttcttgtgttgcttcgtgatggtaggaaactgatgggtctacttcggtcctttgatcaatttgctaatgctgttttagaagaagcttatgaaagagtcattgggggtgatctctactgggatattcccttagggctatccattatgccgtggagaaaatggtgccttgattggtgaattggacgtggaaaaagaagagcttccagctcatatggt

SEQ ID NO: 89125 - DNA, 835 bp, Arabidopsis thaliana columbia
  unsure (1)..(835): unsure at all n locations
ttgaattgcctggcactccgcggtaccggtccggaattcccgggtcgacccacgcgtccgaatcgaggagaagaagaaaagggaagatcgggaattgggaaactgagaagtcaaaaaggcaaatgcgagtggaggagattgagttttagaattccaatgtcttgggctgctcctgatgatatcttcttctccacttctcttgctgcttacctagacaagaaacttcttgtgttgcttcgtgatggtaggaaactgatgggtctacttcggtcctttgatcaatttgctaatgctgttttagaagaagcttatgaaagagtcattgtgggtgatctctactgtgatattcccttaggtctatacattatccgtggagaaaatgttgtcttgattggtgaattggacgtggaaaaagaaggagcttccagctcatatggttcaggttccagaagcagagataaaaagggctcagaaagcagagaaggaagaaatgcttttaaagggcacaatgcggaaaagaatggagttccttgatctcgattagggcattttcctatgtgttgcagcattgtagaaactagaagatctcaagatggaggatacagaagatccttaaacgtcataatgttagttgatgtgtgtatgtgtggatgacattgatgaatcctcagaacttagtcgttgcagatcctctgctctgtttatggaatgaaattgttgagcctgttctttactggccatttatttgatcaaaaaaaaaaaaaaagggcgnnnnnnnnnnnnnnnnnnnnnnnnnnnnnnnnnnnnnnnnnnnnnnnnnnnnnnnnnnnnnnga

SEQ ID NO: 89126 - DNA, 525 bp, Arabidopsis thaliana columbia
  unsure (1)..(525): unsure at all n locations
aatgatctccnnnnnnnnnnnnnnnnnnnnnnnnnnnnnnnnnnnnnnnnnnnnnnnnnnnnnnnnnnnnnnnnnnnnnccacgcgtgcgctctctctctctctctctcgccgttactctctgctctgccgccggcattctctccgggatttggagtttgtgtacaaaaagactgttgttggaatgtgcaaatgagacaatattggaaatgttatttgcagcagaaggaggaggattcttctctgcgtcagcttctggttatagcaatggtttagctcttcttctattaggtcaaaagactgaacaaaaaccaatcaaagtttcatcacaatggaaccattatcatttagttcttgaagattctgataccgggtttcggttagattcgtctaagaattggctctcttctgcttgcacttctctcatatgttttggtcgaaaatccgaaagactggaaagcgagggggaagaaagatgaggcaccgagtgtggaggactataataactggggaaggcactaatagg

SEQ ID NO: 89127 - DNA, 586 bp, Arabidopsis thaliana columbia
  unsure (1)..(586): unsure at all n locations
atgatctgccnnnnnnnnnnnnnnnnnnnnnnnnnnnnnnnnnnnnnnnnnnnnnnnnnnnnnnnnnnnnnnnnnnnnnnccacgcgtccgctagaaatagaattaatctcagctattttgtcttaacgactctttattgtcccgacacacgaaaatggcgtctcttagccaaatcaccctgccacgcgcgccgtcgtcggagattggcctcttacgccgtcgattggagcggccgatcatcagaacccggatcggattcaacggccggattgcgagcgtattgactaacgcaggggaccaagcggtgtcggtaaaagcgagtgtgagccagaaggtgattgaagaggaagccaaagttattgtgggtacctacgcgcgagctccagtggttctctcgagtgggaaaggttgtaaattgttcgaccctgaaggaaaagagtatctggattgtgcatctggaatcgctgtgaatgctcttggtcatggagatcctgattggcttcgagctgtcactgagcaagctggtgttcttgcccatgtcagcaatgtttattacacgatccctcagatagagctcgcaaaacg

SEQ ID NO: 89128 - DNA, 1703 bp, Arabidopsis thaliana columbia
ctccaacttttaaaactcatcataaatagtaaaaaagtagccggaaaaataaaataaaaagtctatttctctttcctttaaaatccaaatcctataaactcatagctttctctgttctttacttatacctcacgttatacatatatatagagtttctataaatgcttctctttcctctcgaacaaatcttcctcacttctctcatttccacactcaccttcctctctatatattaaaccctatctacttaactcttcttctaactctaatctctctctctatttactctgcttctgttctcactctgaaagaaccaaaacatgacggtggttagagagtacgacccgacccgagacttagtcggcgtggaggacgtggaacgacggtgtgaagtcggaccaagcggcaagctttctcttttcaccgaccttttgggtgacccgatttgtagaatccgacattcaccttcctatctcatgctggtggctgagatgggtacggagaagaaggagatagtgggcatgattagaggatgtatcaaaaccgttacatgtggccaaaaactcgatttaaatcacaaatctcaaaacgatgtcgttaagcctctttacactaaactcgcttacgtcttgggccttcgcgtctctccttttcacaggagacaagggattgggtttaagctcgtgaagatgatggaggaatggtttagacaaaacggagctgagtattcgtatattgcaactgagaacgataatcaagcttctgtgaatttgttcaccgggaaatgtggttattcggagtttcgtacaccgtcgattttggttaacccggtttacgctcatcgagttaatgtttcgcggcgagtcacggttatcaagttagagccggttgatgctgagacgttgtaccgaatccggtttagcacaacagagtttttcccgcgggatattgattcggtacttaataacaaactctcgcttgggactttcgtcgcggtgccacgtggaagctgttatggatccgggtctggatcatggcccggttcggctaaattcctcgaatatccacccgagtcatgggccgtattaagcgtgtggaattgtaaagactcgtttctgttagaagtacgtggagcgtcgagattgagacgtgtggtggctaaaacgacgcgagtagttgataaaacgttgccgtttctgaaactaccttcgataccgtccgttttcgaaccttttggacttcattttatgtatggaatcggaggagaaggtccacgcgcggtgaagatggtgaaatccttgtgtgctcacgcgcataacttggctaaggcaggtggttgtggtgtcgtggcggcggaagttgccggagaagacccgttgcggcgaggaataccacattggaaagtgctatcgtgtgacgaggatctttggtgtataaagcggcttggagatgactatagtgatggtgttgttggtgattggactaaatcgccacctggcgtttccatttttgtagaccctagagaattttaaaactttttttttaactctataatatatattctctattaaccacttgatgttaaattaggggttttcttctaagtttatagattttcttgttttagaattaatctttttttttaggtaactttttttgctttttgttttgttttgttttgtttttgtgggtgttataaatta

SEQ ID NO: 89129 - DNA, 1477 bp, Arabidopsis thaliana columbia
gttaacactcttttaaaagaacaaaaaaagcaaaaataaaataaagatattatcaccatggctaacgcaagaagtttagtcgccaaggcaaacaatattaacgtaggttcattgattctaatggccttggtgtttggttcttgcgtggctaatggtgaatatctcggcggccgccgtggtctcgctgctaattccggtaaccccacggtctatgatattactaagtttggagccgtaggagatggttccaccaatacttttaaggcgtttttgaacacatggatacaagtgtgtgacagtccagtaccagcaacgctactagttcctaagggaacatttttggctggtccagtcattttcgccggtccatgcaagagcaaagtgaccgtcaatgttataggcacaatcatcgctacgaccagcgggtacgcaactcccgagtggttcttgttcgagcgtgttgacaatctcgtcctcaccggaaccggcacattccacgggaaaggtgaagctgtctggaaagcagatggttgtggtaaaaaggtccaatgcaatcttcctccaacgtctctcaaattcaggaacatgaaaaatgttgaaatcaatggcataagctcggtgaacgcaaaggccttccacatgttcttagtcaaaactgagaatgttaacatccaaaacattaagcttaccgcaccagctgaaagccccaacaccgatggtatccatttgagcaatgcagacaacgttagcatcctcgacagtaccatagcgactggagacgattgtgtttcagtcggtcgtggctccaacaacgtaaccgtcgaacgtgtgatttgtggtccaggacacggtctaagtgtcggtagtcttggtaagtacaagaacgaggaagacgttagcggaatccacgttaacaactgcacgatgattgagaccgacaatggtcttaggatcaagacatggggtgggtcagacccaagcaaggctgtggacattaagtttgaaaacatcatcatgcagagtgtcaagaacccaatcatcattgatcaaaactacggttcaagaggcggagattcacaagttgctataagtgatattttgttcaagaacattagaggaacaacaattacaaaagatgttgttcagattatgtgtagcaaatcggtgccgtgccaaggagtaaacgttgttgacgtgaacttggactatgtaggcaagacaggaggagagaagaagtcgtcatcaggcggtttggtcggagctctttgcgataacgccaatgttatcttcggtggaaaacttagtttccctatgtgtcccaaataagctttttggtataaataatttaatattaaaaaaaataatcaaaagtttcacaaacattgttttgtttgtgagttagtttgggaatttatcaacaagaaataatcagtggaatatttgacttttgatttttgataatgtttttttcccgatt

SEQ ID NO: 89130 - DNA, 653 bp, Arabidopsis thaliana columbia
acgcgtcaatgaatgtgttgtgtcgagtgttcacttcgtcaagagtcttatcatcaaacgttacgttctcgttttctcaaattccaaacaataccaagaaacctctacttgaaaagagaagattatcgccgcgtgtgtgcctaagagcgatggcgtctgagaaacaaaaacaacatgcacaacctggcaaagaacatgtcatggaatcaagcccacaattctctagctcagattaccaaccttccaacaagcttcgtggtaaggtggcgttgataactggtggagactctgggattggtcgagccgtgggatactgttttgcatccgaaggagctactgtggctttcacttacgtgaagggtcaagaagaaaaagatgcacaagagaccctacaaatgttgaaggaggtcaaaacctcggactccaaggaacctatcgccattccaacggatttaggatttgacgaaaactgcaaaagggtcgttgatgaggtcgttaatgcttttggccgcatcgatgttttgatcaataacgcagcagagcagtacgagagcagcacaatcgaagagattgatgagcctaggcttgagcgagtcttccgtacaaacatcttttcttacttctttctcacaaggcatgcgttgaagcatatg

SEQ ID NO: 89131 - DNA, 400 bp, Arabidopsis thaliana columbia
cgtccgaagacactctggaagaaccctaaagcattttcctcaatcgttattggggttttacgaattcgacatctgtttctgactccgccggatggctagatgggatcagattttctccttacctgtgcaaaatcctaccttgccagaattttcttctaccgatcttgtctggtcaaaggttgaaggttaccgggacaatatagataggttagccctcatcccatatactagggtggatgattttgtaagaggtgaatgctcgaataaagattgtcctacaagtttccatgttgaagctagacgacggaaagccaaaggaaaaaaatataagccaaaggtggatggcatcttggagtatattctgtattggtgttcctttggaccggatgacaataggaaa

SEQ ID NO: 89132 - DNA, 668 bp, Arabidopsis thaliana columbia
  unsure (1)..(668): unsure at all n locations
ctcactatttggaaagcgggcacgcctgcagggaccgggccggaatcccgggtcgaccacgcgtgcgcagatttaagccatacagttaaggtatcacaaacattcaacagacctgcaaccactcttgcagaatncgggaacttgactacccgcgattcactttgtcccaagacacaatgttaagctatgactttatagagcgtgccaatgtgggcctcacatttcaaagcctacaaggtttctgtctcccctttcaaaggcccatccgtaactgtccagcccaaaacactcaatttctcttcgaagccccaaaagctttcctacccggttactttcaggacaaggttccggatgaagaggcctgagtttggggggctagtgtggaagagccctccccataaagttcgtagcccggttatcatcacatgggtgccccccctgtaaaacaacaaccaatgtttgagcaatcctaatgtttttagttccccaaataaaaattccttatgtaatgggagctattttttagatcaatgctttggccttttttaaaaaaaaaaaaaaaaaaaaaaaaaaaaaaaaaaaaaaaaaaaaaaaaaccaaagggcgaccgctctagaggatccaagcttacgtacgcgtgcaggcgacgtcataactcttctgatagt

SEQ ID NO: 89133 - DNA, 1168 bp, Arabidopsis thaliana columbia
  unsure (1)..(1168): unsure at all n locations
ctttagggaaagctcgtccgcctgcaggtaccggtccggaattcccgggttgacccaggcgtccgcccacgcgtccgcgagtttagagattcttggaacaagaattggtatcaaaccttcaccagttgtagcagcgttctcttcaagaggaccaaattttctgtctttggagatcttgaaaccagacttgttggctccaggagtgaatattcttgcagcttggactggagacatggcaccatcgagtttatcatctgatccaaggagggttaagttcaatatactgtctggaacttcaatgtcatgtcctcatgtaagtggtgtagctgctttgatcaaatcaaggcatccagattggagtcctgcagcaatcaaatcagctctcatgacaactgcttatgttcatgacaacatgtttaagcctcttacggatgcatcaggagcagctccttcatcgccttatgatcacggtgcaggacatatagatcctttaagagctacagatcctggtttggtctacgacattggacctcaagagtattttgaatccctctgcactcaagatttaagtccatcacagcttaaggtattcccaaaacattcaaacagaacctgcagacacactcttgccaagaattcgggaaacttgaactacccggcgatatcagctntgttcccagagaacacacatgtaaagctatgcccttagaagaacagtgaccaatgttggtcctcacatttcaagctacaaggtttctgtctcgccattcaaaggcgcatccgtaactgtccagcccaaaacactcaacttcacttcgaagcaccagaagctttcctacacggttactttcaggacaaggttccggatgaagaggcctgagtttggtggtctagtgtggaagagcactacacataaagttcgtagcccggttatcatcacatggttgcctcctctgtagaacaacaaccaatgtttgagcaatcctaatgtttttagttccacaaataaaaattccttatgtaatgggagctattctctagatcaatgctttggcatttataaaacaaccatatgttcttcttaaaaaaaaaaaaaaaaagggcggcacgctctagaggatccaagcttacgtacgcgtgcatgtgacgtcatagatcttctatagtt

SEQ ID NO: 89134 - DNA, 626 bp, Arabidopsis thaliana columbia
gctctatacaactcactatagggaaagctggtccgcctgcaggtaccggtccggaattcccgggtcgacccacgcgtccgtgcaggtacaatgaagtgatacaaagctggcaactttgtttcaattgggaacaagggtttgactttcaggtccacacggttcgcactcggatactaacagacatggcttgggtcaccatgaaggcatacctgaacgtggatggtggtccattcctaataaccaatgtgttcgagttccacaatggaaggtggcacatggttcatcatcacagctcagtgatgctcatcgatgatcaacaagttgttgttcattgatgaatgatgataatatcttttagttttggtttccttctcttcttttattttcatggggacaacaaataaagaagaagaaagaaactgcatattggagaaattggcttattagatttttagtggttattatttagttttaactacatgtactgaatgttctatttttttttttttctcagttgctgttgaatggttggtctaattattactttttcctaatttcaaaaaaaaaaaaaaaaaagggcggccgctctagaggatccaagcttacgtacgcgtgcatgcgacgtc

SEQ ID NO: 89135 - DNA, 1122 bp, Arabidopsis thaliana columbia
  unsure (1)..(1122): unsure at all n locations
aacgacaagcctcaattgcttgctgctgtaaaatttatagcgcatctagtaaaccagcaagtcgctgaggagatcatagcacttgagttagttaccatacttctgggagacccaactgatgacagtgttgaggtggctgttgggtttgtgacggaatgtggtgcaatgcttcaagacgtttcaccaagaggattgaatgggatttttgagaggtttcgtggtatactgcacgagggagagatagataagagagttcagtatttgattgaaagtctctttgctactaggaaggcgaaatttcagggacatccggccgttcgtcctgagctagatcttgttgaagaaaaatattcgcatgatctctctcttgatcatgaaattgatcctgaaactgctcttgatattttcaaacctgatcctgatttcgtggagaacgaaaagaaatatgaggcgctgaagaaagagttactcggtgacgaagagtctgaggatgaagatggctctgatgctagttcagaggataacgatgaggaggaagatgagtctgatgaagaagatgaagaacaaatgagaataagagacgaaacagagactaatcttgttaatcttagaaggacaatctacctgaccataatgtccagtgttgattttgaagaagcaggtcacaaattacttaaaattaagcttgaaccaggtcaagagatggaactatgcataatgctcctggaatgttgctctcaggagagaacatatctgcgttactatggattgttgggtcagcgtttctgtatgatcaacaaaattcatcaagagaattttgagaaatgctttgttcagcagtattccatgattcaccgtcttgagacaaacaaattgcgtaacgtggctaagttttttgcccatttactgggcacagatgctctcccctggcatgtgcttgcctacattcgnttaaccgagggaaggcactacttncctcatctcggatcttcattnagntccnaattnccggggatttgtcaagaccactttnggggtttaggnttncttaatgagngggttnaagggtcnancaatncangggtcccttgnatccntntttccccaagggtatncaaagac

SEQ ID NO: 89136 - DNA, 370 bp, Arabidopsis thaliana columbia
acgaaatctcgctcgctttcgccgccgtgaaatttgattctccgatcactacaacgattccgatctgtcctccgttgatttcgatcctgattttgatattgtttcgacatgaaattggtgtgatctcgtttcgagtttcgtggcgtatttgcttattttaagtgtgtggaatcgatttttaatgggggataattctggtagaagtagaaactctatgatggcaactgtttcttctgggaaagagttgtgacctaagagaagcttagtagctgctattccaagagctgttcagcagacaatctctaagcatgtttcgtttgggagtaatggtagatttggaagtggaaccgcgcgtaatgcagctgtgttt

SEQ ID NO: 89137 - DNA, 993 bp, Arabidopsis thaliana columbia
  unsure (1)..(993): unsure at all n locations
atacgactttctatagggaaagctggtacgcctgcaggtaccggtccggaattcccgggtcgacccacgcgtccggtgcgtctccaattccagtttccgccgccgaagctaaatttcttcaggcttcatagaagaagaccgaacatggcgagacgtaaccgtggggtgacaaggcgcgaaaggccgaacctactgatcacggtgactcctggtaccggcaaatcgacgacggcttctgctctagccgaagccacgaatctccggtatatttgcatcggagatctggtcaaagagaaagaattctaccatggctgggacaatgagctcgagtgtcacttcatcaacgaagactcggtgattgatgagcttgacgatgctatgatagaaggagggaacattgtggactaccatggcttggacttctttcctcagcgatggttggatcgcgttgtcgggctcgaaccgaaactccgttttgttgaaccgttacgaataggggttattcaggaaccaagcttagtaacaaccttcaatgcgaaatgtatcaagtcctactcgaagaagcacatgacagttatgatgaggaaattgtcactgaactacaaagtaacacaatcggggatatttctacaatgtctccactttgacggttggattaatgcatggcaaccctgatgatcatcatattggaatctgatgaccatgctctgaatcgatcctgggtgcaatttggttactgagattctgaagcacataattcaggttatggatgctttactgtgatatttaatgaaaagaagaagcttctaatcttttaattgtctttgggaaactttacaattgggggaaaacttgaatggtctgataattatgataagaaacttaatctgggtccaaaaaaaaaaaaaaaaaannnnnnnnnnnnnnnnnnnnnnnnnnnnnnnnnnnnnnnnnnnnnnnnnnnnnnnnnnnnnnnnnnnnnnnnnnnnnnnn

SEQ ID NO: 89138 - DNA, 460 bp, Arabidopsis thaliana columbia
tacactcatataggaaactgcccgcctgcaggtaccggtccggaattcccgggtcgacccacgcgggcggggaacaagtaaactgaagaagccgattgttcttctcactatcgcactattgagctctgtcttcttcttcgcattcttcttcctaaacaaatctgacgtatcatctacctctgctttacggaaccgagactccatggctcgaaccttcatcttatggcttcacgggctaggtgattccggacctgccaacgaacccatcaaaacacttttcaggtcccaggagtttagaaacactaagtggctcttcccttctgctccaccaaatccagtctcttgcaattatggtgcagtgatgccttcttggtttgacatccctgagcttcctcttactgcgggatctccgaaagatgaaagcagtttgcttaaagcagttaagaacgttcatgccatt

SEQ ID NO: 89139 - DNA, 555 bp, Arabidopsis thaliana columbia
  unsure (1)..(555): unsure at all n locations
nnnnnnnnnnnnnnnnnnnnnnnnnnnnnnnnnnnnnnnnnnnnnnnnnnnnnnnnnnnnnnnnnnnnnnccacgcgtgcgagacataccactcaccgtaccaaaaagattagaccaacaaaaaaaaaaaaaaaaaggaccagctcagatgagtctggagtttccaagtttaaaacctctctacctcgatttgagcaaatcctgatttactctcatcctcatcatctctcatcatcgagattcatagtctcttttgccgcttggattcttccaaggttagtgagctgctatggcaactcatcagcaaacgcaacctccttccgattttcccgctcttgccgatgaaaattcccagattccagaggctactaagcctgctaatgaggttcagcaagctaccatagctcaggatcctccaacatctgtgtttaagaattctgaaccaatacgggaggatcaaattcagaacgctatcaaattcctttcgcacccgagggttagaagctctcctgttatacataaaagatcttttcttgagaggaaaggtctcactaa

SEQ ID NO: 89140 - DNA, 348 bp, Arabidopsis thaliana columbia
agagaacgagagaggcggccatgggaggaggaatgggtgcgttttggggaactcgagtgatggaattagtgaagaagcacgattccggtggtcttctttggaagcggatcaagctaacccctactcgtacagccaatgccaaaacccgcctccgtcgtgtttggcacaatgaggctgttcgaagggcgtgtggggaatcagatgcaccagattcgccgggagctagcaacacaaaaagctctagcaatgcggtgaaaaatgcgtaaggccgaaaagaagctagtcctagtttgtgaggactcgtagatcaagtctctgtcgttacctgattttacaaaaataatattt

SEQ ID NO: 89141 - DNA, 523 bp, Arabidopsis thaliana columbia
  unsure (1)..(523): unsure at all n locations
cgcctgcaggtaccggtccggaattcccggtgtcgacccacgcgtccgtacggctgcgagaagacgacagaagggggcggcgagagattcagctgcgttgggcaaaatcccagacgaagatcagtgattagtcttttgataacttgagccatggcaactggtaaaactgtgaaagacgtctcgcctcatgacttcgtcaaggcttatgcttctcatctcaagcgatctggcaagatcgagcttcccacatggacagacattgtgaagaccggaaagttgaaggagcttgcaccatatgatcctgattggtactacatcagagctgcatctatggcaaggaaggtttacctgaggggaggacttggtgttggtgctttccgtagaatctatggtggaagcaagaggaacggtagtcgcccacctcacttttgcaaaagcagtggtggtattgcccgtcacatcctccaacagctggagacaatgaacatttgtttgggttggcaccaaagggggnangaaggnt

SEQ ID NO: 89142 - DNA, 855 bp, Arabidopsis thaliana columbia
  unsure (1)..(855): unsure at all n locations
anncncccccgntggcccttaaaacttggggcccccccggntcagaatccnggcccgcaaaaccccagcccaaaccccccccttccctttgaaaacctggcccntggcaactggacaaaccgtgaaacgccttccccctcaaggtttcgtcaaggcttatgcttcccatctcaagcgatttggcaagatcgagcttcccacatggacagacattgtgaagaccggaaagttgaaggagcttgcaccatatgatcctgattggtactacatcagagctgcatctatggcaaggaaggtttacctgaggggaggacttggtgttggtgctttccgtagaatctatggtggaagcaagaggaacggtagtcgcccacctcacttttgcaaaagcagtggtggtattgcccgtcacatcctccaacagctggagacaatgaacattgttgagctcgacaccaaaggaggaagaaggatcacttccagtggccaaagggatttggaccaggttgctggccgtattgcagttgaaccttgaagatcttaatgttcttttttgttcttcttctacttttgaggccattgtgcttttagtgtttatctttacttttaagaattgttaccatttcattctcaagacttgcgctcataatgttcaaaaatttatctttttggcgatggctttggacattgaaacttatgtcttcaaccgtatttttgtgttcgtccgatttaaggataataggatatggtttcttcatccctaaaaaaaaaaagataaacaaaaaaagagcgaccgctctagaggatccaagcttacgtacgcnnnnnnnnnnnnnnnnnnnnnnnntacattcg

SEQ ID NO: 89143 - DNA, 913 bp, Arabidopsis thaliana columbia
  unsure (1)..(913): unsure at all n locations
aggagaaaaattgaattgcactggccgtccgcggtaccggtccggaattcccgggtcgacccacgcgtccgcaaaacccaaatcggaacttaaaccaaaagacaaacaaaaacgccgtcgtttcacgatgctttcttcttccccaaccttcttcgctactccatttctctcttcttcttcttcttcttctccgtcgttctcttctacttcaccaccgtcacgcatttcccggatctcgccgtcgctttctacaaccaccgcgtcctacacctgcgccgaagatctaccgagattacgccaaatcccgcagcgattttcagcaaccgcgtctctctacgagatccttgaaattcccgtcggctcgacgagtcaagagatcaaatcagcttaccggcgactagccaggatctgtcatcccgatgtagcgagaaatagtcgggataactcgtcggcggacgatttcatgaagatccacgcagcgtattgcacgctttcggatcccgagaaacgcgccgtttatgatcggaggactcttcttcggagtcggccgttaacggctggatacggcagttacggtggacggaattgggaaaccgatcagtgctggtagcgagttgactcgatgtgtcgagttggtccaaaaccattgaattggttgtaattagagcaaacccagagattctgggtggttgtgccacgtaggatcaacacggtttatcgtgccacgtaggatctgtcgcgttgttagcctttgtatccataattagtaagtagtctgtatttagtatttaccatctaataaagaaaataaaaatttatgtnnnnnnnnnnnnnnnnnnnnnnnnnnnnnnnnnnnnnnnnnnnnnnnnnnnnnnnnnnnnnnnnnnnnnnnnnnnnnnnnnnnnnnnnnnnn

SEQ ID NO: 89144 - DNA, 407 bp, Arabidopsis thaliana columbia
cgaactctctcctctcttaaacttatagacaagaatcaatcagtcacacgtctataccacgatttgctcacaaaatctttggcttccaccaaagattataagcagagatcattcacttactcgtatcaatagatcaaatcttcatcacaatagaagaaatggttttagagacggtttcaaagacggaaccaccaccgttgcttggacctcgtatctccttctcatctgatttatctgacggtggagatttcatctgcatcacccccgtaatgtgtaaggaagatgtcgtcaaagggtcagtgaaagtctccgactttgagttcttgtcgtcggaaaatgtgagtccacagagaatgcttaccgccgatgaactcttctccgaaggtaaattgcttcctttttggcaa

SEQ ID NO: 89145 - DNA, 558 bp, Arabidopsis thaliana columbia
gttttattccaactacattatagggaagagctggtccgcctgcaggtcccggtccggatattcccgggtcgacccacgcgtccgatcagggattcaggaagagaagcagagaaagaaatggagataacactgaacagtggcttcaagatgccgatcgtcggcttaggagtatggagaatggagaaggaagggattcgagaccttatcctcaatgccatcaagatcggctatcgccatctcgactgtgctgctgattataggaatgagaccgaagttggtgatgctcttacagaagcattcaagactggtctggttaagagggaggatctcttcattacaaccaagctatggaattcagaccatggccatgtcattgaggcctgcaaagacagtctcaagaaacttcaacttgattacctcgatctcttcctcgttcattttcccgtagcaacgaaacacaccggagtagggacaaccgatagtgctttgggcgatgacggtgtattggacatagacacgaccatctctctggaaactacatggcacgacatggaaaag

SEQ ID NO: 89146 - DNA, 843 bp, Arabidopsis thaliana columbia
tttccgttcgcagtaccggaccggaattcccgggtcgacccacgcgtccgataagacgcctctggtgttatccccaatgtcgtcactccacgctaccgtgagcctcccactgttctccaactcaaaccacaaaaagctaacgtgcgcagctacattatcacctccgccatggaaacagagccggcgagttatctccgtctccttttttctctcccgtctcctcctcctccctaacgatgctatggctggtggcttaatggataaattggataaatacgtcaagaggaagaaacttgatccacttgaagcatatgtaccaccagtgattctagctcagttacaaatccaggatcttgagggatttttgaatgtggagaaacctgaatttgaggcgtgtagacgccaattgcggtctggtcctgctagctctcttcgtgtaaacattcgagctgttgctcagtatgcttcagatgatggtttctccaaaaccgccactgatgatgttgatcgatgtttaagagcattggaagaactggattcggtgtttctacgtgcgtcgaggaaagattcaaatgcaactgttggattgatgaagtcacagcttggaacagcgttaaccgcactggacagtcttctacaaacagatccttctcaagtgcttgataaagggaaagctatggtggaaggctacagatcaagcatttgaagaagatgccggaagggatgatttagaatcctttgagataaaggaggcttcaggcccatacttgtgagagggggaggccacaggactattacctttcaaaaaacagtggttaatcttacagcattgggattcaaaaa

SEQ ID NO: 89147 - DNA, 841 bp, Arabidopsis thaliana columbia
  unsure (1)..(841): unsure at all n locations
agggaagcctgcgtttgctcctaaaaaagctaacgctagtgtagttatgtttgttggattacaaggtgctggaaagacgacaacttgtactaagtatgcttattatcatcagaagaaaggatacaaaccagctttggtttgtgcggatactttcagggctggtgcgttcgatcagctgaaacagaatgctaccaaggctaagatccccttttatggaagctacacagaatccgatcctgtgaaaattgctgttgagggagttgataggttcaagaaagaaaagtgtgatcttattattgttgacaccagtggtcgccataaacaagcagcttctctctttgaagaaatgcgtcaagttgctgaagcaacggaaccagatcttgttatatttgttatggatagcagtattggtcaagctgcatttgaacaagctgaagcttttaaggaaactgtatctgttggagctgtaattattactaagatggacggccatgccaagggtggtggtgctcttagcgctgttgcagctacaaaaagtcctgtgatattcatcggaacaggagagcatatggatgagtttgaagtgtttgacgtcaaaccatttgtcagccgtctcttaggaatgggtgattggtctggattcgtggataagctacaagaggtagtacctaaagntcaancagcctgaaccttctggaaaaagctctctcagggtaactttacggttngaattatgtccggccagttccagacantctgancatnggnccncttaaggnnggtttcnaantccncctggantaggnntnaaanntccgaagccattggantanacctgggg

SEQ ID NO: 89148 - DNA, 1010 bp, Arabidopsis thaliana columbia
  unsure (1)..(1010): unsure at all n locations
gctctcatacgactcactattnggaaagctggcacgcctgcaggtaccggtccggaattcccgggtcgacccacgcgtgcgcggacgcgtgggcggacgcgtgggcttccatcaacttgacccacaccgaaagaaaaagagaagaagagagactttttttcttgggcattcccaagttttcttttttcttcctcttaacactttttttgtgggtatttccctaaaaagaaaactttatttttgttcttagtaaatctgcttttaaattttataaaaatgggaaactgtttgatgggaggaaacaacgttgagaaaatggttaaagaagaagaagtaatgaagaaagaatacaagagaaaagatcgtaaagtaaagatagttttgagaagagatgagttagagaaactcattctttttcagctaaatgccaatggtaacgtcgacggcaagggagaaacaactttggcttcttttggtgactttctaagggagttagaggcggagagatctgcgggagaagcggctgcaaaggcggctgaggaagaggaggagtctcgtcggagatgtcgtaagtggaggccctcgttggaaagaatcactgaatggcctgaagaaacactttcgtaatctttttctttaatcctttctttttcgttttagagatcttgaagtcttttatttttcttatgaaaatgggattttttgtgggggagtttgcccttttgctgatttttttccctttttttaccgagggatattttttcatctgagattttatctcagtgtgtttgagatcagcaaaaggcttatttaccccagagaaaatcctcagaaaaaacgaaattatgtattcattttcgtctttcatgtaaggttcaatttgtcatcataaataaatattagtagtttagtataaaaaaaacaaaaaaggnannnnnnnnnnnnnnnnnnnnnnnnnnnnnnnnnnnnnnnnnnnnnnnnnnnnnnnnnnnnnnnnnnnngatcaatcg

SEQ ID NO: 89149 - DNA, 1283 bp, Arabidopsis thaliana columbia
agaaatatctcataaagatcaaataaacactaaacctgaaagcaaaaaaatggcagcacgagcaacattcatattctatgctctcttcctaaccacactccaattccttctaacacaccatgtgtcatccgccgcccgaggattatggaaatacatcgcccccaacgtcggaatctccgcgatgcatatgcaacttctccataacgaccgtgtcgtaatgtacgaccgaaccaacttcggaccatcaaacatctctctacctaacggtaactgccgtgacaacccccaagacgccgtctccaaaatcgactgcacagctcactcgatcgaatacgacgtcgcaacgaacaccatccgacctttaacggtacaatccaacacatggtgctcatccggttcggttcgaccggacggtgttcttgtccaaaccggtggagaccgagacggagaacttaagacaagaaccttttctccttgtaataacaatcaatgtgattgggtcgaaatgaacaacggtttaaaaaagagaagatggtacgcttccaaccatattctgcccgacggtaaacaaatcgtcatgggaggtcaaggacaattcaactacgagttctttcccaaaacgacaaaccctaacgtagtcgcgttaccgtttttggccgagactcatgatcaaggacaagagaataatctttatccttttgtgtttatgaataccgatgggaatctatttatgttcgctaataacagagcgatattactcgactatgttaagaacacggtggtgaaaacttttccggcgattcccggtggtgatccgagaaactatccgagcactggctcagccgtgttattaccgttaaagaatcttgaagcggataatgtcgagacggaggttctagtgtgtggaggtgcaccaaaaggatcatacaacctcgctagaaagaaaactttcgtgaaagcgcttgacacgtgtgcaaggatcaagattaacgatgccaaacctgaatgggcggttgagaagatgccacatgctagagttatgggagatatgattcctttgccaaacggagatgttttgctaatcaacggtggatcttttggtactgctgcatgggagcttggtcgtacaccggttttagcaccggacctataccatcccgagaatccggttggctctaggtttgaatcgctaaggccgactacaatcccgagaatgtatcactccgcggctattcttctacgtgacggtagggttttagtcggaggaagcaatcctcatgcgt

SEQ ID NO: 89150 - DNA, 752 bp, Arabidopsis thaliana columbia
  unsure (1)..(752): unsure at all n locations
annnnnnnnnnnnnnnnnnnnnnnnnnnnnnncttaaaaaaattatccgaagaagacgatagacagcaaaaagcgttgggcgagaagaagacgacgtgcttctcttctgctactcctcatcgccatcatcttctactttcttctccatctacttccaaatccctgcttcgatttccctcatcttatctgaaacctagccccagtcttctcttccatggctcatctcgctctctcctctcctgttcagacggcagcaacaaccgtcctcctccctccggtgacaccgtcccaaataacttctgtatcattgagggatcagagacagttcaagactttgtgcagatgcagcttcaggaaatccaagataacataaggagtagacgcaataagatatttctcctcatggaggaagtgaggaggttacgtgtgcagcaacgtatcaagagtgttaagccatcaatgaggacagtgagctcgaggctaccgagatgcctgagatcacatcttctattcctttcctcctaatgtgacaccaaagactttgaaccaactctattcgaccagcgttgcattgatatcggggaattatcttctttggtggtctcattggacctaatctggaactgaagtaggacttggaggaaccccttatgaagatttataatgagctaacttctacccttggcattaaaccaggaggatccattgggggcatttttttctggggggcccctgggaggtattttaacccc

SEQ ID NO: 89151 - DNA, 845 bp, Arabidopsis thaliana columbia
ctaccggtaacaaattctggagctccaccccggtggcggccgctctagaactagtggatcccccgggctgcattaatttctggccgcttccttttccctcccctaattgtgacacccaaggacttttggaaccaaactctatttcgaaccagcgttgcatttgatatcgggaattatctttctttggtggtctcattgcacctaatctggaactgaaggtaggacttggaggaacctcttatgaagattttataaggagcttacatctacccttgcaattaagccaggtagatccaattgtggcatctttttctggcggggccgtgggagtcatttcaaccttgatgctaatcgaagttaacaatgtttaaacaacaagagaagaagaggtgcaaatactgccttgggactggatacttgccatgcgctcgatgctcagctagtggtgtgtgtttgagcattgatcccatcacaagacctagagctacaaaccagcttatgcaggtcgcgaccacaaaaagatgtctaaattgttccggcgcaggaaaggtgatgtgtccgacatgtctttgcaccgggatgggtacagctagcgagcatgacccccgctttgaccccttcgattagaaaaacagtggcctcctttgaaattggtccttgcaaaagctaagccaagcctatgagaactgaggagagccaaacctcgtcatataaatgttttacataataaaagtaattacataataaaagtaacattaaaatttttaacttttgtctatagtaaacatggggcggccgcgaattcgatatcaagcttatcgatacacgtcgacatcggggggggt

SEQ ID NO: 89152 - DNA, 629 bp, Arabidopsis thaliana columbia
aacaaagcagatttgcttcttctcgattctttgcaatttgcatgcattgctcatcaaaaaaattcctttctgggttttgttggaaaatagctgtataacttcaaatgttgaaactttgcttttcttcttcttctcttttggtcaaattttgtgttctctctagagcaaaaccctaattctctcaattctactcaaaattaatatctcttgcttccttgagaaagataaagatttgtgtttactaaggttgaggaaatgataatagcaaagcaatatcgttgcattcactcggcgacttgtcattgcacgaaaggacatcttagcgaagaagtattgtttcttatggttcagcatctaaactggaaccctaatgtgattgccactctatcttgtgtttgtaaatggtttgatgatctcgctaagcggttattgtggaaagaattctgtagagctagagcgcctaagatgatgagtgaccttcaatctagtggtagccatagtgttgatgggagttggagagcactagggaaacttttgatttactgctctggttcaagcaaaggtggactctttaatgatgttcaaatctctggtcattttgttcacagaacccgcttctctagaacatc

SEQ ID NO: 89153 - DNA, 510 bp, Arabidopsis thaliana columbia
  unsure (1)..(510): unsure at all n locations
tacgactcatttagggagagctggggcgcctgcaggtaccgggccggaattcccgggtcgacccaccggtncgggggacatgaagcagaggcagcaatgctagtgaggaagcagaaaacatatgctcttttagatgctgatgatgatgaagacgaagttgttgtggagaaaaaatcttcagtttctgaatctagaaaatcagataagggcaagaaaaggtttagaaagaaaagtgggcagtcagatgaaagtgatggcgaggtggccgttagagaggatagtagacacgttagaagaaaggtttctgaagaggatgatggttctgagtcagaagaggaaagagtgcgtgaccaaaaggagagagaagaactggagcagcatttaaaagatcgtgatactgcacggacacgaaagctaacagagcaaacgttgtcaaagaaagagaaagaagaggctgttcgaagagcaaatgctttggagaaggatgatttatattccttaaggaaagtg

SEQ ID NO: 89154 - DNA, 518 bp, Arabidopsis thaliana columbia
tacgactcactatagggaaggctgctccgcctgcaggtaccggtccggaattcccgggtcgacccacgcgtccgttcatccacattactcaaagatctctattggtacttctcaaattaaatggatcacaaaatcctactaacacctcccaaatctttatacaccaaatgtatcataaccatcatttacgtagtatcaatctctcatctaaatgcccatttcataacttcatgcaaacaaaccccataccctagcgtctgcgaccaccacatgtctaattcacctctcaaacctttagacgaccaaacggatgggttcactttccacgaccttgtggtcagctccaccatggaccaggccgtacaactacaccgccttgtgtcttccgtgaaacagcatcattctctccacaaacacgcaacatcagctttgtttgactgcttggagctctacgaagacactatagaccaactcaaccactctcggagatcgtacggtcaatattcttcgccacatga

SEQ ID NO: 89155 - DNA, 383 bp, Arabidopsis thaliana columbia
ctcgaatgaggggtctaggggctcggctcttaaaactcttatcgccgctaaaactctctacccatcgcagagcctctctaaaggttatcttcatgatctcactcaatacatatgtttcgttactatatgtttttgcttctgattgtcgttattctgtaatcgtttagagtcgtttatggtttcccccattttgtctgtaatgtccatgctctgtttctttacagtttcctctccggcttgttagatatcagtttagttcctgatttactgagaaaccaagcttctgagcttaagtatgttcgggttctgacgttgattgagaaatattataaactggttttcaagtttatttctttctggaatttcttttgtagtctgattat

SEQ ID NO: 89156 - DNA, 470 bp, Arabidopsis thaliana columbia
  unsure (1)..(470): unsure at all n locations
nnnnnnnnnnnnnnnnnnnnnnnnnnnnnnnnnnnnnnnnnnnnnnnnnnnnnnnnnnnnnnnnnccacgcggttcgggatcacacgagagaaaaaccaatggcttgtattcacatcgaatcatcacatccacctgcatggaagacacactctgtccaagagaacaaaccagcaaatgctgatgatatatcgaacacaaccttaccagaacaccacgacggtggcgacgggggaatccaagaaacgtgggccgcgattggagattctggcggcagaggaggaggctatttcgccggagagagtaggaagaagctggagaagaagaagagccaagtgttgcttgagggatacgcgttggatgatcaagatgatttgacgagagccaagagtttgacggatgatgatcttgaggagcttaaaggttgtttagatctagggtttggttttagttacgatgagatccctgagct

SEQ ID NO: 89157 - DNA, 578 bp, Arabidopsis thaliana columbia
  unsure (1)..(578): unsure at all n locations
catacgactcatttagggaaagctggtacgcctgcaggtaccggtccggaattcccgggtcgacccacggcgtncgcgtttccaggaatggttgcatagttaatatgactgctgatgggaagtccctcacaaacacggaaaaatatgttggaaaatttcttgatttactccctgaaaatccgtctggtgaactcgtcacttgggatgctcgacttcctttgagaaatgaagctatagtaataccaacccaggtgaactatgtgggaaaagcgggaaatatatacagcagtggctacaaacttgatgggagttcatatgttatatcaaagcatattagtaacacatggttatgggatcgtgttcgtgtaagtggtggtgcatatggaggttcctgtgattttgattcacattcgggagtattttcgttcttatcttaccgtgatcccaacctattaaagactctagacatatatgatggaactggggatttcttacgtggcctcgatgtcgatgaagacacccttaccaaagcaattattgtgacaattggcgatgtcgattcataccaactccctgat

SEQ ID NO: 89158 - DNA, 554 bp, Arabidopsis thaliana columbia
  unsure (1)..(554): unsure at all n locations
nnnnnnnnnnnnnnnnnnnnnnnnnnnnnnnnnnnnnnnnnnnnnnnnnnnnnnnnnnnnnnnnnnnnnnnnnnnnnnnnnnccacgcgtgcgcgcgcgtccaaagattcttccttttccgattccgatgaaaaggaattttgggttttaggaaagttcgattggttggtttggaaacatctccctaacacacgcagcaaacaccttcgttgtttacggagacagtcactttttgtatatatggattcgaatcaatcgatgcggctcctcagtgcttggattggtcaaattggtgatcttggtcttaatttgctatggcgttttatacacattgttgtgagcttatggtacattgtctctggcatatttgaggcaatagaaagctatgccataacgttaggattgaataaaaagtacggttccatcgatcttgagaaactccggtgtctagctgttgtagtggacatcgaagcagctcaagatgttgccaatgttgttgagcttttgcaatggctaaccaccattggggttaaacaagttggtctatttgactc

SEQ ID NO: 89159 - DNA, 468 bp, Arabidopsis thaliana columbia
agtagcgaaaaaaagaaatctaattctctcgagaaaatgtctggtcgtggaaagggaggaaaaggcttgggtaaaggaggagccaagcgtcacaggaaggttctgagagacaacatccaaggaatcaccaagcctgccattcgaagattggctcgtagaggtggagtcaagcgtattagtggtctcatctacgaggagacacgtggcgtcctcaagatctttctcgagaacgtaattcgtgatgctgtcacttacaccgagcacgctaggaggaagactgtgaccgccatggatgttgtctacgctctcaagaggcaaggaaggactctctacggattcggcggttaatcagggtttttcaagatttgtggtttggagatctgtttcttggaaattagatttttggaaattttaaatgtacggtttttttatttaatgttaaccatgtattttattttcctatttttt

SEQ ID NO: 89160 - DNA, 528 bp, Arabidopsis thaliana columbia
  unsure (1)..(528): unsure at all n locations
atcaattaaatcttcaaatcgaaaagtttccgatagatttattcaggttcctttagaaaatgtcaggtcgtggaaagggaggcaaaggtttgggcaaaggtggagccaaacgtcatacgaaggttctgagagacaacatccaaggaatcactaaaccggcgattcggagattggctcgtagaggtggagctcaacgtattagtggtttgatctacgacgagacacgtggcgttctcaagatctttttggagaatgttatccgtgacgccgttacttacactgagcacgctcggaggaagacggtgactgctatggatgttgtttatgctcttaagagacaaggaagaactctctacggattcggcggctgggggttttttaattgtngntttttggtggtttctacggttaattaagggatggtaaattttccagaattttggtgnttaaacttccggaaaaaatttaaanggcatttgaagggtttgtttttgcaattncgtgannnntttnaagggcntttnttnc

SEQ ID NO: 89161 - DNA, 748 bp, Arabidopsis thaliana columbia
  unsure (1)..(748): unsure at all n locations
nnnnnnnnnnnnnnnnnnnnnnnnnnnnnnnnnnnnnnnnnnnnnnnnnnnnnnnnnnnnnnnnnnnnnnnnnnnnnnnnnnnggccggcccacgcgtccccgttcttcttcttctacagacatcaatttctctcgagataaactaaatcttcgctgaaaaaatgtcgggtcgtggaaagggaggaaaaggtttgggtaagggaggagccaagcgtcacaggaaggttctgagagacaacatccaaggaatcaccaagcctgcgattcgaagattggctcgtagaggtggagtcaagcgtatcagtggtctcatctacgaggagactcgtggcgtcctcaagatctttctcgagaacgtgattcgtgatgctgtcacttacaccgagcacgctaggaggaagactgtgaccgccatggatgttgtctacgctctcaagaggcaaggaaggactctttacggattcggtggttaattagagtttttcagatccgcgtttgtgttttctgggtttctcacttaagcgtctgcgttttacttttgtattgggtttggcgtttagtagtttgcggtagcgttcttgttatgtgtaattacgctttttcttcttgcttcagcagtttcggttgaaatataaatcgaatcaagtttcactttaaaaaaaaaaaaaaaaaagnnnnnnnnnnnnnnnnnnnnnnnnnnnnnnnnnnnnnnnnnnnnnnnnnnnnnnnnnnnnnnnnnnnnnnnga

SEQ ID NO: 89162 - DNA, 732 bp, Arabidopsis thaliana columbia
  unsure (1)..(732): unsure at all n locations
atgnnnnnnnnnnnnnnnnnnnnnnnnnnnnnnnnnnnnnnnnnnnnnnnnnnnnnnnnnnnnnnnnnnnnnnnnnnnnnnnccacgcgtccgcggacgcgtgggctcaattttcatttcaatcaatcaaaaccattcggcaaaatcaaataatctttttcttagttcgaatttaatttcccaagagaaaaatgtcaggccgaggaaagggaggaaaaggattaggaaagggaggagccaagagacatcggaaagtactcagagacaacatccaagggattaccaaacctgcgattcgtcgtctcgcgagaagaggaggcgtgaagcgtatcagtggtttgatctatgaagagactcgcggcgttctcaagatctttctcgagaacgtgattcgtgacgccgttacttacacggagcacgctcgccggaaaactgttacggcgatggacgtcgtttacgctctcaagagacaaggacgaactttgtatggattcggcggctaaatcgttcggattgcaatttcggattttgtaaactcttcaatttcagcatctagggatttcagatttgtaatttctcagttaaacgatgaatggattggatnaaannnnnnnnnnnnnnnnnnnnnnnnnnnnnnnnnnnnnnnnnnnnnnnnnnnnnnnnnnnnnnnnnnnnnnnnnnnnnnnnnnnnnnnnnnnnnnnnnnnnnnnnnnnnnnnnnnnnnnnnnnnnn

SEQ ID NO: 89163 - DNA, 473 bp, Arabidopsis thaliana columbia
gaaagtttcttgttacaaaaatgagagctattcaaactcatgtgataaccttctgcatgttagtcatcatcgtaacatcatcaacaagagcccaaaagagtcctcatgtgcctaacaaccatgaactttctatcgccatcgaagaaatggagaaagcaaattacttctcttttgtgatgctcatcaacatgttaccatccgtaaatcctcgattcttagccaatgtcacattcttgatgccaaaggacaaaaccctttctacatcaaacattattaatcaacaagattcggttaccgagttcttgcttcgccactcaatcccttcttctcttcttttcgagcaccttaatctcatccccaatggctccattgttccttcctctttaccacattacaccctcgagatctccaatggtggaagatcaaactactttctcaataacgtcaagattataagccgcaacatatgtagc

SEQ ID NO: 89164 - DNA, 1814 bp, Arabidopsis thaliana columbia
  unsure (1)..(1814): unsure at all n locations
acgactcactatttggaaagctggtccgcctgcaggtaccggtccggaattcccgggtcgacccacgcgtgcgcaaaaacaaaagaagaagagaataaacaaaagaagaaaaaaaactaataaaacaaaatcaataaaaagagaataaaaaatggtgggttctcacaaagcaagcggagtgcttcttgtgctactagtggttatggccaccacaatagcaaacgggacaccggttgtcgataaagcaaaaaatgcagctacagcagttgaagatacagcaaaaaatgcagctacagcagttggcggtgcagctgcatcagttggtgctaaagtatcaggtgccaaaccaggcgcagcacttgatgttaaagcatcaggagccaaaggagacggcaaaactgatgatagtgcggcatttgcggctgcatggaaagaagcttgtgcagcagggagcacgattacagtgccaaaaggtgagtatttggtagagagcctagagttcaaaggtccatgcaaaggtccagtcactttggaattgaatggcaattttaaggctccggctacggtcaagaccactaagcctcatgccggatggattgatttcgaaaatctcgctgatttcactttgaatggaaacaaagctatttttgacggtcaagggtccctcgcttggaaggccaatgactgcgccaaaaccggcaaatgcaactctctccctatcaacatccgattcactggtctaacaaactcaaagattaacagtattacatcaacaaacagcaagcttttccacatgaacatccttaactgcaagaacataactcttacggatatcggtattgatgcacctccggagagtctcaacaccgatggtatccacatcggaaggtccaatggagtcaacttaattggggcaaagattaaaaccggagatgactgcgtttccattggagatggtaccgaaaatctcattgttgagaacgtagaatgtggaccaggacacggaatttccattggaagtcttggaagataccctaatgaacaaccagtaaaaggagtcaccgtgaggaaatgcctcatcaagaacactgacaatggtgttcgcatcaagacatggccaggatctccccccggtatcgcctccaacattcttttcgaagatatcacaatggacaatgttagccttcccgttctcatcgaccaagagtactgtccttatggccactgcaaagctggggtaccatcgaaagtgaagttgtcagacgtgactatcaagaacattaagggaacatcagcaacaaaggtagcagtgaagctaatgtgcagcaaaggcgttccttgcaccaatattgctctctctgacatcaacttggtccacaacggcaaagagggaccagctgtctcagcatgttctaacatcaagcctattctcagcggaaagttggttccagcggcttgcactgaagtcgctaaaccgggtccttaaattaaagtcgcttgtccaccataaatccatccaatctggtgaagacgctttgattagggtgcgatgaaaaaattttgcaatatttttttgacatataaattatatggatattttatagataagacggagtccattcaggattggagtttataacctgaagagtgactcgtgaattgggtagtaattgttgtgtggattcgcatttatgcgagaatgttttaataattattcgaaaagtaataatatcattgaaattttgaagtttttatttaaagcaatacacgnnnnnnnnnnnnnnnnnnnnnnnnnnnnnnnnnnnnnnnnnnnn

SEQ ID NO: 89165 - DNA, 833 bp, Arabidopsis thaliana columbia
  unsure (1)..(833): unsure at all n locations
gggccacgcnncccgtccgctcttcttcttctatttttgctgtgtgacgaacgagaagactcttttttgaattttgattcttcttcttctccgtttctttcgctacttcctcagcttcgtcaccgtcgaaaattcttcacgttttcctcggaattttccaattgtcttctccaattctcttgcgatcgttgaagatctgaaaaattcgaagcgtttgatcatggcttcgtacactcccaagaacattctcatcaccggagctgctggtttcattgcgtctcatgtcgccaacagactcatacgaagctatcctgattacaaaatcgttgtgcttgacaagcttgattactgttcaaatctcaagaatctcaatccttctaagcactctccgaacttcaagtttgtcaaaggtgatatcgctagtgctgacttggtgaatcatcttctcatcactgaaggtattgacaccatcatgcatttcgctgctcagactcacgtcgacaattccttcggtaacagtttcgagtttactaagaataatatctatggaactcatgtccttcttgaggcttgtaaagttactggtcagattaggaggtttattcatgttagtactgatgaagtttatggtgaaactgatgaggatgctcttgttggtaaccatgaggcttctcagctgcttccgacgaatccttactctgccacgaaagctggtgctgagatgcttgttatggcttatggtagatcttatggtttgcctgttattaccactcgtgggaataacgtctatggaccgaatcagtttcctgagaagttgattcctaagttcattt

SEQ ID NO: 89166 - DNA, 484 bp, Arabidopsis thaliana columbia
aatatcagtgttttattaattgattggtgtggcgaaacaaatccgtcgttttgctccgttgatcggcaggtgatcaccagaagcctcgtcaccgtctctttctctcccccctttttcatgacgccgccgagaccaccgtctgggcgagtaaggtcgctgcgtgattattcttcggaatcagaaaagatggatggtaccggtagttgggacacgcttgaatggaccaaactcgattcaacttcagggtcaggttctttctcgaatttgagttgcttgctggaatcggagagggtcatcgtcgagggttatggagttgtgcttattaacaccgatgaggcaggaacccttttggtgactaatttccgtattctttttttgagtgaaggaaccagaaaagtcattccacttggtacaattccattggcaactattgagaagtttaacaaaatggttctgaaagttcaatcaagtccccgtcagtctg

SEQ ID NO: 89167 - DNA, 506 bp, Arabidopsis thaliana columbia
  unsure (1)..(506): unsure at all n locations
attggngcaaacccagccttcaagtatgaaacntccgccacggttgtccagtccaagttccaagatgtccccaatggtgaatatgtagatgaagaaatggaggagcagttttatgatgccacggactcatcatctggagaagaggatgaggaggaaagcgatgacgatgatgaaaatcaggacaataaggagataaaagttaaactgaagaatgtttcatgggcaatcgctagcttatctttgaagcgacctaaagctccaggcgcaagtaatgtattagacgctagtgttgatcctgtgagtatcgatccaagtcagttccaaggatctctgcgcaaaggaaatggtgataaggactcaaattgctggaattctcctagtggcatggggtttatgatcaggggaaagacctacctaaaagataatgcaaaggtgatgggtgggcagccccttctaacacttatttccagtggattggttcaaagttgatagtgctgtagacaaca

SEQ ID NO: 89168 - DNA, 507 bp, Arabidopsis thaliana columbia
  unsure (1)..(507): unsure at all n locations
nnnnnnnnnnnnnnnnnnnnnnnnnnnnnnnnnnnnnnnnnnnnnnnnnnnnnnnnnnnnnnnnnnnnnnnnncccacgcgtccggcgatcaaacaactaaattaaaaaaaaatcttgagagattcttggaacacaagaaaaacatgaaacctagaatgtgtttaatcttgtttattgctttaatgagagtaatgtcgattgtttctgctcagtcgagttgcacaaatgttctaatcagcatggcgccgtgtctcagcttcatcactcaaaacacttctctcccgtctcaacaatgttgtaaccagttggctcatgttgtccggtattcttctgagtgtttgtgtcaggttctcgatggtggaggttctcagcttgggatcaatgttaatgagacacaagctcttgctttgcctaaagcttgtcatgttgaaactcctcctgctagtcgctgccatagtggttcttcggttaattcacattcagaacatggaaatggatcaaaaaca

SEQ ID NO: 89169 - DNA, 472 bp, Arabidopsis thaliana columbia
cttagaagtttccccatgaaatccgagaagattcaaatgtaaattcagcctccgattcatatattttgctcaccggaaacttcagatcgagctactgcaatttgcggatcgtgtttttttttttctttcaattcacggtgtatttatctcgggagaagaagaatggatactttcacggcggaggatctgtcgacgatcggcggaatagcgacagtatcgctccttcactcgtttattccgacgcattggctacctttctccatcgtcggacgtgcgcagaaatggacgctttcgagaacactcctcgtcactgcatttggagcagtcctacatgttatatccacttctctccttggtataacagcaatcacaatggcgaataccatcgctggtgaagagactgttcacaaacttgcttcccttttgcttgtatttctcggtggaagctatgttttgctgtttttgcttggta

SEQ ID NO: 89170 - DNA, 518 bp, Arabidopsis thaliana columbia
  unsure (1)..(518): unsure at all n locations
gannnnnnnnnnnnnnnnnnnnnnnnnnnnnnnnnnnnnnnnnnnnnnnnnnnnnnnnnnnnnnnnnnnnnnncgtctcgcccacgcggtgcgcccacgcgtccgcggacgcgtgggtgtcggtgtgttcttcgtcttcttcttctcagaaaacatggattgttaacgggatcttggccggaacagcgattgcagccgcaatcggcgcacgtgcttatctgggtcgatccaagaaattccggagccgggtcgtcggaatcattcccgcacgttacgcttcctctcgattcgagggtaagcctctcgtgcaaatcctcggcaaacccatgatccagagaacttgggagaggtcgaagttagctactacgcttgatcatattgttgtagccactgatgatgaaagaatcgcggagtgttgtcgtggatttggtgccgatgttatcatgacttcagagtcttgcagaaatggcactgagaggtgcaacgaagcgctagaaaagctggagaagaagtatgat

SEQ ID NO: 89171 - DNA, 515 bp, Arabidopsis thaliana columbia
  unsure (1)..(515): unsure at all n locations
ggtcccatacgactcactttagggaaagctgctacgcctgcaggtaccggtccggaattcccgggtcgacccacgcgtncgcggtaatcaaaattctccggcgagaaatttccattgagattttactctctctctctctctcttcttcactctctaccaaaggctctcgtctcagatatgaagatttctcaagctccgatctctgttttcggactcttcttgctctccactggggggcctcaccatctctcactgggagctccgattacatgctctggtataggtccaatgaaacacagaaacgagatgctatcaatttcggattttggagctggcggtgacggcaagaccttgaacaccaaagcattcaattcagctattgatcggatacgaaactcccataacagtgacgaaggaactcttctttatgtgcctcggggggggtatttgactcaaagcttcaatcttccgagtcacatgactttatacctcggcgggggggctgtttttaaggc

SEQ ID NO: 89172 - DNA, 528 bp, Arabidopsis thaliana columbia
  unsure (1)..(528): unsure at all n locations
gatacttcnnnnnnnnnnnnnnnnnnnnnnnnnnnnnnnnnnnnnnnnnnnnnnnnnnnnnnnnnnnnnnnnnnnnnnnccacgcgtgcgtgagaagagatctctcgttcgtttttttcccggtaaatccggcgagaaaaagttcacattgaatctacgagaaaatttccttccatttcactccacgagttttcacctctcttgttcaatctctcaacgtctctccctcgtttctcgttttcgctttttccccttttcctcttctattttaccggaatccgagaatttttgatcagatctagtttcagaaataggttagttccaacaatgttgacggaacgaggaaggcgaatttctggtttcaatgggagtttcgaatttagcaatagaaaattccgtggttatggattcgtagatcgatctcaaggtttccatgaaaggagtccttcaagatcatgttctgtttcgaaaatccttcgtatcacgccaccaacctcgtctccaccgtcttcggcttctacatgcgct

SEQ ID NO: 89173 - DNA, 493 bp, Arabidopsis thaliana columbia
gcctgcaggtccggtccggaattcccgggttgacccacgcgtccgacccgcgtccgaagagatctctcgttcgtttggttcccggtaaggccggcgagaaaaagttcacattgaatctaccagaaaatttccttccatttcactccacgagttttcacctctcttgtgtaatctctcaacggcgggctgcctcatgtctggggggggctgaggccccttggcctctgctattttaccggaatccgagaatttttgatcagatgtagttccacaaataggttagttccaacagtgttgacggaacgaggacggccaatttctggtttaaatgggagtttggaatttagcatagaaattccgggttatggattcgtgaatcgacctaaggtttccatgaaaggaggcccttaagatcatgttctggtctcggaatcctgtgtttaccgcccccaacctgggcttaccgtgcttgggtagtacattggctggtttg

SEQ ID NO: 89174 - DNA, 506 bp, Arabidopsis thaliana columbia
ggggagcacgtacgcctgcaggtaccggtccggaattcccgggttacccacgggtcgggcaggcgtacaaacacgcgtccgcgagatcatctagaagatgatgttcacatgtcatttggaagtatgttgttacgaggcctttgttctggtgaagctgatggtgatcttgagacatgttgcagagctgcaagcattctttctcatgttggcgggggcgatcttcggcgcaaggaaaaggctttgaaaatcgtacttgaatcaccgatgccgtccatgggaactccagagcctctctttcagaggattgtcagatacctggctgttgcttcttccatgaaaagcaaagagaaatcaagcgcactgggggaaatcatatattcaacagatcattttaaaactgctggtgacatggactgttgattggcccactgcagttcagtgctttttagattcccgccaccacctaacgtttttgctcgagctggtaacagacccagctgcaacag

SEQ ID NO: 89175 - DNA, 524 bp, Arabidopsis thaliana columbia
  unsure (1)..(524): unsure at all n locations
tacgnaggtcgnacggtcatcgcatcaagtcttgnatcatcgtaattacgncggccgcttagtaacaaaagtttcttctttcttctctcccgagaggcctctcgctgttcattgaagttctcttagaattttctatcaccttgtatggttgtgtaatttgcaaaacagacaacaatggttgagcgtgggaagaggactcacaatcgtttcagagacaacaacaatgacaacaaccggaatcaaaggagaagactttcttacgaatccgaagaaaaaaagatcgataacaaagacgatctcgttgttgtttacagaatcttatgcccaagtggtgtcatgggaagtgttataggcaaaagtggcaaagttattaacttgattaggcaagaaactagagctaggtcaaagttgttgatccttttccaggttgtagcgaaagngtcattacggtcttttnctcggtttcggngangaaagcaattttggncattgggtntagtgattgggttnccctgtccctntga

SEQ ID NO: 89176 - DNA, 813 bp, Arabidopsis thaliana columbia
gcaaatatgatggatcaacggctgagaagaaaaagatcttagaaaaactccgtgttcgtggtgccgtagctataaacttaagaccagcaacaaagatagaggatttggctgatatgatggcgaagggttcaaagtgtagatggggaaacttcataggaacggttatatttccgttgtgggtgaaatcagagaaagatccgttggagtacattcgacgagccaaagctacgatggataggaaaaaaatatctctggaagctttttttttctatggaattattaaattcaccttgaaattttttggaggaaaggcagtagaagcttttggaaagaggatattttggtcacacatcattggcattttcaaatgtgaaaggtcccccatgaagaaataagtttttttctccatccgatttcatatatcccaggaaggccattagttggagcccaagctctcaatacccttttataaactacgtagccaagattgtcatcaatctagctgttgcccaccaccgattcaagatcctaatcgactatgtgatgatatggtggaagcacttgagatcatcaaatctccactactaggggaaatatttccgaaaaggcccccccccaacacatcacatgatgtttgatcagggttatgtaatatatacctatatgaagttttgtattcgcaatgaatttttttatggagtatatacccaaaatattggttaagtgtaagtttgtttgttaaaaaaaaaaaaaacacccgcgcccccgctctagaggatccaagcttacgtacgcgtgcatgcgacgtcatag

SEQ ID NO: 89177 - DNA, 434 bp, Arabidopsis thaliana columbia
acccacgcgtccgtgcgattctgctactctggagaaaggaagacgaatgattagttaaagaagaagaagaggagtcttgcgatagaagaagatttttgcgatatcttcatagaaggaagatggtcttatctcaaggctctgcatctctctccttttctcatccataggtcatgcgtccatgagcaattggcataatacgtaattgtcagatggtatactacaactgtggacaagagtgtatgtttttcagtgtggcagtgttggaaaaagaagcaatgcgaggaggcacacctcttcacttaaagagcaaaatcgatgagctgatcaagagtctcttggatttgtgcttctgtacttcttacgaggaagatttagagattgtggaaaacaatttgaaacattttgaagagaagcccacttgagagatactacca

SEQ ID NO: 89178 - DNA, 710 bp, Arabidopsis thaliana columbia
  unsure (1)..(710): unsure at all n locations
aattttntcggaaaaatccctgtttctttacttttttataagtctcaggttcaattttttcggattcaaatttttattttaaatggcagctgctatgaatttgtacacttgtagcagatcgtttcaagactctggtggtgaactcatggacgcgcttgtaccttttatcaaaagcgtttccgattctccttcttcttcttctgcagcgtctgcgtctgcgtttcttcacccctctgcgttttctctccctcctctccccggttattacccggattcaacgttcttgacccaaccgttttcatacgggtcggatcttcaacaaaccgggtcattaatcggacgcaacaacctctcttcttctcagatccaccagattcagtctcagatccatcatcctcttcctccgacgcatcacaacaacaacaactctttctcgaatctnctcagcccgaaaccgttactgatgaagcaatctggagtcgctggatctngtttcgcttacggttctggtgttccttcgaagccgacgaagctttacagaggtgtgaggcaacgtcactggggaaaatgggtggctganatccgtttgccgagaaatcggactcgtctctgggcttggnacttttnacaagggcggaggaangttgcgttnggctttgaataaggggggggnacaaagtttngggggggntttncncccggttnaaatt

SEQ ID NO: 89179 - DNA, 923 bp, Arabidopsis thaliana columbia
  unsure (1)..(923): unsure at all n locations
cnnnnnnnnnnnnnnnnnnnnnnnnnnnnnnnnnnnnnnnnnnnnnnnnnnnnnnnnnnnnnnnnnnnnnnnccacgcgttcggccacgcgttcggccacgcgtccgctcatggacgcgcttggaccttttatcaaaagcgtttcccgattctccttcttcttcttctgcagcgtctgcgtctgcgtttcttcacccctctgcggtttctctccctcctctccccggttattacccggattcaacgttcttgacccaaccgttttcatacgggtcggatcttcaacaaaccgggtcattaatcggactcaacaacctctcttcttctcagatccaccagatccagtctcagatccatcatcctcttcctccgacgcatcacaacaacaacaactctttctcgaatcttctcagccccaaagccgttactgatgaagcaatctggagtcgctggatcttgtttcgcttacggttcaggtgttccttcgaagccgacgaagctttacagaggtgtgaggcaacgtcactggggaaaatgggtggctgagatccgtttgccgagaaatcggactcgtctctggcttgggacttttgacacggcggaggaagctgcgttggcctatgataaggcggcgtacaagctgcgcggcgatttcgcccggcttaacttccctaacctacgtcataacggatctcacatcggaggcgatttcggtgaatataaacctcttcactcctcagtcgacgctaagcttgaagctatttgtaaaagcatggcggagactcagaaacaggacaaatcgacgaaatcatcgaagaaacgtgagaagaaggtttcgtcgccagatctatcggagaaagtgaaggcggaggagaattcggtttcgatcggtggatcntcaccggtgacggagtttgaagagt

SEQ ID NO: 89180 - DNA, 530 bp, Arabidopsis thaliana columbia
  unsure (1)..(530): unsure at all n locations
cttatttcaaaccttttagatccatttttttttaattttctcggaaaaatccctgtttctttacttttttataagtctcaggttcaattttttcggattcaaatttttattttaaatggcagctgctatgaatttgtacacttgtagcagatcgtttcaagactctggtggtgaactcatggacgcgcttgtaccttttatcaaaagcgtttccgattctccttcttcttcttctgcagcgtctgcgtctgcggttcttcacccctctgcggtttctctccctcctcttccccgggtattaccccggttcaacggtccttgacccaacccggttttcaaaaggggtcgggatnttnaacaaaaaccggggtcaattaaatcggggctnaaaaaaccntttttttttnttaaggncccccagnttccngntttaaggtcccataatccntttncccccggggggttaaaanaanaaaaaanttttttntgggattttttttnggccaaaaggggtnttttttnnaggaaat

SEQ ID NO: 89181 - DNA, 773 bp, Arabidopsis thaliana columbia
tccccaaaaccttctttaattaccgggattttccacatccgtagggggatttcggggtgaataataaaaccttttccactccatcatgcaaacgttaagacttttaaactattttgtaaaaggcatgaggggaaactcattaaacaggacataatcgccgaactcttctatgaaacgtaagaagaaggtttggtcgccagatctatcggataaagtcaagtcgaagaagaattcggtctcgatcggtggatctccaccggtgacggagtttgaagagtccaccgctggatcttcgccgttgtcggacttgacgttcgctgacccggaggaggccgccgcagtggaacgagacgttctcgttggagaagtatccgtcgtacgagatcgattgggattcgattctagcttaggggcaaaataggaaattcagccgcttgcaatggagtttttgtgaaattgcatgactggcccaagagtaattaattaaatatggattagtgttaaatttcgtatgttaatatttgtattatggtttgtattagtctctctgtgtcggtccagcttgcggttttttgtcaggctcgaccatgccacagttttcattttatgtaatctttttttcttttgtcttatgtaatttgtagcttcagtttcttcatctataatgcaattttattatgattatgtaaataaaacgaacgcatgggtcggccgctctataggatcccagcttacgcacgcgtgcatgcgacgtcaagctgtgtttatagtgt

SEQ ID NO: 89182 - DNA, 805 bp, Arabidopsis thaliana columbia
gggggtattatggtgttcgacatgacgagtttcagggtgtttcctttagagaagccgtatggatgatttttcaaaagggttgtaaggctcaaggtccattggtgtaaaaatgggtggcattacattccctttcaccgaaaaaatgggaattgtcttttgagatggtactctttaatagggcggaggaagttgcgttggctaataataagggcggcgtacaagttggggggccttttagcccggtttaactttcctaaacctacgtcataacggatctcacatcggaggcgatttcggtgaatataaacctcttcactcctcagtcgacgctaagcttgaagctatttgtaaaagcatggcggagactcagaaacaggacaaatcgacgaaatcatcgaagaaacgtgagaagaaggtttcgtcgccagatctatcggagaaagtgaaggcggaggagaattcggtttcgatcggtggatctccaccggtgacggagtttgaagagtccaccgctggatcttcgccgttgtcggacttgacgttcgctgacccggaggagccgccgcagtggaacgagacgttctcgttggagaagtatccgtcgtacgagatcgattgggattcgattctagcttaggggcaaaataggaaattcagccgcttgcaatggagtttttgtgaaattgcatgactggcccaagagtaattaatttaatatggattagtgttaaaaaaaaaaaaaaaaaagggcggccggtttaaaggatccaagcttacggacgcgtgcaatcgaagttagtggttg

SEQ ID NO: 89183 - DNA, 486 bp, Arabidopsis thaliana columbia
  unsure (1)..(486): unsure at all n locations
gacngcttnagggaccgggccngaattccccgggtggcccactgcgggccgccaatcagaagagaaaacgatgaccgagaactgttctactgagagctctgacgaagaataagttcgtcgcctctaatgctcctcgatctatatccatttccatcaccagtctctctagatgcattagcactctgattctagcagaacatgagagtggtacaatcaaacctcagacagtgagtacagtagttgcagctaattcattaggtgagagctcttcaatttctttgttattggctggttctggttcttctcttcaagaagctgcttctcaagctgcctcttgtcatccttctgtttccgagggtacttgttgctgattctaataaatttggagtacctctttagctgagccttgggctaaaattgggttgactttgttccggcaacaaggggggttcctcaaaaatttttngnttccccnnggtcatttng

SEQ ID NO: 89184 - DNA, 1113 bp, Arabidopsis thaliana columbia
  unsure (1)..(1113): unsure at all n locations
accggactttccgggtcgacccacgcgtccgttacgatttgcttagaaaggagaagacatctggagcaacaggatttacaaaagttattatctttatcgatttctcttcttcctagacccaacagacgaagagaatttgttgttggttgtctctggtctcttcgtctaggttttttttgggttattaaagatggtgaggatcgtgagaagttgtttacagtccatgttaaagctcgtgaattctctaattgggatggttgggattgctatgattctctacgctgtttggctgattaggcaatggcaagaacaaatgggaaatcttccttttgctgattctgatcaccctgttccgtggttcatttattcatttcttggtctcggggccattctctgtgttgtcacttgtgccgggcacatagcttctgaaaccgtgaatggatgttgcctttacttgtatatgggattcatagtcttgctaactatggttgaaggcggtggtagttgccgatatctttctaaaccgtgactggaaaaaggactttccagaggatccaagtggtgctttccaccagttctctaagttcatcgagtcaaacttcaagatttgcaagtggataggtctctctattgtctgtgtccagggtctatcagttttaatagccatgttgctcaaagctcttggacctcacccctcaccgaccattatgatagtgacgatgaatacaatgtaagcacagttgcactcctgcaggatgctcgtcagccgcctccatacgttgttggagaacccatgtatggagccaaaccgggagcttggacagttagattaatgaaagggcaaaccggtgagaggtgaaaacaaagaaactcgtagaaccaaatggcaaagcagagtctgctctttccatgtgtgcatttactttggcttcttattgcatctctttctttcactatttatctcttgtaaatgttgaatacatatatttgggatgttcttacatattaaagactatgtgatgtatgataaaactccaaaaaaaaaaaagttgaccnnnnnnnnnnnnnnnnnnnnnnnnnnnnnnnnnnnnnnnnnnnnnnnnnnnnnnnnnn

SEQ ID NO: 89185 - DNA, 662 bp, Arabidopsis thaliana columbia
ctatatggttgagaaggagaacacgtataatgtgatctaacaaaactcaagttattagattcaaatttatagcgtggtagaagaacaaaatcattcatgccatgtattttgtgatgttgttttctggatatatagattgaatgacataatggtaataagttgtggcaactcttacttttattttccttgtctgtccctgggagttttgggatgtttgacgtttgttggtggaaataggtgttgagaagggatcaaaagatccacagcaagataaagttggggtgataacaatagaccagctacgcacaattgcagcagagaagctacccgacctgaactgcacgaccattgaatccgctatgagaatcattgcaggaactgcagctaacatggggatagacattgcccctccgattcttgaacccaaaaagaaagcagttttattgtaaaagcctggttggtcccttctattccataatgccttattcgtttcaaaggtgtaattttccccacatgacgcttaagagagttcagatataatgatgcaacaatgtatgtgttttttttgttttaaaaaaaaaaaaaaaaaaaaaaaaaaaaaaaaaaaaaaaaagcaagggcggccgctctagaggatccaagcttacgtacgcgtgcatgcg

SEQ ID NO: 89186 - DNA, 688 bp, Arabidopsis thaliana columbia
  unsure (1)..(688): unsure at all n locations
nnnnnnnnnnnnnnnnnnnnnnnnnnnnnnnnnnnnnnnnnnnnnnnnnnnnnnnnnnnnnnnnnnnnnnnnnnnccacgcgtccgaacagataaaatcaaatttgagagatctactactaaatctaacttaaagcattgtactttcttttatctcattctcctttgctctgctttcttctggtcaacccccacgagattccttcttatgtgattgtaaagagaagatttttcagagatgggtctcttcgaatcggtgaaatcaatcgattgggaacaagaatcgttcccaacttatcaagatttagggtttttgcctctctttgcagtgttcttccctacaattcgatttctacttgacagattcgtcttcgagaaattggcaagtcttgtgatctatggaaggatgagtacgaataagagtgacaacataaaagacaggaagaaaaatagtccaaaagttcgaaaatttaaagaatcagcttggaagtgtatttactatctatcagctgagctacttgctttatctgtcacatataatggaacccttgggtttcaaaatacnctctacttttnggntttggncccggggtcannatttggcctgaccaacccaattgaggttgaagtttnagtttttnnaaanggttccgnctnggttntanncggnccccnnnatccggtggggg

SEQ ID NO: 89187 - DNA, 739 bp, Arabidopsis thaliana columbia
  unsure (1)..(739): unsure at all n locations
cctgcttgcttttatgcactggctagaaactgggactcttctcgtgcataccgaagctgaagaaaaacttgggttgaacagtttggagtttggattggagacagaagattatctcactggaatttgtttcatgtcaaacgatttgcctaggtacgtggttaatcgagtgacagcaggagactatgactgcccaagaaaggtgatgaatttcctgacagatcttcatgcagcctttcgcatgctcaatctcaggaacgatttcctgcgcaagaaattcgacagtatgaagtacgacctaagaagagtggaagaagtttactatgatgtcaagatccgaggtttgatttccggcggagatcctcctggcgtccaagcagtccaaggccaatcctaaatgtcctcggctctttttaagtttttatgtataactttgtttagctagcatgaaaacgtcaaggagtgttcttctctaaaccaaaaacggcaaggaaaatagagagactgtagtttttaggtgtagtttgcaattactgaaaacggcaagtattccttttgtgggccttgaaagcccacattttagtcacaactttactgttatccgaagtcagcagcttaatagtataacagtagatgttcatgaaaaaaaaaaaaaaaagnnnnnnnnnnnnnnnnnnnnnnnnnnnnnnnnnnnnnnnnnnnnnnnnnnnnnnnnnnnnnnnnnnnnnnnnnnnngaatccg

SEQ ID NO: 89188 - DNA, 537 bp, Arabidopsis thaliana columbia
  unsure (1)..(537): unsure at all n locations
nnnctctacgactcctatagggaacgctggtacgcctgcaggtaccggtccggaattcccgggtcggcccacgcgtccgattttatttttctttcttcttcttcaattattatgacactcccgtgttcctaatcttttctcttattcttctctttcttctcatcttacaaaatcttgcaaatcaattttaatgaagagagagcacaaccaccgtgaatcatccgccggagaaggtgggagttcatcaatgacgacggtgattaaagaagaagctgccggagttgacgagcttttggttgttttaggttacaaagttcgatcatccgacatggctgacgtggcacacaagcttgaacagttagagatggttcttggtgatggaatctcgaatctttctgatgaaactgttcattacaatccttctgatctctctggttgggtcgaaagcatgctctcggatcttgacccgacccggattcaagaaaagcctgactcagagtacgatcttagagctattcctggctctgcagtgtatcc

SEQ ID NO: 89189 - DNA, 2134 bp, Arabidopsis thaliana columbia
acccacgcatccacgaacaaaccctagaccgttaaaacccttatcaatttcgctgaaacggcaaatggaagaagtgtcgtcggagatggaagtggaggttcaaaatcgtcagctttcggattcttctccggctcaaaacgtgaagaaatttgggctcaagaactctattcagaccaacttcggctctgactacgtcttccagattgtcccaaaaatcgattggacagcaatcgcggtttccttatcaaccaacaccgtcaagctttactcgccggtgactggtcagtactacggcgaatgtaaaggccactccgataccgtcaatcagattgcgttttcctccgactcggcggcgtctcctcacgttttgcactcttgttcctccgatggtaccattagatcttgggacactcgaagtttccaacaggtttcgcgtattgatactgggaatgatcaggagattttcagcttctcctatggaggtgctgcagataatcttctggctggtggatgcaaagagcagagagagcacaaccaccgtgaatcatccgccggagaaggtgggagttcatcaatgacgacggtgattaaagaagaagctgccggagttgacgagcttttggttgttttaggttacaaagttcgatcatccgacatggctgacgtggcacacaagcttgaacagttagagatggttcttggtgatggaatctcgaatctttctgatgaaactgttcattacaatccttctgatctctctggttgggtcgaaagcatgctctcggatcttgacccgacccggattcaagaaaagcctgactcagagtacgatcttagagctattcctggctctgcagtgtatccacgtgacgagcacgtgactcgtcggagcaagaggacggaaattgaatcggagttatcctctacgcgctctgtggtggttttggattctcaagaaactggagtgcgtttagtccacgcgctattagcttgtgctgaagctgttcaacagaacaatttgaagttagccgacgcgctcgtgaagcacgtggggttactcgcgtcctctcaagctggtgctatgaggaaagtcgcgacttacttcgctgaagggcttgcgagaaggatttaccgtatttaccctcgagacgatgtcgcgtcgtcttcgttttcggacactcttcagattcatttctatgagtcttgtccgtatctcaagtttgcgcattttacggcgaatcaagcgatacttgaggtttttgctacggcggagaaggttcatgttattgatttaggacttaaccatggtttacaatggccggctttgattcaagctcttgctttacgtcctaatggtccaccggattttcggttaaccgggatcggttattcgttaaccgatattcaagaagttggttggaaacttggtcagcttgcgagtactattggtgtcaatttcgaattcaagagcattgctttaaacaatttgtctgatcttaaaccggaaatgctagacattagacccggtttagaatcagtggcggttaactcggtcttcgagcttcatcgcctcttagctcatcccggttccatcgataagtttttatcgacaatcaaatcaatccgaccggatataatgactgtggtcgagcaagaagcaaaccataacggtaccgtatttctcgatcggttcacggaatcgctacattactattcgagcttattcgactcgctcgagggcccgccaagccaagaccgagtgatgtcggagttattcctaggacggcagatactaaaccttgtggcatgcgaaggagaagaccgggtagagaggcatgagactttaaatcagtggagaaaccggttcggtttaggaggatttaaaccggttagtatcggttcgaacgcgtataagcaagcaagcatgttgttggcactttatgccggggctgatgggtataatgtggaagagaatgaaggttgtttgttgcttggatggcaaacgcgaccgcttattgcaacatctgcgtggcgaatcaatcgtgtggaataaaaaaaaaaaaggacggccgctctagaggatccaagcttacgtacgcgtgcatgcgacgtcaagctcttctataggttcacc

SEQ ID NO: 89190 - DNA, 428 bp, Arabidopsis thaliana columbia
gaccgccgcatcatggtggaggaggaggaggaggtgggaaatcaccgccggttgttagacctccttccgtagtggtgaggccaccgccaatcataagacctcctccggtcgtctatccaccaccaattgtgaggccaccgccaatcacaagacctcccatcataatccctccaattcaaccaccgccggttacaactcctccgggactcctccctccgatcacaactcctccgggactcctccctccagtcacaactcctccgggacttctccctccagtcacaactcctccaggacttctccctccaatcattaacccacctccggtcacagtcccaccaccatcgtccggctatccaccatatggtccacctttcggtggaggaggaggaggctgtttcaaacaatcaacgtgtccgatcaatgca

SEQ ID NO: 89191 - DNA, 555 bp, Arabidopsis thaliana columbia
aacaacacacccagatatgcatgcgctaacgaacactcttattatatctactctcactcttaatcctcatggttgttgcatactgtttatgcactccagcgagaggcgacgagttcaaacgcactgccatttgagacaacagaacagtctccggcgccgtcatgctactgaatctcgaagccggacagatggaagtgtgggaccacattagctctgagctccgatgcgccggtgtaacggtgggttgcatcacccttcagcccaattccattgtcttgcccgctttctttagcccacctgcccttgcttacgttgtccaaggagaaggagttatggggacgattgcttctggttgtcctgagacttttgcagtagctgatggatcatcacggtagaggaggaggaggagacccgggtcgacgtttcgaggacatgcaccaaaagttggacaatttccgacgaggggatgtcgttgcttcggttgtcgcatttacacagaggtggatctaccagacggcatccagaacccgcattgacgacagcttctgaagaagt

SEQ ID NO: 89192 - DNA, 707 bp, Arabidopsis thaliana columbia
  unsure (1)..(707): unsure at all n locations
aagttactgccgccacggctgctgctacaaaggttaacacccatacaagagtcacgggtttcatttaagcttcaactatatatttgcatgttatttgccaaaaggatttgacaataatgcaacaagagtttcattgaaaatttcaagaaccctagttaataacgataatgggttcgagagttttggcttccttctttgttttcttaatcttcacggtcatcacattgcctcccacgatccaagcttgcactccttgtactcgtcctcatcctccggttccgaaacctccacaacacggcggtggtggaggtggtggtagcaagccgcctccacatcacggtggaaaaggtggtggtaaacccccaccccacggtggaaaaggtggaggaccgccgcatcatggtggaggaggaggaggaggagggaaatcaccgccggttgttagacctcctcccgtagtggtgaggccaccgccaatcataagacctcctccggtcgtctatccaccaccaattgtgaggccaccgccaatcacaagacctcccatcataatccctccaattcaacaccgccggttaaaattcttcnggnctctcctccggtaaaaattcttcggggtctcctcagtanaaatntcngggttttctcagtaaattttagggtttctcatataacncttggaaagcncacatgtcggttncaatttc

SEQ ID NO: 89193 - DNA, 1517 bp, Arabidopsis thaliana columbia
ctttaaataccattttccctacgagtctacgacgctctctaaacttcttatacaaaacaaaacacacccaaatatgcataagcttttgttttctcttctctccgtcgtctcactctcatttctcctcttcttccatggcgccgaggcacgccagcgagaggcgccgtttccaaacgcctgccatttcagccaaatcaacagcctcgcgcccgctcaggcgacgaagttcgaagccggtcagatggaagtatgggaccacatgagccctgagctccgatgcgccggtgtaacggtggctcgcatcacccttcagcccaattccattttcttgcccgctttctttagcccacctgcccttgcttacgttgtccaaggagaaggagttatggggacgattgcttctggttgtcctgagacttttgcagaagttgaaggatcatcaggaagaggaggaggaggagacccgggtcgacgttttgaggacatgcaccagaagttggagaatttccggcgaggggatgtgtttgcttcgcttgccggagtttcacagtggtggtacaaccgcggtgattccgatgccgtcattgtcattgttcttgatgtcaccaacagagaaaaccagcttgaccaagtccctaggatgttccaactagccgggagcagaacgcaagaagaagaacaaccattaacgtggccatcaggcaacaacgctttcagcggtttcgacccaaacataatcgcggaagcattcaaaatcaacatcgagacagctaagcaactacaaaaccagaaggacaacagaggaaacataatccgagcaaatggtcctctccatttcgtcatcccaccgcctcgtgaatggcagcaagatggcattgctaatggcatcgaagagacttattgcacggctaagattcatgagaatatcgatgatccagaacggtctgaccattttagcacacgagccggaagaatcagcactcttaacagccttaatctccctgttctacgtctagtcagacttaacgcccttagaggttatctctacagcggaggaatggtgttgccacaatggacggcaaacgcgcacacggtgctatacgtcacaggaggtcaagccaagatacaagtggtggacgacaatggtcagtcggtgttcaatgagcaagtgggacaaggccaaatcattgtgattccacaaggctttgcagtttcaaaaacggctggtgaaacgggtttcgagtggatatcattcaagacaaacgataacgcttacattaacacactgagcggccaaacatcgtacttgagagcagttccagtggatgtgatcaaagcgtcatatggagtgaacgaggaagaagccaagaggatcaagtttagtcagcaagagaccatgttgtctatgacaccaagctcttcttcttaagctctttaattgcttcctttaatgtttttttagattttccagcccctcaaataaataaagctgagactaataaccaacttttcacaaa

SEQ ID NO: 89194 - DNA, 454 bp, Arabidopsis thaliana columbia
accacgcgtccgcccacgcgtccgcggtcgcgggggatgagtttaagatggagagaacttgtgcggccagaccaaaatctccagaatgtcaaaggcccagagacagatgttgccatttttagggacgctcggatatgtgacaaaaagcttagtgataacaaggttagctacggagttttctttggaaatcaaaagcatctgccatcacgcgtcatgaagaatataatggaggtcgagaaaacccaagatagaaatgaaaagtattggttacaagaagcccatgttcccctatacttgatcaaagaatttgaagagagcttgcatagagtacaaatgccttcttcaaccaagaagccatccaagaaattatcaaagcttcagagaaagcagctgaaagcttccctcatggacatattttcatatatagcctcaaggagggacaagatggagaaat

SEQ ID NO: 89195 - DNA, 676 bp, Arabidopsis thaliana columbia
  unsure (1)..(676): unsure at all n locations
ttngctcnttccaaccttttccatcacagcgttttccaggccnagacaccctttccccgcattcttcccncngnctntgaggtcccccccnggaacttttttgccnaancggctccngaatgancttggaattgncngtccccttcnttgcttcctcccctcggtcggaacccggaccattgaagatgtggtcaccaagttaaagaaggtaagtttgcattgagcaaaggatgggtgattgagaaagtgagtgttttgggacttagaggagcaggacaagtgtctgagattccaatcaatggaagtccaatgacaaagaagattgaggttagctcgaaggagcatacctatgtgattggtttggaagatgaagaagagaacaagagtgtgatggttgaggttagaggacttgagatgcttgttggaaaggactttaacatgtcctggaaaatgggtatcaattaatttacatgtgagagtgggtaaactattgaggaggagaatgagattatttaaaaaaaaagggtaagtgttttgttcttctccatttcggattataagaaagaaaaaaagaattagaggtttggttttaaaaaaaaaaaaaaaaaaacaaagggcggccgctctagaggatccaagcttacgtacgcgtgcatgtgacgtcatagatcttcta

SEQ ID NO: 89196 - DNA, 713 bp, Arabidopsis thaliana columbia
  unsure (1)..(713): unsure at all n locations
aaanntttncccccnggctttaggtccccccggaccttttgccgagcgccccngaattacctgggaatgcctncccntccttgcttctccctcggccggaaccggccatgagattggccccagttaaccaggtnagttccnttgcccaaggatggtgattgagaaagtgatttttgggncctagaggaccgggccagtgtctgngatccaatcaatggnagtccnatgncaaagaagattgaggttagctcgaaggngcatacctatgtgattggtttggaagatgaagaagagaacaagagtgtgatggttgttgttttaggacttgagatgcttgttggaaaggattttaacatgtcctggaaaatgggtatcaattaatttacatgtgagagttggtaaactattgaggaggagaatgagattatttaaaaaaaaagggtaatgttttgttcttctccatttcggattataagaaagaaaaaaagaattagaggtttggttttagattgtgtctctgtctttttattaaaagatgctttagtctgaataaaatttgaagcagtagaagtgttacttcattggcttatttacttctttgtttttaatttttttataattaattattaagggcggcccgttctagagggttcaagcttactaacctcgtgtttgcgacgtcattactcttttatagtgttacctaaaattaa

SEQ ID NO: 89197 - DNA, 628 bp, Arabidopsis thaliana columbia
gagcttctgaaggttacgccaccgggaaactctatctagacgaagacgagcctccggaaatgaagctaggaaatggacagtccacgtacgttgacttctacgcttcggtcggaaacgggaccatgaagatgtggtcccaagttaaagaaggtaagtttgcattgagccaaggatgggtgattgagaaagtgagtggtttggggcttagaggagcaggacaagtgtctgagattcaaatcaatggaagtccaatgacaaaggaagatggaggttagctcgaaggagcatacctatgtgattggtttggaagatgaagaagagaacaagagtgtgatggttgaggttagaggacttgagatgcttgttggaaaggattttaacatgtcctggaaaatgggtatcaattaatttacatgtgagagttggtaaactattgaggaggagaatgagattatttaaaaaaaaagggtaatgttttgttcttctccatttcggattataagaaagaaaaaaagaattagaggtttggttttaaaaaaaaaaaaaaagaagggcggccgctatagaggatccaagcttacgtacgcgtgcatgcgacgtcatagtaatctatagtgcagttcaagaa

SEQ ID NO: 89198 - DNA, 675 bp, Arabidopsis thaliana columbia
  unsure (1)..(675): unsure at all n locations
tatgnnnnnnnnnnnnnnnnnnnnnnnnnnnnctactttagggaaagctcggtcgcctgcaggtaccggtccggaattccgggtcgacccacgcgtccggtggtcacaagttaaagaaggtaagtttgcattgagcaaaggatgggtgattgagaaagtgagtgttttgggacttagaggagcaggacaagtgtctgagattcaaatcaatggaagtccaatgacaaagaagattgaggttagctcgaaggagcatacctatgtgattggtttggaagatgaagaagagaacaagagtgtgatggttgaggttagaggacttgagatgcttgttggaaaggattttaacatgtcctggaaaatgggtatcaattaatttacatgtgagagttggtaaactattgaggaggagaatgagattatttaaaaaaaaagggtaatgttttgttcttctccatttcggattataagaaagaaaaaaagaattagaggtttggttttagattgtgtctctgtctttttattaaaagatgctttagtctgaataaaatttgaagcagaagaagtgttacttcaaaaaaaaaaaaaaaaaagggcggccgctctagaggatccaagcttacgtacgcgtgcatgcgacgtcaagactcttctatnngcgacctaannnnnnnn

SEQ ID NO: 89199 - DNA, 1227 bp, Arabidopsis thaliana columbia
  unsure (1)..(1227): unsure at all n locations
atgatacgcgagctctatacgacttacttagggaaacctggtacgcctgcaggtaccggtccggaatttccgggtcgacccacgcgtccggggacacagttgcagactcagctcgtaacgctcttggtatgagatacaagatccttcctttcctctacactcttaactacgaagcgcatatgactggtgcacccatcgctagaccgctcttcttctcattccctgaatacaccgaatgttacggcaacagcagacagttcttgcttggaagcagcttcatgatatctccggttctcgagcaaggcanaaccgaagtagaagcattgttcccaccaggttcttggtaccacatgttcgacatgactcaagcagtagtgtccaagaacgggaaacgtgtaactctcccagctcctttgaactttgtgaacgttcatctttaccaaaacactatcttaccaacgcaacaaggcgggttgatttccaaggacgcaagaacaacaccgtttagcctcgtcattgctttccctgcaggagcttctgaaggttaccccaccgggaaactctatctagacgaagacgagcttccggaaatgaagctaggaaatggacagtccacgtacgttgtcttctacgcttcggtcggaaacgggacaatgaagatgtggtcacaagttaaagaaggtaagtttgcattgagcaaaggatgggtgattgagaaagtgagtgttttgggacttagaggagcaggacaagtgtctgagattcaaatcaatggaagtccaatgacaaagaagattgaggttagctcgaaggagcatacctatgtgattggtttggaagatgaagaagagaacaagagtgtgatggttgaggttagaggacttgagatgcttgttggaaaggattttaacatgtcctggaaaatgggtatcaattaatttacatgtgagagttggtaaactattgaggaggagaatgagattatttaaaaaaaaagggtaatgttttgttcttctccatttcggattataagaaagaaaaaaagaattagaggtttggttttagattgtgtctctgtctttttattaaaagatgctttagtctgaataaaatttgaagcagaagaatggcggccgcgaaatacatgcagcccgggggatcccctagttttagaacggccgccaccgcggtggagctccaggttttggtccctttagttnnnnnngt

SEQ ID NO: 89200 - DNA, 940 bp, Arabidopsis thaliana columbia
  unsure (1)..(940): unsure at all n locations
caagggcttaattaatgtccaaggcaaacgtcccttccgcgtcccccggtctactttcgttggttcgggtcaatatgcggctcactggaccggagataaccaaggaacatggcagagcttgcaagtgtctatctcaactatgttgaacttcggtatatttggagttcccatggttggttcagacatttgtggattctacccacaaccaacagaagaactctgcaaccgttggatcgaagtaggcgcgttttacccgttttcaagagatcacgccaattactactcaccaagacaagagctttaccaatgggacacagttgcagactcagctcgtaacgctcttggtatgagatacaagatccttcctttcctctacactcttaactacgaagcgcatatgactggtgcacccatcgctagaccgctcttcttctcattccctgaatacaccgaatgttacggcaacagcagacagttcttgcttggaagcagcttcatgatatctccggttctcgagcaaggcaaaaccgaagtagaagcattgttcccaccaggttcttggtaccacatgttcgacatgactcaagcagtagtgtccaagaacgggaaacgtgtaactctcccagctcctttgaactttgtgaacgttcatctttaccaaaacactatcttaccaatgcaacaaggcggcgttgatttccagggccgcaaggacaacaccgtttaggctcggcattgctttncctgcangggntttttgaaggtaacggcaccgggaaacttttnttgnngnaggcgggnttccggaattaagctngggaatggcagccncggacggtgctttttnggttnggtcggaaagggcattanggtttngccaagttaaggaggaagtttntttngaaaggntgggnttanaagaggttttggcnagggggaa

SEQ ID NO: 89201 - DNA, 621 bp, Arabidopsis thaliana columbia
  unsure (1)..(621): unsure at all n locations
acgcgtccggtaggattattatttattagctgaggtaatggaatcacttcatatacaaagaggagttcgtcgtgtgctctttagaacatccaacaccgacaagcggcttatgtttaagaaagagtttgattcaagctttgctgggttcatgaccgatggggctaaatggttggttgagaatacagacatcaaacttattgggcttgattatctttcatttgctgcttttgaggaatcacctgcaacacacagggttatacttaaaggacgggatataatcccagtggaagcgctgaagctggatggtgtggaggtaggaacatactcgcttcattgcttaccgctgagattagttggagcggaaggagcaccgacaagatgcattctcatcaagtgattcagttcttcttcttcttcttctgtgtaagttgttcagtataccaaactgataatgaataatatgcttcttactttacaagatctcagaacccatgaagcagatgtgatgattcagtttgtaaaaggaagcatacctttataaacgtgtgaatgtattatgtatgacagtatatttgtaattctgaaggacatgataataaacctagactgaaacnagcgaat

SEQ ID NO: 89202 - DNA, 838 bp, Arabidopsis thaliana columbia
  unsure (1)..(838): unsure at all n locations
gaangccgggggcgttcccacgcaaattgaacccgttaaccggcgacccgaaacaatgacccggtccgtcagtttccctctcttcctcttcgccgttgtactctccctctcttcttctctcctcgccgacgatcccaaaccaatccgccgtgaggtctacgaaggaggtaagatatacgacatcagccatcgttacacgccggagattccagcttgggaatcttcggaaggattgggaaagacgttcctgcgattagccgcgagtatgaagaatggatcattcgctaacgtatcggagatgaaactatctgttcactctggaactcacgtggatgctccaggtcacttttgggataattattacgatgctggttttgatactgattcgcttgatctccaagtcctaaatggtcctgctttgttggttgatgttccgagagataagaacattactgctgaggtaatggaatcacttcatatacaaagaggagttcgtcgtgtgctctttagaacatccaacaccgacaagcggcttatgtttaagaaagagtttgattcaagctttgctgggttcatgaccgatggggctaaatggttggttgagaatacagacatcaaacttattgggcttgattatctttcatttgctgcttttgagggatcacctgcaacacacagggttatacttaaaggacgggggtataatccccagtgggaagccnctngaagcttgggattggtgttgnaggttaggnaccatacctcgggttcaattgctttncccncttgnggatttngtttgggncngangggnnccccccnccaaaggtncaatntt

SEQ ID NO: 89203 - DNA, 958 bp, Arabidopsis thaliana columbia
  unsure (1)..(958): unsure at all n locations
cgnnnnnnnnnnnnnnnnnnnnnnnnnnnnnnnnnnnnnnnnnnnnnnnnnnnnnnnnnnnnnnnnnnnnnnccacgcgtccggtttctgcagaggaatttgactgtgtatcacgtagcattcagtgctctcgctgatctgaaggatgtaaaagcaacggaagctcttcttgagatgcttaagaaagacggaaaagatactgacacttactgcatgctacaaatcatgaggtgctatctacattcgcaagactttgagaatggtctcaaactgtttcaagattacatgagcgcagacaaaatccctgccatggaactatacacgacgcttatagaaggagctatgacaggatacaccgataatggaatgaagattgctcaggacactctgatccaaatgaacgaacgcaatttcttcttagacccaagaactggaagcaatctgttactcaaagccgctggtgaaaagacgggagggtacacagttgcaaatatgatatgggatctgatgctagctcggaatattctaccaacactagctgctgttgaagcttactacaagggcttgaaagaacgcgaaataccagaggatgatccgagactgatgttagtgacgcgaacatacaataacttgcggcttagggaagggacattacctaataggcgttaaagcaaagggaccaagaggaagaaagatggtatcatggcttcttcgttttctacttctatttgcttattgggatctctgtgaaccatctgggtattttaaaaccagttcgtttagatgaataaggaaatttcacctagatgatgactggatattattctgatttgatttcaattacttaaccaaaaaaaaaaaaaaaaaaaacaaagggcggccgctctagaggatccaagcttacgtacgcgtgcatgcgacgtcaagatcttctatagtnnnnnnnnnnnnnnnnnnn

SEQ ID NO: 89204 - DNA, 494 bp, Arabidopsis thaliana columbia
agcttgtcaatggcagttcttttaccaaatctaaaagcattgcttcagatttgtcatctttaagttcaatgcaatctcgagacatcgtggctgttgctagttcaaagacaaatcttggtctgtctcaagaaacaaagctgaaaactaatgcagatagagatccggtttcgtcaaatcttataatgtggaagcctgaagtaaaagattcagtcgagaagacgaatattcaactatcttcttcagatgtttcttcaagcaagaaggttcccgaggttaaaaaactcgaaagtgtatcgttagtgaagcaagaagataagggtttgaacaaaccaagcaagaagcttatagaggccgagagtgtattgttagtgaagcaggaagataagggattgagcaaaccgagaaagaagtttacagaggctaaaacccccgagagtgtatcgttagtgaagcaagaagagacgggtttgagcaaaccggaaagaaagcctaaa

SEQ ID NO: 89205 - DNA, 923 bp, Arabidopsis thaliana columbia
  unsure (1)..(923): unsure at all n locations
aatgannnnnnnnnnnnnnnnnnnnnnnnnnnnnnnnnnnnnnnnnnnnnnnnnnnnnnnnnnnnnnnnnnnnnnnnnnnnnnccacgcgtccgctcaattcatatacaaagagtagtgtgtttttagtggaggaagaatcagattcaaaagccaaaatcaaagcttggtgatgggatctggagctggcaatttcctcaaggttcttctcaggaacttcgatgttcttgctgggcctgtggttagtctcgtttatcctctatatgcttcagttcaagcgattgaaactcaatctcatgctgatgacaaacaatggctaacttattgggtcctttattcattacttacactcatcgagctcacattcgccaaactcatcgaatggttaccgatatggtcatacatgaagctgatcttgacttgctggcttgttattccctactttagtggcgctgcttatgtctatgaacattttgtgagaccggtgtttgttaaccctcggagcattaacatttggtatgtgccaaagaagatggatatcttcagaaaaccagacgatgtgttaacagctgctgagaagtacattgcagagaatggacctgatgcttttgagaagatcttaagccgggctgataaatcaaaaagatataataagcatgaatatgaaagctatgaaacgatgtatggtgagggttatcagtactaagagaaatttgaaaaagcttttaattttagaatgtgtgaagcaacttcatgtctttgttgtttgtttatgcttcctttttgtggatctctctcgtgtaaaaaagttgctaattaaaataaagatgctttctgctccaaaaaaaaaaaaaaagcaaagggcggccgctctacaggatcccagcttacgcacgcgtgcgtgcgaagtcatagctggcctat

SEQ ID NO: 89206 - DNA, 1129 bp, Arabidopsis thaliana columbia
  unsure (1)..(1129): unsure at all n locations
agagcccaaaacaacaacaacactcggagactttttagggctcatccccgaattatcagtgcaagtggatcgaattaaaccaaaatcaaaactaagcaacctaactaaccatatcttccgatttctcttatctctctgaagccacaaatctccagattcattcgtcgtctcggttaaggttagacggagaagaagatacaacaaatatggcggttagtatgaaacaaatgtcgttggtcgtctctgctttgggcgtcttatcctttgttttgggagttatcgccgagaacaagaagcctgcgtctgggactccaataagtggaaaaggagtagttatctgcaaatacccatctgatccaactgttgccttgggatacctttctgctgcttttctccttgcctgcactgtagcaggatacaaatccttgttcatctcttacaagggaaagtctgttcctaactctgtcttgttcaaaagcaccagcttctctgtgttcttcaacattgccttgataacatctggactggccttgtctctgttgctctggccaaccattacagaacaacttcacttgacccgtaatgttcaccgaaacttagaaaccagttgccccccggctaagaccggtctgcttggtggaggtgcctttgtgtctttggactcgtgccttttctggttgggtgctctgatgctcgcttgataacgcccgtgaagaccattttgatgaagttgcaagcagaagcatcgatgggaactcttcctccagggatgtgaatctcaagattgatgcttgagagaatgatatgcttttattggtattggggataagaagggtttttcatttgttttctacttggttgattaggaaaataataatttggttcttctggtggttttttttttttttaatgattggctagaatgttatgaaacccatctctgcaccttgatgcattgtgattcataagctggatctgtgtaaaataatcttttggttatatctcttacatttgacataattgatatgagaaagcccttccnnnnnnnnnnnnnnnnnnnnnnnnnnnnnnnnnnnnnnnnnnnnnnnnnnnnnnnnnnnnnnnnnnnnnnnnnnnnnnnnnnnnnnnn

SEQ ID NO: 89207 - DNA, 761 bp, Arabidopsis thaliana columbia
  unsure (1)..(761): unsure at all n locations
nnnnnnnnatgatcttnnnnnnnnnnnnnnnnnnnnnnnnnnnnnnntaccgtcccgattcccggtcgaccccgcgtccgcagtaactctcaggtgcgtgtgctctccgctggttccttagaacaatcggcacacgctttttcatttcaatcttcttcttctactcttaagtatctcaggtctgttgagagatggcagatcgattgacacgtattgctattgtgagttcagaccgttgcaagccaaagaaatgtcgccaagagtgcaagaagagttgtcctgtggtcaagacaggaaaactttgtattgaggtgactgttggttccaagcttgcttttatctcagaggagttgtgtatcggttgcggtatttgtgtgaagaaatgcccgtttgaagctattcagattatcaatcttccaagagacttggagaaagatacgacccatcgttatggggcaaacacttttaagttacacaggctcccagttccaagaccagggcaggtgctagggttggttggaaccaatggtattggaaaatcaactgctctgaaaattttggctggaaagctcaaaccaaatttgggccgtttcactagtcctccagactggcaagaaatcttgactcacttccgtggttcagaacttcaaaactacttcacacgtattctagaagataatcttaaggccattataaagcctcaatatgtcgaccacatcccaagagcagttaaaggcaatgttggagaggtccttgaccag

SEQ ID NO: 89208 - DNA, 741 bp, Arabidopsis thaliana columbia
  unsure (1)..(741): unsure at all n locations
caccgcccaaaataaaaaaaaaaaaaaaaaatcctttttttctcttcttgagagagagaaagagagagggagacaagtttgttctggataaaaagacaattcatttctattttaattgtctgcaaaattctcacgggccatcggagagaggagacagaggtggtgctgcacaagaatccttcctcctatatcctacaagactttggaatgggaagagaagttgttgaggtgcttatggaccgaaacgccgacgtttcaagcgctagagttcatgttgctcctaagatagctgcagaggagactgatgaggaatttgaagtcaaagaatgcacagaggagaagtctctttctgagaatgcaccaaatgttggatctgctgagagagttggagctcagaaatcacctaaaacccgtaatggaaatgctaaagtttcagagcagcaggatgctcctcttctcgcggtgaggaagccattgcaacccgagaacaagaagcatattgatgacgnagataattgctccattgcttcttccgttgcaacttccatgaggatgggtaagtctggattgacttatggaagtgctccaacgnttaggagtgctcaacgtgcttngaaacgcaaggagtattnccaaagctcgtggggaaaaccaagcgctttaagcttntaggaccgngctttancagaggcaaaagggtnaccaagaggagcntttagnancttngaaggatttnantgc

SEQ ID NO: 89209 - DNA, 354 bp, Arabidopsis thaliana columbia
tgtttttggtcactctgatgctttcagtttccatggttttatgagaaaatatcattgattatggttgcttctgagattaaatccccggtgagtgtccccgagactccgggaagctcctctgtgcatcataggaagcagttgagtgtgttcttcatagaatcagataacagacgtcttgctcttggccgtggctataccggaggaaccactcccgttaacatccatggcaaacccatcgccaatctttccaaaaccggtggttggatcgcagctttcttcatttttggaaatgaaatggcagagagaatggcgtatttcggactctcggtgaacatggtggcgttcatgttctac

SEQ ID NO: 89210 - DNA, 414 bp, Arabidopsis thaliana columbia
tttaacgattatggccaccgatggcgagagtatctcgatgtcgttggcggtggctacctgcgtcgcgatggcactattctacgttttgatcctttacgttcccaccgtgatactccgtctcccgtcggcttcttcttacaccgaattcatgattcggcgattcatctgcgcggccatttgtactgtagcatctctcgtcttcacagcttttatacttccgataaaaagctgggaggcctcttatatacttggagtttatggcataaggaaagatcatctgtggcaaggagtggtgtatcctcttctattgacctcgctcgtttatgctgggtctttggtgttgaagttgtttactctcctggaatcatggaaggaaaatggcggaggatgtagttcctttaattacatcagaag

SEQ ID NO: 89211 - DNA, 836 bp, Arabidopsis thaliana columbia
  unsure (1)..(836): unsure at all n locations
gcgaacgaatttctcttcttcttttttttcttctttgttacacganaatggcggctacaaacgcacgcacgtttttaatatgctggggggcaccaaacaaatctcaaactaaacctacaccaccaccaaancncactcnnccnncnccaacaancncccaaaggcgaatttttttttttttttttttatcaatggcggncgaagaaaccgccgcaaccgcttattcactttcctctgagcttgcttccgggattgggccctcgcttgcttactccaacacactcttcttcagttctggatacaatgtgcaagtgtttggtgaagataatgagtcagaggagaggcttgtgaatcgatttaagagagaagtgatgagaactggtgttatacaagaattgtagaggagaagatactttgagaataaacaagatgagaagaaacgtaggactcgtgatgctgctaaggtaataagaaaaggcgtcctcaagcaaggtttactcaagaaacaagagaagaagcagcagcagcaactaagagtaagaaaaaagatgaggaagaagagcaagctgggagatgcctggtggagatgtaccttcttgaaacacgattttagtatataaaatctccggtcttttgattaaatttcgtattatcccgtttttattacttggtacattgtgagttggaaatgtgtttactgcatattataacttgcttctagtattgagttctcttaagggcatcttcatttgttttataatgtctaaaatcagttgcatttgttggggctctccatggatgctattgttaatctgattcagtgctatttctctaaa

SEQ ID NO: 89212 - DNA, 826 bp, Arabidopsis thaliana columbia
ggcccacgcgtacgctcttcttcttcttcttcttcctcgcgacgcgttaatggcggcttcgttctcactcacgagcttcatctccttcatctcaccattcaaatctcaaactaaacctacaccaccaccaaatctcactcttccttctccaacaatctcccaaaggcgaagaaatgatctcgctatcgaatcaatggcggtcgaagaaacttcctcaaccgcttcttcactttcctctgagcttgcttccgtgatttgtccctcgcttgcttactccaacacactcttcttcagttctggatacaatgtgcaagtgtttgttgaagataatgagtcagaggagaggcttgtgaatcgatttaggagagaagtgatgagaactggtgttatacaggaatgtaagaggagaagatactttgagaataaacaagatgagaagaaacgtaggactcgtgatgctgctaagcgtaataagaaaaggcgtcctcaagcaaggtttactcaagaaacaagagaagaagcagcagcagcaactaagagtaagaaaaaagatgaggaagaagacacctgggagatgcctggtggagatgtaccttcttgaaacacgattttagtatataaaatctccggtcttttgattaaatttcgtattatcccgtttttattacttggtacattgtgagttggaaatgtgtttactgcatattataacttgcttctagtattgagttctcttaaaaaaaaaaaaaaaaaaagggcggccgctctataggatccaagcttacgtacgcgtgcatgcaacgtaatagctcgttgatagtttccc

SEQ ID NO: 89213 - DNA, 527 bp, Arabidopsis thaliana columbia
  unsure (1)..(527): unsure at all n locations
tctctacagagaacttgattattttttctgtatccgagtaaaaaaaatggcgaatggagctaatagagtggatctcgacgggaaaccgatacaaccgttgacaatatgcatgatcggcgccggaggtttcatcggttcacatctctgtgaaaagctcttgaccgagacgccacataaggtgcttgcgctcgatgtttacaacgataagatcaaacacttgcttgagcctgataccgttgaatggagtggtcggatccagtttcatcgtatcaatattaagcatgattcgagacttgaaggtcttgttaagatggcggatctgattataaatcttgcttgcggtcttgtactccagctgattacaatacacggcctcttgatactatcttacagcaatttcatttgatgcgcttcccctttgtgaaatactttttttgggacaaaaaggggtttnttnntttttcnccccggggngtttttnggaaaccccttgggggtttttncccnanntncnccccggggggngc

SEQ ID NO: 89214 - DNA, 568 bp, Arabidopsis thaliana columbia
  unsure (1)..(568): unsure at all n locations
atgatcttnnnnnnnnctctatacgactcatttagggaaagctggtccgcctgcaggtaccggtccggaattcccgggtcgacccacgcgtccgcacaaatctctcttccacccattgttatctctgtagaagcgtgagagagatcacgcgtgttcaccgacacaatcaaaatatggcgaacggagccgatagattggatctggacggtaaaccgattaagccgatgacgatatgcatgatcggtgccggaggtttcattggctctcatctctgtgagaagcttatgacggagactcctcacaaggttcttgcgcttgatgtttacaatgataagatcaagcacttgcttgagcctgataccgttcaatgggctggtcggatccagtttcatcgtatcaacattaagcatgattctagacttgaaggactgatcaagatggcagatctgacgataaatctagctgcgatctgtactccagcagattacaatacgcgtcctcttgacactatctacagcaatttcattgatgctctcccagtggttaagtactgctcagagaacaacaa

SEQ ID NO: 89215 - DNA, 542 bp, Arabidopsis thaliana columbia
  unsure (1)..(542): unsure at all n locations
cnnnnnnnnnnnnnnnnnnnnnnnnnnnnnnnagggggaggccatgngnccaacggtgtgttccncaagggtccacgcgtacggttatgatgacagtgacaagagaatcccagacatgaccatcattaaccgccaactcggatggaacccgaaaacatcgctatgggacttgctcgagtcgaccttaacctaccagcacaggacatacgctgaagctgtgaagaaggcaacatccaaaccagtggcttcctaaactctccaagaccccaacgaaactcgttaaacacgcgtcattttggcattttactctattcgattctatttttttcatcccagagaaaactttttttcttttttctttttaagaaaacgatataatcacggtggttcgttccaagtataccttttcgtttgtaagttttctctttttgtttggtttgtttggccatgtatgtcggagctgtcagaaagcaagaggttaatcgtttgtagcgaatgataaatgttcgagtgtaaattttaaaatgcttcgttttacatgt

SEQ ID NO: 89216 - DNA, 712 bp, Arabidopsis thaliana columbia
  unsure (1)..(712): unsure at all n locations
acccgngccctctctcctcaantgcttcgagttccttnttgtcgaaatcccggngcccatggcttctcatntggccccatcatgagtgccntggncactgctgatgtgctgagtctcnccaagtgagtggaggaccgctatcgagagtccaacgatcgacgtgagctccaaagagttttatggagaaggttatgatgacagcgacaagagaatcccagacatgaccatcatcaaccgtcaacttggatggaacccgaagacgtcgctttgggacttgcttgaatcgaccttaacataccagcacacgacttatgcggaagccattaagaaggccacttcaaaaccagtcgcatcttagaggtcgtctctctttacaaacacctcaaatcatgtggtggctacgattccattctttctttttaaaaaaaaaattctcccaacagaaaccttctcttcccttattttaggccattctaaacaaatgatatatcatggtggttgattctagtttacgttttccttgttatatagtattactgttaatgtttttgaattcctttgttttgaagctttatatcttgtatttgtccgaaactaaaaagggaatggtttgtgcaaactataaaaaaaaaaaaaaaaaggtcgannnnnnnnnnnnnnnnnnnnnnnnnnnnnnnnnnnnnnnnnnnnnnnnnnnnnnnnnnnnnnnnnn

SEQ ID NO: 89217 - DNA, 1372 bp, Arabidopsis thaliana columbia
  unsure (1)..(1372): unsure at all n locations
gcgagctctatacgacttacattagggaacgctggcacgcctgcaggtaccggtccggaattcccgggtcgacccacgcgtccttgattattttttctgatctgagaaaaaaaatggcgaatggagctaatagagtggatctcgacgggaaaccgatacaaccgttgacaatatgcatgatcggcgccggaggtttcatcggttcacatctctgtgaaaagctcttgaccgagacgccacataaggtgcttgcgctcgatgtttacaacgataagatcaaacacttgcttgagcctgataccgttgaatggagtggtcggatccagtttcatcgtatcaatattaagcatgattcgagacttgaaggtcttgttaagatggcggatctgattataaatcttgctgcgatctgtactccagctgattacaatacacgtcctcttgatactatctacagcaatttcattgatgcgcttccagttgtgaaatactgttctgagaacaacaagcgtctcattcacttttccacttgtgaagtgtatggaaaaactataggaagctttcttccaaaggatcatcctctgcgtgatgatcctgctttttatgtactcaaagaagatatatccccttgcatctttggttcaattgagaagcagaggtggtcatatgcttgtgcaaagcaacttattgagagacttgtttacgctgagggtgctgagaatggactcgagttcaccatcgtacgaccttttaactggattggacctaggatggatttcatccccggcattgatggtcctagcgaaggtgtcccacgtgtccttgcctgctttagtaacaatcttctgcgacgggagcctctcaagcttgtggatggtggagaatcacagagaaccttcgtctacatcaatgatgctatcgaagctgtccttttgatgatcgaaaatccagagagagccaatgggcatatcttcaatgtaggcaacccaaacaatgaagtgacagtgagacaacttgctgaaatgatgactgaggtctacgccaaagtgagtggagagacagctatcgagagtccaacgatcgacgtgagctccaaagagttttatggagaaggttatgatgacagcgacaagagaatcccagacatgaccatcatcaaccgtcaacttggatggaacccgaagacgtcgctttgggacttgcttgaatcgaccttaacataccagcacacgacttatgcggaagccattaagaaggccacttcaaaaccagtcgcatcttagaggtcgtctctcttttacaaacacctcaaatcatggtggtggctacgattccattctttctttttaaaaaaaaaattatcccaccccna

SEQ ID NO: 89218 - DNA, 445 bp, Arabidopsis thaliana columbia
gtctcctccacgcaattacctcttctcactctcagacattttgtcaaacagatggtgctcgtttctgaatcagcttaagaactaacaaggagacagacactaagcttggtttttctctccgattagacggaggaaaaagtgaaaacgaggggcttagacgagtgatgtgatagagatggaaggagttgagctagaattagaaagaagaagcaagttcttgaacagtttgatacagaagaagaaggctaaagaacagcaagatcagaaagatgagttcaatgttcgtgttagggcttcagatatgcctttgcctcaacagaacagagcctttagtttgtcgcgtgagattttgaatgctactccagggaaggctgataacaaaagactcgctcatgccctaaaaaaggacttcgattcagcctacggcccggcatggcactgcatt

SEQ ID NO: 89219 - DNA, 900 bp, Arabidopsis thaliana columbia
ctaccaggttacttagctggagctccaccgcggtggcggccgctctagaactagtggatcccccgggctgcattaattttcggccgcctcatcttttccttcacttgctccctcataggatctgaaatttcttcctctgcatgtgctctcgtggtttcttccttgataattccttgctcattccctgcatgtgactcccgatcatcgtcttcctcttccaagttacgaatcaaaatcatagccgagattcagatttcatagacaatggcgactaaggcggcttcgtcttccagcctccccaaatctggagccatttccaaaggctacaattttgcttcgacttgggaacagagcgctcctttgacagagcagcaacaagcagctattgtttctttatcccacgcagtcgctgagcggtcatttcctgccaatcttgtacatgagcatgttcacaggcctgagaatggcttgtctgtctccgtggaggacacacatttgggagattctggagcaattgaagctgttttggttaatacaaatcagttctacaaatggtttactgatcttgaatcagcgatgaagtctgagacagaggaaaagtatcggcactatgttagtactttaactgagcgcatccagacgtgtgataatatacttcaccaggttgatgaaacacttgacctatttaacgaactgcaactacaacatcaaggagtaacaacaaagactaaaactcttcatgacgcatgtgaccgactgttaatggagaagcagaaattgatggaatttgcagaagctctaaggagtaagctcaactattttgatgaactggagaatgtatcctctaatttttattcaccaaatatgaatgtatcaaactcaaactttctcccactactg

SEQ ID NO: 89220 - DNA, 547 bp, Arabidopsis thaliana columbia
  unsure (1)..(547): unsure at all n locations
cgnnnnnnnnnnnnnnnnnnnnnnnnnnnnnnnnctttataaaagcttatcgctaatttgacagaacactagaacagttctctctttttgtcgacagtcttcttcttcttcttcttcttcgattggatctggaactgaactcaaattgggaagaattttgacatggaggaggaccggtgttcgatcaaggatgatgcaactcaattgataggtaacaccccaatggtatatctgaacaacattgtggatggttgtgtagctcgtattgcagctaagcttgaaatgatggagccttgctctagtgtcaaggagcgaattgcttatggtatgattaaagatgcagaagacaagggattgattactcctgggaagagcacactgattgaggctacctctggtaacaccgggattggtttagccttcatcggtgcagctaaaggttacaaagtggtcctcacaatgccctcatcaatgagccttgagagaaaatcatcttttagcattaggtcggcggtcccctaacantcctgnaagngtnaggatatgc

SEQ ID NO: 89221 - DNA, 332 bp, Arabidopsis thaliana columbia
cccacgcgtccgcggacgcgtggggtgacgagcctcttgttgtttttggttatcagattgatgatcggacggttcttattggtttatcggttttgacggttgtgatgcttttgttgactcacgctacttcgaatattctgggatctttgttaaccgccgccgtgttggttctgattcatgcggcggttagaagaagtgataatttgtttcttgatgaagaagctgcggcggttactgaagcttcagggctgatgtcatacccttcgtcgtaaatccaaaaatttgttttttttttttttgtatgttactgagtttggtgcgatttgagaaaa

SEQ ID NO: 89222 - DNA, 814 bp, Arabidopsis thaliana columbia
  unsure (1)..(814): unsure at all n locations
nnnnnnnnnnnnnnnnnnnnnnnnnnnnnnnnnnnnnnnnnnnnnnnnnnnnnnnnnnnnnnnnnnnnnnccacgcgtgcgctctgtgcgagctctctcctctcatcaatggaatctctcatcaatcccagccatggcggaggaaactacgattctcactcttcttctctcgatagtctcaaaccaagcgtactagtcatcattctcattctcctcatgactcttctcatctccgtttccatttgcttcctcctccgctgtctcaatcgctgtagccaccgctccgttctccctctttcatcttcctcttccgtcgcaaccgtaacttccgattcccgacgattctctggacatcgagtctctcccgaaacagaacggtcctccgtgcttgattcgcttccgattttcaaattctcctccgtcactcgccgatctagctccatgaattccggagattgcgccgtttgtttgtcgaaattcgaaccggaggatcagctccgtcttcttcctctctgttgtcacgcttttcacgccgattgtatcgatatctggctagtctctaaccagacttgtcctctctgtcgctctcctctcttcgcttcagaatctgatctcatgaagtctctcgccgtcgtcggntcaaacaacggcggaggagaaaacagctttccgtctcgaaatcggatccatnagccgtcgtcgtcaaaaaacgattcagaatccggttgagcagaatgaacttactaaacgggtcgtcgnttanataggngcgcgggatcagaattnagggaaattaacgngaaaaggagngggg

SEQ ID NO: 89223 - DNA, 499 bp, Arabidopsis thaliana columbia
  unsure (1)..(499): unsure at all n locations
gaaggttgcagctgctccggtgtccattaaggcggtggcggcgtctgcggtgcatcccgcgtctgaaggagggaagaggattgtggcgtctccttatgctaagaagttagctaaggagttgaaggttgaattggctggtttagttggaagtggaccgatgggaaggattgtggctaaagatgttgaggcggctgctgctggaggaggagttcaagctgctgttgctgttaaggaggtagtggcagctcctggtgtggagttgggatcggtggttccttttacgacaatgcagggggctgtgagtacgaatatggtggagagtcttgctgttcctacttttagagtcggttacacgattagtacggatgcccttgatgctctctacaagaagattaagtcgaaaggtgtgacaatnacggcactcctagcaaaggcaactncacttncnctggcgaaacatccagttgtaaactcgtcctgtagagatggtaacagtttt

SEQ ID NO: 89224 - DNA, 511 bp, Arabidopsis thaliana columbia
ggaaagctggtacgcctgcaggtaccggtccggaattcccgggtcgacccacgcgtccggggacgcgtgggattttacaaaatagagagaataatgaaaaaaccctagcctgccccgccgtggaggagaattacaccacgacgagctcgtaatcgccgctgggtttctatgtttacatcgctaagagattaaccatcgagcgtgatttggtattggggttaggtaaatttggggatcaagcgaacagtatcatttggaaatgacgaaagtagttgctaagaggaagacgccttctgaactgagaggagaacaattgaaacggactgcttttgtggaccaagctaaagaaccttttgatgcattgcctccttgcaaaagtgcttgagagagaaaatggggtcaaggaaatcagtagctttcggaagaatccaaaatacattgggatgcgcgatggatgaaactgtttcctgggcaaaaagcgctaggccttggatgctctctggcaaaggaa

SEQ ID NO: 89225 - DNA, 699 bp, Arabidopsis thaliana columbia
  unsure (1)..(699): unsure at all n locations
atgactnnnnnnnnnnnnnnnnnnnnnnnnnnnnnnnnnnnnnnnnnnnnnnnnnnnnnnnnnnnngaccacgcgtccggccacgctgcatatttgcagagctcgagattctccttccctatacaactctcatctgtaatcgatacagatggcagcttcatcagcttgtcttgtgggaaatggtttgtcagtgaacacaacaaccaaacagaggttaagtaaacatttttccggcagacagacaagcttttcttcagtgattaggacatctaaggttaatgtagtgaaggcttctttggatgggaagaagaagcaagaaggaagaagagattttctcaaaatcttgttaggaaatgctggggtcggtttggttgcaagtgggaaagcaaatgctgatgaacaaggtgtttcttcgtcgaggatgtcgtattctaggtttctagagtacttggataaggatagggtgaataaagttgatttgtatgagaatgggactatagctattgtggaagctgtttctcctgaattgggtaaccgggttgagagagtacgtgttcagctaccgggtttaagtcaagagcttctacagaagcttagggctaagaatattgattttgcagcacataatgctcaggaagatcaaggttctgtgttattcaacttgattggtaatcttgcttttccggcgcttttgattgg

SEQ ID NO: 89226 - DNA, 888 bp, Arabidopsis thaliana columbia
  unsure (1)..(888): unsure at all n locations
gccnnnnnnnnnnnnnnnnnnnnnnnnnnnnnnnnnnnnnnnnnnnnnnnnnnnnnnnnnnnnnnnnnnnnnnnccacgcgtccgctctttctttatatgcatgtttggaagcgtttctacgcgaagagcctttggtacctgacgaaatgtggttctgtccacaatgcaatgaaagaaggcaggcaagcaaaaagcttgatctgtggaggcttcctgaggtcttagtcatacatctaaagagattctcatacagcaggtccatgaagcataagttggaaacatttgttaactttcccattcatgacttagatctaacaaagtatgtagccaacaaaaacctatctcaacctcaactatatgagctctatgccttgaccaaccattatggtggtatgggcagcggacactacactgcacatatcaagcttttggacgacagtaggtggtataacttcgatgatagccatatatcacacataaacgaagatgatgtgaagtcaggtgctgcatatgtgctcttctacaggaggaagtctgatgcaggcggaaaaatgacataagtctgctcaaaacgacaatctccgaggttccagtagtaatctctacacagctgtctgcaacttggaacccataagagtgacaattaggtttagatctattgtaaattagtggagttgggttctgagtagtttaattaacagagatgaatattgtctctccttctctgtcagtttctgtatagattgtgtttggcataatagcagtactgttattgtcactgacacataaaaaaaaaaaaaaaaaagggcggccgctctagaggatccaagcttacgtacgcgtgcgtgcgacgtcatactcttctatagtnnnnnnnnnnnnnnnnn

SEQ ID NO: 89227 - DNA, 710 bp, Arabidopsis thaliana columbia
agttattgagcaatagtctaatgttccttcctctgctggctttggctttaaccgcagtttcgtcgcttaaatacagcagaaatgacttccctccaggctttgtctttggctctggcacatcagcttatcaggtggaaggagctgctgacgaagatgggagaactcctagcatttgggatgtttttgctcatgccggacactccggagtagcagctggaaatgttgcatgtgaccagtatcacaaatacaaggaagatgtgaagctcatggcagacatgggattggaggcttacagattctctatatcctggtcaaggcttttaccaagtggaagaggaccaatcaatcccaaggggctacaatactacaacaatcttattgatgaattgatcactcatggaatccagccacatgttacattgcaccactttgatctcccacaggccttagaagatgagtatggaggttggctcagccaagaaatcgtgagagacttcacagcttatgcagatacttgcttcaaggagtttggagatagagtgtcacattggactactataaacgaggtcaatgtgtttgcccttggagggtatgaccaggggattaacaaccgcctgctcgatgctctcctccatttggacttaattgtaccaaaggaaactcttccattgagccttacattgccgtacacaacatgttgctcgcacacg

SEQ ID NO: 89228 - DNA, 511 bp, Arabidopsis thaliana columbia
  unsure (1)..(511): unsure at all n locations
tataatatcacaggcggattcagacaaagatagacgtttgactttggcagagatgattgagcatccatacgtcttctacagtgccattttcgatgaagatgacactgatgatgattatggtttccacgatgaattccgctagttttataatttaggaataaacaacatcaggctcagttcaatatatcctcaaggaacattcctcacaaaacagagtccagcacgaatctctctcacgtagatcatctggtgatttagaagttagaagagtatttatgattctgaacagctaaaagaaacatacttttctttggatcttgttcaatcaattatagatggctttctccatttctgtatgtttaatttaacacctttgaagctcaatcttttataagcaaagctctatgaagtaaacagntgttatgcaaaaaaaaaaaaaaaaagnnnnnnnnnnnnnnnnnnnnnnnnnnnnnnnnnnnnnnnnnnnnnnnnnnnnnnnnnnnnnnnnnnn

SEQ ID NO: 89229 - DNA, 762 bp, Arabidopsis thaliana columbia
  unsure (1)..(762): unsure at all n locations
ctatacgactatattgggaagctgggacgcctggcaggtccgggtccggatttccgggttcgaccaacgccttccggccacacgctaaaacacacaaacaaaaaaacaactcttcaagaacatatacatttaatatttatataaacaaaaaagaatggatcttgatttaatacaagatctgcccatcttgaatttcccaccagccatcaagatccgagccaacaccaacagagatgatgacggcggcggctgcaccactcccacttcttccgaccacaagattcctcccaccacagccaccactcctcctcctccaccgcagaaaccccgtccaccttccacaccgtcgtctctcggcatcagatcttgcaagagaaagcttatgacgtcattgtccaagtatgagatcatcgtcaacaaagatgagatcgagcggttcttctcctctgtttacaaccaaacgatggcgtcatccaccacgacggctatcacggtggccaagcggcgaagaagtttccgttcttgttcacgaagatgatcaataattggacgtttcattaaaggttccataatttcgaatagctttttcgatttttatttatttttatgtaatgtttttatcaactttacacgtcgacccactctataaatatacatgtgcgatcgatcgatggaaaaaaaaaaaaaaagnnnnnnnnnnnnnnnnnnnnnnnnnnnnnnnnnnnnnnnnnnnnnnnnnnnnnnnnnnnnnnnnnnnnnnnn

SEQ ID NO: 89230 - DNA, 892 bp, Arabidopsis thaliana columbia
cttttgattgggcactcgggcccccccctcgaggtcgacggtatcgataagcttgatatcgaattcgcggccgcctttttctgggttttgttgttcttctttgactttatgggttcttttgttttagatttaggctcctacagatctgcttaaatctctgtgatcttgtctcttaattcttctgtttacccgtaatttccggaggattctcttcttgcttttccctgagcttctggatttggtcagagaagccttaagttcaaaaggatttggcttttgaagattggtgttaattaagcttctgggttttcatcagtttgtctaaaagtgagtggagtctctcatcttagtctgaagctcttttttttggatttgagcatttctggtttgagaagaatcttgtggaaaccaaagagaaatgtcgtttcgaggcattgttcaagatttgagagatgggtttgggagcttgtcaaggaggagtttcgattttaggctctcgagtcttcataaagggaaagctcagggttcttcgttccgtgagtattcgtcatcccgtgatctcttgtcgcctgtgatagttcagacaagtagatgggctaatcttcctccagagttactctttgatgtgatcaaaagattagaggaaagtgagagtaattggcctgcaagaaaacatgttgtggcttgtgcttcggtttgtcggtcttggagagctatgtgccaaagagattgttttggggcctgaaatctgtgggaaactcactttccctgttttccttaaacagccagggcctcgtgatgcaatgattcagtgtttcatcaaaagggataaatcaaagctaacatttcacctttttcttttgttaagtcccgctctattagtggagaatgg

SEQ ID NO: 89231 - DNA, 507 bp, Arabidopsis thaliana columbia
  unsure (1)..(507): unsure at all n locations
nnnnnnnnnnnnnnnnnnnnnnnnnnnnnnnnnnnnnnnnnnnnnnnnnnnnnnnnnnnnnnnnnnnnnnccacgcgtccggaaagtaatgcagctgaaagtcgttctcctatatgtcatcttccatcagaatctgttggagaaggtcacctaagtaatgatgagatgggagttgatgtaggaacaccggacaatgtagaatcagggatgactgggagaagcaacgaagatgaaagaactctgtccaagtctcttagttttggattgattctgaaaaagttgatcgacctgggtaaagtggatgtgaaggatgtggctgcagagattgggattaatcctgatgctttgagggctaaacttacggacggagacttgttacctgatttactaggcaaagtagttaaatggcttagccagcatgcacacttgggttcttcggataaaggcaaaaatttaaaacgtaagaccactactaaatctgagcgtcgggcagctatctgtactgaa

SEQ ID NO: 89232 - DNA, 547 bp, Arabidopsis thaliana columbia
acgactcactattgggaaagctggtccgcctgcaggtaccggtccggaattcccgggccaaaaccaaacacagaaacaaaaatctaaatttctttcttggtctgctttcaatatggctcctctacctatttcttcgattagagttgggaaaatagatgatgttcaagaactcataaaatccaaaccaaacaaagttccagagagattcattagagaagagtatgagagaggagtcgttgtgtcgtctcttaagactcatcatcttcatcatcagattcctgttattgatctctctaagctctctaaacccgacaatgatgattttttctttgagattcttaagctctcacaagcttgtgaagactggggatttttccaggttataaatcatgggatagaagtggaggttgtggaagatatagaggaagtggcttcagagttctttgatatgccattggaggagaagaagaagtatccaatggagccaggtaccgtacaaggttatggtcaagctttcatattctccgaagatcagaaacttgattgg

SEQ ID NO: 89233 - DNA, 287 bp, Arabidopsis thaliana columbia
aatttctcaatctcttcttcaacttttttttttaacgatggcttcagaggatcaatcggcggcgagatctaccgggaaggtgaactggttcaacgcttctaaaggctatggtttcattactcctgacgatggcagcgtagagcttttcgttcatcaatcttcaattgtctccgaaggttaccggagtttaaccgtcggcgatgcggttgagttcgctattactcagggaagcgacggtaagactaaagccgtcaatgttactgctcctggtggtggttctctcaaga

SEQ ID NO: 89234 - DNA, 707 bp, Arabidopsis thaliana columbia
  unsure (1)..(707): unsure at all n locations
nnnnnnnnnnnnnnnnnnnnnnnnnnnnnnnnnnnnnnnnnnnnnnnnnnnnnnnnnnnnnnnnnnnnnnnnnnnccgcgcgtgcgcggacgcgtgggtttatatataacaatctggatccgccaccgtcgaattaatctccggaaagctcgtcgaaagatgtcgatgggaggcgacacgacgtgggttgggaagaagccgatcagacgcatcggtggattatctgatgctctctctatcgcctccgatctcggtttcgccgtcgctcctcctccgtcgcaggaagaattacaaagctttgcgtcttcgaatggggaaagaggtgatgatttgataagggtattgagagagttatctgttgttcaaaggaaaattgcagacttgcaggtcgagcttcaagggaggaaggatgataaaaatgtggcgcatttgactcatgttggtgaaatgcaaaagaaaatcgagactttgtcaaggattactcaaatattgaaagatgttatacaaaacaaggatcgcattattgctcgtctccaacaacaccaggaggtaacgaaatgacacatagagactcagattgtgtgactccacctcaagggaggatagagtcaagcttcgacgatttagctgttcataaaacaaggagacanaacaatgatcaaaatgaagaagaagaagaagaagaagaagaagaagatggtaataac

SEQ ID NO: 89235 - DNA, 540 bp, Arabidopsis thaliana columbia
tttttaggccagtttcaatagaaaatcttcgggcctttcaaaaccttcaagtggttaatttgcagttttttccccccacccccaggaggtagcgaaatgccacatagagacccagattgtgtgcctcccccccaagggaggatagagtcaagcttcgcccatttagctgttcataaaccaaggagccaaacccatggtcccaatgaagaagaagaagaagaagaagaagaagaagatggtaatatcaatgggaaccggagactatcttggcctccttctgtaaaaaagagtagcgtttaaacagttgcttttgtctttgcttgagctttttaacacccctcgtgttttgtttcatcagcattagtgttctttatggatttacttatttctatttgatagtctttgagtgaaacttaaaccacgtgtatattttgttaacactggttttcatggtccatgtgactatcatacaaaaaaaaaaacaaaggccggccgctctagaggatccaagcttacgtacgcgtgcatgcggcgtcatag

SEQ ID NO: 89236 - DNA, 451 bp, Arabidopsis thaliana columbia
cctatttcctattatataatctctccgaccatcataatttgaccgttggagaacattactacttttcgcaaaagaagggaaaaaaaaagagagagataaagctctcttcgattcttttgcaatcttctctcctacggttgtttcaatctccgaccaaaccgtgctttcgaatagaacccagaaatggcatcgccacagagtaccaaaaccggtttgaatcttcccgcagggatgaaccagacttcgttgcgtttagaaacgttttcgagctcatttcgtgggatttcgagtttatcctcgccgtctaaatcgacttgcagcgacagattcataccgtgcagatcttcttcgagactccacgctttcgatctgcaggataaggaaccgactaccccggttaaagagggagggaatgaagcctattctagacttttgaaatctgagcttttcg

SEQ ID NO: 89237 - DNA, 568 bp, Arabidopsis thaliana columbia
  unsure (1)..(568): unsure at all n locations
caggaacctgtgcttccgggtttttttttgcgtgccagagccattggattaatgcctatgattgaccagtgtgtgttgatgatcctgaatataagcactaccctgccatcaaagaacttcctcctccccgtctctctgaaatccgtcgtttcttcgaagactccaagaaaaacgagaccaaggaagttgcagtgaatgattttctgccatctgagtctgcggttgaagctatccagtactcaatggacctctatgctgaatacattctccacaccctgaggcgttgaagcttctcctcagaagatttctgcagcatctatgtttctgttacttttcattgataataagaagcatatgatcctaattgatattacttttatctctgcatttttcttccttatcatttggtccttctgtaatttcgttttaaagaccctttcttggcattgaaatttttggtttaaaaaaaaaaaaaaaaaaaaaaaacaccaagcnnnnnnnnnnnnnnnnnnnnnnnnnnnnnnnnnnnnnnnnnnnnnnnnnnnnnnnnnnnnnnnnnnnnnnnnnn

SEQ ID NO: 89238 - DNA, 650 bp, Arabidopsis thaliana columbia
  unsure (1)..(650): unsure at all n locations
nnnnnnnnnnnnnnnnnnnnnnnnnnnnnnnnnnnnnnnnnnnnnnnnnnnnnnnnnnncccacgcgtccggaccccgcggcttcacttgtttctctcccaaagtttcttcatcatccttgcgataaagaaaacaacaatcggctgtttcgtttcgatccaaagatgagtgaagaaactaaagataaccagaggctgcagcgaccagctcctcgtcttaacgagaggattctctcatccttgtcaagaagatccgtagctgctcatccatggcatgatcttgagattggacctggagctccacagattttcaatgtggttgttgagatcactaaaggaagcaaggtcaaatacgagcttgacaaaaagacaggactcatcaaggttgatcgtattctctactcatcagttgtgtaccctcacaactatggttttgttcctcgcacattgtgtgaagacaatgaccccattgatgtcttagtcatcatgcaggaacctgtgcttccgggttgttttctgcgtgccagagccattgggttaatgcctatgattgcccagggtgaaaaagatgccaagatcatttcagtgtgtgttgttgacccttcaaaggctccctgcatnaaggcttcnnctaccggtttttgaaanntc

SEQ ID NO: 89239 - DNA, 1737 bp, Arabidopsis thaliana columbia
atggattcttcttcatcagtcgtttacgttggttcatcatccaaatccagaaactttcaatctaaatccaaaggttcgattacatctttctcaatcgattcaagaggcaccaagaaatcaatgaagacgttattaatcccagaaccagaaccaacttcccctgaagttatagaaagttctgtgtcctctgtttcagctgaatccgagacaccaatttcgattatacgtaagaagaaacaatcagagccaaggttttactctagcccaaccaacacgttttacacagaagcaaaacaaagctttaccaacacagaattcagtgaatgtgcaagcataagcactattggtataggtggtattgatttggagaagaatggtgtaatgatatacagaggaagtatagggagtgatgttagtgatgagagtagctcaagtggtctgagtaatgcagcttacaagccacatagagataataacgataagcgttgggttgcgattcaggaggttcgttctcgggttggttcgtcgcttgaggctaaagatttcaagctgattaagaagttaggaggaggtgatattggtaatgtttacttagctgagttgattggaactggagtgagttttgctgtgaaagttatggagaaagctgctattgcagcgaggaagaagcttgttagagctcagactgagaaagagatacttcaatcgttagatcatcctttcttgcctacgctttactcacatttcgaaacagagatgaattcttgtttggttatggagttttgtcctggtggtgatttacattctcttagacaaaaacagcgtggaaagtacttccctgagcaagctgctagattttatgttgctgaagttcttcttgctatggagtatctacatatgcttgggatcatatacagagaccttaagcctgagaatgttttagttcgtgaagatggacatataatgctatctgatttcgacctctctttgagatgtgcagtctctccaacgttggttcggttcgcagcaatcacgcttgagtccaaaagctcaagctactgtatccaaccaacatgtgtagaccaatcgagctgcattgttcagcctgactgcatccagccagtgtgtttcactcctcggttcttgtctaaaggaaagcacaggaagaagtcgaacgatatgagccgccaaatcagaccgcttcctgagctgatagctgaaccgactagcgcaaggtcaatgtcgtttgttggtacacacgagtacctagcaccagagattatcaaaggagaaggtcatggaagcgcggttgactggtggacattcgggatattcctctatgagcttctatttgggataacaccgtttagaggaggcgataacagagcgacactctttaacgtagttggacagccattgcggtttcccgagcatccaaatgtgagctttgcagctagagatttgatcagaggattgctagtgaaagagcctcagcatcggttggcttatagaagaggagctactgagattaagcagcatccgtttttccaaagtgtgaattgggctttgatcagatgcaccagtccaccacagattcctcaaccggttaaaccaatggatcaagctcacagtgttcgtcatggttttagtcaaggacatggacatgttggttatgataagcctcctactgtggatgtgaagccttctggtaattatttggaaattgatttcttctga

SEQ ID NO: 89240 - DNA, 965 bp, Arabidopsis thaliana columbia
  unsure (1)..(965): unsure at all n locations
accggngcggagacccaggcgcgacccagaccatcaatataatctagaaaaaaaaagagaagagagaagagagaaatgtcgagagctttgtcagtcgtttgtgtcttgctcgccatatccttcgtctgtgcacgtgctcgtcaggtgccgggagagtctgatgagggaaagacgacgggacatgacgatacaacaacaatgcccatgcatgcaaaagcagctgatcagttaccaccaaagagcgtcggcgacaaaaaatgcatcggaggagttgctggagtcggtggattcgccggagttggtggtgttgccggcgtgggaggtctagggatgccactcatcggtggtcttggcgggatcggtaagtatggtggcataggcggtgcagctggaatcggtggatttcatagtataggcggtgttggcggtctaggcggtgtcggaggaggtgttggcggtctaggcggtgttggagggggtgttggtggtctaggtggcgttggcggtctaggtggagctggtttaggcggtgtaggtggtgtcgccggtggtattggtaaaccccgtggtattggcggtttaaggtggtctaggcggacccggaggtggtttaggtggagttggtggtctccggtaaggctggtggtattggtgttggtggtggtatcggtggtggacacggcgtggtcggtggtgtgatcgatccacatccttaatagagagtatttgttggttagggttttaattaaggaataattaattagtttcgatgttattgttggtcttttaattctgtgatcattagggtgacttttgatctattttctagtttgggcttttgtaacgtttgctttgatttcggccgtggtgttatgaaatgtgcgactctatatgaaaaaaaaaaaaaaagggcggccgctctagaggatccaagcttacgtacgcgtgcatgcgacgtcatagct

SEQ ID NO: 89241 - DNA, 389 bp, Arabidopsis thaliana columbia
  unsure (1)..(389): unsure at all n locations
nnnnnnnnnnnnnnnnnnnnnnnnnnnnnnnnnnnnnnnnnnnnnnnnnnnnnnnnnnnnnnnnnnnnnnncgacgcgtgcgcggacgcgtgggccggtgacgagacccaccactcttcccactgccttccccggttttattatcatcaaggaggtggtggttcgtatcatgcccgacgaaagtaacttcatccggtttagggggaaaatttgataatcttgcctgtgtcaaaagcggtaatagttggctttttgctacggctgaaaaggacaattcacaagaaatctcatgagtttctgtgacaaaagttgatgtattcgacttcacattctgtagtgttggttaagtaaatctctgtgtgtgaccctttttgtcaaaaaaaaaaaaa

SEQ ID NO: 89242 - DNA, 647 bp, Arabidopsis thaliana columbia
  unsure (1)..(647): unsure at all n locations
acgaggtagaccggcattgaacatgacaataccgatgagtgtttttgaaggatctggaaaagatcatcatcattttgggcgggtagtaggtgaaaacggtgaagaagtgttggatgaagagaatggagagcaaagagaggttcaagtgaaggtcctagtgaagagaggaaacaaacaacaaacaaggcaaatgctaatcccgagtgattgtgctctagtgcagagcacaaaacagaaagaagctgcagaattggaagagaaacaagacataaagaggttagtactcgagtacaatgagagggatgaagaggaagcaaatgggttaggaacacagatattgaattggacttctggaggaagcagaggatccactcgaaccggggaaggcagtgggaagagtggtgggtctcgtcaccggttttattatcatcaaggaggtggtggttcgtatcatgcccgacgnaagtaacttcatccggtttagggggaaaatttgataatcttgcctgtntcaaaagcggtaatagttggctttttgctacggctgaaaaggncaattcacaaggaatctcatgagnttctgtgacaaaagttgatgtattcgncttcacattctgtaggtgttggttaggnaatcncttgtgtgt

SEQ ID NO: 89243 - DNA, 607 bp, Arabidopsis thaliana columbia
  unsure (1)..(607): unsure at all n locations
gggggacaccncaacnggncatnntaccccnggttttnccccttggcngccccaaaccggaagaccnccagaatnggnggggaaccancccttaaggggttattccccgagtccaatgagagggatgaagaggaagcaaatgggttaggaacccacatattgaattggacttctggaggaagcagaggatccactcgaacccgggaaggcagtgggaagagtggtgggtctcgtcaccggttttattatcatcaaggaggtggtggttcgtatcatgcccgacgaaagtaacttcatccggtttagggggaaaatttgataatcttgcctgtgtcaaaagcggtaatagttggctttttgctacggctgaaaaggacaattcacaagaaatctcatgagtttctgtgacaaaagttgatgtattcgacttcacattctgtagtgttggttaagtaaatctctgtgtgtgaccctttttgtccagcttggttaaatcttgcatttaatgattatttagcatcattcacaaaaaaaaagggcggccgctctagaggatccaagcttacgtacgcgtgcatgcgacgtcaannnnnnnnnnnnnnnnnnn

SEQ ID NO: 89244 - DNA, 530 bp, Arabidopsis thaliana columbia
  unsure (1)..(530): unsure at all n locations
nnnnnnnnnnnnnnnnnnnnnnnnnnnnnnnnnnnnnnnnnnnnnnnnnnnnnnnnnnnnnnnnnnnnnnnnnnnnnnnnnnnccacgcgtccgaatccagggccttccccggcaccagagcctaagccatgtccgagtccagggccaaaccccgcaccagcgacaactaagaggacacataacactacgtttccggcgatcttcgcctttggggattcgatcttagacacaggaaataacgattatattttgaccttgatcaaagctaattttcttccatatggcatgaattttccagataaagttcccaccggcagattttgcaacggcaaaatcccttcggactttatcgcggattatataggagtaaaaccagttgtaccggcatatttgagaccgggactgacccaggaagatttgctcactggtgtatcctttgcttcgggtgggtctggctttgatcctttgacacccatcgtagtaagtgcgatcccgatgtcaaaacaattgacatactttcaagaataca

SEQ ID NO: 89245 - DNA, 440 bp, Arabidopsis thaliana columbia
cccacgcgtccgatctcactgaaactagagagaaaaccaaatggcggctactccaatcagagttatagtctcagctcttgtgatcctctcggtattactactttcctcgtctctgggagtcgccacagagacagaaattgagcggaacgagacagaggtgcggctgatgtacgagcaatggcttgtggagaatcgaaagaactataatggtcttggagagaaagagagacgattcaagatcttcaaagacaacttgaagtttgtcgatgaacacaattctgttccggatcggacttttgaagtagggttgaccaggttcgctgatctaacaaatgaagagtttagagcgatttatttaaggaagaagatggaaagaactaaagattcggtgaaaactgagagatatttgtacaaagaaggagatgttttgcctgatgaag

SEQ ID NO: 89246 - DNA, 474 bp, Arabidopsis thaliana columbia
atttttcgctgactctccacttctctcaatcgtccgcctctacctacagagagagagactgaaccagacgactttcagtttcagttccagtttcaaagatctctttttcgtttctcgctgtctgtagcatcaatggcaatcgcttcctgcttcttctgtgttccaacaccgaacacagctatctctgaatccaatctgacatggcctcacatcgcttcgtttcctagactctcttcatcttcctcttttaacggtgtaatctctgcaaagtcaatctcttttaaccgccgtgtacctattacccctgttttatccgcttcaagtggtaacggcggctctgataacaacggaggaggtcttagtggtggtggtggtggtggcgatggaggtaagaatgatggagatggacacggtgtcgaggacagggttagggtcaggaacgaggcgatgcttttgttgaaggagtctgggatt

SEQ ID NO: 89247 - DNA, 813 bp, Arabidopsis thaliana columbia
  unsure (1)..(813): unsure at all n locations
atgacctnnnnnnnnnnnnnnnnnnnnnnnnnnnnnnnnnnnnnnnnnnnnnnnnnnnnnnnnnnnnnnnnnnnnnnnnnnnnnccacgcgtccgcggacgcgtgggctgttttatccgcttcaagtggtaacggcggctctgataacaacggaggaggtcttagtggtggtggtggtggtggcgatggaggtaagaatgatggagatggacacggtgacgaggacagggataggaacaggaacgaggcgatgcttttgttgaaggagtctgggattgaattggagagtcttcccaaagatctagcggctgctattgaggcgggtcggattcctggatcggttatcactcggttcctggagcttcagaaatcggctgtgatgcggtggctgatgcaatttggtgggtttagggaaagattgttggctgatgatctcttcatggctaaactcgccatggaatgtggtgttggaatcttcaccaagactgctgctgaggatgaacggcgctgagaaaacttcttcaatgaacttgaagttggctattcccgttgcggcgatggctattatctgctgatttcatggtgggctaatcttccctgctcccaaccgtttctcttcgaccacctttggnacttnacttgctggaggtataatccaaanttttcccacaaactgccccagncaatgccttccagggttgcnntttcccggaacctcatatactcttttncaaagntngggnncntaaacgggaattgggctaaagctnttttcccgttgaccaaancangctggttggctgnntttnaaat

SEQ ID NO: 89248 - DNA, 677 bp, Arabidopsis thaliana columbia
atgtgactcctttattggttgaggatactgaaaaaatcaattcattaacatcagaggtggaagctctaaaggcttcgcttcaggctgaacgacaagccgcagaaaatttgagaaaagctttctctgaggcagaagctagaaattccgagctggcgacagagcttgaaaatgctacaagaaaagcagatcagcttcatgaatcagtacaaagactagaagagaagctttcgaattcagagtcagagattcaagtactccgtcaacaggcacttgctatttcgccaaccagcagaactatggccacacgatcaaaaacaatgcttttaccgagaactccagagaatggaaattatcttaatggaggaacaaagactacaccggacatgactcttgctgtacgggaaccagagtctgaggagaaaccacagaaacatctgaatgaaaagcaacaggaaaaccaggatttactagtcaagtgtatttcacaaaatcttggatacaatggagacaagcctgttgctgcatgtgtcatatacaaatgtcttcttcactggagatcatttgaagtgggaagaacctagcggctttgaccgtatcatttcaaacaaatagcttacagcccattgaaggggcccagttaacaatggggggtttttggcgtattggttatctaattc

SEQ ID NO: 89249 - DNA, 500 bp, Arabidopsis thaliana columbia
  unsure (1)..(500): unsure at all n locations
caatgcgnttgcaagttgaagaagcaaacgctgctgtaattagagagcgggaggctgcaaggaaagctattgaagaagcacctccagtcattaaggagactcccgtattggttgaggatactgaaaaaatcaattcattaacatcagaggtggaagctctaaaggcttcgcttcaggctgaacgacaagccgcagaaaatttgagaaaagctttctctgaggcagaagctagaaattccgagctggcgacagagcttgaaaatgctacaagaaaagcagatcagcttcatgaatcagtacaaagactagaagagaagctttcgaattcagagtcagagattcaagtaccccgtcaacaggcacttgctatttcgccaaccagcagaactatggccacacgatcaaaaacaatgcttttaccgggacctccggggtggggatttttttttggggggccaaggtttcnccgggcaatttnntttttttggggccnagnnttt

SEQ ID NO: 89250 - DNA, 883 bp, Arabidopsis thaliana columbia
  unsure (1)..(883): unsure at all n locations
nnnnnnnnnnnnnnnnnnnnnnnnnnnnnnnnnnnnnnnnnnnnnnnnnnnnnnnnnnnnnnnnnnnnnnnccacgcgtccggctactcaaaggatgttcataccgagctgattcaacataaacgagcttggatgataaaacgtggtattgtcaaagggaagctctctgtagactcagccgagcaacgcctcgcggggttatgtcctcttatgccagaagaagttggtattcttttacgagcttatggatactcatgggatacaatcatatatgtcgctgggggagaggtttttggtgggcagagaacgttaattcctttacatggtatgtttgagaatgtcgttgaccgtacttctctaagtactagctgggagcttgctaaaatgtatgggcgtgaggcaaagcataatgatatcaagaaaatgacacctccttcgatcgaggtagaaacgaaacatgattcattgaaaagcacaagacanagacctcaaccgcttncacctncaccagctagaccaaagtactacaacatcgaaggttggtggggttgggtagccgagagtgacaacgagcccgaaagcacgggtattgagttgagaactaatgcccataagtttggtgtgggaagcgatacattacgttgttagcgtggaagcagatgtgtttatctcgggttttgatcgcgatgggaaaggacatccgagtttcgctagtttggtcatgggacaccggctttatcagtctgcttctgctagaacatttagaccagacaggaaacaaattgcaatgcttttggaagagattcgagaccatatgtacgacgcgaatcacacttggataacatcagttaggaagctactaaagagaagcatactcgagggt

SEQ ID NO: 89251 - DNA, 641 bp, Arabidopsis thaliana columbia
cagcactatccactactatagggaaagctggtacgcctgcaggtaccggtccggaattcccgggtcgacccgcgcgtccgcccacgcgtacgcccacgcgtccgcggacgcgtgggtcctcactcactcttcttccccaaaaaaaaaacaagacagaggaagagaatcacgaaaccatagtcccaaacccttcgaatctataagcatttctcaaacacaatcaagaaactgtgtttagcttttagatttctacaagcatgtaagacgagattttgtttcttttttttctgcatggtggatcgaacggtgagaatggggacggaggtgaagtcgattagggttccaagaagggtctggtttggatcacaaatatctatagttctcctcgtgggtggaaaccatacctcctccaggttttgtactcgctagattcttcgattttctctttgcgattcttctttgttcttaagatctgtctagcagatccgactagacattaatcatattttaagattccatcggagctgaagtatttgaagaaatcagtgggtataaagatcttgaagcttgatatcttcccgaggatctacgaataagcatgctctgttccgggctctcatcatcggctctgctctatctgg

SEQ ID NO: 89252 - DNA, 410 bp, Arabidopsis thaliana columbia
ctctgtttatggaatctctccgctatctccctcagcgcctgcttatcaatccggtccatcttctaccggtgtttcaaataaggaacaaacttttcctcagcgacctgaacaacctgagtgtcaatactttatgagaaccggagattgtaaattcggaacctcttgcagattccatcatcctatggaagcagcatcgccagagggcgcagtgccatgcactcactttgcgcaacacggtatttgcaagtttgggcctgcctgcaaatttgaccactccttgggctcttcttcactaagctacagcccatccccttcttcactcacggacatgcccgtcgcaccttacccctcctcgctcggcacattagctccatcatcctcatctgaccaatgcactgagcttatctctt

SEQ ID NO: 89253 - DNA, 879 bp, Arabidopsis thaliana columbia
ccagataatgatgtttatgatttcagagagatgtttgtttctcctccggatacagatatttactcaattccgagagttcttgcaccgatgcctcaaaagtatattcgatgtgcaatgagtgactatggatgttacaatgtcactgaaccacctattgatgcccccagagatccactgtacaaatctgagagggagatatccaaggttttcttgacaaaacattaccggaacagaaggacaaacgatccagaatttgtgctagatcttgaagagatatatgttattgattccaagacaaagtcaatcaccagagccagagttctggtgacagttccgggaggaagaaaaagggataggaaggatgacttgcttgtgatacgagataatggaacctcctttaagatcatacacgtggtgaaagagatgacccaacaacggtaatagaaagagaagagtggaccaagactagagaagacatggagaaacatctcaggaagctacgagacttcagtgtctcaaattggttctagaagaactcgagagacaccaaacgacaagtcagcataactttcttcctgagatggaaaacgagagcagatgatctaaatcgatgatatggtggagggtatacaattttggtgacctcaggttctgcactagcagcagagatggatgtgttattagatgaatatgggcctctagaaaaaagtgtgtagatgcaatagtttgatggactaacattcaatgactagagaagctagcttatttgcaagttttgaggtgtttaattcaagttttcaattgatgattatgatggcctgtattattcttgtaatgagatattttcatattccagattggaacaaagtgtttgtattt

SEQ ID NO: 89254 - DNA, 551 bp, Arabidopsis thaliana columbia
  unsure (1)..(551): unsure at all n locations
nnnnnnnnnnnnnnnnnnnnnnnnnnnnnnnnnnnnnnnnnnnnnnnnnnnnnnnnnnnnnnnnnnnnnnnnngccgtgcgggcgcccacgcgtccgcagatagtgaagcgacttcatgcattgagctaccacatgaggagctacttttggctagacttgaagcagcttaatgacatttaccgatataagacagaggaatactctcacactgctgtcaacaagttcaacgtaatccctgattctcttccagaatgggttttcgactttatgccgcctcacggagggttctttattggcaacgttagccctgcaagaatggatttccgttggtttgctttgggtaattgtatagcaatattgtcttccttggctacacctgaacagtcgacagcaattatggatctgatagaatctccctggggaagagttggtttggagaaatgccactgaaaggttgctatcccggccttaaaaggcctgaagtgagaatagtaacctgggtgggaccccaaaaaccactcgggggagctaccacaatggaggatccggg

SEQ ID NO: 89255 - DNA, 519 bp, Arabidopsis thaliana columbia
  unsure (1)..(519): unsure at all n locations
nnnnnnnnnnnnnnnnnnnnnnnnnnnnnnnnnnnnnnnnnnnnnnnnnnnnnnnnnnnnnnnnnnnnnnnnnnnnnnnnnnnccacgcgtccgtatcccttcccttttgggatattttcgccgcgtggattgatatgacgactctctttcgccggaagtcaatcggaatccgcgacaacttcttccttcaatccctttgatttttttttggctctacttatcccaaacccttcaaatcttcaggtccaatctcttcttctatttgttttttaattaaaaaaatccggcgaaaggtgaagctcttggattcgagtggtggctagtaatcgatttcggtagtttagaagtagtttataggttttatcagctttcgatttgatggagccgcgagtcggaaacaagtttcggctcggaaggaagatcggcggtggatcattcggagagatctatcttggtaccaatatccagacgaatgaagaagtggctattaaacttgaaaatgtgaaaactaagcatcc

SEQ ID NO: 89256 - DNA, 1102 bp, Arabidopsis thaliana columbia
  unsure (1)..(1102): unsure at all n locations
caaaaaatagtaaattgcaaaagaaagaaaatcgaaaaggttgtttgtaaaataattacaaaacataattagtggtgagaataaatctaaatataaggtacaagggggtgaaggggtgtgtgtctatatatgttggatgattagtttctgccatgtgctatggaatcaacctcttatgctttatgttctgtttagctcctaccttatactataactttaattattcatcaataattctaattctccttcgttttttaatatactagtgtttcatataaatactcgctctctctactcattccctccataacatatatttcttcttcgtttcattcataatcgtcttataaccacagattctaaaacatgggagaagaagtaaaaccagaggcaaaggaggcagcctctgctccacaggccgtccccgctgaggaggaggagaagaagaaagatgtagcggaggagaagaaagtggcggctgaggaggagaaaccaaaggaggaagaggagccgcaaccaccaccaccgcctccacccttcatactctacgtcgacttgcattgtgttggatgcgctaagaagattgaaagatctattctaaaaattagaggtgtggaagaagtggtgatggatatgaatgagaaccaagtgacgataaagggagtgttggatccgcaagcagtgtgcaacaaaatcaagaagaagactaaaagaatggccaaagtcctctcgccgcttccggcagctgagggagagcctctgccaccaatcataacctctcaggtctccggcggcctcaccaccgtcgagctcagcgttaacatgcactgccaagcttgtgctgaccagctcaagaagaagattctcaaaatgagaggggtccaaacaactgtgacagagcacaccacgggaaaagtaatagtgactgggacaatggacgctgagaagcttgtggattacgtctaccgtcggaccaaaaagcaagcccgaatcgtaccccaacctgacccggaacctgaagcccccnnnnnnnnnnnnnnnnnnnnnnnnnnnnnnnnnnnnnnnnnnnnnnnnnnnnnnnnnnnnnnnnnnnnnnnnnnca

SEQ ID NO: 89257 - DNA, 487 bp, Arabidopsis thaliana columbia
  unsure (1)..(487): unsure at all n locations
agaaatccctaagctcaagacgagttttcatttctcgagcaatttcactcttccgagaacaaccctagattccgatgatgaggggtctcgtttccggcgccaagatgctatcatcaaccccatcgtcgatggcgacaagcatcgccactggtagaagaagctacagtctgattccgatggttattgagcactcatcgcgaggagagagagcttacgacatcttctctcgtttgctcaaggagcgtattatctgcatcaacggtcccattaatgacgacacatctcacgtcgtcgtcgctcagcttctttacctcgagtctgagaatccttcgaagccgatccatatgtatctcaattcccctggcggccatgtcaccgccggtcttgcaatttatgatactatgcagtacattcgttctcctattagcacaatttgtttgggtcangntgcatcaatggcttctcttctgttggcagcgggtgccaa

SEQ ID NO: 89258 - DNA, 426 bp, Arabidopsis thaliana columbia
gcgctttacagtgaaggagttcccggactaaaatgcggatgatgaggatgagactactgaagaaactactgaatcgctggacagcctatccacatgacacataaaaggatgtctcctgagcacatgtgggacttcccttacagtattccttcttcgtgaaacttcccccttatataagactactgaaggtgcaagcaccgttgtaagatctgatgaagaagcttggaatggagacattcgggagagcagagaatatggaaaagctttatttttgtcagcaaaagattttgtgagtgggaatgatactgaagagtgaggagagagtggtgtaaagacggagggaagaaggaagcgaaagcagtgttccaagatggatgtctctgtttctgacaaaagctttgcatattctgagccaaagactaagca

SEQ ID NO: 89259 - DNA, 429 bp, Arabidopsis thaliana columbia
cccacgcgtccgggaagatcaaatcgggcaactgttatctgcattttggatacaatcagcacttcctgatatcttaccttcaaacattgaagctattgctcattcttttagcttggtgcttctgtccttgcgactaaagaatcctgatgacgggcttgttgttcgagccttccagcttctcttctcattgaggactctttcgttggaccttaataacggcacattaccctcagtttgcaagcggttgatccttgctttatccacaagtatgctgatgttcgctgccaaaatatatcagattcctcatatttgtgaaatgttgaaggcccaacttcctggtgatgtggatccttatcttttcattggagatgacttacaacttcacgttaagacacaggcaaatatgaaagattttgggtcctcaagcga

SEQ ID NO: 89260 - DNA, 603 bp, Arabidopsis thaliana columbia
  unsure (1)..(603): unsure at all n locations
ctaatacgactcactttagggaaagccggtacgcctgcaggtaccggtccggaattcccggtgtcgacccacgcgtccgattctctttggtgttcctggtgctttcactcccacatgcagcatgagccatgtgcctggattcattgggaaagcagaggagctgaagtcaaagggtatcgatgagatcatttgctttagtgtgaatgatccatttgtgatgaaggcatggggaaagacatacccagagaacaagcatgtgaagtttgtagcagatgggtctggagaatacacgcatcttcttggacttgagcttgacctcaaggacaagggtcttggtattaggtcaaggagattcgctctgttgcttgataaccttaaggtagactgtagccaatgtcgaatctggtggcgagttcacggtttccagcgcagaggatatcctcaaggctctctaagaaactttatcgtttcgctttgttgtattgtgaatctaaacctcctgtatgtgatgaagagnatttcctatagctttgattttcaaatcaccaagcatggtgttttnactttccntnngcnataataaaaggattttgatnaaacggt

SEQ ID NO: 89261 - DNA, 937 bp, Arabidopsis thaliana columbia
atgatactccaggtctctacgactcactattgggaaagctggtccgcctgcaggtaccggtccggaattcccgggtcgtcccacgcgtccgttcttaccataacagaaaataaacaaatctcattccggaaaacgctcataaattgtccgaaagccctaaaaatctgagtctcgcattaagtccaaacactttcatttgtctcctttcgtcaactccacagagatctcctcatggctccaattgctgtcggcgatgtcgtaccagacggaactatctccttcttcgatgagaatgatcaacttcagaccgcctccgttcactctctcgccgccggtaaaaaagtcattctctttggtgttcctggtgctttcactcccacttgcagcatgaagcatgttcctgggttcattgagaaagcagaggagctgaagtcaaagggtgtttgatgagatcatttgctttagcgtgaacgatccgtttgtgatgaaagcatggggaaaaaacatacccagagaacaaacatgtgaagtttgtagctgatgggtcttggagaatacacacaccttctcggacttgagcttgaccttaaagacaagggtcttggtgttaggtcaaggagatttgctctgttacttgatgatctcaaagtgactgtagccaatgtcgaatctggtggcgaattcacagtttccagcgccgatgatatcctcaaggctctctaagaaatgtaccacttgtgttgtctatgtaaaccgctgtatgtgtagtagaggattctatagcttgttctcagacattaaccaaggttgtaataaagcggtttcattgtgacttgtttggccaaaaaaaaaaaaaaaaaaaaaaaaaaaaaaagggcggccgctctagaggatccaagcttacgtacgcgtgcatgcgacgtcaaagctcttctat

SEQ ID NO: 89262 - DNA, 978 bp, Arabidopsis thaliana columbia
actcactatagggaaagctggtacgcctgcaggtaccggtccggaattcccgggtcgacccacgcgtccgcccacgcgtccgcccacgcgtccgcccacgcgtccgattctggaaacttcttaccataacagaaaataaacaaatctcattccggaaaacgctcataaattgtccgaaagccctaaaaatctgagtctcgcattaagtccaaacactttcatttgtctcctttcgtcaactccacagagatctcctcatggctccaattgctgtcggcgatgtcgtaccagacggaactatctccttcttcgatgagaatgatcaacttcagaccgcctccgttcactctctcgccgccggtaaaaaagtcattctctttggtgttcctggtgctttcactcccacttgcagcatgaagcatgttcctgggttcattgagaaagcagaggagctgaagtcaaagggtgttgatgagatcatttgctttagcgtgaacgatccgtttgtgatgaaagcatggggaaaaacatacccagagaacaaacatgtgaagtttgtagctgatgggtctggagaatacacacaccttcctcggactttgagcttgaccttaaagacaagggtcttggtgttaggtcaaggagatttgctctgttacttgatgatctcaaagtgactgtagccaatgtcgaatctggtggcgaattcacagtttccagcgccgatgatatcctcaaggctctctaagaaatgtaccacttgtgttgtctatgtaaaccccctgtatgtgtagtagaggattctatagcttgttctcagaccattaaccaaaggttgtatatataaaccggtttctcttgtttaaaaaaaaaaaaaaaaaaaaaaaaaaaaaaaaaaaaaaaaaaaaaaaaaaaaaagggcggccgctctagaggatccaagcttacgtacgcgtgcatgcgacgtcatagatctct

SEQ ID NO: 89263 - DNA, 847 bp, Arabidopsis thaliana columbia
gcactaatacgactcatatagggaaagccggtacgcctgcaggtaccggtccggaattcccgggtcgacccacgcgtccgagtccaaacactttcatttgtctcctttcgtcaactccacagagatctcctcatggctccaattgctgtcggcgatgtcgtaccagacggaactatctccttcttcgatgagaatgatcaacttcagaccgcctccgttcactctctcgccgccggtaaaaaagtcattctctttggtgttcctggtgctttcactcccacttgcagcatgaagcatgttcctgggttcattgagaaagcagaggagctgaagtcaaagggtgttgatgagatcatttgctttagtgtgaatgatccatttgtgatgaaggcatggggaaaaacatacccagagaacaagcatgtgaagtttgtagcagatgggtctggagaatacacacatcttcttggacttgagcttgaccttaaggacaagggtcttggtattaggtcaaggagatttgctttgttgcttgataaccttaaggtgactgtagccaatgttgaatctggtggcgagttcacggtttccagcgcagaggatattctcaaggctctttaagaaactttatcgtttcgcttgttgtattgtgaatctaaactgctgtatgtgaagaagagatttctatagcttgatttcaatcaacaagcatgtgtattgacttgcttggcataataaagtatttggttttaatgttaaaaaaaaaaaaaaaaaaaaaaagggcggccgctctagaggatccaagcttacgtacgcgtgcatgcgacgtcaagatcttctatagtgt

SEQ ID NO: 89264 - DNA, 1168 bp, Arabidopsis thaliana columbia
  unsure (1)..(1168): unsure at all n locations
tcgttgnnnnnnnnnnnnnnnnnnnnnnnnnnnnnnnnnnnnnnnnccgggtcggccgcgcgtccggttttcacactctctcctagggttttatctgcgaagcccaatctagagcttccatggcgacgcataccatttctcgatccattctttgccgaccggcgaaatctctttcgtttctgttcacgcgatcctttgcttcatctgctcctctcgccaaatctccggcgtcttctctgctcagccggtcccgtcctctggtcgccgctttttcctccgttttccgtggcggccttgtgtctgtcaaaggtctctcgacgcaggctacatcgtcttctctgaacgacccgaatcccaactggtcgaacaggccacctaaggagacgatcctgctcgatggttgcgatttcgagcactggcttgtcgtcgtggagccacctcagggtgagcctactagagatgaaatcattgatagctacatcaaaaccctagctcagattgttggcagtgaagacgaagctaggatgaagatctactcggtttcaactaggtgctactatgcttttggagcacttgtgtcagaagatctttctcacaagttaaaagagttgtcaaatgtgcgctgggttcttcctgactcttacctggatgtgaggaacaaagactatggaggggaacctttcatcgatgggaaggctgttccttatgatcctaagtaccacgaggagtggataaggaacaatgctagagcaaatgaaaggaacagacgcaatgaccgtcctcgcaacaatgatagaagcagaaactttgagaggagaagagagaacatggcaggaggccctcctcctcaacgtcctcccatggnaggccctcctcctcctccgcacatcggtggctctgcacctcctccgcctcatatgggtggctctgcacctcctccacctcacatggggcagaactatggtccaccaccaccaaacaacatgggaggaccaaggcatccaccaccttatggagcaccaccgcaaaanaacatgggaggaccgaggccacctnagaactttgggggaacancaccttcnactatggaggngcaccancagnaaanatcatngnggngngacaccacaaactttngtgggggccctccacttntttttggngggtt

SEQ ID NO: 89265 - DNA, 417 bp, Arabidopsis thaliana columbia
cagagaactcatcaaagacatcaactcttcccaagtctcctgagaaactaaaagctatgaatttcccaatctccacgatcaagattggcgactgtgtcttcgttgccaaaaaccctgatgacattgtggccaaattctattttgcaaagaagaaacttttatgggagtttctcttcggagaaccagtggctaacatgccgaggctgaagagtaagatcgagattcaatggaatgatgtctcatcttttgaagagagtattaattcacgtgatgaaactggaatcctcaaaatcgagttgaaaaaacgtccaacattcttcacagagactaatccacaggcaggaaaacacactcaatggaaacaattggattacgatttcaccggagatcaggcttcttattacaggagacatacac

SEQ ID NO: 89266 - DNA, 974 bp, Arabidopsis thaliana columbia
acgacagaaggggggaaagagcagaagaaatttgcagaagagagaaaaacaaaaatggcggttctttgctcgtcttcgacggtgatactctcttcttcttccgtgaaatcctccggaagtgagagaaagtctccgtttttagggttctctttaacggctatctcgaagccgtcggtacgagtcggcatttatgcgaattcgaaaagaggattgcaagtgaagtgtgaagctgagccgacgacgacgacttctcttgttccggcgaatcaacgatggatgttcgacgaagaagaagctaatggccctgacatctggaacacgacatggtatccaaaagcttcagaccatgtgaacacggacaagccctggtttgtggttgatgcaactgacaaaattcttggtagattggcatcgacaattgctaatcacatccgtgggaagaatcttgcctcttacactcctagtgtcgacatgggagcttttgtgattgtggtgaatgctgagaaagttgctgtatctggaaagaagcgtaaccaaaagctgtacaggaggcattcaggacgacctggtggtatgacagtagagacatttgatcaattgcagcagagaattcctgaaagaatcgttgagcatgctgttcgtggaatgcttccaaagggacggcttgggagagctctgttcaatcacctgaaggtgtacaaaggccctgaccatcctcacgaggcccagaaaccgcttgatctgcctatcagggacaagagaatacagctgcaaaaatagaagctccaccactgttccattatcgccaagcgcagagagttttttcttctcaggtttctgtagtttcttcatcccaaaaccagaggaggctttacagattcttgttttcgcttctatcaactctgttatgctacaaaactttctaatttgaaatatttctcgttaaaaaaaaaaaaaaaaaaaaagggcggccg

SEQ ID NO: 89267 - DNA, 1060 bp, Arabidopsis thaliana columbia
  unsure (1)..(1060): unsure at all n locations
nnnnnnnctctcactagccgatgtagatccaatgctcatgatggaagatgagagcctcgtgtgggcgagcagtgacctgcgcgtgcggcttcagcatctaaatgagaaaatacctttgagttatgtttctgaaacagagagacagcatgctgtcccatcacaggtacagcgacatgtacttgcaggtatagcttctgctttaggcggtgtaagtgcaccatatgaaaagacctcacacgcgcatgaaagacctatcaccaattggctttgggcagccggttgtcacccgtttggaccattctcaaacgtctccctgatcagtcaaatgcttcaagatgttgcactgaggaatactatttatgctcgggttgattctgctctacgcaaaatccgtgaaacatcagaggcagtacaaaactttgcatccgaataccttaagactccacttggcgagccagtgaaagataaaaagaacaaaaccaaaacggagctatgggtcgagaagttctacaaaaagacaacaacattgcctgagcctttcccacacgagctagtcgaaagattagagaaatatctagacactgtagaagaacaactggtggatctatcttctttgctatacgaccacaagctatacgatgctcacctcaacagctcagagattcttcaaaccaccatgtttacacaacagtacgtagaacatgtactggaaacagaaagggagaacatgagatgctgtaagatagagtacaaatacacagttggagtaaagtcttaccagacgttggtgtacggaggaatacttgtggctggttttctcgtttatttccttgtcattttcttctcttctcctccttctcgctagcctacaccttggtatttacggtctactagatttttgtaagtgtaacaatttcttgttgaagacttactttttatgaactaattttttcgtctgataaaaaaaaaaaaaaaaaaaaaagnnnnnnnnnnnnnnnnnnnnnnnnnnnnnnnnnnnnnnnnnnnnnnnnnnnnnnnnnnnnnnnnnnnnnnggaatca

SEQ ID NO: 89268 - DNA, 553 bp, Arabidopsis thaliana columbia
cgatacgtcagctctattccacttaattttagggaaggctggtccccctgcaggtcccggcccggatttcccgggtcgacccacccgtccgtttcatttcaaagacaacatcaacgatgatccgtacaacagtttagcttcttgggtctctaatgctgacctctgtaacagcttcaatggtgtatcttgtaaccaagaaggattcgtcgaaaagatcgttctttggaacactagtctcgccggaaccctaacgccggcattgtctggtttaacttctttaagggttttgactctgtttggcaacaggattacaggtaatttacctttggattacttaaagttacagactttatggaagatcaatgttagttccaatgcattgtctggtttggttcctgaatttatcggtgatttgcctaatttaaggttcttggatttgtcgaaaaatgcgttctttggagagattccaaattctctgtttaaattctgttacaagacaaagtttgtttcattgtctcataacaatctctcaagatcaatccctgaatcaatc

SEQ ID NO: 89269 - DNA, 488 bp, Arabidopsis thaliana columbia
  unsure (1)..(488): unsure at all n locations
ccctcgcgtccgatcttcttcctcaatttcttcttctacttctcatctcttttctgttcttctttgttaaacccaatctgggtctatcatcgtcttcgaggagcctgcgtgctagggtttctccgccttcttccttcccttattttagatctcaaaaggtagaagcagctcattacaggaaccatgatgtcctttgaaatgaatgaccggaaaaaaatcgggttaggcctgacaggatttggcgtattcttctcgtttttgggaatagtctttgtctttgataagggattacttgccatgggaaatattcttttcatctcgggggttagtctaaccattggcttcaagtctaccatgcagttcttcatgaagcgtcaaaattataagggaccatctcttttggcgtcggtttcttctttgtaatcatcgggtggcctattttgggaataaatgtttngngncnatnggctttttccgaaccncttcat

SEQ ID NO: 89270 - DNA, 671 bp, Arabidopsis thaliana columbia
  unsure (1)..(671): unsure at all n locations
gannnnnnnnnnnnnnnnnnnnnnnnnnnnnnnnnnnnnnnntacgcctgcaggtaccggtccggaattcccgggtcgacccacgcgtccgtgaaaattagggttttttgggggattctcgtgtggataaagccatggctgaacgagaagacgcagcagaggtttctctttcagtgagaaacgaggaagatctttctcctgaatgtgtagcttgggctgattcttgcatcatcagttttctagatgattcagacaacaataattggggaacttttagagatgctttaacagaaatcatcgatatccatcccgagatgtttgttttttcatcaacaacgggaacaagaggtgtcctgtctccagacgaggttatgactgaatccgagactattgatctacggagatctgaaccagcagctggttcagcgaacagtagaactaattcatcgaatgaagaagttagcgagattatctctatgctaacttttgaatcagacccgtcaaagaattgcttagaagattattattttccagagtctatagcagagaatggaaaccgtgaaccagcggacggttctaagacagatctgggaggtgttgaaagtatagaagaagatgggtcagtgagcaatggagaggctaaagaagaaaaaccagcgtcagtatcgtct

SEQ ID NO: 89271 - DNA, 433 bp, Arabidopsis thaliana columbia
atttatggcgcctcatgaaattcgccgtcctttcaagcgacgacctatctccgatcaacagaaacgccgagagctttctcttattcgtcagactcagcatcgcagtgatgctcagcagcgagcccgaaacctcgcctcttccttaatctcgctccaatcctcctctcccgatgtcgacccagagatactatctgaagccgtgcctgagcttgtaggaaccgaatcggaatcgagtagctttgacgttcgtcaagcttcgaggctcagaggacctgaggcacgcaagtggttcgcaaagcagctaatgttacctgaatggatgatcgacgtccctgataatttaagccaagattggtatgtgttagcaagaccagctgggaaaagatgttttgtagtttcatctgatggaacaactgttagtagagtacgaaat

SEQ ID NO: 89272 - DNA, 456 bp, Arabidopsis thaliana columbia
cccacgcgtccgaaaagagttaaagaaaaaatgggaatgggaaggtatcagaaatctgcaacttctggtgtttcagctagatgggtttttgttctctgtatttctagcttccttcttggtgttcttgtcgttaacaggcttttggcaagttttgaaaccgtagatggcattgagagagcttcacctgagcaaaatgatcaatctagatcacttaatcctcttgttgattgtgagagcaaggaaggagacattctatctcgagtttcgcatactcatgatgttatcaagacattagacaagacaatttcttctcttgaggtagaactagctacagctcgagcagcaagatctgatggtagagatggatctccagctgttgcaaaaacagtagcagaccaatcgaagattcggcctcggatgttctttgtgatgggaatcatgactgctttcagtagc

SEQ ID NO: 89273 - DNA, 706 bp, Arabidopsis thaliana columbia
  unsure (1)..(706): unsure at all n locations
attacttgtgtgtataattttattttattttgcaaacgagaagaagccagaatcaagtcgttaacccatgcctttcaattacccaatcacctaagatattttttttatattacttcctttgacaagttaatccacttccaaatatactataaagttgcacattgacaagaggttttagcagaagctagaagaagaaaggagaagaagaaacatagagagaagatgaagaatgttatgctgattattgacgagagcaacgcaagttatgatttactcatttgggcacttgaaaaccaaaaagataccattgagagctccaaagtttatatctttgcaaaacagccacaaaattcctttactcctcctaccgtactttcttcatcagtcggctttgctcaaatttnctatccattttcacctaattcagaactcataagattggctcaagaaaagaatatgaaaatngctttgggtatattagaggaagccaaggagntatgtttaaatcatgggntcaaggcaggngccatttnctgntgttgggggccctnaagntcctaatccgnaaggttattcaaggnccggaatntccaatttaattggttcgggggtcaccaaggctcaaaaggngtcccaanttcnggttgncctttcttgccgggagnnngctttggaagggtnagggttaggggttcaaattcccctt

SEQ ID NO: 89274 - DNA, 754 bp, Arabidopsis thaliana columbia
ttcccttctgcggtaccggtccggaattcccgggtcgacccacgcgtccgaaggagaagaagaaacaaagagagaagatgaagaatgttatgctgattattgacgagagcaacgcaagttatgatttactcatttgggcacttgaaaaccaaaaagataccattgagagctccaaagtttatatctttgcaaaacagccacaaaattcctttactcctcctaccgtactttcttcatcagtcggctttgctcaaattttctatccattttcacctaattcagaactcataagattggctcaagaaaagaatatgaaaattgctttgggtatattagagaaagccaagaagatatgtttaaatcatggggtcaaggcagagacatttactgatgttggagaccctaaagatctaatccgcaagataattcaagaacggaatatcaatttaatagttacgagcgatcaacaaagtctcaaaaagtgtacacaaaatacagattgttctcttcttgtcgtgaagaaaagacttcgcaaagattaaagattaaggaagttacaaaattcaccaatatatataattttctatgtggttaattgagattgtgtaatgatttggggttgtagtttcaggtgttgatttggggttgtagtttgaacttataatggtgttatgtgtataaatatttgtgtttatatatatcaagttagtaaaaaaactataatttcttaaaaaaaaaaaaaaagggcggccgc

SEQ ID NO: 89275 - DNA, 525 bp, Arabidopsis thaliana columbia
  unsure (1)..(525): unsure at all n locations
taccccaaactctaatacgacttacttatagggacagctggtacgcctgcaggtaccggtccggttttcccnngtggagccacgggtccacggacaccttgggttggctcattcgattattataggaggaaaccatggagctaaggaaatctcaagtggccatgcctgttttcttggcaataatgagtctaatggtgagtcaagtggtcttcgccgagaaagattcaggttcaatgtcccctcatgatcgggcattagcagaaatgcaagcccttaaagcttcattggttcggcgaaatctaccggctttggtatctcctcctcctacccctcctcaggccgtacccggtccgcgcgtgtaccaagtgatatcatatggtgccgatcccacagggaaattggatagcacggattcaatattaaaagctatggaagaagcatttgatggtccaaatcatggagttttgatgcaaggtataaatgatctcggaggagcaagaattgatcttcaaggtggaagctact

SEQ ID NO: 89276 - DNA, 516 bp, Arabidopsis thaliana columbia
  unsure (1)..(516): unsure at all n locations
nnnnnnnnnnnnnnnnnnnnnnnnnnnnnnnnnnnnnnnnnnnnnnnnnnnnnnnnnnnnnnnnnnnnnccacgcgtccgaggatctcctccgaagatttccactattactggaagtgatatagatacgttgcaacaaagaagaccacacaaaaacgttattgagcagccgtgaaatcgatttaccaattgaagcttccccccatgatttgactttccctgatgctcgtttgtgggaaagggtttctaaagtgcagagcacctggagttccattcttttgtgacaaaagaaaatccttcttcactaaaactaagaggggctttcacagtttacctttgggcactggggtccgtgtttatttcaacaacaatcttaggtactcaagcaattcaatagaagttgtggagaaagctgccattaatatgggttcaaaggaagacaaggcagataatccagctttatcttcatatgatgatgccatggaagctctgtcgactcttatttctcgtcgaaacc

SEQ ID NO: 89277 - DNA, 437 bp, Arabidopsis thaliana columbia
acgcgtccgatcggcgaccaaaattggaaaatgtactcagcgattcgctcgcttccactcgatggtggacacgttggtggtgactaccatggacctcttgacggaaccaatcttcccggtgacgcttgtttggttttaacgactgaccctaaacctcgtctccggtggacaactgagcttcatgagagattcgttgacgccgttactcagctcggtggtcctgacaaagcgactcccaaaactattatgagaacaatgggagtgaagggtctcactctctaccacctcaaatcacatcttcagaaattccgcctagggaggcaagctggcaaagaatcaactgagaactctaaagatgcttcttgtgtaggggagagtcaggacacaggttcatcttcgacatcatcaatgagaatggcgcagcaggagcagaacga

SEQ ID NO: 89278 - DNA, 473 bp, Arabidopsis thaliana columbia
agataagaacccaccatggagttttaacatttttcccttcaaaaggcgaacgcttttgatttgtataaaagtcccacttaatcacctctctagcttctcattccatttccatctcctctcttttgttttctaagttgcttcaagagttttggatagtgtagcagagagattttaactaatgggtttataaaattttgttcttttgcgtgaacaagttgtcaacttctagacagattttctttttgaagtgttttcttgtcgaaattcttcttcttttggtcaaagaacgcaagattcttctgtagttcctctaaaaaaaatcctaatggagggttattcaagaaacggtgaaatctctccgaagctgcttgacttgatgattccacaagagagaagaaattggtttcacgatgagaaaaactcctggttttcaaaaacagaggggaaggagcttgagctaaagcttggaccac

SEQ ID NO: 89279 - DNA, 617 bp, Arabidopsis thaliana columbia
  unsure (1)..(617): unsure at all n locations
nnnnnnnnnnnnnnnnnnnnnnnnnnnnnnnnnnnnnnnnnnnnnnnnnnnnnnnnnnnnnnnnnnnnnnnnnnnnnnnnnnnccacgcgtccgggctttggaagtcacttgaagcgcaataaatttagaggctcttggatgccacgagatgatgctcttaaaaaacttgaggaaagaggagttgtcatacgctttgtgattggtcggagtgctaaccgaggtgatagcctagatagaaaaattgacgaagaaaatcgtgcaactaaagactttttgattcttgagaatcacgaggaagcccaagaagagttaccgaagaaagtgaagttcttctacagtgctgctgttcagaattgggacgcagagttttatgtcaaagttgatgacaacgttgacttggatcttgaggggatgattgcgcttcttgaaagtcgtcgtagtcaagatggtgcttacattgggtgcatgaaatctggagatgtgattactgaagagggaagtcaatggtatgagcctgagtggtggaaatttggggacgacaaatcgtatttccgtcatgcaactggttcgctggtaatactctcaaagaatctggctcagtatgtcaatataaaca

SEQ ID NO: 89280 - DNA, 763 bp, Arabidopsis thaliana columbia
  unsure (1)..(763): unsure at all n locations
gggggtagtatcgccgnnnnnnnnnnnnnnnnnnnnnnnnnnnnnnnnnnnnnnnnnnnnnnnnnnnnnnnnnnnnnnnnnnnnnccacgcgtccgcccacgcgtccgaaaaaaaaacacaaaagcggcgttgatttttttagattttccgacaagatttctcgtgagaagatttgtctgaatctttctttcgaagaggttttgagttaatttcaaaatggttttggagaaaaaatctgcattgttggaagatttgataaagaaatgcggcggttgtgcggtggtcgacggtggtttcgctacccagcttgagattcacggcgccgccattaacgaccctttgtggagtgctgtttctctcatcaaaaatcctgagctcatcaaaagggttcacatggaatatttggaagctggtgcagacattgtggttacttcatcttatcaggctacgatcccggggtttctttctagaggtttatcaatagaagagagcgagtctttgcttcaaaagagtgtagaattagctgttgaagctcgtgatagattctgggagaaagtgagcaaggtttcaggacatagctataacagagctcttgtagctgcatctattggaagctatggtgcttatcttgctgatggctctgagtacagtggtcactatggtgagaatgtaagtttggataaactaaaggactttcacaggagaagacttcaagtcttagtggaagctgggcctgatcttcttgcttttgaaaccatagcg

SEQ ID NO: 89281 - DNA, 449 bp, Arabidopsis thaliana columbia
  unsure (1)..(449): unsure at all n locations
aaaccgggggcgacccagcgnncgagcagccaacgacaggnancaaagtttaagtttttttacgagaaaatccttttgcggagagccaatcatggcggatggtgaaccacacgttgccgctgctggagttcccaagaagaggacgtttaacaagtttgccttcaaaggagttgatctcgatgctctcctcgatatgtctactgatgatcttgtcaagctcttctcttctcgtattcgtagaaggttctctacaggtttgacaacggaagccaatgggctctgattaagaagctgaagaaagcctaaaagggaggcaccccccatgttgagaaacccntaaaccacttnatcaacnccactttganggaacntngatncntccntcccntnaaaatgaattgggaancctcnctttggaattgnttctaaggaanagacttncttccccg

SEQ ID NO: 89282 - DNA, 720 bp, Arabidopsis thaliana columbia
ggaaaacgcaagctaccacagatttagagtttatccaccttatctttcgccgagatccaacaatggctgatgtggaaccagaggttgcagcagcaggagttccaaagaagagaacgttcaagaaattcgccttcaaaggagtcgatctcgatgctcttctcgacatgtctaccgatgatcttgtcaagctcttctcttcccgtattcgcagaaggttctctagaggattgacgagaaagcctatggctttgattaagaaactccgcaaggcgaaaagagaggcaccagctggtgagaagccagaaccagtgagaacccacttgaggaacatgatcattgtgcctgaaatgattggaagcatcattggtgtgtacaatggaaagactttcaaccaagtggagatcaagcctgagatgattggacattaccttgcagagttctccatctcgtacaagccagttaagcacggtaggcctggcgttggtgctacccactcctccaggttcatccctctcaagtgaagaccatacagagtctgtgttgtgctcttgttttgttagatctcattatgcaattatagggtcctccttctttgtctgttttgggaccattttgtctgtctgtacttctctgtttggctactctgctgcgattctctcttctttagatgagtctaaactcttgttccaatcctttaaagaagactcaaaacttttttgg

SEQ ID NO: 89283 - DNA, 904 bp, Arabidopsis thaliana columbia
  unsure (1)..(904): unsure at all n locations
agctggtacgcctgcaggtaccggtccggatttcccgggtggagccacgcgtccggacctctcagcagccaacgacagttatcaaagcttaagccgttttagggttttatccttttgctgagatccaatcatggcggatgttgaaccagaggttgctgctgctggagttcccaagaagaggacgtttaagaagtttgccttcaaaggagttgatctcgatgctcttctcgatatgtctactgatgatcttgtcaagctcttctcttctcgtattcgtagaaggttctctagaggtttgacaaggaagccaatggctctgattaagaagctgaggaaagcgaaaagggaggcaccacaaggtgagaagccagaaccagtgagaacccacttgaggaacatgatcatcgtccctgaaatgattggaagcatcattggagtgtacaacggaaagactttcaaccaggttgagatcaagcctgagatgattggtcactacctggctgagttctctatctcatacaagccggtcaagcacggtaggcctggtgttggtgctacccactcttccagattcattccccttaagtgaaaagcttctattggggaatgtgtttacttgctcgttatatgtggatctaagtacgtggatctcttatgtttttgaagctttataatgacattactttagaagctttctcaactctagctcttgcgttttcattatcatgttacaagaggatcttaaatcaaatcattttggatttttgttttgtttatgttgttataatttatttgggtttggttgnnnnnnnnnnnnnnnnnnnnnnnnnnnnnnnnnnnnnnnnnnnnnnnnnnnnnnnnnnnnnnnnnnnnnnnnnnnnnnnnnnnnnnnnnnnnnnnnnnn

SEQ ID NO: 89284 - DNA, 705 bp, Arabidopsis thaliana columbia
  unsure (1)..(705): unsure at all n locations
nnnnnnnnnnnnnnnnnnnnnnnnnnnnnnnnnnnnnnnnnnnnnnnnnnnnnnnnnnnnnnnnnnnnnnccacgcgtccgcaatcctccggtggtcactcgctaatctccgtttgatctcgccgacactcgagccttttaccgatgaaggatggagattccttaccaataagcacttcttccgtcgcggcgacgacggtgaccggaaagaaggaaaccggttattccgctctcttctcgaaaggccggtacaagttttgggccttagctgcgattctgttactcgctttctggtcaatgctcactggcacggtcaatctccgttggtctgccggtaacattaaccatttcaccgacgatctcgtctttcccatccacgaggatctcgatgttcttgaaatggaggagagggagaaagtggtgaagcacatgtgggatgtgtataacaatggccgtcgtatcagattacctagggttttggcaagaggcctttggaggctgcttacgggggggcttaccaattaatgaaccccaattntgggtttanggttccaattccggggtccnnaaggntgctnttcggnccnttttaaaagncccgncccggttattcccnggtttcgggnattaaaaagctttaaantttggcaaagggggggacntaatttaaccagggngnggttaangcttggggttgggaaatta

SEQ ID NO: 89285 - DNA, 380 bp, Arabidopsis thaliana columbia
cttgtcgcgtgggttggagagtagaagagatcttgattttggaagtgcagagagtttccagggcttcctcggtcaacttgagaagacatatgaccactgtagagtatatgtcagaatcttggaacctttgcaggctgtggaaatcctgaaacggcatttcacgttagttctaccgccaaatggttcctatatgcacatccctgatagttctacatggcaagaatgtcttatcttactgattaacttttggataagattagctgatgagatgcaagaggtaaaatcatctaatccaagtttggtggagaatcttaccttgagccctgaatgcattagcagctgttttactctactcataaaacttgtaatgtatgacagtc

SEQ ID NO: 89286 - DNA, 569 bp, Arabidopsis thaliana columbia
gatacgtcagctctcctaatacgactcactatagggaaagctggtacgcctgcagtaccggtcgggattccgggtcgaccacgcgtgcgcccacgcgtccgcaattttccgtttccgttactatctccgaacagcctctttatcgtctccttatttcttccatcatcaccgggtatacattgtggaatgcggagtatcgtgtatcactgaggaggaattttgatataccgattgatcctagaaaggaggaggaggatcaatcttcgaaagacaatgttagatttggttcagagaagggaatgagtgaggatttagggaattgtgttgaggaatttgagagactgagtcctcaggtgtttggagacttgtcacctgaagcgttgagttatattcagcttttgcagtctgagctatcttccatgaaagaggagctagattcacaaaagaagaaagctttgaggatagaatgtgagaaaggaaacaggaatgatttgttggattatttgcgttctttagatcccgagatggtgactgaggtatctcaactggcttcaccggaagtggaagaa

SEQ ID NO: 89287 - DNA, 837 bp, Arabidopsis thaliana columbia
gttggccgtcctgcggtaccggtccggaattcccgggtcgacccacgcgtccgctctttccttctctcaccgcgagagtaaccgagagacatgattctgataaactctaattctccgacgctaatctcagccgttagattcgtgggctcatctccgttcaccactcgggggctttctcagtccactgtctcaatctctagaaacaaaagcttcttcttccacttcaccgagacgaaggagaagaacgcaagaagagattatttgagagtatcaatcgtgtgtgacgcaggagggatgtttccggtggatccatgggctccaaccattgattcacagagcatagcatcacaactcttcgctgtatctctgtttccttacattggctttctctatttcctcactaaatccaaatcagctccaaaactcacacttttcggtttctacttcttgcttgccttcgttggagctacaattccagctgggatttatgctaaggtgcattatggaacatcgttgtcgaatgttgattggttacacggaggagctgaatcacttcttgctcttacccatttgtttatcgtggtgggtcttagaccagctctgaggaagtctccagatgatgatgatgataaacctggtaatgatgatgaaggtcccaccactcaagaaccaagggaattctccagtgtaggaaaaccaaaggtaaattttttaattatggaggttcccctggttttttaattagattatatattaggcgccgcccttctaattcccatttaaaaaaaaaaaaaaaaagggcggccgcctcaaaagaatccaggctaaggaaggggg

SEQ ID NO: 89288 - DNA, 534 bp, Arabidopsis thaliana columbia
  unsure (1)..(534): unsure at all n locations
atgatactgccagctgnnnnnnnnnnnnnnnnnnnnnnnnnnnnnnnnnnnnnnnnnnnnnnnnnnnnnnnnnnnnnnnnnnnccacgcgtgcgctcttcttcatcgtctcatcttcttcgtcttcttcattattaaccctaaatctagccgcaactacctctctctctaggtctctttctctatctccctctgtttactcccacagctctaaaagcgttttcgaatcgtcacacctggagaaggaagctaatcactttctcattttggaactttgaggagagatctgaaagtttttttttttttgttgttgttctggatcgttcctgttccactctcttcatcttccgatcatcgttattttcgaagctctctacaaacaaaatcgattttttttctggttaatctaaagaggtgaccgaaagaagaaaacttttacgttttgcatggagtaagaatgccagagttaagaagtggagcaaggagatcgagacgccttgacgagcagcctaaccctccgctagttgaacaagca

SEQ ID NO: 89289 - DNA, 412 bp, Arabidopsis thaliana columbia
tccggacatgcttttttttctgaaggtaggagaaaagataaaacttattatattaattaatatattaattaaatcaaaatgaaagtttgaaactcatgtaattactctcttttgtttaatccaagaaaaacaaaaaatctataagaaatctcattcaattagacattcaattagatataaagttcaaagtaggttaaagttaaaaaactggtacaccaaaacaaaagagttggttgtcgagccgtatgaggtaggaaactctcaagtacggttctcagggagggaattgatccgcctattccgaccgtggagaacaggccattcaacaaggagattctgaaatggcggaggcttggttcgctccagccgctgagtattggaaacaggctataacgcttactcctggtaatta

SEQ ID NO: 89290 - DNA, 414 bp, Arabidopsis thaliana columbia
cttcaatgtgtgactctcggaaatcactcaaacatcgaggaattggaccggttaagttgttgttggataggtcaagaatagcaagagagcttccggtgctggtttcaagaggtatgtttcctgtgaaactattgttccatgcagataagaggccgatagagagtggtggttgaggaaatggtcctctaaaatggttataagccaaatctaaaagcctcaccgatgaattcactaaaacttcctccgaaccttctaaatcggtgaacaaattgttaaaaagattcactctgcggagacgaagaaggttccaaaaccactcagggactttcccttttattttattgttggaaaggtctatatgctccaatttcgtaaggttctttaagatggttgggaactcaatgaggccgcaac

SEQ ID NO: 89291 - DNA, 901 bp, Arabidopsis thaliana columbia
  unsure (1)..(901): unsure at all n locations
cggacgcgtggggtgaacaaaaaaagaagaataagaataaaagaaaatgtttgatggtggagtacctgagcagatccaccgtttcatagcttctccaccgccaccgcctccgcttccgccgcatcaaccggcggcggaaagatcactaccttttcctgtctcattctcttcctttaacaccaatcatcaacctcagcatatgttgagcttggatagccgtaagatcattcaccatcatcatcatcatcatcaccatgacatcaaagatggtggtgctactactggtgagtggataggtcagacggatcatgatgatagcgataatcatcatcaacatcatcatcatcatccatggtgtagtgatgaagttcttgctcttcttaggttcagatctacagtggagaattggttccctgaattcacttgggagcatacttcaagaaagttggcagaagttggttttaagaggagtccacaagaatgcaaagagaaatttgaagaagaagagagaagatatttcaatagcaacancaacaacaacaacaacactaatgatcatcaacacatcggcaattataacaacaaggggaataattatagggtatttagtgaggttgangggtttatcatcatggtcatgccaatgaccatgtttcatcaggaagtttgggggtacccaaancaaggngggccccttttngtaggnggggaaagggaaccgtgggggaancggtncaagcttnattggggggggccaaattnaggggnccggtccagggcaagttgggggnnctccttgggggttaaagaacccttttgggttggaaagttggaccgtgnggttttccnggcanttctcctcagnttttgttcctntggggggngngtgnnggngaggaaa

SEQ ID NO: 89292 - DNA, 608 bp, Arabidopsis thaliana columbia
  unsure (1)..(608): unsure at all n locations
atgatacttcagcgtctctacgactcactatatggaaagctggcacgcctgcaggtaccggtccggaattcccgggtcgacccacgcgtgcgggagcttctctgctcaccaacgtctctttcctcctccttcgctctctcttctgctcttttagtccctcgttcgttctccatgccagggacaaggagattcatggttctgtgtagttcccagaaggaaagtcagatgacagtgtcagtaactggagcaactggattcatagggagacgattggttcagagacttcgtgctgataaccacgctatccgggtcttaacacgctctaaatccaaagctgagcaaatatttcctgccaaggacttcccaggtattgtgattgcagaagaatcggagtggaagaactgtgtacaaggctctactgctgttgtgaacttggcaggactgcctattagtacaaggtggtctcccgagatcaagaaagagattaagggcagccggatccgtgtcacctccaaagttgttgacttaatcaataaattcaccagcagaggctacggcctaccgttcttagtttaggggcccacgggtttnttgggtaannanngggg

SEQ ID NO: 89293 - DNA, 529 bp, Arabidopsis thaliana columbia
agccaaaattacactgtaaatttggcatttcgagaagaagaagagggagtgatggaattgcaaggagaggaaagcaaaacggcgacgtattgcgtgacgggtgcaagtggatacatcggttcttggttggttaagtctcttctccaaagaggttacacagtccatgccactctcagagatcttgcaaaatctgaatactttcaatctaaatggaaggaaaatgaacggctcagattattccgagcggatcttcgagatgacggcagctttgacgacgccgttaagggttgtgacggcgtcttccatgtcgccgcttccatggagtttgatatctcatcagatcacgttaatctcgagagttatgtccagagcaaagtcatagaaccggcgctaaaaggcgtacggaatgtacttagttcttgtctaaagtcaaagtcagtcaaaaagagttgtcttcacatcatccatcagcactctcactgctaaagatgagaatgaacggatgagatctttcgtggatgaaacatgc

SEQ ID NO: 89294 - DNA, 541 bp, Arabidopsis thaliana columbia
cagctctctacgactcactttgggaaagctggcacgcctgcaggtaccggtccggaattcccgggtcgacccacgcgtccgcccacgcgtccgtcttcctcgaactctcttcttctttctctcttactttgtgtttgctctgttttgctctcttaacacaacacaaaaaatgtccatcgttgttggccaagcttaccaacatcttcccaagcaagtaagccaaaatcctgacgtgggtggatggagtttcttgcaatatttctctgagccaaaaggcattgtccagaacagagaagacgacacaaagaaaacagcttatgtctacccgatcgagaagcgttccgtagctaaactgagccttgagatgtgcacagagagcctcgggaccgagaatgggagtgatagtggagacgagatgtcgttacttgcgcttgaagcaaccaatatttcaaagagtcctcgtcttactacgaaacctcaaaaagaaactagcttcatgacccgtgagaacagttttcctccgccgctaaactccgtcaac

SEQ ID NO: 89295 - DNA, 1142 bp, Arabidopsis thaliana columbia
  unsure (1)..(1142): unsure at all n locations
atgattttcgccnnnnnnnnnnnnnnnnnnnnnnnnnnnnnnnnnnnnnnnnnnnnnnnnnnnnnnnnnnnnnnnnnnnnnnnccacgcgtccgtgggggttcatccaaaggagtattgaatcagaacaatgagaatgggggtggtgaggcagctaatgtcagtgtcgataacaaagaggagatagagagagaaacaaaagaaagcagcctacatcttgaaagccatccagcccataaggacaatgtgagagaagccccccataactctagacctttagttgagggacctgggaaagacaactcagaaagagagggtggagagctacaagatgatggtgctgttcataaatctcgaaatgttgatgtgggtgatgccctaatcagccaatcgccaaaagatttgaaattgcttcgagataaggtgaaggctaaacgagagaaagctaagaagttgctaggtgaaagaacgaggaaaaaggatttgatggatgaggatgatttgattgaaagagaactggaagatgtgcaactagctgttgaggatgaaaagacgaaggaaaggaaagtacagagcaggccaaaggcggagaactctgatctcatgggtacagaacatggtgagattttagatgttaaaggagaagtcaaaaatacagaggaaggtgaaatggtaaacaacaatgtgtccccgatgatgcatagcagaaaaaaaaaaatgggaagccctcctgaaaagcagtcagaaggaaagagacgccccaatagtgagaaatggggaagaaacccataagacgaccagaggtagtagccatcatggtggatagagagcacagaagacactcacaagagaatacccattcataagagaggtaatgattattaaaactgctactctttgtatcccatctaaatggtctttttaaaagacctttggcacttcgatgcccaaccatgtgaacttgacttctacatgggtcggttcagtcgttggaaccatgctctctgtattttatgttgattatatatctattcgtggcatttttgcacaaaaaaaaaaaaaaaaagcnnnnnnnnnnnnnnnnnnnnnnnnnnnnnnnnnnnnnnnnnnnnnnnnnnnnnnnnnnnnnnnnnnnnnnnnnna

SEQ ID NO: 89296 - DNA, 501 bp, Arabidopsis thaliana columbia
  unsure (1)..(501): unsure at all n locations
tnnnnnnnnnnnnnnnnnnnnnnnnnnnnnnnnnnnnnnnnnnnnnnnnnnnnnnnnnnnnnnnnccacgcgtccgacagaatagcagagatcgaaggaaagattcactttgggtatacacaaaaaacgtatgcttatgacccaaagcaaggtgaatgggaatgctgtgaaggcgaggttgcatttccgaggtcccaatgtgtgatggagagtgtattgtacacctttgctaataactacacttgggaggacgactacgggtgcaagtggtggtcaacggatggatatggggaaaacgtaaaagggttggagtcactttttgagatacacaagaggaatgggggctcaagtgagtataccacctaactaggtgcctggggggggaaactcttacttttatgggaagggttcctgaagccttatccccatattacgaggaggattgggggcgcggtatcgcgtaaaaaaacctaatgaaggtaaggttggggaaatggttaa

SEQ ID NO: 89297 - DNA, 558 bp, Arabidopsis thaliana columbia
tagacccacgcgtccgattcttcttcaacccgaccaaatacacatccgacggggaaaaagagttccgacaagaatcgagaactgaaagatttgtcatttgtctctcaaatatctgtggagagaagagaaattggaataaagaagacagtgttgtgagagagagagagagagagagagatgagttcgtctctacctctgaggctacttcttcctcttacaacttctctgatttctcctcctcctcctcctccagattctttccatgctccttcgtcgttcagatcgaaaaaccctaatttcaaacgccgattgtcttcttcttcctgttgttcttcccagtcgcagcttttctctgggagatgcagatcctattcgcggtgtgttaccatgtgcttaccagaacacatgagaaatcaagagaacacagaaatcttgacagataaagatgaccacattgaatgtgtgcttgaatcggatgaagattctggcctcaggattccgactcaagcacaggctatcgttgaaggatctggttcagttgcagtgtcaaagcttaaa

SEQ ID NO: 89298 - DNA, 639 bp, Arabidopsis thaliana columbia
  unsure (1)..(639): unsure at all n locations
nnnnnnnnnnnnnnnnnnnnnnnnnnnnnnnnnnnnnnnnnnnnnnnnnnnnnnnnnnnnnnccacgcgtccgcccacgcgtccggtgagtggcaagaccgtgtcatcaacacaacagtcagagctcaagcagacaatcaccaagtgggaaaaggtcaccacccaatttgttgagaccgctgcttcttcaagttcatcgtcatcctcatcctcatcctcatcctcatcttctgctgcttctcagcagcagggcaatgcagcaatggtcaagactaattgagtttaaaggtgaagttactttattgcgcaaaagatcaccaagaaagacacaaccagtaatgccaaatattataataagtagttaactattagataatttttcttgtaaataaaactaagatcggtataggtaagcattgcatgcttataaaccgatgtatgcaagtaataactctgtaaaaaaacgttacagatagattgtaaccgctttgtatgttaacatacaaaagtgagtgatacctatgaaagggatttttgaataaaaaaaaaaaaagaaagnnnnnnnnnnnnnnnnnnnnnnnnnnnnnnnnnnnnnnnnnnnnnnnnnnnnnnnnnnnnnnnnnnnnnnnnnnnacaatc

SEQ ID NO: 89299 - DNA, 266 bp, Arabidopsis thaliana columbia
ggtaaccaattgagcatgacttgtttgaggaatgggaaatcagcatcttacattttggcaaatccctcggattcacggattaatagcttatgtgttcagctttgccgttgatttactgatttttagaaatatgatagatacagtgtagagtgtgtttgtgtacataataatattttttcttgcttattatgtgtatgttttatagaggcccttgttcaataaataatacaatgttttcctaaattactataacggtgctttgctac

SEQ ID NO: 89300 - DNA, 793 bp, Arabidopsis thaliana columbia
  unsure (1)..(793): unsure at all n locations
cctccgtccaaaaatctctgttgaagcataaggtcccgtgttttgtttactagatggaatgctctctgagatctttatctcctggaccatctattctagctaggttgtgacgattgtatctcttgcattgattgaggcggtgaacttggggctcggtgtgctccctggagtagatacctttgctcatatcgcagggtttgctacaggttttcttcttggatctgtgctctcaatccgtccccatgtcggatggatcaaccaaagacacggtcctggagctaaaccccacaggttcaagatatatcagggcatattatggtctatctctcttctcatcttggtcgctgggttcactgttgcattgatctctctcttcaacaatgtcgatgcaatcgaacattgttcgtggtgtcattatctttcatgtgttccaacatctaaatggagctgtaaccgagaaccagcctcttgcacgaccactctattaggtaaccaattgagcatgacttgtttgaggaatgggaaatcagcatcttacattttggcaaatccctcggattcacggattaatagcttatgtgttcagctttgccgttgatttactgatttttagaaatattattatgtacacaaacactctctacactgtatccatcatatttttttcgtgcttattatgtgtatgttttatagcacccgaaattaaaaaaaagnnnnnnnnnnnnnnnnnnnnnnnnnnnnnnnnnnnnnnnnnnnnnnnnnnnnnnnnnnnnnnnnnncnnnaagtgaattt

SEQ ID NO: 89301 - DNA, 741 bp, Arabidopsis thaliana columbia
  unsure (1)..(741): unsure at all n locations
gagtttctcgtcacttgtgacattgtcgtttgttctgagatctttaatctatatgacattattacaggtgtagatgtactctgatgatgtgcgtgactgggctggttgctcctgagtagtaacttgctcatacgaagggttgctacaggtttcttcttggatntgtgctcttaatccgtccccattacggatggatcaaccaaagaaacggtcctggagctaaaccccacaggttcaagatatatcagggcatattatggactatctctcttctcatcttggtcgctgggttcattgttggattgatctctctcttcaacaatgtcgatggaaacgaacattgttcgtggtgtcattatctttcatgtgttccaacatctaaatggagctgtaaccgagaaccagcctcttgcacgacgactcaattaggtaaccaattgagcatgacttgtttgaggaatgggaaatcagcatcttacattttggcaaatccctcggattcacggattaatagcttatgtgttcagctttgccgttgatttactgatttttagaaatattattatgtacacaaacacactctacactgtatctatcatatttttttcttgcttattatgtgtatgttttatagcggccgcgaattcctgcagcccgggggatccactagttttaaaacggccgcccccccggttgagcttccagctttgttccctttagtagagtgatttcaaagggcgt

SEQ ID NO: 89302 - DNA, 771 bp, Arabidopsis thaliana columbia
  unsure (1)..(771): unsure at all n locations
nnnnnnnnnnnnnnnnnnnnnnnnnnnnnnnnnnnnnnnnnnnnnnnnnnnnnnnnnnnnnnnnnnnnnnnnnnnccacgcgtccgggcgtgctcgcctaacacagatggggaaatatttcacagcatacaggattgatcatatattgggattcttcagaatctgggagcttccagctcatgctatgactggtttagtggggaagttccgtccatctattcctttaagtcaggaagagttggaaaaggagggaatatgggattttgaccgcttaagcaagccctatatccagaagaagtttcttgaggagaaatttggagatttttggccttttattgcatcaaactttcttaatgaaactcagaaggacatgtatgagttcaaggaggactgcaacacagagaagaagattgtagcaaagctgaagtcattggctgagaagtctttgttgctagaaaatgaggacaaagttcgacgtgatgtctttgacattttacggaatgttgttctgatcaaagatccagaggatgcaagaaaattctatcctcgctttaatattgaggatacttcaagcttccaggatttggatgatcacagcaaaaatgttctgaagaggctatactatgactactatttccaacgccaagaggatctatggagaaaaaatgctttgaaaaccttgcctgctctgttgaattcatctaatatgctggcatgtgggggggatctgggtctcattccatcttgtgtacatcctgttatgcaagaacc

SEQ ID NO: 89303 - DNA, 665 bp, Arabidopsis thaliana columbia
ctctatcttgaaaaggagaaataaataattaatcactaagcgaaagagatttgatctaaagtaatacaaataaaccttgattgagattgtaaaggagaagagtttaaaagcatggatacagagagaggatcaataagttcatcagaaatatccagaactgctcatctacaagatagaacagttgcttgtcttcctccttcgtacggacaacttgtgaccattcttagcatccatggtggtggaatccgtgggatcattcccggcacaatcttagcttaccttgaatcacaacttcaggaattggatggtgcggaggcaaggcttgtggattatttcgatgtcatctcaggaacaagcaccggaggtttgatagtggcgatgttgaccgcacaagaccaaagcggtggccatagccgcaacagcaaccgccctttgtttgaggccaaagaaatcgtccctttttatctcaaacactcacccaaaatctttccacagccacgagggatattctgtggttggggtgaaaccatagtgagacttgtaggaggacccaagttcaacggtaaataccttcatgacttagctgaaggtttcttgggcgacacaaaattaactcagtctttgacaaacgttgtcataccttgcttcgacatcaagaaactcca

SEQ ID NO: 89304 - DNA, 648 bp, Arabidopsis thaliana columbia
  unsure (1)..(648): unsure at all n locations
ctcacgcgtccgcaccggctctgtatttcggcatttgtggagagaagaaggtaaagagagaagatagaaacataaaatgtcggagaagaagggaaggaaagaggaggtggtgaccagagagtacaccatcaaccttcacagacgccttcatagctgtacctttaagaagaaggctccaaaggcgatcaaggagataaggaagtttgctgagaaggaaatggggacaaaggatgtgagagtggatgttaaattgaacaagcagatttggagcaaaggtatcagaggtcctccgaggagaatcagagtccgagttgctcgtaagagaaatgatgatgaagatgcaaaggaagagttcttctctcttgtcactgttgctgaaatccctgctgaaggactctctggcctcggcactaagatcattgaagaagaggattaaactatcttatagtaacaacaacatttgatcagatttttcgagttttgtttttcgaatctttattggagagaacatttatcttcttgaatccttaagccttgaatcatagtatgcgattgagacaaacaaaaaaaaaaagnnnnnnnnnnnnnnnnnnnnnnnnnnnnnnnnnnnnnnnnnnnnnnnnnnnnnnnnnnnnnnnnnnnnnnnnn

SEQ ID NO: 89305 - DNA, 494 bp, Arabidopsis thaliana columbia
attaataagaataatcagtgcattttagagagaagatggagatagagattaccttcttcttcttcttcttttttgtcaaagagagagattaccttcttcataggaaaagatttctttcttcttctgcattccccaaattttatcttcccaagaaacccaacacagaagaaaatcttaaagtttagtgaattgtggtggagatgaaagttggagctccggcaagtaagccgggtcggatcattgttcaagtttttcttctacaacttcttcttcttcttcaaagtgttcattcacagagatcacaaaacaaacttaacatcacaaagcctggacaaaacataccagccttaacagttcagctaaggagagttggccatgatacggcggtagttgataatggtattgtccaagttactttctcgaacccagaaggcttaataactgggataaaataccatggtatcgataatgtgttggacgacaaaattgatgat

SEQ ID NO: 89306 - DNA, 392 bp, Arabidopsis thaliana columbia
cggacgcgtgggcggacgcgtggggaaatatccaagctttttactcgtaggcctgctttgcagagagccaatgttgctcagttagagtttaagttaagccttcttaagccactgggaatcacgtcttcagaccttgtgaagattcttaactgtcgtcctaggttctttagttgccgtcttgtccttgatgaaaggatcaactacttcatggagattttggggtcaaaagaggtgttgcgcagagtcattatccggaatccgtcactcatgttgtatgacctcgatgacaagatcaaacccgcgatagaatactacaaagggttgggctttagccaacaggatcttgtcgcaatgttgatatcgcgacccacgttgattccaagaacaaactt

SEQ ID NO: 89307 - DNA, 532 bp, Arabidopsis thaliana columbia
  unsure (1)..(532): unsure at all n locations
gccagctctnatacgactcactatagggaagctggtacgcctgcaggtaccagtccagaattcccgggtcgacccacgcgtncgaattgagcagcgggtaaagcaaaatcatctacgtttgggtcgggtttccgtgaatccggaccagagcctgaccgatgggctcgaggagtccttccttctggtggtggggttcaggaagagcgacgtcgtcttgtatttgaaccacgaaaggctgatacagaagtgagtgaaactccaactgctgtgaagacgagtaagccgagtccatttggagcagctagaccgagagagcaagttttggcggagaaaggattggactggaagaaacttgactcggatattgaggccaagaagggacaaacaagctgaccatcaagcgcgcaatcgagcagaccatcaagtgctcaatctaacaggtctgagagttcagcattgaacaatgtggagaatgtggtgaaaccgagaccaaaggtgaatccttttggtgatgcaaaacctcgggaagtat

SEQ ID NO: 89308 - DNA, 484 bp, Arabidopsis thaliana columbia
cgaatttcaaatcaaaatctctctctttctcttatctctaatggcgttgaggaacattgaaaacgctcttccgatctcacaggaacgacctaagaagctggccaggctctcaaagcaaccggagattggtctaaatgacgaaaacaaccctgtcgctgtggctgaatcgaccgtcgaatacgttgcttctgagaatctcaaaccattttcagatcctgaatcttctgtccagagattacttgaagaattagcatcaaaggattggattaaagtatgtgactcattgaacaacacaaggagatttgcaattcatcactcttctctgttgctaccaattctagaaaagcttatagttgtgatggtgaaggcgatgaagaatcctagaagtgcattgtgcaagacttcgattatgacttgttctgatatcttcactgcttatggagaaaagttgctggaaggacctcatttgaaatctatggacgat

SEQ ID NO: 89309 - DNA, 711 bp, Arabidopsis thaliana columbia
  unsure (1)..(711): unsure at all n locations
nnnnnnnnnnnnnnnnnnnnnnnnnnnnnnnnnnnnnnnnnnnnnnnnnnnnnnnnnnnnnnnnnnnnnnnnnnnnnnnnnnnccacgcgtccggaaagaacatcctgattctgttgcaagtgcagcgttaaaaagaaaggttgggaatgatgactttactgtcccggggcatattcgggttgaccagtttattcatggatcagcaagtcagtcccaagatattgaaactgtcaagttgatggaagaaaacaagaagctccgagcaaaatgtttggaccgcaaggtgcgaagtcagaaccttgaagtcaaggccatgaatcttaggagtgagctcgagaactataaaagtgagtatgaaaggttaatgttagagctacaagctttggatttggtgaaagacgagcacagaagaaatgtaaatacgtagaaacttcctctgcacttaaaaaaacactcttttttggctggtcgtatccatcttctaggtatgaaaactagagatccttagtttatgggctgtctcggaaagacaaaacaaaatgtgtaaaaacaggattcatgtttatgaatctttttgtctagaagattcagcaaagttatggaaaatatataactttctaaaaaaaaaaaaaaagggcggccgctctagaggatcccagcttacgtacgcgtgcatgcggcgtcatagctcatctatagtgcagctcaat

SEQ ID NO: 89310 - DNA, 684 bp, Arabidopsis thaliana columbia
  unsure (1)..(684): unsure at all n locations
acctgccggtagacaagcattaagtcctccttcaggcttccaagcagtttttccacaaggaaatacaacatctctccctagagtttcaactcagccagtgctgttggagaagaggaaagaacatcctgattctgttgcaagtgcagcgttaaaaagaaaggttgggaatgatgactttactgtcccggggcatattcgggttgaacagtttattcatggatcagcaagtcagtcacacgatattgaaactgtcaagttgatggaagaaaacaagaagctccgagcaaaatgtttggaccgcaaggtgcgaagtcagaaccttgaagtcaaggccatgaatcttaggagtgagctcgagaactataaaagtgagtatgaaaggttaatgttagagctacaagctttggatttggtgaaagacgagcacagaagaaatgtaaatacgtagaaacttcctctgcacttaaaaaaacactcttttttggctggtcgtatccatcttctaggtatgaaaactagagatccttagtttatgggctgtctcggaaagacaaaacaaaatgtgtaaaaacaggattcatgtttatgaatctttttgtctaggaaaanaaaaaaaaaaaaaaaaannaagggcggccgctctagaggatccaagcttacgtacgcgtgcatgcgacgtcagag

SEQ ID NO: 89311 - DNA, 388 bp, Arabidopsis thaliana columbia
agagtatcaatcaacttgacaaaaatcggaagaagaaacacaaaccgggggttttgaaacatggcgtctaaggtaatctctgccacaatccgcagaaccctaaccaaaccacacggcactttttcccggtgtcgctacttatcaaccgccgctgctgcgacggaggtgaattacgaggatgaatcgattttgatgaaaggagttcgaatttcaggtagacctctttacttagatatgcaagcgacgactcccattgatcctagagtattcgatgcgatgaatgcttcacagatccatgagtatgggaatcctcactcgcgaacgcatctctacggctgggaagctgagaacgccgtcgagaacgcacgaaaccaggtcgcgaaactga

SEQ ID NO: 89312 - DNA, 692 bp, Arabidopsis thaliana columbia
ggggaagaagaagctgaaaagagagagactaatcttcttcttcttcttcctctctgtatttttctcattctcttcgatttgtttgcttgctagtgactagtgagtgagagagtatggagagaagtactccggtgagaaagccacacacatcgaccgcagatctacttacttggtcggaagttccaccgccggattctccttcctccgcttctcgctccgccgttcgttcccaccagccatcggatgggattagcaaagtggtgtttggtggtcaagtcaccgatgaagaagttgagagcttgaaccgcaggaagccttgctcagaacataaaatgaaggagataactggcagtgggatcttttctcgtaacgaaaaagatgatgcgtcagagccattaccagtttatcagcaagcagttaatggtataagccagatatcatttggtgaagaggaaaatctatctcctaaaaagccggctactgtacctgaagtggcgaaacagcgagagctcagtgggactatggagaatgaatcagctaataagctacagaagcagctctctgatgctaaatacaaagagatcagtggacagaacatctttgcaccaccgcctgagatcaaacctcgatctggaactaatcgtgcattggctcttaaggacaatttcaacctcggagctgaatctcaaact

SEQ ID NO: 89313 - DNA, 602 bp, Arabidopsis thaliana columbia
  unsure (1)..(602): unsure at all n locations
cagctctatacgactcatatgggaagctggtcgcctgcggtaccggtccggaattcccgggtcgacccacgcgtncgagcagggttcatgagctaccagagtttgatgaagctaaaagaagctgcaggaggcgcttagctggacacaatgagaggaggaggaagatctctggtgacagttttggagaagggtcaggccggagagggtttagcggtcaactgatccagactcaagaaagaaacagggtagacaggaaacttcctatgaccaactcatcattcaagcgaccacagatcagataaaccctcccgctctctctcttctgtcatctacatatgctctatctacactcttattagacaaataatggcatctaacaatgtcaagaaaagttggtcatggtattaaatcctacacggatatataactataaacctctagtcccctctatgctgtcctgtaatgaatatctatccggaaatgtattcgcatagtcttgctctaaatgttattggnnnaaaaaaaaataatataaaaaataaaaaaggcgccgctctaagatcagcttacgtagggcatgcacgtcaagtctctaatgcact

SEQ ID NO: 89314 - DNA, 1045 bp, Arabidopsis thaliana columbia
gctctatacgactcacttagggacagctggtacgcctgcaggtaccggtccggaattcccgggtcgacccacgcgtccgcccacgcgtccgcggacgcgtgggcttcaacattgcttcctaaccagaaatccaccatcatcttcccacgaatacaacttaaagctttaccagaaaatggagggtcagagaacacaacgccggggttacttgaaagacaaggctacagtctccaaccttgttgaagaagaaatggagaatggcatggatggagaagaggaggatggaggagacgaagacaaaaggaagaaggtgatggaaagagttagaggtcctagcactgaccgtgttccatcgcgactgtgccaggtcgataggtgcactgttaatttgactgaggccaagcagtattaccgcagacacagagtatgtgaagtacatgcaaaggcatctgctgcgactgttgcaggggtcaggcaacgcttttgtcaacaatgcagcaggtttcatgagctaccagagtttgatgaagctaaaagaagctgcaggaggcgcttagctggacacaatgagaggaggaggaagatctctggtgcacagttttggagaagggtcaggccggagagggtttagcggtcaactgatccagactcaagaaagaaacagggtagacaggaaacttcctatgaccaactcatcattcaagcgaccacagatcagataaaccctcccgctctctctcttctgtcatctacatatgctctatctacactcttattagacaaataatggcatctaacaatgtcaagaaaagttggtcatggtattaaatcctacacggatatataactataaacctctagtcccctctatgctgtcctgtaatgaatatctatccgcgaaatgtattcgcatagtcttgcgtctaataatgtttattgattttgtaggtttgattataaaaaaaaaaaaaaaaaaaagggcggccgctctagaggatccaagcttacgtacgcgtgcatgcggcgtcatagctcaactatagtg

SEQ ID NO: 89315 - DNA, 428 bp, Arabidopsis thaliana columbia
gcttcagaggtgtttgaagtggcgccatcattgcatgtggtagttgtctttacggacattaaagcctaatggctttgcggtttcttccattttcgacattatttcactcgcagatcgttgagaagtaaaccgcgtttctttcttcacaagttgcgcttgcttctcgaacaagttttcaagactgaactcgcttgagctagagataagttcgaaagcgttcatggatacaggtttctccttcttctcagttacaagacattccttggagttactaaaagcagcatcaacatcatctatggttatgtcctcgtcatcttggtcaaatgatggcggcttggtaccctttcttgaaccattcatcttcgagcaactctgcaatacttattctggtaatagggttgggttcgagaatacgcttgatgactctc

SEQ ID NO: 89316 - DNA, 508 bp, Arabidopsis thaliana columbia
  unsure (1)..(508): unsure at all n locations
nnnnnnnnnnnnnnnnnnnnnnnnnnnnnnnnnnngagagatcgaagagtgaaatctgaaatggaatcagctccgacgggatgcttcaagtgtggtcgtcccggtcattggtctcgtgattgtccatcatcggctccggtcgccggcaataattccgtttcttcttcttccgctccatctcaaatccctaataatgaatttcagagatcctccagtaaaagtggaacctcaatagctcctgctcctaaagtgacgaagacgagagttcaaaggcccaagctaactcctgaattgttactctctgaggatggtctcggctatgttcttcgctatttccctaaatccttcaagtatcgtggccgaggcaaagaggtgagcgatttggggaatttgatacggttgtacagtgagtggcacactcatttgctaccttactattcctttgatcactttgtgcataaagtgcaacaagtcgcttctactaagcgtgttaagaattgtataaatg

SEQ ID NO: 89317 - DNA, 495 bp, Arabidopsis thaliana columbia
  unsure (1)..(495): unsure at all n locations
ttctataccctcactaaacatctcttataatattcgacagtgaagagaaaaatggtggatctattgaactcggtgatgaacctggtggcgcctccagcgaccatggtggtgatggcctttgcatggccattactgtctttcattagcttctccgaacgggcttacaactcttatttcgccaccgaaaatatggaagataaagtagttgtcatcaccggagcttcatcggccattggagagcaaatagcatatgaatatgcaaaaagaggagcgaatttggtgttggtggcgaggagagagcagagactgagagttgtgagtaataaggctaaacagattggagccaaccatgtgatcatcatcgctgctgatgtcatcaaagaagatgactgccgccgttttatcacccaagccgtcaactattacggccgcgtggatcatctagtgaatacagcgagtcttggacacactntttactttgaggaagtgagtgac

SEQ ID NO: 89318 - DNA, 1178 bp, Arabidopsis thaliana columbia
  unsure (1)..(1178): unsure at all n locations
gccaaattgganaaagtgttcancccgggttcaccgccattggggcaattgctttgatttccaaaaaggggccgaatttgtnttgttgccgagganagaccagagactgaggttgtgagtaataaggctaaaccagattggagccacccatgtgatcatcatcgctgctgatgtcatcaaagaagatgactgccgccgttttatcacccaagccgtcaactattacggccgcgtggatcatctagtgaatacagcgagtcttggacacactttttactttgaggaagtgagtgacacgactgtgtttccacatttgctggacataaacttctgggggaatgtttatccgacatacgtagcgttgccataccttcaccagacgaatggccgaatagtcgtgaatgcatcggttgaaaactggttgcctctaccacggatgagtctttattctgctgcaaaagcagcattagtcaacttctatgagacgctgcgtttcgagctaaatggagacgttggtataactatcgcgactcacgggtggattggcagtgagatgagtggaggaaagttcatgctagaagaaggtgctgagatgcaatggaaggaagagagagaagtacctgcaaatggtggaccgctagaggaatttgcaaagatgattgtggcaggagcttgtaggggagatgcatatgtgaagtttccaaactggtacgatgtctttctcctctatcgagtcttcacaccgaatgtactgagatggacattcaagtcgttcactgtctactgagggtacacgtagaagctccctcgttggcgtcgggtcaggtatgcctgtggatgaatcctcttcacaaatgaaacttatgcttgaaggaggaccacctcgagttcctgcaagcccacctaggtataccgcaagcccacctcattataccgcaagcccacggcggtatcctacaagcccacctcggtatcctgcgagcccacctcggttttcacagtttaatatccaagagttgtaataaaaactggatggaggaacaagaggtgaggtcggtttggtgtgtagagtgtagagtgaacttgagctttagaactttctctgaccaagtgaaccacaaaaaaagaaaagcaatgtaaaggacatcgagtcaagaataataccggatgatacaccc

SEQ ID NO: 89319 - DNA, 547 bp, Arabidopsis thaliana columbia
atgatacttcaggtctctacgactcactattgggaaagctggcacgcctgcaggtaccggtccggaattcccgggtctgacccacgcgtccggacgacgatatcgagatcgatccaaccaactctgcagctaacatctctaaggtttgattttccgatgatgagggtgatggagcctccgcctatcgaggaggcagctttggccccagtatcggtcttctgggacataaaatcgtttccggttcccgatggctatgatgctcgactggtgggtccgtgtatcaaacggaatttgaggaagttaggctacacaggtcctatcaccatcactgccgttggcgtactatcagaggtccctcgtgacatccttaaagcagtgtattccactggaatctctcttaaggaggtcattaaaagtccgacaaacatgtatgctcttttccttgagtcctctcttcttcgtactccacctccagctaatatgatggtcatatcccgtccaccatcctacattcctcgacacttctcttctatacgtgacaaggacc

SEQ ID NO: 89320 - DNA, 623 bp, Arabidopsis thaliana columbia
  unsure (1)..(623): unsure at all n locations
tactagttttctatattcttactttctttgtgaatgttttgtagaatgttccttatgtctttgtgccttcaaagcaagccttgggaagagcctgtggtgtgactagacctgttatcgcttgttcagtcacatctaacggagcttgtccatttgaattcccagattcaacatctcaaggtaacttagcccctccacttgctgtactctctttataacctggaaccatcattgattccacagaattggttaatcattaactctttttttacatttcttcaggatgctattgagaagcttctgatctaaggcattctctgaattgattgctcggtatgatgggtctccgcgaatgggaaggctttgactgaagttttgtttaggcaactaccaaatcaaaaaccgtccattattctactatcttctcttcaagtttgtaacgtaattcacttttctgcaacttggtttcttaagaatttgtgttggtttctggttttggtttgtagcgaatcattgtgttatttataagaacttgttttaataaaaaaaaaaaaaaaagnnnnnnnnnnnnnnnnnnnnnnnnnnnnnnnnnnnnnnnnnnnnnnnnnnnnnnnnnnnnnnnnnct

SEQ ID NO: 89321 - DNA, 491 bp, Arabidopsis thaliana columbia
  unsure (1)..(491): unsure at all n locations
gtcgtagcctctaaaaccctaatcctctctgaaaccctagacatcgcagctgaaaatgaccggagaagtcgtcaaccctaaagcgtatccgcttgcagattctcagttatcgataacaattcttgacctcgttcaacaagctactaactacaagcagctcaagaagggtgctaatgaaggtatccgcttgttactcatgtgtgtttgtctctcttatttattgagtttaatgtttgtgaagttgttcctgatttatttaaatttgttcatttcagctacggagactcttaatcgtgggatctccgagtttgttgtcatggctgcagatgctgagcctctagagattcttctttcaaccttcccctacttgctggagggtaagggtttgacttcttcctttcccctggggttccctttttatttatacaccccgttttttttagnaaattgnggtatttgtttcccagggtctangngggggttaagtttac

SEQ ID NO: 89322 - DNA, 753 bp, Arabidopsis thaliana columbia
gaaagtcgtagcctctaaaaccctaatcctctctgaaaccctagacatcgcagctgaaaatgaccggagaagtcgtcaaccctaaagcgtatccgcttgcagattctcagttatcgataacaattcttgacctcgttcaacaagctactaactacaagcagctcaagaagggtgctaatgaagctacgaagactcttaatcgtggaatctccgagtttgttgtcatggctgcagatgctgagcctctagagattcttcttcatcttcccctacttgctgaggataagaatgttccttatgtctttgtgccttcaaagcaagccttgggaagagcctgtggtgtgactagacctgttatcgcttgttcagtcacatctaacgaagctagtcaattgaaatcacagattcaacatctcaaggatgctattgagaagcttctgatctaaggcattctctgaattgattgctcggtatgatgggtctccgcgaatgggaaggctttgactgaagttttgtttaggcaactaccaaatcaaaaaccgtccattattctactatcttctcttcaagtttgtaacgtaattcacttttctgcaacttggtttcttaagaatttgtgttggtttctggttttggtttgtagcgaatcattgtgttatttataagaacttgttttgatatctaaaaaaaaaaaacccagcccggccgctatagaggatccaagcttacgtacgcgtgcatgcgacgtcatag

SEQ ID NO: 89323 - DNA, 1223 bp, Arabidopsis thaliana columbia
  unsure (1)..(1223): unsure at all n locations
accggccggaancccggnggaccacgcgtccgctaaactcaatatataatgataacacgttcacgtgttcatcgtcaaaagagtgtctcagtgagtacaatcttcaggtgtcttctagttttgatcagacgctctattcaattctcttaattagtcatatctttctttcttttttcctcgtttcgtgttaattttattttaaaacaaaggattaaagagtcgttctttcttttggtaacatggagccttaatgatcctttgttagctctagctaggattttacgtactacttagggtattcaaactaaaataaaatcaagaagaagagcagagagatggtgaggacaccatgttgcaaagaagaaggaataaagaaaggagcttggactcctgaggaagatcaaaagcttattgcttatcttcacctacatggtgaaggtggatggcgtactctccctgaaaaagctggattgaagagatgtggaaagagttgtagattgagatgggctaattacttaagacccgacattaagagaggagagtttagtcctgaagaagacgacactatcatcaagcttcatgctcttaagggtaacaagtgggccgcaatcgccactagcttggcgggacgaactgacaacgaaataaaaaactattggaacacaaatctcaagaagcggttgaagcaaaaaggcatcgatgcaatcactcacaaaccgatcaattcaaccggtcaaaccggtttcgaaccaaaagtaaataaaccggtatattcatccggttccgctaggcttcttaaccgcgtcgcaagcaaatacgcggttgaattaaaccgggacttactgaccgggatcatcagtggaaactccaccgtcgccgaagattcacaaaactccggcgacgttgattctccgacctccacattgctcaacaaaatggcggcaacatcagttttgatcaacactacgactacatattccggcttctccgacaactgttctttcactgatgaattcaacgaattctttaacaatgaagagatctccgatatttacacgactgtcgataattttgggtttatggaagagttaaagagtattttaagctacggcgatgccagcgccggagttattgaaaattcgccggaggtcaatgtagctgatgcaatggagttcattgattcctggaacgaagatgacaatatggttggagtctttgtctga

SEQ ID NO: 89324 - DNA, 391 bp, Arabidopsis thaliana columbia
ctgaatgagaatgtcagaaattgtcaatttgtcagcatctttgagatctttaaacccgaagatctcacctttggttcctccatatcgccaaacctcgagctctttctctcgaccgagaaacttcaaatatcattcttttaccgataaaatctgtttggcagcggagagaatccgagcagtcgatatccagaagcaggacggtggtttgcaagagctcgatgactcgccggtgtctgttgagctcggacctatctgtggtgagagccacttcgatcaagtgatggaggatgctcagaagctcggtgaatcagttgttattgtctggatggctgcttggtgcaggaaatgtatttacttgaaaccaaaactcgaaaagctcgctgctgaattc

SEQ ID NO: 89325 - DNA, 745 bp, Arabidopsis thaliana columbia
gagatagagagaagaatcatctcctatactctagctccaacaatggctaacaaaaacccacttcaaaaaccctttcttttcataatcttatcaatcaatctcatctttcttcaagcagaaacaactactcaaatctctaccaagaagacttatgttatccacatggataaatctgccatgcctttaccttacactaatcacctacaatggtactcttcaaagataaactctgtaacgcaacataaatctcaagaagaagaaggtaataacaacaggatactctacacttaccagactgctttccacggtttagcagctcagcttactcaagaagaagcagagaggcttgaggaagaagatggtgttgtagctgtgatacctgagacaagatacgagcttcacactacaagaagtccaacgtttcttgggttagaaagacaagaaagtgagagagtttgggctgagagagtcaccgaccatgatgtggtagttggtgttttagacactggtatctggcctgagagtgagagcttcaacgatacaggtatgtcccctgttcctgctacttggagaggagcttgtgaaactggaaaaagattcttgaaacgtaactgcaatagaaagatcgttggtgctagagttttctatagaggctatgaagctgcaacgggaaagatcgatgaagagcttgaatataagtcaccgagagacagagatggtcacgggacacacactgcagctactg

SEQ ID NO: 89326 - DNA, 465 bp, Arabidopsis thaliana columbia
ccacgcgtgcggttttctcctgcattctctctattcttcgctaaaccttgaataaagacatgttctttaacatgggtttttccggtttaaagtagtggtatctttgtttcccctttaaaccgggtttaagctcaatcttttcttagaacaactccaactgtttgacgatttgactgagagaaaacagagtcatggaagagacttttgtgccgtttgaaggaatcaagaatgatcttaaaggaagattgatgtgctataagcaagattggactggtggattcaaagctggatttaggattctggctcccaccacttacatatttttcgcttctgcgattcctgtcatctcatttggtgaacaactcgaaagaagcaccgatggagttctcacggctgttcaaaccttagcatctacagccatttgcggtatgatacattcgattatcggaggtcagccactgctta

SEQ ID NO: 89327 - DNA, 764 bp, Arabidopsis thaliana columbia
  unsure (1)..(764): unsure at all n locations
nnnnnnnnnnnnnnnnnnnnnnnnnnnnnnnnnnnnnnnnnnnnnnnnnnnnnnnnnnnnnnnnnnnnnccacgcgtccgcgaagaacatcatcgtcctcctccaaagaggagctttcatttccaaatctataattctctcacagatcaggatcaaacatgggtttccttataacaaccctaatcttcgtcgtcgttgggataattgcttctctatgcgttagaatctgctgcaacagaggcccctccacgaatctgctacatcttaccttggtcattactgcgacggtctgctgttggatgatgtgggcaattgtatatattgcacagatgaatcctctgattgtccccattctaagcgaaacagagtagattcctctactcagacaagaacaacctcaaactagaaaaagcatgcgcaaagtcagtcgagtaaaatccaatccttgtgtatcttcaatctttaaacagttttcttgtttgtaactcttatcttgagtgtgtcaacaaatctaaaaaccttttggcctctttactattttcaaattttcttgaaatcaccttctcattcattcttcaaaaaacaaagctggatctctcccttttgagattactccaaacactccaacaatgtattgttaatttaataaaagcttttcaaagtcaaaaaaaaaaaaaaaaaaaaagnnnnnnnnnnnnnnnnnnnnnnnnnnnnnnnnnnnnnnnnnnnnnnnnnnnnnnnnnnnnnnnnnnncagttaaatca

SEQ ID NO: 89328 - DNA, 660 bp, Arabidopsis thaliana columbia
  unsure (1)..(660): unsure at all n locations
atcccactcaccttaggggaagcacgtacgcctgcaggtaccggtccggaattcccgggttgacccacgcgtgcgcgcgcgcgtgggttcgtcttcttgatctaatcgctttgagctgttagcagagagcagtcgacaatcatgggtcactccaacgtctggaattctcatcctaagaaatacggtcctggttctcgcttatgccgtgtgtgtggaaactcccatgggctaatcaggaagtatggtctcaactgctgcagacagtgtttccgtagcaacgccaaggaaatcggattcattaagtaccgttgatgatcgatgttgttcacacaggagcatcatgtcttttgagttttaaactttgcgttgaacttgtaatcgatttatcgacattgaactaatttgattatgtttttgtgctgttgaatctacaagttactttgttctactattgcttataaggttatcagatatatttgcttaattgattagaagaaattcctattgaatgtaactgtaaattgttaaaacttacctggaagtggtggatgaatgatatgttttttacttttcaatttcataaannnnnnnnnnnnnnnnnnnnnnnnnnnnnnnnnnnnnnnnnnnnnnnnnnnnnnnnnnnnnnnnnnnnnnnnnnnn

SEQ ID NO: 89329 - DNA, 1068 bp, Arabidopsis thaliana columbia
  unsure (1)..(1068): unsure at all n locations
cgtcattagaaagtagccaggccacaaaagaaaaaaggtaaagagagagaccaatcacaggagataacgctaagataaggcttcttacatttaccatcacatataacataacgttactattattctaaaatccaaaaaaactatatgttataacattggaatcatcagtctctaagcagtatcacaccaactcaatatggctaccaccactgcagcagcagcctcaggtatttttgggatccggattcaagatcctagacctggaaccggtagggtccaagcccggttcgggttcagtttcggaaaaaagaaaccggctccaccgccaaagaaatcaaggcaggtccaagacgatggagacagactagtttggttccccggcgcaaacccgccggaatggttggacggatcgatgatcggagaccgtggatttgatccgtttggtttaggtaaaccggctgagtatcttcagtacgatttcgatggacttgaccaaaaccttgccaagaacgtggcgggtgacatcatcgggatcatccaagaatcttcggagatcaaaccgacgccgtttcagccgtacactgaagtctttgggatccaacggttcagagaatgtgagctgatccatggaaggtgggccatgcttggcactctaggcgccatcgccgtagaggctcttacaggaatcgcatggcaagacgccggaaaggtgcaatcggtggaaggatcatcgtatttgggacaaccattgccgttctcgttgacgacgttgatatggatagaggtgctagtggtcggatacattgagttccaacgtaactctgaactggatccagagaaacgggatttancccgggtgggtatttttaacccgttggggacttcgnggctgatccaaagaagttggntactttttaagcttggctgagnttaaacactctnngtctnggtattggngnattttttaatnttnnttttnaggggggcttttaaccggaaaaggcctttaantttcttttcnccctttaaaattngtaanaccctttttttttntttttaaaaaaanta

SEQ ID NO: 89330 - DNA, 529 bp, Arabidopsis thaliana columbia
ggtgcaacatgacaatagtgaactcaaatacttacaagccgatccaaaatcggacggtaaatcttggccatcaggaaacgatggacttcatgtagaagagggtggtgaatgttccttagatttcgcctaaaatattttccagtaaccaaacccggttcaatgttttcggtttcccgaacctgatactatttgttcagtttaaaagtcaacaacttttctcttgttgagtccacgtcggatggttttttgatacgccgtcggtcaagaatcacgtgtttggaactttgggtctctcatgtccccacgtggcgttatgtaattgggtaatgttaaattctctcggttttattaagataagattattcgtctccacggtgttacgtgttcccgacgctatcaaatcgttttcttagagcacgtatgtattttttatttttaaaaaaaaaaaaaaaagggcggccgctctagaggatccaagcttacgtacgcgtgcatgcgacgtcatagttcaactataggtcagctaaat

SEQ ID NO: 89331 - DNA, 755 bp, Arabidopsis thaliana columbia
  unsure (1)..(755): unsure at all n locations
cnnnnnnnnnnnnnnnnnnnnnnnnnnnnnnnnnnnnnnnnnnnnnnnnnnnnnnnnnnnnnnnnnnnnnnnccacgcgtccgcggacgcgtccgcccacgcgtccgcttggctctctgcggaggaaaaagagctagtgaggaagaagcgagaggagattgaagaagctgaacgagtaaaaaagagcaaagtggttatgacatttgatttaatcggccgtaaggttctgttaaatgaagatgatatctcagaactagaatcagggaacaggattctgggaccacctgagactaaaaacgtgaacagaataaaaccgaacccgactgcaagactcgttccaatcttcttagacccaggaccaaccgagaagaagccaaacagcaccaccaccaagaaagacaacaagaaaaaccgaaacggtttgtgtctagagatcacaggaagggtgcaacatgacagaagtgaactcaaatacttacaagccgatccaaaatcggacggtaaatcttggccatcaggaaacgatggacttcatgtagaagatggtggtgaatgttccttagattacgactaaatatttttcagtaaccaaacccggttcaatgttttcggtttaccgaacctgatactatttgttcagtttaaaagtcaacaacttttctcaaaaaaaaaaaaaaaaaagnnnnnnnnnnnnnnnnnnnnnnnnnnnnnnnnnnnnnnnnnnnnnnnnnnnnnnnnnnnnnnnnnnnnnnnnn

SEQ ID NO: 89332 - DNA, 523 bp, Arabidopsis thaliana columbia
  unsure (1)..(523): unsure at all n locations
tgatacgttnnnnnnnnnnnnnnnnnnnnnnnnnnnnnnnnnnnnnnnnnnnnnnnnnnnnnnnnnnnnnnnnnnnnnnnccacgcgtgcggggaaagtgttcgcctttaccgtcaaaacgaatcattgtgttgaacaaaatggaactcgcggatcctttggagttgaagaagtgtatagattactttgaagagagaaactatctttcgtatgcagtgaattcacataacaaagattgtgtcaattactgaactttttgcagagtcaagttagggaattgcataaggctggtcattctggtcatactactactatgatgcttcttgggattcctaatgtaggaaagtccgctctttcaaattctcttcatcatatcggaaggattagtgctgcagagaaaggtaagctaaagcatacaacagttagctcccagcctggagatactaaagacattatgagcttgaagatcgggagccatcccaatgtctatgtactggacacgcctggaatttttcctcctaat

SEQ ID NO: 89333 - DNA, 1058 bp, Arabidopsis thaliana columbia
  unsure (1)..(1058): unsure at all n locations
nnnnnnnnnnnnnnnnnnnnnnnnnnnnnnnnnnnnnnnnnnnnnnnnnnnnnnnnnnnnnnnngcggcgcgtgcggatcatcgccgggaaaccacaccagtctcaatggcgaaaactctatcccgatccaccgcctcatgcgtcgctaagcgtttcttttccacctccaatgccgtcgcctctccttctccgcttccttctcatctcatctctcgtcgattctcaccgacgatcttccacgccgtcggatacatcccagctttgacccgcttcacaacgatccggacccggatggataggtctggcggctcatattcgccgcttaaatccggatcaaacttcagcgatcgaccacccactgaaatggcacctctatttcctggttgcgattacgagcattggcttatcgtcatggagaagcccggaggtgaaaatgctcagaaacagcaaatgatcgattgctatgttcaaaccctagctaaaattgttggcagtgaggaagaggctagaaagaagatctataatgtttcgtgtgagaggtattttgggtttggctgtgagattgatgaggagacatcaaacaaactcgaaggacttcctggtgttctgttcgtgcttccggactcttatgttgatccagagttcaaagattacggagctgaactgtttgtgaatggagaagtagttcctcgtcccccagagagacagaggaggatggtggagttaacgaatcaaagagggtcggataaaccaaagtaccatgaccgaatcagaaatgtccgacggagggagaacatgcgttgactcttattattctcagactttacgctagagcaatcatttcgatttgatctccgatgcttttttttgttggtttgttcttttaatttgctagactcttaatgaataatgtatatgatggtgttttggtgatatcgaatgtatcaattgtttctgcaactaaaaaaaaaaaaaaaagnnnnnnnnnnnnnnnnnnnnnnnnnnnnnnnnnnnnnnnnnnnnnnnnnnnnnnnnnnnnnnnnnnnnnnnnnnnnca

SEQ ID NO: 89334 - DNA, 451 bp, Arabidopsis thaliana columbia
ctgagactttgaaaaaaacctgaggttgtagaatatagaacagagtttttcaagcttgttgtgggaactctatcggtcccgatcgatatcccgggaacgaattaccgcagtggagtccaagcaagaaacaacatcgataggttattgacagaactgatgcaagaaagaaaagagtctggagaaactttcacagacatgttgggttacttgatgaagaaggaagataaccgatacttgttaaccgataaagagataagagatcaagtggtaacgatcttgtattccggttatgagactgtctctacaacctccatgatggctcttaagtatctccatgatcatccaaaagctcttgaagaactcagaagagaacatttggctataagggagagaaaacgacctgacgaaccgctcactctcgacgatattaaatcgatgaaattcactcgag

SEQ ID NO: 89335 - DNA, 733 bp, Arabidopsis thaliana columbia
  unsure (1)..(733): unsure at all n locations
nnnnnnnnnnnnnnnnnnnnnnnnnnnnnnnnnnnnnnnnnnnnnnnnnnnnnnnnnnnnnnnnnnnntacccacgcgtgcgcggacgcgtgggcggacgcgtgggttgggatatactctgatgccgggactcttacctgcagccaaaccatgccgggatcactcgggcatgaagaacaagatgccaagacatttgcctcatgggggattgattacctcaagtatgataactgcgaaaatacagggacaagtccaagagaaagataccctaagatgagtaaagcgctgttaaattcaggaagatccatattcttctctctgtgcgaatggggacaagaggatccagcaacttgggcaggagatattggcaacagttggagaacaacaggagatatccaagataattggaaaagcatgacattgatagcggatcagaatgatcgatgggcatcttatgcaagaccaggatcgtggaacgatccagacatgcttgaagtgggaaatggaggcatgactaaggaagaatacatgtcgcatttcagcatctgggcattggcaaaagctcctctgctgatcggctgcgatcttagatcgatggacaaagttacatttgaattgcttagcaacaaagaggtgattgctgttaatcaagacaaacttgggatccagggaaagaaagtaaagaaagaaggtgatcttgaggtatgggcaggtccactaagcaagaaacgag

SEQ ID NO: 89336 - DNA, 460 bp, Arabidopsis thaliana columbia
gtttatctccagaatcaaagataaacggaggagaagagagcttcgtcgtcttcttcttcttcgcctccatgaatctcctcaagacgattcattaccagtctaccattactcgattttaccgttttgcccctacacgctcctttgcttcttctgtgtcactctctccacagagacacataatctctctcgtttctatctctaatcgtggaaggtgcttcgcattctcgagcgtctctggtgcttcgctttataataatcaagaggatgggaagaaagaagaatccgagagaaattacgcttcgacgaaggaaggagatgaagtggtttaccagaaaacgctgagattagtagaatgtgccatgttcgctgctgtgacaggcctcgtttactttctcagcaattctctcgccattgaggttaatttttcttgccttataattcccataaggacattggagta

SEQ ID NO: 89337 - DNA, 529 bp, Arabidopsis thaliana columbia
gatacttcagctctaatacgactcactttagggaaggcttggtcccccggcaggtcccggtccggatttcccgggtcgacccacgcgtccgcccacggcgtccgcaactttccattttcttaccaccgaagaagaagcagaaaaaaagtaaacaaagactaaaaaaaaaaagccagcatcttcggagttggtgggagagagacagagatggagaggagaaagattgtgatgtgtggtgttttatttcttcttggtttattatcagctgttactgccttcgtcgctgaagctactcgaatcaagagatctcaggtcacggttaccgtttcggattcaatcacaaaatgcacttatccaagaagtccagctttcaatctcggcttcacttcagctctctttctgatgatggctcagataatagtcagtgtctcaagcgggttgtttctgttgtagaaaaggtcctgcttccttcaaggtctaattggattatctccttaatctgctttggtggttcctgggtcacttttgg

SEQ ID NO: 89338 - DNA, 431 bp, Arabidopsis thaliana columbia
aacggtcacttcactaattccacatactcagagagaaatggcaaccgaaaccgtattagccacggcggtgagcaatggcaaaagcaaaggatgttgcaagtccggtccaggttacgcgacgcctctcgccgccatggccggtccacgggaaaagctcatctatgtcactgccctttactccggaacggggcgagacaaaccggactacttggcaacggtggatgtggatccaagctcacccacattttcaagcgtcattcacagactaaaaatgccatatataggagatgagcttcaccacactggttggaactcttgcagctcttgccatggtgatgcttctgctgatagacgttaccttgtcttaccaggcttaatttctggtcgcatctatgcaatcgacacagagaccgacccaaaggctccgtctt

SEQ ID NO: 89339 - DNA, 661 bp, Arabidopsis thaliana columbia
  unsure (1)..(661): unsure at all n locations
gatctcttagcaaagctccttgtgaacctcgtgaaatctgctgacaacgccttaaacgaagtccagctagtgaaagggtttgaatcggttttgaaaaccctggaggatgcagtaaatgatgctccaaaagcagcagagtttcttggtagaatatttgggaaaagtgtgacagagaaagtagtgacattgacagagattggtcggttaatccaggaaggaggagaagaaccaggaagtctgatagagtttggattaggcggcgatgttcttgggagtgttttggagatgataaaaacagaagctggagaagaaacgttggttgagattcgccggagctcaggtctgaggattgaaaatttcaaacctcatgcacctaaccggtctaagatattagagaaatttacttaggaaaaaaaaatggaaccatcttttgggttcctttcttcttctctttttttgtttctctcttaaaagtcttttctcttttcaagtgcttcaaacaaaactaatttgttataaagggagtttctctattttattatatagcaaaaaacttccaaaaaaaaaaaaaaaaaaaaaagnnnnnnnnnnnnnnnnnnnnnnnnnnnnnnnnnnnnnnnnnnnnnnnnnnnnnnnnnnnnnnnnnnnnnnnnnnnacatt

SEQ ID NO: 89340 - DNA, 530 bp, Arabidopsis thaliana columbia
  unsure (1)..(530): unsure at all n locations
annnnnnnnnnnnnnnnnnnnnnnnnnnnnnnnnnnnnnnnnnnnnnnnnnnnnnnnnnnnnnnnnnnnnnnnnnnnnnccacgcgtccgatcaatatttggttctactcctgcacatgggtcaactccaggatttagcattggtggatttaacaacagtcagtcatctccgctgtttggttcaaacccctcatttgcacaaaataccactcctgcattcagccagactagtcctttgtttggacagaataccactcctgcattaggacagtctagttctgtgtttggacagaataccaatcctgcacttgtacagagcaacactttcagtacaccttccactggctttgggaacacgttttcaagctcttcatccttaactacaagcatctccccctttggtcaaataacgcctgctgttacgccctttcaattcagctcagccaactcaaccattaggtgcttttggtttccacaactttggtcaaacccaaataggtgccatgggaacttttagccaggaaacttta

SEQ ID NO: 89341 - DNA, 420 bp, Arabidopsis thaliana columbia
ccacgcgtccgccttaatttcgtctccgtcagtagcagtctccgccgggaatattttttttccggtagctatgctccgaaccgtctcttgtttagcttcgcgcagctcgtcctctctattctttcgcttctttcgtcagttccctcgctcttacatgtctctcacatcgtcgacggcagctctccgtgtccccagtcgcaatcttcgccgaatttcctctccctcagtcgccggtagacgtcttttgctccgacgaggtttgaggattccctccgccgcagttcgcagtgtcaatgggcagttctctcgcctctctgttcgcgccgtcgccacacaacccgctccactttatcctgatgtaggtcaagatgaggctgagaagcttggatttgaaaaagtgtcggaagaattcatctcaga

SEQ ID NO: 89342 - DNA, 477 bp, Arabidopsis thaliana columbia
tctcaatcttcttcttcctcctcttactatcatctttctcttcctgttttacccattttatcttttgatcaaacttgtgctttgtcttcgtaagaaccttcacttcgaaaacgtagccagaaaagtagttctaatcaccggagcttcctctggcatcggagagcatgtggcatacgaatacgcaaagaaaggagcatatttggctcttgttgctcgaagaagggatcgtctagagattgtagcagaaacatcacgtcaattaggatctggtaatgtcatcatcatacctggtgatgtttctaatgttgaggactgcaagaagttcatcgatgagacgattcgtcatttcggaaaactagaccacctgatcaataatgctggtgtatttcaaactgttcttttcgaagatttcacacaaattcaagacgcaaatcctataatggacatcaacttttggggtacaacatacatcaccta

SEQ ID NO: 89343 - DNA, 867 bp, Arabidopsis thaliana columbia
ctcactatagggaaagctcggtcgcctgcaggtaccggtccggaattcccgggtcgacccgcgcgtgcgcccacgcgttcgaaaagagatggtgcgtctctatgtatggcagtggcaggcaaacaacaggcgttttccctcaggatgtgtggcactgtgagatatgtaaccgaaagcctggacgtggttttgaggcaaccgccgaagtccttccgcggcgtgtttaagattaagtatgagagtgggacgttagaagaactgttatatgtagatatgccaagggagtcccagaattcatcctggccaaattgtcctggagtatgcaaaagcaacacaagagagtgtctttgagcatcttcgggttgttcgtgatggccaacttcgaatagtcttctcgccagatcttaagatattctcctgggaattttgtgctcggcggcatgaagagcttattccacgaagacttttgataccgcaggttagtcagcttggatcggcagctcagaaatatcaacaagctgctcaaaatgcaacaacagattctgctcttccggagctacaaaataattgcaatatgtttgttgcatctgctagacaattggcaaaggccctggaagtaccacttgtgaatgatttgggatacacaaagagatatgttcggtgtttgcagatctcagaggtggtaaatagtatgaaggacctgatagattatagcagagaaacacgaacaggaccaatcgagagtttagccaagtttcctcggagaacaggcccttcatctgcactgcctggtccttctcctcagcaagccagcgaccagcttaggcagcagcagcaacaacaacagcagcagcagcaacagcaaca

SEQ ID NO: 89344 - DNA, 609 bp, Arabidopsis thaliana columbia
agctctaatacgactcactataggggaagctggtaccgcctggaggtaccgggccggaattcccgggtcgacccaagcgttcggccaagccttcgggcatcttcttcatctaaaaccctaagaaaacaacaatggcgttactctctcgaatccgttcatcaacatctctcttccgtcacctcaacgcatcaccacaaatccgatcactctcctcggcttcaacaatcctctcaccagattcaaaaactcctctcacaagcaaagaaaaaagcaaagcagctctctctcttctcaaatccgagaaagatccagatcgtatcctcgaaatctgccgtgcagcttctcttactccagattgccgcatagatcgaatcgctttctccgccgccgtcgagaatctcgccgagaagaaacatttctccgctgtatcgaatctcctcgacggattcatcgaaaacagaccagatctcaaatcggaacgttttgctgctcacgccattgttttgtatgctcaagctaatatgcttgatcactctttaagaggttttcgtgatctctagaaatttgaaattctttcgtactgtgtatatttttaaatgcgcctttctt

SEQ ID NO: 89345 - DNA, 708 bp, Arabidopsis thaliana columbia
  unsure (1)..(708): unsure at all n locations
tttgtttttcaagtaaaaaatactttgagaaacaaaaagagaaaactagtatgagaaacaaatccttaaaaaaggaaataacagtaatgcacgtgatgatataacaaaaggttttgttttgtttgtttttttattgtttttttcttcttttatttgtctgttataataatcaaaaaacaagaagaaaaaacgagacgttcatgcatttaatctcgcaccttacgacaaagagtgagagagaggatcgctcaggtttgttcatcttcaccggacgattagcttttgcggtgggagaaagaacggcctgtcttcagctctgaaacagaggaacagagaggttaggaaggagacaatggttggacccgcgcggcctcagatcgttttgtttggatcttccattgttcagatgagctttggccatggtggttggggcgccattctttccgaggtctacgctcgtaaggccgacatcattctgcgaggatattatggatggaactcttctcgtgctttggaagttgtcgaccaagtgttccccaaggatgctgcagtacaaccttctctggtcattgtctattttgggaggaaacgactcaatggcgcctcactcgtctgggacttagggacctcatgtaccactttactgaatatggttgttaacatgaaggaaggacccccttaatttttaanggccttttaagntcancc

SEQ ID NO: 89346 - DNA, 452 bp, Arabidopsis thaliana columbia
tgtttttctcactcactcgccgcttcctcttctcttcttctggttcacttctctcctaagtaataacaccactgcatgtttctctcttgagacactccaaaccatttctctccgaaaatgtctgctccttctggcggtggcgaaggaggaggaaaagaatcagctgctggtggagtgagttcatcgtctcttgctccgtcgtctctaccaccgcctcgtcctaagtctccaccagagtatccagatttgtacgggaaacgcagagaggcggcgagagttcagatgctcgagagagagattggttttctcgagggcgaaattaaattcatcgaaggcgtacaaccggcatctagatgcatcagagaagtctctgattttgttgttgcaaattctgacccattgatccctgcacaacgaaaaagtcgaagatccttccggttctggaagtggct

SEQ ID NO: 89347 - DNA, 542 bp, Arabidopsis thaliana columbia
agccacactttgcagtcccttcgcggtattaagtacctctacaagtacaatgtgttccagatcgggtttgttgtcctcgctggattgacctttttatattacattgcctttggatggagaagaaaaaagccgagcggcagattccagctctctacctaatgtaaatctcttcttttgattttatcgtttatgtttcctcgtctctgggatcgatcgcgtgccactgaggattgctgtgtccacaattataccgagattggtctcatgatctgtgcaagtggtcttatatcataagaacaagcacctgcccaaaaagcttctctttcttctgcttctctttgctgctgaggtttgttttcatttcacttgaatgtaaaattattcttctttttctcttatcttttctcctgtatctattgctttatttttgtttgattaattacaagaaagatctctttgtcgccgtcttctcatggcctattgaatgatttcgaatactttcttgtaaccattacttggttgagagtttagactgtcagaac

SEQ ID NO: 89348 - DNA, 569 bp, Arabidopsis thaliana columbia
  unsure (1)..(569): unsure at all n locations
aaatggcggaaaaatgtgaaagcagttgaaaaggagttgcgccaattgggggaagatgtgaactttttagaagagatgtatccgcaaggagagcaggcagagactgcttgggccttcactgtcctgggatacttggccaagtttgttcttggaatcttaggattgatcgtttccgtggcttgggttgctcacatcatcatatatctactcgtcgaccctcccctctccccttttctgaacgaggttttcatcaagctggatgacgtctggggtcttctcggcactgctgcctttgctttcttctgtttctacctcctacttgctgttatcgctggggcaatgatgctgggtttgaagctggtcttcattaacattcatccaatgaaatggggagcactcttatgaactcctttccccttaatggcgggccatccccccnggtcnaacaagtgngatcaatctggngcacgnattngnaatatgccaagcaacggcggncagngaaattggcanacttgaagccctcgnggataagacccacagnnaaggncaaacgggtgtgcccncgg

SEQ ID NO: 89349 - DNA, 1016 bp, Arabidopsis thaliana columbia
aagctggtacgcctgcaggtaccggtccggaattcccgggtcgacccacgcgtccgagaagatgtgaacctcttagaagagatgtatccgcaaggagagcaggcagagactgcttgggccttcactgtcctgggatacttggccaagtttgttcttggaatcttaggattaattgtttctgtggcttggattgctcacatcatcatatatctacttgttgaccctcccctctctccttttctgaatgaagttttcatcaaactggatgacgtctggggtcttctcggcacagctgcctttgctttcttctgtttctatctcctacttgctgttattgctggggcaatgatgcttggtttgaagctggtcttcattaccattcatccaatgaaatggggagccactcttatgaactcttttctctttaatgtcggtctcattctcctctgttctatcagtgtgattcaattctgcgccactgcatttggatattatgctcaagccaccgccgctcaggagatatttggccacactttgcagtcccttcgcggtattaagtacctctacaagtacaatgtgttccaaatcgggtttgttgtcctcgctggattgacctttttatattacattgcctttggatggagaagaaaaaaaactagtggccgtttccagctctcttcttaatgtaaaaccgttttcccggggatctgattgagtgctgtcgacaaagtttctacttgtttctggatcatcatcgattccagaagtatctagagactctgcttctgaggtttattttcctgaatgtattattaaatttcttgtgagtgtgctgtttggttgcgcaacagttagctgtcctgtcttggtctattgtactgtctcggatgcgatcatgtaatcatattttcttaatgagaagccttcttcgaaaaaaaaaaaaaaaaaaagggcggccgctctagaggatccaagcttacgtacgcgtgcatgcgacgtcatagctcttatagagt

SEQ ID NO: 89350 - DNA, 633 bp, Arabidopsis thaliana columbia
  unsure (1)..(633): unsure at all n locations
nnnnnnnnnnnnnnnnnnnnnnnnnnnnnnnnnnnnnnnnnnnnnnnnnnnnnnnnnnnnnnnnnnnnnnnnnnnccaggcgtgcgcccacgcgtccggaagaacacaacagtcagatactttttcttcttattttgtccgtaccgaaatcggaaaatggacattactgttcgaatctccggcttaaaatcctccaatctaatccggataacccctagattctcatcttcctctagattccgttgctccaacaacgaacctcctcgaaagggaaacgagtccaacggtggtggtggtgataaagcgtcgacggactgggacaaggcgtggaagaatttcaagaagcagagcaagaagtcattgttctcgcaattcaacgtggacaagtacgtgacttggaatcctcccagatcggagtttgatttgtcggaagaagtcgatcctataaaaagaacagagagatccaatctcatgctctggacaagtccaaggttcacacttgttggagccatcgncattggctcattcctccttctctacaccattcttgctcctgtcaagngataataatctcattcatctttcatttagatcagattctgaatctggtggttctactgggtatatgcatta

SEQ ID NO: 89351 - DNA, 430 bp, Arabidopsis thaliana columbia
cccacgcgtcagcccacgcgtccgcggtcgcgtgggttttaactttggctgctctgtctcaatccctcgagacttaaacccacttagtacaatctccatataatttgagtagaacctaaaagatcgaagcttgaggaaaatggtcccttccaatggcgcaaaggttcttcgcttgttgagtcgtcgatgtctctcttcatcgcttattcaagatttagccaatcagaaactgagaggagtatgtattgggagttataggagattgaatacgagtgttggcaatcatgctaacgtgattggagattacgcttcaaaatctggacatgatcggaaatggatcaactttggaggttttaatactaattttggttctacaagggcttttcattggaacaggttcttcggttatgtctgctaaggactactatag

SEQ ID NO: 89352 - DNA, 523 bp, Arabidopsis thaliana columbia
  unsure (1)..(523): unsure at all n locations
nnnnnnnnnnnnnnnnnnnnnnnnnnnnnnnnnnnnnnnnnnnnnnnnnnnnnnnnnnnnnnnnggggcccgcgtgcgccagtttcatagtcactaacctaaaagaattaatggaggaaactcggaggaggtttgtcatatcctctgttctaagtgtttctttgatctacttatgtctttcgacatgtcacgtttccgccttcgacttcggtagaaggcagctccggtttaatactgatggtcggttcaagatactgcaagtgtcagatatgcactacggttttggcaaagagacgcaatgctcagacgtttcacctgcagaatttccttactgctccgatctcaatactacctcctttttacagcgaactatcgcttccgagaagcccgatctcatcgtcttctctggagacaatgtatatggattgtgcgagacaagtgacgtggcaaaatcgatggacatggcatttgctcctgcgatcgaatggggattccatggggggctattttgggaatcacgacc

SEQ ID NO: 89353 - DNA, 697 bp, Arabidopsis thaliana columbia
gctttacaacaactccttgaccggaaaacttcctaccggattcggaaagttgaagaatctgtcttacgtggacgcttcaacaaatcttctacaaggcgatttatcggagcttaggtctctgactaatctcgtttcactacaaatgttcgaaaacgaattctccggtgagattccgctggagtttggtgaattcaaggatctcgtgaatctctctctgtatacaaacaagttaaccggttctctgcctcaaggactcggttcacttgctgattttgatttcatcgacgcatcagagaatctcttaaccggaccgatccctccagatatgtgcaagaacgggaagatgaaagctctgcttctcctgcaaaacaacctcactggctctatccctgagtcctacgctaactgtttgactctgcaacggttcagagttagcgagaacaacctcaacggaactgttcccgcgggactttggggattaccgaagctcgagatcatcgatatagagatgaataacttcgaaggtccaatcaccgcggatataaagaacggtaaaatgctcggagcgttgtatctagggttcaacaagttgtctgatgagctgcctgaagagataggtgacactgaatctttgactaaggttgagcttaacaataaccggtttaccgggaagattcctagctccattgggaaactc

SEQ ID NO: 89354 - DNA, 620 bp, Arabidopsis thaliana columbia
gggatgtaatgaacaaccaagaagtctgcgaaatagcaaggtgacggatattgatgtggcacaagaagaacggtgcaccgcctctagcagagagaggcaaaggaatagatccagcttgccaagccgcagctgactacctctcaatgcttgctctacaaaaaggaagtaaagacaacatctccatcattgtgattgacttgaaagctcaaagaaagttcaagaccagaacctgaagcttaattacaagcagtacgcttacttacttttttttttactgggggtaagtttcgagttttcgtataatttagatcgttaaggatctaatttcgacaggtttttacatgttaattactcaatattgttagaagggagaaaaaataaagaaaaaaaatggaaatgcgggttggggaggagaagtaaagactaaagactgaagattaagaagatgatgcatagctaattataagtccattcctttttttctcatggtacttgaattcgtatgtataagaagaaataggcagagaaatgctttttttttttggggtattgaaatagttgaatatgttgtaatagtttgagagatgtggcaaatgaaattgtaaaagaaactatgtccc

SEQ ID NO: 89355 - DNA, 1911 bp, Arabidopsis thaliana columbia
  unsure (1)..(1911): unsure at all n locations
atggaggagatgactcccgcagttgcaatgactcttagcttagcagccaacaccatgtgtgaatcatcacctgtcgagatcactcagctaaagaacgttactgatgcagctgacttgttatctgattctgaaaatccaagcttttgcaacggagggactgaatgcactatggaagatgtttctgaactggaagaggtaggtgaacaggatttgttgaaaactttatccgatacgagaagcgggtcttccaatgtttttgatgaagacgatgtattgtctgttgtggaggataatagtgctgtcataagtgagggcttgttagttgttgatgcaggctctgaattaagcttgtctaatacagctatggaaatagataacgggcgagttcttgcaaccgcgattatcgtaggcgaatcaagcattgagcaggttcccaccgcggaagttcttatcgcgggtgtaaatcaggataccaatacttcggaggttgtcattagattgccagatgaaaatagtaatcatctggtgaaagggagaagtgtttatgaactagattgtataccgctttggggcacggtttccattcaagggaatagatctgagatggaggatgcttttgccgtgtcacctcattttctgaaactacccatcaaaatgcttatgggggaccatgagggtatgagtccaagcctcacacacctcaccggtcattttttcggtgtttatgatggtcatggaggccataaggttgctgactattgccgagatagactccattttgctttggctgaagaaatagaacgtataaaagacgaattatgcaagaggaatacaggagagggtaggcaggtgcagtgggataaagtcttcacgagttgttttctaactgtcgatggtgagattgaaggaaaaattggtagagccgttgttggttcttctgataaggttcttgaggctgttgcgtctgagaccgtaggatcaactgctgttgttgccttggtttgctcatcacatatagtagtttctaactgcggtgattcgagggcggttttattccgtggcaaagaagccatgcccttgtcagttgatcacaaaccagatagagaggatgaatatgcaagaatagaaaatgctggaggcaaagttatacaatggcaaggcgcacgtgtttttggtgttctcgccatgtctaggtccatcggtgacagatatctgaagccatatgtgatcccagaaccggaagtgacattcatgcctcggtcaagagaagacgagtgtctcatactagccagtgacggtctttgggatgtaatgaacaaccaagaagtctgcgaaatagcaaggagacggatattgatgtggcacaagaagaacggtgcaccgcctctagcagagagaggcaaaggaatagatccagcttgccaagccgcagctgactacctctcaatgcttgctctacaaaaaggaagtaaagacaacatctccatcattgtgattgacttgaaagctcaaagaaagttcaagaccagaacctgaagcttaattacaagcagtacgcttacttacttttttttttactgggggtaagtttcggggttttcgtataatttagatccgttaagggtcctaatttccggccaggtttttaccatgtttaattaccccaatatttgttaggaggggggaaaaatttaagggaaaaaaatngnaatccggggnttgggggagggggaggtaaaggcctnaaggcttnaggttaggaggttgttccttgnctattttaaggccatccctttttnnncangggcctgattcggttntttagggggantgggnggaatcttttttttttgggggtttaaaagngnattttaangttngggttgcaaaaatttttnccttnccaaattt

SEQ ID NO: 89356 - DNA, 887 bp, Arabidopsis thaliana columbia
  unsure (1)..(887): unsure at all n locations
actttcttgtcgctattgccttcgccgtcattttcaccgcctccaccgtacatggtcgtcataatggtgcagaagatatcgtgcattcctcctgcgaacacgcgagctatccatcactatgcgtccgtactctttcgtcatactccggtccaaccatcaccaaccgccgcgatctagctcaagccgccataaaaatcagcctctcccacgctcaaagcgccgcgaagaaactcgcggtggtgcgagactcggtggggaagaagaagcaagagaaagcggcgcttgtggactgtgtggagatgattggagactctgtggacgagctaagccgtacgctcggcgttttgaagcacctccgtgtctctggcggttgagctaacgagttccggtggcagatgagcaatgcacagacgtgggctagcgcggcactcccggatgacgacacgtgtctcgatgggtttcaagggatggacgccggtgaaatcaaaacggaggtgaagcagtggatgacgaaagtggccagggttacgagcaacgcgctttacatggtcaaccagctagatgagacacgtggcaaaccccacgacgtacatctttgatgttaatgcactagatcgttttaatggacggtctttattgtgtgtgttggtttttcgttcatgtgtaaaaagtgtgagattatctatcgctccgatatatagaaatgagtttttgattatggataaagtcgtttttcgtagttctgattatggtctaataaataacatgtttttttttnnnnnnnnnnnnnnnnnnnnnnnnnnnnnnnnnnnnnnnnnnnnnnnnnnnnnnnnnnnnnnnnnnnnnnnnnnnnnnnnnnnnnnnnnnnnnnnnnnnnnnnnnnnnnn

SEQ ID NO: 89357 - DNA, 663 bp, Arabidopsis thaliana columbia
gaagatgatgcttaccgaaaacatattttgtaaaatacaaaattcttatatccgaatgtgagctaatttgagaaagacggtctctatacgtatataaaatatatgtatatatgcctctctattctttgatgaacttcagtcagggtaattaatttactaaaactcttccaaaatgtcacattccttcttcaatttattcctaatctctcttttcctctacaacaattgcattgcgcatcactatacattcacggttagggaagttccatatacgaaactgtgtagcacgaaggcgattttaaccgttaatagtcagtttcctggaccgattataaaggttcacaaaggagacactatttatgttaacgttcaaaaccgagctagtgaaaacatcacaatgcattggcatggtgtagagcagccgagaaatccgtggtcagatggtcctgaatacatcacacaatgcccgattcgacccgggtcagattttttgtacaaagtcatattttccatcgaagacacgactgtttggtggcacgcgcatagctcttggacacgtgcaactgtacacggtcttattttcgtatattcctcgccccccgcaaatcctcccttttccaaaggcagaccatgaagtccccataattttgggtgagtggtgga

SEQ ID NO: 89358 - DNA, 499 bp, Arabidopsis thaliana columbia
  unsure (1)..(499): unsure at all n locations
ggnnnnnnnnnnnnnnnnnnnnnnnnnnnnnnnnnnnnnnnnnnnnnnnnnnnnnnnnnnnnnnnnnnnggagccaggcgtgcgtaacaataagaaaccaataaactctaacgctcttcaaagcaaaaaaaaacatcaataatgaagcaatctcttcttctatccttcgtgttactactactctcatcatcatcactcgtgacaccaatccatgcacgtaacaaatcaaatccggcaaagtctcctgttggtgctccagcaccaggaccatcaagttccgattgttctacagtaatatatagcatgatggattgtctcgggtaccttggtgtcggatcaaacgaaactaagccagagaaatcgtgttgtactggaatagaaactgttttacaatataacccacaatgtatttgtgctggtttggttagtgctggcgaaatgggaattgaactgaatagcacaaggactcttgcacacctaaggcttgcaaactctccat

SEQ ID NO: 89359 - DNA, 425 bp, Arabidopsis thaliana columbia
cttggaatccattttcgtttgaatctcaacgttttttgcttgattttagcttctgagagagtccagatccaaggaattggaggaagaataatgtcggcaaggcatgggcaatcgtcgtatcgagatcggagtgacgaattcttcaaaattgtggagactctaaggagatcgattgctccggctccggcggcgaataatgtgccgtatggtaataatcggaacgatggtgcgagaagagaggatcttatcaacaaatccgagttcaacaagagagcttctcatattggtttagctattaatcaaacgtcgcagaagctatcgaagcttgcgaaacttgcaaagaggacatcagtgtttgatgatcctactcaggagatacaagagctgacggtagtcatcaagcaagagatctctgctctaaattc

SEQ ID NO: 89360 - DNA, 509 bp, Arabidopsis thaliana columbia
  unsure (1)..(509): unsure at all n locations
cnnnnnnnnnnnnnnnnnnnnnnnnnnnnnnnnnnnnncggacgcgtgggcggacgcgtgggcggacgcgtgccccgccgccggactgagagacatctcggtgaagaagtagcagagatgtcgacggtgtacgtgctagagccgccgacaaagggaaaggtcattgtaaatactactcatggtccaatcgacgtcgagctttggcctaaggaagcgcccaaatccgtacggaacttcgttcaactatgcctcgagggttactttgacaacaccatcttccatcgtgtcattcccggttttctcgttcaaggcggcgatcccaccggctccggaaccggtggagatagtatatatggaggtgtctttgccgatgagttccattcaaggctgagatttagccaccgtgggattgttgccatggctaatgcgagctcacctaattctaatggaagtcagttctttttcactttggataagtgtgattggcttgataagaagcacactatctt

SEQ ID NO: 89361 - DNA, 372 bp, Arabidopsis thaliana columbia
acggacgcgtgggtcgcccacgcgtccgcccacgcgtccgcctctctccttctctcgcagccgacgatcccatccaaaaaccaaaactcgctctccggtgatcgtctttcgaaaatgaatttcttaaactcagctgcatccatttgcagaagagttagtctgagggaactcatcactgaggttcctgcttatactggcagcagcatttccgatggttcttcaagtgggttgagtttggtcttgaagcgttgggctactaagaaaaccgctggttctacaaagaacggtcgtgactctaatcccaagcttcttggtgttaagaaattcggaggagagagtgtgatacctggaaacatcatagttcgtcaacgt

SEQ ID NO: 89362 - DNA, 876 bp, Arabidopsis thaliana columbia
cagctctaatacgactcctattggggaaggtggtgcccctggcgggaccgggcccggatttccgggtcggcaccacagcctgccgcggcaccctggggcggccacaggggtcggccacaggctgcggcttttttcttttttctggaagcggagaatccaatccaaaaaccaaacctggttctccggggatcgcttttcgaaatggaattccttaacctcagttgcatccattggcagagaagttagtctgagggacctcatcactgaggttccggcttatactggcagcagcatttccgatggttcttcaagtgggtggagttgggtcttgaagcgttgggctactaagaaaaccgctggttctacaaagaacggtcgagactctaatcccaagtttctgggtgttaagaaattcggaggagagagtgtgatacctggaaacatcatagttcgtcaacgtggaactcggtttcatcctggagactatgtcgggattggtaaggaccatactctgtttgcattgaaggaaggacgagtcaggttcgagaaaagcaagattacaggacgcaaatggattcatgttgatccaataggtggtcatgttcttcaccctatctacacaaaagccgcagctgcaaaatcgactaagttgaacacagcttcatagcaaactcgacaatctaaacgtgtcttcgtttcttcttttagattatatgatctctcgagtaaaagatgatggtatcttagaatatcaacactcattcccattacagctgctgttttgtttcaaaaaaaaaaaaaaaaaaagggcggccgctctagaggatccaagcttacgtacgcgtgcatgcgacgtcaagatcttctatagtgtac

SEQ ID NO: 89363 - DNA, 867 bp, Arabidopsis thaliana columbia
  unsure (1)..(867): unsure at all n locations
cgcagtaccggtccggaattcccgggtcgaaaaagcatttacacaacgaagatcattaatggctctcgaggcatggtttatggatgatagcaatgaggaccagagacttcctcatcatcgtaacccgaaagaactcgtctcgttggattacttggcagagttgggagtgttgtactggaagttgaaccctgagaactacgagaatgattctgaacttagcaagattagagaagacaggggttacgattacatggatttgctggatctgtgtcccgagaaagtcagcaactacgaagaaaagctgaagaactttttcacagaacacattcacaaggatgaagagattcggtactgcctagcaggaagtggctactttgatgttagggacaaggatgatcgttggattcgtatctggatgcaacctggcgatctcattgtccttcctgccgggatctaccaccggttcacattcgacaccagcaactacatcaagctaatgaggctgttcgtgggggaaccggtttggacaccatataaccggccacaggaagaacatccggttaggcaaaagtatatccacggcttaacctacaagtttggagaaaccgttaaagcacattaacaatattaatatatgcttgttgggtaatttgtatgtattggttactctttagtcttaagcagttaaaataaaaccggcggctccttctgggttgttggtcttggaacatacttttgcgatgtatgcttttatacataaaaaaaatagtgtgtatttatctaaaaaaaaaaaaaaaagnnnnnnnnnnnnnnnnnnnnnnnnnnnnnnnnnnnnnnnnnnnnnnnnnnnnnnnnnnnnnnnnnnnn

SEQ ID NO: 89364 - DNA, 525 bp, Arabidopsis thaliana columbia
  unsure (1)..(525): unsure at all n locations
nnnnnnnnnnnnnnnnnnnnnnnnnnnnnnnnnnnnnnnnnnnnnnnnnnnnnnnnnnnnnnnnnnnnnnnnnnccacgcgtncagccacgcgtccgtccacgcgtccgatctgttcacagagaattgaagtcgagacattagaagtgtttgttgtgtgtgtgtgtgtgtttctatagaatttttgaattttgtgataaaattgtgtgaatgggagctccaaagctgaagtggacaccagaagaagaaacagctcttaaagctggagtacttaaacatggaactggaaaatggcgtaccattctctcagatcctgtgtatagcacaattctgaagtctcgttctaatgtggatctcaaggacaaatggagaaatataagtgtaacagctttatggggatctaggaagaaggctaagcttgctcttaaaagaactcctttgtcgggtagtaggcaagacgataacgctacagctattaccattgtgtctttagctaatggtgatgtaggaggacaacagattgatg

SEQ ID NO: 89365 - DNA, 960 bp, Arabidopsis thaliana columbia
  unsure (1)..(960): unsure at all n locations
aggagatggaggtgtcctgcgggaagttgcacgcnatgcttctattgagcagattgacatgtgggaaattgatgaaatggtggtcgacgtgtctaagcaattttcccctgatgtagcaattggatatgaggatcctcgcgtgaaccttgtcattggcgatggtgttgctttcttgaagaatgctgctgaaggatcatacgatgcagttattgttgactcttcagatccaatcggtcctgcaaaggagctgtttgagaaacccttcttccaatctgtggctagagctcttcgtcctggtggagttgtgtgcactcaagctgaaagcttgtggcttcacatggacatcatcgaagacattgtttccaactgccgtgagatcttcaagggttctgtgaactatgcttggaccagcgttccaacataccccagtggggtcattggatttatgctttgttcaactgaaggacctgatgttgacttcaaacacccactgaacccaattgacgagagctccagcaaatcaaatggacctttgaagttttacaatgccgagattcattcagctgcattctgcttgccttctttcgccaagaaggtcattgagtcaaaagccaattgaaaagggaaagaaaactaatctggaggatcgttgaatttatcaaaaaataaaagctttttacagtttttagaatgttctgttgtttcactcatgtttctgtaacacaatgcaagagcgactatgtcttcttttagcattacacattcgcatagtagcaaatcctatttacaacatgttcttatgcttttgcgttgaagctgagaagtctaataacctttctgcttttataccatttattataaagattcacacttaaaaaaaaaaaaaaagnnnnnnnnnnnnnnnnnnnnnnnnnnnnnnnnnnnnnnnnnnnnnnnnnnnnnnnnnnnnnnnnnnnngcc

SEQ ID NO: 89366 - DNA, 522 bp, Arabidopsis thaliana columbia
acgactcattatagggaagagctggtccgcctgcaggtaccggtccggaattcccgggtcgaccctcccgcccgcttcaacctcctaagcacattcttatctctttctgaaacgagttcccaaattagctctacaaaaaccaggatcttgatttctcatcagttaaacatgggaactcctgtcgaagtctctaagctccatttcttgctcttccctttcatggctcatggccatatgataccaactctagacatggctaagctctttgccaccaaaggagctaaatccactatcctcactacacctctcaatgccaagctcttcttcgagaaacccatcaaatcattcaaccaagacaacccgggactcgaagacatcaccatccagatccttaatttcccttgcacagagcttggtttgcctgatggctgtgagaatactgatttcatcttctccacacctgacctaaacgtaggtgacttgagtcaaaagtttttactcgcaatgaaatatttcgaagag

SEQ ID NO: 89367 - DNA, 471 bp, Arabidopsis thaliana columbia
cacacgcgtccgagcaataaatctcacctcccttttttttttttttttgtctcgctacttttgattatcatttaaaaccaaaaaacctaccatgaatgagaatcacattcaaagtgatcacatgaacaacaccattcatgtaacaaacaaaaaactcccaaacttcctcttatccgtacgtctcaaatatgttaaacttggttaccattacctaatctcgaatgccgtctacattctcatactccccgtcggcctcctcgccgcaacctcctcctcctttagtctctccgatctcacactcttatacaaccaccttctcaaattccactttctctcgtccactctcttcgccgctcttcttatctttctaaccaccctctacttcacaactcgtcctcgcagaatctttctcctcgatttcgcttgttacaaacccgactcttttctaatatgcacacgagaaacgttcat

SEQ ID NO: 89368 - DNA, 1268 bp, Arabidopsis thaliana columbia
  unsure (1)..(1268): unsure at all n locations
cgcagtaccggtccggaattcccgggtcgacccacgcgtccggatatgatattattaagtagtagtataagcctctcaagaccagtttcttctcaaagcttctctccacctgctgccacttcaacaaggagatctcattcctctgtcacagtcaagtgctgctgttcttccagaaggttgttgaagaatcctgagttaaaatgttccttggagaatctctttgaaatccaggctttgaggaagtgttttgtttcagggtttgcagctattttgcttctctctcaggcaggccagggtatagcgttggatctctcatctggttatcagaacatttgccaactagggagtgctgctgctgtgggagaaaacaagctgactcttccatctgatggtgactcggaatcaatgatgatgatgatgatgagaggcatgactgctaagaactttgaccctgttaggtactctggaagatggtttgaagtagcttctcttaagcgtggatttgcaggtcaaggccaagaagactgtcattgcactcagggagtatacacgtttgatatgaaggaatcagccattagagtagatacattttgtgttcatggcagccctgatggatatataacacgaatcaaagggaaagttcaatgcgtgggagcggaagacctcgagaaaagcgagactgacttagcaaagccagagatgattaaagagaagtggttcctaccatttcccacccattcctttttttccccaagtttgccttatgaatgtcataacccacaggactacgaacaacctacgccactttggttcttgggagcttaaagggctttgttcaggtatactcaaggacgccaaatccaggacctgagttcatcgcaaagtacaagaactacttggcacaatttggctatgacccggaaaaaataaaggatacaccacaggactgtgaagtgactgatgctgagctagcagccatgatgtccatgccaggtatggagcaaacactgaccaaccagtttccagatcttggattaagaaagtcagtccagtttgatcccttcacaagtgtgtttgaaaccttgaagaaacttgtaccgctctatttcaaatagagcaagcttctttgctcaaattcttatgtagactataatcactgtccatatatacatatcttccagaatcaaaaaaaaaaaaaaagnnnnnnnnnnnnnnnnnnnnnnnnnnnnnnnnnnnnnnnnnnnnnnnnnnnnnnnnnnnnnnnnnnn

SEQ ID NO: 89369 - DNA, 476 bp, Arabidopsis thaliana columbia
cagacccccctaagaatccgagagagaagaagagataatgcagatcttcgtcttaaccctcaccggcaaaactataaccctagaagttgagagcagcgacaccatcgacaatgttaaagccaaaatccaggacaaagagggcataccacctgatcaacagaggctgatttttgctggtaagcaattggaagatggccggaccttagctgattacaacatccagaaagagtctactcttcatcttgtcctcaggctcagaggtggaaccatgatcaaggtgaagacactcactggaaaagaaatcgagattgatatcgaaccaaccgacactattgatcggatcaaagaacgtgttgaagagaaagaaggcattcctcctgttcaacaaaggctcatatatgccggaaaacagcttgctgatgacaaaactgccaaagattatgcgatagagggaggctctggtcttcaattggttc

SEQ ID NO: 89370 - DNA, 603 bp, Arabidopsis thaliana columbia
  unsure (1)..(603): unsure at all n locations
gccnnnnnnnnnnnnnnnnnnnnnnnnnnnnnnnnnnnnnnnnnnnnnnnnnnnnnnnnnnnnnnnnnnnnnnncgcacgcgtccggcagaagcggcggcggaagaggaggaggaggaggaggagcatcggctgatcttcactccgcggcaagatccggtgatttagcagcagttcaatctattatcagctctaatcctttggctgttaattctacggataagcattctcggactccactacatttagcagcatgggcagggcacaacgaggtagtgagctacttatgcaagaacaaagctgatgttggtgctgcagcaggagatgacatgggtgcgattcactttgcttctcaaaaggggcatttggaagttgtgagaactttattatctgccggtggttctgtgaagtctatcactcgcaagggactcactcctcttcactacgctgctcaaggttctcactttgaaatcgtcaagtacttggttaagaaaggagcaagcgtcagagctacgactaagggctgggaagagtccagctgatgttgcgggtaatgcagaaaccgcaaattccttgaagaatgtgaagagcaagccaggaaagc

SEQ ID NO: 89371 - DNA, 581 bp, Arabidopsis thaliana columbia
  unsure (1)..(581): unsure at all n locations
nnnnnnnnnnnnnnnnnnnnnnnnnnnnnnnnnnnnnnnnnnnnnnnnnnnnnnnnnnnnnnnnnnnnnnnccacgcgtgcgggacattatagacacaaaagatggaagctgtaagatgcagaagaggcagagagaacaacaaaagtccagagaggatcataaggtctttgaatcatcatcaacatgatgaagaacttgaagaagaggtcaagacaaagaaacccattttccgaagagtccaagttgtttactatctcacaagaaatggccaccttgaacatcctcacttcatcgaagtcatttctccggttaaccagcctctccggttaagagatgtgatgaaccggcttacgattctgagagggaagtgcatgacatcacaatatgcttggtcgtgtaaaaggagctatagaaatggatttgtgtggaatgacttagcagagaatgatgtgatttacccttctgactgtgctgaatatgtcttgaaaggatctgaaatcacccgcaaatttcaagaagtacttgtgaacagaccattgtctggttctattaaagaagctccaaaaagtcgactttctaa

SEQ ID NO: 89372 - DNA, 534 bp, Arabidopsis thaliana columbia
  unsure (1)..(534): unsure at all n locations
cnnnnnnnnnnnnnnnnnnnnnnnnnnnnnnnnnnnnnnnnnnnnnnnnnnnnnnnnnnnnnnnnnnnnnnccacgcgtccgcagaggcttgggaacaatgtctcaagggaaacaaagagggttaccccgtgtggaattaaataagcgatgtaggcaaaaggcactgcgaaaaaaagagacaaagggaaagggctaaagagaagatatttaacgaaattgacagcttgcccaacatcttagaagaaatagcccaagaagatgagggataaccagaattaacatttacgaagggtcatcgccaagcaggaagtgctgaagatacctccctcctcggttgggaaaggtccaatttgaggctcctccagttcaagtcctcttgaccgaagagatgactgggtcaccttcgtaagctgaaggcatggtggacttttgccagagatcgattcaagaaccttgagaagcgaggaatacttggttccttaaaacagattaaaagggtttaggaacttttcttactgtctaaagcttggttg

SEQ ID NO: 89373 - DNA, 522 bp, Arabidopsis thaliana columbia
  unsure (1)..(522): unsure at all n locations
nnnnnnnnnnnnnnnnnnnnnnnnnnnnnnnnnnnnnnnnnnnnnnnnnnnnnnnnnnnnnnnnnnnnnnnnnctcttggccgagagaagaaacattgatcgtcgatcatggttggaccagtaagacctcaaatcgtacttttcggttcttcaattgttcaatatagcttcactgatcgtggttggggtgccactctcgctgacctctactctcgcacggctgatatcattcttcgtggatatgctggttggaattctaggtttgccttgaaggttcttcaccaagtattcccaaaggttctctctttttgcaaaaagattatgtaatatagtgaaaggaattagctttacttgacctctttttttttggttatgtactgttaggatgctgtgatacaaccttctttggtgatagtctatttcggtgggaatgattcaactcatcctcatccttcaggtcatggccctcatgttcctttatctgaattcatcgaaaacatgaggaagattggtgaacatctt

SEQ ID NO: 89374 - DNA, 1225 bp, Arabidopsis thaliana columbia
  unsure (1)..(1225): unsure at all n locations
gcagtaccgcaccggaattcccgggtcgacccacgcgtccggacctcaaatcgtacttttcggttcttcaattgttcaatatagcttcactgatcgtggttggggtgccactctcgctgacctctactctcgcacggctgatatcattcttcgtggatatgctggttggaattctaggtttgccttgaaggttcttcaccaagtattcccaaaggatgctgtgatacaaccttctttggtgatagtctatttcggtgggaatgattcaactcatcctcatccttcaggtcatggccctcatgttcctttatctgaattcatcgaaaacatgaggaagattggtgaacatcttttgagcctttctgataaaactcgtgtcattttcctcactccgccaccaatgaatgagaaacagatcgagatagtttttggagatgcaataaaaggccggagttacgagtttgtgccgtccatatgcagaagaggttgttaaatctatgcagagagatcaatgtgaaaggtatcgatatttggacccgcgatacacccgccaagatgtttggttgaacagctgcttcacagatgggatcccttttcactgcgaaggcaagtgagattgttgttaaaggagattttgaaggtactgagaggagcggattggaaaccaagtcttttactggaaaatcattaccgggttgaattttccattttgattttgatgctcccaaacttctataagcccttccatgaacctaagagttaaacccagaaaaccaaccattttgagtcaccgcaccttgtaagcctttgtgaacaagagttaaccagaaacgagcagctggagccgccacaccctgtaagcctttgtgaccatgagttaacccgaaacgagcagctggagccgccacaccctgtaagcctttgtgaccatgagttaacccaaaacgagcagctggagccaccacagcctacggcgcgcttgtaaaacaagtcgtagttagagattatgcttctacattgacatcttgatggtgtgtaaccagtttcacctttcatttgcatctggatatttgtattgctaatttaacattttgttagacgttttgttttgtatcattagtttcgctgggtctttggattaaaaaaaaaaaaaaaaaagnnnnnnnnnnnnnnnnnnnnnnnnnnnnnnnnnnnnnnnnnnnnnnnnnnnnnnnnnnnnnnnnnn

SEQ ID NO: 89375 - DNA, 919 bp, Arabidopsis thaliana columbia
  unsure (1)..(919): unsure at all n locations
agttttttgaaaaattccaataaaaaaggcccggtaatttaacaaaagtttttgcccgttccacattattgccaaaaaagaagttttgtttaaaaactccccaacgccaaagaaagagcattccaaatttgtttgaaaaaggtgttaatccacaaataatttttttgagcaccgcggtctgaattcacaaccgccaaacgcgagagagactggtacttgtgggtttgggaaacccatggttgtgctctcttccccaaataatgggagaatccccattttttccacctggggaaagggccaaagtaaaaattttgtgcgttaaaggaagtattattgaagggtctctaagagggaacgggtatgggtaaccaatccttactagaaaatcattaccgggtcaatttccttttgtttttgatgctccaaactttataagccttcatgacctagagttaaccagaaacatccattttgagtcaccgcaccttgtaagcctttgtgaacaagagttatccagtagcgagcagctggagccgccacaccctgtaagcctttgtgaccatgagttaacccgaaacgagcagctggagccgccacaccctgtaagcctttgtgaccatgagttaacccaaatcgagcagctggagccaccccagcctgcggcgcgcttgtaaaacaagtcgtagttagagattatgcttttacattgacatcttgatggtgtgtaaccagtttcacctttcatttgcatctggatatttgtattgctaatttaacattttgttagacgttttgttttgtatcattagtttcgctgggtctttggattaaaaaaaaaaaaaaaaaagggcggccgctctagaggatccaagcttacggaagggtgcaggcgacgtcnnnnnnnnnnnnnnnnnnaacg

SEQ ID NO: 89376 - DNA, 449 bp, Arabidopsis thaliana columbia
gattctccaaggctctatcgactcactataggagaaagctggtacgcctgcaggtaccggtccggaattcccgggtcgacccacgcgtccgattttttggtaaatttggtcgctatatttgactacttgtactctgctttgagaagaacaataaaaccatttttgggtgataggtgactgaataaacatctcttgtctcttgatggatctactatggtctggagattagttcgtttattgaactagtgttttagacaatgcaagagttccatagtagcacagattcattgccttgtcctgcaacttcttgggataactctgtcttcaccaactcaaatgtccaaggatcatcatccttgaccgatcacaacactttaagcttgacaatggagatgaaacaaactggttttcaaatgcagcactatgatttctcctctactcaaatcact

SEQ ID NO: 89377 - DNA, 419 bp, Arabidopsis thaliana columbia
ctctctctctcttttctcaaatcttggaggagaagaagcaaagaattagactactctgcaacaatggctatttattctgtccataacggcgacaagaaacattggtggttcactcacaagaagattgttgataagtacattaaggacgcaagatctttaatggagagtgaggagcaaaacgacgttgcttcagccattcatttactagacgcggctttatcaatatccccgcgttcggaaactgcgttagaacttaaagccagatctttgctctttctacgtcgcttcaaagatgtagttgatatgcttcaagattatatcccaagcctcaagcttgccgtgaacgaggaagatggatcttattcatacgaaggttcttcttactcttcctcgtcttctcagctctcccggaaacttct

SEQ ID NO: 89378 - DNA, 579 bp, Arabidopsis thaliana columbia
atacgactcactttagggaaagccggtacgcctgcaggtaccggtccggaattcccgggtcgacccacgcgtccgcccacgcgtccgtacgctgcgagaagacgacagaaggggacgtcccggtagagagaaagagaggaaagcttaagccgacgacgacgacgaagatgagagagacggtgaagttgataagcatggaaggtttcgagttcgtcatcgacagagaagccgctatggtttctcagactatccgaagcatgctcacttctccaggtggtttctcggaatcgaaagatggcgtagtgactttccctgatataagcaccacaatactagagaagatttgccagtacttctattggtctcttcaatactctagaggcaaagagacagagtttcatattgagcctgaactgactctagagctgatgatggctgctaactatcttcacacttgaagaatgaaaaggataacgctgttgaatcttattcgacttgtgtgaatcaaaaggataaatctgcattgggttcaagaagaactattgaatagctctaaggaaaagtcatgtacttctttac

SEQ ID NO: 89379 - DNA, 520 bp, Arabidopsis thaliana columbia
cgactcactataggagaagctggtacgcctgcaggtaccggtccggaatcccgggtcgacccacgcgtccgggagcgtgcaaaaaaaagtcacagtcgcgagataaaatccgaagctagcgaaaagcttcgatttccagcgatcctagtgttggattctacgattttagggtttaaatcttgagatgtgttcgttatcaatgcaattctcgctcttgcaatcaccaccatctcgtccttgtccgtcttttttagccaaccatgaacctaaactctctactacttcctcctctgtgaccttccccttgaagacgaacacttggaagtgtagcggaactgggaatttgttggttttgagagttaaagcttatggttcttcttctgattcctctgcagattcctccacgcctcccaatggccctcggccgcccaaaaccagaaggggttttcttctccggagttttgtcacaaaatgggaaacccaagtttcttgggtaagtttcgtttaaacggccccctaa

SEQ ID NO: 89380 - DNA, 404 bp, Arabidopsis thaliana columbia
cacttgtcgagcaatgtcgtcgtcttggtcctgcaacaaatgtactttcctcaattctgcgtctcagaaactcaattgcatgatctgcttggctcctgtatctctcccttctttgtctcctcctccaccttctctctcaatttccgcgaacgatgaagctaaatgggcttgcaaggcctgtacttttttgaacacgtacaagaactcaatctgtgacgtctgtggaacacgatcgccaacgtcttctctcttgggatttcaggatttgactgattcgggtctcgagagtaacgacgctgattcctccgtcgggtctgttttctttcctctgcggcggtgtatcaagcgtaaagctatggatgatgacgtcgtcgaagtcgatggtgcttctgttgtttgctctg

SEQ ID NO: 89381 - DNA, 701 bp, Arabidopsis thaliana columbia
  unsure (1)..(701): unsure at all n locations
gaaccggcgcggagacccaggctcgacccagcgacagacacatttcgtaacccccacagccacgccattcgatcaaggaaatggcgtacgcttctcgttttctctccagatctaagcagctacaggggggtctggtcattttgcagcagcaacatgctattccagtccgagcttttgctaaggaagctgctcgtccaacctttaaaggagatgagatgttgaagggtgtcttttttgatatcaagaacaaattccaggctgctgttgatattctccgtaaggaaaagatcacccttgatccagaggacccagctgccgtaaaacagtatgcaaatgtaatgaagaccatcaggcaaaaggcagacatgttctcagaatctcagcgcattaaacatgacattgatactgagactcaagacattccagatgctccgtgcatacttggttgaaagttgccggggaattcgcaccaggagggggggttacctggtgagcttggggcctgaggcccatgatggtccgggcctttgggacaaagccgggaagggccttaaaaagcccctcctgggaaggtgccaaaaaaggatgggccttttggttcaaggtttnanaagngccaaaaacttggggtttgngaaaaaccncccaagnccganaaattgggcccnatgccaacccantgggtnncnnaaaggtccggc

SEQ ID NO: 89382 - DNA, 1200 bp, Arabidopsis thaliana columbia
  unsure (1)..(1200): unsure at all n locations
nnnnnnnnnnnnnnnnnnnnnnnnnnnnnnnnnnnnnnnnnnnnnnnnnnnnnnnnnnnnnnnnnnnngaccgaaccggaattccacgcgtccgcaacacgacaccacaaaccctaaatttcgtcaactccacagcgactcgattcgatcaaggaaatggcgtacgcttctcgttttctctccagatctaagcagctacaggggggtctggtcattttgcagcagcaacatgctattccagtccgagcttttgctaaggaagctgctcgtccaacctttaaaggagatgagatgttgaagggtgtcttttttgatatcaagaacaaattccaggctgctgttgatattctccgtaaggaaaagatcacccttgatccagaggacccagctgccgtaaaacagtatgcaaatgtaatgaagaccatcaggcaaaaggcagacatgttctcagaatctcagcgcattaaacatgacattgatactgagactcaagacattccagatgctcgtgcatacttgttgaagttgcaggaaattcgcaccaggagggggcttactgatgagcttggtgctgaggccatgatgttcgaggctttggagaaagtcgagaaggacataaagaagcctctcctgagaagtgacaagaaaggaatggatcttttggttgcagagtttgagaaaggcaacaaaaagcttgggattaggaaagaagatcttcctaagtacgaagaaaatttggagctcagcatggccaaagcacagttggatgagctgaagagtgatgctgttgaagctatggaatctcagaaaaagaaggaggaattccaggatgaggaaatgccggacgtgaagtctctagacatccgtaacttcatctaaggtttgatccttagaaacatttgatttgttgtaagaaaaggcaaagatctctcacttgattgtctttgaaagagaagatcgttcccttgctgctgttttggtttggcgttcaataaggtctctcacctggatttgagtctaactctctctgtggttattacgcttgagattcttagacacaaacgttgtttcatgtttttttgataatggtgatcactggaatttgagataattaataaaagttgggatgttaattcgaaaaaaaaaannnnnnnnnnnnnnnnnnnnnnnnnnnnnnnnnnnnnnnnnnnnnnnnnnnnn

SEQ ID NO: 89383 - DNA, 524 bp, Arabidopsis thaliana columbia
taaggcaccagcggcagaagaaacaacatctgttaaggaagacaagtgaagactctgttctagagatgatgaagaagagacagcacaatcaggagacaagaaggatgatgccgttaaggaggaatctctttttcaaggccaagcgagcaagagacgtcggagcggcggctactacttaggtttcagtttttgaaattttgaagaatggtgagaatcagtgtgctcaatgatggtcttaagagtatgtacaatgcagagaagagaggaaagaggcaggttatgatcaggccttcttctaaagttatcatcaagttccttatcgtcatgcaaaagcacggttacattggcgagtttgagtatgttgatgaccacaggtctggtaagattgttgttgagcttaatggaaggctgaacaagtgtggagttatcagtcctcgtttcgatgtcggtgttaaggagattgaaggatggactgctcgtctacttccttccagacagtttggtttcattgttctgacgacctc

SEQ ID NO: 89384 - DNA, 731 bp, Arabidopsis thaliana columbia
  unsure (1)..(731): unsure at all n locations
acgcgagcggcagattactacatatgctaaaatgtttgatattatgaagaatgggaggaatcagggggctcaaggatggtctaagaagatttgcatggcgttcttacaagggaagaggcagggtatgatcacgccttcttctaaagttatcatcaagttccttatcgtcatgcaaaagcacggttacattggcgagtttgagtatgttgatgaccacaggtctggtaagattgttgttgagcttaatggaaggctgaacaagtgtggagttatcagtcctcgtttcgatgtcggtgttaaggagattgaaggatggactgctcgtctacttccttccagacagtttggtttcattgttctgacgacctcagcgggaatcatggatcatgaagaagctaggagaaagaacgttggtggcaaagttcttgggttcttttactgaagcagggtctcgagatctatcttatcgggttatagtttggttctctgtaagtcgattgacctcactgtcaaagtagtagttttatatgttgtggtcgctcggatacgtaaaaacttggagatgagtagactaattaatttcagtttttgaattcgttagacttgcgatttatgaaatcaaaatcatctttcttgggtnnnnnnnnnnnnnnnnnnnnnnnnnnnnnnnnnnnnnnnnnnnnnnnnnnnnnnnnnnnnnnnnnnnnnnnnnnnnnnnnnnnnnnnnnnnn

SEQ ID NO: 89385 - DNA, 613 bp, Arabidopsis thaliana columbia
  unsure (1)..(613): unsure at all n locations
nnnnnnnnnnnnnnnnnnnnnnnnnnnnnnnnnnnnnnnnnnnnnnnnnnnnnnnagggaggaatccacgcgtccggaggaatggaaggaatggatttctcgaaattaatgggtggaatgggtggaatgggtggaatgggcggactcgaagggctcggtggaatgggaggcatgggtggaatgggaggcatgggtggtatgggaggcatggaagagtttgaagacagtgatgatgaagaagagacagcaaaatcaggagacaagaaggatgatgccgttaaggaggaaggtcttgcgacagagaaggcaccagcggcagaagaaacaacatctgttaaggaagacaagtgaagactctgttctagagatgatgaaaaaccatatggtattattagcttttcaggtttatgaaaccctctgaattacttcctcttttatatgaatgttgttggtactctgttttctttctatggatttgatcttggtttaagtttcttctaccttttgttttgggttatattgtctccaaaagttcttggacttggaaannnnnnnnnnnnnnnnnnnnnnnnnnnnnnnnnnnnnnnnnnnnnnnnnnnnnnnnnnnnnnncg

SEQ ID NO: 89386 - DNA, 512 bp, Arabidopsis thaliana columbia
ctcaccagccgccattcaacgccggcgctaacggtaacagtcagtttcctcctccatctaccggtgcgccgattcctccgccatatcctcaggctaatcaggaatggggcaatccaaattgggggtatcaacaacaacaaggtcacacccctcaagctaatagcaacgtcgaggactgggctgtgaaagccaaagaatgggcagctgcgaacaaggatcagcaatcacagcagtctgcaccgaaccaacctagcggacaagtctaccagcagcagtatcctactcatggctatcaagattttcatcaacaggcagttccaggagtaagctatcagcagcatcagcagtttccagttccacccacaacacagcccgagagatatccaaattacgcaacaggaaacgagagctttcctggagttggattgccccaagaaaacctgcctaccagttctgcaattcatcagcggggggccccttatacttattcttctgtagcaggtaaccattta

SEQ ID NO: 89387 - DNA, 513 bp, Arabidopsis thaliana columbia
  unsure (1)..(513): unsure at all n locations
nnnnnnnnnnnnnnnnnnnnnnnnnnnnnnnnnnnnnnnnnnnnnnnnnnnnnnnnnnnnnnnnnnnnnnnnnnnccacgcgtccggttttgtctcgttcgtgcagagtattcagcctcactttgatgctgtgagctttaacaatgttcaaggagactgtgtggcgacttaccttgctgaaaagcagaatgtcatgaagtctttagaagggattcctggacgcttctgtctaacgctcgacttttggacctccaagctaactcttgggtatgtgtttataactgctcactacattgacagcgattggaagatacaaaagaagcttctcaatgttttgatggaatcgtatccagaagctgacgaagccttgagtctcgcggttgcaaattgtgtttctgaatggggtctggagggaaagttgtttaacgtcacctttaaccacccggcgagtaactctgcggttgaaaacatcagacctcaactctgcatcaagaaccctgggattctggatgg

SEQ ID NO: 89388 - DNA, 835 bp, Arabidopsis thaliana columbia
  unsure (1)..(835): unsure at all n locations
ttttattccaattacattttagggaaggctggtcccctggcaggtcccggcccggatttcccgggtcgacccacgcgtccgttaatatccataatttttttttttaatctccccttggttgatcgggggaacacaaaaaaaaaaatctaaaataatcgcaaaatacattttgaagaagctacacgatcaacaacagcaaaggatttcgattgttgaaaaagttgactcttcttaatttgattcgttgtcttggtttctgggttttcttcttcttcttctgcggcgctctccaattttacaccttgcgaccagcgagaaaagaaacaaatttcacccccattgaagaaggacctttggttaagctccatggtgtggtatgcgcaaagtggacaatacctagatgggtgtttctcttctgaaacaacaacatcgtattacaaatcaagctgatactttttctagattcatggaaagatcaccagagaataatctaagcagaaatgagcacatcatcattgacattccaagaaatgccgccattgcatcatcatcatcttctcatgatagaatctcaaatgttttggaacctttacaacatgaggaagagagaccttctactgtttctcccatggctgctcctcagccagctacagctacagcttcttcttcttcttctatgcgatcaaatcctagaagtgtccgtcgtagaagaagtcctttgaattctggcttatggatttctattgaactattccgcgnnnnnnnnnnnnnnnaaaaaaactattgtcgttttgtctttgtcaaaacatgagcatcctcgtgctcctttgttcac

SEQ ID NO: 89389 - DNA, 591 bp, Arabidopsis thaliana columbia
  unsure (1)..(591): unsure at all n locations
nnnnnnnnnnnnnnnnnnnnnnnnnnnnnnnnnnnnnnnnnnnnnnnnnnnnnnnnnnnnnnnnnnnnnnnnnnnccacgcgtccgctttgcgaaaagtcgtttttttaatcaagtctgaatcacgttttattgatctacactcgcgtgggttctccgtttcgtgcttagatcagagagctccctcccgtgattccgagctttaaggtcggaaatggcggctcatgtttctactggaaacattcataatttctatcttgcggggcaggtttacaggggacaagctttttcatggagttctgcttctactttcatggcaaatccattcaaagagccctcttggtcaagtggggtatttaaggctctaaaagctgagagatgtggttgttactctcgtggtatttcccccatcagtgagacctcaaaacctatcagggctgtttcggtatcttcttcaacaaagtattatgatttcactgtgattggtagtggagtagcgggtctgcgttatgctttagaagttgcaaagcaaggaacagtcgcagtgattaccaaagatgagcctcatgagagaacacaaactatgctcaag

SEQ ID NO: 89390 - DNA, 629 bp, Arabidopsis thaliana columbia
  unsure (1)..(629): unsure at all n locations
gggggggggggaggttgaanncacccctcctctcgcaaaccaacgtttaacactaactaananaacaagatagcgtgaaagtttaagtgtgttggcatccccaaggcttgcatgactgtggccggtcccattcacagcgaacgcgctttatgagttgtggcaccgccaacggcaacctggcagggtgcattgcctacttgacccgaggtgctccacttacccaagggtgccgcaacggcgttactaacccttaaaaaacatggccagtacaaccccagaccgtcagcaagcttgccgctgccgtcaatctgccgctaaagccgttggccccggtctcaacactgcccgtgcagctggacttcctagcgcatgcaaagtcaatattccttacaaaatcagcgccagaccaactgcaacaccgtgagggattgaagcgacggtcaaatgaagctactagccggatgttttcggaataattatataaatncgntngggattaatattaaaataaaagatggttccgaatggngtggaacccttttcnaatttcccngggcntttttttaancggggggggttncaaataaatggggaacggcctggaacaaaggttcggnaaanaacggtct

SEQ ID NO: 89391 - DNA, 632 bp, Arabidopsis thaliana columbia
  unsure (1)..(632): unsure at all n locations
gtttgtnaatccncggaatnngnccctaacnagggancaantggctgnagnatgaanttttggcatgcatggtcttggcttgcaatgattgtggccggtccaatcacagcgaacgcgcttatgagttgtggcaccgtcaacggcaacccggcagggtgcattgcctacttgacccgaggtgctccacttacccaagggtgctgcaacggcgttactaaccttaaaaacatggcctacaaccccagaccgtcagcaagcttgccgttgccttcaatctgccgctaaagccgttggtcccggtctcaacactgcccgtgcagctggacttcctagcgcatgcaaagtcaatattccttcaaaatcagcgccagaccaactgcaacaccgtgaggtaatgagcgacggtcaaatgaagctactagcggatgtttcgaatattatataatcgatggggtaatattaaataaagatgttcgaatggctggaccctttcaatttccggccttttttatcggggggtccaataagggatcgccgaccaatgtcgnaaaacgtcttgattcatctgacttaaataaaagngggatccttanccnggggcccaatttangggccncggggggccccttttn

SEQ ID NO: 89392 - DNA, 701 bp, Arabidopsis thaliana columbia
  unsure (1)..(701): unsure at all n locations
aaacccccgggggtgccnccccccgntttataagacctntnggngngnccccccccgggggntncagggaatttcccgggccccccgggntttagttnaaggttnnngaattccattgggcctttgnctttccaattggtttgtggccnggttccaattcacagnggaccccggctttantgaggttgtggccacccggtcaacggnaaacccttggcaggggntncatttncctacttggcccccggaggtnctccacttaccccaaggggtgctgcaaccggcggttactacccttaaaaacatggccagtacaacccccaggaccgtcagcaagcttgccgttgccttcaatctgccggctaaagccgttggtcccggtctcaacactgcccgtgcagctggaccttcctagcgcatgcaaagtcaatattccttacaaaatcagcgccagcaccaacctgcaacaccgtgaggtgatgagcgacggtcaaatgaagctactagcggatgtttcgaatattatataatcgatgagataatattaaataaagatgttcgaatggctgtactcttttcaatttcctgtctttttttatcgtggcgtttctattatgtgatcgtctgcactatgttcgcaaacaagcggccgcgaattcgatatcaagcttatcgataccgtcgacctcgagggggggccc

SEQ ID NO: 89393 - DNA, 788 bp, Arabidopsis thaliana columbia
  unsure (1)..(788): unsure at all n locations
gatntttnnaaggtgnattcccctctagggaaaaagtggncccnccggggggccgtttaaactggggcccccgggttcaggaattccgccncgcctaatcagttgcatgcatggtcttggttgcatgattgtgccgggtcaatcacacggacgcgcttatgagttgtggcaccgtcaccggcaacctggcagggtgcattgcctacttgccccgaggtgctccacttacccaagggtgctgcaacggcgttactaacccttaaaaacatggccagtacaacccccagaccgtcagcaagcttgccgttgccttcaatctgccgctaaagccgttggtcccggtctcaacactgcccgtgcagctggacttcctagcgcatgcaaagtcaatattccttacaaaatcagcgccagcaccaactgcaacaccgtgaggtgatgagcgacggtcaaatgaagctactagcggatgtttcgaatattatataatcgatgagataatattaaataaagatgttcgaatggctgtactcttttcaatttcctgtctttttttatcgtggcgtttctattatgtgatcgtctgtactatgttcgcaaacaacgttctttgaggcccggaatcctgaaccccggggngncnccnaggcctnnanngggcgcaaccngggtgngnnccaacgttttggccccttttngagggggaaatttnaacnttngggaacaangggaaaacnnggnnccnggggaaaattgancccggccaaaatcccnanaaaaaatggggg

SEQ ID NO: 89394 - DNA, 717 bp, Arabidopsis thaliana columbia
  unsure (1)..(717): unsure at all n locations
gcccgaattncccncttagggnaaaaggggnccccccggnggcccttaaantngggcccccnggntcaggatcccgcccgaaacccttcctaggggccaattggctgggtgataaatttggatccatggntttgnttnaatgattgtgnccggncaatcaccagnggacccgcttatgggttgtggcaccgtcaccggcaacctggcagggtgcatgcccctacttgccccccgaggtgctcccacttacccaaagggtgctggcaaccggcgttacttaccccttttaaaaaacatggccagttacaaccccagaccgtcagcaagcttgcccgttgccttcaatctgccgcctaaagccgttggtcccggtctcaacactgcccgtgcagctggacttcctagcgcatgcaaagtcaatattcccttacaaaatcagcgccagcaccaactgcaacaccgtgaggtgatgagcgacggtcaaatgaagctactagcggatgtttcgaatattatataatcgatgagataatattaaataaagatgttcgaatggctgtactcttttcaatttcctgtctttttttatcgtggcgtttctattatgtgatcgtctgtactatgttcgcaaacaacgttctttgaatttcagacttgaagtttaagcggccgcgaattcgatatcaagcttatctataccgtcgagctctagggggg

SEQ ID NO: 89395 - DNA, 843 bp, Arabidopsis thaliana columbia
  unsure (1)..(843): unsure at all n locations
actcccactnnnnnnnnnnnnnnnnnnnnnnnnnnnnnnngcaagtaccgctccggaattcccgggtcgacccacgcgtccgatccatcacatctcctcttgcaaaccaacgtaaaacactaactaagagatcaatatggctggagtgatgaagttggcatgcatggtcttggcttgcatgattgtggccggtccaatcacagcgaacgcgcttatgagttgtggcaccgtcaacggcaacctggcagggtgcattgcctacttgacccgaggtgctccacttacccaagggtgctgcaacggcgttactaaccttaaaaacatggccagtacaaccccagaccgtcagcaagcttgccgttgccttcaatctgccgctaaagccgttggtcccggtctcaacactgcccgtgcagctggacttcctagcgcatgcaaagtcaatattccttacaaaatcagcgccagcaccaactgcaacaccgtgaggtgatgagcgacggtcaaatgaagctactagcggatgtttcgaatattatataatcgatgagataatattaaataaagatgttcgaatggctgtactcttttcaatttcctgtctttttttatcgtggcgtttctattatgtgatcgtctgtactatgttcgcaaacaacgttctttgaatttcagacttgaagtttaagtgttcaaaaacatagttccctaacttaccttatctcacagagggcggcccgcttttagaggaatccaaagctttacggtaccgcgtgcctttgcgaacggtcataagcttttttttataggtgtcaaccctaaaatttcaattttcacctggcc

SEQ ID NO: 89396 - DNA, 998 bp, Arabidopsis thaliana columbia
  unsure (1)..(998): unsure at all n locations
nnnnnnnnnnnnnnnnnnnnnnnnnnnnnnnnnnnnnnnnnnnnnnnnnnnnnnnnnnnnnnnnnnnnnnnnnnttctgcttttaattcgcggccgcagttggcatgcatggtcttggcttgcatgattgtggccggtccaatcacagcgaacgcgcttatgagttgtggcaacccgtcaacggcaaccttggcagggtgcattgcctacttgaaccccgaggtgctccacttacccaaagggtgctgcaacggcgttactaaccttaaaaacatggccagtacaaccccagaccgtcagcaagcttgccgttgccttcaatctgccgctaaagccgttggtcccggtattaacactgcccgtgcagctggacttcctagcgcatgctaagtcaatattccttacaaaatcagcgccagcaccaactgcaacaccttgagggtgatgagcgacggttaaaataaacctactatgcggatggtttcgaattatttatttaattcccatgaagattaattccttaaacataaaaggaatggtttccctaactgggccttgggatcccttctcttttcttcacaaatttttcacccctgggcgctctatttatttattttacattcgcgcggggcggccggcgatatacccttaaattacaatttggggggaaacaccggttgctagggtatacccttaatgtgttttccgcgccaacaaaccacaaaccgggttattttttttggaaaaattttttaacgggccgtggcccggtcgaaaaattttttataattatcaaaagcctttaattgaatatccccggtagaacaccttttaaggggtggggcacccgggtaccccaaaatttcggcccctttaatttgaggggtgaattacaaaattaacttggctcgggggttgttacaaccccttctgaaactgtgaaaaaacccttggggtttccccaaatttaattcgccttggaagacaaaacccccttt

SEQ ID NO: 89397 - DNA, 389 bp, Arabidopsis thaliana columbia
gggttcgagacgaactctttttctttctcgtgacgaatgtttctgtctagaagcttttaaggattaagactctccaaaattttgacgccgtgttattctcttcccgtctctcatggatccttcaagacgaccaccgaaggactctccttacgcgaatctattcgatctcgagccgttgatgaagtttagaattccgaaacctgaagatgaagttgattattatgggagtagtagccaggatgaaagtagaagcactcaaggtggggtagtggcaaactacagcaatgggtctaaatcgagaatgaatgcgagctccaagaagagaaagcggtggacagaagctgaggatgcagaggacgatgatgatctctacaatcaacatgttactg

SEQ ID NO: 89398 - DNA, 748 bp, Arabidopsis thaliana columbia
aaagttctactaattaaaaacatttttatagaacaagaaaaaaacagtttttgataatttgcataagctaaaaacatttgtaatctagacattacccgaaaaatatttattcaaaattttaaaatacaaagttagtgccccatatctttgtaaagtactccaattttgtgatttgcagtttaattactacttcaatccggtaattttaatctgatttagtttcataccggcatttgggataaaccgggttcccggttaaacaaattccaaaacattatccaaaacaaacagagaattttatcaacggaattttcccaaaagaaaaacacagaatgatgaagctgcaagggggacttctccagtggagtcgtagcagcttaatcccgtcgatttatacgccaatcaacaaaacccaattctctatcgccgcctgtgtcatcgagcggaaccaccagcttacggcgaaggagagacggcagctccggaacgagcggcgggagagtaaattggggtatagctggcgagaagaagttgaagaaaagttgattaagaaaccaaaaaaacggtatgcaacgtggacggaggagctgaatttggatactttggctgagtcgggtccgcaatggtgggcggctagggtttcgagacttcgtggtcatgagactgctcaaatcttagctcgagctctggctcgtcaattccctgaaatggaattcacggtttatgcaccatctgttcaagtgaagag

SEQ ID NO: 89399 - DNA, 800 bp, Arabidopsis thaliana columbia
tctacgactttctatagggaaagctggtacgcctgcaggtaccggtccggaattcccgggtgcggccacgcgtgcgcccacacgtccgcggaattttcccaaaagaaaaacagagaatgatgaagctgcaagggggacttctccagtggagtcgtagcagcttaatcccgtcgatttatacgccaatcaacaaaacccaattctctatcgccgcctgtgtcatcgagcggaaccaccagcttacggcgaaggagagacggcagctccggaacgagcggcgggagagtaaattggggtatagctggcgagaagaagttgaagaaaagttgattaagaaaccaaaaaaacggtatgcaacgtggacggaggagctgaatttggatactttggctgagtcgggtccgcaatggtgggcggttagggtttcgagacttcgtggtcatgagactgctcaaatcttagctcgagctctggctcgtcaattccctgaaatggaattcacggtaattggaattttactggatatttgggttgtgttgggtgattttaaagtttggattttgacaatgagattggatcaaactggtatcttgatagaattgctgacaaactctaaacagttgttgatggaaagtgaaaagatttgattttgggttattgtgtgatctttagaatttgtggggaattcatacattggtattgaaacaagtggcttttgaatttggctgtccaggtttatgcaccatctgttcaagtgaagagaaagctaaagaacggttctatatctgcccacgcgtccg

SEQ ID NO: 89400 - DNA, 592 bp, Arabidopsis thaliana columbia
  unsure (1)..(592): unsure at all n locations
nnnnnnnnnnnnnnnnnnnnnnnnnnnnnnnnnnnnnnnnnnnnnnnnnnnnnnnnnnnnnnnnnnnnnngggccacgcgtccgattttctcttacatcacttaatttataatttccttttcccattttttttcaaaaaaggaactatgatttctgtttctgaatttgttctctgcatagatgacaatgttagtggtacgtgcatgagaggtaaggtcgttatcagtgatcaagcatttgtgtatgctcaatctgtttatgtagaagacggtgacaacgatgatgacgatatctatgattatgctccagcagcatgaatggatcatatgaaacatgattttgtacctttatatattaatgattttttgccctagggtttctttatgttagttgatttaataccttcagtctttcactataaatcctttaatatttgcttctatacacagctctttgtttcacgttatagaagcgatcgaacgaaaaatttcaaagcaataacgttttattatgcgcattgagatcattactaattttgtttttataaaaacagtgatgtgctaacattcttatgaaaaataaaatttatgat

SEQ ID NO: 89401 - DNA, 848 bp, Arabidopsis thaliana columbia
  unsure (1)..(848): unsure at all n locations
nnnnnnnnnnnnnnnnnnnnnnnnnnnnnnnnnnnnnnnnnnnnnnnnnnnnnnnnnnnnnnnnnnnnnnnnnnnnnnnnnnnnccacgcgtccgcactctcctcttttccttgtccttctctatcgcttctataaactttttcgatctaaggttcgtgatctccttcttctctacgaagtttacactttttcttcaaaggaaacaatgagccagtacaatcaacctcccgttggtgttcctcctcctcaaggttatccaccggagggatatccaaaagatgcttatccaccacaaggatatcctcctcagggatatcctcagcaaggctatccacctcagggatatcctcaacaaggttatcctcagcaaggatatcctccaccgtacgcgcctcaatatcctccaccaccgcagcatcagcaacaacagagcagtcctggctttctagaaggatgtcttgctgctctgtgttgttgctgtctcttggatgcttgcttctgattggagtctctctctctctgcataaagcttcgggatttatttgtaagagggttttggttaaacaaaaaccttaattgatttgtggggcattaaaaatgaatctctcgatgattctctttcgttttatgtgtaatgttcttcggttcataacattttaactattgtctatcgacgttctgccttagtttgtatttgattatgggaatgtaaattggttgggagacactattctatgccatagtttattgcttggatcttaaaaaaaaaaaaaaaagggcgaccgctctagaggatccaagcttacgtacgcgtgcaggcgacgtcatagctcttctatangtgtgt

SEQ ID NO: 89402 - DNA, 442 bp, Arabidopsis thaliana columbia
atcctccgcaatttcgcaattttgtgaaggagccgccggctaaatttgatggcagaccaaaggtcggagatcgtcaatgctctgtgcggcggagatggaagctgtttccgtttcatcaactcaggcatcttcttcgtccgatggattccagatgagtgaagaagttgagaagagatacaaaattgttaggagtatcggtgaggaatgtatacaagaggaagagctaaagaatcttcttgctaagaaggctgctccgatttgctacgacggctttgaaccatcaggaagaatgcacattgctcagggagtgatgaaagtcatcaatgtgaacaaaatgacttcagctggttgcagagtgaagatttggattgctgattggtttgctcagttgaacaacaaaatgggtggtgacttgaagaaaatcagagtggttggagaatac

SEQ ID NO: 89403 - DNA, 291 bp, Arabidopsis thaliana columbia
aaatcatcaaaaatcaaaatctctaaaatcaaatattcgcattttctctctcgccggagagatgcaacggtttcttctacctttactcttccttgcactatcgccgccggcgatttgtcattactcttcctcaacctcttcaccttcttcgtcctccgtttcttccgacgcctcagaatggcgtccagctcgagccacctactacgccgctacgaatcctcgagacgcggtgggcggtgccgtgtggatacggagatctcgtcaaatctgggtacggtatggctactgttg

SEQ ID NO: 89404 - DNA, 543 bp, Arabidopsis thaliana columbia
  unsure (1)..(543): unsure at all n locations
atgatatnnnnnnnnnnnnnnnnnnnnnnnnnnnnnnnnnnnnnnnnnnnnnnnnnnnnnnnnnnnnnnnnnnnnnnnnnnnccacgcgtccgtacgctgcgagaagacacagaagaggagagcagaagtggaagtctcttgtccctctgtaaaccctaaaatagaaaagcaaatcacacttgggggattcatgttctttggctttcttacaaacctctagaaataatggccgagaaagcaggcaaggcaacgaatggtggagaagcagagaaatctctaaaggaaaaaggaaatgagttcttcaaagctggcaactttcttaaagccgcagctctctatactcaagccatcaagctcgatccttctaacgctactctttacagtaaccgagctgctgcatttttgagtctggttaagcttagcaaggccttagcagatgctgagactaccattaaactcaaccctcagtgggagaaggggtacttcaggaaaggttgtgtgcttgaagccatggaaaaatacgaagatgctttggctgcatt

SEQ ID NO: 89405 - DNA, 1024 bp, Arabidopsis thaliana columbia
  unsure (1)..(1024): unsure at all n locations
atgatattgccnnnnnnnnnnnnnnnnnnnnnnnnnnnnnnnnnnnnnnnnnnnnnnnnnnnnnnnnnnnnnnnnnnnnnnnnccgcgcgtgcgcactatttctctttagtctctctacggaacctgtcttcttgtcttgtccaaaatcggatttttaagagtacaagtgagtttattttgggggccgaaatctgtcctggaggatacagaagcaagatgaagttaatagatcgaagaatgaggttaacggagctgctcttacggtgctccatcagtgtcttcgctctcctcgcgcttattctagttgtgacagacactgaggtcaagcttatcttcactatcaagaagacggccaagtacacggacatgaaggcggttgtgttcttggtggtggctaatgggatagctgcggtttattctttgttgcaatcagttcgttgcgtggtgggtacgatgaaaggaaaggttttgtttagtaagcctcttgcttgggcctttttctctggtgatcaggcgatggcgtacttgaatgtggcagcccttgcagcaacagcagagtctggtgtgattgctagggaaggagaggaagatttgcaatggatgagagtgtgtactatgtatggaaagttctgcaaccaaatggctataggagtctctagcgccttgttagcctccattgctatggttttcgtctcctgcatttctgcttttagtctcttccgcttgtacggtgccaccaaagaccgcagaaccacgccgtggtgaagtgaatgcggctttgtctttagtagtgttgaaaatgttgttgttaaaaaaacatatagtaacaaaagtgtaggctcctgttggttcttcttcttcttcttcttgatgatgttatatgtgacaaaccaatatgtaaaactagactattgatgttctgtgtcaatgtgccatatgctgtgataaaaaaaaaaaaaaagcgcggccgctctagaggatccaagcttacgtacgcgtgcatgcgacgtcatagctattcta

SEQ ID NO: 89406 - DNA, 588 bp, Arabidopsis thaliana columbia
  unsure (1)..(588): unsure at all n locations
gttatgttttttgagtaaaacagtattcgtcggacaaccgaagcgaaatccctaatttcccacaacacgaaataccaatttccccaattcgaaaacaaacacggtctgatgtcagacgcaagagataatgatgaccgtgtggatttcgaggagggtagctacagtgagatggaggatgaagtggaggaggaacaagtagaagagtatgaagaggaggaagaagaagatgatgatgatgatgacgttggcaatcagaatgccgaagaacgtgaggtggaggattatggtgatacaaaaggtggggatatggaagatgttcaggaggaaatagctgaagatgacgacaaccatattgatattgagacagcagatgatgatgaggaaccaccatctcctattgatgatggagatagggnaaagtattcccaccttcctttcacttcctcctcatgggttctggaagttttnntttggtgggntcccanggggtnttggagaannggcctgangggtntntntgagagntnggcgggntctttgnggtgnncntgtgaagttgggccctggtgttccatgctttctttnngc

SEQ ID NO: 89407 - DNA, 659 bp, Arabidopsis thaliana columbia
  unsure (1)..(659): unsure at all n locations
ccnnnnnnnnnnnnnnnnnnnnnnctactatagggaaagctggtcgcctgcggtccggccggaattccggtcgcccgcccgtcgacaaaactgtagagatgcacagtttgctacaaaagttgggtagaaagattgttcgtgatgaatcctttggaaatcctggaaaacgccggttcttgttggatgctgaggatatttgtgatgtatttaccgataataccggcacagaaactgtactaggtatatctcttaacacattggaaatcaacgggacattgtctgtagatgataaatcattccaaggtatgcataatctccaatttcttaaagttttcgagaattggcggcgggggagtggtgaaggcatattgtctttacctcaaggcctcaattctttgccccgaaaactcagactactacactggtataaattcccgttgaggtgtatgccttctaacttcaaggccgagtatctggttaacctagaaatggcgtatagccagcttgagaggttgtgggaaggaaactcagcacttgggagtctcacgaagatggatctgtccaagtccggacatttgaaagaaattccagatctttcttacgccgtaaatctagaggaaatggatctttgcagttgtaaatctttgggtacacttnct

SEQ ID NO: 89408 - DNA, 507 bp, Arabidopsis thaliana columbia
  unsure (1)..(507): unsure at all n locations
nnnnnnnnnnnnnnnnnnnnnnnnnnnnnnnnnnngctgggtaaaaaaaattcggaggacgacgaaagagaaaacgagtgtttcagtcactgccccacggagctctcggaaatttgtcttccccttgtcgtcgtctccctatctactgcttcttcttcgttttcgtcttctttatcaaggaatgctgtttaattggaatcaacaatggagaatttgacggaaatagaatcaacgatggagagtttaacggaaatggagagtgagagagttgaacagggtaccgataaggaaattggaagtggagagaaaaggcaggatgatgtaaaggaaacggagaatgagaattctggagagagagtaggagaggaagctcctgtcagggaacatgaagattctccatgtctcattgttattgaagaaggtacttccctagcttcccttgaggaggtgaccaatgctgatgatctgccgaagattgatgatgagaaaaaattcccattttggaac

SEQ ID NO: 89409 - DNA, 429 bp, Arabidopsis thaliana columbia
ccctggcccaaatctttctcttttctataatcactcactgtttggttttttatatttgttttcaaaaactttgggaatttcgtcaatggagcctgacgtggtggagatccctcctcctcctctgatcgcttcgggttctagaactcgtaaacccagaaaggctgttcctgaagtgattgatgtggaaagttatgaattccgcaatgttggtgttgttaaggataacaatgttgttgataagaagaacaaagggaaggcaatacaagttgactccttttctttcaacaacgttcaatctcatcatcatggatcgtcgctgcttaacttagagacgttccaagactattatggtcataagaatatcccttttagtgaatttgctaatcaaccaattgatgttgatgactactcaatgtatcaagacgttct

SEQ ID NO: 89410 - DNA, 811 bp, Arabidopsis thaliana columbia
  unsure (1)..(811): unsure at all n locations
gcggattgggaattggcattggttgaaacaacgagcaatttagaaaaacagacagccgctttgggtggtgggttcgataacttgttgctcaacgggatgtatgatcaaggaatggtcagacaacacgttagcacctcgcaattgacaggtggtagcgcgagcagcgtagctttacccttacctggtaaaaccaacaatcaagtattagccttacctgcaccagatggaaccgttgagaaagtgaaccaagacccattcgcagcttcactaaccattccaccaccttcgtacgtgcaaatggccgagatggagaagaagcagtatctactgagccaagagcagcagctatggcagcaatatcaacgtgatgggatgagaggtcaagccagtttggcgaagatgaacaccggtccagttccggcttacggaatgccacctgtcaacgggatgggaccgccaccgacggggtattactacaacaatccttactgattcattcttttttgcacccattcatatatgtgtagatgactcgtcttccacctttgatcttgtgtgtgttttattatatcccctcggattgtcgtaaaacgattccatcttcttccttgtctctgctcgagtttgatttatagtttatgtacactttcttgagaatcttgattcccttctgtataacattttgatattcatccatgtttcccactgtctaacttaagaacaactccaggtcggtttaaaaaaaaaannnnnnnnnnnnnnnnnnnnnnnnnnnnnnnnnnnnnnnnnnnnnnnnnnnnnnnnnnnnnnc

SEQ ID NO: 89411 - DNA, 752 bp, Arabidopsis thaliana columbia
  unsure (1)..(752): unsure at all n locations
nnnnnnnnnnnnnnnnnnnnnnnnnnnnnnnnnnnnnnnnnnnnnnnnnnnnnnnnnnnnnnnnnnnnnnnnnnnnnnnnnnnccacgcgtccgctagaatgatctcccgtgcccttcctcagggattatcgagggcctttgttggcaggatgttggcggatcctgcatttctctataaacttcttttggagcaagctgccacggttggatgctcagtttggtgggaggtgaagaatcgtaagaatagactaaaagaggaatgggatcttgcacttataaatgttcttactgtatcagcatgcaatgcagctgctgtttggttactagctccatgtcgttcctatggaaacacattccggtttgacctgcaaaatacattacaaaagctaccaaataatttatttgaaatgagctatcctcttagagagttcgacttgcaaaagagatttcattctcttttctacaaggctgcagagttgtccattcttggactcgcagcaggaacactccagggttcgttgtcaaacgttcctagcaggaaagaaagaaagaaacagaattatcttgttgacnggtccccatcctatcaagcaacaaatgctccttgggttaatgggtgccatttctttggaatatatgcccaactttganaatatcagctgtttatgtttggaattttgaaaaaaggaattganccantccncttttgaacntccctaggantttncactccttcctttcccgggactgg

SEQ ID NO: 89412 - DNA, 885 bp, Arabidopsis thaliana columbia
  unsure (1)..(885): unsure at all n locations
gannnnnnnnnnnnnnnnnnnnnnnnnnnnnnnnnnnnnnnnnnnnnnnnnnnnnnnnnnnnnnnnnnnnnnnnnnnnnccacgcgttcggcagcaaaaacgagagtctcttcacggtcaaagaactaaacgacatggtatatctacaagcagcactttcagaaacaatgagactttaccctccaataccaatggaaatgaaacaagccatcgaagacgatgtgtttcccgatgggacattcatacgtaaaggctcacgggtttactttgcgacttacgccatgggaaggatggaatccatatggggaaaagactgtgaatcattcaaaccagagagatggatccaatcagggaatttcgtgaatgatgaccaatttaaatacgttgtgttcaatgctggaccaaggctgtgtttagggaaaacatttgcttacctacagatgaagacaatcgctgcttcagtcctgtctaggtactcaataaaggttgctaaagatcatgtagttgtccccagagtaactacaaccctggtccttgaggcacggtctcaaggtacccttctcgtcaaagtccctggaagagaggatccccgtccaagactagtgattcaacgtccccagagataccagagattcaagtaggaaaacttccccaagtcatgttcctagtagaagcattccaaaaaattaagcctttagggagaaattagcctttgtttaatactaaaaacggcaaggtaacatcttccccttctactacctcagtgatataggctatagtataatcttgaaagatgaaaaaaaaaaaaaaaaaggccgaccgctctagaggatccaagcttacgtacggcgtgcgtgcgacgtcatactcttctatagtgcacct

SEQ ID NO: 89413 - DNA, 1043 bp, Arabidopsis thaliana columbia
  unsure (1)..(1043): unsure at all n locations
gctgccgtaccggtccggaattcccgggtcgacaaacaaacaatggcggcttctctgcaatcagcaaaccctacattgtcacgaaccctagcttctccgaacaaaccttcctccttcgccaccttccgatctccatttctcagattcaattcaacatccgtcgcttccaatttcaaacccctagtttctcgagaagcatcctcatcgttcgtcactcgctccgccgccgagccacaagaaagaaaaaccttccatggactgtgctatgtcgtcggcgacaacatcgacactgaccaaatcattcccgcggagtttctcactctcgtcccttcgaatccagaggaatacgagaaactcggttcttacgctttagttggtcttccagcttcttacaaggaacgattcgttcagccaggtgagatgaagacgaagtactcaatcatcattggcggtgaaaactttggatgtggatcgtcacgtgaacatgctccggtttgtttaggagcagcgggagctaaagcagtggtggctcagtcttatgctagaatctttttcaggaactctgttgctactggtgaggtttatcctttggattctgaagttagggtttgtgatgagtgtacaactggtgatgttgcgactgttgagttgagggaaggagatagtattttgatcaatcatacgactgggaaagagtacaagcttaagccgattggtgatgctggaccagtgattgatgctggtggtatatttgcttatgctaggaaagctggaatgattccatctgctgctgcttgattttgacttcaggtgtcaatggaagtgcatgagagtcacttcaaggatcttgatccaataataagaatatgtaatgtttccaaaagcttatggaccctaatcctatgttttatggnatatataatgactatcggctttagtcttaaaaaaaaaaaacaannnnaanaaaaaaaggggnggcccctnctagnggntcccctgcttncggtcgnngggcaatccnacggnattagccttccnannng

SEQ ID NO: 89414 - DNA, 549 bp, Arabidopsis thaliana columbia
  unsure (1)..(549): unsure at all n locations
nnnnnnnnnnnnnnnnnnnnnnnnnnnnnnnnnnnnnnnnnnnnnnnnnnnnnnnnnnnnnnnnnnnnnccgggcgtgcgcccacgcgtccgcaaaagtgctcgagagagagaccttgaagaagaaagaagaagagacgagtttgatatctaaaggaatcatttttgacggatttaggatctaagtaaaccctagattgaccgaatatgagtactcaagcgacgggtccttcttcaacatcagggaggagaagcaattctactgtacggcgaggaccaccaccttctaagaaaccagtacaatcagagaatggaagtgttaatgggaacacctcaaaacccaattcacctcctcctcaacctcaatctcaagctccttctaatggagagagaacagtgaagaagcttaggttatcgaaagctcttactattcctgaaggaactactgttttcgatgcttgtcgaagaatggctgctaggcgtgttgatgcttgtttgttgactgattcaagtgcgcttctttccgggattgttactgataaagatgtag

SEQ ID NO: 89415 - DNA, 809 bp, Arabidopsis thaliana columbia
  unsure (1)..(809): unsure at all n locations
nnnnnnnnnnnnnnnnnnnnnnnnnnnnnnnnnnnnnnnnnnnnnnnnnnnnnnnnnnnnnnnnnnnnnnnnnnnccacgcgtccgctaaaactaaaagtattcttacatcaaaaaaaacaaagatgacaaagactcttctcatggttacgctcgtgtctatagtaatgttttacatggctcgtccaattttctcccaagaaattggatccatattcgctagaggtgctacaacatgtggccttatcttcatcttcaaagtttaatatttacgttgaagctcccgatgaagctctattcgaagaagctgattcacccgcaatagaatatgacaaggaccggtacaaaatacccgattttattgcggcttgcgctatgaagcaaagctggatatgcttaaatgtggttttcgaaaacatgaaagatgagatgatgccaattataaatgaatgttgtcgtgaaatattgaaaatgggcaaagattgccatttcagattggttgaaggctggtccgccatgtatgtgtatggtaatagtattgcatctaaagacattccatatagcaaacaatcatggaaccaatgtgtccgtagagtagggagcaagtttggtgctccggtctcttttgaccagtaaactaatatatttgtgtgttgatgtgtctatggattttttcaatttgattattccccttattgcccctaaaaaaaaaaaaaaaaaaaaacaaaggcnnnnnnnnnnnnnnnnnnnnnnnnnnnnnnnnnnnnnnnnnnnnnnnnnnnnnnnnnnnnnnnnnnnnnnnnnncaacc

SEQ ID NO: 89416 - DNA, 458 bp, Arabidopsis thaliana columbia
agcttactgactctctggggtatcgctctctccgcatttccattaaccctccaattttcccgcctttgtctcactctcttcccgccttgcactcgccggggactccatggttcagaagcagcaagcctccgccggtccgggtaccgagcctaagaagcgtcgccgtgtcggattttctcccgccgatactggtgtcgaggctaacgagtgcatcaaaatttatctcgtttcaagcaaagaggaagttgattcctctgatatttccagcgtgaagccagttgacttgaatgatttctttgatggagatggcaagatttatggttaccaaggtttgaagataaatgtatggatcaatagcatctcattacattcatatgctgatatcacataccagagcaccattaacggagacaaaggcatcacggacctcagatctgctttacagaacatatttgctg

SEQ ID NO: 89417 - DNA, 510 bp, Arabidopsis thaliana columbia
taaaaaagaggaacattgtagtatagtccccacttgtctctcttcgtctccaaataaaccacattagtcttttcagattttttgtacacttccttcatcccccacccatctctctctctctctcatccttcctctttcttctttgcttgcccttttctttttattttattcttccaaaatcaaatagttccttctttgatctcattgggataactaaaagtttcaagaagagaaacatatcattgaagagagaacccacacaaaaaaaaatgtctgtagatttctcatctgagcgtgtttgctatgtccactgcagcttctgcaccacgattttagcggtaagtgtaccatacgcaagtttgttcacacttgtgacggtgagatgtggccattgtaccaatttgctatccctcaacattggagtttcacttcatcaaacctcagctcctcccattcaccaagatcttcagcctcatagacagcacacaacctctctggtgacaaggaaag

SEQ ID NO: 89418 - DNA, 990 bp, Arabidopsis thaliana columbia
  unsure (1)..(990): unsure at all n locations
annnnnnnnnnnnnnnnnnnnnnnnnnnnnnnnnnnnnnnnnnnnnnnnnnnnnnnnnnnnnnnnnnnccacgcgtccgtacgctgcgagaaggacagaaggggggggtcgcagtgaccaggcccgggcgactgtttaccaaaaacacaggtctccgcanagtcgtaagaccatgtatgggggctgacgcctgcccagtgacgaaaggcttagaaatggtggtgacgtctttctcttcagcgccgcctatcttcttcttacctggagctgatgctcagttttcttcttccaatggaaggtttgctattccttcctcttctctcgtaaagggactaagaagacaccaagatgcaaagttggtgggcaacagagccagagttggagtagtacgagtcctagcgaacccaaatgtatctcctcctcctcctccaggaaaagcaaaggtaaaaaaagaggtaatcatggtagaccctcttgaggctaagcggttagctagtaagcaaatggaagagattaaaggcagagaaaagcaacagagaaggcgtgaaatagaggctattaacggagcatgggcaatcataggactcatgatagggctggtgatcgaagctcaaacggggaagggtattctggctcagttggctggttattggtctgcagttgtccatttgttcactccatcaacttagaatgaattaagtttcatttggttttctctactctcaactgtgaccaaatctaatgttgtgttcatgcaagttaagttgttaaacacatacactttgtaaatcctcccttgtttcaaaatgtcaaatcctgccatttgtaaaagaacaaaatttaaagagttttacacttaaataacaatcaaacatacacttttgtaacaaaaaaaaaaaaaaaaaaaaaaaaaaaaannnnnnnnnnnnnnnnnnnnnnnnnnnnnnnnnnnnnnnnnnnnnnnnnnnnnnnnnnnnnnnnncgtcctaa

SEQ ID NO: 89419 - DNA, 617 bp, Arabidopsis thaliana columbia
  unsure (1)..(617): unsure at all n locations
nnnnnnnnnnnnnnnnnnnnnnnnnnnnnnnnnnnnnnnnnnnnnnnnnnnnnnnnnnnnnnnnnnnnnnnnnnnccgacgcgtccgataaaatttgatagagaaataatgggtgtatttcctgcgtttggagcatggatcaatcagaattctcaacagcctcttgaggaagatcccaagagctctgagcatgttgaatctaagtcggcatcagagatggataatggtcctgctaagatgaaaaaatactatgacgaagatgagtgggagaggcaagataaactttggacagctgcagagaagaagcatccatggaaagatgcccctcctaaggttaaggtgacaacaaaaaagggtatatgccatatgcacatagaattgacattggggttgcctcctgatggagtcttcgaacttttcactaatccacataacggaccaaacaccgaaccacttctggttttatttcttatcattgaatgattcaaatgtggtattaattgtagcaatacttgaaagtgtactctntttgttaattatgaagaaaagcaaatcaagaaaggttttgaaggacgatggaccgaggcagatcgcgaaggtgaagaaagctgtggcct

SEQ ID NO: 89420 - DNA, 496 bp, Arabidopsis thaliana columbia
gagttagaagggcatattcctcagttgtggcatcgatatggtaaatgttctgaaggaactattcccatgaggaggacaaaggaagatgatgttttgagagcaagttcagttaaaagatatggcaagaagaagcgtagaagtgtccctttacctaaatctgcagaacctgaccttattaaccaaagtggtcaccagcatgccatagcttatgtagaaggagataagtactatggagctaaggctactataaatgtgtgggagccaaagatacagcagcagaatgagttcagcttgtcacagatatggcctcttggtggctcattcggacaagatcttaatagcatcgaagctggttggcaggtgagcccggatctgtatggtgacaataacacgagactcttcacttactggactagtgatgcatatcaagctaccggttgctacaatcttctttgctccggttttattcaaatcaacagtgacatagcaatgggag

SEQ ID NO: 89421 - DNA, 583 bp, Arabidopsis thaliana columbia
  unsure (1)..(583): unsure at all n locations
cnnnnnnnnnnnnnnnnnnnnnnnnnnnnnnnnnnnnnnnnnnnnnnnnnnnnnnnnnnnnnnnnnnnggggccacgcgtccgaactaatgagtcgactcgttgactccgttaaagaaatatcagggttttcatcttcaaggggttttattgggaagatccaaggcgatcttgttcgtaggatcacgcttctcagccctttcttcgaggaattgattgagcggcgatgttgaattgaaaaaggatcagattacagggtttgaggctatgagaatcgctcttgattcaagtcttgagctttttcgatcggttaatggaggaagcaagctttttcagcttttcgatagagattctcttgtggagaagttccgtgacatgaacagtggagatagaagcagcgttaagtcagattccttatgagaagattgaggtatcagaggaagtcagagaacaggttcagcttctggattttcagttcaagagagcaaaagaaaaatgggagagtctgatctacgccttaccatgatctagctatggcagagaatggaatggatcctgacctttaatcctaaaagactttacaa

SEQ ID NO: 89422 - DNA, 695 bp, Arabidopsis thaliana columbia
  unsure (1)..(695): unsure at all n locations
gggagttcatttccttccccttagccctcctcggaacggttgttggaagaaattggagcggtgctcctaacaatccatgccgtgtgaagactattccacgtccaatccctgagaaaaaatggtacttgactccatcagtcgtctccctgatggggggtttgctaccctttggaagcatcttcattgagatgtactttgtcttcacatccttctggaattacaaggtctactatgtgtatggattcatgttactggtttttgtgattctcgtcatagtgacggtgtgtgtgacaatcgtgggtacatatttcctgctgaatgcagagaactatcactggcagtggacttcatttttctctgctgcttcgacggctgtctatgtgtacttatactccatctattactactacgtaaagaccaagatgtccggattcttccagacaagcttctactttggatacaccatgatgttctgtcttggccttggaatccnttgcggacctggttggctanctggggatcaaatctgtttgtaaggaggatccnccagnaacatcaagtgcgaccagaaganggnaaccgggaaaaaaagggnaaaccaaatccaattnngaagggancccctnccgaggggananaantaaattggaggngccnnaanaaaancccccaaatgggggggttttgnccccnca

SEQ ID NO: 89423 - DNA, 680 bp, Arabidopsis thaliana columbia
agcaagctccttcaatacatttcatcgtggggcatggtgcacaccaccacgtttgtttcttgaggatcagtttgacgtagtccctccagagaatgcttctgtaagttcatatgggaagaagtctgttgtagaggaacgtgtcaagaagaagccccaacctgtgaagattagtccttggactctagctcgtctcaatgcagaagaagtttcaaaagcagcagcagaagcaagaaagaaatccaaaataatccagcctgtggcgagacgggaaaatccatttgttggcttagaagcaagcagcagcttcggaagcagtggccgtagaatgttcccaacaaaatatgaaggtgttaataataacgggaagcagcgaaggcaatcaaagcgcatacggttaccagcagaactacctctagaaccgctgatgaatgttcagacaaaagcagcaaaggagacatcaactagttcagggctagctccacttcagctagaagcaagaagcgcgtttcagacaagccgggcaatgtcagggtctggtaatgttatggtgacatcttcaccagagagcagcttagactcgcatgacattcacccgtttagagtttcgtctgaagcagaggatgcagcgcagcttaatgggttctcttctgctgttggtctgatgggtcaacagagaggac

SEQ ID NO: 89424 - DNA, 540 bp, Arabidopsis thaliana columbia
gtttccgacaaatttattggattgacgaactttgaagaagaagaagagagatgccgaagagaacgacacacacgtactcgagcgaggacgccgcgccggatggacccgactctgatctcttcgtatactactgcaaacactgtggttctcatgtccttatcactgatacccagttgcagaagatgccaaaaaggaagaccgacaggtcgaatgtacttgacaagaagacgcaccttgctaggttgaatgtcagcgagggaggaaaagttttattgaaacgtggcgaaggaaaaatggagagacagtttagaatgaactgtatcggttgtgagctttttgtttgttatcgtgctgaagagaatctggaaacagcgtctttcatttacattgttgatggagcacttagtgctgttgctgcagaaaccaacccacaggatgcaccagtacctccctgcatttcacaactcgacggtggacttgttcaggttgcaatagaagtggaagaccgtgcacaacgttcagcaatcacaagggtaaatt

SEQ ID NO: 89425 - DNA, 563 bp, Arabidopsis thaliana columbia
  unsure (1)..(563): unsure at all n locations
nnnnnnnnnnnnnnnnnnnnnnnnnnnnnnnnnnnnnncggaatctccataaatcaaaatacatgatcggagctttctcactatcaaaagctttccggcgacaaaaccaaccatctcctccttatctccaccatgatctcactccactcatcagccattaaagcctctctctacggctctttcccttcttcgttacgatcaacactctctgtttccttctctgctggatctcttattcggcttccttccgtcggcaagcgcaatctctccgtcgtcgtttcctctggaagagactcctcgatgtcatcaaacaatgtttctcgcggatcgtcttcaaaggttgctgctgaatctttcttcaggagtgtcttagggcagatggaaactgtttacctaaatcgaaacccgacgcctaaatccgtcttggagcttgttcgatctgttgatgaccagcaactttgctatgatcatctcgctttcagaacgtttgggattggtggatatggggttgactcgcttgcaagctctatccttgactatggatatacaccgatggatgagct

SEQ ID NO: 89426 - DNA, 449 bp, Arabidopsis thaliana columbia
cccacgcgtccgaaagaacccaaagctcttggaggaggtgatcttctcttctcagatcatcttctactcttgagtatacccttcctttgaagataattcctagtttgggacttatccttacttctccgggatttcactttaatccaccgaagagttttgacatctgaattgtattgttttgggtgtgatcccgatagaattcgagggtaggaatcggaaagtagggtgatttggtttagaagaagaaagaaatggagggttttgtcgatcactacattgttctaggtttagcttctggagaggaagctctgaagcttaccgagaaggagattgcaaaagcatacaagttgaaagctttggacttgcatcctgataaaccccctgatgatcctgatgcccatgagaaatttcagaggcttaagacattttacgaggttttttaaagacga

SEQ ID NO: 89427 - DNA, 833 bp, Arabidopsis thaliana columbia
  unsure (1)..(833): unsure at all n locations
nnnnnnnnnnnnnnnnnnnnnnnnnnnnnnnnnnnnnnnnnnnnnnnnnnnnnnnnnnnnnnnnnnnnnnnnnnnnccacgcgtccggagcttactgagtcggaacaacatcagccaataaagccctgaaccctaattttcttttggctttggctggagaacgactgtatgtgtgttcaacaatgtcgtcgatgaacttcaatccatttcaaaactggttcgagaaaccaccgaacccagtcccgtccatcaacttcgtctcgctcgctgattccttctttcccaagtcgcagtctccgaatttcgcttcgattggacttccaaaattctcaaagaagtccccaaaacccgaaacagcaggaaccgacgaaccaggaccgtacaagcaaatagcagagcagttcttatgggagtgtgagaacataccggattacaggcacactccagaagtggataagcttctcaacgaagatccagttttcgagaagaaggagaatccgagcacagaagagattgaagctgagcagaaatggtgggagagttttcgagcgagtcctgtgggtcagtttatgactcgcgccgaggagattgccgacgatatgaacaagatggagctcgaggataacgacacgccttatcggaaagaagacaaggattactggagagccattcctcatgtccccgggctttgacgggaggcccatagcctagaaggcgatcaaatcanaggaagagagtgatgataagntctgggattcatgaaacagnttctcttcggactttggggtttccggaacggtcttacccgnctggtcgacccatggatgtggctt

SEQ ID NO: 89428 - DNA, 527 bp, Arabidopsis thaliana columbia
  unsure (1)..(527): unsure at all n locations
gatactccnnnnnnnnnnnnnnnnnnnnnnnnnnnnnnnnnnnnnnnnnnnnnnnnnnnnnnnnnnnnnnnnnnnnnnnccacgcgtccgcttgtcaaaaaaggaaccaaactatgaggcgactaggcttcactttgataaccttgtagaacgatatggaaaccccatcatcattctgaacttgatcaagacaaaagagaggaggcctagagagtcaatcctacgagaagagtttgttaatgcaattgactttataaacaaagatttacctgaggaaaatcgtctgcgattcctccactgggacctgcacaaacattttcggagcaaaacaaaaaatgtcttggcactcctttgcaaagtagctacctgcgcattgatgctaaccgatttattttactatcaagttacaccagccatgacgattgaggattccatgagcttgtcttcttcttctgatgccgacactggggatatatctccacacactagttctgatgaatgataatggggaccatgatagtcttgag

SEQ ID NO: 89429 - DNA, 432 bp, Arabidopsis thaliana columbia
atcctctcctctccttcacgttgagatatttttgagttttctgtgttgaattttggggaatcgaagaaattgaatttcaaaaatcaatggcggaagaaattgaaaaatctgtgccgacagaggaatctctgatggagaagatctccgagaagattcaccatcacgattcgtcgtcatcgtctgaatccgagtacgagaaacctgattctccttcggctgtgaaggcgaagatctatcgtatgtttggcagagagaagcctgttcacaaggttctcggtggtggaaagcctgctgatgtgttcttgtggagggataaaaaactatcaggtgctgttcttggtgtcgcgactgctatttgggttctgttcgagctggttgagtatcatttgttgagtcttttgtgtcacatttcgatactcgctcttggaggcc

SEQ ID NO: 89430 - DNA, 1015 bp, Arabidopsis thaliana columbia
  unsure (1)..(1015): unsure at all n locations
cagctactnnnnnnnnnnnnnnnnnnnnnnnnnnnnnnnnnnnnnnnnnnnnnnnnnnnnnnnnnnnnnnnnccgcgcgtgcggccggacgaaggagaggcagccgcctaagaagttgccgtcgtgcgccatggccgtgaaggcttctggattcattgggaaatcagcaatctctgttcatctagatttctcttcgtttcctgtgaaattttcatgcttgaaacagttttctgtatcttcaccaaagccactggtcgttttatccgttgccttatcgtcgccggcaagaacagttgagtctccgcctgttggttaccggaagaatgttgggatttgtctcgttagcccatgtagaaagatttttacggcgtcaaagattcacattccggatacatggcagatgcctcagggtggtgctgatgagggagaagatttgaggaacgctgcctttagagaactgagagaagaaacaggggttacttcggcagaattcattgcggagataccaaactggctgacctatgattttccccgagaagtaaaggacaaactaaaccggaaatggcgaacaagttacaaaggccaagctcagaagtggtttctctttaagttcacgggcaaggaagaacgagataaatctccttggagacggtactgcaaaaccagagtttaaggtgtggtcgtggatgctaccggaacaagttattgaacatgctgtatatttcaagagacctgtttatgagcatgtcataaagcaattcaacccttattttgtggatgaagaaaaggattccatgaactcgtctaaggattgaatgtgcacaaagattcaccaagtgaatactgattagaagcaaatcaatcaattcattatactggtttctcttgaatctcatcaaaaataaaaattcatgaatctcagccaaaaaaaaaaaaaaaaaaaaaaaaaggccggccgctctagaggatccaagcttacgtacgcgtgcatgcgacgtcatagctattctatagg

SEQ ID NO: 89431 - DNA, 630 bp, Arabidopsis thaliana columbia
  unsure (1)..(630): unsure at all n locations
nnnnnnnnnnnnnnnnnnnnnnnnnnnnnnnnnnnnnnnnnnnnnnnnnnnnnnnnnnnnnnnnnnnnnnnnnnnccacgcgtgcgcccacgcgtccgcccacgcgtccgcccacgcgtccgcccacgcgtccgcccacgcgtccgatttcatatataaagtaaaacattttgaggtatgtaaccgatgtgggacaaaatacaagtttgggcttcccagatcccacatttggtggaacacatatataaagagtctcttcgttgattagcttcccagatcccacatttcagtgggaggagctcttctcagaccttaagactattgctttagtggaatgcttctcgtaaatgtataagtgaggaaagaaactccattcgtatctatctactaccctaagccgtttatgcattttctgtccatcagaagatcaacacctgtttctggaggattccattgatttaagggattagatggatgatggaccatgtgggattcagtagatgacaagaacacaaaggaatccacctaacagagaccacccacatgttngcaggaaatacatttaataatatcacaagaaacggaaaaggaagcagacagagacacctttttttgatttaacgccttaca

SEQ ID NO: 89432 - DNA, 687 bp, Arabidopsis thaliana columbia
ttttaacttgctgtttttcacaccaggaaaaatgaagtcttgtctagctacttttgctctcgcagtgttagtaacacaaggaagcatttttagtttgtgtttggcctcctctgcttctacaaactctgttcctaattggtttcatcattggccgccgtttaaatggggaccaaaatttccatattctccacctaaaccgccgccaatcgagaaatatcctccaccggtgcagtatccaccaccgatcaagaagtatccaccgccaccatacgagcatccaccggtgaagtatccaccaccgatcaagacttaccctcatccgccggtgaagtatcctccaccagaacagtatccaccgccgattaagaagtatcctccaccagaacagtatccaccgccgattaagaagtatcctccaccagaacagtattcaccgcctttcaagaagtatcctccgccagaacagtatccaccaccgatcaagaagtatcctccgccagaacattatccaccgccgataaaaaagtatcctccgcaagaacagtatccaccaccgattaaaaagtatcctccgccagaaaagtatccacccccgatcaagaagtattcttcgccagaacagtattcaccgccgatcaagaagtattctccgccaaataagaagtattcttcgccagaagagttttc

SEQ ID NO: 89433 - DNA, 535 bp, Arabidopsis thaliana columbia
  unsure (1)..(535): unsure at all n locations
nnnnnnnnnnnnnnnnnnnnnnnnnnnnnnnnnnnnnnnnnnnnnnnnnnnnnnnnnnnnnnnnnnnnnnnnnnnnnnnnnnccaggcgtgcgcccacgcgtccgcggacgcgtggggcgaacgattatatctctgctatcaatcacagctcggcatccagaagcttctgaagctggattcgaagccctccggtttataatgtcagaaggagctcacttgttaccatcaaactacgagcgctgtttggatgcagccagtcactttgctgaatcccgagttggtgaagtcgatcggtctatctcagcaattgacttaatgtcaaactctgtgttttgtcttgcaagatggtctcaagaggcgaaaaactccgattggtgaaactgatgctatgatgaaactaagtgaagatattgggaaaatgtggctcatactttgggaagaacctcaaaaaagtatgtcttgatcaacgcgacgaatgggaaaccatgcatttcaatggtgcaacagctatagccggggcagacgggatcatgt

SEQ ID NO: 89434 - DNA, 309 bp, Arabidopsis thaliana columbia
  unsure (1)..(309): unsure at all n locations
caacaaaaaaaaagaaaggagaaatggttgtgatcctatcatagaanggngagtgtcaatggcataacaatgcacattgccgagaaaggtcccaaagaaggacctgtggtgcttctcctccatggattccctgatctctggtacacgtggcgtcaccagatctagtgggttatcatctctaggttaccgcgctgtagctccagacctccgaggctacggagactctgattcgccggagtctttctccgagtacacgtgtcttaacgtcgttggggacctcgtagctcttctggacagtgttgctggaaa

SEQ ID NO: 89435 - DNA, 635 bp, Arabidopsis thaliana columbia
  unsure (1)..(635): unsure at all n locations
aacccaagcgtccgcaaattcccaacttggcctctctttttcatcttttgggtttttatgttcactcttctctgcttcattcctctttctacttccaggaaataaaaacttctaatcaaagagcaagagattaagaaatgtatgcagaaactagcttagctttccgattcatgcagagttcttcttctccagagattcaccaatttgaagacctctttaaatcctacaagctctctgatgaaatgaacaatcttgttgaggcaagtgagtatgattttggagaagagagtgacctattcaaagcccctgagccgattattgaagaaccaatgttagctgttgatcccctctctcaagagcttgttgaactcggtgatctcgggtcgttgcagagtgaccaacagcttatagacaaggctttctacggctgtaagcaggacctcctggtgaaatcagccatggagtctccgctctccgaggtactagacatcaagaacatctctttagtggcaaaaatggccaacgttgtgaagggtacgggtttaggcgcctctaatgtcccaattcccagggggttagcctcgggaacttaagctcatgggatttgngggcccaannacggggtttanggtncc

SEQ ID NO: 89436 - DNA, 533 bp, Arabidopsis thaliana columbia
  unsure (1)..(533): unsure at all n locations
actcaagagagactttgtggccatggcagcctctctccaatccaccgctacattcctccagtcggcgaagatcgccaccgctccttctcgcggaagttctcacctccgatcgactcaagccgtcggcaaatcttttgggctcgaaacttcctcggctcgcctcacttgctccttccagtctgactttaaggacttcaccggtaaatgctccgacgctgtcaaaatcgccggattcgctcttgccacctctgctctcgtcgtctcgggagcaagtgcggagggagctccaaagagattgacctatgatgagattcagagcaaggcatacatggaagtgaaaagggactggaacgggctaaccaagtgccctactattgacccggtggctcttagacttttttggttcaaaccccggaaaggtttcaggaaagaaggttctcctttgggcctatttcctttaccggtaaggcaggcagtttatgaaaggacgttctccgnggtttagacanaaagtatgnccgttncctaacctt

SEQ ID NO: 89437 - DNA, 1146 bp, Arabidopsis thaliana columbia
  unsure (1)..(1146): unsure at all n locations
gagaagaagagtattttgttgtgtttgtgataacatgtttatgatttgcatttctatgtatcgaagttggcacttgagaacacctaaaccaataacagactcggatagtataatagaaggagaaaccgctattccaattctgtaatcttcgattcatgtagatacaatcttcttggatcagtgagtttgatttaaaagttgcttgtttctcgtgtaatgaaagggagcaagtgcggagggagctccaaagagattgacctatgatgagattcagagcaagacatacatggaagtgaaaggaactggaacggctaaccagtgccctactatgatggggctctagccattctcgtcaaagctggtagtacacaggcaagaagttctgcttcgagcccacttccttcaccgtcaaggcagatagcgtcagcaagaatgcaccgccggatttcaaaacaccaagctcatgacccgtctcacttacacactcgatgagatcgaaggacccttcgaggttggttcagacggaagcgtgaagttcaaggaagaagatggtatcgattacgcagcagtcacagtccagcttccgggaggagaacgcgtgccgttcctcttcacggttaagcagctcgaggcttcagggaaacccgaaagcttcagtggcaagttcttagttccatcgtaccgtggctcgtcctttttggacccaaagggtcgtggtggatccactgggtacgataatgcagtggctttgcctgccggaggcagaggagacgaggaagagctatccaaggaaaacgtcaagaacacggcggcttccgtcggagagatcactttgaagatcacaaagagcaaaccggagacaggtgaagtgatcggagtgttcgagagtcttcagccatcggatactgacttgggtgctaaggtaccaaaagatgtgaagatccaaggggtttggtacggtcagattgagtgattcatataatttgttacttttgtaaaattgtattgaaacaacttctttctatcaatatatatatatatatattaacgctcgataaaaaaaaaaaaaaaagnnnnnnnnnnnnnnnnnnnnnnnnnnnnnnnnnnnnnnnnnnnnnnnnnnnnnnnnnnnnnnnnntgtcctaa

SEQ ID NO: 89438 - DNA, 762 bp, Arabidopsis thaliana columbia
  unsure (1)..(762): unsure at all n locations
gcnnnnnnnnnnnnnnnnnnnnnnnnnnnnnnnnnnnnnnnnncccccggcaggacccggcccggaatacccggttcgacccacgcgtccggcgaaacaaaatctctcctctgattattactactcaacttcgcattatcactcaaacaaacatattgacatctgagtcttgtcatcatggcaacttctctccaagccgccgcaacttttcttcaaccggcgaagattgccgcttctccttctcgtaatgtccatctccgatcaaaccaaaccgtgggcaagtcctttgggttagactcttcacaagctaggctcacgtgctctctccactctgacctcaaagacttcgctggaaaatgctccgacgccgccaagatcgccggttttgctctagccacctctgctctcgttgtctcgggggccggtgcggagggagcaccaaagaggctaacgtacgacgagatacagagcaagacttacatggaggtaaagggtaccggtacggcaaaccagtgtccaactatccgatggttggctctggagacattctcgtttcaaagctgggaaagtacacaggcaagatgttctgcttaggggcccacttccttcaccgtcaaggcagatagcgttagcaaggatgcaccggcggatttcaccaaaaccaaagttattnccggtttatttnaaatngntngancnagggccttnggggttgtttaacggaggtaantaaggaaanttgtttgttgggattaanccntt

SEQ ID NO: 89439 - DNA, 940 bp, Arabidopsis thaliana columbia
  unsure (1)..(940): unsure at all n locations
nnnnnnnnnnnnnnnnnnnnnnnnnnnnnnnnnnnnnnnnnnnnnnnnnnnnnnnnnnnnnnnnnnnnnnnnnnnnnnnnnnnccacgcgtccgcggacaacatattgacatctgagtcttgtcatcatggcaacttctctccaagccgccgcaacttttcttcaaccggcgaagattgccgcttctccttctcgtaatgtccatctccgatcaaaccaaaccgtgggcaagtcctttgggttagactcttcacaagctaggctcacgtgctctctccactctgacctcaaagacttcgctggaaaatgctccgacgccgccaagatcgccggttttgctctagccacctctgctctcgttgtctcgggggccggtgcggagggagcaccaaagaggctaacgtacgacgagatacagagcaagacttacatggaggtaaagggtaccggtacggcaaaccagtgtccaactatcgatggtggctctgagacattctcgttcaaagctggtaagtacacaggcaagaagttctgcttcgagcccacttccttcaccgtcaaggcagatagcgtcagcaagaatgcaccgccggatttccaaaacaccaagctcatgacccgtctcacttacacactcgatgagatcgaaggacccttcgagggtggttcagacggaagcgtgaagttcaaggaagaagatggtatcgattacgcagcagtcacagtccatgcttcgggaggagaacgcgtgccgttcctcttcacgggtaagcagctcgaggcttcagggaaaccccgaagcttcagtggcaagttcttagttccatcgtaccgtggctcgtcctttttgacccanaggtcgtggtggaccactgggtacgatatgagtgctttgctgccggagcaagagacagaaagcttcaggaaacgcagacacgcg

SEQ ID NO: 89440 - DNA, 1170 bp, Arabidopsis thaliana columbia
cattactttgctcacagctttggaccgcaaaaaaaaaaactcaagagagactttgtggccatggcagcctctctccaatccaccgctacattcctccagtcggcgaagatcgccaccgctccttctcgcggaagttctcacctccgatcgactcaagccgtcggcaaatcttttgggctcgaaacttcctcggctcgcctcacttgctccttccagtctgactttaaggacttcaccggtaaatgctccgacgctgtcaaaatcgccggattcgctcttgccacctctgctctcgtcgtctcgggagcaagtgcggagggagctccaaagagattgacctatgatgagattcagagcaagacatacatggaagtgaaaggaactggaacggctaaccagtgccctactattgacggtggctctgagactttctcgttcaaacccggaaagtatgcaggaaagaagttctgcttcgagcctacttccttcaccgtcaaggcagacagtgtaagcaagaacgctcctccagagttccagaacacaaagctcatgacccgtcttacctacacccttgacgagatcgaaggacccttcgaggttgcttcagacggaagcgtcaatttcaaggaagaagatggaatcgactatgctgcagtcacagtccaacttccaggaggtgaacgtgtgccattccttttcacagtcaaacagcttgacgcctcaggcaaaccagacagcttcaccggaaaattcttggttccatcgtaccgtggctcttccttcttggacccaaagggccgtggtggatccacaggatatgacaacgccgtggcattgccagctggaggcagaggagacgaggaggagcttgtaaaggagaacgtgaagaacactgccgcttcagtgggagagatcactctgaaagtgacaaagagcaagccggagacaggagaggtgatcggagtgttcgagagtcttcagccgtcggatactgacttgggtgctaaggtaccaaaggatgtgaagatccaaggggtgtggtatggtcaacttgagtgatcatgttattatattttccgttgattgtgtttgatgataatgataacatcttttgatgctttcttcgtttatctctcttatataaaatgcacatgcctaagatcttgaatt

SEQ ID NO: 89441 - DNA, 431 bp, Arabidopsis thaliana columbia
cggtaatcggaaccattatatgggcggtcgggttagcgaatcagcacggttactcgttggacaaactaccggaaaagaaacttgattttaaagattccgggatagagtttgcgggaccattcgtgttatatatgagctatgcattgttagatgcaatgtatcagagtatggtttattggttgataggagcattggctgatgattcgcagactttgagtagatatagtggattctacaaaggagtgcagagtgcaggagctgcagtggcttggcaagtggatactcgtaaggttccgttaatgtcacagcttattgttaattggtcacttactactgtaagttatcctttacttgttcttcttgtgtatttttatgttaaaaatgataatgatgatgatagtaatgataaggtttagaagatagtagttatt

SEQ ID NO: 89442 - DNA, 545 bp, Arabidopsis thaliana columbia
  unsure (1)..(545): unsure at all n locations
nnnnnnnnnnnnnnnnnnnnnnnnnnnnnnnnnnnnnnnnnnnnnnnnnnnnnnnnnnnnnnnnnnnccacgcgtgcgcggacgcgtgggcggacgcgtgggcaatcagctcctctcgatttccgtttgtcggaaaatctctcccgtgatcggcgtattgtgaatgccgctcaccgagatattctccgattcttttccccagtgaggacaagtgttcagttgacttattaggaggtggggtttgaataagttacaatggcctcaattcttaatcaaacccaggagttgcaagaatcttctaagggtcttgggcatttaagatgtgaaaacttctttctattccccggggaaaaacactttgtcagatgggttgaggggggggttatattttcgcgggcttgcctactggtttatgggggtggcaggcattactgggacggtcttcagggtatgggaaatggcgggaaacttcccggaaagggggacaattggtccccttactaaggctgagagcatcacatacaagagaggggggaactttacta

SEQ ID NO: 89443 - DNA, 398 bp, Arabidopsis thaliana columbia
acccacgggcccaaaaatactcaaatggctagcttctccacagcacaacctctctctctgccacgtcatccaaacttcttcaatccgaatcaaccaactaccaataacgaacgctcccgccacatttctctgatcgaccgatgtgtgtctctccgacaactaaagcaaacccatggtcacatgatccgtaccggtacgttttccgatccttactcagctagcaagctattcgcaatggcagcgctctcttccttcgctagtctcgagtatgcacgcaaggtgtttgatgaaattcctaaaccaaattctttcgcttggaatactcttatccgtgcttacgcttctggaccagaccctgttcttagcatctgggctttcttggatatggtttcggagag

SEQ ID NO: 89444 - DNA, 273 bp, Arabidopsis thaliana columbia
cccacgcgtccgctaattttctctgtttgatttgtcctctcaacaatggcggcttcatcatcttcgtcttcctccgacgtctcctctgattcttcagactcgcatcgtcgccgtaaggatcgccgtcatcatcggagaaacgatcgagacagagactcgctcaaagtacgggaaaagagccgatccacctcgaaaaaacgccgtagacgccaacactcctccgattcctctgattcttcttactccgattcctccagtgagagctcagatagt

SEQ ID NO: 89445 - DNA, 486 bp, Arabidopsis thaliana columbia
gacaacacaaaaaaaaagtgttaagagatccttctccctcttcgaagatgagcggtacggtgaaggatatcgtttcaaaggcggagcttgataacttgcgccagagcggcgcaccagtcgtgcttcacttctgggcttcttggtgtgatgcttcgaagcagatggatcaagttttctctcatctcgctactgatttccctcgtgctcacttctttagggttgaagctgaggaacatcctgagatatctgaggcttactctgttgctgctgtgccttatttcgtcttcttcaaggatggtaaaactgtggatacacttgagggtgcagatccatcaagtttagctaataaggttggcaaagttgctggttctagtacttctgcggagcctgctgctcctgcaagcttagggttggctgctgggccaacgattcttgaaactgtgaaggaaaatgcgaaagcttttttacaagaccgagctcaacctg

SEQ ID NO: 89446 - DNA, 550 bp, Arabidopsis thaliana columbia
  unsure (1)..(550): unsure at all n locations
cgaagctttgatttcatctccgatatctcccgccggatttcacacaatacttgaatcagatgagaacgaagactgcgaggagtttacaggattttccgttaatactccgtcacctttaacggcgaaattgttaacggatcgaaacgtggacgttaagctctctccggaatcggctatcgttgcgtcgggtaaaggctacgagacttactccgtcgtcatgaaggtgaaatcgccaccgtttccgacggcgcgtggatttgcgcgtagagtgccggtggatttggttgctgttttagacgtaagcgggagaaattccggtgggaaattggagatgttgaaacaaacgatgaggattgtgctttcgaatctccgggagatggatcgtttatcgattattgcgttttcgtccagctcgaaacggttatcgccgttacggaggatgacggcgaacgggaggagaccggccccaagaatcggtggtatcaatcaccgtncctgggttttntccggggtggaattnaatttnccggtnaagggntagtttnacacc

SEQ ID NO: 89447 - DNA, 605 bp, Arabidopsis thaliana columbia
acgccagctctatacgactcactattagggaagctggtacgcctgcaggtaccgggtcccggaattcccgggtcgaccacgcgtccgggagactcgacgagtcaattttaaccagatttagaggatttgtggatgtgatttcttcttttggtctcttctctttgggattttttttcattggaattgagcatacacatgtgttttccgaatagtttttggagtgagaattaagtttggattgttgattctcttcctctggtcatggaggagccttgtgagacacttgacagtggtgaagcctatcaaatatctagatatcataactataaccaacacagctccagaagctcatctccctggttggatttgagagtgttctatgtccggataagcaatttcgtggtggaagattcaactcctgaggtcctcactatcaatcacattcctctggatccagatacgcttttggagattaacggtgttagaatgggaatgtactcagaaggaggttcttcacagctttaaggagagatcgggttgcataaagaaatcttgaaggagctaccttatgtcagcacagacaatatcaggttaactggtagtgt

SEQ ID NO: 89448 - DNA, 527 bp, Arabidopsis thaliana columbia
  unsure (1)..(527): unsure at all n locations
cggaggaagcnccctganccaacggccctgaantgttaacccnctgatagtaggnacncncgngaaagaaccggatntcgcgcttncacatgagtcttacccgcagacttgtccccttgccttaactcaagaacgccgtgtgaagttctttgctgagaatgagatatgcaagaatgagtagtagtagagagagactagagaataactgtctttgacaaagattcttgcatcattttaggctcaaagagattcacatggcaacaaccatagtttttatcttctacagtctacactgcagctggagccgccagttttgctgtatagtgttagaatatcttttttttttttaaggatgatgctaaaattggatatttttaattcattcattgaacaattattgaattttccttctaatgttaaattctctttcaaattaaaaaaaaaaaaaaaaaaaaaaaagggcggccgctctagaggatccaagcttacgtacgcgtgcatgcgacgtcatagtcattctatagtgc

SEQ ID NO: 89449 - DNA, 690 bp, Arabidopsis thaliana columbia
agctccctacgactcactatagggaaagctggcacgcctgcaggtaccggtccggaattcccgggtcgacccacgcgtgcgatggtaatcgtcggcggatggtttagactttagagataacagaagaagacctcatctttagagtccggagcgaaattaatggcggccatagctcgtcttccactaactcattctcttccctccatcttcaatccttcatccttcctctctcagtctctctcttttcctacttatctccatcgctctccctttcgctccttctcctccgtctctccaatcctctgcacctcccatcgcgattcgagatcgccggggagtgattctaatgcgtcgattgttggggatcttctggattatcttaatgaatcctggacacagtttcacgccactgctgaggcgaagagacagcttttggctgctgggtttgatctcctcagtgaaaacgaagactggaatctgaaacctggtggccgttacttctttacacgaaacatgtcctgtttggttgcttttgctgtcggagaaaagtatgtgcctggtaatggttttcatgccatagctgctcacaccgatagcccgtgtcttaaacttaaaccgaagtctgcttcatccaagtctggctatctcatggtgaatgttcagacttatggaggtggtttgtggcacaca

SEQ ID NO: 89450 - DNA, 541 bp, Arabidopsis thaliana columbia
atttttatctcactcttcttcctcttcacctgtaatctctccaaaatcagaaaaatgacttcttcagtactaaccccaagcttaaagcttttagctatgacgaattcttcctcttcgacccttttttgtattccttctatcttcaacatctcgtcctctgaatctcaccgcttcaatttttccttatcttcacgacccgttaatctcacactctctctcaaatccaaaactcttcgtaactcatctcctgttgttactttcgtttcccaaacttcgaattgggctgaggaagaagaaggtgaggatggaagcatcggaggtacttcagtcactgtagatgagagtttcgagtctgaagacggtgttggattcccggagccaccggaagaggctaaattattcgtcggaaacttgccgtacgatgttgatagtcaagctttagctatgctctttgaacaagctggtactgttgagatttcagaggttatatacaatagggacactgatcaaagtcgtggatttgggtttgtaacaatgagta

SEQ ID NO: 89451 - DNA, 569 bp, Arabidopsis thaliana columbia
atgatactccagctctcctacgactcactattgggaaagctggtccgcctgcaggtaccggtccggaattcccgggtcgacccacgcgtgcggtgagacagagcctcacataaataaaaagtctcctaatctgaatacaactattactaacaataattcacttatctaaagaccatcatctgactgactctacgctgaatcatcacgaggaagacttgaatcgaccggagaagagatacgtgtagagatctgattggctcaccggagagaacaaaacaagaaatggggaggacgacgtggttcgacgttgacgggttgaggaaaggagagtggacggcggaggaagaccggaagctcgtggtttacatcaacgaacacggtctaggcgagtggggttcactgcctaagagagccggtctacaaagatgtggaaagagttgtagattaagatggctgaattatttgaggcctgggattaaaagaggcaagttcactcctcaggaataagaagaaatcatcaaataccatgctcttcttggaaacaggtgggcagcaatagctaagcaaat

SEQ ID NO: 89452 - DNA, 1189 bp, Arabidopsis thaliana columbia
  unsure (1)..(1189): unsure at all n locations
tgcnnnnnnnnnnnnnnnnnnnnnnnnnnnnnnnnnnnnnnnnnnnatcccaatcaatatttccaccactgaaatggtactccacgcgtccgtcttatttcattgcacccgctctcgccttctgcaactcttatggaacggggctcacagactggagcctagcatcaacctatggaaagatcggtcttttcataatcgcttccgttgtaggaagtgatggtggtgtcattgcgggtttagctgcctgtggtgttatgatgtcaatcgtctccaccgcagctgatctcatgcaagacttcaaaacaggttacctcactttatcatctgcaaagtccatgtttgtaagccagctcgtgggaaccgcaatgggctgtgtaatcgctccactcacattctggctgttctggactgcctttgacattggagatcccaatggtccgtacaaagcaccttacgcagtgattttccgtgaaatggcgattctcggaattgagggctttgctgaattgcctaagcactgtttggctctttgtacgggtttttcatagcagctttgattgtgaatctcttaagagatattacaccgcctaagatctctcagttcatcccgatcccaatggcaatggctggcccattctacattggagcttacttcgccattgacatgtttgttgggactgtgatattgttcgtatgggaacggatcaacaggaaagatgcagaggactttgcaggtgcagtagcatcaggactgatctgtggtgatgggatctggactataccatccgcaatcctttcaatcttaaggatcaaccctcccatttgtatgtactttggaccgtcctcagcaagatagagatgccactgtggtcataatcgcaaccgcaactgtgagtcatacaaaaggaaacttatccgagagtcttgtggccgtcagaatcgaaacagttgtcttcatatgttgtgtagatatgtttagtatctcagctcgcaagaacaaaatgttgttgcaaatctcttcaaatgttttagtcaatgttgttgtatgtccccgggatgttgtctcccttgaatgctttcattcacaagctcaaagagttttaggncaaaaaaantnnnnanannnnatnaaaagggngcccgttttgggggncccancttncggcccgggnnattngncgggnatggc

SEQ ID NO: 89453 - DNA, 615 bp, Arabidopsis thaliana columbia
  unsure (1)..(615): unsure at all n locations
nnnnnnnnnnnnnnnnnnnnnnnnnnnnnnnnnnnnnnnnnnnnnnnnnnnnnnnnnnnnnnnnnnnnnnnnnnnccgngcgtgcgtctcgttctgattaccatgaagaggttatcgaacttttcaaacacatgcttcaatcaaacatccgccctgataagtacacattcgttagtatcttaagtttgtgttctaagctctgtgaccttactcttgggagttctattcatggtttgatcaccaaaacagatttcagctgcgctgacacatttgtatgtaacgtactaattgacatgtatgggaaatgcggaagcattaggagtgtaatgaaagtctttgaagaaacaagagagaaaaacctcattacatggacggcattgatttcgtgtcttggcatccatggatatggacaggaggcacttgaaaagtttaaggaaacactgtctttgggttttaagccagatcgtgtctcgttcatctctattctaactgcttgcagacatggtggtatggtaaaagaaggaatgggtttgtttcaaaaaatgaaggattacggtgttgaaccagaaatggatcattatcgttgcgccgttgatcttttggcaagaaatggtt

SEQ ID NO: 89454 - DNA, 492 bp, Arabidopsis thaliana columbia
  unsure (1)..(492): unsure at all n locations
aggtgactggtccaatgcacagggaagttgcaaactgctgcaggtacctggctatggttttgtaccatgcaggagatatggctggggccataatgcagcaacacaaggaactcattattaatgagcgatgccttggtttggaccatcctgatactgcccatagctatggcaatatggctcttttctaccatggactgaatcagacagaacttgctctacaaaacatgggtcgagccttgcttctacttggcctttcatctggccctgaccatccagatgttgcagctacatttataaatgttgccatgatgtatcaagacatgggcaaaatggncacagctctacgttatcttcaagaggctttnaagaaaaatgagagncttcttggtcctgnanacattcagnctgcagtatgctaccacgntcttgncattgcgttcaaactgtatgggngcattcaggcttttcananccatgcatgtgaaggaaaac

SEQ ID NO: 89455 - DNA, 595 bp, Arabidopsis thaliana columbia
  unsure (1)..(595): unsure at all n locations
cnnnnnnnnnnnnnnnnnnnnnnnnnnnnnnnnnnnnnnnnnnnnnnnnnnnnnnnnnnnnnnnnnnnnnnnccacgcgtccgggaggtggttcggacaacagtagcatgcgagtgcgtgtatgtccgggcaatggttatcaaagcattgatatggatgcaaagtccagatgaatcattggatgagttaaaatcaatcattgcctcggagctttcagatcctggttggcctgcagctctagtcaatgatgttttgcttactttgcatgcccgctttaaggcaactccagatatggctgttattcttctcgaaattgccagaatatttgccaccaaagttccagggaaaattgacgctgatgtcttacagctgctatggaagacatgtcttgttggagctggtcctgacgggaaacacacagctctggaagcagtcacgatagtactcgatctaccacctccacaaccggggtccatggctggactgacatcaattgatagggtctctgcatcagatcctaagtcagctctggcgctgcagaaattggtgcaagcagcagtatggttccttggagaaaatgcaaactacgccgcat

SEQ ID NO: 89456 - DNA, 641 bp, Arabidopsis thaliana columbia
  unsure (1)..(641): unsure at all n locations
ctctaatacgaactcactttagggaaagctggtccgcctgcaggtcccggtccggaattcccgggtcgacccaggcgtccgcccacgcgtccgcggacgcgtgggcggcgacgaagctctctctctctctctctctcgcttcgacctctctttcgactcctactccggctccagctgagcttgagaagagaaagcacaagctcaaacgtcttgttcagtctcccaattcctttttcatggtaatgtaaatttgaaacctttctccttcttttgaaccctttaggaacaaagtctctgtggttagaatctatgtaactactcgactttgtgaattgtatgtaagttttgagtctgtgggagacgtgggaggtcatcttcttactctagttcaccaagtcatctttttttttgtgtgggtttctctgttaaatcattctccctgtagccattgtagtctcttttctttacttgtaggtgcatatagagagtcttagatgcatgtttgagttgtcactgttgattacttcatttcatggttgatggtatgggggtataaatagggcttttaacgagattgtgggaaaatgcattgaaaataacatcatgganggggtgccanggggggcattgncaaaggctgc

SEQ ID NO: 89457 - DNA, 1207 bp, Arabidopsis thaliana columbia
  unsure (1)..(1207): unsure at all n locations
aactcactatagggtaagctggtacgcctgcaggtaccggtccggaattcccgggtcgacccacgcgtccgcttaagaaaaacaaaaacaaaaatcaaatgagctccttcaccaccaccaacactccgccaccgtatctcctccggaaaatttatcatcgccgtgtaaaccaaccgttctccgtcgtatgttgcaccggagaaccccaacaagacatcttcacccgccggagaaccttgacttcactaataacattcacggtcatcggcggtgctacgtcatcagcattagcacaggagaaatgggggacaaggtcattcataaaggagaaatattttatgccgggactatcacctgaggatgcggcggcgcgtataaaacagacggctgaaggattaagagacatgaggggagatgttggaccacatgtcgtggagggtacgttatattctacataagattgaaacaggcttatctgtctcaggatctcaccaacgccatgaacatcttgccggagagtcgccggaatgattacgttcaggcggcaaacgagcttgtcgaaaacatgagtgagttggatttctatgtacggacgccaaaggtgtacgagtcctatctttactacgagaagacattgaaatcgatagacaatgttgtggagtttcttgcttaattcagttgtattgtatatatgtctttcttcattcttcacatgaaatctctggactcgttacattagatataaaattaaaagacttaataatgtatattcaagaaacatttcgtttgcgtgatttctctgcaaaatcagatcgatatatatatgtgcatagatatcttagtggcgagagagggagatagcggaattgataacaataagcatgagtaagatcactgcgcagaaagaaccgatgagagatcccgagatgcgttcacagaatccgtcaaattgctggcagatcggtgggccaattagcagttgtggttcccctcgtgagctaaatacacggngggctgttgctgcagatgctccagagctaacccaagccagcatcaccgtgtcgacaacgngcaagatggtccccgnggnttagcttgggacctgaggtttggaagnnncccnagggagggaaggnccaattcccccanatgggggttgcaccccgaaaaatggcgtggaaaccnggattacttccaagncggggct

SEQ ID NO: 89458 - DNA, 755 bp, Arabidopsis thaliana columbia
  unsure (1)..(755): unsure at all n locations
ctatatcggctcacgctggggcgcgcgcgggcaccggcccggccggtccggatttcccgggtcgacccacgcgtccgcgtgtttcgattctatcatctcatttctcacctgcctccgccgtcatggcttccgagaaagaagctgctctcgccgccactccttccgattctcccaccatatttgacaagatcatcagcaaagagattccatccaccgtggtttttgaggatgacaaggtcttagcttttagggacataacgccccagggtcctgttcacatcctccttattccaaaagtgagggatggcctaactggcctctctaaggctgaggaaaggcacatcgacatcttgggccgccttctctacactgccaagcttgtagcaaaacaagaaggcctagcagagggtttcagaattgttatcaatgatggtcctcaaggctgtcaatcggtgtatcacattcatgttcatctcattggaggacgccaaatgaactggcctcctggttaaagatcatcttgaagtggattgttgtcctgatgataagagggacgcttagagtttgctctcgtcgactaatgtctctataaataataaaacgtgggacatgacttttatgattgttatgcaaaaccttattttatgttatgaaaaggatatttcactaaattaaaannnnaaaaaaaaaaaaaagggcggccgctctagaggatccaagcttacgtacgcgtgcatgcgacgtcatagctcttc

SEQ ID NO: 89459 - DNA, 560 bp, Arabidopsis thaliana columbia
tacgacttactataaggaaagctggtacgcctgcaggtaccggtccggaattcccgggtcgggccacggcgtgcgcgatcaacaagcaagtcgtgttacttgattacgtaaccggtttcgccaaggaatccgaccttgtaatcacctccaccaccatcgatcttagggtgctaaagggatctatgacggcgttggtgaagaatctctacttgtcttgtgatccttacatgcgaaatcgtatgaggaaacctgatcctctgagccctgctactgctcagtccttcactcccggcaagcctatctcagggtttggagtgtctaaagtgatagattctggacactcacattacgaagaaggtgacttaatttggggagcagtaggatgggaagagtacagtgttattacaccaattcctaatcttcacttcaagatccatcataccaattttcctttatcttactacacaggacttctgggttgcccgggaaacccggttggtgggttttcaaaatatgcctcaaaaaaagaaaacctggtttgttcggttcttttgcccggt

SEQ ID NO: 89460 - DNA, 484 bp, Arabidopsis thaliana columbia
agaagataaaaaaatacgagactgtattaaaaattatgtccaaaaaaatataagaatatcctctggtatggagggtattgcacgtattgaaattcaaaaaagaatcgatctcatccagatcataatctatatgggatttcctaaattattaattgaagataaaccccgaagagtcgaagaattacagatgaatgttcaaaaagaactaaattgtgtcaatagaaaactcaacattgctattaccagaatttccaatccgtatggggatcctaatattcttgcagaatttatcgctggacaattaaaaaatcgcgtttcttttcgaaaagcaatgaaaaaagctattgaattaactgaacaggcgaatacaaaaggaattcaagtacaaattgcaggacgtatcgacggaaaagaaattgcacgtgttgaatggatcagagaaggcagagttcctttacaaacaattgaagctaaaattgaatat

SEQ ID NO: 89461 - DNA, 1521 bp, Arabidopsis thaliana columbia
  unsure (1)..(1521): unsure at all n locations
cnnnnnnnnnnnnnnnnnnnnnnnnnnnnnnnnnnnnnnnnnnnnnnnnnnnnnnnnnnnnnnnnnnnnnccacgcgtccgtacggctgcgagaagacgcagaagggtacagatgaatgttcaaaaagaactaaattgtgtcaatagaaaactcaacattgctattaccagaatttccaatccgtatggggatcctaatattcttgcagaatttatcgctggacaattaaaaaatcgcgtttcttttcgaaaagcaatgaaaaaagctattgaattaactgaacaggcgaatacaaaaggaattcaagtacaaattgcaggacgtatcgacggaaaagaaattgcacgtgttgaatggatcagagaaggcagagttcctttacaaacaattgaagctaaaattgattattgttcctatacagttcgaactatttatggggttttaggaataaaaatttggatattcgtagacgaagaataaaaaaactttctttatctttatattttatccgacgataaaaaaacgaaaattatataacccgatacagacagtaataaaaaattgcagtcttcttttttatgtttaaaaataaaataagcaattctataagattgaataaaaatttccatcaagactcctttgatataattgctatgcttagtgtgtgactcgttggtttaggattagataaagataaaaaaaaaagaaaaaagaacttacctataacagaaactaataactatagcattaatagaataacctaagcaactcattgcttcacattatctggataaaaaaatcagtcaagatatgatggattgatcatattattgtagcaactgaaaaaaaaaaagaataaagaactataattataagttatgaaaggtaatcgaaaagtatgcggattcagtggaaggatgaaagaaagagagaaaaaattgaatattaatgatatattattccaatttggaaagtctatgaggtcactgtaagaaaagcaatgtaataaagcatcaatacagattcattcagaataattagataaatctgttccgaaaacaaaaaaaattaagagccttgagccaataaaaactaagaaaattgactcaaaaacaaataaaaaaaatgaaattcccgatttcatataagagctccattgtagaattcgggcctaatgattaatcaagaagcgatgggaacgacggaacccatgaatatagaggattctattgaaaaataaatcttagtaattcattggacaggatggcggaataaaccagattattatctattcttatttttattcagagatctcctgggataaacaacaaacttaatatagatattgaaagagtaaatattcgccggcgaatactttttttttaataaaagtaataaaaaacaaaaattaaaaagataaaagaaaataaggatttgttagaatattctaacaaaaacgacattcgagatgatgatattacgttacgttatttttaaataaatagaattaatcttggatt

SEQ ID NO: 89462 - DNA, 911 bp, Arabidopsis thaliana columbia
ctccaccaatctctctttctctctctcaaaacaagagaaactaataattctcaaaagctcacacacagaaacagaggaatctataaggaagttttggtttttggttatcaacaatggtggaagcaaaagatcaagatatgggtgatggtatgcaatgtataaaccatccatttactaaaaacccaggtgggatctgtgctttttgtcttcaagaaaagcttggaaagcttgtaacttcatctttcccacttcctaaacacctcacttcctcttcaacttcttcttctccttccttcagatctgactctgttggtagcacaaccactgcctctgccgcaaatctctcagcgtctctttctctctctgtctccggagcaacaaacaacaacaacagcaagcttccgtttttgttagctaagaagaagaagaagatgcttactgcttcttcttcttcttcgaccacggctaatattgtctacaagagaagtcaatctacaaggactacgaagacaacgtacggagattcagatttgagcccgagaaagagaaatgggttttggtccttttttcatctctactcttcgaaacaacatggtagcagtaagaaagttggaaactttcatcaacccataagccagactgagacaaaaacagagttggcagagactacaacagtgggatcttcgtcttcttcgtcagcttcttcttcaatgtcaaagagagttgttggtggtggtgggagtagtagtaacagaaaccgggtattgatgttgattgttgaagaagattggaaagtccttaacatttgaaagtcacaccatggtgatgaggcaaagtgtccgggatctagatcttgttggggtgtggaagtagaagcttctctggtgatttctttgagaggatcacaaatg

SEQ ID NO: 89463 - DNA, 895 bp, Arabidopsis thaliana columbia
acgcgtccggcactcaattaaaccctaaaaccctcctcagaagagaggcagagagaaaaaaaacgcagtctttgcggaatctgtgaaaggagaaaagatgagaccaccaatgagaggcggcgggggtttccgtggaaggggaggacgagacggtggtggtggcggtaggttcggtggaggaggcggtagattcggtggaggaggaggacgctttggtggtggaggcggtcgctttggtggttttagagacgaaggtcctcctagcgaagtcgtggaggttgcaactttcgttcatgcttgcgagggagatgctgtgaccaaactctcacaggagaagattcctcattttaacgctccgatctacctagagaacaagactcagattgggaaagtagatgaaatctttggcccaattaatgaatctttgttttctatcaaaatgatggaaggtattgtagccacctcgtattctccaggagataagttcttcatcgacccttacaagcttttgccactcgctcgattccttcctcagccaaagggtcagtcaacgggtggacgtggaggtgcaggtcgtggaagaggtgatagtagaggtcgtggaagaggtggatcatttagtagaggtagaggtgctccaagaggtggtagatttccaccacgcggtggctctcgtggaagctttagaggccgaggaagattttaggttcttctcctgctttataagccttatccaaacttgtaccctttgttttatgaatgactatcgttctcccgtattctcaattttcaagactttggttttatctatgcagtaaaaatatttgcctcgaaaaaaaaaaaagaaaacccccaagggcgaacgctctagaggatccaagcttacgtacgcgtg

SEQ ID NO: 89464 - DNA, 491 bp, Arabidopsis thaliana columbia
ggatctcagctctgcaattaagagtgggaaagtccgggctcctactcacatcatctccaccatttctgatgacagaggggaggaaccatgctatgctggtgtgccaatgtcatccatcattgaacagggttatggcgtgggagatgtcatttccctcctatggttcaaacgtagtcttcctcgatattgtaccaaattcatcgagatatgcataatgttgtgcgctgaccacggtccatgcgtctctggcgctcacaacaccatcgtaacagcaagagcaggaaaagaccttgtctcaagtcttgtctcaggtctattaacaatcggtcctagatttggtggtgccattgatgatgcagcacgatacttcaaggacgcttgtgacaggaatctcacaccttatgaattcgtggaaggcatgaagaagaaaggaatccgtgtccctggcattggtcacaggataaagagcagagacaacagagacaaaagag

SEQ ID NO: 89465 - DNA, 796 bp, Arabidopsis thaliana columbia
  unsure (1)..(796): unsure at all n locations
agctccctacgactcacttagggaaagctcgcacgcctgcaggtaccggtccggaattcccgggtcgacccacgcgtccgtgtgaattcttggaaggcatgaagaagaaaggaatccgtgtccctggcattggtcacaggataaagagcagagacaacagagacaaaagagtggagctgcttcagaaatttgcacggtctaacttccctgcagtgaagtacatggaatacgcagtccaagtagagacatacacactgtctaaagccaacaacctggtactcaacgtcgatggagccattggatctctcttcttagaccttctcgctggaagtgggatgttccacaaaacaagagatagacgaaatagttcagatcggttatctcaacggcctcttcgtcctcgctcgatccatcggtttaatcgggcacacattcgatcagaagagactgaagcagccactgtaccgacacccgtgggaagatgtcttgtacaccaagtaatcatatcattattcacttcttctggtcgttccttattcctgttatcattctctcccattcagttaggctatgtttgattatatatttgttctgacactctatctgttgtgatctcttaatgcttgaaaaaataaaagaaagttcaattttagaagaattataatgttttgattaaaaaaaaaaaaaaagggcggccgctctagaggatccaagcttacgtacgcgtgcgtgcgacgtcataaactcttctatagtgcaccnnnnnnnnnnnnnnnnnnnnnnnnnnnnnnnnnnn

SEQ ID NO: 89466 - DNA, 377 bp, Arabidopsis thaliana columbia
cgtccgcattaaactctgaaccttcaacgttatcttcctctcactagctaagaaacccatttcgattctctctctctctctcgtttccaacatcattccatggctgacgatagcgaattgtatcctcgtttcttcaaagtgttcctcgttgaatcggcttctgaatcgttgatgattccgttgccttttatggcatttcttgctgatccattgccaaagacagtgaagctccaaggtcttggaggaaaactttggactgtgagcttgacgaaaataagcggagctgcgtatcttactagaggatggccaaaattcgcagaggaacatgagctgaagaacggagagttcatgacatttgtgtatgatggtcatcgtac

SEQ ID NO: 89467 - DNA, 425 bp, Arabidopsis thaliana columbia
gagaattaaaagatcctcctaccgtattccctggaacattcgccggagaaacgtacggaatcaacaaccttccccgggaaagaatccattaccgccgattctatcaattcgtataccgtatttgactacccagccattgattctctctccctctcttcccttttcattggtgctaaaccagctcatctttcctgatccggacgtttttcgaagatcgggtcctaattccccgggaatgggtccttaagttctggaagaaatccgtccgctctgtctggtaatttcattgaaggacggattaagcaagcgtgtgtgagatcagaaaagacggattcaactatgagcacccagaagcaagtggtgactattcgggacctggtagatgaagccaagaaacgaattgtaatcgtggtcatatgcgtcgt

SEQ ID NO: 89468 - DNA, 595 bp, Arabidopsis thaliana columbia
  unsure (1)..(595): unsure at all n locations
nnnnnnnnnnnnnnnnnnnnnnnnnnnnnnnnnnnnnnnnnnnnnnnnnnnnnnnncgcccccgtcgcttcgccagtctcttcctcgttttggtgagaaaacgatgaccgatggatttcgctataatggtttctctggaatagcgtacccgttttggctctcatctccaccaccgcctacacctccacatcatccagcttctgcgccgccgtttcaacaaagcaatccggttgaatcctatgatccagccaaagaagtgtttgatccgatgatgttgtatcatgactcttatcaacgatcgccggctaattggtcaaataacccatcgtatcgtgaaaattctcgctctcagactccttcttcatcgttttatgctgacaacactcaacatggaaatagtggtcttcgaggtgaagattcttcttataaagatatgttatcaccgagtggattttactcttcaagggaatcatcatctgattttgtgtcactccctcccactgagaatttctcagagaggcaacgtttgaactttgagcctacctacagctcaactaccttacctcctgggccttcttatgcagatatgctaatc

SEQ ID NO: 89469 - DNA, 648 bp, Arabidopsis thaliana columbia
  unsure (1)..(648): unsure at all n locations
gtcgactgtatcgatatgcttgatatcgaattcgcggccgcatcagcttctcgccgtgaaatcagcttccggcaagacttttagccagttagccgcggagacaggtctaaccaacgtatacgtagctcagcttctccgtcgtcaagctcagctcaaaccggacacagtcccaaagcttaaggaagctttaccagctctgaccgatgaactaatcggagatatgatgtctcctccgtggagatcctatgatcctaatctcatccaagaacccactatctacaggttgaatgaagcagtgatgcattttggtgagagtataaaggagattatcaatgaagattttggagatggcatcatgtcggcgatagatttctattgctctgtcgacaaaatcaaagggagtgggatggtaacaatcgcgtgggttgtgcacgcttgatgggaaagtatctttcgcattcccnacagaaggccggggaataatgggccccaagggtaaaccccaagggggggccaaagcggttggtaagaagccttttccgaacccaggaggccttatttggaaggggancggtggaaacccatggggttggttacccgaaaaattggactccggccctgttaaaagggcgggatttgnnggggana

SEQ ID NO: 89470 - DNA, 1083 bp, Arabidopsis thaliana columbia
  unsure (1)..(1083): unsure at all n locations
ggggtctgtctgagtggatttgtatactatattgtgatgagagtcaccacaacaaattcgttgacatgagcctttcatatatttttgaattatactgaactaaaacccatttaaaagcccatttaaagacccattataagagtagagatactcagcccatttaaagataaaattacgtcatagcgatttttccattaaaagagtgaggaagagacaaaagtgattgattggtcagaaaaaatggaagcggcgaagaaacagagtgttacaaatcagcttctcgccgtgaaatcagcttccggcaagacttttagccagttagccgcggagacaggtctaaccaacgtatacgtagctcagcttctccgtcgtcaagctcagctcaaaccggacacagtcccaaagcttaaggaagctttaccagctctgaccgatgaactaatcggagatatgatgtctcctccgtggagatcctatgatcctaatctcatccaagaacccactatctacaggttgaatgaagcagtgatgcattttggtgagagtataaaggagattatcaatgaagattttggagatggcatcatgtcggcgatagatttctattgctctgtcgacaaaatcaaaggagtggatggtaacaatcgcgtggttgtgacgcttgatggaaagtatctttcgcattccgaacagaggacggagaatatggtctcaaggctaaatctcaagggaggtacaagcgaatgataagaaagcctttacgtatccatgaaggccttattgtaagtggtaacgttgtaatacctatgtgtttgtttatctgtaatatatgcaacttcagcatctagattaaaagctgtttcaggttgaataacagtgaataaacaaaacttataaaacctttctatgtttatctttaacatcgtaatcgagttccgattcatgcttaaaaaagattgaataaagtttcaggcactgctatgtaaaaaaaaaaaaaaaaagnnnnnnnnnnnnnnnnnnnnnnnnnnnnnnnnnnnnnnnnnnnnnnnnnnnnnnnnnnnnnnnnnnnnnnnnngataatcg

SEQ ID NO: 89471 - DNA, 519 bp, Arabidopsis thaliana columbia
aagatcgcggcgaggtcttggaccttcgtgtctttgagacaggagagtatgcacttgttggatgggttggtatccccaccgcaccagcttggctcccaacagatatgctcatcaagtgtgagaaacttgttttcgagcgaaatgtagagtcaagaaggttccaagaagaatcctttggaatgcacctgatataccaaggattgtgttaagctgaagatgaacgataacaatggcgcaccatcatgatcatgtgttcaagagtttgacaaagtatcaacgttacaattagttacaaaaactgttgtggagtgtggaatatgtcatcagactcctataataagaatgcagcttcagtaaacggatgatggtaattttatctcatcgatctcccaacataaactcatttctcacagcttcataaaatttcctctggttttgtcaaaaaaaaaaaaaaaagggcggccgctctagaggatccaagcttacgtacgcgtgcatgcgacgtcaaagtcttctata

SEQ ID NO: 89472 - DNA, 783 bp, Arabidopsis thaliana columbia
  unsure (1)..(783): unsure at all n locations
gatacccagctctatacgnactcactatagggaagctggtacgcctgcaggtaccggtccggaattcccgggtcgacccacgcgtccgcccacgcgtccggaactccaagaacacataattttttttcttggtggtctctccaatggctttctctgcgactgtgtctcagctttcttctctttcaaccatctcctcttcattaccaatttcttctagaagactccctcatcgatctcttcctcaattcacagtcaaagcagaagcagagaaagagaaacagagcacacagggcaagtctgatggggaagcatcaccagctgcaaccaaaacccctaaaaccctccccaagaaaccggtttactcgatgaagaagggccaaatcgttcgtgtggaaaaagagaagtacctcaacagcatcaattacttatcagttggacatcctcctttctacaaaggacttgattacatatacgaagatcgcggcgaggtcttggaccttccgtgtctttgagacaggagagtatgcacttggttgggatgggttggtatccccaccggaccagcttgggtcccaacagatatgntccatcaaagtgtgggaaacttgtttacgagcgaatgtaggagtcaagaanggtccaagaagatncctttggatggaactggnntnccaaggggttgtggtaagctgggatgnacggtacaattgggggccatcntgngnatggggtcaaaggttggcaagnttaacngtccatnggttcaaaactggtnggggnntc

SEQ ID NO: 89473 - DNA, 665 bp, Arabidopsis thaliana columbia
  unsure (1)..(665): unsure at all n locations
nnnnnnnnnnnnnnnnnnnnnnnnnnnnnnnnnnnnnnnnnnnnnnnnnnnnnnnnnnnnnnnnnnnnnnnnnnnccacgcgtgcggacattgtgcttgatgtgatcaagaatgtcccggcctggcctggacgacatttgctagagggaggagatgatctaagatacttcggtttgaagacggttatgcgaggtgatgttgaattcgaggtcaagagccaaagggaatatgaaatgtggacacaaggtgtctcaaggcttcttgttcttgctgctgagaggaagtttaggatgtgaataaacgttcaatggctgcttggtttaagtgtgagtttttttttaacttatgtggtcaaatttcattagtaggggttcttttaaggtaatggttttttgggttgggtataggataaaatggacctaccagtcaaggtgaggaagcatttgggtaaacaaaacttagtgggggtgatctcgaatatctatgttcctagttttttttgggtggttgggggtctttttgtataaaaaaccaaagtggaggtaatagatatataggatgttttaattttaaaaaacaaaaaaaaaggcgcgttttaaggannnnnnnnnnnnnnnnnnnnnnnnnnnnnnnnnnnnnnnnnnnnnnnnnnnnnnnnnnnnnnn

SEQ ID NO: 89474 - DNA, 639 bp, Arabidopsis thaliana columbia
  unsure (1)..(639): unsure at all n locations
nnnnnnnnnnnnnnnnnnnnnnnnnnnnnnnnnnnnnnnnnnnnnnnnnnnnnnnnnnnnnnnnnnnnnnnnnnnccgcgcgtgcgggcgaatgtggcggcgaagtaacttaccggggaatccagattccgatcagagcatatctgaggaagaagaagaaaatgatatttcgccgaaggagaatgcgaaggaacaagaggtaatgtttaatctcaactttcgattcgttaagcttgcataaagctctctgtgaactcctgagaagttgtctttgagaaagaacttggcaacttctgatttgccgaattgattgttgttggcttgagtagttttttttgaggagctatagggaatttgattgtggtttgaccatagttggcttcaatattgtagagaggattactacttcaaacaaagctcgaaaaactcataggttgtggtgagctaaattatgctagggaaaccggtgatgtaactctggaagcaactctacggaagatatcatcctctcttgaagatgtggtcgaagttcctgactcccccgaggagagttatatttcttcttccaaagaactggattagcatgcctatctgctcaggaaaatgggtcagatgatgagattacacatgatgaacaag

SEQ ID NO: 89475 - DNA, 417 bp, Arabidopsis thaliana columbia
acccaagcgtccgcgacggtacaaaggcgaacaccggcaagatcgatttgaacggtgacggcgaatgtggcggcgaagtaacttaccggggaatccagattccgatcagagcatatctgaggaagaagaagaaaatgatatttcgccgaaggagaatgcgaaggaacaagagagaggattactacttcaaacaaagctcgaaaaactcataggttgtggtgagctaaattatgctagggaaaccggtgatgtaactctggaagcaactctacggaagatatcatcctctcttgaagatgtggtcgaagttcctgactcccccgaggagagttatatttcttcttccagaagaactggattagcatgcatatctgctcaggaaaatgggtcagatgatgagattacacatgatgaaca

SEQ ID NO: 89476 - DNA, 603 bp, Arabidopsis thaliana columbia
  unsure (1)..(603): unsure at all n locations
cggacgcgtggggcgtcctataaaatcccctctcctctgctccacactctctcaaaaccctagaaaaaatggcaggaaccggagttgtggcggtgtacggcgaaggagccatgacggagacgaaacagaaatctcccttctccgtgaaagttggtctcgctcagatgcttcgtggcggtgtaatcatggatgtcgtcaacgcagagcaagctcgaatcgctgaagaagctggcgcatgcgccgtgatggctcttgaacgtgttcccgccgatattcgagctcaaggcggtgttgctcgaatgagcgatccagagatgatcaaagaaatcaaaaacgccgtgacgattccggtgatggcgaaagctagaattggtcatttcgttgaagctcagatcctggaagcaatcggagttgattacgtcgacgagagtgaagttctcactctcgccgacgaagataatcacatcaacaaacataaatttcaaaaatcccctttttggtttttngntgtagggatttncggtaaagcttnaaggnggtcccctttaaggngcccccatttttaanacccaanggntnngcctgnaccttgnaacntttttc

SEQ ID NO: 89477 - DNA, 899 bp, Arabidopsis thaliana columbia
attgtttttaggtacacactatagaagagctatgacgtcgcatgcacgcgtacgtaagctcggaattcggctcgagcaaaaacgccgtgacgattccggtgatggcgaaagctagaattggtcatttcgttgaagctcagatcctggaagcaatcggagttgattacgtcgacgagagtgaagttctcactctcgccgacgaagataatcacatcaacaaacataatttcaaaatcccttttgtttgtggatgtaggaatctcggtgaagctttaaggcggatccgtgaaggagccgccatgataagaaccaaaggtgaggctggaactggtaacgttgttgaagccgttaggcacgtgaggagtgtgaacggagctattcggttacttagaagcatggacgatgacgaggttttcacttacgcgaaaaagatcgctgcgccgtatgatttggttgtgcagactaaggagcttgggaggttaccggtggttcagttcgctgctggaggagtggcgacgccggcggatgcggcgttgatgatgcagttgggatgtgatggagtgtttgttgggtcgggtgttttcaagagtggagatccggtgaagagggctaaggctattgttcaggcggttacgaattatagagacgcggcggtgttggcggaggtgaagctgtggtttaggtgaagccatggttggtcttaatttggatgataaggttgagaggttcgctagtcgttctgagtaaccaatcaaatttcagatgtttttatccataacgtttgtcactttaatatgtatccccaaaccaatattctcgatttattcaagattttatagaaaaaaaaaaaacccaaagggcggccgctctagaggatccaagcttacgtacgcgtgcag

SEQ ID NO: 89478 - DNA, 670 bp, Arabidopsis thaliana columbia
  unsure (1)..(670): unsure at all n locations
gaaacggtatgcaacttcagtggctgcttctgctgccagaaccaaagggcccgtggtgagtaacgggagtggtttccctgatcacaatatgaccacatcacctgcgggaaccaccaagtttgcaaatgctaattcagggttccctcaaaaccttgtccagtcgagtagcaatcaggttcagtctcagcagtggaaaaacaattcacccaggacaacaaatactacccaagctcagtctccttcgatgttgtcgccatcaacatcagttgctgctgcatcttcgctaagaaacatcccgcataaacagcaaagccgtccccagcaatcgcagatatcttttgcagcaaactcaaaaccaatgacttctggttcaccaatgcagcaggtacaaggaggaaccaaccaccaggctccgtctccaccaatgttagttgggtcgccttcgacgtcgtctgtctccaaaaatgccagcggaagcccaagaccaactgctttctgctttcctcggcgggcaaacaaaaggtgggcaagcttccacaacttntnnctnagnatcttagccgtccaagnantttcagcctgaattggggggtaatttnttggtgnagggatnaatgggcctntttttnttggaanccggnccaggggttttggtccagtgggacannag

SEQ ID NO: 89479 - DNA, 439 bp, Arabidopsis thaliana columbia
  unsure (1)..(439): unsure at all n locations
cgcgtccggattttgcgattcggcgatttgcttctccgatgtcaatcccaccatcttcaggttcttcttcttcatcttcctcgtctcagtacacatacgcagctaattcttactagtccgctccgtatcagcctccacagccttacgcggcggcgccttcgcctgctgtaccggcgcctgtggcatccattcccggagctacggtctatcctcagcctgttggaccggttcctgccgtctacgnttaccctcagtaccaacaggcacatcaattgttccaaagagatgcacagncaattacaccagaagctcttgaggaatgtaaaanctgctttngcaagtagtggaacccgtacacaaagcagganactanaaagggnggccatttntccgtnaagctnctggacaagttttnggnggntccanctctttcaanaat

SEQ ID NO: 89480 - DNA, 575 bp, Arabidopsis thaliana columbia
  unsure (1)..(575): unsure at all n locations
nnnnnnnnnnnnnnnnnnnnnnnnnnnnnnnnnnnnnnnnnnnnnnnnnnnnnnnnnnnnnnnnnnnnnnnnnnnccgacgcgtgcggcagagctcacacttagaaaacaaaaaacaaaaatggctacgctttcgtttggaatcgccgccgctgcaaccaccgtccgtacgattccgagatttaattcacggaggagcaaaatcacatgcgaatgggatccgaaaggtgtgttgggtccggctcaaactggtcatatagctcggcttgagtttaagcgtcggctagagagagattcagaggcaagagaagcttttcagaaacaacttcgtgaagagaaagagcgtcgtcaagctcttagacaatctagagttgtaccggatactgctgcggagctgattgagtactttcttgatactgaagctcaggagattgagtatgagatcgctaggcttagaggaaggttaaccgccgattccttgcgcagatacgacttgaaatcggacagattcgatttgctgttactaagactgcggatattgagatagattgttgacctttaaacacttcaaaagct

SEQ ID NO: 89481 - DNA, 439 bp, Arabidopsis thaliana columbia
tttccgcgtttatcacttgtttcctcgaggtgagactacgaagatgccattgagctggcctcagagaaagagcatcattttggatgtggctaaagggttggcttatttgcattacggtgtgaaacccgctatttatcaccgggatattaaaggttcgaacatattgttagatgtcgatatgagagcgagagttgcggatttcggtttagctcaacagagtagagaaggagagtctcatctcactaccagagttgcgggaacacacgggtacttggctccagagtatgccctctatggtcaattaaccgagaaaagcgatgtgtatagcttcggggttgttatattggagatcatgtgtggaaggaaagctcttgatctgtctacttctggatcaccaaacacttttctgatcacagattgggcttggtcattggtaaaa

SEQ ID NO: 89482 - DNA, 518 bp, Arabidopsis thaliana columbia
  unsure (1)..(518): unsure at all n locations
acaatcatgttttgtttcaagactacaacgcatccgggtttgataatcacggcagagaagaagcattcgacgatacatttggcgggttcttgagaacaaacgaagttacagccgccgcaggatcagagaagagtactaaaagcggtggaggagaaggtttgacgagagatttcttggggctaagaccgttaatgtctcataacgagattctaagttttgctggtcttggaagttgcataaatagctctgcttctgatcagcttcatccaaagccttggcagggttagttaggttttttgctcataatatataatatgtgtatatatatttatatatctagttttgcatctttctcttgttttgttcttcgttttataaatttatatgttgaatgctcatcaaaggagaatcacagaaaccgttaacaaaaagaaaaaaaaagnnnnnnnnnnnnnnnnnnnnnnnnnnnnnnnnnnnnnnnnnnnnnnnnnnnnnnnnnnnnnnnnannnnnnnnnnn

SEQ ID NO: 89483 - DNA, 921 bp, Arabidopsis thaliana columbia
tttccgatttacgtctcttcttcttcatcttcctcccacaaccacatcatcatcaatagccttcacttcgacaccaacaatggtaatactaataatagtaacaacagctacaaccatctccatacatttcccatgaagaaagagcaacaaagcaatgaccatatcatgaattaccaccatagtatcatccctccttggcttgctcctcagcctcacgcactcacatcttcaaaccctaaccctagtaatggtggaggaggaggaggaagtttgttctctcttgcttctccggctatgtcagccaccgcattgctccagaaagcagcccaaatgggctctacaaagacacctcctttaccaccaaccacggcctacgagaggtcaactcataataacaacctcacaacgacaatggcggccaatgatgccgtcaccatctggatccatcagctccaaccaacaacaatcatgttttgtttcaagactacaacgcatcccgggtttgataatcacgggcagagaagaagcattccggacgatacatttggcgggttcttgagaacaaacgaagttacagccgccgcaggatcagagaagagtactaaaagcggtggaggagaaggtttgacgagagatttcttggggctaagaccgttaatgtctcataacgagattctaagttttgctggtcttggaagttgcataaatagctctgcttctgatcagcttcatccaaagccttggcagggttagttaggttttttgctcataatatataatatgtgtatatatatttatatatctagttttgcatctttctcttgttttgttcttcgttttataaatttatatgttgaatgctcatcgcggccgcgaattcgatatcaagcttatcgataccgtcgacctcgagggggggcc

SEQ ID NO: 89484 - DNA, 416 bp, Arabidopsis thaliana columbia
cccacgcgtccgggaccctgagcaaggagctcttctctttgtcaaagagatcaagaacgggagattagcccatgtttgcgatgctcggttgctttatccaagcgtatgttaccggagaaggtcctgttgagaaccttgcaaagcatctcagtgatccttttggaaacaacttgcttaccgtcatcgctggaactgccgagagagctcccactctctaagccatttctactttttttaagagcttccaaaatgtacactttgttcgattggaactcctttttgacaatgttaaaaaaacttccatctgaatcttcttgatatatttcaaattttcaaaaaaaaaaataaaataatttataaaaatataaataaaaaatatattaattataataataattaaaataattttttttttt

SEQ ID NO: 89485 - DNA, 590 bp, Arabidopsis thaliana columbia
  unsure (1)..(590): unsure at all n locations
aggtgccactatagaagagtctatgacgtcgcatgcacgcgtacgtaagctcggaattcggctcgaggaggtaaggttggaactttggactaaaagaatggcgtctttgggtgtgtcggaaatgcttggtacctccccttaacttcagggcagtttcaagatcgtctgctccggtggcatcaagcccatccacgttcaagactggtgctctcttctctaagaaaaagccagctcctgcttaggccaaggctggctctgagactagcgatgagctcgccaaggggtatgggcctgacaggagaattttcttgcctggtgggcttttggattgatcagagatcccagagtacctaaacgggtgaaggtgctggagattatgggtatgacccatttttggtcctggaaaggaagcccgggaacctttgctaaattaccaagcctttgaattgcgtccatgccgacgatgggcctattgttggggccggaactggttccataatccctgnancttaaacaaanatggngnaactgtggccttgacntgctgggtaaaantggcgttntcctnangnaaacattnccacntttgg

SEQ ID NO: 89486 - DNA, 269 bp, Arabidopsis thaliana columbia
cttttgacaatgttaaaaggagtcccaatcgaacaaagtgtacattttggaagctcttaaaaaaagtagaaatggcttagagagtgggagctctctcggcagttccagcgatgacggtaagcaagttgtttccaaaatgtacactttgttcgattggaactccttttgacaatgttaaaaaaacttccatctgaatcttcttgatatatttcaaattttcaatggtgctttatcatgcttctaaggatatacatagtcacccattggtt

SEQ ID NO: 89487 - DNA, 819 bp, Arabidopsis thaliana columbia
ggaaggttgctcccccggaaggtcccggcccgaatttccgggttggaccaaggcgtccgcccacgcttccgcccacgcttccgcggacgcttgggctgggaaggaagcctgagaactttgctaaataccaagcttttgaattgatccatgcgagatgggctatgttaggagcagctggtttcatcattcctgaagctttaaacaaatatggcgctaactgtggccctgaagctgtctggtttaagactggtgctttgcttcttgatggaaacacattgaactactttggcaagaacatccctatcaaccttgttctcgccgtagttgctgaggttgttctcctcggtggagccgagtactacagaatcaccaacggattggatttcgaggacaagctacacccaggaggtccatttgatcctctaggccttgctaaggaccctgagcaaggagctcttctcaaagtcaaagagatcaagaacgggagattagcccatgtttgcgatgctcggtttctttatccaagcgtatgttaccggagaaggtcctgttgagaaccttgcaaagcatctcagtgatccttttggaaacaacttgcttaccgtcatcgctggaactgccgagagagctcccactctctaagcccatttctactttttttaagagcttcccaaaatgtacactttgttcgattgggactccctttgacaatggtaaaaaaacttccaatcttcaaaaaaacccaaaaacaaaagggcggccgctctagaggatccaagcttacgtacgcgtgcgatgcgacgtcatagtcttgtatag

SEQ ID NO: 89488 - DNA, 708 bp, Arabidopsis thaliana columbia
  unsure (1)..(708): unsure at all n locations
gaatncaaggggccnatccnagntnttaaaagggacttgttcngctttgggnccccccaaaccctttgttccaattgccttattgaaaacaatggattgccnaaacccttattaagactggtctttnctnctgatggaaaccacattgaactactttggcaagaacatccctatcaaccttgttctcgccgtagttgctgaggttgttctcctcggtggagccgagtactacagaatcaccaacggattggatttcgaggacaagctacacccaggaggtccatttgatcctctaggccttgctaaggaccctgagcaaggagctcttctcaaagtcaaagagatcaagaacgggagattagccatgtttgcgatgctcggtttctttatccaagcgtatgttaccggagaaggtcctgttgagaaccttgcaaagcatctcagtgatccttttggaaacaacttgcttaccgtcatcgctggaactgccgagagagctcccactctctaagccatttctactttttttaagagcttccaaaatgtacactttgttcgcttggaactccgtttgacaatgttaaaaaaacttccagctgaatcttccttgatatatttcaaaaaaaaaaaaaaaaggggagccgctctagaggatccaagcttacgtacgcgtgcatgcgacgtcatagtcttctatagtgctaccta

SEQ ID NO: 89489 - DNA, 552 bp, Arabidopsis thaliana columbia
  unsure (1)..(552): unsure at all n locations
gcgagatgggctatgttaggagcagctggtttcatcattctctgaagctttaaacaaatatggcgctaactgtggccctgaagctgtctggtttaagactggtgctttgcttcttgatggaaacacattgaacctactttggcaagaacatccctatcaaccttgttctcgccgtagttgctgaggttgttctcctcggtggagccgagtactacagaatcaccaacggattggatttcgaggacaagctacacccaggaggtccatttgatcctctaggccttgctaaggaccctgagcaaggagctcttctcaaagtcaaagagatcaagaacgggagattagccatgtttgcgatgctcggtttctttattccaagcgtatgtgaccggagaagggcctggtgagaaccttgcaaagcatctcagtgatccttttggaaacaacttgctaccggcatcgctggaaangccgnagagctccagncctaagcatttcactttttaaggnnccaatgaanttgtcgttgaancttnnaattnaaaacncctg

SEQ ID NO: 89490 - DNA, 858 bp, Arabidopsis thaliana columbia
  unsure (1)..(858): unsure at all n locations
atgatacttcagctctacacgactcactattgggaaagctggcacgcctgcaggtaccggtccggaattcccgggtcgacccacgcgtccagtgttaaaccagagtaaagcttgaaactttggactaaaagaatggcgtctttgggtgtgtcggaaatgcttggtactccccttaacttcagggcagtttcaagatcgtctgctccgttggcatcaagcccatccacgttcaagactgttgctctcttctctaagaaaaagccagctcctgctaagtccaaggctgtctctgagactagcgatgagctcgccaagtggtatggtcctgacaggagaattttcttgcctgatggtcttttggatagatcagagatcccagagtacttaaacggtgaagttgctggagattatggttatgacccatttggtcttggaaagaagcctgagaactttgctaaataccaagcttttgaattgatccatgcgagatgggctatgttaggagcagctggtttcatcattcctgaagctttaaacaaatatggcgctaactgtggccctgaagctgtctggtttaagactggtgctttgcttcttgatggaaacacattgaactactttggcaagaacatccctatcaaccttgttctcgccgtagttgctgaggttgttctcctcggtggagccgagtactacagaatcaccaacgggttggatttcgaggacaagctacacccagggggcccatttaatcctctaggcttttaagggcccgagaaaggctttttaaagcaaggggnaagccggggttcccttttannccggtttttccnggtttccgggggccttnaccnaaat

SEQ ID NO: 89491 - DNA, 823 bp, Arabidopsis thaliana columbia
agtaccgctccggaattcccgggtcgacccacgcgcctgaagctttaaacaaatatggcgctaactgtggccctgaagctgtctggtttaagactggtgctttgcttcttgatggaaacacattgaactactttggcaagaacatccctatcaaccttgttctcgccgtagttgctgaggttgttctcctcggtggagccgagtactacagaatcaccaacggattggatttcgaggacaagctacacccaggaggtccatttgatcctctaggccttgctaaggaccctgagcaaggagctcttctcaaagtcaaagagatcaagaacgggagattagccatgtttgcgatgctcggtttctttatccaagcgtatgttaccggagaaggtcctgttgagaaccttgcaaagcatctcagtgatccttttggaaacaacttgcttaccgtcatcgctggaactgccgagagagctcccactctctaagccatttctactttttttaagagcttccaaaatgtacactttgttcgattggaactccttttgacaatgttaaaaaaacttccatctgaatcttcttgatatatttcaaattttcaaaggggcacccttgatgggctgctccccatgtttttaacgcaccccaaatttttgaccccccgggggcggcccgttttaaaaggatcccaactcttacctccgccgtgcaatgcccaacgtaataagcttttttctattagggggcacccttaaaatttcaaatttcccctgggcccggcgggttttaaccaacgggtgtggaactggggaaaaacccc

SEQ ID NO: 89492 - DNA, 604 bp, Arabidopsis thaliana columbia
  unsure (1)..(604): unsure at all n locations
cccgcccgcgatttgttgtcgcaattttgagcgcaaacccttttcgcccgacgaacccgcaggccccctactttgcgccccactctaactcgccctcactttagggaaaagcttgtccccccctaggtcccggttccggaaattcccgggcggcccccacggttccgcgttcctccactcgtcgctctctcacagtctggtactcctagagctagagaaaaggcacaggcgttgctcagttacttcagaaaccaacggcatggaaacgctgggcgtggctgatgatggatgatgatgatgatgatgatgttgatgatgcacagattctggtctctcagtgcctatttttatgttttgtcttgtgaccaaagtagtgattttgtacaaaagaggtctcttctgcaaataattttttcgtactcaagattttttgttggttctctgtattctttaattttctattgattctcataataaactttgatttggaatagaattttttttttttcaaaaaaaaaaaaaaaaaagcnnnnnnnnnnnnnnnnnnnnnnnnnnnnnnnnnnnnnnnnnnnnnnnnnnnnnnnnnnnnnnnnnnnnnnnnnnc

SEQ ID NO: 89493 - DNA, 753 bp, Arabidopsis thaliana columbia
  unsure (1)..(753): unsure at all n locations
gtcgtgcggggactcacgaacacgctcgtggtttaggtaaacgtggccccaggttgcttccattggggttggaactctgagccacaatgtcctggtcaatgcgcgtggcctttccacgcgccggtgtacggtccacagagtccaccactagtggcaccaaacaatgacgtgggactcgatgggatggttattaacttagctagtcttttagctggaaccgcaacgaacccttttggtaatggttactatcaaggtccacaaaacgcaccgcttgaagctgcttctgcttgtcctggcgtttatggtaaaggagcttatcctggttacgctggagatttgcttgtggatactacaacgggaggtagttttaatgcgtatggtgcaaacggcaggaagtttttgcttcctgctttgtatgatcctacgacgtcggcttgctctactatggtctgaatactaaaaaaaagtccaatgtttggtctttggtagtagaaaataatattctagcgtaattcttttgttatgtttggttacaaattctagtataattcaatttattcattaatattattctcatttttcccttcatgttgtatgactgaaatcttgtcgcttggactataatttaacggaatattattaagacactttggcggccgnnnnnnnnnnnnnnnnnnnnnnnnnnnnnnnnnnnnnnnnnnnnnnnnnnnnnnnnnnnnnnnnnnnnnnnnnnnnnnnnnnnnnnnnnnnngt

SEQ ID NO: 89494 - DNA, 551 bp, Arabidopsis thaliana columbia
aggtgacacttagaagatctatgacgtcgcatcgccgcgtacgtaagcttggatcctctagagcggccgccctttttttttttttttttatcatataacaatttttgatttgattagttctcctcatcacatatctgaaaaagcaatatggtgaggaaagatcgattctgtaacaaaagacaaacacaccaatgggtggtgagtgtgtttacatatctgcactcatctgtctaatgaaagggacaaagttgttccagttctcgaccctaaagatcttctcattcattctgcaaaacgtaaatgatcttagagtgtcgccattcggttgcacacagttctctcgtatttgccttagtcccatctcatcaaatctttcgcttgtgtttctaccagtcacatgtattgtccacttcttcgaaacatcatgtatctgtctacgtaatccttcagggctgcaaagatatttctcaggtatttcactatctgccatatccaagcaggggatgttgagagcagcaccttgactagacatgacggaagcttcaggatct

SEQ ID NO: 89495 - DNA, 506 bp, Arabidopsis thaliana columbia
  unsure (1)..(506): unsure at all n locations
nnnnnnnnnnnnnnnnnnnnnnnnnnnnnnnnnnnnnnnnnnnnnnnnnnnnnnnnnnnnnnnnnnccacgcgtccgggaagggtgacgtggcacaatttccctgcgacgcacccaacctccgtctctctctctctcagatcggcggccatctccgtcgagtaattgaaatctctctcagccgttggattcgaattccgccgcatcttcatatacctcgtttcaatcctgcggaaccctagttgctctgaattgtggtttgctactgtgataagttcttcagtggtagattaggaagcaccaccaatggagattgtgtaagacatattcattacagctctcttttaaggattatggggtctgtttgctgtgtggctgcaaaggacagaaatgttcccagtggagctattgataattcagtgtgttcaccatcgtggagttttcgacgggacaacaggaggcgtgtagctgatgagattaaagattcatctaatcataatgttgggg

SEQ ID NO: 89496 - DNA, 378 bp, Arabidopsis thaliana columbia
tttcccacgcgtccgatttagggttcctccttccttgagagttcaggtcaagctttctttccaatttcgccatgccagaagaagatgttgttgatcagaaaagatactttgaggaatcttgcaaaccaaaatgtgtgaagccactacttgaatatcaggcgtgtgtcaagaggatccaagatgatgagtctggccacaaacattgcactgggcaatattttgattactggcattgtgttgacaaatgtgtaagtgtgtgagtgctgtttttctgtatacacctaaagtttcgcgaaactaaaatgacaaagacagctacttggagtctatttttctttccagggttatataaaatgatgtggatgcttaacattacta

SEQ ID NO: 89497 - DNA, 692 bp, Arabidopsis thaliana columbia
  unsure (1)..(692): unsure at all n locations
gcccttatggaaccgtgactccgaaactagatttctgtctgatttcagctccagtgatgtcgagattgtggactgtggtgtatagatctttgtaagtagtggcattgaagtgggcgactgtgaaaactgcaggcgacagaaaccaccacatagatggagaagcagaagcgtttaaggtaactcaagttgaaaacagtaaacatacaggccactggagttggcttaggaagcttcgtctggggaagaagaagatgaagaataataagacagagcttagttcgagaccagtctcaggatttagtgatcttactcggggaatctttataaggtatcaggagcctgaagctgttgagctcactaaagatgaaagaatcacagatctttcgagtttactatgtattggttcccttgtggtctgtttttttcattctgtttttttcgggcaaccccttgtggtctctgttttgttgcttccttcttgcttctttcttcagatgcaatgagctgcatctcacacagatcttgttgtgtgtgtatgtgcgaaacaaaaaaagatttcagttttcttgttcttatatatactccctctgggaggcggccgnnnnnnnnnnnnnnnnnnnnnnnnnnnnnnnnnnnnnnnnnnnnnnnnnnnnnnnnnnnnnnnnnnnnnnnnnnnnnnnnnnnnnnnattt

SEQ ID NO: 89498 - DNA, 647 bp, Arabidopsis thaliana columbia
tagcctttgctgctgcaacagttgcagtctcttcttcagtgttacggattcttattcttcagccctaaaaatcatcactttggaatcagaagcttgaatgatggaaggaagaagaatcatagcaaaccctagaccgtgtagcggtagtagaagagttattgctaagaagaggtctcgtcccgatggattcgtcaatagcgttaaaaagcttcaacgccgagaaatctcttctcgtatggatcgagctttctcaatcagcactgctcaagagagattccgcaatatgcgtctcgtggagcaatatgatacgcatgatcctaaaggatactgtttagtatcattacctaacttgttgaaacgaagcaaagttattgagattgttgctgctcgtgacattgtctttgctcttactctatctggtgtctgtgcatcttttagcagagagacgaataaaaaggtttgctttttaaatgttagtcctgatgaagtcattcggagtttgttctacaacaagaacaatgattctctcattactgtttctgtttacgcctctgacaattacagctctttgaaatgcagatccactagaatcgaatatattctgaggggtcaagcagacgcaggatttcctctttttgagtctgagt

SEQ ID NO: 89499 - DNA, 695 bp, Arabidopsis thaliana columbia
  unsure (1)..(695): unsure at all n locations
cagctctatacactactataggaagctggtcgcctgcagtaccggtccggattcccggtcgaccacgcgtncgcgcattcttttacgtatgggcttgagtcccacggtaaagccgagacacaagatgataatcaagaggggaatcaaatgttcattgggcttggatgctaaactgttcagatgagaaagttcgaacagagaatgagctacgacacaatagatatagaagaggtagaaactgatccatcttcttttgacatgaatacattgatgcaacctgaaagagaggaggaatctgattccgagtacgaggaagaagaagatgatgacgacgaggagtttgcataaacccggagttcaacaaagaaaaggtccaaatacagacaatgaatcgaagaacaagcttcatgtcttgatgtatcatcatcatgagaggagaatgaatgatttactttgaattttcgaacagattctttgttgatcagattagcattctctcttatccatccttgtcatcgattcttttgttcatcatgttgttgaaatcagaacaatatggcccagaaattgtaatgactaaaataccctcaggggcaaatcacctaattatgattttttttttcctaagcaaaaaaaaaaaaaaaagggcggccgctctagaggatccaagcttacgtacgcgtgcgtgcgacgtc

SEQ ID NO: 89500 - DNA, 480 bp, Arabidopsis thaliana columbia
  unsure (1)..(480): unsure at all n locations
gacagacaaaacactcaccaccctcaccaaacagtctctcttcaactctaaaatcaggtggcaaaacaaaatcaatggctctagtggtgtcaggtggcaaagcagccatgatgccgcttcatgccaattctcttcctctaagtatcaacaccaaatcaagagtactaagtgcatcagcatttccactattctcgtccactcctcacctcccttccagatccctctccatccgcctctcgccgaatgtttcccggtctctcactgtggtatcttctgttttgtcagaggacagagctactaacgttagtggcgtctggggcagatgcattcaagctgacttacttggagggcaatagctggctatgggaacagctgggctgaaaacctagttgatccggttcttntgggaatttgggctttgggatnccntggtttttnatgntnccagnggtttttnagggcttcaaggttnntgncccc

SEQ ID NO: 89501 - DNA, 492 bp, Arabidopsis thaliana columbia
acacgactcacacttagggagaagctacgcacgcctgcaggtaccggtccggaatacacgggtcgacccacgcgtccgatcatgtcccatggctctctgaatttgatcctcaaagaatccggcctagatgctctaatctcgtcccaaaagtaaaccggcttgtgaaccggattatctctgaccaccgtgaacaaactcgtgactcaccgagtgacttcgttgacgtattgctctctctcgatggtcctgataaatcatccgaccctgatatcatcgccgttctatgggaaatgatattcagaggaactgacacggtggctgttttgatcgagtggattcttgctacgatggtccttcatccagatattcaatcgacggttcacactgagcttgatcaaatcgtgggacgatcaagggctgttcgaagagactgacgtggtgtctctagtatatctaacggctgtggtgaaagaagtcttgaggcttcacccg

SEQ ID NO: 89502 - DNA, 561 bp, Arabidopsis thaliana columbia
actatagggcaagctggtacgcctgcaggtaccggtccggaattcccgggtggacccacgcgtccggaagaagacgcttgatcgaaaattcccttagatttcgtaaatagggttttacagaaggtgagattacacagagatcggatttgcgaaaaaaaaaaatgggaagtccaaagaagaacgagaacaaaggcttcttcgccgccatgacttctggcttctccatgttcggtaccgccgtgtcgagatccgttaacggcgtgcaaggtaatgaaggagttgaggtcataaatccagaaggtggcaaggaagatgctgaagaggaagctcagaaaggaaggtggaaggacgaggaacgagatagttactggaagatgatgcagaaatatataggttcggatattacgtcaatggtgactcttcctgttgttatatttgagcctatgactatgctccagaagatggctgagataatggagtattctcatttgttggatcaagcagatgaatgcgaagatccatacttgcgtttagtatatgcttcatcatgggctatttctg

SEQ ID NO: 89503 - DNA, 750 bp, Arabidopsis thaliana columbia
tgcagtaccggtctcgaattcccgggtcgacccacgcgtccgggtaatgaaggagttgaggtcataaatccagaaggtggctatggaagatgctgaagaggaagctcagaaaggaaggtggatggacgaggaacgagatagttactggaagatgatgcagaaatatataggttcggatattacgtcaatggtggctcttcctgttgttatatttgagcctatgactatgctccagaagatggctgagataatggagtattctcatttgttggatcaagcagatgaatgcgaagatccatacttgcgtttagtatatgcttcatcatgggctatatctgtttactatgccttccaacgaacttggaagcctttcaatcctattcttggggagacatatgagatggtcaaccatggggggatttcttttatttctgagcaggttagccatcatccaccaatgagtgctggtcatgccgagaacgagcacttcatttacgacatcacatcaaagttgaaaactaaacttttggggaactctgttgatgtttaccctgtgggaagaacgcgtgtaaccctcaagaaagatggtgtggttctggatttggtgccgcctctcactaagatttacaatctaatatttggacgaacctgggttgactcacctggggaaatggtcatgacaaattttaccactggagacaaagttgtgcttttatttccagccatgtggctggttcgggtctggccgat

SEQ ID NO: 89504 - DNA, 440 bp, Arabidopsis thaliana columbia
  unsure (1)..(440): unsure at all n locations
gggtgaccccaaatatgaaagctggatgagaagtatggaggaaacatacagagacacattccgtggttgggctgggttcaatgtccccatctctcatcgaatcacagccgggtaaaaacaaatcattctagcttagactgtcaaaaatgccagaagacatgataaaatcaatagagaatctttgctttgtccagggagatctattctatggactatcatatgatccatatacaggaactgttgtagaaaaccttcacagtgccacaaatatctcattggattgtttttnnttgtnttgtcttgaaaaactatccgntaaacagcttgtgacattcttntcatngccgtcggaggattcgagcccctgtnggtttaaatccagntnntccgcaatgnagatacggaaccntttccatttntttcattgggncctggnggct

SEQ ID NO: 89505 - DNA, 571 bp, Arabidopsis thaliana columbia
ggcccccccattaggcctgaatgtccgatgattgggtttataggaagacttgattaccagaagggcattgatctgatccaaaccgctggtcctgatctcatggtggatgacattcaattcgtcatgcttggttcgggtgacccaaaatatgaaagctggatgagaagtatggaggaaacatacagagacaaattccgtggttgggttgggttcaatgtccccatctctcatcgaatcacagccggctgtgacattcttctcatgccgtcgagattcgagccctgtggtttaaatcagctatacgcaatgagatacggaaccattccagttgttcatggcactggaggactcagagatacggttgagaatttcaacccttatgcagaaggtggagctggtactggtacagggtgggtcttcactcccttgtcgaaagatagcatggtctcggccttgaggttggctgcagcaacgtacagagagtttaaacagtcatgggaaggattgatgagaagaggaatgacccgaaactactcttgggaaaacgctgccgttcaatatgagcaagttt

SEQ ID NO: 89506 - DNA, 508 bp, Arabidopsis thaliana columbia
  unsure (1)..(508): unsure at all n locations
aggggntcnccctgcgagatccatgccgcctgngtgctcacacgtcaggggttaccctcggggagcgttgatgagaagaggaatgacccgaaactactcttgggaaaccgctgccgttcagtatgagcaagtttttcagtgggttttcatggaccctccctatgtcagctagaccaaacataggctgaaccaaaccgagttggaccggatcagaccagacctgaccaatcagatggagagtgtggaacctccttttccggctatcgaaaatctatggttttcaacgtttccacattaaaccgtgtatctatctatgtctattatcttaaactcgtatggtgtttgttttggggaggtatagaattttagttatgaggttataatatgtttttctttcggttatgacatgtgtgtcttactcttttcctaattatctgaatcccacctagatttcttttgataagacattatacgagtagactaatatgacttaagtttataaaaaacc

SEQ ID NO: 89507 - DNA, 766 bp, Arabidopsis thaliana columbia
gcccgggtcgacggtatcgataagcttgatatcgaattcgcggccgctcttgggtttggttgggtcactcttcaggtcaggtgtgtaaaaaagaaagaaagaaaagagagattgttgtgttgtaacccctttgactaaaatctaatgaacttttttaacacaacaaaactccttcagatctgaaagggttcttcttctctcttagtctctttgtccttttattctccgtcgtcgtttcatgatctgactctctggtcttctcttcttcttcttcttcttctattttttcttacttcgtcactgttgtgtctgaacatgccacgccctttcttccataagttgattttctcatccactatccaagaaaaacgtctgagggtcccagataagtttgtgagtaaattcaaggatgagctttcggttgctgttgcactcacagtacctgatggtcatgtttggcgtgtaggactaaggaaagctgacaacaaaatttggtttcaagatggttggcaagagtttgttgaccgttactccattcgcattggttatcttttgatttttagatatgaaggaaactctgccttcagcgtctacattttcaatttatcccactctgagatcaattaccattccaccggtctcatggattccgctcacaaccacttcaaacgcgcccgtttgtttgaagaccttgaagatgaagatgccgaggtcatctttccttcttctgtgtacccatcacccacttctgagtctacagtaccag

SEQ ID NO: 89508 - DNA, 799 bp, Arabidopsis thaliana columbia
atgcaggtcctcgtcgtctctcctccgctcatcgccgccgcatctctctctaaacctctcaattctctctctaaagccgcactctctttctccagagccaaacccatttgtcctttccctcaaacctctcgacgaccaatctccgtatacaaatccccaatgaacaaccttttcaacagactcggattcgggtctcgtcctcaagcccaagctgacccatcttccgccgcaatcgcccaaggacccgacgatgatgttccgtcttcaggtcagcaattcgcgcaatttggcgccggttgtttctggggagtggagctagcttaccagagagttcctggtgtgaccaagaccgaggttgggtatagccatggcatcgtgcacaatccgagttacgaggatgtctgtactggcactacgggacataacgaggttgttagagttcagtatgatcccaaagagtgtagctttgagagcttgcttgatgttttctggaatcgtcatgatccaaccaccttgaatcgtcagggtggggatgtgggaacgcagtatcgatcaggtatatactactacacagacgagcaagagcgcatagctcgtgaagctgttgagaaacagcagaagatattgaacaagaggattgtcacagagatacttcccgctacgaaattctacagagcagaaaattaccaccagcaatacctggcaaaagggggtcgcatgggtttaagacaatcagctgagaaaggttgcaaggatccaattcgattctatggttaagaaactaagtcagtctttccct

SEQ ID NO: 89509 - DNA, 1993 bp, Arabidopsis thaliana columbia
catttttttgttcttgtttactagagagaatgagattttgaatgagagattgatcaaaaagatgtgtatatattttggaagaggtaggagtgtttgttagatatattaagaaaggagacgagaagtcacgtgtcaatggagacatcatgcaattgtaggccacgtgttaatggcgtcaccatgcagccgctgcatgtgttaacgagaggagtctattcaaagacacgtttgttttttgcctagctcagaatgtggcgttggcatcgaaccgaaacataaaacgcaaaacgaacctttgggctcgtcagtatgggtttgggccttcaatagattccttctatacggcccacatatccactattggcaacaaaattagaaaaatttaggatttagttttaaaatttgttccgcgacattctagaacaatgaagaaaatggatacaaataataaatctatctgcctcttaaaagttccaaatttcaccacgtcactgctttgataatgcaggtcctcgtcgtctctcctccgctcatcgccgccgcatctctctctaaacctctcaattctctctctaaagccgcactctctttctccagagccaaacccatttgtcctttccctcaaacctctcgacgaccaatctccgtatacaaatccccaatgaacaaccttttcaacagactcggattcgggtctcgtcctcaagcccaagctgacccatcttccgccgcaatcgcccaaggacccgacgatgatgttccgtcttcaggtcagcaattcgcgcaatttggcgccggttgtttctggggagtggagctagcttaccagagagttcctggtgtgaccaagaccgaggttgggtatagccatggcatcgtgcacaatccgagttacgaggatgtctgtactggcactacgggacataacgaggttgttagagttcagtatgatccgaaagagtgtagctttgagagcttgcttgatgttttctggaatcgtcatgatccaaccaccttgaatcgtcaggtgattgattgctttaaccctaaaaatctagacgttatcagtatcagatcgtaatttgaatcaatagagagctctatgtgtgttctgcatttggggctgaattgtttattagataacaacgactagattcacctgtttagacgaactctctgtcccttagtctttagttctacatacatttggtagtctcaagtaactattggctaagttgttatgagctagttagaatctcaggccttgttgatatgaggattcgtgtttgattatgtggaagtgacattgccatttccattttcgtatgcgatcttgtacttgagtctgttcttgttcatgttactatacctacataacacttgaagatgaatctagtgttgttgttgtggttcttcacttactaacttttatgtgttgatctaagtagggtggggatgtgggaacgcagtatcgatcaggtatatactactacacagacgagcaagagcgcatagctcgtgaagctgttgagaaacagcagaagatattgaacaagaggattgtcacagagatacttcccgctacgaaattctacagagcagaaaattaccaccagcaatacctggcaaaagggggtcgcatgggtttaagacaatcagctgagaaaggttgcaaggatccaatccgatgctatggctaagaaactaagtcagtcttccctcaagcacataaaaagaagtgagttgtctcatgaaaaatacaataatctgtagatcacatttgtttcttgtctttgttatgcaaccaatggttatgatgcatcctatgcttatatgaatcaaggctttgtccaaatcaatttcaatttgatactacagtactggtaatacaatttggaagttctcaacaatttcgggttttcttttgatttatgagttttgacaattcaacgttatgaatgattgagcaatggtcgcaacatcatttggatcc

SEQ ID NO: 89510 - DNA, 369 bp, Arabidopsis thaliana columbia
gtgaacatgtccttacacggtttttgtcatgtcaagctgtctttctccggggtcctcgggagatcagatcatcattgtttttggcgatgccgacggtaacaaggttaagtaactagattgttgtgtatatagttccagttaagtcgacatcttatttgctttaaagtggtttagataccttgcatgtgtgctcagtgcaagtaactttatagtgatttaaataaaaatgttaaatatctctgttgttttaggtgtatgcaccgaaactagggggtttggtaagaggaccagggggtttggggaagtgttcaacgaacacattccaagtcagaggtcaatgttttgatgaccctatctgctctctctata

SEQ ID NO: 89511 - DNA, 788 bp, Arabidopsis thaliana columbia
gcgcctaatcacaaacacacacaaatctctgaagtaaaatgacgttcccttctctttctgtctcatttctcttctttgccttcatattcgttacgcatgcattcgacctcagcatcatccagatgcaacagggaacatgtccgtacacggtggttgtcatgacaagctgtctttctccggagtcgacaagagatcagatcagcattgtttttggcgatgccgacggtaacaaggtgtatgcaccgaaactagggggtttggtaagaggaccagggggtttggggaagtgttcaacgaacacattccaagtcagaggtcaatgtttgaatgaccctatctgctctctctatatcaaccggaatggacccgacggttgggtcccggagtccattgagatctactcagaaggttcaaagtccgttaaattcgatttcagcaagagcgtccctcaactaaacacttggtacggccacaacaactgcaacaccacaggcagaccatcgtctcccgatctgcctccaccgcattttccgccagagtttccaccggagacacctaccaccccaccgccgcctccaccaaggccgtctgctgcttcaaggcttggaaatggtgagagtgttttccttgcgtttgccattgcgactgcgattgccgcaatggtgcgttgggttactagcatggtacttgaagagcatgtagttgggttgtatgaagctttttctttccgtcgaatgtttctatttgctttcgttttgcttcagcctttttctttgtgagaaaacata

SEQ ID NO: 89512 - DNA, 452 bp, Arabidopsis thaliana columbia
atttttgacctgaaccgcttcgtttccgatcggaggaagtatctggtgatgacgggaggcttgcataatgaggaggcgggttcactggctacgccgactagtgctaggcacattgggaagagagctcgcaagaacaaaagcctcaccgtctcttttgacgagaaagatctcaaggattttgtgactggttttcacaagaggaagaagaaaagaagaaaggaagctcagaagcagcaggaggaagcttttaggcggaaacgaatcgaggcccgtaagaataggaaattggaagagctaatggttgctggtaatggcgaggataatgaagatggggaagctgaagatgaagtggatgcagaggatgaagaagcagagcctgatgcttcaacatctgccacgacgatgtatgatacaggcgagttgaaagtaactgtgacaacaagtgagatatc

SEQ ID NO: 89513 - DNA, 1060 bp, Arabidopsis thaliana columbia
  unsure (1)..(1060): unsure at all n locations
tactnnnnnnnnnnnnnnnnnnnnnnnnnnnnnnnnnnnnnnnnnnnnnnnnnnnnnnnnnnnnnnnnnnnnnnnnnnnccacgcgtccgcggacgcgtgggttttgatctgacgtttaaaagcaggtttctttctatttccagataaaaaaactttactcatcgagactcgtttagtgattcgaaatttcccttctcggctcaaatcttcgatctgggctttcgtgtctttttgcgttttgattggtaataaaaagaagctttttaaaaactttttccatggctggaagtgaagaagttaatcttattgagagcaagacagtggttcctctcaatacatgggttctaatatccaactttaagctagcttacaatctcctgcgtcgccctgacggaacttttaaccgtcatctcgcagagtttctagaccggaaagtccctgcaaatgccaaccctgttaatggggtcttctcttttgatgtgatcatcgatcgccaaactaatttgcttagcagagtttacagaccagctgatgctggcacttcaccaagtattactgatctacagaatcctgttgatggtgaaatagtgcctgttattgtcttctttcatggtggaagctttgcacattcttctgcaaacagtgctatttatgatactctttgtcgtaggcttgttggtttgtgtggtgctgttgttgtctctgtgaattatcgccgtgcaccagagaatcgatacccttgtgcttatgatgatggatgggctgttttgaaatgggtcaactcgagttcttggcttagaagcaagaaagactcaaaggttcgtattttcttggcgggtgatagctctgggggtaacattgtgcataatgtcgcggtaagagcggttgagtcaaggatcgatgttttggggaacattttgcttaaccctatgtttggagggaccgaaagaacggaatctgagaaacgtttggatgggaagtactttgttacggttagagaccgagattggtattggagagcgtttcttcctgagggtgaagacagagagcatccagcgt

SEQ ID NO: 89514 - DNA, 365 bp, Arabidopsis thaliana columbia
cccacgcgtccgcccacgcgtccgcacacatcaaacacgtgaattgctctctttctggttcactcacctaccattactataagtctgaaagagtgattgaaacccacctcgaaaaatctatccttttttttgttttccttctccggcgaatccccggggagattggtaatcggtaatcacggctatttacgggataaagccacggcctttgagcttcatgtccaacgaaagggttgtttaatcataactaatcctttgcctcacggaggacgtggagctctgccgtctgaaggcggcagtccctccgatctcctcttcctcgccggaggcggttccacaaatagccactaaccctaacccttttt

SEQ ID NO: 89515 - DNA, 531 bp, Arabidopsis thaliana columbia
cagctactattcgactcacttatggctaagctggtacgcctgcaggtaccggtccggaattcccgggtcgacccacgcgtccgatttgctctctttctggttcactcacctaccattactataagtctgaaagagtgattgaaacccacctcgaaaaatctatccttttttttgttttccttctccggcgaatccccggggagattggtaatcggtaatcacggctatttacgggataaagccacggcctttgagctttcatgtccaacgaaagggttgtttaatcataactaatcctttgcctcacggaggacgtggagctctgccgtctgaaggcggcagtccctccgatctcctcttcctcgccggaggcggttccacaaatagccactaaccctaaccctttttctaattaggtttttagttcttagagtcctgtattaatctgttatttcgagattataatatttgtgagcaatgttgttgaagatcaaaagagttccaacagttgtatcgaattatcaaaaagat

SEQ ID NO: 89516 - DNA, 1051 bp, Arabidopsis thaliana columbia
  unsure (1)..(1051): unsure at all n locations
ctcactattgggaaagctggtacgcctgcaggtaccggtccctggcccctcctccaggccaccggtttcattaacctggattgaattattcattcaggcatcttctcaaatttttgtttgtgaaaaaaacccacatcaaaagatctctcatttattcgtttcgtttctgctgttttgagtgtcgggttcgttttagctgtaatctttttttccggcgttcgatttgaaaaaatccggggaacaggtgatcggaatcacggctatacacgggatatcacggggtgttagctcacatgtccatattgtccgacagaagggttgtttaatcgaaactaatcctttgccgcacggaggacgtggagctctgccgtctgaaggcggcagcccttccgatctcctctttctcgccggtggcggttccagctttaacttcttttcctttaggttttaggagttagggtttgttagtgttttttccttcttctttttttggtgctcttgaatcgcttttttcttgggggaagttttttcttttgctcttcgaaatttgtcttttttgagaatgttgaaaatcaaaagagttccgaccgttgtttcgaactaccagaaggacgatggagcggaggatcccgtcggctgtggacggaattgcctcggcgcttgttgccttaacggggctaggcttccattgtatgcatgtaagaatctggtaaaatccggagagaagcttgtaatcagtcatgaggctatagagcctcctgtagcttttctcgagtcccttgttctcggagagtgggaggataggttccaaagaggactttttcgctatgatgtcactgcctgcgaaaccaaagttatcccggggaagtatggtttcgttgctcagcttaacgagggtcgtcacttgaagaagaggccaactgagttccgtgtagataaagtgttgcagtctcttttgatggcagcaaatttaacttncactaaaagttgggcaagaaagnggttgcnttccnagttttnaagcttgtgnanggttgcccaagntcaantt

SEQ ID NO: 89517 - DNA, 338 bp, Arabidopsis thaliana columbia
ccacgcgtccgaaaaacatcatacagagagatatttaacgttttgaaatggaggctgttagattcgccgtcgccgtcgttcttgtattttgctacgttacgtcgtctaatgctcagatgacttcaccaccgagcggcggtgcaggaggagacgcacactcactgccgtgtattcagaaactgatgccgtgtcagccgtatcttcacttggcgactccgccgccggcgacgtgttgcatgccgttgaatgagatcgtagccaaagacgccacgtgtctctgcgctgtctttaacaacgttgatatgctcaaatcgcttaacctcactaaagaaaacgct

SEQ ID NO: 89518 - DNA, 296 bp, Arabidopsis thaliana columbia
ttttcctgaggacataacagcatctcctttaccgaccaagtcactcttgtcacctgaaataaacaactccggaaaggaggaagagcgagtgttaccaaagtccttggagtacatatcatgcctaattcatttggctgcttttgggatttttggggccattacgagatatttgctgcaaaaattgtttgggccaactggtgctcgagtaacaagtgatgggagcatcttgtaccttgatcttccctccaacatggtaggatcattcctgatgggttggtttggcgttgtattcaaag

SEQ ID NO: 89519 - DNA, 382 bp, Arabidopsis thaliana columbia
  unsure (1)..(382): unsure at all n locations
gttctttgccggcaaatgctccaaagattcttctttttttctcctatcaacaagtccaacacacaaacttaatggcttccgcttgcgttaaaagtgccggtgtttcgccggagaagttctcgtcgtacggatggacgagccctcggatgtctttaaccagagacgacaacagacgctcttcctccgttgacaagcaacaatctgacccattaccggaaatccaagatccagttgtggatttcgagttttgccttgaggatccggtcacaatgctctctgccgatgagctcttctcccgacggaaaagctcgtanctttnaangttctctggccctaaganggacgnccggcgncggacgtaaacgccagtcaaancacaant

SEQ ID NO: 89520 - DNA, 909 bp, Arabidopsis thaliana columbia
  unsure (1)..(909): unsure at all n locations
acgactcactattgggaaagctggtccgcctgcaggtaccggtccggaattcccgggtcgacccacgcgtgcggtttaatatcttattgtttaaaaaagaagaacaagactatgggaagtgtacagttgagtggttccggcctagtagcttctctacctccaaatcatagctttagccacaagaccaaacttaataagccaaattcgtacttctttcgctcaaaacacaatgccgcaagaaccaaaaccgtccgagccataagcaccgcaccagcgagccagcctccagccgctgatgagcccgacgaacctcctgctgtcgattttgcgttcgtccattcggtgttgttgccggacgggacaccggacgtacattggagaagagcgaacggtggacagaaactaagagacataatgttggattctaacatcgaactctatggtccttatagtaagcctttgtcaaactgcgcaggagtaggaacctgcgctacttgcatggtccgagatggtaaatggaaaggaacttctaaatccgcgaactgatattgagaaggagaaactcaaaaggaaaccaaaaaattggagactagcttgtcaaaccaacgtgggaaatccagattctaccggattggttgtcatacaacaattgccagagtggaaagctcatgagtggaacatccctaagaatatacctaatgacgatgatctcgaaacttctacttgaaaccatccattaatntgtcattgttgttagttgttactatatcataaaattgtaacgatctattttttatatatatggatcgataattagctataaaaaaacaaaaaaagggannnnnnnnnnnnnnnnnnnnnnnnnnnnnnnnnnnnnnnnnnnnnnnnnnnnnnnnnnnnnnnnnnnnn

SEQ ID NO: 89521 - DNA, 502 bp, Arabidopsis thaliana columbia
agctctatacactatataggaagctggtcgcctgcagtaccggtcccggattccgggtcgaccacgcgtccgcaaaatcccaaatttttcctcgacaaaaaatctacctgctttgatccaaatctctatgggtttttatcattaatcgaatttcaaaattgatgaatccataatttttttctctattcgatttatgagaaattgatttttttttttatttttctcccttgtgaaataggttaaagattattgttttgttgctgtttgtagttatgccggtaatgaatccatcattgtgtattggtacacaaacatcggtgtacctcgctcctcgtgagaaatcttttacgagtaatggaaactctcaaaggcgttatcctacaagcgtttctatgcaacgccagccttggagccaaagtaaattcccttctctccaggatgcagtgcaaccagttgtcgtctctaagaataaaagaccagtctttgcatgtaactctgcgct

SEQ ID NO: 89522 - DNA, 420 bp, Arabidopsis thaliana columbia
ctctctatagggaaagctggtacgcctgcaggtaccggtccggaattcccgggtggggccacgcgtgcgcccacacagtccgggaaggtttgggtgcttttcaaaaactgcccatggtcatgccatctattgatttgtatgcttctgctctcaggaagtctaaaagagtccaaccaactaaaggcattgctaatattgctaagcgagaaagaaatagaggtgctaaacagcttgatgcattcatgaaagaactggctctacctttaaaaggctacatggaaagttttcccaggaagaaactcttgcatccatatgaaaggtctcttattgactcgacactcggtgatggaaagtatgaagaggtgttaggaaaagttgctgttctgaggaagaaggtgcaatctgttggaaaggaacatg

SEQ ID NO: 89523 - DNA, 556 bp, Arabidopsis thaliana columbia
  unsure (1)..(556): unsure at all n locations
nnnnnnnnnnnnnnnnnnnnnnnnnnnnnnnnnnnnnnnnnnnnnnnnnnnnnnnnnnnnnnnnnnnnnnnnnnnccacgcgtgcgggtacttggagtgatggaaagcttgttactcgaataggaaagaatagtgccaccgttctagcggtgttgaaaacgttggttcgctttggggctcctgataatatattggtcaacggaaagcctcatctaggaacagataagctagttccattactccgtaatttcagacattatcttcaaagtgcgggagtgactatcaagtttggaactcgggtagatgatcttctggtagaggattctcgtgttgttggagtcagggtttcggattcaacaaaccaattgcagactacctcccagaatttaaaggttgatgcagttgttcttgcagttggtcattcagcacgtgacacatatgagatgcttcattcctcgtaatgtcgaattgattccaaaagattttgctgttggtttgcgtattgagcatcctcaggagctaattaacagtatacaggactcggatttggctaatg

SEQ ID NO: 89524 - DNA, 968 bp, Arabidopsis thaliana columbia
gtttcagtcattcaagttcatgagaatagaaacgagtccaagtttgttgttcatgcaaaattctcatgactctgttacactcctgaatttcttctacttatattccattcaataacttttcttcttctatcagttcaacgttcacacactttttccatttcctcgacaaactcctttttttctctcacttttctcgaattctttttttttttttttctctcaacgaaacataaatcctctgttttggtttaagagatggagatagaagcaagcagacaacaaaccaccgtaccggtttcagtcggcggtgggaattttccggttggtgggttaagtccgttgagtgaagctatatggagagagaaagctccaacggagtttgtcggagacgtgtcagcgaggcttacgtggcaagatctgacggtgatggtgactatgggagatggtgagactcaaaatgttcttgaaggtcttaccggttacgctgaaccgggatctctcacggctctcatgggcccttccggctccgggaaatctactatgctcgacgcattagctagccgcctcgctgctaacgcttttctctccggcaccgttcttcttaacggccgcaaaaccaaactctcctttggaacagctgcatatgtgacccaagacgataacttgattggtacgttaactgtgagagagacgatttggtattcagcgagagttcgtcttccggacaagatgttacggtcggagaagcgtgctctagtggaaaggacaataatagagatgggtcttcaggattgtgcagatactgtcataggaaattggcatttgcgtggaattagtggtggagagaagagaagagtcaagtattgctcttgagattttaatgagacctcgtttgctgtttctcgatgagccaacaagtggtcttgatagtgcttctgctttctttgtgactcagactttgcgtgctt

SEQ ID NO: 89525 - DNA, 661 bp, Arabidopsis thaliana columbia
  unsure (1)..(661): unsure at all n locations
nnnnnnnnnnnnnnnnnnnnnnnnnnnnnnnnnnnnnnnnnnnnnnnnnnnnnnnnnnnnnnnnnnnnnnnnnnnnnnnnnnnccgcgcgtgcgcagcaaaaccacctaactcaaattgttgtctatatacaagaaacataatcataatgggaaaaggaggaggttatgtgacggtggcggcggaagaagtggaggagttacggaggaggaacggagagttggagagagaaatggaggagatgaagaaagagatggttcagctgtggcggcgtacggtggtggcggaggaggcccaggagagactctgctcgcaactggcggagctagaggtcgagtctttagatcaggcgcgtgactatcactctcgtatagtctttctcatggaccaaatctctcgtctctcttcttcctctcttgaaggcggtgttacgcattcgtagatagattaattattattttggctttagctttttttttttttttaattgtgggatccaaggagtttaatgtgttaaaaagatatgtaaagaaattttgcataagtattacaaattttcattttcttcaaaaaaaaaaaaaaaggggcggccgctctagaggatccaagcttacgtacgcgtgcatgcgacgtcatagtcttactatagttcagctaaatca

SEQ ID NO: 89526 - DNA, 478 bp, Arabidopsis thaliana columbia
actctaatacgacttactatatggaaagctggtgcgcctgcaggtaccggtccggaattcccgggggggcccgggcggcgaaagtttctaacctctaggccaccactcatggctactctgttcatgaagctggtgagcttctttctaattctatctactttttgtctcactactgtgaactcggagccacagtgccataatttcaaatcgatcattagtttcggcgattctattgccgacactggaaacttgctcgccctctccgatcctaccaatctccctaaggtcgcgtttctaccgtacggagaaaccttcttccaccatccgaccggccgtttctcaaacggccgcctcatcatcgatttcattgctgaatttttgggttttccgcttgtgcctcctttttacgggtctcaaaatgcaaattttgagaaaggagttaattttgcggttggaggagcaacggcactggaacgtt

SEQ ID NO: 89527 - DNA, 431 bp, Arabidopsis thaliana columbia
  unsure (1)..(431): unsure at all n locations
tctaatacnactcactatatggaaagctggtacgcctgcaggtaccggtcccgaattccccggtggagccacgcgtccaggaaaattgtcctaggccatctaacacacggtttaaggagcttaattctgagcctgttgtaccggaaggttttccggggtgggaagaagtaatggactcatggggttacaagatgatatccgcggttgaggttgttgctgaaatggcagcaattgggtttggtttgcctaaggatgcatttacatcactcatgaagcagggtcctcatcttcttgctccaacgggaagtgatcttaactgttacaacgaggaagggacgatatttgcaggatatcactatgatcttaattttctaacgattcatggaagaagtagattccctggtctatatatttggttaaggaatggagag

SEQ ID NO: 89528 - DNA, 431 bp, Arabidopsis thaliana columbia
aatcaggccctctcgatactgatctcttgctttgtgaagacgtctcatcacgaagaatatttgggtgtaaaggaagctatattggtggaccttcttagagtcataagccaccaccgagctcgtctagctacaccaatccgtacaatccgtaagatgtacacagagactgacgtggaaaacacaccatttggggaatcgatgtacggaggtgttacttctcggcggcctttgatgctaattgaacccgcttacaaaatcaatggagaagacaaatcaaaatctcaaaaccgtgcagcaaaaccaaccgcagagcaagaaaacaagggctcgaatccaaagtcaaaagaaacgtcttctcctgatctaaaggcgaatgtgaaagttggggaatcccctgtttctgataccaacaaagtatctgaagaaacagt

SEQ ID NO: 89529 - DNA, 521 bp, Arabidopsis thaliana columbia
  unsure (1)..(521): unsure at all n locations
nnnnnnnnnnnnnnnnnnnnnnnnnnnnnnnnnnnnnnnnnnnnnnnnnnnnnnnnnnnnnnnnnnnnnnnnnnnnnnnnnnccacgcgtccgtagaaacattagcttcacgaatactgcgccggctccattgccggggatgcaagggtggcaagcggtggcgtttaggatctccggcgacaaagctttcttttccggctgcgggttttacggtgcacaagacactttatgcgacgatgctggccgtcattacttcaaggagtgttacattgaaggctctatcgactttatctttggtaatggccgctccatgtataaagattgtgagttgcattcgatagcgtcaagattcgggtcgatagcggcgcatggtaggacatgcccggaagagaaaacgggtttcgcgttcgtgggttgtcgggtacaggtacgggtccattgtatgtgggccgggccatgggacaatactcacgtatcgttaacgcctacacttactttgatgctctcgtcgctcacggtgg

SEQ ID NO: 89530 - DNA, 592 bp, Arabidopsis thaliana columbia
  unsure (1)..(592): unsure at all n locations
nnnnnnnnnnnnnnnnnnnnnnnnnnnnnnnnnnnnnnnnnnnnnnnnnnnnnnnnnnnnnnnnnnnnnnnnnnccacgcgtccggagaacatagtttcttcttgcttttgagaaaaaataattatatatttttatataggaaagggttaatttattaataaaaaaaaataaaaagaagcagaaaagagataatgcagggtggtaggcttttgacggtgttggtgtgcctcgcctccacggtggcgttggtgagcgccggtgacccttacttctactacacgtggaacgtaacctacggaaccgccgcgcctctcggaattcctcaacaggtgattctcatcaacggacagttccctggtcctaacctaaactcaacctccaacaacaatgtcgtcatcaatgtcttcaacaacctcgacgagcctttcctcttgacctggagtggactccagcacaggaagaactcatggcaagatggtgtgactgggacctcatgcccaatcccagcaggcaccaacttcacttaccatntncagcctaaggaccagatcggtagctacttctacttaccatccaccgntcttcaccgtt

SEQ ID NO: 89531 - DNA, 575 bp, Arabidopsis thaliana columbia
  unsure (1)..(575): unsure at all n locations
ggggcactatttctccataaaataagaaaaataaaacaaaaataaataaataaaaaatactgctttagcttttggagtatcctccttttaatctcaataaaaaaactattaaaacagaaaaaaaaatggcacgtcaatttgtcgttttggtcctattggctttaactatcgccaccgctttcgccgccgacgctccctcagcttctcccaaaaaatctccatcacccactgccgcaccaaccaaggctccgactgccacaaccaaggctccttcagctccaaccaaggctccagccgccgcacctaaatcatcttcggcctcttctccaaaagcatcttctccggctgccgaaggacccgtccccgaggatgactactctgcctctagtcctagcgactctgctgaggcacctaccgtntcctccccaccggntcccacccccgacagcactttcgccgctgatggaccaagcgatggacccactgnagagtcacccaagagtggtgccgtgacaaactgntaagttctctgttnntcgggaaaagttgccgccgtngggtttntttttttttta

SEQ ID NO: 89532 - DNA, 630 bp, Arabidopsis thaliana columbia
  unsure (1)..(630): unsure at all n locations
acttatggcnttgggagtntccttagtcggcggatcggtnccaggcgaaatggnggaattgcgttggccaatgnttaatacgcaacgtttgccgcggaggtccttaggtttccaaaaatnaacatcncccatgcgnacaaccaaggttcaactgcacaaccaaggcatccttcaggctccaaccaaaggctcccgcccgccgcaacttaaatcatcttcgccctcttcttccaagagcttcttctccggctgccgaaggacccggtccccgaggatgactactctgcctctagtcctagcgcctctgctgaggcacctaccgtctcctcccccccggctcccacccccgacagcacttccgccgctgatggaccaagcgatggacccactgcagagtcacccaagagtggtgccgtgacaactcgctaagttctctgttgtcggcacagtcgccgccgtcggcttcttcttcttttctttctaagttaagtcgtccacgttttgcttggatggatcagagatttgtataatcttttgagttgaggccgtaaatttattttatatattctgtttataaaggaaaaaaaaaaagggcggacgctctagaggatccaagcttacgtacgcgtg

SEQ ID NO: 89533 - DNA, 636 bp, Arabidopsis thaliana columbia
  unsure (1)..(636): unsure at all n locations
gccnnnnnnnnnnnnnnnnnnnnnnnnnnnnnnnnnnnnnnnnnnnnnnnnnnnnnnnnnnnnnnnnnnnnnnnccgcgcgtgcgcccacgcgtacgagactgtgttcattactcgtggggtcggtctctctcctctctatctctctctttctctgtgaagacgaagacagctgtttctgagtttcccttttgtttttgtgtctatcttctcaaccaagttttttgtgtgtccggggttcgcaaagaaacgcctttctcttcttctccttagatttctcggactttctttcaatagtgggaaaaagacacagaatctcaaaaaagtcctctcttgtccaaagtccaaagcttttgaaagagaccataaaaacagagcttaatctctctctgtctctgtctctctctcttttggaggcttgaggatgacgagaagagctgaatttgagatgggtttggtcgtgattcttcaatccatgtttctgatatctctatgttcatcacagaaacctgaggagttcttacctgagatatcaccagatacttctcctcaaccggtttcttcctttcattgcaccttctccaatgggtccatacataaatagtaccatgcctanactatcagggctntgctcgct

SEQ ID NO: 89534 - DNA, 768 bp, Arabidopsis thaliana columbia
tgggcccccccccgagtcgacggtatcgataagcttgatatcgaattcgcggccgcctcggactttctttcaatagtgggaaaaagacacagaatctcaaaaaagtcctctcttgtccaaagtccaaagcttttgaaagagaccataaaaacagagcttaatctctctctgtctctgtctctctctcttttggaggcttgaggatgacgagaagagctgaatttgagatgggtttgttcgtgattcttcaatccatgtttctgatatctctatgttcatcacagaaacctgaggagttcttacctgagatatcaccagatacttctcctcaaccgtttcttcctttcattgcaccttctccaatggttccatacataaatagtaccatgcctaaactatcagggctttgctcgcttaatttcagtgcgtctgagagtttgattcagactacttcacacaactgttggactgtttttgctccattgttggcaaatgtgatgtgttgtcctcagctagatgctacactcacaataatcctttggtaaagcgagtaaagaaaccggtttgcttgctttaaacagaacccagtctaagcactgtctctcggatttagagcaaatcttggtacgaaaaggcgcttcaggtcagcttaataagatctgttctattcactcgtcgaatctcacttcttcgtcctgccctgttatcaatgtccatgagtttggaagcaccgtggatacagcgaaacttcttttggcctgtgaaaaa

SEQ ID NO: 89535 - DNA, 558 bp, Arabidopsis thaliana columbia
  unsure (1)..(558): unsure at all n locations
tacatattttacacagcggacacgctaacagtggaatcgttgttggaactgttggatgaagagtccttgaggaaggacacagctcttccatctccagaatggtcttctgatcacattgcacttttggctgaatttcgctgcatgcccagggccagacgaaacaatattttatagagatactgcagctgtaataacccgataccaaagactggttccaatggatatggttaagctacatgaagtagatagcatggccatgtccctggggtttctcccgctgggtttttcgcttgcgttctactctgtatcacagttttatttactgcttggttcgcttggcttttctttctatagttatttcctctttgccagaaagttttgtcttcactggcttgtgattgtaacaatgtaaacaattagattcttcaagaaaatagtgacttcaccttttccatattaacaaaaaaaaaaaaaaaagnnnnnnnnnnnnnnnnnnnnnnnnnnnnnnnnnnnnnnnnnnnnnnnnnnnnnnnnnnnnnnnnnnnnnnnnntcaatcc

SEQ ID NO: 89536 - DNA, 595 bp, Arabidopsis thaliana columbia
atgggaggcaacgttattactgagcagcaacgtagaagactggatcctgcatcaagtgaaccgttgtttaccaactgtaccagggactttataggcacacttgattacatattttactcagcggacacgctatcagtggaatcgttgctggaactgttgggtgaagactccctgaggaaggacacagctcttccatctccagaatggtcttctgatcacattgcacttttggatgaatttcgctgcatgcccagggccagtcgaaacaatattttatagagatactgcaactgtcataactcgataccaaaggctgggtcccatggatatggttaagctacatgaagtagatagcatggccatgtccctggggtttcttccgctgggtttttcgctcgagaataactctgtatcacagttttctttactgcctggttcgcctggcctttctttctatagatatttcctctttgcccgaaaggtttgtcttcaccggcctgtggttggaaccatgttaaccattaggcggccgcggatttcttccggcccggggctccccttaatttaaaaccgcccccccccccggtgaacctcc

SEQ ID NO: 89537 - DNA, 274 bp, Arabidopsis thaliana columbia
tttagatttagggttttgtaactttggagagctcaagttcggtttcgttcatctccctcttaattcactttaattcagggtttagggtttcatttattttgttttccccaattcgatatgtattctgatctagtggtggctgaaactaaaatcagcaaaacgttcaagaaccgtctcaatggtggttccggtgccttctcttctcgcggcaaacaacaacaagtcacaaggaagagaggaaggcaagatcatcataagtgggagcatgatcttt

SEQ ID NO: 89538 - DNA, 502 bp, Arabidopsis thaliana columbia
ctctatccaactaattatagggaaggctggtccgcctgcaggtcccggtccggaattcccgggtcgacccacgcgtccgtctctctctctccacaaagataagccaacaatggttggtgattacagaggacgctttagtagccgtcgtttctccgatgactctgacgattcttccgacgatgcttcttccgtggagggagagaccacttcttccatgtactctgcggggaaagagtatatggaaacagaatggactaatgagaagcatagtttatatcttaaatctatggaagcttcattcgtagatcagttatataactcgctcggagctctcgggaagaacgagaatgtatccgaatcaacgaggttcggtagcggtagaaaaccgtctcaagaacagttcaaggttcttcatgatggtttctggcagaagattaatgtgaaacaacctgaacatcggattaacggaaggcacggtggtaattctcatgagtttcttagg

SEQ ID NO: 89539 - DNA, 931 bp, Arabidopsis thaliana columbia
  unsure (1)..(931): unsure at all n locations
gccgagcactatacgactcattatgggaaagctggtacgcctgcaggtaccggtccggaattcccgtttcgacccacgcgtccgcccacgcgtccggaaatggcttgcaccgtagatttccggtgccttgacgaaggattcggcggcaaaacctacaaacgcaaacgcgaatctcaagaacaagccgccgccgaagcaatcgccgatgaagcttccatggacatcgatggtgctcctcctgccgcgaaacgtagcgccgtcgcttcctctgaaaatccagacaaacctattgctctagctgtcgagagaccaacctacgacggtgtaatcgccgggaaagtctccggacggaactggaaacagccgcgaactcatagatcttcagggaggtttgtgaagaacaggaaaccagatctggaggagatgaagaggcaaagggagattaagaaagcgtataaggagagggtgaatgagctgaaggaagagattaggagtaataaggttgagaagaggaagaagaaggaagagagagagaagcggaagaaggagaatgttttgagaactggtactaagttgcagaagattacaaatcccaagactttgaagaaaatttctatgtctaagaagcagaggaagcagcttaagaaaattcctgacgagatgttgagtggtggtagcaagaagagtatcacgaattagtggttttttgttccttctctttaaaggcaagtgttttcagttttttgtatttcctcatgaggtttattcgatgttgtttagttaacaatctgcagctaagaactaaatgttatgaaagtttaatagtgagaaactttgttttgcttcaacaaaaaaaaaaaacaaagnnnnnnnnnnnnnnnnnnnnnnnnnnnnnnnnnnnnnnnnnnnnnnnnnnnnnnnnnnnnnnnng

SEQ ID NO: 89540 - DNA, 768 bp, Arabidopsis thaliana columbia
  unsure (1)..(768): unsure at all n locations
tgannnnnnnnnnnnnnnnnnnnnnnnnnnnnnnnnnnnnnnnnnnnnnnnnnnnnnnnnnnnnnnnnnnnnnnnnnnnccacgcgtccgcccacgcgtccggccaaatttgcagactttcccaggaccaaaattatattaacaaaaagttccttttttctgatcaaattgtgaaattcgcttgcttgctttcttcacagtcaattaattctcttacaaaacattcttcgatcgttcgttttcatcttctatgcttctctgatcagacacaagaacacaaccaaagaaactcactatagcttgtctgtagattctgatgttcgaattcttgttgttgatgatgattgaattgatgatgatgatggtttgatgcagatgggttntcaaaaatctcatctttttttcttaacaaatcanaaagcttagaacttggtgaacaatactagagactagagaatttgcagataatctgtttcaaaaatggatgctacgagtggaactccgagtttacagtatattaacttgccggaacaaatctgttcgactaacttctctccctgtgtcaccatttcanaaggccaaacgacattgctttggtgacccaactccaggagagtttcctttagcagctaaccctctcattgccctacatgttctcactgaatgtagattggatcctcgtgacctcgctaatcttcgaggttttgttccgaaatgtcggaaatgtgttactcgcaatttcgaggattgattggtctgctgatttga

SEQ ID NO: 89541 - DNA, 987 bp, Arabidopsis thaliana columbia
  unsure (1)..(987): unsure at all n locations
nnnnnnnnnnnnnnnnnnnnnnnnnnnnnnnnnnnnnnnnnnnnnnnnnnnnnnnnnnnnnnnnnnnnnnnnnnnnnnnnnnnccacgcgtccgcccacgcgtccgggcgtgcaaatcaggtatacgtcatcgactttggtctggcaaagaagtacagagactcaaatcatcagcatattccatatagggaaaacaaaaacttgactggaactgctagatacgctagcatgaacactcaccttggcattgaacaaagtcgtagagatgatttggagtcacttggattcgttctcatgtacttcttaaaaggaagtcttccttggcaaggactgaaagctggcaataagaagcaaaagtatgagaaaatcagtgaaaagaaagtatcgacatctattgaggctttatgccgaggttatccatctgaatttgcatcttatttccattattgccgttctctgagatttgacgacaagccagactatgcctacctgaaacggcttttccgcgacctgtttattcgtgaaggcttccagtttgattatgtatttgattggacgatcttgaagtatcagcaatcacagatttctactcctcctcctcgtcatcatggtcctgtagttgggccaagctctgccctcccccctgccattaccagtgctgagaggccatcaggtggcgacgaagctagaccttctggctggtcatcaggaatccctagacgaaattctggacaaatttttaactcaggaagcttagctaaacaaaaagcaccagtttcaagtgatcctgcaatatctaaagatgtagtgttatcaagctctagcttttctccgcgcaactggggcatcaagacggtgctgcttgtatccagtagtcgcgaacgtccaggttcttcccacctgattctgagccatcaaaccctcaaatcggtgaagctgggtcaggctccaatcaagaaccctgttagtcgaactcactatgtctca

SEQ ID NO: 89542 - DNA, 848 bp, Arabidopsis thaliana columbia
  unsure (1)..(848): unsure at all n locations
taatcgactcatttagggaaagccggtacgcctgcaggtaccggtccggaattcccgggtcgacccacgcgtccgcaaaaagcaccagtttcaagtgatcctgcaatatctaaagatgtagtgttatcaagctctagctttctccgcgcaactgggtcatcaagacgtgctgctgtatccagtagtcgcgaagctgcagttctgggaactgattctgagccatcaaaccctcaaatcgttgaagctggatcaggctccaattcaaagatccctgttagtcgaaactcacctatcgtctcatctgagatcaacaagctatcatcaccttcaagggcgactacttcagtcatgaagaactatgaggctaatcttaaagggatcgagagtctgcatttttagtcgttggggccagtgaatgatcttgaaaccccgggacaagtgtaaattaaaagacaaagatgacctctcttaggccctcctcatgttttacgtgcatttgtgtttacagggagggagacttgtgcctctaagcacacactctaataacatagataaggaaaagcctctgaagaagtgattttcagagaaagacaaactcaaaagagggcgagactaaaaagtcaaaagacttttaacacttttattccccatttggttttacactgtttatgttgtgtttgtcttgtttggtactgcaacagctaaaatcgtttgtgcttcaaaaaggttttaagttcttaaaaaaaaaaaaaaaaaaagnnnnnnnnnnnnnnnnnnnnnnnnnnnnnnnnnnnnnnnnnnncgtcctaaannnnnnnnnnnnnnnnnnnnnnnnnaatcgnnnnnnn

SEQ ID NO: 89543 - DNA, 459 bp, Arabidopsis thaliana columbia
atagggaaagctggtacgcctgcaggtaccggtccggaattcccgggtcgacccacgcgtccggttactaagcaagcagccttggaaaatgactcttctgcgtattgcctcagatacgtaaagcagttactgtgcgtgtccggagactgaaaagcctgaagtagggaaacaaagtagttttatcagacaaaaaaaagatttttgataagattcaagttggatgcccttaataccttatcgatgttgacagctggtgcgtacttgtctgtttgtgttttctctttgtcaagaaggaaatagactctagtatcgactttagatgtctcgtgccacgacttcacagctgtttccatagtctcaacaataaaaaaaaaaaaaaaagggcggccgctctagaggatccaagcttacgtacgcgtgcatgcgacgtcatagtcattctatagtgcgacctaattc

SEQ ID NO: 89544 - DNA, 556 bp, Arabidopsis thaliana columbia
  unsure (1)..(556): unsure at all n locations
nnnnnnnnnnnnnnnnnnnnnnnnnnnnnnnnnnnnnnnnnnnnnnnnnnnnnnnnnnnnnnnnnnccacgcgtccgtcctcttcctctgctccactcattctcctccaccgtcgccacaaaatccaccgcctctagaatcactgccacgccgtcgaaaatccgcttctctgtcataaacgccacgtcggagaatggaaacagcggtggtagtaaaaacgatcgtgatgaggatccatcttttaacccatttggtttcgttacagacaacccgtctagccggagtgcaattcagttaccagagtctccggcggaagacggcaatgtcggccaaatgctctacaggactgaagataaaggtaaagagtatggctcaactatcaaatctgggaagcttagatggtttgtgagagagactggatcaaaggagagtcgtcgaggaaccattgtatttgttcatggagctcctactcagtcttttagctacagaactgtcatgtctgagttgtcagatgctggatttcattgctttgcacctgactggataggattcggat

SEQ ID NO: 89545 - DNA, 528 bp, Arabidopsis thaliana columbia
  unsure (1)..(528): unsure at all n locations
tgatacgccagctctatacgactcactattagggaagctggtacgcctgcaggtacccggtccgggaattcccngggtcgacccacgcgtccgaaagaactccagcatatcgagcaggtcttcactcctttggttgagaaatgcaaaaagtacgggagagcaatgcgtattgggacaaatcatggaagtctttctgaccgtatcatgagctattacggggattctccccgaggaatggttgaatctgcgtttgagtttgcaagaatatgtcggaaattagactatcacaactttgttttctcaatgaaagcgagcaacccagtgatcatggtccaggcgtaccgtttacttgtggctgagatgtatgttcatggatgggattatcctttgcatttgggagttactgaggcaggagaaggcgaagatggacggatgaaatctgcgattggaattgggacgcttcttcaggacgggctcggtgacacaataagagtttcactgacggagccaccagaagaggagatagat

SEQ ID NO: 89546 - DNA, 609 bp, Arabidopsis thaliana columbia
  unsure (1)..(609): unsure at all n locations
nnnnnnnnnnnnnnnnnnnnnnnnnnnnnnnnnnnnnnnnnnnnnnnnnnnnnnnnnnnnnnnnnnnnnnnnnnnccacgcgtccggctagttagagttttcgccaatgatccacattttgtgaaggatggtgttgatgtttcgaatcaaccaggttcgaggaaacctttttgtacagaggtgaaggatttggtccgggaagctgatactgtcataaagattcggtcttttcagatcattgtagctcagggagtgacaggatcgtttccttggtctgctctttcttttgcacctatgtggttggaactcattgggttctcacacgggaaaactgcattcttgatgggtcttttcgtggctgcatcttctcttggtggcttgtttggaggcaaaatgggagattttctgtctactcgtcttcccaattccggaagaatcattctcgcgcagattagttcagcctcagcgatcccgctcgctgcaattctcttgttggtcttaccagatgatccatctacagctgcaatccatggtctgatcttagtcctattggggctatttgtttcttggaatgctcctgctaccaacaacccaatcttcgcagagatc

SEQ ID NO: 89547 - DNA, 895 bp, Arabidopsis thaliana columbia
  unsure (1)..(895): unsure at all n locations
ctcatactgcaactaagtatgatgttttcctaagtttcagagggcatgacactcgcgacaacttcatcagttttctctacaaagaactggttcgaaggagcattcgaaccttcaaagacgacaaagagctggagaatggccagaggttttcgccggagctcaaaagccccatcgaggtgtcaagattcgccgtcgttgttgtctcagagaactatgctgcgtcttcttggtgtctcgatgagctcgtaacgatcatggatttcgaaaaaaagggttccatcaccgtgatgcccatcttctacggcgtggaaccgaatcatgtgaggtggcagaccggagtactcgctgaacagtttaagaaacatgcgagtagagaagatcctgagaaagttcttaaatggaggcaagcattgaccaattttgcgcaactctccggcgattgttcaggtgatgatgactcgaagctggtggacaaaattgctaacgagatatcaaacaagaagccgatttatgcaacaatatgatgagtccagacgagaagaagaagaagaaaggagaaggcccataaggactcgcatgcccaatccaaagtattcccaacactaagtcattttacttagtctctgttttcgatttagttacaataagcaaggagtcttccacgattacagtttccatcttttccaagtttgtagaagttgttactccacgtttgtttccatgttgtttctagttgtaaggaggtgtactccaagtatttatatcaatgaaaaccaaaccaaaaaaaaaaaaaaaggcgnnnnnnnnnnnnnnnnnnnnnnnnnnnnnnnnnnnnnnnnnnnnnnnnnnnnnnnnnnnnnnnnnnnnnnnnnnnnnnnnnnnnnnnnnnnnnnng

SEQ ID NO: 89548 - DNA, 890 bp, Arabidopsis thaliana columbia
  unsure (1)..(890): unsure at all n locations
tccagctttataccaattcattttagggaaggctgttcccctggcaggacccggcccggatttccgggtccgacccacgcgtccgcaaaaatcaaaatgtcttctcatactgcaactaagtatgatgttttcctaagtttcagagggcatgacactcgccacaacttcatcagttttctctacaaagaactggttcgaaggagcattcgaaccttcaaagacgacaaagagctggagaatggccagaggttttcgccggagctcaaaagccccatcgaggtgtcaagattcgccgtcgttgttgtctcagagaactatgctgcgtcttcttggtgtctcgatgagctcgtaacgatcatggatttcgaaaaaaagggttccatcaccgtgatgcccatcttctacggcgtggaaccgaatcatgtgaggtggcagaccggagtactcgctgaacagtttaagaaacatgcgagtagagaagatcctgagaaagttcttaaatggaggcaagcattgaccaattttgcgcaactctccggcgattgctcaggtgatgatgactcgaagctggtggacacaattgctaacgagatatcagacaagatgacgatttatgcatcactaaacaatgggaagaatctagttgggattgatacacacatgaatgaactaatccgattaatgatatgaattgcacanagtactgaagaatggtgggatctggcaaacgaggcatggtagtcagctcagctaatatgttatcagacatctgcacagttgacagcattgttctggaactgaaacattctaggtcgcctcaccattaccacagttctggaaataaagaaaacttacaacatgtctagataaagtctgtgtggaacacgtct

SEQ ID NO: 89549 - DNA, 433 bp, Arabidopsis thaliana columbia
gtttcttcattgccttgggcaagagcacccagtcttttttagctgcaaatggtttcagttcgctggagaatcctgtggaagaccttgttaggtgactcattgtttttcttctgtttgcttaccatactctttgatacaccctatcacttagatcttctttatttaggcacttcattgggggaagtctcctacaatatcctcagctttcagccatcagttcttaccagttgtatgtagaggtaggcataaatcataccatcactggttgaaaatatttagttaccagtttgaaatcttatcatggaattctatagcgtaggttgtctgtgaagaactagattggattcctttctatccagccagaaaggactcccagccagccgaacaatcacacgggcataaaagcagaccacaagggccacctaattatgat

SEQ ID NO: 89550 - DNA, 475 bp, Arabidopsis thaliana columbia
attggtttcagttcgctggagaatcctgtggaagaccttgttaggcacttcattgggggaagtctcctacaatatcctcagctttcagccatcagttcttaccagttgtatgtagaggttgtctgtgaagaactagattggattcctttctatccagccagaaaggactcccagccagccgaacaatcacacgggcataaaagcagaccacaagggccacctaattatgatgctcttccacagatattgaatgtttgctcttattggctacagagctttattaagtacagcaaatggcctgagaatccttctaatgtcaaggcagcaaaattcttatccaaggggcacaacaagttaatccagtgccaggaagaactgggaatatcaagtttggctgtaacagaagcgagttttattgacatgacctcatcctcaactgatggagagtcaagctcatttgacaaggctctagaga

SEQ ID NO: 89551 - DNA, 589 bp, Arabidopsis thaliana columbia
ttccctcaataaaccaaataagctaagtgttttgtgtaacgaaaacaaaaaatgggaaacctcatgtctctcgttctcgtggctttgctcttttctctctcccttgctgttattgcggacacatccaacgatgccacacatgttaaagaagaagtgaagccgagtactgaagcaactgatgctatagaagccgaagtcgaggtcaatgacgctgttgtagagccccagcaaggcttgcctggtggtggttgtaggttcggatgttgcggtgggtactggtggaatggactgtgcatatactgttgccgcagtcaagccgaggccaacgaagttgtaaaaactgttgagcctcagaaggaagaagctaagccatgatttcgcatgtaacacaaactctatatgtttgtatgcatgcagtggtcaattaccgtatgtatgtataaataaaagaagcatggtgcctaagtaagtaagatacctagaggagctcaatagaaagaaaccaaaggttcattaatggtttttggttatgaggtgttttctcgtggatgttataaataataactgttttaatattaatattttgttc

SEQ ID NO: 89552 - DNA, 547 bp, Arabidopsis thaliana columbia
gttagacccaaaacgaaaaaaaggttcgtttaaagagctctggttgggtttaacttggaggaattaatcgagtttggtgatcttcttcttaggtttttttctcgatctggttgatttgcttaaacatctgtaactatggcggcagaacccaaggcagctgtcgaagtggtgaaggtggatctattcgaggacgacgatgagttcgaggaatttgaaatcaacgaagattggttggagaaagaggaagtgaaggaagttagcctgcagtgggaagatgactgggatgatgatgatgtcagtgacgacttctcgcgtcagttaaagaaggagcttgagaatgctagtgagaagaaatgaggtccaagattgcgagaaaggcaggtcttctcatttagggaaccttggcttttttgtttgaattgcatcctttggtttatcgtagcatgtatcggttctccttttccttaacacattatactcttccttggatgcaaatttctcgtctttgaagatgataaatttgagctgatagtaattctattctgat

SEQ ID NO: 89553 - DNA, 443 bp, Arabidopsis thaliana columbia
  unsure (1)..(443): unsure at all n locations
aacgtcatctctttctcatctcgtgaaatcaacaccactgccggattccaacctcctccggcgaacatacgactttgttcccgtcagccatcgtctcctcctttccccaccgcgctctcttgttctcgacatggagaagatggagcttgcctttcgatgacaaaatcaaactcagattccgactactttgatggctacctccggcgaaagcaactgcaaaccttcaccttttcttggttgctctccgttctggtgaaacaagagacttctcttcgtctctnatccagggctctngtccgtgacacatnacaacaatnacaatcnatcttcaccatccaattaactccggctgcgnttaaatccgccgaatnggnccgccancattaaccggacaantcatgtttccaattgggngagntccacctntttttccgnggaannng

SEQ ID NO: 89554 - DNA, 578 bp, Arabidopsis thaliana columbia
  unsure (1)..(578): unsure at all n locations
gancntacttggcnatnangccatnccacccnntnttgagctcttttcacggcntcacccncngttcgnccgncttgcccttttntccggggncccagaatcncccttaaacattcccccaaacacaagccccaatcataaaccacccntttgctctgggaccggttaggcagcgatgcttatggaaccgatactttgttctttgcgttctactatcagcagaactcataccagcaatatctagctgcaaaagagctgaagaaacagtcatggagataccacaggaagttcaacacttggtttcagagacataaagagccaaagattgcaaccgatgaatatgaacaaggagcctacgtttacttcgatttccaaaccccgaaagacgagaatcaagaaggaggatggtgccaaaggatcaaaaacgagttcacatttgaatacagttatcttgaagatgaactcgtcgtatagaatagagagagatgcatgtttgtatatactctcgagcaagtgtgttattatttccagcgactatttgtactcttcttttcaataaactaattacttttagtttc

SEQ ID NO: 89555 - DNA, 789 bp, Arabidopsis thaliana columbia
  unsure (1)..(789): unsure at all n locations
agataaaccaatgcctagaggggagattgtggtaggtggtaacagtgtaacagcaggttacttcaacaatcaagaaaaaaccgatgaggtttacaaggtcgatgagaagggcacaaggtggttttacaccggagatattgggagattccaccctgatggatgtctcgaagtcatcgatagaaagaaagatattgttaaacttcaacatggggaacccgggcccccgggaaaggtggaggcagctttgggttcgagcaattacgttgataacatcatggtccacgcagacccaattaacagctactgtgtagctcttgttgttccatcacgaggagcattagagaaatgggcagaggaagctggagttaaacacagcgaattcgctgagctatgcgagaaaggtgaagcagtcaaggaggttcaacaatctcttaccaaggccgggaaggcggcaaagctcgaaaagtttgagcttccagcaaagatcaagttgctgtcagagccgtggacaccggagtcgggattggtcactgctgctcttaagataaagagagaacaaataaagtccaagttcaaagatgaactcagcaagttatatgcctaaaaacttttcttggacttgtgacaaactccatatatttcagtctgactttccacattttgttatatctacaataaacttgaagtttttctagacacaaacacaaagggcaannnnnnnnnnnnnnnnnnnnnnnnnnnnnnnnnnnnnnnnnnnnnnnnnnnnnnnnnnnnnnnnnnnnnnnnttc

SEQ ID NO: 89556 - DNA, 746 bp, Arabidopsis thaliana columbia
  unsure (1)..(746): unsure at all n locations
nnnnnnnnnnnnnggtaaatacgactcactttaggaaagctgacacgcctgcaggtaccggtcccgaatttccgggtctgtaccacgcgtccggagcaattgagcagccatggtttgcatcaggcgagcgacggtggatgatctgctggcgatgcaagcctgcaatctcatgtgtcttcctgagaactaccagatgaagtactacctctaccatatcctctcatggcctcagcttctctacgtcgccgaggactacaatggtcgcatcgttggctatgtcttggctaagatggaggaagagagcaacgagtgccacggccacatcacttctctcgccgttcttcgtacccatcgcaagctcggtctcgccactaagctcatgaccgccgctcaagctgccatggaacaggtttacgaggctgagtatgtttcgttgcatgtgaggagaagtaaccgagcagcattcaatctatacactgagacattaggctacaagattaatgatgtagaagcaaagtactacgccgatggggaggatgcttatgacatgcggaagaatctccaggggaagcaggaccattaccacggccacggtcattcatnaatcaccatggnggaggntttttttcttggtgnttncaaaaatttttggnancagnttaagccctagattgttaagcagtttccaaatnnggnttntnaagncggtanttttgggtttttggggggggtccangggnccccct

SEQ ID NO: 89557 - DNA, 697 bp, Arabidopsis thaliana columbia
  unsure (1)..(697): unsure at all n locations
cccanccccnggcnggttcgggctgggttttcgtccatggggggaantaccggccccattcatctttccctggggcattaggctccaggattaatgatgtggaagcaaaggtcttccccgatggggaggatgcttatggccatgcggaaggatcccaaggggaagcagaaccatcaccacgcccacggtcatcatcatcaccatggaggaggatgttgttctggtgatgcaaaagttgtagaaacagctcaagccgtagatggtaaagcagtttccaaatgagattcgaaagcagataattatgagtatattgaggtgggttcactggctcgctctagtacttctcactatttccattcatatgattccgagtgacaaatacatttggtgaccactctgtgttactcctttgtctttctttggttgtattgaaaatttagccgttcctttttttgatgtatcattttggaaattccaagctttcattaaggctttacaacttaagctggaaatcttctatttgcaagatagcagatctctattggcaatatagtacatttaattacaagaaaaataatcttggcttgtaaaaaaaaaaaaaaaaaaaaaaaagcggccgctctagaggatccaagcttacgtacgcgtgcatgcgacgtcatagatacttnctatagtgtcgtcctcaattagattc

SEQ ID NO: 89558 - DNA, 741 bp, Arabidopsis thaliana columbia
  unsure (1)..(741): unsure at all n locations
acgactcactatagggaaagctggtacgcctgcaggtaccggtccggaattccgggtcgcccacgcgtccgagacgacagaagggtacgaggctgagtatgtttcgttgcatgtgaggagaagtaaccgagcagcattcaatctatacactgagacattaggctacaagattaatgatgtagaagcaaagtactacgccgatggggaggatgcttatgacatgcggaagaatctcaaggggaagcagaaccatcaccacgcccacggtcatcatcatcaccatggaggaggatgttgttctggtgatgcaaaagttgtagaaacagctcaagccgtagatggtaaagcagtttccaaatgagattcgaaagcagataattatgagtatattgaggtgggttcactggctcgctctagtacttctcactatttccattcatatgattccgagtgacaaatacatttggtgaccactctgtgttactcctttgtctttctttggttgtattgaaaatttagccgttcctttttttgatgtatcattttggaaattccaagctttcattaaggctttacaacttaagctggaaatcttctatttgcaagatagcagatctctattggcaatatagtacatttaattacaagaaaaaaaaaaaaaaaaaagggcggccgctctagaggatccaagcttacgtacgcgtgcatggtacgtcatannnnnnnnnnnnnnnnnnnnnn

SEQ ID NO: 89559 - DNA, 640 bp, Arabidopsis thaliana columbia
cggggctaagcgatctgccgaagctgtgggatgtcaaaatgcatcggtaggggagcgttccgccttagggggaagcaaccgcgcgagcggcggcggacgaagctctctctctttagcttcgatctctccctcgcttcgatctctctctcgactgctactcctggaatgtacatttgttgatggaagtttcttcagaattgatttcaaaatctctgagctgaagattcttgacttggaacaaatatgcctcacagaacaaggccgttgaagggactcttgcttttcactggaataaactttgtgttggtgcagaccattactccagtctatgactttgtctgcttcttgccttactgggagagaaggagagagcgaatccggcaggagcgtgaagccgcagctgcatccttaaactcaacacaaaaagctactcaagcatctgttggatgatgaactcttctctacatcttctcagtctcttaaatcagaattcctctttgtaagaaactagttaccctctgattactgaatatctgagaaggcatgttcacatttctgctctgagcttagattcattgtagcaaatcttgaaagtttctgtggatttttcaaacacgtgttattaatcgtagatactttc

SEQ ID NO: 89560 - DNA, 853 bp, Arabidopsis thaliana columbia
cagctctatacgactcactatagggaagcttgtacgccttgcggtacccgtcccgaatttccgggtcgcccacccttccggggaggtggtggttagggacccgagaacccggaagaagggtggaccacgacggtgtttccgttggagagatcgttttaaaaggcggttcggttatgctgggttactacaaagaccctgaaggacccgcaccgtgtatgagagaggacggagggttctacagcggagacgtaggagttatacttgaagacggttacttggaagttaaagaccggtcaaaggatgtgatcatatgcggaggagagaacataagtagtgccgaggttgagacggttctgtatacaaatccagtagttaaagaagccgcggtggtggctaaaccggataagatgtggggagagacaccgtgtgcttttgtgagcttgaagtatgatagtaatggtaatgggttggtgactgagagggaaataagggagttttgtaagacgaggttacctaagtatatggttccaaggaaagtaatttttcaggaggagcttccaaagacttctactggaaagatacagaagtttcttctaagacaaatggctaagtctctgccttaaagattcgcttgagttattgagaatatgaagaagaatctccaagaatgaagtaaagaatgacatttattttgtgttgtattattgttgtacccttaagaagggattagtttccaaacaagcttgctactattttcataagaaactatatgaagaactattcagaacaaaaaaaaaaaaaaagggcgaccgctctagaggatccaagcttacgtacgcgtgcatgcgacgtc

SEQ ID NO: 89561 - DNA, 703 bp, Arabidopsis thaliana columbia
acaccccagacgagctatgacgtcgcatgcacgcgtacgtaagcttggatcctctagagcggccgctcgcgatctagaactagtcatcatccttcaagaacacaaagctagacagaaaaaaaaaaatgtgttcctcaaaattaaaaaatctgacccaagaaaacatttctcagatcaacggccgtccggttcttcaaccgaagtcgaaccaagttccgacattagaccgacgtaactcactaaaaaaatcgcctcctaagcctttgaatccaattgcatcaaagataccctcaccaagaccaatttctctaatctctcctcctttgtctcccaacacaaaatccttaagaaaaccggccggttcttgcaaggaacttcttaggtctagctctacaaaatcgaaaccagtgatatcaccagagaacagtgatggtggctacaaagaggttatgcctatggtgattgttcaaaagcagcctggaagtatagcagctgccagaagagaagaggttgcaatgaaacaagaagagagaaagaagaaaatttctcattacggtagaatcaaatccgtaaaatcgaatgaaaagaacttaaatgttgagcatgagaagaagaagagatgcagtttcatcactacaagttcagatccaatatatgtcgcttaccatgacaaagaatggggagttccagttcatgatgacaa

SEQ ID NO: 89562 - DNA, 450 bp, Arabidopsis thaliana columbia
ctcttgcaagaagaaaaagcaagcaaaacttcagcgtgcagtgaaaagtattaaaagaaagcagcgttcgtcgtctgagaacaccacttcaacattttcacctcttaatcatttaaatgatgcgcagaaattcgcagagaaattgttttcccgtcttcagaccatcaagggcagtggtgaacgtgttgagactaggttgatgatgattaaagttattgctcgcacaattggtcttcacaagttgcatttactaagtttctatccttttcttcaaaactatgctctgccgcatgtaaaggacattacacaaatacttgcagcagcagttcaatcttgccacgatggggttccttctgatgttgtggagccactgttcaagcaaattgtgaatcagtttgtacacgacaagtcacgtcctgaagctattgctgtcggactcaatgtggtgcg

SEQ ID NO: 89563 - DNA, 517 bp, Arabidopsis thaliana columbia
  unsure (1)..(517): unsure at all n locations
nnnnnnnnnnnnnnnnnnnnnnnnnnnnnnnnnnnnnnnnnnnnnnnnnnnnnnnnnnnnnnnnnnnnnnnnnnnnnnccacgcgtccgaaaaaaaaatgtctaccatttcaaaacctctcttcttaaaacttctctatatcttcttcttcttctgctactcagtttctctctcatggtcttcgtctctttctctccactttcctctcacatctcttcgtctcactccaaccacaaactcctcctccttcaaaacctccctcctttctcgccggaacccatctccgccgtcgtctccgtacactttccgatcaaacatcaaatactcaatggctctaatcctctctcttcccataggaacaccatctcagtcacaagagctagttcttgacaccggaagccaactctcatggatccaatgccatcccaagaaaatcaagaaaccacttcctcctccaacgacgtcgtttgatccttctttatcttcatcgttctccgacctaacttgctctcatcct

SEQ ID NO: 89564 - DNA, 531 bp, Arabidopsis thaliana columbia
  unsure (1)..(531): unsure at all n locations
tgannnnnagcttttaatccaattacttttagggaagagctggtccgcctgcaggtcccggtccggaattcccgggtcgacccacgcgtccgggaacatctttctgttcctcgtttcagcgatgtagcagtagtacccagtggagtggagcaatggcttgccttagccgaatcttccttattctgatgattactatgtcttcttcgtctcctcctttctgttccggtggaagtcggaaggagctccgagataaagaaattacgagtaagagtgatgatacacaggcgagttatgttttaggatctaaatttgtggacccgacacgtgttcttcaactttcatggctaccaaggtcaggtacttctgattgatatctggttctaccatcatggatcatttctgcacataggaatgtatgttttactgcttcaaattttaggggtctgaagcaatttggtatgtatagggtctttctataccgcgggttcttgtccgaggaagagtgtgatcatctgatatctctggttaatt

SEQ ID NO: 89565 - DNA, 473 bp, Arabidopsis thaliana columbia
gaaaaatggcgaacaatgttacatacacatcactttatttcttataatgctcaatcgcaactatgccgtaaaacaataaacgagggtagtatccatttgcgggtgagctcattcgccgtccttcctccatttggttcctcatacagctccacaaccgatagatcttcttcttcttcgttttactcatctctcgaaacttctccgcatatctcaataccggttccagtcaaattcccgttgtccaaatgtgttcgtctcgtgctcactgaatcagccttctgatgatgcttccgacgccgccctttttctcgaatccaattcaattgctgattacatgcggttcaaacgccgtcccgaccccggaaatggtaccagcgagttgcagactgcaatcgtgagttacaagaaacgtttcccttggattcttctcaacccttttcttcaggtggatttggtctcaactattcatattg

SEQ ID NO: 89566 - DNA, 418 bp, Arabidopsis thaliana columbia
ttcttcgcgtccggttttcgattcgaaaatcttaatctccatttcattccttcgacatcttcacacaaaccctaatctcatttctggtaaatccgattttgggaaactctaatttgatctcgagatcgctaacaacgatggaagaagacaagcaaatgcacgaggagaaatcatctctggttaaagaagaaccggttcgtggagaagagcccgagattgagaaattgacagtggcagatgtggacgcgccaccgaagagtaccggtggttggggttggggtttctctggcttctctgtgctttccgatctccaaaaagctgcggaagatatttctcgtaatgctgcagcggtggcagagaaagcagcgaaaagcattgcagagatgggagaagtggatgaagactctgaatcttctgc

SEQ ID NO: 89567 - DNA, 486 bp, Arabidopsis thaliana columbia
  unsure (1)..(486): unsure at all n locations
agttggggtatccaaanacctgggctngggacccagcttgccatntatggggaaaaccagcttgnacccaggcgattttctaggaccactggtgggtagcagctctagcattcggggaaggatgccacaacaatcaccatgctttggagttctcagctcgacacggcttagaatgggtggcaacttgatatgacttgggtacgtcgttaagttccttcaagccatcggtttagcaactgatgtcaagctcccatcggaagctcagaaacaaagaatggcattcaccagcgactgatcttaaaaaactacatggttatgcctaaagtcaaaactgtcggttcgattgaagctatgaaggttttaaaaaaggattttgttctgcttttttgtgtttacttaaaggtatatatctgtgcaagagattgtatgtgacaaactgattatgaataatatctataattacattcaaaaaaancaaaaaaagaa

SEQ ID NO: 89568 - DNA, 588 bp, Arabidopsis thaliana columbia
  unsure (1)..(588): unsure at all n locations
nnnnnnnnnnnnnnnnnnnnnnnnnnnnnnnnnnnnnnnnnnnnnnnnnnnnnnnnnnnnnnnnnnnnnnnnnnnnccacgcgtccggcctttgttctgtttctctgcgatttcttcgatgttcctcttcttcgttttgattttcagatttgtttaactcggtcgttgcgttgacttcaaatttcttaaaagagagagagagagagagaggagatagttcagaaaatctgtcagacttgggatctttctcggcaatgcgacgcttgttcgccgcgaaatccctctcccgagaggatacaacctttttgtcattctcttcttcttcggtgacgcgtttcctcaaggctcttcttcctctccgttcagatccaagagatgtccgctaattctcatcctcctaattccaaaaacgtcctctgtaatgcagccgccggtgccgccgccggggttgttgcggctacgtttgtgtgtcctcttgatgttataaaaacgaggtttcaggttcatgggctgcctaagctcggtgatgcaaacatcaaaggtagtctaattgttggcagtcttgagcagatcttcaagagagaaggg

SEQ ID NO: 89569 - DNA, 442 bp, Arabidopsis thaliana columbia
ggtccagcacgcgtccggattaaattggagcactgaattgttcttctggatttgttattaatttggaaccatggaagcagaaatcttcaggaatcttcttggcttgactcataaataaaaaataaggttttggaatgtgaaagtttaatctttgaacattctatttacaagaagtgtaggaaaggattactttgtgatttggatccttttctacacttgttagtttgtgattttgagttgtggtatttggtgttttgttatgtagcagatcaaataaaagaccactttacctgcaaaatgacgagatcgtgggtgcttttgtttgttcttatgttcattgtgttgacttctcagtttgagtggaatgaacaagttgagaatgaaagtgagactagtagtcgtcctctgattctttcagataaagagcaacaacatatccctc

SEQ ID NO: 89570 - DNA, 449 bp, Arabidopsis thaliana columbia
ggaaaacggtgaaagtagcttgtagtatttggcataccgcagcgattgtcgaggttatgggtcaaaccgctacgagtatgtcatctaggaagttgtttacttggggtgatggtgacaaaaacaggttgggacacggaaacaaagagacttacttgcttccaacttgtgtatcttctcttattgactacaactttcataagattgcttgtgggcatacatttaccgtcgcactcacaacttctggacatgtttttactatgggtggtaccgctcatggtcagctaggtaactcaatctctgatggtaaattaccatgcttggttcaagatagattagtcggagaattcgtggaagaaatcgcgtgcggagctcaccatgtcgcggttttgacatctagaagtgaagtcttcacgtggggaaaaggtgctaatggaagattaggacatgga

SEQ ID NO: 89571 - DNA, 1064 bp, Arabidopsis thaliana columbia
  unsure (1)..(1064): unsure at all n locations
cagcaatcaatataagcctgggatccaattttcttatttccccaaccaaaacaggggaagaaaaaaaaagaaaacaaaaaaatcaaaaaaaattagaaaatgaaagcctcaacaagagtcatatggacaatatctgtccttatgctcgctgctgtgtccgaggccatcttccctctaccgtttctaccgttcctccctgggttcaacaacggctttagggacaatgaggctgtcaaggttgcgaaaccacagcctgcaggagcagttggtggaaaagccgcaagaaggcagcgtggcggcggtttagacgctcagacaacctggggtggtaagtgggagctcttcttggaaaactcgggtgtgtcagggatgcatgcgatccttatgccagttatcaacaaggtccagtactatgacgccaccatttggagaatttcaaagattaagttgcctccaggcgtaccatgccatgtcgtggacgctaagactaacaaggtcgattgttgggctcattcgattctcatggatgtcaacaccggcgcccttaagcctctagggctttccaccgatacatggtgctcatccggaggtctgaccgtaaatggtacattggtgagcactggaggatacggaggaggagccaacaccgcgaggtacctatccagctgtgaaaactgcaagtgggaagaataccctcaggcattggccgcgaagagatggtactcaacgcaagcaactctccctgacggaaagttcttcgtgattggtggaagagacgccttgaactacgaatacattcctgaggagggacaaaacaacaggaagctctttgactcattgctcctcaggcaaacagacgacccggaagaaaacaacctttaccctttcgtctggcttaacaccgacggtaacctcttcattttcgctaacaaccgatccatccttctaagccccaaaacaaaccaagtcatcaaggagttccctcagctcccaggtggtgcccgtaactacccgggatcaggttcttncgcactcctccccatccaactttacgtgaaaaaccc

SEQ ID NO: 89572 - DNA, 509 bp, Arabidopsis thaliana columbia
aaatcatttacgttttgatcgacaaaaatggagttgataaacgactttctcaacctaactgctcctttcttcaccttctttggtctctgcttcttcttgcctcctttttacttcttcaagttcttgcagtctattttctcgacaattttctctgaaaatctttacgggaaagttgttctcatcactggtgcttcctccggtataggcgagcaattggcatatgagtacgcatgtagaggtgcatgtttagccctgaccgcccgaaggaagaaccgtctagaggaagtggcagagattgctcgtgaactcggatctcccaatgttgttaccgttcatgctgatgtctccaaacctgatgactgtagacgaatcgttgatgacaccatcacccattttggcagattggatcatcttgtaaataatgctgggatgacgcagatttcaatgtttgagaacattgaagatataacgaggacaaaagcagttttggatactaacttctgggatcg

SEQ ID NO: 89573 - DNA, 423 bp, Arabidopsis thaliana columbia
ctgtaatatctggttctcttgtccttgaaaattttacgaggttgttctctgtgaataatcgatgtctgcttcatgtgctttaacaccgtctgttaggacagagttattcagttcatcatcatctaaaagatcaatctttcctgctagaatttgtcgaccaagaaacaaatgtgaaatcagcagaagggattttgcaattaggggagggattgctgcttctggagtctcagtcatggatacttcttctgcttcttctcagtctgttcaaggtagtgagaggttggcttttaaaccagaaggctataacttttgggaatggagaggtcacaagattcattatgttgttcaaggagaaggctcgcctctagttcttattcatggttttggtgcttctgtctttcattggaggtataacattcctga

SEQ ID NO: 89574 - DNA, 865 bp, Arabidopsis thaliana columbia
  unsure (1)..(865): unsure at all n locations
ttaggtgacactactagaagactatgacgtcgcacgcacgcgtacgtaagcttggatcctctagagcggtcgcggaggcggtgctagggtcagaacgaactttgtggtggctaaagatggaagcggacagtttaagacggttcaacaagccgttgatgcttgtcctgagaataaccgaggccgatgcatcatctacatcaaggccggtctctacagagagcaagtaatcatccctaagaagaagaacaacatcttcatgtttggagatggtgcaagaaagaccgtcatttcttacaacagaagtgttgctctcagccctggaaccaccacttccctcagtgccacagtccaggttgagtccgaaggattcatggcgaaatggatcggattcaagaacaccgccggtccaatgggacaccaagccggggctatccgagtgaacggagaccgtgccgtgatcttcaactgcaggttcgacggttaccaagacaccttgtacgtcaacaacggtcgtcagttctacagaaacattgtcgtgtcaggaacagtcgacttcatcttcggcaaatccgcaaccgtgatccaaaactcactcattgttgtccgtaaagggaacaagggccaattcaacacggtcacaggccgatgggaacgnaaaggggtctngcgntgaaaatcggtatcgtcctccaaaactntcggattcgttnccggcaaggaacttgcggcagannggttaatcgtggggtatctttggaggccctggagaattntttcccccgngttttaactccgggtggnntttnttgccnaaggttgaggtttggttgggagttccaagnattgncgtggtacacctggcnnc

SEQ ID NO: 89575 - DNA, 672 bp, Arabidopsis thaliana columbia
  unsure (1)..(672): unsure at all n locations
tctaatacngactcatctatangggaaacgctggtancgcctgcaggtacccggtccggaattcccgggtcgacccacgcgtccgcaatcatcaaacttcacgggtaaaaccgaaggaaacttgggttcggcatctcgcaaacaacaaagccgttcttgattactgcaagaaagttttcatgtacgcgcttgaggatctcagcaccattgttgaggaaatgggtgaagatcttaaccagatcgggagcaaaatcgaccagcttaaacaatggttaaccggtgtttacaattaccaaactgattgtcttgacgatatcgaagaagatgatttaagaaagactattggagagggcattgcaagctccaagattctcactagcaacgctattgacatcttccacactgtcgttagcgccatggccaagcttaacttgaaggtcgaggacttcaagaacatgacaggcggaatcttcgctccttcagacaaaggagcagctcccgtcaacaaaggaacccctcctgttgctgatgattctcccgtggccgatccagatggtcctgctcgccgtcttcttgaagacattgacgagaccgggatcccaacatgggtttcaggtgctgacaggaagctcatgactaaggctggacgtggcagtaatgacggtggtgcta

SEQ ID NO: 89576 - DNA, 945 bp, Arabidopsis thaliana columbia
  unsure (1)..(945): unsure at all n locations
cggtccggatttccgggtcgacccacgcgtccgaacatatgcatgtgcggagatggtgcaaaaaaaaccgtcttttcttacaacagaagtgttaaactcagccctggaaccaccacttcccttagtggcacagtccaggttgagtccgaaggattcttggcaaaatggatcggattcaagaacaccggcggtccaatgggacaccaagctgtggctatcagagtgaacggagaccgagccgtgatcttcaactgcaggttcgacggttaccaagacaccttgtacgtcaacaatggtcgtcagttctacagaaacattgtcgtgtcatgaacagtcgacttcatcttcggcaaatccggaaccgtgatccaaaactcactcattggtgtccgtaaaggaaacaagggacatttcaacacggtcacagccgatggaaacgaaaagggtctagcgatgaaaatcggtatcgtcctccaaaactgtcgcatcgttcccgacaagaaactagcggcagagagattaatcgtggagtcatacttgggaaggcccatggaagaaattctcttcccaccgggattatccaactcccagattggagatgtgattaagcccagaacgctggaagattttgggatgggaaagtttcccccagttaaggagggtcgtttaagtccaccacccttggcccggagcttttccttacccaaaaagttaattgggttaggttccccggttctccacctaaggccaatgacttccctgttcctacctggttaggtcctattacttgaattcaagaacccaatgttcccttcacgcttggataataaggcgtataattcaaatcaaatcaaatcaaaaaaaaaaaaaaaggccgcnnnnnnnnnnnnnnnnnnnnnnnnnnnnnnnnnnnnnnnnnnnnnnnnnnnnnnnnnnnnnnnnnnn

SEQ ID NO: 89577 - DNA, 477 bp, Arabidopsis thaliana columbia
aaggcgggccccccggcgggacccggcccggatttccgggtttgacccaggcgtccgtttaatctaataaagcctctccctctccgattaaccttaataaatccggagggatcggaaagaaaaaagaaccaaaaaaaaaaaaaaaacagaaaaaaaaaaatgattggaaaagttgtggtctcggtggcctccatcctcttaatagtcggagttgccataggagtcgttgccttcataaacaaaaatggcgatgctaatctgtctccccaaatgaaagcggttcaaggaatttgccagtcgacatccgacaaagcctcatgtgtcaaaactctcgagccggtcaagagcgaggacccaacaagctgatcaaggctttcatgctcgctacaaaagacgaattaaccaaatcgtctaacttcacgggtcaaaccgaagtaaacatgggctcgagcatcttggcaaaaaacaaagccgttc

SEQ ID NO: 89578 - DNA, 792 bp, Arabidopsis thaliana columbia
  unsure (1)..(792): unsure at all n locations
attnggaanccnaccgntccaacnccccnttttcccntaggnaccagggccattcacccggtcncncccgtgnaccgaaagggtctngccgtgaaatcggtttcgcccncccaaactntcgcatcgttccccgncaagaaacttgcggcagagggattaatcgtggagtcatacttgggaaggcccatggaagaaattctctacccaccgtgattatccaactccgagataggagatgtgattagaccagaaggttggaagatttgggatgcggaaagtttccacaagtcatgtaggtacgttgagtacaacaaccgtggaccaggagctttcgctaacagaagagttaactgggctaaggttgccagggtctgcagctgaggtcaatggcttcacagttgctaactggttaggtcctattaactggattcaagaagccaatgttcctgtcacaattggattataatttataaagcgtatatgaaaattattttagtttttaagtatatcacaattggtgtatgaaattggtttatgaaaactttttaagaaagtctataatgtttttcctctgctaacttgcttcatctaattaaggtcacattgcaatgcagccaagtactcatgttgctttattataagctccttcttcctgcaaaaaaaaccaaaaaaaaaacaaagggcagcctgctcgcgatcgcacgcgtggnnnnnnnnnnnnnnnnnnnnnnnnnnnnnnnnnnnnnnnnnnnnnnnnnnnnnnnnnnnnnnnnnnnnnnnnnnnaggatcat

SEQ ID NO: 89579 - DNA, 807 bp, Arabidopsis thaliana columbia
cagctacatacgactccattagggaaagctcgtacgcctgcaggtaccggtccggaattcccgggtcgacccacgcgtccggaacatgacaggcggaatcttcgctccttcagacaaaggagcagctcccgtcaacaaaggaacccctcctgttgctgatgattctcccgtggccgatccagatggtcctgctcgccgtcttcttgaagacattgacgagaccggaatcccaacatgggtttcaggtgctgacaggaagctcatgactaaggctggacgtggcagtaatgacggtggtgctaggatcagagcaacctttgtggtggctaaggacggaagtggacagtttaagactgttcaacaagccgttaatgcttgtcctgagaaaaacccaggccgttgcatcatccacatcaaggctggtatctacagagagcaagtgatcatccctaagaagaagaacaacatcttcatgttcggagatggtgcaagaaagaccgtcatttcttacaacagaagtgttaaactcagccctggaaccaccacttcccttagtggcacagtccgtaagtctcaccaaaccctaattcactagttaggttaacaaatatttttctctacatatatagctcatgttatatattattgcgcagaggttgagtccgaaggattcatggcaaaatggatcggattcaagaacaccgccggtccaatgggacaccaagctgtggctatcagagtgaacggagaccgtgccgtgatcttcaactgcaggttcgacggttaccaagacaccttgtacgtcaa

SEQ ID NO: 89580 - DNA, 2100 bp, Arabidopsis thaliana columbia
  unsure (1)..(2100): unsure at all n locations
nnnnnnnnnnnnnnnnnnnnnnnnnnnnnnnnnnnnnnnnnnnnnnnnnnnnnnnnnnnnnnnnnnnnnnnnnnngaccacgcccacgcgtccggtcattcaacaacttggcttttatctaataaagcccctccctctccgataaaccttaaataaaaccggagggagagcaaaaaataaaaacaaaaatatacaaaaacaaaaacaaaaaatcataaaaaatgattggaaaagttgtggtctcggtggcctccatcctcttaatagttggagttgccataggagtcgttgcctacataaacaaaaatggtgatgctaatctgtctccccaaatgaaagcggtccgaggaatttgcgaggcgacttccgacaaagcctcatgtgtcaaaactctcgagccggtcaagagcgatgacccaaacaagctgatcaaggctttcatgctcgctaccagagatgctataacccaatcatcaaacttcacgggtaaaaccgaaggaaacttgggttcgggcatctcgccaaacaacaaagccgttcttgattactgcaagaaagttttcatgtacgcgcttgaggatctcagcaccattgttgaggaaatgggtgaagatcttaaccagatcgggagcaaaatcgaccagcttaaacaatggttaaccggtgtttacaattaccaaactgattgtcttgacgatatcgaagaagatgatttaagaaaggcgattggtgagggcattgcaaactccaagattctcactaccaacgctattgacatcttccacactgtcgttagcgccatggccaagattaacaacaaggttgacgacttgaagaacatgacaggcggaatccccactcccggagcccctcctgttgttgatgaatctcccgtggccgacccagatggtcctgctcgtcgtcttcttgaagacattgacgagaccggaatcccaacatgggtttcaggtgctgacaggaagctcatggctaaggctggacgtggccgtagaggcggccgcggaggcggtgctagggtcagaacgaactttgtggtggctaaggatggaagcggacagtttaagacggttcaacaagccgttgatgcttgtcctgagaataaccgaggccgatgcatcatctacatcaaggccggtctctacagagagcaagtaatcatccctaagaagaagaacaacatcttcatgtttggagatggtgcaagaaagaccgtcatttcttacaacagaagtgttgctctcagccgtggaaccaccacatccctcagtgccacagttgaatcggaaggattcatggcgaaatggatgggattcaagaacaccgccggtccaatgggacaccaagccgcggctatccgagtgaacggagaccgtgccgtgatcttcaactgcagattcgacggttatcaagacacattgtacgttaacaacggtcgtcagttctacagaaactgtgtggtctcgggaacagtagacttcatcttcggcaaatccgcaaccgtgatccaaaacacactaattgttgtccgtaaaggaagcaagggacaattcaacacggtcacagccgatggaaacgaaaagggtctagcgatgaaaatcggtatcgtcctccaaaactgtcgcatcgttcccgacaagaaactagcggcagagagattaatcgtggagtcatacttgggaaggccatggaagaaattctctaccaccgtgattatcaactccgagataggagatgtgattagaccagaaggttggaagatttgggatggggaaagtttccacaagtcatgtaggtacgttgagtacaacaaccgtggaccaggagctatcactaaccgaagagttaactgggttaagatcgccaggtctgcagctgaggtcaatgacttcactgttgctaactggttaggtcctattaactggattcaagaagccaatgttcccgtcacgcttggattataaggcgtataaatcaaatcaaatcaaatcaaaaaaaaaaaaaaaggggcgaacaannnnnnnnnnnnnnnnnnnnnnnnnnnnnnnnnnnnnnnnnnnnnnnnnnnnnnntcgtcctaaa

SEQ ID NO: 89581 - DNA, 422 bp, Arabidopsis thaliana columbia
agagaatttggtccccttggcacgtataaaccctagcagagacattaaaccctgaaagtaattagggatcactgttctccggctccggcgaaaaaatccctcgaaatcgatcctaacctcaattgattgaaggaagttatgtattcgctttcgaggattctccaaaggagtcaaagatataactttgcaccttcttcgtttggtgcggtcagtaaattagaagtatcaagtggtggtgataaagaacgggtctttaaatcatttggattgatttatagcaaacctcaaggtttagtcagactttattccgcaagagatgtgttttcacggttctttggcatccacaagctttcttctatagctgatgctaaagataaaggagatgaggtagttagggaagaggagctgtctgaatcagagga

SEQ ID NO: 89582 - DNA, 513 bp, Arabidopsis thaliana columbia
acgcgtccgtaagaccaataccaccagagaagggcattttccctttggatcacttgcacgagtgtgatgcggagaagaaagaatatctaggttgtcttaagtcttcagctcacaaatctgaacaatgtagacatctctctaagaaatatctccagtgtcgaatggctaagaacttgatggcaaagcaggatatggctgaacttggattcagtggtgttaaagaacttgattccactgaagataagaatacagagagtatcgaacattgaaaggttgaccaaaaaactttgagcctcattttgtaaaattttggattaacattgggatagcatttgagattttaggtcctaaaacccaactactatgaaagtatatgcttcagattcaccaatttttatacgtatgtattcctgtgtgaaattaagccttaatccaaaaaaaaaaaaaaaagggcggccggtttaaaggaacccaggttaaggaaggggggcgtgcacctcctaagtctccaaa

SEQ ID NO: 89583 - DNA, 538 bp, Arabidopsis thaliana columbia
tgatacgctcagctctatacgactcactatagggaagctggtcgcctgcaggaccggtcccgaatttccgggtccggcccaacgccttccgtagaaccattcccaccgaggagggcctttttcctttggattcattggcccaatggggaggcgaagaaaaaggattttttaggtggccttaggtcttcagttaacaattctgaccatggtaaacttctctctaagaaatatctccagggtcgaatggctaagaccttgatggcaaagcacgatatggctgaacttggattcagtggtgttaaagaacttgattccactgaagataagaatacagagagtatcgaacattgaaaggttgaccaaaaaactttgagcctcattttgtaaaattttggattaacattgggatagcatttgagattttaggtcctaaaacccaactactatgaaactatatgcttcagattcaccaatttttatacgtatgtattcctgtgtgaaataaagcattatacaaaaaaaaaaaaaaaaagggcgg

SEQ ID NO: 89584 - DNA, 1278 bp, Arabidopsis thaliana columbia
  unsure (1)..(1278): unsure at all n locations
nnnnnnnnnnnnnnnnnnnnnnnnnnnnnnnnnnnnnnnnnnnnnnnnnnnnnnnnnnnnnnnnnnnnnnnnnnnnnnnnnnnccacgcgtccggaaaataagaaaaaacaaaagatgaaaaccattatcctttttgtaacatttcttgctctttcttcttcatctctagccgatgagacagagactgaatttcattacaaacccggtgagatagccgatccctcgaaatggagcagtatcaaggctgaatggaaaatttgcgggacagggaagaggcaatcgccaatcaatcttactccaaaaatagctcgcattgttcacaattctacagagattcttcagacatattacaaacctgtagaggctattcttaagaaccgtggattcgacatgaaggttaagtgggaagacgatgcagggaagatcgtgatcaatgataccgactataaattgggtcaaagccactggcacgcaccttcagagcattttctcgatggacagaggttggcaatggaacttcacatggtacacaaaagtgtagaagggcacttggcagtgattggagttctcttcagagaaggagaaccaaatgctttcatttcgcggatcatggacaagatccataagatcgcagacgtacaagatggagaggtcagcatcggaaagatagatccaagagaatttggatgggatcttacaaagttttatgaatacagaggttctctcacgactcctccttgcacggaagatgtcatgtggaccatcatcaacaaggtggggactgtttcacgtgagcaaattgatgtattgacagatgctcgtcgcggtggttatgagaagaacgcgagaccagctcaacctctgaacggacgtctggtttatttaaacgagcagtccagtccaagtccaactccacggctaagaataccacgagttggtccggtctaagacagtcttataggacaaggcaactccgagccctaatttccatacaaagaaaattcggaaaagaattttgaagatgtatgaaaattgggagccataactatttttttttaactattcttttgattaaaagataaaactacgcaatattatatgcataaagtttttcttttatacatgtattccaataaacaagatgtaataatatccaaccataatgagttgtttgattattttataacaaaaaaaaaaaaaaagnnnnnnnnnnnnnnnnnnnnnnnnnnnnnnnnnnnnnnnnnnnnnnnnnnnnnnnnnnnnnnnnnnnnnnnnnn

SEQ ID NO: 89585 - DNA, 906 bp, Arabidopsis thaliana columbia
ctaatattaataaactcatatctctctcatctaaaatctcatctcttcttcttcttcttcttcttcttcttcttcgtcttcttctcctctgtctttgaagctatcttcttggattgtgtttaggagttaaaaacttgctttggtccatcatgagattgcttcttagtctcttgtttctcttggctttaaccacctactcaagtgcaacttattgtctatgtagagatggtgttggagagaaagatcttcaaacatcgatagattatgcatgtggagttttaaaagattgtaatcctattcatgagaaaggtccttgttatcaaccaaacaccatcaagagtcattgtgattgggcggttaatacttatttccaaagatttggtcaaatctctggaagctgtaatttctcaggaactgctactaccagccaaaatcttccttcaactgtggttactggttgcttatatccttcaagtccaggaagtgcagggacaactcccacgacaggtactccttcaggaacacagacgtttccgggacctcctgcgtttggtccggccggagattttgatccttcaggcaataatggtgctccgagtttgttcatttcaatcgctctctcacttggtttctccgtcgtcattgcgtttctataaaaggctagtgagtgattaagaaagtgaggctgacgttttggatgtatggatgagattttgtcacgtgtgaatgcaagttctttgaggcagacatccatttagtggttggctttgttgtttaggctattttaattttatttcatgtatgtaagaaatgatctaatggaatctttctataagtgttaaaaaaaaaaaaaaagggcggccgctctagaggatccaagcttacgtacgcgtgcatgcgacgtca

SEQ ID NO: 89586 - DNA, 505 bp, Arabidopsis thaliana columbia
cggacgcgtgggtcgcccacgcgtccgcccacgcgtccggagagagagagagagagaggcttgtttgttttctctcctctaagaaacaatcagtctcataaagtggcaaagatggttgcagaacgatacacagtcgatttgaataagccacttgtgtttcaggttggtcatcttggcgaagaatatcaggaatggattcatcaacctattgtatgcgttgagggtcctcgttttttcgaaagtgatttttgggagtttttgactcgcacggtttggtgggcaatcccaacaatctggcttccagttgtttgctacgttctttcaatatcggcgagtaagggacttacgtttccccagatcggtttaatagttgcttttggtgtactcacgtggacactgctcgagtacacgcttcatcgcttccttttccacatccaaaccaagagttactgggcaaacactgcacactatcttcttcatggatgccatcacaagcacccacaag

SEQ ID NO: 89587 - DNA, 583 bp, Arabidopsis thaliana columbia
  unsure (1)..(583): unsure at all n locations
ctnnnnnnnnnnnnnnnnnnnnnnnnnnnnnnnnnnnnnnnnnnnnnnnnnnnnnnnnnnnnnnnnccacgcgtccggccttgttatgattattttcgcaacataatggaggagttcacgactgagaagtctccatctttgacggtttatgtccctctagttgctggggcaatagcacgctccttggcttgtatctcttgttaccctgttgagttagcaaggacacggatgcaggcatttaagggaacgcaaagaaatgtgaaactgcctggcgtttggaagacattagttgacgtcgtcaatccagtgaagggctcaaataatggatataggatgttatggactggtcttggtgctcaacttgctagggatgttccattctctgcaatctgctggtcgatacttgagcctacccggagaagcattcagtcggccatgggtgaagaaccaagggcaggcagtataataggtgcaaacttcgctgctggttttgttgcgggtgcagttgctgcagcaactacttgcccctagatgttgcaaaactaggcgtcaatagagaagaaacagatagagccttgacatg

SEQ ID NO: 89588 - DNA, 638 bp, Arabidopsis thaliana columbia
  unsure (1)..(638): unsure at all n locations
nnnnnnnnnnnnnnnnnnnnnnnnnnnnnnnnnnnnnnnnnnnnnnnnnnnnnnnnnnnnnnnnnnnnnnnnnnnnnnnnngcgcgcaggggggaattagagcttgctcttccctaggccatcttcttaatgagatttttgaagttgttgtagagccaaagcttgtgcagcccacatttgtcttggactacccaatcgagatatctcctttggccaagccacatcgcggcaatgccggtttgactgaaagatttgagctgttcatctgtggtcgtgaaatggcaaacgcattctctgaattgactgatcccgtggaccagaggacacggttggaagagcaagtaaggcagcataacgcaaagagagcagaggctgttcgggaatctcctgaaccaaacgcaaagaaagatgatgatgatgatgagtcatacgaagtgccccttgacgaaaactttctaactggcttggaatacggaatggctccggcttcagaatgggggttgggaattacaggctggtgatgctgttaacaactccccgagtataagagacgtcattgcttttcctggttgagacttancagtacactgaaactggcagggggaatgcgtggtgcacctttatagcattcttgggga

SEQ ID NO: 89589 - DNA, 924 bp, Arabidopsis thaliana columbia
gaaaatcacattattttgttttgttttctggtccactcgttttaaactacggcgatcgattttcacggcgagaaatgttgtcggcgcttggctttgctttactcagcatcttcgcgatcctcttgtcgttatcaaccttgtctaatggattacttcaacctcgtaggatttctcatggcttgacggaaagtagcaagtacttgacgagggatgagctctggttcaatcaaaccctagatcattactctccttctgatcatcgcgaattcaaacagcgatactatgaatatctagaccatttacgagttcctgatggacctatctttatgatgatctgtggcgaaggaccttgcaatggaatccccaatgactatataactgtgttagcaaagaagtttgatgcaggcattgtttcacttgagcatcgttattacggaaagagctcaccgtttaagtcattagccactgagaatctcaagtatctttcttctaaacaggctcttttcgatttagctgctttccgccaatattaccaggactctttgaatgttaagtttaatagaagtggcgatgttgagaatccgtggtttttcttcggagcttcttattctggagctttaagtgcttggttccggcttaagttccctcatttgacctgtggaagccttgctagttctgcagttgttcgtgctgtctacgaattccccgaatttgatcaacagatagctgagtcggctggaccggaatgtgaaactgcgctacaagagactaataaactcttggaactagggcttaaagtgaataacagggctgttaaagctctcttcaatgccacggaggtctagctttactgtttctgttttcttttgtttgaatcttaaggaagtaagaagtctatctccaatctgattaagtttctgaaat

SEQ ID NO: 89590 - DNA, 432 bp, Arabidopsis thaliana columbia
ggcggcaatttctcctctcttccttctcttcctcattcccattatcccactatcgcttctcgctatcttagccctaattgtacgtcctcgtcccattaagatccctatcaagtcccgtcacgccttcatcaccggtggatctagcggcatcggtcttgctctcgcccaccgcgccgcttccgagggcgctcgctgtctcaatcctcgcccgatccggatcaaagctcgaggaggctaagaaatcgatccagctcgccactggtgtcgaagtcgccacattctctgcagacgttcgcgattacgatgcagtctcgaaggcgatagatgaatcggggaccgatcgatgtgttgattgttaaccaaggtgtgtttacggcgaaggagctggtgaaacatagtcctgaagatgtcaaattcacgattgacgtaaat

SEQ ID NO: 89591 - DNA, 584 bp, Arabidopsis thaliana columbia
tcctacgacttactatagggaacagctggtacgcctgcaggtaccggtccggaattcccgggtcgacccacgcgtccgtggtggggttttgggtgaggagggattgccgttgaatggtgttgaagctgatcggccgaagaaagttttgattttgatgagtgatactggtggtggtcacagagcttctgcggaagccattagagctgcttttaatcaggagtttggagatgagtaccaggtgtttattacggatttgtggacagatcatacgccctggccgttcaaccagcttcccaggagctataattttctggtgaaacatggaactctgtggaaaatgacttattatggtacatctccacgcattgttcatcaatctaattttgctgccacttccacttttattgccagggaaatcgcccaagggttaatgaaatatcaaccagatatcataatcagtgttcatccgttgatgcaacatgtcccacttcgtgtcctaagatcaaaaggcttgcttaagaaaatcgtgttcaccacgggtattacagacttaagcacttgccatcctacatggtttcataaga

SEQ ID NO: 89592 - DNA, 799 bp, Arabidopsis thaliana columbia
  unsure (1)..(799): unsure at all n locations
attggactctcttcttgatcttctttctggcttcatcctctggtttaccgccttctccatgcagacacccaacccgtatcagtatcccattggcaagaaacgcatgcaaccactgggaatcctagtctttgcatcagtgatggcaacacttggattgcagattatcttggaatctcttcgcacaatgttatccagccacaaggagttcaacctaacaaaagagcaagagagttgggtagttgggatcatgctttctgttacattggtcaaactgcttctggttctttactgcagatccttcactaacgagatcgttaaagcttatgctcaagatcatttcttcgacgtcatcacaaacatcattggactcattgcagtaatcctggccaattacattgattattggattgatccagttggagctatcattcttgcattatacacaatacgggcatggtcaatgacggtcttggagaacgttaactctcttgttgggaaatcagcttgaccagagtatctgcagaaactaacttacctgtgttggaaccaccataaagccattaggcacattgacacagtgagggcatacacatttggctctcattattttgtggaggttgatattgttcgcccagctgacatggctctgcaagtgggctcacggcattgggngaatccgctgcagagaagccccagctactaaagggnntngaacggggcttttgggcncctgntaangggnccccccaaaccgggncccgnnaancccccggtaaggggtancccttnaanancccgg

SEQ ID NO: 89593 - DNA, 710 bp, Arabidopsis thaliana columbia
gtccgtctgcaagtaccggtccggaattcccgggtcgacccacgcgtccgcttcgacgtcatcacaaacatcattggactcattgcaggtattcctggccaattacattgattattggattgatccagttggagctatcattcttgcattatacacaatacggacatggtcaatgacggtcttggagaacgttaactctcttgctgggaaatcagctagaccagagtatctgcagaaactaacttacctgtgttggaaccaccataaagccattaggcacattgacacagtgagggcatacacatttggctctcattattttgtggaggttgatattgttctcccagctgacatgcctctgcaagtggctcacgacattggagaatcgctgcaagagaagctcgagctactagaggagatcgaacgggcttttgtgcatcttgattatgagtacactcacaaacctgagcacgctagatcccactgttagctgtttatcctttttaaagatctctacgtttctatatctttacacattaatcttcactgtattgttgtttagtagacaattgtgagataaaggaatacctttgtaactatttacttctgtttgacggtctccttacaactgattgtccgttgttacacgccgactggaaacctagcgtcccactaatcccttcacacaggccgctttctaagaccaattt

SEQ ID NO: 89594 - DNA, 806 bp, Arabidopsis thaliana columbia
  unsure (1)..(806): unsure at all n locations
taggtgcacactatagaaagatctatgacgtcgcatgcacgcgtacgtaagctcggaattcggctcgaggtttgactcgttgatcaacgaaagtgtgagtttgaggtgaaagatgacggcgacgatagatcggaggttatcaacgctgaatccaaacgcgccggtgtttgatccggtggaatttcgtgaggtggaggatttttcaccgaaatggtgggatctagtaacgacttcgaaatggttccgtgacttttggctcagtgctaactctgagaatgagttcctcggcggcgacgatttctcagttatggaagaagagttcgaggagatgatcgcatcgtctgatggtggatccatggctgatacagttacagaagcagatgtggctagttatttgaagatgcttttgaacatagcggagtctacgaaagagaagatttatagatcgaaggtttcgtcttgttcaccaaagtataatcagaagaagtacatgaatccgaactttaattgtcgccggaatcatcatatctatcagccacggtgaagcttctagaaggaacaaagctcttcttcttcttctttcgagatgataatcagagtcgtgtctgtgtttatggctgaatctgatcttttctgctttcttgttttttgtaattctgtgaatattcctactttctataataacatcactttatgttaaaaaaaaaaaaaaaaaaaagggcggccgccgactagtgagctcgcgaccggaatttatccggacggactgcancgtacagcttcctatagtgagtcgtatagagctg

SEQ ID NO: 89595 - DNA, 861 bp, Arabidopsis thaliana columbia
  unsure (1)..(861): unsure at all n locations
gnnnnnnnnnnnnnnnnnnnnnnnnnnnnnnnnnnnnnnnnnnnnnnnnnnnnnnnnnnnnnnnnnnnnnccacgcgtccggaaaatttgtttatctatgagtgattttgacatggcatttacagttcatccagaaagctggaatccgatgtggtctgtatcaagcatacttacaggacttctctcatttatgatggataccagtccgacaactggaagtgttaacactactgtaattgagaaacaacggttggctaagtcatctctcgctttcaattgtaaaaccccagcatttcgaaagctatttccagagtatgtacagaagtacaaccagcagcaactagctgagcaagctaccacacaaactgacaacaccagagtctcctcaaaagagcgataccaaagtcgagtcagagaaaaccatcgatccaacaaagggagattcagaaggtggcttgaaggagaggaaaaagaacaataatcagggattgccagcgtggataatactgttgctagtgtcggttttcggtgtggtaatggcgttgcctctacttcaactgtgatttctatgcagcaaacctcgacctggttttcgtataatctctccttgtgtctctctctcttcagcatcaagagtagtctccttttgtctagtgctcttcgtctgaatttactcatttagcacctcatggtttgtgcttgtaaaagcagataacataagtttggtttcacaattacatacatattgtagcttcgttggaactactttgtatagtatatatgaattgaggataatggtttggatttgaaaaatagaaccgtatggtcttcnnnnnnnnnnnnnnnnnnnnnnnnnnnnnn

SEQ ID NO: 89596 - DNA, 521 bp, Arabidopsis thaliana columbia
atacgactcacttagggaaagctggcacgcctgcaggtaccggtccggaattcccgggtcgacccacgcgtccgcttgagcgtcctaaagtgatatacaattcagatacaggtaagtacgtgatgtggatgcatatcgacgatgcaaactacactaaagcttcggttggtgtagccattagcgataacccaacaggtccattcgattacttatactgcatatcgccacacgggtttgatagtagagacatgacagtctacaaagaccatgataacgtagccgacttgatatattcatcacaggacaacagcgtgctgcatatcggtcccctgaccgagaattacctcgatgtgaagccggtaatgaagagaatcatggtgggacaacacagagaagctccggctatcttcaaacatcaaaacacttactacatgatcacgtctggttgcaccggatgggcaccaaacgaagcattagctcatgccgctgagtctataatgggtccgtgggagacattatgg

SEQ ID NO: 89597 - DNA, 497 bp, Arabidopsis thaliana columbia
  unsure (1)..(497): unsure at all n locations
atgannnnnnnnnnnnnnnnnnnnnnnnnnnnnnnnnnnnnnnnnnnnnnnnnnnnnnnnnnnnnnnnnnnnnnnnnnnnnnccacgcgtccggaccattgcattgcttcatctctgatcttcttcattctttttgttaactttggttctaccctaaacttgtctcctgcaaccatcggttgttcatgctctctgtttcatggtgcgatgaaggagatgggcaaattgggaggagaaacaaggcagtgagaaagctgtgggagttggatcttgtgtacctcacatggaccgaggtttcagtacacccggacgcaccaatggattggaacgccacatatgtctcagaccagaacatactaatgggaattgagatgttcaagatctttgggcaggtattaagtttcttcactgtctgcgatgtattaactgaagaagcctcttggagacatgtttcgaggaaccaaaggagtcaaaaacttaatctatcttgtacgaac

SEQ ID NO: 89598 - DNA, 692 bp, Arabidopsis thaliana columbia
  unsure (1)..(692): unsure at all n locations
acattgagagaggcttctggatacaatccaaacatctccaatccctcctcgggttcatgagttctaccctaaacttgtctcctgcaaccatcggttgttcatgctctctgtttcatggtgcgatgaaggagatgggcaaattgggaggagaaacaaggcagtgagaaagctgtgggagttggatcttgtgtacctcacatggaccgaggtttcagtacacccggacgcaccaatggattggaacgccacatatgtctcagaccagaacatactaatgggaattgagatgttcaagatctttgggcaggtattaagtttcttcactgtctgcgatgtattaactgaagaagcctcttggagacatgtttcgaggaaccaaaggagtcaaaaacttaatctatcttgtacgaacaagaccattgcattgcttcatctctgatcttcttcattctttttgttaactttcaggactcgtcgaaattgattgattcatgtattgaaaagaaatgcaatgtgctagttcctagattgatttgaaatgtaatatttatattttttttaaaaaaaaaaaaaaaaagaaaaaaaaaaaaaaaaaaacccacccccaagnnnnnnnnnnnnnnnnnnnnnnnnnnnnnnnnnnnnnnnnnnntagaatcgnnnnnnnnnnnnnnnnnnnnnnnnnnnnnncg

SEQ ID NO: 89599 - DNA, 711 bp, Arabidopsis thaliana columbia
  unsure (1)..(711): unsure at all n locations
tctnnnnnnnnnnnnnnnnnnnnnnnnnnnnnnnnnnnnnnnnnnnnnnnnnnnnnnnnnnnnnnnnccacgcgtccgctctcttcctcttcgaattttgtgagtttcttcgagagttgaggaagagagactcgagaatatggccaacgatactcacaccgatgacttagacgagcttctcgatagtgccttggatgatttcaaggatcttaatcttactcaaagaaatggaggggttaagaaagaagagggtgataaaaaagagacagagtcattgccaagtggggttcaaggtcttggaatggggttaccagatatgaggagtaagaagaaaggaaagaaaaagattgctaaagaggaccatgttactgaggcacttgataaactcagggaacaaactagagaaactgtgaagggacttgagtccttgtcatcgaagcagcaacctacaggttctgatgatgctatggttgaagattggatcaagcaattcgagaatcttactgggtctaacgacttggagtcgatagtggacacgatgtatgcaacagctgttatcgaaggattttcttcacgaaccaatgaaagagattggtgcaagatacccaaaatggctagaagagcatgaatccagtctaaacaaggaagaattcgatcgttattcacgccagtatgaacttatcanagaactcaacttggtgtacgagaacg

SEQ ID NO: 89600 - DNA, 373 bp, Arabidopsis thaliana columbia
aggaccttgtaacggcaagaagcttaggtgtcctgctaagtgtttcaaatcttttcgccgcagccgatggaacaccgttcgtgagagaaaacatggtttgtatctttgagagttacgccggagatattgggtggcgtcactccgaaagccccatcaccggtataccgataagggaagtgagaccaaaagtgacgctagtggtacgaatggcagcttcggtaggtaactatgattacatcattgattacgagttccagactgatgggcttataaaagctaaggtcgggctaagtggaatactaatggtgaaagggacaacatatcaaaacaaaaaccaagtggagaaagattaagacggtaatgaagaagagct

SEQ ID NO: 89601 - DNA, 745 bp, Arabidopsis thaliana columbia
tgattctccagctctattcgactcactatatggaaagctggcacgcctgcaggtaccggtccggtattaccgggtcgacccacgcgtccgcccacgcgtccgcaaaaatgttcacaaaatctatccttttggcttctcttcttatcatcatcctcgtctctgcaactgaatcagctcgtcaaaagagcgggaacgatggtttaggattcggtggtgtacccggatccggatttatacccgggtttggaaacgggtttccggggactggagttggtggtggatacggtggagggtttggtggtcctagcggagggtttgggaaaggaggtgtggtgagaccaacggttacttgcaaagagaaaggaccttgtaacggcaagaagcttaggtgtcctgctaagtgtttcaaatcttttagccgctccgggaaaggatacggcggtggaggtggcggtggaggatgtactatggattgtaagaagaagtgtatcgcttattgttaagatataataaagatcacatcatctttataatatatagtcattatgatgggtatgtattttctatgttatagcctatagattatgagatcatgaggatccttttgtcttgattcgatttgtagcagttttatatgcataatatatggttgtgatgaataaatgagggaactttactgttttctctattgtatgtttgtgtaaaagattctaagttaattgtgatttcatctgttttatgatgc

SEQ ID NO: 89602 - DNA, 502 bp, Arabidopsis thaliana columbia
  unsure (1)..(502): unsure at all n locations
atgannnnnnnnnnnnnnnnnnnnnnnnnnnnnnnnnnnnnnnnnnnnnnnnnnnnnnnnnnnnnnnnnnnnnnnnnnnnnnccacgcgtccgcggttattgaaagacagagtgttaggggtccaacagagtttctgagttcgtgttgcttgtgtaagaagaaacttcaaggcaaagacatatacatgtacaaaggagagatgggattttgtagtgccgaatgcagatcagtgcaaataatgaatgacgaacgacaagagcaatgtaaaacgcacgtttcaagaaacgccgacgttttgagctctccttacgccgccggacagagattatctgccggagtattcgtattttaggatgatcacaattcacaataatacgaagagaagtatattttatttatatataaaaaaaaaagtgatcatcattccattttaccttaatagaagaaaaaaggttagaaaataacaaaaaaaaaaaaagggaaatttttggttaggttaaa

SEQ ID NO: 89603 - DNA, 434 bp, Arabidopsis thaliana columbia
ctttccctcaaacccaaaacacattttgttttttgtttcccatctaaaatgcgtatgagttgtaacggatgtcgagttctacgaaaaggctgcagtgaaaactgtagcataagaccttgtcttcaatggatcaaatccgctgaatctcaagccaacgccaccgtcttcctcgccaagttttatggccgtgcggggctcatgaacctcctcaacaccggtcctgaccacctccgtcctgcgatatttagatcattgttgtacgaagcatgcgggaggattgtgaatccgatatacggatccgtggggttattgtggtcaggaaactggcatctttgtcaagcggccgttgaggcagtaatgagaggctcacccgtgactccgatcgcatgcgacgcagcggttactggtcaagcacctccttttaacaacaagct

SEQ ID NO: 89604 - DNA, 500 bp, Arabidopsis thaliana columbia
aatacgactcactttagggaaagctcgtacgcctgcaggtaccggtccggaattcccgggtcgacccacgcgtccgctgacggcgactcgacgacgacttcggctatggagatctccggcgacaagattgatttgaaggacggtgaagcaacaacaccaccaaaaacagatatcgagtcacagattctcgcggctatgcagtcccgagtaacctacctcagagataaagcagacaacttcacctttgaaggtgtgcggaggttgctggaggaggatctgaaattggagaaacatgctttggatgtgcataagagctttgttaagcaacatttggttcagtgcttagcaggtgctgagaatgatgaaacttcagaaaattctctagaaactgagaagaaagatgatgtaactccagtgaaagaagcagcagagttatctaaagagcacacgacgaaaaaagatggtaaggaagatatgactggtgatgatgagaaaacaaa

SEQ ID NO: 89605 - DNA, 373 bp, Arabidopsis thaliana columbia
cgggtagttgagacatcttcgaagcaccagattctccgaattcgagccatttctaagaatttcatactctgattaatgtcctactcagtcgcctacgcaccgtcggcaccggagctaccacaatcgtgcgttcagcagcagcacgatggctgaatgtagatacacttacgcctatccatcatatcaaccaactcagcaattcagctctgactccgggatgttttccccggaaacgcatccggagattgtgaggagctttgagtcggcggatagaaaccggagcggatttctcgaagaatcggagctccggcaagcgttgtcgttatctgggtacgatggaattagtaacagaacgattaggttgctgttgttt

SEQ ID NO: 89606 - DNA, 476 bp, Arabidopsis thaliana columbia
  unsure (1)..(476): unsure at all n locations
aaaagctgaaaggaggaaaccagaggaaggagacgacgaccaccaccacaacgcatctcagctcttccttaatccatggcagacaagggccgcccgttgccgaagtttggcgaatgggatgttaatgacccttcatcagctgaggggtttactgttatcttcaacaaagctagaaacgagaagaaaggaggtggaaaatctgactcaccagggaaagatgaacctggatataataaaaatggggaagttcttgagaaacccgccaaaaaatggttttgctgtatacgcgcagaataagtggagaggtgtttgccttggaaggtcttttatctatatctaaaatcatactgcatcaagaagactggagcttgtctgataagccatgacagtcactttttggatttccgagtcggtgtgtttagtgactcccggttgttcctgcaaaggttnnantnttcntnggtaaccacanaang

SEQ ID NO: 89607 - DNA, 779 bp, Arabidopsis thaliana columbia
  unsure (1)..(779): unsure at all n locations
accggacccggatacgccccggggcgggctccagagaaacgagagttccgtaatcattttctcttgttgttcctgatcgcgtagctcaagcgaaaaaaatggcgtcgtttgatgaagcaccaccaggaaacgccaaggccggtgagaagatcttcaggaccaagtgtgctcagtgtcacaccgtcgaagcaggcgccggtcacaaacaaggacccaatctaaacggtctatttggaagacaatctggtacaactgctggttactcttactctgctgctaacaagaacaaagctgtggaatgggaagagaaggccttgtacgattacttgctcaaccccaagaagtacataccaggtaccaagatggtgttccctgggctaaagaagccgcaagaccgtgctgatctcatcgcctacttgaaggaatctactgcgcctaagtgaatctgatggtggattgattctgagttgttaagtctctctcagatgaggcttttttactttgctatattcttttgccaaataaaatctcaaactttttttgtttatcatcaattacgttcttggtgggaatttggctgtaatgtgtgctgaggctcactttatcgagtacatttgattttctgaggctcattttcctttttttggccagaagcattttctcccttaanggggcnaaattganggcaaaaaagtccgntttnnnnnnnnnnnnnnnnnnnnnnnnnnnnnnnnnnnnnnnnnnnnnnnnnnnnnnnnnnnnnnnnnnnnnnnnnnnnn

SEQ ID NO: 89608 - DNA, 934 bp, Arabidopsis thaliana columbia
  unsure (1)..(934): unsure at all n locations
nnnnnnnnnnnnnnnnnnnnnnnnnnnnnnnnnnnnnnnnnnnnnnnnnnnnnnnnnnnnnnnnnnnnnnnnnnnccacgcgtccgcagagattgaaaaggctcaagcggaggtgatggtaattgatgcattgagtcacctaaatgaagtaatctcgtatgatgatgaggtttccatgatgaggaacgttctcaatgccccggcttctcaaggcagtgttgccgggattgattattcgggtctgagtttgaccagtttggacggatacggttttgtgtcaagtcttcacaacacagcagaatgtagtggcaagcacagtgatgatgttgacatggaagttactccacatggtttatatgaagactacgacaatctctggaactgctctcacattctaggcttagaagaaccgcaatctgagttgcagagtgcgcttgacgatttcatgtcacagaagaatgcttcggtcggtggtaaggctcacagcaaaagatggacaaagcttttcagtgtctcgagatggctctctgttttcaagtatgtcaagttaggaaaaatataaaatgagtttagtacacaaaagaacaaaacgactcgctgcgccgcgccctggacagattcgtgtatatatatactcggggaaagcttgggtttctgatgatccagaggcgttcaaaagtgttttctttcttcttcttcttctggttgtctccatctttgtgttaaagatgtgaatatatgttttaggacagcttcatttttgttgaaagcttaaaaaacagggtcttttataatctctgtgattagtaccaaattgcagatttgcagaactacgtttttcttggtttgtcaggtaatgtgcaactgaataaaatgaatattatttgaatctacttagattttcaattaaaaaaaaaaaaaaaaaagggcggcc

SEQ ID NO: 89609 - DNA, 791 bp, Arabidopsis thaliana columbia
  unsure (1)..(791): unsure at all n locations
agcaaaatgacaacattctccttcaatttaacggttaacgatttagaaacacattttccggtgaacggagacggcgaattcgagattctcactggaatcatatggaaatgtgttgcgacggtgaggggagaatcagctccggtgacgattacggttatcagatcggatccgaagaagttgaagcctagagcggtgagaaatggtcagatgataagttccattcacgtcgatttctcggtggcggaggcgagtttggaggagattgtgaaatcgatcggtgaagcgaaagatgagagggttgtgatcgatgagattgttgatgatgtttcggattttattgtttacggagcgaatttaacgtttgtggatatgagtgaagttgatttttatgaggcgaaagttatggggaaatcgccggaatcggtttattgtaatattcaggggattggggacgacggagcagtggtggttttaccgggggttgtggaggaggagagggttgtgacggtgacattaccggtggatgagattgagaaggtgaaatgggaaatgaagaaatgtggtttgatcacgccgttagtttaacggtgaatgaagaaatcattttatgcggttatcgttaatcgtgttttttattgtttgtttgggtttttattttatttggtgtgttttatataaaatcaaataaatgtcattttaaaaaaaaaaaaaaaaaaaagnnnnnnnnnnnnnnnnnnnnnnnnnnnnnnnnnnnnnnnnnnnnnnnnnnnnnnnnnnnnnnnnnnnnnnnn

SEQ ID NO: 89610 - DNA, 2430 bp, Arabidopsis thaliana columbia
  unsure (1)..(2430): unsure at all n locations
atgaaagtgcagcgtctgttcttagtagctattttctgcctctcttatatgcagctggtcaaggggcaaaccttgcctcgttgccccgaaaaatgtggcaacgttacacttgagtacccttttggcttttctccaggttgttggcgtgccgaagatcctagtttcaatctcagttgtgtgaacgagaatctattctataagggccttgaagtggtcgaaatatctcacagcagccagttacgcgtcctatatcctgcatcctacatttgctacaacagcaaaggaaagttcgctaaagggacttactactggagtaatctaggtaatttgactctctccggcaacaacacgattactgcattaggctgtaactcgtacgcttttgtgtcctctaatggaactcgaagaaactcagttggatgcatatcagcatgtgatgctctttcccatgaagcaaatggagaatgtaatggtgaaggctgctgccagaaccccgtccctgcagggaacaattggttaatagtcagatcatatcgctttgacaacgacacgtcagtgcaacctatctctgagggtcaatgcatctacgcctttctcgttgaaaatggcaagtttaagtacaatgcttcggacaaatattcttatctgcagaatangaatgtggggtttcctgtggtcttggattggtctattaggggagagacatgtgggcaagttggagaaaagaaatgcggtgtgaatggcatatgttccaattctgctagtgggatcgggtatacatgcaaatgcaaaggaggtttccaggggaatccatatcttcaaaacggttgccaagacatcaatgagtgtactactgctaatcctatccataaacataactgctcgggtgacagcacctgtgaaaacaagttgggacacttccgttgtaattgtcgatctcgttacgaattaaataccaccactaatacctgcaaacctaaaggcaatcctgaatacgttgaatggactacaattgttcttggaaccactatcggcttcttggtcattctgcttgccattagctgtatagaacataaaatgaagaacaccaaggacaccgagctccgacaacaattcttcgagcaaaatggtggcggcatgttgatgcagcgactctcaggagcagggccatcaaatgttgatgtcaaaatcttcactgaggaaggaatgaaggaagcaactgatggttatgatgagaacagaatcttgggccanggaggccaaggaacagtctacaaaggtatattaccggacaactccatagttgctataaagaaagctcggcttggagacaatagccaagtagagcagttcatcaatgaagtgcttgtgctttcacaaatcaaccataggaacgtggtcaagctcttgggctgctgtctagagactgaagttcccttgttggtctatgagttcatttccagtgggacccttttcgatcacttacacggttctatgtttgattcttctctaacatgggaacatcgtttgagaatggctgtagaaatagctggaactcttgcttatcttcactcctctgcttctataccaatcatccatcgcgatatcaaaactgcaaatattcttctggatgaaaacttaactgcaaaagtagctgactttggtgcttcaaggctgataccaatggataaagaagacctcgcaactatggtgcaaggaactctaggttacctagacccagaatattacaacacagggttgctaaacgaaaagagcgatgtttatagctttggggtagtcctaatggaactgttatcaggtcaaaaggcattgtgctttgaaaggccacagacttcaaaacatatagtgagttactttgcctcagccacgaaagagaataggttgcacgagattattgatggccaagtgatgaacgagaataatcagagggagatccagaaagctgcaagaattgctgttgagtgtacaagattgacgggagaagaaaggccagggatgaaggaagtagctgcagagcttgaggccttgagagtcacaaaaaccaaacataagtggtcagatgagtatcctgaacaggaggatactgagcacttggttggtgttcaaaaattatcagcacaaggcgaaaccagcagcagcattggctatgatagtatcaggaatgtagcaatactggacattgaagcaggccgctgatatctccatccaactctcactgttggccacattccgttcgatatgatcaggtttcttcccgcatcatactcatagtaaacatgtaatagaaccctgtaaataaaaaagataataagctaaagctttagacattcatgtctcgccagatcgtcaatcgccgtgtttgaaaactcttcttatagatagatatactgtaaccttattaccgcagga

SEQ ID NO: 89611 - DNA, 2439 bp, Arabidopsis thaliana columbia
  unsure (1)..(2439): unsure at all n locations
atgaaggtgcaggagggtttgttcttggtggctattttcttctcccttgcgtgtacgcagctggtgaaggggcaacatcaacctggtgagaattgccaaaataaatgtggcaacatcacaatagagtacccttttggcatttcttcaggttgttactatcccggaaatgaaagtttcagtatcacctgtaaggaagataggccacatgtcttaagcgacattgaagtggcaaactttaatcacagcggccagctacaagttctgcttaatcgatcctctacttgctacgacgagcaaggaaaaaaaactgaggaggacagttcttttacactggaaaatttatctcttttccgccaacaacaagttaactgcagtaggctgtaacgctttatcacttctggacacttttggaatgcaaaactactcaactgcatgcttgtcattatgcgattctcccccagaggctgatggagaatgtaatggtagaggttgctgcagagtcgacgtttctgccccgttggatagctatacattcgaaactacatcaggtcgcatcaagcacatgacttcttttcacgactttagtccttgcacctacgcttttctcgttgaagatgataagttcaacttcagttctacagaagatcttctgaatctgcgaaatgtcatgaggttccctgtgttactagattggtctgttggaaatcagacatgcgagcaagttggaagcacaagcatatgcggtgggaacagcacttgtctcgattctactcctagaaacgggtatatctgcagatgcaatgaaggctttgatgggaatccatacctttcagctggttgccaagacgtcaatgagtgtactactagtagtactatccatagacataactgttcggatcccaaaacctgtagaaacaaggttggaggcttctattgtaagtgtcaatctggttaccgcttagataccaccactatgagctgcaagcgtaaagagtttgcatggactacaattcttcttgtaaccaccatcggcttcttggtcattctgcttggcgttgcctgtatacaacagagaatgaagcacctgaaggacaccaagctccgagaacaattcttcgagcaaaatggtggcggcatgttgacacaacgactctcaggagcagggccgtcaaatgttgatgtcaaaatctttactgaggatggcatgaagaaagcaacaaatggttatgctgagagcaggatcctgggtcagggtggccaaggaacagtgtacaaagggatattgccggacaactccatagttgctataaagaaagcccgacttggagacagtagccaagtagagcagttcatcaatgaagtgctcgtgctttcacaaatcaaccataggaacgtagtcaagctcttgggctgctgtctagagactgaagttcccttgttggtctatgagttcatcaccaatggcacccttttcgatcacttgcatggttccatgattgattcttcgcttacatgggaacaccgtctgaagatagcaatagaagtcgctggaactcttgcatatcttcactcctctgcttctattccaatcatccatcgggatatcaaaactgcaaatattcttctggatgtaaacttaactgcaaaagtagctgactttggtgcttcaaggctgataccaatggataaagaagagctcgaaactatggtgcaaggcactctaggttacctagacccagaatattacaacacagggttgttaaacgaaaagagcgatgtttatagttttggggtcgtcctaatggaactgctctcaggtcaaaaggcattgtgctttaaacggccacagtcctcaaaacatctggtgagttactttgcgactgccacaaaagagaataggttggatgagattattggcggcgaagtgatgaacgaggataatctgaaggagatccaggaagctgcaagaattgctgcagagtgtacaaggctaatgggagaggaaaggccaaggatgaaagaagtagctgcaaagctagaagccttgagggtcgaaaaaaccaaacataagtggtcggatcagtaccctgaggagaatgaacacttgattggtggtcacatcttgtcagcacaaggcgaaaccagtagcagcattggctatgacagcatcaagaatgtagcaatattggacattgaaactggccgctgatattaatgctctgacaaattcacatgtatttcttttgtttgtaagaaaaagaaagccacctccttgttgcttcatcaataatgctttgcctcatttgtttgtacatcatcaataatcatgttcatattttccttaaaaaaaaaaaaaaaaaagnnnnnnnnnnnnnnnnnnnnnnnnnnnnnnnnnnnnnnnnnnnnnnnnnnnnnnnnnnnnnnnnnnnnnnnnnnnnn

SEQ ID NO: 89612 - DNA, 397 bp, Arabidopsis thaliana columbia
ctggaaaaaaagagtaaatgggaagcgacgactgactcttcttcctcctgctcctccacctcttgtttaggttcttagcactgaaatttgatcagaaggtgttgacggtgtagagcttcacgaaacataaactttcatttcttctagcttcttgatttgctcttaaaggtgcatgttgaagtgattgaaagcgatttacatgtgacttgcagctcggtcagacattatacattacactcaacacgagattggaaaggatgcttgagaatccaaagttcgatttgcacgctgttggcaatcacaacaacgacaacaattactatgccttcacccaagacttttatcaaaagctcggggaagaaggtacaaacatgtctgttgacagtatgcagacaag

SEQ ID NO: 89613 - DNA, 548 bp, Arabidopsis thaliana columbia
  unsure (1)..(548): unsure at all n locations
atgannnnnnnnnnnnnnnnnnnnnnnnnnnnnnnnnnnnnnnnnnnnnnnnnnnnnnnnnnnnnnnnnnnnnnnnnnnnnnccacgcgtccgcacaactccagaagaaaaactgagagagtttgctcgaagaagaagaagaagcaaaagctttttaaaatccatttttattttcttgtatgattccaaacttatcttcatcattctttctcaatcataccattctttcttaatctccaagctcgtattctatttcttattcgatgtttatttcgttgaaatctcgaagcttctcttcgggtaatacctaaatgttgattggttactcgaaagcccagatgagattttgagagtaggccgaaattggagccgtgtttttggttcagtttctcgagggttcgatttcggattcgtgagcttttggggactggagaatatggacaacggccatgaggaaagacttgccgagaggttttcgggagtgggacctcgaaaatcatctggttcccatgaaaaccacgttaaaaacgatagcttggtttaagtta

SEQ ID NO: 89614 - DNA, 624 bp, Arabidopsis thaliana columbia
  unsure (1)..(624): unsure at all n locations
atgannnnnnnnnnnnnnnnnnnnnnnnnnnnnnnnnnnnnnnnnnnnnnnnnnnnnnnnnnnnnnnnnnnnnnnnnnnnnnccacgcgtccgattcaagacgtccacggggacaagatgtccttgtctcttgggctcttccaagactaaccaatagagagaaaattagtgaaatggtggatccaaccatgaaaggtcaatactcacaaaaagatcttattcaggtagcagccatagcagcagtgtgtgtgcaaccagaagcaagttatagaccgttgatgacggatgttgttcactcgctcattccccttgttaaagctttcaacaaaagtactgattcttctcggtttcctagccgtagagaaagcttgtcatttgatgatattatgccatgacactcttttgtttaatatgtattaatttctctcttttaagttgagattctcgttgttattgtatatttgtataggtaaatgaatccatttatcttgtactataacttatattagtgttgtttaattgcctaaaaacaaaaaccaaaagnnnnnnnnnnnnnnnnnnnnnnnnnnnnnnnnnnnnnnnnnnnnnnnnnnnnnnnnnnnnnnnnnnnnnnnnnnnnnnnnn

SEQ ID NO: 89615 - DNA, 551 bp, Arabidopsis thaliana columbia
ggagtcatgttgtgttaatcctcaagcaaacgacccgtttctgtcgccaagtcaacccgacccgacttcgttcccatcggttgatcggccgggacctgattgcgtttagcctcccgaaatctacgggcaaagttgatccctctgggtttgtcatttgatatcctcttttcccgtaccgcgcgtttatgattctgattacgttcttggttgtttgcgattgatccgtttaggattttctctgagtccatcgcttattgaatcgtcaaggctttttcttgtttgactttggaatatcgaatctgctcaatactccaccaaattatcaaacttggtgttctttgttgctcaatactccaccaaattatcaaaacttggatgttctttgtagctcaattaccaaattaataagttgcattcttctttgttgcttgttagccttttcatcgagtttcgtttctgcgatactattttgtttaggatagtatggctgaaaaggaagtggtttctgcctcaactttagaatctaagatcactgaggatcatcatgacat

SEQ ID NO: 89616 - DNA, 728 bp, Arabidopsis thaliana columbia
cctcaagcaaacgacccgtttctgtcgccaagtcaacccgacccgacttcgttcccatcggttgatcggccgggacctgattgcgtttagcctcccgaaatctacgggcaaagttgatccctctgggatagtatggctgaaaaggaagtggtttctgcctcaactttagaatctaagatcactgaggatcatcatgacatctggatccgaggagcgatggaaaagagccgctcctccaacatcagtgttctgaaggatagattcatagctgctgaggattctgctctagtttccaaggatgttgcacaaaaggatattgagattctcttgagacgagtgaaaactgctacagctttattgacttacctgaaatctaaagcgacaactgtggctgctgccgatttggccaatctttcacttgaaactgaccagctccaagatacaatagacgaacatgatgggacttatgtcactgagatgcttcagcatgtagagaccgttacaggcgtcatggagtctctggctaggcgtgcttttatcgccgaatcagaagccgctatcgagaaaggaaaggttgtgctaagccaagaggaaattcaaagaaaggttggccaactcgagaacatgtccgtgaagttagaggacatggaaaagtttgctcttgggaccagtagtattctctgtgaaatgcggcagagggttgatgatttggttgaagagacctctag

SEQ ID NO: 89617 - DNA, 373 bp, Arabidopsis thaliana columbia
gccttgccctgtgctcatcgttctcttcttcactttattcatggtggtttagttcatgattttggatgttttaagaactttttctactagaactcgaaatcttccaagttctggtttttattcgataagtactagtataatgcgagatatcaaagtcaaatctgattctaaggagtttctaacatcatctgatgaagaagaagaatcagtttccattagagtgtcgtcttcttcttccttgagtagtgttaaatcgacgcctgcagattgaggaaaagtatgtccatcgagtttacgatgcgtttgccccctcattttagctcctactagggttgcttagtggcctaaagttgctgcctttctcgaatcgtta

SEQ ID NO: 89618 - DNA, 518 bp, Arabidopsis thaliana columbia
  unsure (1)..(518): unsure at all n locations
nnnnnnnnnnnnnnnnnnnnnnnnnnnnnnnnnnnnnnnnnnnnnnnnnnnnnnnnnnnntcgaccacgcgtccggaagggtttatgatctccttgagcaaatcggagattctttctacagttgtgcgaacgttcttataataagtttttagttgatcgatctccgatttagtgaactaggcgtcatcttaagaaccctaatttgttttctccggttgtgattacttctgttgttcgtcgtcgaaggtcagttcgtgattctgagtttgtacaccttttcgtttcctctgttggcactcgaattttccaggaagtgaaactagaatttgattctgcgtagtattgaacattaagataatgtctggaagaaatcgtggacctcctcctccatcaatgaaaggtggatcttacagtggtttacaagctccggttcatcaaccgcctttcgttagaggcttaggaggaggaccagtgcctnctncttctcatccttctatgattgatgatagtagagaacc

SEQ ID NO: 89619 - DNA, 713 bp, Arabidopsis thaliana columbia
  unsure (1)..(713): unsure at all n locations
cagctctatacgactcacttgagggaaagctggtccgcctgcaggtaccggtccggaattcccgggtcgacccacgcgtccgctctcgcgtcctaaatcagaagagtagagcacaaattagggttagggttagggcttctcccttcctggcaaattcatcccttttagccgccattgaagatgactggtaaggccaagccaaagaagcatacagcgaaggagattcaagcgaagatcgatgctgcgttgactaatcgaggcggaggaaaagctggaatcgctgatcggaccggaaaagagaaaggaggccacgctaagtacgagtgtcctcattgcaaaattacggctccaggtcttaagacgatgcagatccatcacgaatcgaagcatcctaatatcatttatgaggaatcaaagctcgtgaatctccatgctgttttagcaccagtagctgaatcgaaacctaaacctggtatcaggggaagcttgaagaagtaactctatgtttgaattttataaaatttgttatcttttgatgttaaagagtgtaatgtgctacttcttaccccaaaatctatcatgttgttgatgtcaccaaaaaaaaaaannnccnnnaannnnnnnnnnnnnnnnnnnnnnnnnnnnnnnnnnnnnnnnnnnnnnnnnnnnnnnnnnnnnnnnnnnnnnnnnnnnnnnnnnnnnnnnnnnnnnnn

SEQ ID NO: 89620 - DNA, 607 bp, Arabidopsis thaliana columbia
aggtgagtagagagagttatcatctagggtttatagattggagattttagccgcaacaaggaggaagtgtttttaatttaattttattgttaagagttattgttgctttagggatttttagaatttgggtgttcttttaaatggctcggttgataattccttgtcgaagttcgtctctggcgagagtcaatcttctgggtttgctctctcgtgctcctgttcctgttagaagcagttgtcttcgtagttcggcaaacagacttactcaacacagaccgtttcttacttccgaggccatttgtttgaggaagaatcggtttctaccccattctgttgatacacataagcaaaacagcaggaggctcatttgttctgttgccacagaatcagttccggataaagctgaagattccaaaatggatgcacctaaagaaatatttctcaagaactacacaaagcctgattactactttgaaactgtggatctgagcttctctctaggtgaagagaaaacaattgttagctctaaaatcaaggtttctcctcgagttaaaggatcttctgctgcattggtcttggatggacatgacttgaagctactttctgt

SEQ ID NO: 89621 - DNA, 529 bp, Arabidopsis thaliana columbia
  unsure (1)..(529): unsure at all n locations
nnnnnacgactcacattanggagaagctggcacgcctgcaggtaccggtccggaattcccgggtctgacccacgcgtccgcttcatcgtgatgtcaagtgttctaacatattcttgaccaaagagcaagatatacgccttggtgattttgggttagccaagattctaacatccgacgatctcacatcctctgttgtcgggactcccagctatatgtgccctgagcttttagctgatataccttatggttccaaatctgacatttggtctttaggtacgtttttattgcatgtagtagtggattgttaagttcccttatttgctacataaggaagcagtaatctatctcttgaattactaaagtttcaagcataagcctgaaaagattactgcaatttagttttcatgaggtttctaagaagtcttcataaaccataaggaagactgaagagagttctcaagtcttgggttctttttgttactagatcattctaagttgtctagtgtgaattggatcgtagcgtgagggc

SEQ ID NO: 89622 - DNA, 549 bp, Arabidopsis thaliana columbia
  unsure (1)..(549): unsure at all n locations
nnnnnnnnnnnnnnnnnnnnnnnnnnnnnnnnnnnnnnnnnnnnnnnnnnnnnnnnnnnnnnnnnnnnnccacgcgtccgcccacgcgtccgttttcggcttctatccgtcgattcatatcggcggcagttcccagcgacattaatctccggcgagacagtttactcgtgtttattgaagctatgcctaaaagaacagcagaagcgtgtccatcatctgaaatccaaagaagcagaggagatacttttggtagttacagatctcaagtagctgagcttttgtctctaggtgagaggatctcacatcatgatcaacaagaagccaatgagaggcattctgagagtgttataggagctgggatgtcaaatgttgagaaagataatttgaatgttttgttaaggcagtgtgtgaggaatctaagtccagaagttgatgagatgcaggaatgtgtacgctctctgtatctaatttctcagctagggaacaaatgtcagtcatcgtcgccgagcgattttgttcctgaagaaaccggaggagcgagagaagatg

SEQ ID NO: 89623 - DNA, 823 bp, Arabidopsis thaliana columbia
  unsure (1)..(823): unsure at all n locations
gacccacgcctccgcccaagcgtacggaagaacagagccgagaattatcaagaacgcatctgaggtaaaatcaataactgctagtctcaaagccggtgaagcagggtatgatccgtcttcaagaagatggacccggtcatcaaactactacaacgggaaaaacaaggggaaagatggagaagagaacgaggcagcggttgccgcagcggttgagcccaatggggcagatgcaggaccaggtgttgaagcgacagaagcagctttagaagcagctgcagaggcaggaaagctaatagacacaagagctccaataggtcaaggagcagaacacaatcagcttcataactttgaattgtcgttatcgctaacggctttacagaagtacggaggacctcaaggagtacagaaagcgttcatggcgaggaagcaactgaccgaagcaactgtgggatgcagagtcgcagagaacgatggcaagagacatggccttacgttaactgttagtgattacaagagaaggagaggtcttctctgatttatttgcatttttttcaagtctcagtgtttcattatcttctgaaaactgcttcttggttcttcttttcttcatatctttcttttgtactccacaaaatatgtttagatcagtttgttttttcttgaaatatttttgtactcgtttttgtgtgaactctcccgattagtgtatgcctgcatgaaattagaaaaaaaaaaaaaaaaaacanaaagnnnnnnnnnnnnnnnnnnnnnnnnnnnnnnnnnnnnnnnnnnnnnnnnnnnnnnnnnnnnnnnnnnnnnnnnn

SEQ ID NO: 89624 - DNA, 926 bp, Arabidopsis thaliana columbia
  unsure (1)..(926): unsure at all n locations
nnnnnnnnnnnnnnnnnnnnnnnnnnnnnnnnnnnnnnnnnnnnnnnnnnnnnnnnnnnnnnnnnnnnnnnccacgcgtccgggagaacgtggaagaagaagccatggactctatcgtctccagttcgacgattcttatgcgatcatatctcactcctccggttcgttcatgttctccggcaacctccgtttccgtcaaacctctgagctcagtccaggtcacctccgtcgcggctaaccgccacctgctttcgttaagctccggtgctagaagaaccagaaaaagctctagttcggtgataagatgcggcggaatcaaagagattggagagagtgagttttcgagtacggttctcgaatcagcccagccggttttggttgaattcgtcgctacttggtgcggtccctgcaaattgatctatccagctatggaagccttatctcaggaatatggtgacaaattgacgattgtaaagattgatcacgacgctaatccaaagttaatagcggagttcaaggtttatggtttaccgcatttcattctcttcaaggacgggaaggaagttccagggagcagaaagggaaggtgctattacaaaggccaagcttaaggagtacattgatggtctcttgaactcaatatctgttgcttaatcgtctctctccccaccggtattcttctgtctcaacactgtttttttaatgtaatcaaatctcttcaattgtgatgatcttcatccccggtttctcatttgatgtgtatatcttgcaacaaattttacgaatagaaaagagttgttctcttatcagggaaatatgtatttaggcttnnnnnnnnnnnnnnnnnnnnnnnnnnnnnnnnnnnnnnnnnnnnnnnnnnnnnnnnnnnnnnnnnnnnnnnnnnnnnnnnnnnnnnnnnnnnnnnn

SEQ ID NO: 89625 - DNA, 507 bp, Arabidopsis thaliana columbia
  unsure (1)..(507): unsure at all n locations
gannnnnnnnnnnnnncccccgacttacttagggaacgctggtacgcctgcaggtaccggtccggaattcccgggtcgacccacgcgtccgcccacgcgtccgcggacgcgtgggctcgtccccaacgatatttgttcacttctactgcgtattctccgaccagctctctattcaggtcttggagactttgtcccaacaccaacaaaacgtcgtccgatgctcctcctcagtgttccgtctagccaacgaccttgtaacctcaccggtaaacaatctcttccaagatgaattggcgagaggagacgtctgcaaatccatccaatgttacatgagtgaaactggagcatcagaggataaggcgcgttcgcatgttcgacagatgatcaatgacttgtgggatgaaatgaattatgagaaaatggcacatagctcttcgatactccatcatgattttatggaaacagtgataaatttggcacgcatgtctcaatgcatgtatcaatatg

SEQ ID NO: 89626 - DNA, 906 bp, Arabidopsis thaliana columbia
  unsure (1)..(906): unsure at all n locations
nnnnnnnnnnnnnnnnnnnnnnnnnnnnnnnnnnnnnnnnnnnnnnnnnnnnnnnnnnnnnnncttcttcattcggtggtgagcctgatgaagcagaggagaattacgctagaggctcatgggctgctctgttcgctggaatctgtttcgctcttcttctctgtaacatccaaaacgtcttcgacagttacatcttcaaacgaactgaatcaaccaatcaaaaaccaagctttgcctctgttttcgaagttattatcttctcttctctcgttgctacgatcatctccgtcgtgggtctgcttatagccggtgagcaacacgatttgaagagggaaatgaatggattctcgaaagggaaaggttcttatgtgatggctatggttggtcaagctgtttcgtggcaggtctattgggttgggattgttggacttgtctactctgtttcgagcgtgttgtcgaatgtgatcagtgtcattacgtggccgattgtgtcggttcttgtggtgatcttcttcaatttcatggatgatgagtttgatgccttcaaaggtgttgccttggttactgccgtcttaagcgctgcagcttatttttttaggcttcccaaagacaatcgtatggcttattaggtttggattcttgaatctctaaagaaagtttttttatttcccctgattttttgtgggtatatctaatcaaaaattttaggtgtttatcttgtgtaagtgtaagtgtgtaacagctttggttataaatgtaaatttgtatgttttccaatgaaaatgtttgggagtgtgcaatctnnnnnnnnnnnnnnnnnnnnnnnnnnnnnnnnnnnnnnnnnnnnnnnnnnnnnnnnnnnnnnnnnnnnnnnnnnnnnnnnnnnnnnnnnnnnnnnnnnnnnnn

SEQ ID NO: 89627 - DNA, 570 bp, Arabidopsis thaliana columbia
ccagaagaaggcgttgaatcctttcgttttccgattccatttttgggatctcttgtttcgttttcttctctttggatccattccattcccatgttccccaatttctttaatcggtgttgcttccacaaggcttcatgagcttgtataacaagtttctctaggaggtgttaaagagccagatcaagctttcagaagagattttcttagggtggttgagagctgaaagttttgatatttagtcaactttgttccactgaaccttctaggaagctacctcaagtacacagctttgttgacgggcttcaagccagtggtaaagatatgcttctgtagaagggttaatcttgagcattaaaggacatggctttctactctgaagacgacaagagcgaagactacctctttaagattgttctaatcggtgattctgctgtcgggaaatcaaatttacttgccagatttgcgagggatgagttctatcccaattcaaagtcgacgattggagtggagtttcagacacagaagatggatataaacgggaaggagatcaaagcacagatatgggacaca

SEQ ID NO: 89628 - DNA, 485 bp, Arabidopsis thaliana columbia
  unsure (1)..(485): unsure at all n locations
gtttaccaccggaacccgtttcctgtgtttttcttaagaggtctcaatgtttctctgtctactgatgacccccttcagattcacttaactaaagaacctctcgtggaagagtatagcatagctgcatcagtttggaagctgagtgcgtgtgacctgtgcgagatagctcgtaactcagtgtaccagtcaggtttctcacacgccctgaagtcgcactggattggaaaagattactacaaaagaggacctgatggaaacgacattcacaaaacaaacgtgccacacataagggtggagttccgtgacacgatctggaaagaggagatgcaacaggtttatctgggcaaggctgttatctctgatgaagttgttccataaaaaccacaatcagaaatggcaagacattgcaggggnncaaagagagcattttanggagtatacggaagcaggancctagtagnttgggntaataatatgagtgggct

SEQ ID NO: 89629 - DNA, 495 bp, Arabidopsis thaliana columbia
  unsure (1)..(495): unsure at all n locations
atgannnnnnnnnnnnnnnnnnnnnnnnnnnnnnnnnnnnnnnnnnnnnnnnnnnnnnnnnnnnnnnnnnnnnnnnnnnnnnccacgcgtccggcaatgactctctccttcaaattcaatcctccttcttctcttctattctcttcccgcttcatcctcctcctacgtcatccggacgctacgtttccccggcgccggcggattctaccgattcattgcgttagatttgtcactgagccctaagaatttggggaattttggtctgcttcggcgaaggatcgatggagaaatctaccaaatgtgctgtttgctacaagtcgtttcgtccctcaatctgtgtagattgtgttaatcgcgggttaaacgaatacaaggtcaagttggactcgttgaagagtcttcgggaggtttcgtatttcagattaagtggcttacttgtcacaaaggagaaagcaattagtcaacgttgttggaaggagcttcagaatgagaagc

SEQ ID NO: 89630 - DNA, 437 bp, Arabidopsis thaliana columbia
cagcaaacttcaaaaggtaacatgataaaaaggtttgctgcttgggtttgacttcattacttgctctccctgggggtcaattccccgatgaagcgctgcagcgtgttttcagggcaacacttgatcttctagttgcatataagaatcagctagctgaagcagctaaggagacagaagtagattatgaagaagaaatgaatggactccagagtagtgatgatgattatgatgatgatgggtctgatggggagatggatgatacagaggaaggagatgaagcacaaagtgttaaactgcagaagttagctgcacaggcaaaggccttccactatgatgatgatgatgacgacgattctgatgatgactttagtgatgaggacgagtttcagtcacccatcgatgaggtggatgcctttgtattctttgtcgatgcaatc

SEQ ID NO: 89631 - DNA, 431 bp, Arabidopsis thaliana columbia
tttcagtccccgccgagaatcgagaagcagcagccatggccgacgtagttcaataccgcctcgagcggatggttgacgagcttgatgatctagaacgaagagaaatcttcactcgtgctgagatagctgagatcgtgaagcagcggcgtaagtttgagtaccggctcaagcgtccaagcccactcaaagaagatttcatagcctatattgactatgaggttaagctcgatgagctccgtcagctacggaggaaatcggtggcgcgtgtgactaagaagagaaagaagaaatcagtatctgatttcgccggtgtggctaggattgttgagatttatagattggcgacgatgaggtataaaggtgatatcaatttgtggtttaggtatctcgagttttgtaaacagaagaggcatggaagaatgaaaaaggca

SEQ ID NO: 89632 - DNA, 396 bp, Arabidopsis thaliana columbia
acttcgatttttcaatcagtaatattggtggttcagagatgatgatgatgaatcttttaaggagatcagcgatagccatcggccgccaatcaaaatcgaaactggcgtcgttttcctccgctacacaaccttgttccggaatcccaaaatcgtccaagagggtttttagcaactcatttctttcaaaggactctactggagctaatggactattgtttcgcttccgaaacccgcaagcaagtatatgtacggaagctcgtccaaagaacatcaactcatcttactttaccagatcgtttgcagctcgtgctgcacaagatcctgggaatcagcagaataaggctaagaaagaggtgacgactgtggaggatccttttgattctcctacataccaca

SEQ ID NO: 89633 - DNA, 754 bp, Arabidopsis thaliana columbia
gatagatcatgaggccgagttgcttgtgcttgcaagtgacggtttatgggatgtggtaccaaatgaggatgcggtagcccttgctcagagcgaggaagagcccgaagcagctgcccgcaagttaactgacactgccttcagccgtggcagtgcagacaacatcacgtgcattgttgttaacttccgtcatgataagacagaatctcctagaatcgaaacaaacgccatggctgaatcggaacctgatctggtccccacaactgaactggaacctgaatcaaaccccagtactgcattggtaactgaatcaatccccaaggctgaactggaatccgaacctgatgctatacctgatccagaacctgaaaccgaaccagagaccaagggtgagaaagctggtgagtaaggtagcagccggggaaaggtgtccatactgttggggacatgtggaaacagatgaatataaaattgcttagtaagttgtgtggtttgtggctacctgtaacgtgtgaggatttgtgttttttgggtttgtgttgcattcatgcacatgcctatgcctgccttgaggacgacgacgacccgttttgacatgtccccgattttttgtctatttcattttaccctattttggttttgttggtgctactcacaccaaaaacagcacatttgttctctgtttctcctactttttctatcttttatttaaaacaccgtccattccaataaacaatgtttttgtaattaaaaaaaa

SEQ ID NO: 89634 - DNA, 742 bp, Arabidopsis thaliana columbia
gacagtttttcgtggctgcgagataatgaattcggacgtgaagctcttgctggtgtcaaccctgtgaacattgagctactaaaggagctgccaattcgaagcaatcttgacccggctctatatggacctcaagaatctgttctcacagaagaaatcatagctcgagaagttgaacattatggaactactatagaaaaggcgcttgaggagaagagatcgtttcttgtggattaccatgacatactcttgccatttgtagagaagataaactctatcaaagaagatccaaggaagacatatgcttcaagaacaatcttcttctattcaaagaatggagccctgcggccattggccatagagctctcgctgcctcctacagccgaatccgagaacaagtttgtttatactcatggacatgacgctactactcactggatttggaaactagccaaagctcatgtctgctcaaatgatgctggtgttcaccaacttgtgaaccactggctaaggactcatgcttccatggagccttacatcattgctactaacagacagttgagtacaatgcatccggtttacaagctacttcatcctcatatgcgctacacgcttgaaatcaatgctcgtgcgcgtaaaagcttaatcaacggaggaggaatcatcgaaagttgcttcactcccggaaaatacgcaatggaacttagctctgcagcgtacaagagcatgtggcgatttgacatgg

SEQ ID NO: 89635 - DNA, 532 bp, Arabidopsis thaliana columbia
  unsure (1)..(532): unsure at all n locations
nnnnnnnnntctacgattcactatagggacaagctggtacgcctgcaggtaccggtccggaattcccgggtggacccacgcgtccgcccacgcgtccggaagaaagaaagatccaaaggattattattaaagttaaaaaatgacaaaagtcccaatctcttcgagcaaaatcagtccttaccgcatcgtgatcgttcttcgccttgtgatcttagttttcttcttccgtttccgtatcttgacaccagccaaagacgcataccctctctggcttatctcagtcatctgcgagatctggttcgctctctcttggatccttgatcagttcccgaaatggtttccgattaaccgagaaacctaccttgaccgtctctctatgagatttgaacgggatggggaaaagaacaagcttgcaccggttgatgtgtttgtcagtacagtggatccgctcaaggaacctaccttgatcacagccaacacaattctttcgatcttagccggtgtttacccagtgaataaggtgagctgcttt

SEQ ID NO: 89636 - DNA, 745 bp, Arabidopsis thaliana columbia
  unsure (1)..(745): unsure at all n locations
ctnnnnnnnnnnnnnnnnnnnnnnnnnnnnnnnnnnnnnnnnnnnnnnnnnnnnnnnnnnnnnnncttttttttttttttttttttaaacaaaaaaaatatttttttttatctcaagtactaaagacttgagatgtaagtaactgagttcttgttgtttacagagatgctgaagcaagacaacctctctggagaaaagtcccaatctcttcgagcaaaatcagtccttaccgtatcgtgatcgttcttcgtcttgtgatcttagttttcttcttccgtttccgtatcttgacaccagccaaagacgcataccctctctgggcttatctcagtcatctgcgagatctgggttcggcactctcttgggatccttgatcaagttccccaaaatgggtttccaatttaaccggggaaacctaccttgaccgtctctccaatgaggatttgaaccgggatgggggaaaagaacaagcttgcaccgggttgatgtgtttgccagtacagtggatccgcccaaggaacctcccataatcacagccaacacaattctttcgatcttagcggttgattacccagtgaataaggtgagctgctatgtgtctgatgacggtgcatcaatgctcctgttcgatacattgtctgaaacttccgagtttgcaaggagatgggttccgttttgcaagaagtacaatgttgagccaagaacttcagagttttacttctctgagaagattgattacttaaag

SEQ ID NO: 89637 - DNA, 817 bp, Arabidopsis thaliana columbia
  unsure (1)..(817): unsure at all n locations
nnnnnnnnnnnnnnnnnnnnnnnnnnnnnnnnnnnnnnnnnnnnnnnnnnnnnnnnnnnnnnnnnnnnnnnnnnccgggtggcccacgcgtccgtgtttatacaaatatatatctacaaactacaatgaataatttcattctcttatggcatatggtgctataaacaaacacacttaccacgcttgatcctacaacacatgaaccatggcttcttcaacccactcttacttcaccactttagcactaaccctaatcttgatctttcgtctcataccagaaaccaccgcatcacgccatctgaatggaaagaatccggcggtaattggagttaccactactagcgagaaatacattgttcctacgccgttaccaccgtttttacgaccctttttcccaccgttacagtttgccgctgcaccgttcggagggaatatcccacaaccaccgttaccttcaccacctccaacatttctaccgtgtctcccaggtttcaagtttcctccctttcagtcccgaaagcctacgccgccgtaatcgtatatacgttgacggcatcaagtctaaaactgtaatgaaatattaaactatctactttaatgtattatctatctctatatatcaccgttgatcatctataaataattgatggtaatatcatggtatgaaactgtaataaagatctctggtgtagtaattaataaattgaataagtactatgttagatatctaaaaaaaaaaaaaaaggtnnnnnnnnnnnnnnnnnnnnnnnnnnnnnnnnnnnnnnnnnnnnnnnnnnnnnnnnnnnnnnnnncgtcc

SEQ ID NO: 89638 - DNA, 446 bp, Arabidopsis thaliana columbia
  unsure (1)..(446): unsure at all n locations
tggacgcgtccgcccacgcgtccgcaccatgctactcattgtttctatatctatgtatcatatacatccgtaacaatcgtaagaatcacactagttccttctaacctttgaatactagtgtgcttttgtccgtcagtcgccattttgtttgtagccaaatactaaagctggatacaagttgcagtcttatgatagttctaaaatcggtaatggtgtatgtcggcttgtgtgtgtctgtgaagtagagatatagctgtaatctgtatacagtttgagatatgaagtcagttagagtttctcctttttactattacatatggcctcttttgatgctcttaaggtctgagagagccaccatgctactcattgtttctatatctatgtatcatatacatccgtaacaatcgtaagaatcacttcgtgtttggaaaaaaaacaaaaanaaa

SEQ ID NO: 89639 - DNA, 758 bp, Arabidopsis thaliana columbia
gatccttggggttgttttcaaatgtttctaccaaccaacacttggaacaccactggggtttgttgatgcttcgggttatacacactgctcgagttgaaaacttcctggaacgtgctgataaattagtaggtaaggatggagtgtttgattatatcagcgttacgccaccttacatggaggttgattatcaggttctgatggatcagattgctaagtcaccagcgattggggaaaatacttttattttggtcgagtacccatcacgaacaacaatgcttgattcatgtggatgccttgaaaagatgactgatagaaggtttggccggacacatctagctatatatggaccaaaatgggctcagaagccaagaaaatcttaaagccacagtgattgtcgacagttatatctggccatttttttcggtttaaggcaatgaagagagactgtgactgaagagctagttccttctaacctttgaatactagtgtgcttttgtccgtcagccgccattttgtttgtagccaaatactaaagctggatacaagttgcagtcttatgatagttctaaaatcggtaatggtgtatgtcggcttgtgtgtgtctgtgaagtagagatatagctgtaatctgtatacagtttgagatatgaagtcagttagagtttctccttaaaaaaaaaaaaaaaaaagggcggccgctctagaggatccaagcttccgtacgcgtgcatgcgacgtcatagctcgtctagagtgta

SEQ ID NO: 89640 - DNA, 965 bp, Arabidopsis thaliana columbia
  unsure (1)..(965): unsure at all n locations
actcactatagggaaancagtacgcctgcaggtaccggtccggaattcccgggtcgaccccgaaaaaacataaaatctgttcttcttcttcggctgagagacaatggcggaggagcaaaagacgagtaaggttgacgtagaatctccggctgttttagctccggcgaaggaaccgactcctgctccggtggaagtcgcggatgagaaaattcataatccacctcccgtcgagtccaaagctcttgccgttgtagaaaaacccatcgaggagcatacacctaagaaagcttcatctggttcggccgatagagatgtgatacttgccgacttggaaaaagagaagaaaacgtcattcatcaaagcatgggaagagagtgagaagtcaaaggctgagaacagggcacaaaagaagatctctgatgtgcatgcttgggaaaatagcaagaaagcagccgtagaagctcaacttaggaagatcgaggaaaaattagagaagaaaaaagcgcagtacggtgagaaaatgaagaacaaagtagctgcaatccacaagttagcagaagagaagagagcaatggttgaagctaaaaaaggagaagagcttctcaaagctgaagaaatgggtgctaagtatagagccactggtgtagtaccaaaggcaacgtgtggatgtttctaagcctttattgaatttgtatctttgtaacaattcatctctgtttctttcttcttcttttgtttttgtgtgattcaacaactctttttagtttttgttatttgtttggtcgtttgtgtcttgtttacatattgggtgattgtgtgtaaaagtgaaagattaatggagtataattgtatggagcctccnnnnnnnnnnnnnnnnnnnnnnnnnnnnnnnnnnnnnnnnnnnnnnnnnnnnnnnnnnnnnnnnnnnnnnnnnnnnnnnnnnnnnnnnnnnnnnnnnnnnnnnn

SEQ ID NO: 89641 - DNA, 559 bp, Arabidopsis thaliana columbia
aggtgccttatagaagagctttgacgtcgcatgcccgcgtacgtaagcttggatcctctagagcggccgtcctttttttgtttttttgcgctgatgttgtaatattgaagtgcgtagcctgggagctaagagaaaagagaagatgtggaagtcaaaattacaaatgcgaagatagatagcattccatttaaaatctgtcatatcagtaattggtacaagaagaagtaactttgttgcctatgtgagcaccaaagcattcaacaacagataaccataacattggcaccatcaaggcgaccttgtctctgagctggtcccatctttgccaaatcttgaaatacttctcacactcttaggagtcacagcaccaggacttgctccacgaggacttgctccacgataacttgcacgaaggctctcatcaacagtagaagatgatttagctattgcctttctgaaaaacttctgagcagcgggtgaaagagtcctaacattcggacttgcacttccacttcgatgaggagatggcaacggaggtttcttaaacatactattcgat

SEQ ID NO: 89642 - DNA, 409 bp, Arabidopsis thaliana columbia
tatcttctctgcgatttgaatgtaacagatccaacttcattcacagagtgcatcactctgcaaagccacagacaatggaagataacgaagaagaagaagaatcaccgacggagctaaacacgatcaccggtgtaagcgggtttgtagttatctctcccgataagctttctctcaaatacactggcgtttctcaacacggtcacgatgtcggcgttgttcaagctaataaacctgctccgtgtaaacgtttcgcttattacttcgagattgatggtgaagatgctggtgttaaaggacgggtctccattgggttcactactgataggttcagaatcgcgagacatcctggatgggaactcaacacttgtggttatcatggtgaagatgggcttagatatctaggaaaacg

SEQ ID NO: 89643 - DNA, 481 bp, Arabidopsis thaliana columbia
gcgtccgaagattcacataatctttttgttttctacttctgttatcttctcttggattttgctttatacttccattagcttctgaaaattcagtttaagttatggcgtatttgagtgatggatttgaaatgaagtcgactcgtgagtatgagagattacggttagggtttgtgaggtttactagaggattagggaggaaaaggattctcatatctaaacgagctccggaaaatgattcgccgccggtgaagagaccaagtcatgaaacgacggaatcctgtaggtctctgcgtgaaactctgcatcaagatatcttgattcgagtaccttgtcatgtggatcacgaggacctagccacactaaaacgtgtatctaaaacaataagaaaagctgtaattgaagcaaagaagtcgcattttgattatagcacacctaaaaagagattgccatttcgagacgcaatactaatccttgattcaaa

SEQ ID NO: 89644 - DNA, 581 bp, Arabidopsis thaliana columbia
  unsure (1)..(581): unsure at all n locations
aaacattccttctctcgctcactcttctccaatccttattttattttttgaaagtttaaaattttatacaacatatcaatttggggtagaaaaattcgaaagaaatgaaagagatgggagtgatagtgcttcttctccttcactcgttcttctacgttgccttttgcttcaatgatggactactaccaaacggtgacttcgaactcggtccacgacattcggacatgaaaggaacacaagttatcaacataacagcaatcccaaactgggaactctcaggctttgtcgagtacattccctcaggacacaaacaaggcgacatgatccttgtcgtgcctaaaggcgcattcgcagtacgtctaggcaacgaagcctcaatcaaacaaaaaatcagcgttaagaaagggtcgtactattcgataacgttcagtgctgctcgaacatgcgcacaagacgagcggttaaacgtttccgtggctcctcaccatgcagtgatgccgatacaaacagtgtatagtgctcaggttgggatttgtattcgtngggcttttaaggnccaaagtgactatgcagatatagtg

SEQ ID NO: 89645 - DNA, 879 bp, Arabidopsis thaliana columbia
  unsure (1)..(879): unsure at all n locations
caaattacaaaagagaaaagatggaaaaagttttctccgacgaagaaatctccggtaaccatcactggtcggttaatggaatgacgtcgttgaatcgcagtgcttccgaatgggcattcaatcgtttcatacaagaatcctccgccgctgcagacgacggagaatctacgacggcgtgtggtgtttccgtctcctctcctcctaatgttcctgtagattcagaggaatacagagcatttctcaagagtaaacttaatcttgcttgtgctgctgtcgccatgaaaaggggaacttccatcaaacctcaggatacttctggtagatctgacaatggtggagccaatgaatcagaacaagcctctcttgcttcttccaaagctacaccaatgatgagcagtgctataacaagtggatctgagctctctggtgatgaagaagaagctgatggtgaaactaatatgaaccctactaatgttaaacgcgttaaaaggatgctctctaatagagaatcagctagacggtccagaagaagaaagcaagcacacttgagtgagctagagacacaagtttcacagcttcgtgtagagaattcaaaantcatgaagggtctcactgatgtaactcaaacatttcaatgatgcatctgtagaaaacagaagtttttaaaagcccaataattgagacactacgngcannggtgaaaattggcttgaagagccgtggagnancctccctggctttaacccaatggtccnccaatatgcctcanattggntncaactggctcccttccttcaggganttaaattcnccagancnttnaggngccangggcttccccgnggttttgnccggggnnaaggaggcctttntgggnaa

SEQ ID NO: 89646 - DNA, 540 bp, Arabidopsis thaliana columbia
cagctctatacgactcactttagggaaagctggtccgcctgcaggtaccggtccggaattcccgggagacagttttagggttccgtcgttcttattcactctcgattcttcgcttagcttcgtcttcttcatcgaagatttatctctacaattcgctgtggatcttcggggcgggcgaatttcattgattttccattgaatctgcgaggttacatatccggatttgtgttatcggagctgaatttaggaatggaggtagagaaatccaagtataggagcgaagatttggatgtggtggaggaggaggctgatttgaagaagagtcggcgagatcgtgatcggagtaatgagcggaagaaggataagggttcagagaagcgtcgagagaaggataggcggaagaaacgagttaagagtagtgattctgaagatgattacgatagagatgatgatgaagagagggagaagcgtaaggagaaggagagggagcggagacggagggataaggatagggtgaagagacggtctgagagaaggaag

SEQ ID NO: 89647 - DNA, 1105 bp, Arabidopsis thaliana columbia
  unsure (1)..(1105): unsure at all n locations
nnnnnnnnnnnnnnnnnnnnnnnnnnnnnnnnnnnnnnnnnnnnnnnnnnnnnnnnnnnnnnnnnnnccacgcgtccggggggaatgatttcgattggactgaagagatttcagaaagcattagagcttctttacaatgttgggactgctcctatgcatcaagtcaatgccatagctcttgaggcgtacaaaaagtacatattggtgtctctcattcacaatgggcagtttactaacactctccccaagggtgcttctacagcagcacagaggagcttcaagaactataccggaccttacattgaactgggtaattgttacaacgacgggaagattggtgaactagaggcattggttgtggccaggaatgcagaatttgaagaggataagaaccttggattagttaagcaagcagtgtctatccctttacaagcgtaacattctgagattgacacagaagtacttgaccctgtcgcttcaagatatagccaacatggtccaacttggtaatgctaaggaggcggaaatgcatgtgcttcagatgatccaggatggtcagatacatgcccttatcaaccagaaagacgggatggtcagattcttggaggaccctgagcagtacaaatctagtgagatgattgagatcatggattctgttatacaaaggactattggtctgtcgaagaatctcttagccatggatgagagcttatcatgtgaccctttatacttgggaaaggtaggaagggaaagacaaaggtacgactttggagacgatttcgatactgttcctcagaagttctccatgtaaacagcgaaagtcgagaagcaccaacaaaacttggctcaaagacaaccgtagtgtgaatcttgagaatgttacttttgatttctttgttcatttttgttggtttaaaaagtttcatatttttgtcacaattgccaacaagtagagaagaccattatggaccctcgaatcttttatttcccttttacttaaaaaattttccccttgcgcgtgaaaaaaaaaaaaaaaagggcggccgctctagaggatccaagcttacgtacgcgtgcatgcgacgtcatagttttatatagtgca

SEQ ID NO: 89648 - DNA, 517 bp, Arabidopsis thaliana columbia
  unsure (1)..(517): unsure at all n locations
tacgccgnnnnnnnnnnnnnnnnnnnnnnnnnnnnnnnnnnnnnnnnnnnnnnnnnnnnnnnnnnnnnnnnnnnngccacgcgtccggctgattctcgccttctcggtaaggttcaaggcatggaaatcgggctctctctaggcttgaaaagtgatgaaggaggcttaaaactttctctttcggaatgtggatgccatgtggaagacattaccattgagttggaaggaggagcatcatggttttatcaggggatggttaatgcatttaaagaccaaattgggtcaagtgtggaaagtaccattgccaagaaactcacggaaggagtatcagaccttgattcattcctacaaagccttccaaaggaaatcccagtggatgataatgctgaccttaatgtcactttcaccagtgatcctatattgagaaattcatctatcacttttgagattgatggcttgtttccaccaaagggggaaccaaatcaagtntttaaaannccttnttnaaaaaggcctg

SEQ ID NO: 89649 - DNA, 926 bp, Arabidopsis thaliana columbia
  unsure (1)..(926): unsure at all n locations
nnnnnnnnnnnnnnnnnnnnnnnnnnnnnnnnnnnnnnnnnnnnnnnnnnnnnnnnnnnnnacggacgcgccaggcggccggaaaatcgcaatgggtgcgtacaaatacgtgtcggagctatggaggaagaagcagtcggatgtgatgaggtttcttcagagggttaggtgttgggagtatcgccagcagccttccattgttcgtcttgttcgtcccactcgtcccgacaaggctcgtcgtctcggctacaaggccaagcaggggtttgttgtctaccgtgttcgagtcagacgtggtggacgcaagaggccagtgcctaagggtatcgtgtacggtaaacccaccaaccagggagtgacacagctcaaattccagcgtagtaagagatctgttgctgaggaacgtgctggtcgcaaactgggaggccttagggttgttaactcctactggctcaatgaggactctacctacaagtactacgagattatccttgtagaccctgcacacaatgccgtccgaaatgatccaaggatcaactggatctgcaaccctgtgcacaagcacagagaactcagaggtctcacctccgaaggaaagaagaatcgtggtcttcgtggaaagggtcacaacaaccacaagaacagaccttcccgcagggcaacctggaagaagaacaacagtatctctctccgtcgttaccggtgatcagttttatgttttgttttttctcgaactggtatatcttcagtgtggattgtgtttcggaattctggaattacattgggatggaagactttcacattcaagagtttgtttcaagttttgagttctttgattctgaccataaagcaatgtttcttagttattacttatttttgatgattaatttttccctacttaatatcaagagtgtagatttgctcct

SEQ ID NO: 89650 - DNA, 1572 bp, Arabidopsis thaliana columbia
  unsure (1)..(1572): unsure at all n locations
cgactcatatagggagaagctactacgcctgcaggtaccggtccggaattcccgggtctgacccacgcgtgcgcccacgcgtccgcggacgcgtgggcgcaactttcgtcagtttttgtgtgttttcttctacacatagacactttgctcaatcaaacacactctctgttctgtttttctcaaacttgtttaagttcgatgactatggaagtgtcgaaaaagaaaggtggagattttcagcaatgtcacgaattgattcccggtttaccttccgaactagctttggagtgtttggtcagagttccgttccaattccaatccgccatgagatccgtttgccgttcttggcgtagcttactctccgactcttcttttatccaagaacggcggagatgcggcaaaacagagcttctcctctgcctcgttcaaccgctaacgccgccaattccagcgtctaaatcggttgacgagacattaatggttgacgagaaaaaatcagaggatgagtcacacccgcgcgttttctgcacgccgcgttttggattgagcgtttacaacgctgcgatgtccacgtggcatcgcgttgcgtttccagaggaggagcagatcccgcttttctgcgagtgcgtcgtgcttcaggacgccgggaagattctgctcatcggcggttgggatccggagacgttacagccgacgagagacgtttacgttctggaattcgccggaaggaagtggagacgaggtgcgccaatgaaggaatcacgacattttttcgcttgcgcctcggtaagtccaacgaaggtatacgtcgccgaaggtcacgacgatcagaaaaacgctttacgctcggcgaaaggtgtacgacgtcgagaaagccgagtggtcgtcggttactccgatgacggaaggaagagacgaatgtcaaggattcgccgttggtatgggtctaaggttttgcgtgctgagcggttacggaacggaatctcaaggaagattccgatctgacggagaaatttacgatccagcgacagattcatggtcgagaatcgacaacgtctggcgatttccagatactagcccgagaggtcgcaccgccggagactttagaagctcctctacgttatggtgtttcacagacactgatttacagagtgaacgtcgatgggaaactaacgatgattcgagaaatttgaaactggatcttcaatctatacagcttccgatgacaggaagctcagttttcgccggaagcttaggaggtgaatcggtggtaatgattggcggtaaaagagagagtgaaggtgaaggtgaaggaggagtgatgatgaagatgacgactgagaagaaaatgggaaaatggagtcatcatgttcatataccttgtgatttctctactcttccattttcgcatgcttcaatctatgtttgaaaatcccaaaagattttatagtacaacattgtgttctgatcgcggccgnnnnnnnnnnnnnnnnnnnnnnnnnnnnnnnnnnnnnnnnnnnnnnnnnnnnnnncacnnnnnnnnnnnnnnnnnnnnnnnnnnnnnnnnnnnnn

SEQ ID NO: 89651 - DNA, 510 bp, Arabidopsis thaliana columbia
ccacgcgtccggaacatacaagcagctattttgttggtcgagatattcacagtcacaaggttgcttggggtcagatatcaatggttgatgcagaaagaaggctattagctcatgctctcgttgatcctgataatcaacactttatattgctgtcagatagttgtgtaccgctattcgactttaactatatctataaccacttgatcttcgcgaatctcagcttcattgattgttttgaggatcctggaccacatggatctggtaggtattcacaacatatgctgcctgaggttgaaaagaaggattttcggaagggctcacagtggttttcaatgaagaggagacatgctatagtcgtcatggcggacagcctttactacacaaaattcaagctttactgtaggccaaatatggaaggacgcaactgctatgcggacgagcattattttccaactcttttcaatatgattgatccagatggaatagcaaactggtcggtcacacatgtag

SEQ ID NO: 89652 - DNA, 456 bp, Arabidopsis thaliana columbia
ggccaacacgcgtgggggcattttcgtttcgtctccacacgcctctctctctctctcgcttcttcaatcattcatcactccgacgtcagattcaaaatcctccatgatcgatcccaattgatcaatcaataaccttatcttcttcatcttctctgtcagtatctgaatctgcatctggaagcgtgatttcatcatcatgtatttaaccgcttcatcttccgcttcttcctccatcatccgagctgcttcttctcgctcttcttctcttttctctttccgatcggttttatctccctccgtttcatctacttctccgtcgtctcttctcgctcgtagatcttttggtaccatttcccctgctttccgtcgctggagccattcctttcactcgaaaccatctccgtttcgcttcacctctcagatcagagctgtttctccagtcttagatcgtctcca

SEQ ID NO: 89653 - DNA, 446 bp, Arabidopsis thaliana columbia
acgcgtccgcaatatcacactttcataaagctcataacatacataaaaaatgggtgaatcttttagattattcaatcatcatcacttcctcacaacttttctcataatcatagccatgctcaaattggttcatacaacaacaacaacaactacaacaacaacaacaaacaccgagttcgtaaaatcatcatgcactttcacaacgtacccaagactctgtttctcttcactctcaactcatgctagtctcatccaaacaagccccaagctcatggctcatgcggctctcaacatcacattagcctcggctaaagtaacttcagcaatgatggtgcgtctctcgaatagtcggctcaagcctaaagaagtctcggccatgagagactgcgtcgaggagttaggtgacacgttggaggagcttaggaaatcgattggtgagatgtgtc

SEQ ID NO: 89654 - DNA, 627 bp, Arabidopsis thaliana columbia
  unsure (1)..(627): unsure at all n locations
cnnnnnnnnnnnnnnnnnnnnnnnnnnnnnnnnnnnnnnnnnnnnnnnnnnnnnnnnnnnnnnnnnnnnncccacgcgtccgaaaaaacaagaaacagagcctatgacgtgcttgttcagattggtcatgcatacgcagatgaggagaatggtggagacaacgagaagttgcatgggtacttcgatatggtggttggttgcttggctggcgaaaaacctcaaatgattagtgctgctgtcaagggtgtagctcgtttgacatatgagttctccgatctcatatctagtgcttacaatttacttccttcaacatttcttctcctccagaggaaaaataaagaaattacaaaagcaaatttaggtttgttgaaggtgttggtggctaaatcacccgttgaaggactacacgcaaatttaaagagcatggttgaaggcttactaaagtggccagaaggaacaaaaaatctgttcaaagcaaaggtgaggcttctgttggagatgctcatcaagaaatgtggcacggaggctgtcaagtctgtgatgcctgaggaacatatgaaactcctgacaaacatccgaaagatcaaggaacgtaaagagaaaaaatatgcagctggctctgacatc

SEQ ID NO: 89655 - DNA, 439 bp, Arabidopsis thaliana columbia
  unsure (1)..(439): unsure at all n locations
gttcaaacctttactctctctgtctgcaaaaggttcatcatttagggtttatacaagtttacagagagtttacgattctgaatcagtgattttggaagaaaccccaatcagctgaagatgaggagattgtttgcgatttcatcgacgggaaacagatttgttcatcggagtcttctcggaaaaggtaaatgtggaactgctcctccttcctttagccattgcagtttctgggtacgagatttctctggtgttagatatgattacagaaaaatatcgataaataggctaaatgatttgaagctagatgatgcggttaatctgttcggtgacatggtcaagtctcgtcctttcccttcgattgttgagttcagtaaactgttgagtgccattgctaagatgaacaagttcgatcntgtcatctctctcggcgagcagatgc

SEQ ID NO: 89656 - DNA, 461 bp, Arabidopsis thaliana columbia
gagacccccccaaaatcgctgaagaacgcctctcgagctcagatagggtttataggtttctagagagaatttcatggcgacatctgaagcggaatatgagagtgatcccgaggagctgaaccgctccttggcgacgaggaggagagaagcgagtgatgacgatagtgatgatgatgatgctgttagagatgtgaaaaatcagagggctgtggttgattctgacctatctgatgaagaagttggtactgtgaagtatgataatgacgaagatggggaggatagttatgaggatgatgaggaggaaagtggtggaggaatcgataatgataagagtggtgtggtgaaggacgctggtgatatgaatggagaagaaggaagaaaccgcggcaccacgcaaaatgcaaccgagacgtgataattagaacaagattttaaagtagttttcgaagatgtgaaagaaa

SEQ ID NO: 89657 - DNA, 782 bp, Arabidopsis thaliana columbia
gggccccccctcgaggtcgacggtgccgctgcacgagggatttttgttccgatctacttctccggcttatcaccgatttagatctaagcctgaggtttccttttgcattttagagattccgagaatgagacaacggcaactattttccgtgtttttgcttctcttagctttcgtttcgttccagaagctttgctactgtgacgatcaaacggttctgtatgaatcgttcgatgagccttttgatggccgctggatcgtttcgaagaatagtgattacgaaggtgtatggaagcatgcaaagagtgaaggacatgaggattatggacttctcgtgagtgagaaggctaggaagtatggaattgtgaaagagcttgacgagcctctaaacctcaaggaaggaactgttgttcttcagtacgaggttcgtttccaggaaggacttgagtgtggtggtgcttacttgaagtacctccgtcctcaggaagctggatggacacctcagggattcgatagtgaatccccttactctatcatgtttgggcctgacaagtgtggaggtacgaacaaagtgcatttcatcttgaagcacaagaatcccaagagtggcgagtacgttgaacaccatctgaagttccctccctctgttccttatgacaagctttcccatgtctacaccgccatcttgaaacccgacaacgaggttagaaatttggttgatggagaggagaagaaaaaggccaatttactctctggtgaagactttgagcctgcattgatccctg

SEQ ID NO: 89658 - DNA, 1516 bp, Arabidopsis thaliana columbia
  unsure (1)..(1516): unsure at all n locations
agctctctacgactcactattgggaaagctggcacgcctgcaggtaccggtccggaattcccgggtcgacccacgcgtccggacaagtgtggaggtacgaacaaagtgcatttcatcttgaagcacaagaatcccaagagtggcgagtacgttgaacaccatctgaagttccctccctctgttccttatgacaagctttcccatgtctacaccgccatcttgaaacccgacaacgaggttagaattttggttgatggagaggagaagaaaaaggccaatttactctctggtgaagactttgagcctgcattgatccctgccaagaccatccctgaccctgaagacaagaaaccagaggattgggacgaaagagccaagattcctgatccaaatgccgtgaagcctgaggactgggatgaggatgcacctatggagattgaagatgaggaagctgagaaacccgaaggatggttagatgatgagcctgaggaggtcgacgaccccgaagcgaccaagcctgaagattgggatgatgaggaagatggtatgtgggaggctcctaaaattgacaaccccaagtgtgaagcagcacctggttgtggtgaatggaagagaccaatgaagaggaatcctgcttacaagggcaaatggagctcacctcttattgataacccggcttacaagggaatctggaaacccagagatatccctaaccctgactactttgagctagacagacccgattacgaacccattgcagccatcggtattgagatctggacaatgcaagatggtatcttgtttgacacatcttgatagcgaaagacgagaaggtcgctgagacttacagacagaccacttggaagcccaaattcgatgttgagaaagagaaacaaaaggcagaagaggaagctgctggctctgcagatggtctcaagagctaccagaaggttgtattcgacctcttgaacaaggttgcagatttatctttcctaagtgcctacaagtctaagatcacggaactgattgagaaagccgagcaacaaccaaacttaaccattggtgtcctcgtcgccattgtggttgtattcttctcgctcttcctcaagcttatctttggtggcaaaaaggcggcggcacctgtggaaaagaagaaaccagaagtagcggagagttcaaagagtggggatgaggcggagaagaaggaagaaaccgcggcaccacgcaaaaggcaaccgagacgtgataattagaacaagattttaaagtagttttcgaagatgtgaaagaaaagttcagatttatttttctgtttttggttttgggttgaatgttgttttctgctgtagcctataatggtgtaacaccaagtttgagaaatttttgtctttgggcgaagaaaagaaaggaggaatatgtatgtgaagacggtttgttggcggccgcgaattcgatatcaagcttatcgataccgtcgacctcgaggggnnnnnnnnnnncctatgagggggatttt

SEQ ID NO: 89659 - DNA, 831 bp, Arabidopsis thaliana columbia
tgaaagtttagaaaccaggaccccgcgattttactgtaaaccccccaatttccaagcgcatgtcggggtattttggaggtttctggggtccaaatgccaaagatgggttttctttgttttgaccaaccttctttgataggcgaaaagacggagaagggttgcttgagccttaccagacaggccccttgggaagccccaaattcgatgttgagaaagagaacccaaaggcagaagaggaagctgctggctctgcagatggtctcaagagctaccagaagggttgtattcgacctcttgaacaaggttgcagatttatctttcctaagtgcctacaagtctaagatcacggaactgattgagaaagccgagcaacaaccaaacttaaccattggtgtcctcgtcgccattgtggttgtattcttctcgctcttcctcaagcttatctttggtggcaaaaaggcggcggcacctgtggaaaagaagaaaccagaagtagcggagagttcaaagagtggggatgaggcggagaagaaggaagaaaccgcggcaccacgcaaaaggcaaccgagacgtgataattagaacaagattttaaagtagttttcgaagatgtgaaagaaaagttcagatttatttttctgtttttggttttgggttgaatgttgttttctgctgtagcctataatggtgtaacaccaagtttgagaaatttttgtctttgggcaaagaaaaaaaaggaggaatatgcggccgcgaattcatgcagcacagggtccgctagttctagagcggccgccaccgcggtggagctccagcgggtgttccttttag

SEQ ID NO: 89660 - DNA, 492 bp, Arabidopsis thaliana columbia
agcccacgcgtccgcaaaacaaaaaaaagagcgtggctttatctatcatctggtatccactatccacaactggggtcagcttctggttctctctctcggtaactttctgagctgaagaaccctaattcttatcttcaccggattccgggtatagggctttgtaaagttgttgaatttacaaagaaagatatgctggtttgtctgggttttgtagaagaatctgtgttgttgctttgagattaaagtccgaacaatgttgggtttgattcatgtccttgatgagctcgtcaatggtcttatgccactgcttatcattcagtagtcaaaacccagatcctgaatcatcatcatcttctcttcttcgttataagccttgtgattcgatttcgttgtggggtaagagaaggaagaagctttggagatttgttcccagtgcggagaagaataacagtcatacgggtaataataataagaggagaagaagctggtggc

SEQ ID NO: 89661 - DNA, 421 bp, Arabidopsis thaliana columbia
ggaaaatcgagcttatagaagcaatcgtgcggcagcgttggatgcgtcagggaggttagaagaagcagttaaagaatgccttgaagctgtgagatgtgatccttcttacgctagagctcatcagagactcgcttctctttatctaagattgggagaagctgagaatgcgagacgtcatctttgtgtttccggacaatgtcccgatcaagctgatttgcagaggttgcagacgcttgagaagcatctcagactgtgtacggaggctcgagagatcggtgattggagaacggtgattagcgaaatcgatgcagccattgcaaatggagctgattcttctcctcagcttgtagcttgtaaagctgaagcctttttgcggcttcatcagataaaggattcagatttgtgtatatccagcattccg

SEQ ID NO: 89662 - DNA, 625 bp, Arabidopsis thaliana columbia
gtggattttagggaaaaaagagaattcgaacaaggtcgtcgccgtcgtcggatttgtagatcatcatggagttctctctgatcgcagatacagtcacagtttgcacggctaagcaaggtatcgcgtttgggaaatctcttcttcaaagggtggatttggccaatcacattcctttcgccgattccgttgttgatcatcaatctcccggtggaggaatcgttcaagcatcggcgattattttccccgtcgatgcaattgctcctccaccggtcagatctagctcttataagacaattcgccggatccgtaaaaagcgacgaaccaggcgagtttcgtttggtggagatggagatgacgcaggagattttggtcgttttctgttagaaggtgatttcggtggtagcgacggtccatttggatttggaggcggaggaaacgatggaggcggaaagggatggaactacggcggcggcggcggtggtttcgggagggataattgggatgggtcttcgttttcgtcttggtcagatccagcgatggaatttgtgtatgaagtgatttgctggatcgcgttgtctaattgtgtgcactttgcgttcaagaggatagtgaggatcgtgaccga

SEQ ID NO: 89663 - DNA, 563 bp, Arabidopsis thaliana columbia
ttttgaaacataagctcttcttgatacagaaaggactcgctttcaatggttaacgaaccaaaacagctagatctcaaggcaagaagtttcaagtctctgtggagcaagaagctactcggttactgggaaacttgggatgggctctgatgcaacgagacaactttgtggaagctgaagatgcatacagaagagctttatcaatagcaccagacaacaacaaaatgtgtaaccttggtatctgccttatgaagcaaggaaggatcgatgaggccaaagagactttacgacgtgtgaaacccgcggttgttgatggccctagaggcgtggattcacatctaaaagcttacgagagagcgcaacagatgctgaatgatcttggatctgagatgatgagaagaggaggagatgataaggttgaacaaagaaggctctttgatgcaatctttggatcttcctctatatggcaacctcagccttgtagtgagcagactgtgaaggctaaaccaaagcctggtttaagcaatggtgatggatacggtgatgagaacgtgaagatgagtgtg

SEQ ID NO: 89664 - DNA, 372 bp, Arabidopsis thaliana columbia
gaataatctagcgatggaagaagaggatgaaggagagattttccttggtgaatccgatgtcctccgtgaaatcgatgtcgacgaagaagatcttcctgaagcagatgatgatgatatggacgatgatggtgaacaatttgatgaaaacgatgactctgttcacacattcactggtcacaaaggtgagctttatgcattggcttgtagtccaacagatgctacacttgttgcaactggaggtggagatgataaagcatttctctggaaaattggtaatggagattgggctgctgagcttcctggtcacaaggactctgtctcttgtttagcttttagctatgatggacagttacttgcttctggaggattaga

SEQ ID NO: 89665 - DNA, 492 bp, Arabidopsis thaliana columbia
  unsure (1)..(492): unsure at all n locations
anccnaacnccttggtcacggngatgccanaccttaaccnggantgcgnatccaccccnggtcattgcggcncgnggaaggtggacacccctgacttggatgggaacctccaagtacttagccactggctgtgccaatggtacagtgagcatttgggacagcttattaggccaactgcgtccataccctaccatggtccacccaaggatgcggtccaggccatctcagtctctacccaacacggacttcattgtttcggtatctgtcgataacactgctagagtctttgagtcatctgagttccaaaacaaagtgacataggcaagtgaggagaatacttgcagatactatccagacatgttgctatctgtgttcgttgttgtggtcttaattctatgctttgtgggggaaaattttgacaagaaagttatcaatgtctaaaattccatatgtacacggcttaatttattgataaatgtagtctctgtttgg

SEQ ID NO: 89666 - DNA, 885 bp, Arabidopsis thaliana columbia
  unsure (1)..(885): unsure at all n locations
nnnnnnnnnnnnnnnnnnnnnnnnnnnnnnnnnnnnnnnnnnnnnnnnnnnnnnnnnnnnnnnnnnnnnccacgcgtccgatagatttagctccgtcccggagaaccatggcgtcgctttgctctgcgaggttccttccttctccatcgctcgatattttatctacgaagacgaagatatcctccgactcgcgctcgcttggttgctcttcgtcgcgtgtctttgctttctcttccgttcaccgttcttcttcgcgtcgcaatcggaatcagctgcaagttgtgtctatggctcctgaggaagaaaagctcactcgtcgtaatcctctcgatttcccaattgagtgggaaagacctaaacctgggaggaggcctgacattttccccaagtttagccctatgaagacaccattgccaccaccgatgccttatgatcctccggaagaggatgaagaagaggaagagaagaaagaagaggaagaagaaaacccagaccaagaagaagaggaacaacccgagaagcagcaatagatttttggttggagataagaacgaatgaaacatcgagagatatcgaagagcattttttgtttcaacttttgtagtgttttggaggagaagaagaagagtcaatcttttctcacatttagttgctagatttaatctcatactcgtgttcgtgtattatatctgtgtaatgccacagtttcagaagctatgttatcctttcgaaattcgaaccttctttgtgtaagtagacagagggtttaactaatctctctttctccttnnnnnnnnnnnnnnnnnnnnnnnnnnnnnnnnnnnnnnnnnnnnnnnnnnnnnnnnnnnnnnnnnnnnnnnnnnnnnnnnnnnnnnnnnnnnnnnn

SEQ ID NO: 89667 - DNA, 695 bp, Arabidopsis thaliana columbia
acaacatctttttcctcgttatcttcaacctaccctttgtcttaccttgagccggtctctctctttggctcgccaacacaagatagttaaatgaatggcttcaaagactgggttttcgcgctatccaactcaatggcatcatctagaccacttttgggaagtgaccctttttttccgtgaccctcatcaagaacaagataaccactctcaagcacctgccgcaccacaaccagtgacactctcggaaccaccatgttcaaccagtagtgatttagaaattctgcctcctctctctcagcaacaagttccacttgaaagcttgtaccagtcaagtattgatcttaacggaaagaaacataatccactagcaaagattggtggccttcaagtgcagttcttacgccttgttcaaaggtttgggcagtcacagaataatattctagtctccaaggttttgtatcgggtacatcttgcgatgctgatacgagctgaggaatcagaacttaagaatgtaaaacttaggcaagatagggccaaagctttagcaagggagcaagaatcatctggcataccggagcttgatttctcacttagaatccttgtcctggggaaaacaggtgtccgcaagagtgcaaccataaactctatttttggtcagcccaaaagtgagactgatgctttccgaccgggcacag

SEQ ID NO: 89668 - DNA, 951 bp, Arabidopsis thaliana columbia
  unsure (1)..(951): unsure at all n locations
nnnnnnnnnnnnnnnnnnnnnnnnnnnnnnnnnnnnnnnnnnnnnnnnnnnnacggaacgcgcgagacgacccacgcccccgtacggcggcgagatgacgacagaagggggagccatttaaatctgattcatatcaaaaaattttcgatttaaaaaaaaaaccctcaaaaggtgttgatacggaaaaagaaaagggaaagaagaagagaatggatctagaatcggtgaaaaagtatctggaaggagatgaagacgaaaaggccaaggaaccaatggtggcgaaattaccacacagattcctcgaacgattcgtaaccaatggtcttaaagtggatctcatcgaacctggccgtatcgtctgctccatgaaaatccctcctcatctcctgaacgcagggaaattcttacacggaggagcaacggcgacgctggtggatttgataggatcagcagtgatctacacagccggagcttcacattccggagtttcagtggagatcaatgtttcataccttgatgctgcttttctcgatgaagagatagaggtagaatcaaaggcattgcgtgttggtaaagctgtagcagtagtgagtgtggagctgaggaagaagacgactggtaagattattgctcaaggtcgtcataccaagtactttgctcctcgttccaacctttgatcgttcaaccaacctttcttcttttttacattcaataaacaacatcaaggtgtttttagtctttgtcccatttgcttcttattattattgatactaataaaactacattactatatgtttttctaataatacaaacaaccttactttttctcaaaaaaaaaaaaaaaaaaaaaaaaaaaacccaaccccaaagggcggccgctctagaggatccaagcttacgtacgcgtgcatgcgacgtcatannnnnnnnnnnnnnnnnnnnnnnnnnnnn

SEQ ID NO: 89669 - DNA, 503 bp, Arabidopsis thaliana columbia
  unsure (1)..(503): unsure at all n locations
cnccacccncngtgatgggttcggngtcgtaaccccaaaacctggccccagnacccaacgggnnccccccctnanccccggctgccaaacctgggnccacnccaaaaggaaaagccctgctncngttgnccaatcttgtaaagcgggtctactcgacacgtcaaaagcgcttggaagnaaagtngcaatcgttaacatcgtcttcccttgtcttcctcatccattgtctactctgttggttcctgtgctttccaggaacaacaagagggatgaccagttattccccgtacctacggatataagccttgaacatagtttatcgggttttaggacagagattcgttgatacattgttggagtttggttttatgtttgatgatttttatctttggtgttttgatgagacctattgcttgtacagctcacttatgagactattatcagtatgttctgccttttgggctaaaccttgatattgatttattatatgcttttattagttt

SEQ ID NO: 89670 - DNA, 304 bp, Arabidopsis thaliana columbia
cttgcctaacgtttgcaaaatccctaccgttggatcctgccagttcaaggcatctccttactaggaccatgaagaggaccaaactataaaagcacacacgtacacatggtggttttgttaatgataataaaaagtctctctcttgtggcgtgttcgtgtttgtatagtagataaatgtttgtactgtatgagttagagtcttagtggcaatattacaccttctagtgtaatgtaacttgccctacccccttaaataaaagatgttcttgggtattcaaaaaaaaataaaaaaaaaaaattatat

SEQ ID NO: 89671 - DNA, 725 bp, Arabidopsis thaliana columbia
  unsure (1)..(725): unsure at all n locations
acccacgcgcgctcgccaaaaaccttgaaacctttaaaaaatcgaaactatggctaagctcattctcgttttcgcaactcttgccctcttcatcctcctagccaacgcatccatctaccgcacagtggtggagttcgaggaagatgatgacgtgagcaacccacaacaaggtaagtgccagagggagtttatgaagcatcagcaactaagaggttgcaagcaatggatccgcaagagagctcaacaaggaagaatcggatacgaagctgatgactttgagctcactcttgatgtcgatcttgaggacgatgagaacccaatggggcctcaacaacagtcatctcttaaaatgtgttgtaatgaattaaggcaagtggacaagatgtgtgtgtgtcctacactgaaaaaggcggctcaacaagtcagattccagggaatgcatggacagcaacaggtgcaacatgtgtttcagactgctaagaacttgcctaacgtttgcaaaatccctaccgttggatcctgctagttcaaggcatctccttactaggaccatgagggggcccaaactataaaagcacacacgtncacatggtggtnttnttaatgataataaaaagtctcactcttgtggcgtgtnngatgattnnatagtaggtaaatnttttgtacttgtatgagtttagnngcctttaggtgggcaattttttaccaaccttcttaggtgg

SEQ ID NO: 89672 - DNA, 636 bp, Arabidopsis thaliana columbia
aacaccatggataagacagcgacattgtgtctcttgttcttgttcacattcctcacgacctgggggtctaaagatctctgtaaccaaaatgacaaaaacaccctcctcaagatcaagaaatctctaaacaacccttatcacctcgcttcatgggaccctcaaaccgactgttgctcctggtactgccttgagtgcggcgacgccaccgttaaccaccgtgttaccgccttaaccatattctccggccagatctccggtcagatcccggctgaagtcggtgacttgccgtatcttgagacccttgtcttccgcaaactctctaacctcaccggtacaatccaacccaccatcgccaaactcaagaacctccgaatgctcaggctcagctggacgaatctgacaggtccaattcctgactttataagtcagctcaagaatctcgagttcttagaactttccttcaatgatctctctggttccattccaagttctctctctacgttacctaaaatcttggctcttgaacttagcaggaacaaacttacaggttccataccagagtcatttgggtcgtttccaggaacagtccctgaccttcgcctatcacataaccagctctccggtccaatacccaaa

SEQ ID NO: 89673 - DNA, 614 bp, Arabidopsis thaliana columbia
  unsure (1)..(614): unsure at all n locations
catggntaagacagcgacattgtgtctcttgttctngttcacatncctcacgacctgtttgtctaaagatctctgtaaccaaaatgacaaaaacaccctcctcaagatcaagaaatctctaaacaacccttatcacctcgcttcatgggaccctcaagaaccgccgaatgctcaggctcagctggacgaatctgacaggtccaattcctgactttataagtcagcgcaagggtctcgagttcttagaactttccttcaatgatctctctggttccattccaagttctctctctacgttacctaaaatcttggctcttgaacttagcaggaacaaacttacaaggttccataccagagtcattttggggtcgtttccagggacaagtccctgaccttcgccgtatcacataaccagctcttccggtccaatacccaaatcattaggcaacatcggctttaaccgggtcggtttttcccgcaacaagctccaaggtgatgcttcgatgttgtttggttccaacaaaacaacctggtctattgacttatcaagaaacatgttccagttcgatatctcaaaggttgatatccctaaaacacttggtatcttggacttg

SEQ ID NO: 89674 - DNA, 471 bp, Arabidopsis thaliana columbia
  unsure (1)..(471): unsure at all n locations
ctcacttattaggggaaagctcggtacccncttgcagggtaccggggtccgggaatttcccggggtcggacccacggcgtccgcccaaaacacacataaaaagatcaggaaaatgagttccttacaaccactttctgtgcacagtaccaactccaaagtcataacagagaagagaaaatcggtgacaacccttacaaatggtagtcgtcatctagagagcaagcctaagattcatgatgtcgacaaatgcgccgaagctttcatccaaaacttccggcgacaactttctcttcagtgcgataacatcctccctagaggagctctctgatatattccacttacagaaaaaatagatgtctcatgtcacgtgtttcagataacatatgttacttatctctctaagcttcttaggcgatttcaattgtattataaggtttcttactatcatataaccacatgttttagaagcat

SEQ ID NO: 89675 - DNA, 1106 bp, Arabidopsis thaliana columbia
  unsure (1)..(1106): unsure at all n locations
agatttttcaggtacaaacgactcactttagggaaagctgctacgcctgcaggtaccggtccggaattcccgggtcgacccacgcgtccggatgctcacaaagcagggctaaaactatatgcgtcaggttttgcaaatgatgttgatattgcatataactacagttgggatccagtttctgaatatctatcttttgttgacaatggcaatttttctgttgatggtatgctctctgattttcctttaactgcatctgcatctgttggtaagaaaattatcttctacagacaaaatattatttcttaatacattactgtgtaatactcaaaatcaaacattttatttttgtatttcttcagactgcttctcccacattggcagaaacgctacaaaacaagtggattttcttgttatatcaaaaaatggtgcaagtggggagtatcctggatgtacaaaattggcatatgagaaggcaatcaaagatggttctgatgttatcgattgctcggtccaattgtccagcgatggtacacccttttgcttaagttcgatcgatctcgggaacagcacgacggtctccctaactgctttcagaaaccgttcaacaactgttcctgagttgggctcacttggtgcaatatacactttcagtctcacatgggctgagatccagaccttgactcctgctatttcaaacccctacagagtaaccagcctgtttaggaatccaaaacagaaaaatgctgggaagcttttctcactttctgatttcctaagcttggcaaaaaactccacctctctctccggtgttttgatcagtgtagagaatgcggcatacctgagagaggagcaagggctcgacgttgtcaaagcagttcttgatacactcacacagactggctacagcaatagtacagccacaaaggtcatgattcaatcaacaaacaactcggttctaggtgacttcaagaagcaaaaccagtacgagactgtctacaaaagtgaagaaaacatccgtgatattctcgactctgctattgaagacatanagaaattcgctgatgctgttgtgatccaaaaattatcagtctttcctgtcgctcagt

SEQ ID NO: 89676 - DNA, 430 bp, Arabidopsis thaliana columbia
ctcttgtttatcacaaaggtcgagctcctcgtggcgaaagaaccaattgggttatgcatgagtatcggttggttgatcaagaccttgataaaactggtgttcaccaagatgcgtttgtgctttgtaggatttttcagaagagtggctccggacctaaaaatggagagcagtacggtgctccgtttgttgaggaggagtgggaggaggaggatgatatgacatttgtacctgaccaagaagatcttggaagtgaagatcatgtttatgtccatatggatgacattgatcagaagtctgaaaactttgtggtctatgatgccattcctattccgttaaactttattcacggggagtcgagcaataatgttgaaacaaactactcagactccataaactatatacaacaaacaggaaactatatggactctgg

SEQ ID NO: 89677 - DNA, 366 bp, Arabidopsis thaliana columbia
gagcaacagaagaagaaccggagacgatgacaaaggattgctctggaaacttccccaagttaggatcagagacattggaaaagttggtccagcttttggactcggtgtcggttgcggatttggtttcggcgccggtcttatcggaggtgtacgattcggaccaggagttcctggattacaatttggtcttggatttggagctggttgtggaattggtgtaggttttggctatggtgttgggagaggagctgcttatgatcactctcgttcttattacaacgttggaaaaccatctctgaatgaagttgattcactgattgatgaacttgttgttagcacgaagaagcttgtgaaagctactacaaa

SEQ ID NO: 89678 - DNA, 450 bp, Arabidopsis thaliana columbia
ttgctatggcgttaccaccattgtctattcgcggggatcttggtgttctctccacagctgctgctagatatgctccttcgcttttaaaatcttttatcaaaatgggtcctaaaggagcgttgggagcgacaaaacttctccgcccgttctcggagatcgttgattctttggagttaaaagacccgtttatacgaaactggattgatcttctcgcattcctgctcgcaggggtcaaatctgatggcatactttcagcagagatggtagccacttatgttaactgtatcctttattccacaacatgtctaacatggaaaaaagaaacaagattatcatacttttggtgcaaaagatcggtttaaaatgaagtctttgtttcttatgtgtgcagatctacatgtctgcagaatggtacaagccaggctgcacattggagtaccctattgatgg

SEQ ID NO: 89679 - DNA, 597 bp, Arabidopsis thaliana columbia
  unsure (1)..(597): unsure at all n locations
cnnnnnnnnnnnnnnnnnnnnnnnnnnnnnnnnnnncggacgcgtgggttcttcttcttcttcttcttcgccacccggcgagtgctgcgtaaaaatgggtaatacgtattgtatcttaggaggttgtattgaacaagctagcgttggtgtggtcgaacgttggggtcgattcgagcatatagctgaaccgggatgtcatttcttcaaccctctcgccggtcaatggctcgccggagttctctccactaggatcaaatctcttgatgtcaaaattgaaaccaaaactaaggataatgtgtttgtgcagctggtttgttcgattcagtatcgtgtagtgaaagctagtgctgatgatgcgttttatgagcttcaaaaccctaaagagcagatccaagcttatgtctttgatgtggttagggctttggtcccaatgatgacgcttgatgctctttttgaacaaaagggtgaagttgccaagtctgttcttgaggagcttgagaaggtgatgggtgcttatggatacagcattgagcacattctaatggttgacattattcctgatccctctgtacgcaaggcaatgaacgaaatcaatgc

SEQ ID NO: 89680 - DNA, 610 bp, Arabidopsis thaliana columbia
  unsure (1)..(610): unsure at all n locations
cacgcgtccgagtaaaatatacgaagtaaaataaatggtcccaagtatatgaatgaatacatgtatttacagatatctctctcccctatctccttatgatttgtcattttcctcacccataatcctataaaataatcaagaacctccgagggagagagacatacacacagacagagtaagacatatataacatatatagagagagaagacctaaacaaagagacatatggtgtctttaggttactgcttgaaggagaagaagacatgcgtgagatgggtagagatatacttcgatgactgtctctgtaacttaaacgacgacgtttcattcgcacttggaatcgctagcctcctctgttggggagtcgcagagattcctcaggtcatcactaacttccgtacaaagtcaagtaacggtgtctctctctccttcctcctcgcttnggtcgccggtgatatcttcaatctcgtcggttgtcttcttgaaccagctactttgccgactcaagttctacaacagccttgctttacanagtgggcactntagtnttggggtnccaggctatttcnngnggttnaattacaancttttnngncanggcgtcccaag

SEQ ID NO: 89681 - DNA, 1249 bp, Arabidopsis thaliana columbia
  unsure (1)..(1249): unsure at all n locations
atgannnnnnnnnnncgcgtccgaacaacactgttcaaaacatctacacttcacttgacattcatttaggacagtcttactctgttcttgtgacggctaaccaagctcctcaagactattacatcgtcatctcctcgaggttcacgcggaaagtccttacaacgacttcgattctccattacagtaactcgagaaaaggcgtatctggccctgttccaaatggtcctactttggacatcgcatcttcactctaccaagctcgaactatccggagaaatcttacagcgagtggtccgagaccgaatccgcaaggctcgtatcattacggtttgatcaaaccaggccgtacgatcatactcgccaactcagctccttggatcaacggcaagcaaaggtacgccgtgaacggtgcctcgtttgttgcgcctgacacaccattgaagctcgccgattacttcaagattcccggagtttttaacctcggaagcatcccaacgagtccctctggtggaaacggagggtatcttcaaagctctgttatggccgctaactttagagaattcatcgaggttgttttccaaaactgggaaaattcagtccagtctttggcacgtctccggttaactctttcttcgtcgtcggtatggatggaggacaatggactcccggaagccgagcaaagtacaacctgcgggacggggtttcacggtccaccggtcaagtatatccgtggccatggacagcgtcttacctagcgttggataatgttgggatgtggaacataaggtcggagaattgggcaagacagtatttggggcaacaattctatcttcgagtttacacttcctctacttcgtaccgagatgaatatccaccaccaaagaacgctcttatgtgcggacgagctaaaggccgccacactaggccattctaaaagggatattggacgcaacggctcaactgttttttttttctttgtttttttagattgaatgatttgaaatgtttagtattgtcacgagagggtggcaaagagatgtgagcttcgtggatttattcactacggcacaaaaattaggaacaagaaaaatttggagcttgacttgagctttcaacttagtttttatgacgaaatcaaatgttgtgttcttattttaaaaaaaaaaaaaaaagnnnnnnnnnnnnnnnnnnnnnnnnnnnnnnnnnnnnnnnnnnnnnnnnnnnnnnnnnnnnnnnnnnnnnnnnnnnn

SEQ ID NO: 89682 - DNA, 712 bp, Arabidopsis thaliana columbia
  unsure (1)..(712): unsure at all n locations
nnnnnnnnnnnnnnnnnnnnnnnnnnnnnnnnnnnnnnnnnnnnnnnnnnnnnnnnnnnnnnnnnnnnnccacgcgtccgctagtcttgtcttctattatgcaaaaggtcttcttggccatggatacttgtgctctagtaatccatcagtctctgtctcgcatcaaactttctcctcccaaatcttcttcttcttcttcttctgctttctcccctgaatccttaccgatcagacggatcgagctgtgtttccgaggagctatatgtgccgccgtacaaagaaactacgaagaaacgacctcctccgtggaagaggcagaggaagatgatgagtcatcatcatcgtacggagaagtgaacaagatcattggaagccgaacggcgggggaaggagccatggagtaccttatcgagtggaaggacggccattctccgtcgtgggttccatcgagctacatcgcagcagacgtagtgtcggagtacgagacaccctggtggacggcagctagaaaagccgacgagcaggccctgtcacagctcctggaggaccgagacgtcgatgccgtggacgaaaacggccggacggctcttcttttcgtggcaggtcttgggtcggacaantgcgtaaaggtttttgcggaggcttgagccgtttttgccacccggaaaataaggggaggntttacggcctttnanatnggggntngttacnt

SEQ ID NO: 89683 - DNA, 629 bp, Arabidopsis thaliana columbia
  unsure (1)..(629): unsure at all n locations
nnnnnnnnnnnnnnnnnnnnnnnnnnnnnnnnnnnnnnnnnnnnnnnnnnnnnnnnnnnnnnnnnnnnccacgcgtccggtttctaagtctctcgtccttttcttttaaccacactccttgcttgagattcaatcgaaaactgaaattcgcaagcctccactgctcgccgtcgcactcatcggaatattccattggcaccgtactaccctgaaatcatctcatcagatcaaaacgggagtttaactagaattgcgtggattaatggggaagaagcagagcgagatatctgcaatggagatcgacgatccgaaatctgaaagctcggatcagatccttccaaggttctcgatcaatgttctgcagctgatgaaatcttctcaggcgcaacatggtctgcgtcatggtgactatgctcgctatcggaggtattgctccgcacgtttgaggaggttatacaagtccttgaaattcactcatggccgtggaaaatacactcgacgagccattcttgaatcaactgtcactgatgttaggttccttcatgtggttttctatatggcggaaagagcatggagccatgcaatggaaaaaagacagctaccagttggtcctaatgcacggcagcgga

SEQ ID NO: 89684 - DNA, 478 bp, Arabidopsis thaliana columbia
  unsure (1)..(478): unsure at all n locations
nnnnnnnnnnnnnnnnnnnnnnnnnnnnnnnnnnnnnnnnnnnnnnnnnnnnnnnnnnnnnnnnnnnnnnnnnnnnnccacgcgtccgcgaactcaaatcttcaatcttcatcttactctctaattgctttcctattccgatctctgtttcttcataaagtctcaatcttttttttctctatggccggaactaaagattctcatgtagtggagattccagtagatgaagagcataaagagagacaacaacaacaacagttggttgcggtctcaaatccgggaatgggaatactcaaagtgattcagcagcatccgttgtctgaaatctcagagagtccaggacatttgttgcttttgaagttatggcaaagagaagaagatttgttctgtcgtcgtgttcttcttaaagaatcaagactagagtcaatcaaaagagagatctttcagctttgttgtttcttcctagtcttccatgggt

SEQ ID NO: 89685 - DNA, 558 bp, Arabidopsis thaliana columbia
  unsure (1)..(558): unsure at all n locations
nnnnnnnnnnnnnnnnnnnnnnnnnnnnnnnnnnnnnnnnnnnnnnnnnnnnnnnnnnnnnnnnccacgcgtccgatatatggcaaaagaggcctcctttggaattctttgcgatgatccaaggaagagttttggcacgtgatctatttgtagcttatgcacggtgtcataagcatgaatttctgaaggatttcttcttatctacgggccagattcatgaggtagcttttcttttatggaaagaatcatgggatatggggaaaaacccaatggctagcaaaggatctccattgcacggtccgcgcataaaactaatagagaaggctagaaaccttttctcccaaacaaaggaacacactttcgagtctaaggctgctgaggaacatgcaaaactcctgaagatacaacatgagctagaagctagtacgaagcaggctttctttgttgattcaagcatcaatgatactatacccacatgttttgtcctgggtataacccgggctgcaataaaagtgaagacagaattcaagggcagtgataaaagatggtgttggctta

SEQ ID NO: 89686 - DNA, 599 bp, Arabidopsis thaliana columbia
cggccgaaatcccggtgggcgacgcgtccgcggcgatattcttcttcttcggctcacattgcatcgtctctcactcgatccttcgttctttcagggacaatcatttcggaaacatgccaggtcagaagattgaaacgggtcatgaggacattgtccatgatgtgcagatggattactatggaaagcgaattgcaactgcatcatctgactgcaccatcaagataaccggtgtcagcaacaacggtggatcgcagcaactagccacattaaccggccaccgtggtcctgtctgggaagtcgcgtgggcacacccaaagtatggatcaatccttgcttcatgctcctatgatggtcaagtcatactctggaaagaaggcaaccagaaccaatggacccaagatcatgttttcacagaccacaaatcttcagtcaactccattgcatgggctcctcatgatatcggactatccttggcctgcgggtcatctgatggcaacatttcggttttcacagcccgtgctgacggtggctgggacacatcaaggattgaccaagcacatccggttggagtcacttcagtctcatgggccccagccaca

SEQ ID NO: 89687 - DNA, 770 bp, Arabidopsis thaliana columbia
gcttgttgcaccgtcttccgtctcctcctctttccctctctctctctctccaaaccagtcctacttctctctctagaaacctagggaagaagaagaagacggtgaagcgagcgatgtcttcggacgacgaaggaagagaggagtatctcttcaagattgttgttatcggcgactctgccgtcggtaaatctaatcttctatctcgttacgcacgtaacgagttcagcgctaactccaaggcgacgatcggagtcgagtttcagacgcagagcatggagattgaaggtaaagaggtcaaggctcagatttgggacactgctggtcaggagcgtttccgtgccgtcacttccgcttattaccgtggcgctgtcggtgccctcgtcgtttacgacattacccgccgcaccactttcgaaagcgttggacgttggctcgatgagcttaagatccattcggatacgacggtggcgagaatgctggtggggaacaagtgtgatctagaaaacataagagcagtgagcgtggaggaaggaaaggctctagccgaagaggaaggactcttctttgtggaaacatcggctcttgattcgactaatgttaaaacagctttcgagatggtgatacttgatatctacaataacgtgagccgtaagcaactcaactcagatacttataaagacgaactcaccgtgaatcgggtaagtcttgttaaggatgataactctgcctccaaacaaagctctggtttctcttgttgttcttccacttga

SEQ ID NO: 89688 - DNA, 1169 bp, Arabidopsis thaliana columbia
aacgactcacgttagggaaagcacgtcacgcctgcaggtaccggtccggaatacccggttcgacccacgcgtccgactatggtatctgaaaatgaaattgatgcaccttatgcagattggaattgttcgtgtctttgagcaccaaggtattgaagctcctagtgacgatgatgattttattgaggtaagatcaacaacgcaaatgcttaatgatcgccgtgaacagagagaaaaggaaattaaagagaagtctcaggcagccaaggcattccgaaaacctcgttcaactttccagaacaatactactgcagccaggtccaacagaagcccaccagctagccgagctgcgaacaataagcagtttaatccagtctccaacagacagacgttagccccaattggcacaccttcacctaaaatagattcccatgttgatgaaaaatctgggagcaacaagtccactcaggcaagtagtgctcttccagttatacccaaaaatgatcagaatccagcgtcaggttttgtattcagcaacaaaaataaggttctcgataacagtcatacacctgtggggacttggggtaaccaactcacctatcagccggttatggccctaacccagagtcagcttgatgaagccatgaaacccgtatctcatctttcatgtgtttctgttgagaatggtgccaaccgaattagcgagtcaaattcgacatcaacgtctgttgtgccaaagaacaatactttttcaagcagcacaagtccaataaattcattgcttgctgagggcaaaattcaatttggtgcagttacatcttccactgttatccctccctgtggtgggcgtacagagaaggatagctctttatattttgaaaaagataacaaacatcgaaatccatcatccactggcatagagatttgtgaagcagaagcagaagctgctgcttcagctattgctgtggcagccataactaatgatgaaaccagtgggaatgccttgagtactggctctgtattacctgttgaaaccaaaatttatggaggaacagagttagatgatggggcagcaagtggtactgttggtgggcagactagtcgatcaaaagctgaggaatctctcattgtttctctaccagcagatctttcagtggacaccccaatctctc

SEQ ID NO: 89689 - DNA, 563 bp, Arabidopsis thaliana columbia
  unsure (1)..(563): unsure at all n locations
acgcgcacnnnnnnnnnnnnnnnnnnnnnnnnnnnnnnnnnnnnnnnnnnnnnnnnnnnnnnnnnnnnnnnnnnnnnccacgcgtccgctctcttatgtctacttcccagaaaaatttctgcttttgaaattcaagatgtactcgtcgtcggcctcttcttctatttttcttcaatttccaccggcgagaataaccaccgcgtctccatttatactccgccgtagcaggaagcgaggagctcgttttaaacgacagagtcggaatttagttcttgtgaattcgtcaattttccctccgcctttcgatggcagcgttcctctcgattcctccttagctccatctctcgccggaatcgcttccggcttagccgtttatttatcgtcgaggttttttggaaagtctttggagaagattagtgataaaatcgctgatgatgttgttgttggggaatggattcttttcaccactccgacgccgtttaacagatgtgctcttcttcgttgatctttgctctcctttgatgatgactctgagaagagtttaagcgatagacttgtcacag

SEQ ID NO: 89690 - DNA, 481 bp, Arabidopsis thaliana columbia
ttgtgtcaacagcgatcatgttatgcttcctttggttcagctattgcatgatccatcttcctctgtccaggttgcagttcttggtgctctgaacaatatagtaatggatttttcatcaccgaagtcatcatttatcgagtatggagggataaaacagcttactgagttgtcaaaatcaatggatccaaatactcggtgtagcgctttgcgggctttaaggaacctcatgttccttgccgacattaaacgtaaagaactcttttattcagacgttaaggctcaaggacttgcttgtctcattagtgatcctgagcccccagtgcaagagcaagctttggccctcctccgtaatcttgttgatggatgtatcagctctatcgagtttgtatttgatgaagatggtcttatcttagatactgttgggaggcaattgaggaaagctccacaggcacaaatggcaatacagggaatgtatgtgctc

SEQ ID NO: 89691 - DNA, 888 bp, Arabidopsis thaliana columbia
  unsure (1)..(888): unsure at all n locations
nnnnnnnnnnnnnnnnnnnnnnnnnnnnnnnnnnnnnnnnnnnnnnnnnnnnnnnnnnnnnnnnnccacgcgtccgcccacgcgtccgtacggctgcgagaaacgacagaagggggagaacaactaagttaaagggaaagcaaaaatgggctgcatcggtgttgtgaatgtaacaagcataaatccatatctcacaagaagatcaaacaaaccctacaattcaagaagaccatcatccatggctgctgcgattagagctgagtctactgagaaattagggattacaattgaaaagaatcctcctgagtccaaactaacccaactcggtgttcgtagttggcccaagtggggttgtcctccaagcaagtttccatggacttacagtgcaaaggagacttgttatttactacaaggaaagtgaaagtgtaccctaatggatccgatgaaggcgtagagatcgaagcaggcgactttgttgttttccctaaaggaatgagttgcacttgggatgtctctgttgctgttgataaacattaccaattcgagtgaatggctgctatcaatctctgctctacgtattcgtgtattcgataggacttgaccatctttgtatgttgatggatacttactttaagcttgtgtgaagttttttactttagtggaaataaaggagtcatatatggacgcattatctcattcaacaccaaagtcattcgaagttcgatacaataacatgtatagtgtttactgtcgaaaagtaaataattgataatagaagtgatattcccgtnnnnnnnnnnnnnnnnnnnnnnnnnnnnnnnnnnnnnnnnnnnnnnnnnnnnnnnnnnnnnnnnnnnnnnnnnnnnnnnnnnnnnnnnnnnnnnnnnn

SEQ ID NO: 89692 - DNA, 746 bp, Arabidopsis thaliana columbia
aaaaaaagtcactgaagatttattagactctcttcttcttcttcctccttggcgcaggttcgcaatttcgcaatcgcatcagtcaattatcgaatcgtcctcccagagattaccggagaaaatgaggattgatgagaacgaaggtgtctctgcttcaagcaagcacctagtcttcgcttactacgtcactggacatgggttcggtcacgccactcgagtcgtcgagggtgtccgtcacctgatcgcggcggggcatgatgttcatgttgtcaccggcgcgcctgattttgtcttcacatctgaaattcagtctccgaggctcaaaattcgaaagggtcttttggattgtggggctgtacaagctgatgcattgaccgctgatcgtcttgcctcgttagaaaagtatgtggaaacagctgtggttcctcgagctgaaatattggaaactgaagtggagtggcttcattctatcaaagctgattttgtggtgtctgatgttgtccctgtcgcatgccgtgctgcggctgatgctgggatacgttctgtttgtgtcaccaatttcagctgggattttatctatgctgagtacgtgatggctgctggatatcaccatcgctccatcgtttggcagatagctgaagattattctcattgcgagttcctaattcgcctcccaggatattgtccaatgcctgcttttcgtgatgtcatcgatgtaccgttagttgtgaggagacttcacaaat

SEQ ID NO: 89693 - DNA, 535 bp, Arabidopsis thaliana columbia
  unsure (1)..(535): unsure at all n locations
cnnnnnnnnnnnnnnnnnnnnnnnnnnnnnnnnnnnnnnnctcagaatagaaatcgtccaagattcgacgaccacgcgtccgcaaagaagaagagaagtgtatgtttttgccactcgttttgttactttcttttgatattttgttttaggtgttcacataaatttgatagtgtaaagaaaacaaaaccactttctagttcttaaagaaactagaaatccatggacccgtctcgtcatactcatgtgatgctcgtatctttccccggccaaggtcacgtaaaccctctacttcgtctcggaaagctcatagcctctaaaggcttactcgtcacctttgtcaccacagagaagccatggggcaagaagatgcgtcaagccaacaagattcaagacggtgtgctcaaaccggtcggtctaggtttcatccggtttgagttcttctctgacggcttcgccgacgacgatgaaaaaagattcgacttcgatgccttccgaccacaccttgaagctgtcggaaaacaagagatcaagaatc

SEQ ID NO: 89694 - DNA, 564 bp, Arabidopsis thaliana columbia
  unsure (1)..(564): unsure at all n locations
gccggcactaatacgactcacttagggaaagccggtacgcctgcaggtaccggtccggaattccttcttctagatcgagaggcgcatgggtcttaccagccgccgttgacgactacgacgaccattctcttcctcttcatcttctctccttctgcttttctctatttcctattctctccaaattcaccatttccttccaccactcagagatctccctttcttattagctatgtcttcttctaacacgccatcttctagcgccgccgctgccggatcgatagattcttccgccgcccggagaaattccaagagacccaagtattcgaaatttactcagcaggagcttcctgcttgcaaaccaattcttacgcctggttgggtgatttcaacgtttttgatcattagtgttatcttcattccccttggtgttatttctctctttgcttctcaggatgttgttgagatcgttgatcggtatgatagtgcatgcataccctatctgatagggcaacaaggtgaancatnaaggactggaaaaaanttgacccgncggaaattgtnttc

SEQ ID NO: 89695 - DNA, 711 bp, Arabidopsis thaliana columbia
  unsure (1)..(711): unsure at all n locations
gtatttttagtagaaatacttatttttccaaaaatatttgtttgtgttgatgtatatataaaaaatctgcatcagtgttttgtctacattttctcttccattagtttcgttatctttttattttctctatctatctggatattattttttcacttggggatttggagaaacctctcctctctctatctatagccatggctgctttcacttgtacctctcgtcctccgatttctctccgctccgagaccagaatcgtatcctcatcaccatcggcttctcctctctcttctcggcggatgttcgccgtcttaccggaatcatcaggtttgagaatccgtctttctctctctccggcttcgttgacctcgattcatcaacctagggtttctcgattacgaagagccgtcgtctgtgaagctcaggaaacgactacccgatattcaagtggtcaatgactccgacatggggactctctaagttcttaaaagcaaactggggcctggtaagttggtcgaccccaacggcgtcccgtgnntgcctccgggtcaaagggnncctaattaaacccggaaacggaaagcttggaaaaaaatcntcctaaacccccggaaaatggggnnnaaactcaaaaccaaaaacancanccaatnaannccggnnaaagnanggggggccccnaaaaggnaanccaaaaaaancaagggttccntt

SEQ ID NO: 89696 - DNA, 996 bp, Arabidopsis thaliana columbia
  unsure (1)..(996): unsure at all n locations
agccgtattggtgcttgcatggcttggatgggggggtagaattcgcgggnatactatacgactcactatagggaaagctggtacgcctgcaggtacccggcccggaattcccgggtcgacccaggcgtccgatctttttattttctctatctatctggatattattttttcacttggggatttggagaaacctctcctctctctatctatagccatggctgctttcacttgtacctctcgtcctccgatttctctccgctccgagaccagaatcgtatcctcatcaccatcggcttcttctctctcttctcggcggatgttcgccgtcttaccggaatcatcaggtttgagaatccgtctttctctctctccggcttcgttgacctcgattcatcaacctagggtttctcgattacgaagagccgtcgtctgtgaagctcaggaaactactaccgatattcaagtggtcaatgactcgacatgggactctctagttcttaaagcaactgggcctgtagttgtcgacttttgggcaccatggtgtggaccttgcaagatgattgatccgcttgtaaacgatctagcacagcattacactgggaagatcaagttctacaaattaaacactgatgaatctcctaatactcccggccagtacggagttagaagcatcccaacgatcatgatctttgtcggtggcgagaagaaggatacaatcataggtgcagtgcccaaaaccacactcacatctagcctcgacaagttcttgccatgaaatatcacttgtggagtctgtaagatctcgtatctctctgtctctcgttcttgttctcattatctctgtaactcattatcactgaacatctagacctggataaataatatgatgtcatgtcttatgtcaaaaaaaaaaaaaaaagcnnnnnnnnnnnnnnnnnnnnnnnnnnnnnnnnnnnnnnnnnnnnnnnnnnnnnnnnnnnnnnnnnnnnnnnnnna

SEQ ID NO: 89697 - DNA, 512 bp, Arabidopsis thaliana columbia
  unsure (1)..(512): unsure at all n locations
nnnnnnnnnnnnnnnnnnnnnnnnnnnnnnnnnnnnnnnnnnnnnnnnnnnnnnnnnnnnnnnnnnnnnnnnnnnnccacgcgtccggataccttcgccggagaagaagctctcgttctctctatcgtcggagaagctctcgttctctgcttccctgctctgtacagatctcgagccgcatttcgtggatctgtcaaaatcgcgttaaaacctactcgcttctctctaaccctagggtttttgaatttttttcgggacgagggagaaatcaatgtctgtgaagctttgaggaagctatatggttacacctttggttctggttagtcttcgttttgatcggcggagagtgttcgccgaggcttggtgtctccgttattgactaatggtggtttttgatttgagataagagatgcggaactttgcgatgcttctgctgttaattcttcttcttcactctctcgcctcgtttcctatatgctttgctcggttatttccgatgagtttgccattta

SEQ ID NO: 89698 - DNA, 564 bp, Arabidopsis thaliana columbia
  unsure (1)..(564): unsure at all n locations
aattaactggtgagagagttcaacatccaatctttctctctctctctctatcttttatctctcacactcttaaaatgcttcttctatctccgatctctgcctctcttccaccgtcgtttcaccggggtaatttgatccggcgatcaattaagccgttaggtagggttgttgcaaaggccaaggacaacaccgacactggtggatttctggagacggcagctatagccggtggtttagtgtcgacgacggttattggatggtcactctacactttgaagaccacgggatgtggcttanctnccggaccggccggnttaatcggagcgttggaaggtgtgagctacttggtggtggttggcaatcgttgggttgggcttttntacactaaaaccaaaaaacttgggtcaagntttnccaaaatgggccattttgggttttttgggtccggccnaggggttnttcgaatttttcggntntaagcccatttttttgggntttggaattaanttttngnaaaaggggcngttccagggccctttctngnnccngttttttggnaccccg

SEQ ID NO: 89699 - DNA, 765 bp, Arabidopsis thaliana columbia
  unsure (1)..(765): unsure at all n locations
nnnnnnnnnnnnnnnnnnnnnnnnnnnnnnnnnnnnnnnnnnnnnnnnnnnnnnnnnnnnnnnnnnngccacgcgtccggagacgtcgtcgtcttctagcttctgattaagtctgataaattatgcccctaaatctgtaattctccaaggattcggattcgatcgatgaaagcttctcaaattttggcggctgcagcggcgagggttggaccggcgttaaggaagcaagtattaaccttaacggacgaagctgcttctagggttcatcatctcttgcaacagcgtcaaaaaccttttctccgattaggcgttaaggctcgtggctgcaacggcttgtcgtacactctcaattacgccgatgagaaaggtaaatttgacgagttggtagaagagaaaggtgtgaggatccttgttgaaccaaaggccttaatgcatgtgattggaacaaagatggattttgtagatgataaactcagatcagagtttgtgtttatcaatcctaactcacaaggacaatgcgggtgtggtgaatcgtttatgacaacatctacctctagtgctaagcagagtgctagttaacacacagtgatgcgtttacatttgtgattacactcatatattatactgttactggaattggcgttaatgagaaactaaatactttttaataaaaaaaaaaaaaaagggcggccgctctagaggatccaagcttacgtacgcgtgcatgcgacgtcatagctttaactatagtgtcggtctcaattc

SEQ ID NO: 89700 - DNA, 614 bp, Arabidopsis thaliana columbia
tctctacgactcactattgggaaagctggcacgcctgcaggtaccggtccggaattcccgggtcgacccacgcgtccgcccacgcgtccggctgcgagaagacgacagaaggggaggacgaagaagacactgattggtcttggtttgggacagctcctctcacttcttgctacttctaatggctttacatcttctgagctcgccagaaaaggaattaatgttccaacatcacaatgctttctgaattatgtgttactggcatttgctactacagctactggactgatcatatactccatgaaggagaaagatcaagaggaacacagatttgaagaagtgggcgacgaggcggctatgcagaggaagttgttaggtgaggatgatgagccgggaacctaaccacataggtttttgtcaattccatcgactgtgtgatattatattattgcatccagcaaaaataaaggatcttttgagtggagaaaagtaaggacaccgttggtgactgtaaagagtgagaaaaagggctttatttgatcttgattgtaaagataaacgaagatttacattgtaagaacaacattggactattatagaagttacttccattgaag

SEQ ID NO: 89701 - DNA, 423 bp, Arabidopsis thaliana columbia
tgcaattcttcagtttccgtttctctcctgagaaatttattgacttcaaaaaccctaaaaagacttgtgattgttcgtttctctaactcgaatgttgatcgtacgacggtgagtgatcggagtacaatgacgaagaaatcacagccgcagattccgcctccattgtcccgtcgcggcggcgtcgtgtggctgggatggaaactcgtaatcgctttctccgtcgcgctttgccttcttgctcttcttcgaatccaactacagtacaattccttcacgacattgtcgtttccactctccgtcgcgagatctcagacaccgcttcacaaatactccggtgatcgtcccaagctcgctttccttttcttagctcgccgtgatctcccacttgattttatgtgggatagattcttcaagggagtggat

SEQ ID NO: 89702 - DNA, 545 bp, Arabidopsis thaliana columbia
  unsure (1)..(545): unsure at all n locations
nnnnnnnnnnnnnnnnnnnnnnnnnnnnnnnnnnnnnnnnnnnnnnnnnnnnnnnnnnnnnnnnnngccacgcgtccgcggacgcggggtcgcccacgcgtccgcccacgcgtccgcccacgcgtccgctttttgtttttggcatacaagaaaagaaaatggcgtctcatgctgttacaagcggacaaaaaccacacgtagtttgcatacctttcccggctcaaggccacatcaatccgatgctcaaagtggctaaactcctctatgccagaggcttccatgttaccttcgtcaacactaactacaaccataaccgtctcatccggtcacgtggtcccaactcccttgatgggcttccttcttttcggttcgagtccatccctgacggtctaccggaggaaaacaaggacgtcatgcaggatgtccctaccctttgtgagtccaccatgaaaaactgtctagctcctttaaggagcttctccggcggatcaacaccacaaggatgttcctccggtaagctgtattgtatcgacggtgtgatgagc

SEQ ID NO: 89703 - DNA, 809 bp, Arabidopsis thaliana columbia
  unsure (1)..(809): unsure at all n locations
ctctttggtcgggatcattttataagaaatgtataatctcactttctctccatcattgtcctcttctttgctctcttttacacaacaaactcctgcagccatagtgtcctcttctcctccggatttagtacttcaacaaaaactccggtttgtcgtggaaacctcaccggaccgatgggcttatgtcattttttggcaaaagatgtttgatgatcaatcggaccggtcttacttggtttgggttgatggccatttctgtggaaacaagaacaacaattcccaagaaaattatacaacaaacagcatcgagtgtgagctgatgatggacggcggagatgatctggagttgttctatgccgcatcgttttacggtgaagatagatcgccgagaaaggaagtatccgatgaatctttggtttggttaaccggtcccgacgagctccggtttagcaactacgagagggctaaagaagccggttttcacggggtacacacattggtctccatacccatcaacaatggcattatcgaacttggttcgtctgaatcaattatacaaaaccggaactttataaaccgagtcaagtccatattcgggtcgggtaaaacancaaaacacactaaccaaaccggttcttaccctaaaccggcggtatcagatcattcgaaaagcggaaaatcaagcaattcggggttggnaagaaaacggggggtgngnaactttagacggcaaggntagttncggcgccggaaagggaacatnatcccggggnttttttcccnngnnggaaggcggnnaagncacgggg

SEQ ID NO: 89704 - DNA, 833 bp, Arabidopsis thaliana columbia
  unsure (1)..(833): unsure at all n locations
nnnnnnnnnnnnnnnnnnnnnnnnnnnnnnnnnnnnnnnnnnnnnnnnnnnnnnnnnnnnnnnnnnnnnnnnnnnnnnnnnnnccacgcgtccgtacggctgcgaaaagacgacagaagggggaagcagaagtaacggcaaccaaaaatgacgacaatggcgacacaaggcgcttggctacgaatgacctcatcagccaagtccatgaccaagtcaaccgtgacttcaaaggagcttggattcctcacctcccagctcagcggcttaagaatctcatatactcccagtgacgtcatcaaccgtatctcccttccttcgttccccgggattcagccaatcgtcgcacgtagaatctgcccttttactgggaagaaagcaaacagagcaaacaaagtttcattctctaaccacaagaccaagaagttgcaattcgtcaacttacaatacaagagagtttggtgggaagctggcaaacgttttgtcaaacttcgtttatcaactaaggctttgaagaccattgagaagaacggactcgacgctgttgccaagaaagccggcattgatcttcgcaagaaatagatatgatgatcgcaaagtttattatatacatttcttgcttctccttttgcagtactcgtacatttcctttctagattttggtaagtatcaatggaatctctgagtttgttgtatcagacactgtcaagaaaagactttaaagagaaacgaaacccncctctcaaaaaaaaaaaaaaaaaaaaaaaaaaaaaaagcggccgctctagagatcccaagcttacgtacgcgtgcatgcgacgtcatagatcttctat

SEQ ID NO: 89705 - DNA, 406 bp, Arabidopsis thaliana columbia
gggttcgccttcctccgtgactcaccggatttatcttcctctccaattctggagatatccgtgtgggattcatcgacgggaatcgaaaccagccaattccttggtggaatttgcttcgacgtgtcagagattccgctccgagacccgccggatagtccattagcgccgcaatggtaccgtctcgaaggtggtggagctcacaacagtgatctaatgcttgccacgtggacaggaactcatgctgacgaatcattccccgacgcgtggaaaactgatacagccggaaacgtgtccgcacgagcgaaggtttacatgtcgtcgaagctgtggtatctacgcgctaccgtgatagaagcacaagacttgttaccgcctcagttaacggcgtttaaggaagcgtcatttc

SEQ ID NO: 89706 - DNA, 561 bp, Arabidopsis thaliana columbia
  unsure (1)..(561): unsure at all n locations
atgtggtatcactgcttgcatcataaactctgtgatgaccatgaagcaaggctcagcaaagagagactcaggggactcaaaagatagagggcaagtctcttctacacgtgtacgccaagctcttgcggcgggagatatgaggtacgtatcagagctccttggcagggcacatcgtcttatcttgagagtcagaacccaagatatgccaagtgaaaggatgatctcagtcccgagatcatcaatacttaatttgccaccagggatcggaatttataaggcatgtttgcttctagttggtgatgagtcttcagttccgtgtaccgtagttgttgatacatcaaatatccatgtagaaacagaggaggtacgaccctgtaatttagattggtctcaagaatttcgactcgtgagtgttgagttcggttgagtcaatcttagttcgtataaattcatatttctaaaaaaaaaaacccaaaaaagnnnnnnnnnnnnnnnnnnnnnnnnnnnnnnnnnnnnnnnnnnnnnnnnnnnnnnnnnnnnnnnnnnnnnnnnnnncattcg

SEQ ID NO: 89707 - DNA, 1309 bp, Arabidopsis thaliana columbia
  unsure (1)..(1309): unsure at all n locations
tgannnnnnnnnnnnnnnnnnnnnnnnnnnnnnnnnnnnnnnnnnnnnnnnnnnnnnnnnnnnnnnnnnnnnnnnnnnnnnccacgcgtccgcggacgcgtgggcttttcagagagagaaacaatatttctaatctattacaagtaacatgatcggccaacttatgaacctcaaggccacggagctctgtctcggcctccccggcggcgctgaagcagttgagagtcctgccaaatcggcggtgggaagcaagagaggcttctccgaaaccgttgatctcatgctcaatcttcaatctaacaaagaaggctccgttgatctcaaaaacgtttctgctgttcccaaggagaagactacccttaaagatccttctaagcctcctgctaaagcacaagtggtgggatggccacctgtgaggaactacaggaagaacatgatgactcagcagaagaccagtagtggtgcggaggaggccagcagtgagaaggccgggaactttggtggaggagcagccggagccggcttggtgaaggtctccatggacggtgctccatatctgaggaaagttgacctcaagatgtacaaaagctaccaggatctttctgatgcattggccaaaatgttcagctcctttactatgggaaactatggagcacaaggaatgatagatttcatgaacgagagcaagctaatgaatctgctgaatagctctgagtatgtgccaagctacgaggacaaagatggtgactggatgctcgttggcgatgtcccatgggaaatgtttgtcgagtcttgcaaacgtttgcgcattatgaagggatctgaagcagttggacttgctccgagagcaatggagaagtactgcaagaacagatcttgaattaataataaaaaaaaagaagcatcaatgatcaacaatatgacgggttcttgattttatatgtatttttatgattgtatgtggctatcacctatatatgtgtgttgtaattttaaatacttgatgggtatatagggcagtattttaccagtaagatgtggacaaacttgtaatgtgaccaaaagagaggaaacttcaatatctctgtgtttgtgtcatatttattgcccaacatgtgtctgtcggtttgatgatcaatcacaacttgatatgtgcatacatataaatgtgtgtatgtaggtgtgtgtacatgtacatgtgttttgatccctactctacaacttctcgtgtcttgtgtgtgttgcggccgcgaattcgatatcaagcttatcgataccgtcgacctcgagggggnnnnnnnnnnnntaa

SEQ ID NO: 89708 - DNA, 621 bp, Arabidopsis thaliana columbia
  unsure (1)..(621): unsure at all n locations
nnnnnnnnnnnnnnnnnnnnnnnnnnnnnnnnnnnnnnnnnnnnnnnnnnnnnnnnnnnnnnnnnnnnnnnnnnnnccacgcgtccgcctggattatatcttggttatcccttagtagaaaccacaattggagtgatggtgcaatgctttgactgggaaatcgaaggagataaagtcaacatgcaagaaggttccggattaagatttttcttggatttggctcatccccttaagtgcactcctattcctcgaatcataaatcatgaaccttctaatacgcagattccaaattcgtgagttcaagacttcacttaatttacaaatatataactgtgaaggttcaaggatcgttattacacccctatggtatatacattatttttgcattcgttgatgttgttgaatgcactttccctaaactgttgtatttcattatgttcatattattgttaagttatttatgtaaatcgcatagatatttgggtgaattggtgtactatcatatatagtaaatttacttaaataaaaaaaaaaaaccaaaccgaaagggcgaccgctctagaggatccaagcttacgtacgcgtgcatgcgacgtcaaagtcttgtatagggcaccaaat

SEQ ID NO: 89709 - DNA, 437 bp, Arabidopsis thaliana columbia
aaaactctgactaacattcttcttcacttatctcccatctttctctcttcaataataataaacatggatctcaccgacgtaatcatattcttgttcgctctctatttcatcaacctatggtggcgccggtacttttccgccggaagcagccagtgtagcttgaacattccaccgggaccaaaaggatggccactagtcggaaacctactccaagtcatattccaacgtcgccatttcgtcttcttaatgcgtgacctacgtaaaaagtatggtccaatattcaccatgcagatgggacaacgtacgatgattatcatcacggacgaaaaactcatccacgaggcactagtccaacgcggccctacattcgcttcccggcctccggactcgccgatccggctcatgtttagtgttgggaaatgcgctataaactcggc

SEQ ID NO: 89710 - DNA, 534 bp, Arabidopsis thaliana columbia
  unsure (1)..(534): unsure at all n locations
nnnnnnnnnnnnnnnnnnnnnnnnnnnnnnnnnnnnnnnnnnnnnnnnnnnnnnnnnnnnnnnnnnnnnccacgcgtccggaaaaggatagagacgacaaaactccattgaagaacttattagagaagaagaacaacaacaaggaagataacgaaagtcactaaaatctttcaagacccatgaactctcaaatcactcttttcttcttcttcttctcaatcctctccctctcccaaatctcaaattcatcatcactactaaaaccacacccatgtccaattttacccctcccatcctcccaacagctccaatggcaactcggatccatggccatgttcctccattttggacccaacactttcaccgactccgaatggggcaccggaaaagctaacccatccattttcaacccgacccatctcaacgcaagtcaatgggtccaaatcgctaaagactcaggcttttcccgcgttatcctcacagctaagcaccatgatggattctgtctctggcctagcgaatacactgattact

SEQ ID NO: 89711 - DNA, 455 bp, Arabidopsis thaliana columbia
atcgactctaatcataatggaagtgatacctttcctgggtttggctgtcggtgttgataatatgtgcatcctggttcatgctgtcaagaggcaagagcaagagctgcctttggaaagaagaattagcaatgcccttatggaagttggaccatcgattactctagcaagtttagccgagattttagctttcgctgttggtgctttcattaaaatgccagctgttcgagtattctccatgtttgctgcattggctgtccttttggactttctttctccagattaccgcgtttgtagctttgatagtttttgactttccgacggaccgggggataagcgagttgattgcttcccgtgtattaagacatcaaaatcatctattagtgctgaaaaaggggttggtcaaagaaaagctggccttttgactcgatatatgaaggaagtccatgcacctgttc

SEQ ID NO: 89712 - DNA, 990 bp, Arabidopsis thaliana columbia
  unsure (1)..(990): unsure at all n locations
cgnnnnnnnnnnnnnnnnnnnnnnnnnnnnnnnnnnnnnnnnnnnnnnnnnnnnctccatcttctacttcccacgcctccggaaaaatcaaatgaagaagttagcgagaaaatggcggagaactcgtcgtgacgaagatgatgataagttcgtccttcctacttctgaagacgtcgattctcggcctattgatacgcaagagcaggaggagtacgttcggtatcttgaggaagctcatgctcagcaaagtcttcaatggaggagcgtgtttgtggttcttctgatctgctttggagctttcctcttctactccattttccagcagttcatgtcaccatgggaactgcggtatcatgcctactttatggaagatctcaagtcatggatggtcatttcagctgagtggatcgctatcatggcttgctccctctccattgtcgggctacgagataagaagaatgatcatagacgatggttctggtactcttgtgttgttggatctgcattgaccatcttttggctttattacttgctgaggcttccgaaattccggtgggatgctatctggcttccgtttgggccgctttgtggagctggaatttgtctatacgtggaccatcttctagaggagtcatctgaggaagtgaaaaaactgaggaactatatgtatgcatataaagcacggtagagagataatagctactttcaaacctcgtcagagtgaatttgtgatagcaagagtgcaagttttgactctattatcccctaaagaacattcttctgttgttgtaaatagatacgaaactctgaagttcgttttgtttaaaaactcatgattgactcgaactagattccagttcatacatgtaatactcttgatttattcaagcaattcacttgagagaaaaaaaaaaaaaaagnnnnnnnnnnnnnnnnnnnnnnnnnnnnnnnnnnnnnnnnnnnnnnnnnnnnnnnnnnnnnnnnnncacc

SEQ ID NO: 89713 - DNA, 705 bp, Arabidopsis thaliana columbia
atttattttcattgttcaaacaaatatttgcagaaaagagatttatttttacctgcttagcatataataggaagggcgtaagaaaactttttttttatatattcattgctagattattaaaataaacatgaatgcacagatatatatgtctatttttattcttttattgtggtacagctctatctgggacagcacatgctgtgctctataaaaaaggaaatgttctcttcaagggaaaaattgaaacataaaaatttattgagaattactcctcaaacgcatctctagagagataaaataccccattatagagctataggtctataacacaacgtaacgtatgttctgattctggggtttacatatactcatcattactgttataatttaaattgaagaagatttctttttaattgaaaaaaactcaatatagattagttagaaatgcatttctaatgattttcttaatattattagaaataaaaaactggagattttaattttcattcaaaaaaggtcatgaatttacagtcaatagttaatggttctggtttgtactagattcgatattttgtgattgataatctatatatagatttttttcggaatcgttttggcggcatggccgagtggtaaggcgggggactgcaaatcctttttccccagttcaaatccgggtgccgcctcagcaacaaactttaaata

SEQ ID NO: 89714 - DNA, 484 bp, Arabidopsis thaliana columbia
  unsure (1)..(484): unsure at all n locations
nnnnnnnnnnnnnnnnnnnnnnnnnnnnnnnnnnnnnnnnnnnnnnnnnnnnnnnnnnnnnnnnnnnnnnnnncccttttcctctgttcttcactttaagaaaattacaaacttttatcttctattggacgaatctttgatctggttttaattaatcacacgcttactttaggatttttttacctgaattcgaatatatacttttgattttcatcttccgtagtccgtaccgtagaattgaggagcttcatggagaacgagctgtttatgaatgcaggagtttcgcatccgccggtgatgacgtcaccgtcttcttcgtcggcgatgcttaagtgggtttcaatggagactcagccagtggatccaagtctcagtcgcaatctgttttgggaaaagtcaacggaacagagcatttttgattcggctctgagctcactcgtctcttctcctacgccgtcaaattcaaacttttcggttggcggag

SEQ ID NO: 89715 - DNA, 1514 bp, Arabidopsis thaliana columbia
atggctaattcctcaatcgtagctcttcttcttctctttgttatcgctagttccgtcaatggaggagatcaagagtatccaaatcaatatctaacagaagctttaggtgataaagaatggttagtgtctgtaagaagacaaatccatgaaaacccagaactccttttcgagttacataaaacaagtgctctgattcgtcgcgagcttgatgaattaggggtttcttattcttacccggttgcgaaaaccgggatcgtagctcaaatcggatccggttatcctccggttgttgctctccgtgctgatatggatgctcttcccttacaagaacttgttgagtgggatcataagagcaaaatcgatggaaaaatgcatgcttgtggtcatgattctcataccactatgctccttggtgctgctaaattgcttagcaaacgcaaacgtatgctcaatggaacagtgaggcttctttttcaaccagcagaagaaggtggtgcaggtgcttttcatatgataaaagaaggtgctttgggtgattctgaagcaatatttgggatgcatgttcatactggcttacctacaggagaattagcaacaatctcgggtcctgctttggcatccacaagcattttcagtgtaagaatgagtggtaaatcacccgcttcttcggagacctattcttgtgttgatccggtgttggctgcatcatctaccatcttagcattgcaacttattatctccagagaagtagatcctctcttaagccatgtgctctctgttacatttatgaaaagtggcggttctgagtttgatgtgattccggcatatgtagaatttgggggaactttgaggagtcttacaaccaatggcatcaactggttgataaagcggttgaaagaggtggttgaaggacaagctgaagtacaaagatgcaaagcggatatagatatgcatgaagacgatcatcctatgtatccagcaacagtgaacgatcacaagctacacgaattcactgaaaaggttttgaaactcttgcttggacccgagaaggtgaaaccggctaacaaggtaatggcgggtgaggattttgctttctatcaacaaaaaatacccggttactacataggaatcggtataagaaacgaagaaatcggttctgtgcgttcggttcattcgccttatttcttcctcgacgagaatgtgcttcccattggatcagcaacgtttgctgccttagctgaaatgtatctacaagagcatcagaatcaaactaagtctggagattgagaaagttactaaaccaaagcttagttaattgccttcacaagtaaatgctattgtttttataaaatgcaatttttacaacttcaagaaatcaagttgtatattataaaaattgtaagtaatgggtctctgtctcatatggtaggtgcagatgtctgagtctgagacacccaaagcgatgtcgtttagtttcgagatatcgcccaaaaaaaatctggtgaatttttatg

SEQ ID NO: 89716 - DNA, 479 bp, Arabidopsis thaliana columbia
  unsure (1)..(479): unsure at all n locations
nnnnnnnnnnnnnnnnnnnnnnnnnnnnnnnnnnnnnnnnnnnnnnnnnnnnnnnnnnnnnnnnnnnnnnnnnnnnnccacgcgtccgcggacgcgtgggcggacgcgtgggcggacgcgtgggcggacgcgtgggttctaggtacctcaaattagcgacacattatggcatctccaggggaaaaatatgttaccagcgatatggttcatttttaaccgtagaggatgtgatgcagctgtacagtatgttgaaaattttcagtttttagatgattgcgagaagagtgaggttgagttggccttgaagaagtttcgcgttctttatccagatgcagtgagagagagtgcagagaaaggactgcttaggggaattgctgctcatcatgcaggttgtctacctctttggaaatctttcattgaggaactttttcagcgaggacttgttaaggttgtctttgctactgagacacttgctgctg

SEQ ID NO: 89717 - DNA, 657 bp, Arabidopsis thaliana columbia
tacggtgcgagaagacgacagaaggggagaacaaaatactcatacacacacacacttggatttaaagaaaaaaaggagttttccttcttcttttgggtgtgtcaagtttctgttcttctttttctcgtgcttccatcacgagatatctcacaaggctctcgcgactcaagaaaggtaaagataaagaaagaagaagcaaagattccataaatggacttgaaaagcaacaaccaccagcaacagcaacaagtacttgatggctcggacatagttgagctggtggaaaacgagaaagtgttcgacaagtttgtggaacaaaagtttcaacagttagaccaagatgaagatggtaagctctccgtgactgagttacaacccgccgttgctgatatcggcgctgctcttggtttgcctgctcaaggaacttctcctgattccgatcacatctactccgaggtaatttccttttcttctttcttaaaaccttttatattcgtgatctatggtccagtccgactaatttgcatatacatatgttagcattttaatttcttaatcacttttcctgtattattgatctttcaattgttggttatcatgtgatctttgattttttccgattaccgtatattttaatgctagtaagaaatgttttcc

SEQ ID NO: 89718 - DNA, 750 bp, Arabidopsis thaliana columbia
  unsure (1)..(750): unsure at all n locations
ggtcgagcacgcgtccgattaaaagctctctctctctatctcccacgatttcctttttccgccggaagaagaagcaaaaaaaaaagaaatcgaatctctctttcaagtgttcgatttaaagcaaaagtgtaattataatcggaagcgagatcttgagaaatggtgggatgacggcggagggagatggcgaggggaggaggagaatggaccggagggatcgccggaaccggagttctctctttcaaaagaatcactctacttgtttgctttttcaacattctcattgctctctttgttcttcgctttctctatgcttcttctctccacatctattccaataacgataatgttgttaagtacacagctgatgagattaggaaaatggaggaatctattcggattcgaagatcgaaggaacctactctgattcttcaattggtgaagaagctcaagcatgaggtttccactgcagaatctagtactgaactatctcctaatgttaaacacaaactagttgatgagatcctccagcgtttgaaaagctttgaggacaaatctaatgttactcagcttagagaagttntaaaacgtggcgcaatgagaagctggaggaagctaaagagctaaattcaagggcaaaatggggtaaattccncccttatagtggnggaagcagggtttcttttaagngcctttngagtttgagtgggnttttncctntnttnaggnaatccggtttttggggtancc

SEQ ID NO: 89719 - DNA, 531 bp, Arabidopsis thaliana columbia
ttattccaattcattttagggaaggctggtcccccggcaggacccggcccggatttccggggtcgacccaggcgtccgcccaggcgtccgttaaccaggagaaatttactttttttaaaatatacattcaaacttaaaacatgcaacttcaaataaagacactttctaatgagaaatttacaattgaatgtgaattaactgattcggtaagatcaataaaagaaaaaatcgcttcgaaagatcttaaagataaatacgaagctgatgcggttaaactaattttttcgggaaaaattctcgaagattcaaaaacacttgaatcttattcgataaaagaagatagttttctcgttgttgttaaacaaacaccgccaaaagcatcatcagcagcagcaactacaccgagttcatcagctgcatcaactaatgttcaacaaccaacaccagctgctgcttcagctagcccagctccagctcaacaacaacaacaacaacagcaaccagctcaagcgagtggtactgcagaaactg

SEQ ID NO: 89720 - DNA, 504 bp, Arabidopsis thaliana columbia
  unsure (1)..(504): unsure at all n locations
ctctatacgactcatatatggaagctggacgcctgcagtaccggtccggattcccggtcgaccacgcgtncggtatatttcctttggggtgtcttccagggaagaaaagagactaacccacaaaagaacacatctttgcctacttcaaatgttttgccgcgtgacagagaccccaaggagctgtgtcaaacgagttctccttccaagcatttggagaaagggtcttctctacgtgagagctccagcaacggaattgaaacacggaatgggacagatgcacgtagtcatgagaatccaaataacagggaatcctctattgagcgatcaccgagcaaaaaggaggatattgctcttaaagtggaagaagcaggtgtgaatcacatcccccctcaagttactggatcaaattctggagatagtctagtgaggaaggttcagaaagtcgaggaacaagaattaggtggtaggaaggatctgccattgacggtcatgggctcagggatc

SEQ ID NO: 89721 - DNA, 739 bp, Arabidopsis thaliana columbia
tgtttgaaacaagtctaatcctcctcccggagaattcacgaacttagaggagattcttccaaaagggtttttagatcggacggcggagatagggaagatcataagctgggcaccacaagtagatgtgttgaatagtcctgctataggagcgttcgtgacacattgtggatggaactcaattctcgagagtctttggttcggtgttccgatggcggcgtggcctatctatgctgagcaacagtttaacgcgtttcatatggtggatgagcttggtttagcggcggaggtaaagaaggagtaccgtagagattttctggtggaggagccggagattgtgacggctgatgagatagagagagggatcaagtgtgcgatggagcaggatagcaagatgaggaagagggtgatggagatgaaggataagctccacgtggcgttggtggacggtggatcttcgaactgtgctctaaagaagtttgttcaagacgtggtcgataatgttccataatccataggaacgtgctcgataatgtaccataggaacatggttgggtgttttgtgatagaataatgggaatcttttaaaaggactatgatgacatgattgaaaacaaccagtctgaaagtataataatagttacgtgtaaaaaaaaaaaaaaaagaaagggcggccgccggctagtgagcttgtcgacccgggaattaatccggaccgggacctgcaggcgttcccagcttc

SEQ ID NO: 89722 - DNA, 528 bp, Arabidopsis thaliana columbia
gatattacatgggactgacggttgccccggcgatagtatcgccggctactatacgactcatatagggaaagctggtacgcctgcaggtaccggtccggaattcccgggtcgacccaggcgtccggaataatcctttctctgtatttccttcacctccggctaaatctccggcgaccgcgtaacttgttctccggtctgaatagtgaataaacacacacacggagccaaatccaggagaaattaggtttgaattagagagattaggagaatacaaattggtttggtggttttcaagtatgctaccaagtgggttgaaagaaacccaactccgtgagagcaacaacaaccaaaaagtccatcctcaaccaatggaagagtctatcaatcagaatcctgaagctatggaagcacttatctccaatctcttcggaaacatctcgtctttgaaatctgcttatatcgagcttcaaagtgctcatactccttacgatcccgagaagattcaggcagcggacaaagttgtcattt

SEQ ID NO: 89723 - DNA, 520 bp, Arabidopsis thaliana columbia
taataatactctctcgacggcgtcgtttcgtgctggcttcacttgaattattatttttctggctggactcatattttctccggcaaggaaaaaagaaaaacatcactttctgcaagcggatgaaaaattcaaagattgagtcaccaccaccatagtaatatacgcgtatgagttcccagatgtgatctccatccaacgttgtatttctttcgttttggttatcttcttcggttccatcgaattccaacaattcccatcgaggaatttggttacgaatcttttgatctgactaaacctagggagcttgatcacaaggagactgaaaccaatgctaggaggagtctcttcaggttagtagaatgagtagaaaaagaacggaaaatggcagtgaatcaggaccagccacttctcatgttcctgtggatagattcgggtttctcaagcaagaacatgccaattcgcctgagcgttttagcaagtctaaaactacatcatccactgatcatgacagagaggagag

SEQ ID NO: 89724 - DNA, 447 bp, Arabidopsis thaliana columbia
tctctctaaaacactctacaacaaaacttagttgtgtgatctttggtttccttgaaatcatacagttcaaagagtttgctcaatgaaggttcacgagacaagatctcacgctcacatgtctggagacgaacaaaagaagggaaatttgcggaagcacaaagcagaagggaaacttccagaatctgaacagtctcagaagaaggcaaagcctgaaaacgatgacggacgttctgtcaacggcgccggagatgctgcttcagagtacaatgagttctgcaaagcggttgaggagaatctgtccattgatcagattaaagaagttctcgaaatcaacggccaagattgttctgctccagaagagaccttgctagctcaatgtcaagatttgctgttctatggggcattagctaaatgtcctttatgcggaggaactttaatttgcgacaa

SEQ ID NO: 89725 - DNA, 1450 bp, Arabidopsis thaliana columbia
  unsure (1)..(1450): unsure at all n locations
agctgttcctcgaggcagttacgaatatgaagtttgatgaggagcccaactatgccaagcttatctcgatttttgatactcttatcgagccatgtgctatatctagaccaattagaattgatggggctctaaaggttggccaaaagcgaggaagattgcttatcaatttggaagaggatgaacagccaaggaagaaaattagaatcggcagtcctgccacacagtggatttcagtctataactgcccccccgtccgatgaaacagagatatcattacaacgttgcagacttaagacttgcacagcatgttgagaaaggtaatgaggatggccttttcataagctgtgtagcatcatcagctaatctctgggccatcatcatggatgctgggactggtttcagttctcaagtttatgaactgtcctcagtcttcctgcacaaggactggatcatggaacaatgggaaaagaactactatatcagttccatagctggtgcaaataatggaagctcgttggttgttatggctaaaggaactccttatacccagcaatcttacaaagtcagcgactcatttccattcaagtggataaataaaaagtggaaagaaggttttcatgtaacatccatgaccaccgctgggagtcgttggggtgtagtaatgtccaggaactcaggctactctgaacaggtggtggagcttgacttcttgtacccaagtgaaggaatacatcgaaggtgggaaagtggatacaggataacatcaatggctgcaacagctgatcaagcagctcttatattgagtatacctaaacgaaaaataaccgatgaaacccaagagactctccggacttctgccttcccaagtacccatgtcaaggagaaatgggcgaaaaatctgtacattgcatcaatatgctatggtcggacagtttgctgatgaaacatggagtatactgtttcaacctctctcactctctctctagggttttagggacgatctctctctagaagcctgacaacgtgtagccttcggtttcagtacaatccaaaggtaaaccttaaccaggagccaacctatgtgactgtgtaatgaaatgaaatttgtctctatgtatgtagtaagtccaagataaaaggaaaaaaaaaaaaaaaggtagaagagccgaaatcattattcctagaaatgatgaagagctgccccaagattatgcagtttttggcttatttggctttgtccctgatttgagtccagaatcaggaggaagccccatgtttgttataatgaccatataattttaagaaggctttcttctnnnnnnnnnnnnnnnnnnnnnnnnnnnnnnnnnnnnnnnnnnnnnnnnnnnnnnnnnnnnnnnnnnnnnnnnnnnnnnnnnnnnnnnnnnnnnnnnnnnnnnnnnnnnnnnnnnnnnnnnnnnnnnnnnnnnnn

SEQ ID NO: 89726 - DNA, 514 bp, Arabidopsis thaliana columbia
gctctatacgactcatatagggaagctggtacgcctgcaggtaccgggtcccggaattccggggtcgaccacgcgtccgatgatgaagttgatgaggttgttgttgattagagtttaaaccaaataaaccctaaccaaaaataaataagatctgaggttttttctcgagaagtaagagagatctggaatttggcgacgatgagttacggatgggcgatatacgaaggcacggtggtgatagcttcactaagtctcttaggatgggcaggtttatggtttcttaatcggagattatacaaagagtatgaagagaaacgagctttggttcaaatcattttcagtgtcgtcttcgctttctcttgtaatctattgcagctcgttttgttcgagatcatacctgttctctctagagaggcaaggatgataaactggaaggtggatcttttttgtttgatacttcttctggttttcatgttgccgtattaccattgctatttgatgcttcgtaatagtg

SEQ ID NO: 89727 - DNA, 493 bp, Arabidopsis thaliana columbia
acgcctgcaggtaccggtccggaattcccggttcgacccacgcgtccggtctcaaaagagattaaaagagtacgagctcaaatggaagaagatgaacagttatctgtgttgatgagagggcttcgtggccagaatttgaaggattcggtttttgctgatgataatattcagctaaggcttgttgagactggccctagcagtgagttcttacctttggtatatgatccggagaccatttctgcctattgggggaaacggcctcgtgctgttgcttctcgagttatccagttgctttcggttgctggagggtttctatcgcgtattgcaggggatgtaataaacaagaaagttaaagagaatgaggttgctacggcaattgaattgagggaaattgtaacttccttgggtccagcatacattaaacttgggcaagctttgagtattcgaccagatatattgtcacccgctgcaatgacagagctacaaaagttgt

SEQ ID NO: 89728 - DNA, 401 bp, Arabidopsis thaliana columbia
tggatttagcgagtcacatattcgaggaaatgcgacagagaaacgttgtctcttggagttctatgatcgtgggttacgcagctaacgggaatacattagaggctttagaatgctttcgtcagatgagagaattcggtgtcagaccaaacaagatcacgttcgttggagttctcagtgcttgcgtccatggaggtcttgtggaggaaggaaaaacatattttgcgatgatgaagtcagagttcgagctagaaccgggattatcgcattacggatgcatagttgatctattgagccgtgacgggcagcttaaggaggcaaagaaagttgttgaggagatgccgatgaagcctaacgtgatggtttggggttgtttgatgggaaggtgtgagaagtttggggat

SEQ ID NO: 89729 - DNA, 769 bp, Arabidopsis thaliana columbia
gctctatacgactcactatatgggaggctgggccgcctgcaggcaccggcccggatttcccgggtcgacccacgcgtccgggggagcccatattggatggcacctgaggtgataaagaattcaaatggcagtaaccttgcggtcgacatatggagtcttggatgtactgttttagaaatggctacaacgaaacctccatggagccagtatgaaggggttcctgctatgttcaagattggaaacagcaaggagcttccagatatccctgatcatttatctgaagaggggaaggattttgtaagaaaatgcctacaaagaaaccccgcaaatcgtcctacagctgctcagcttttggatcatgcttttgtaagaaatgtgatgccgatggaaaggcctattgtgagtggcgagcctgcagaagccatgaatgtagcttcgagcaccatgagatcactggacattggacatgcaaggagtcttccgtgcttagactcggaagatgcaaccaattaccagcagaaaggattaaaacatggctcgggattcagtatatcccaatctcctaggaacatgtcatgcccgatttcaccagtcggtagtccaatctttcactcgcattcaccacacattagcggaagaagatctccattcccaatatctagtccccacgctctctctggttcatcaacacctttaactgtgtgtggtggagccatcccgttccatcaccaaagacaaactatcagttaactttttgcttgaaggcata

SEQ ID NO: 89730 - DNA, 963 bp, Arabidopsis thaliana columbia
  unsure (1)..(963): unsure at all n locations
caggaattaaaccaagacggcccttttaactcagtggtagagtaacgccggggtaaggcgtatgtcatcggttcaaatccgataaggggcttttacgttctttactttctaatagtcaaaatttcatttgaaagtctataatttaatttcaaattttgttaatttcattctaataaatttcattctaataatataataactaataataaagttagcgagtaatttaaaaaataaaaatgaacatttgtatattataatacaattacaatgaataatgataagtcgtctcttgaatcgccaaatatatattctttttttttcgatttttcgatagattagaaatcgacaaatccaaaagaaaaagtaagtggacctaacccatcgaatcatgactatatccactattctgatattcaaattcgatagagattaaattgaaacagtagattttttttatttcatatttttgtattaggaaatccgtcgatatctcttattgaatcttcttgtttctatatatttcataggaaatatattgcgttcctgcctagagaaagagagtctttttgcaaagtaataactaaaagggcgtttcaatattttttttgattcgagaacataacaagatcctacattctctttgtattaagaatcaatttgtattaaaaataaacaaaaatcgaatcataatcatggcttcagatatcaattaaatatttccatattgatgcatccgagatgacaatgtaatgtgatcgagggtgtatgtgagaaaggaactctcatttacagtttcctataattnngtttaaatattgnattaaatataaatangganatttccccccttttttgncaggttccataggggncatgtnccttttgggtttccaagggnattggggnanantttttnaaggnccccctttttgngttaaccccggcaccttaaaaaggggggtt

SEQ ID NO: 89731 - DNA, 548 bp, Arabidopsis thaliana columbia
  unsure (1)..(548): unsure at all n locations
aatcccgggcgccacgcgtcgatgaacagagttttccatttcatatttttgtattaggaaatccgtcgatatctctgattgaatcttcttggttctgtctatttcataggaaatatattgcgttcctgcctagagaaagagagtctttttgcaaagtaataactaaaagggcgtttcaatattttttttgattcgagaacataacaagatcctacattctctttgtattaagaatcaatttgtattaaaaataaacaaaaatcgaatcataatcatggcttcagatatcaattaaatatttccatattgatgcatccgagatgacaatgtaatgtgatcgaaggtgtatgtgagaaagaaactctcatttacagtttcctataattttatttaaatattgaattaattattaataagaaattttccccttttttggcccagccccaaggggacgggccccttggtatccaaggaattggnaaaattttaaagnccccttttgctcaaccggcaccaaaaaggggtnaagggataccatagtgggccnc

SEQ ID NO: 89732 - DNA, 1057 bp, Arabidopsis thaliana columbia
gtaccggggcgaagtcccggatcgcccgacgcgtcccacgcttactgcaaattcgatagagattaaattgaaacagtagattttttttatttcatatttttgtattaggaaatccgtcgatatctcttattgaatcttcttgtttctatatatttcataggaaatatattgcgttcctgcctagagaaagagagtctttttgcaaagtaataactaaaagggcgtttcaatattttttttgattcgagaacataacaagatcctacattctctttgtattaagaatcaatttgtattaaaaataaacaaaaatcgaatcataatcatggcttcagatatcaattaaatatttccatattgatgcatccgagatgacaatgtaatgtgatcgaaggtgtatgtgagaaagaaactctcatttacagtttcctataattttatttaaatattgaattaaatataaataagaaattttccccttttttgacagatacataagggcatgtacatatagatatcaaagaaaatagaaaaaaatattaaaagttccctttttgcttcaacccgtcaactaaaaaaagggtataaaaggaaaataacaatagttgatactatagtatttaatagacaagtatttaatacacgcaaaaaagaaaaaaaaaagttctttattctttatctgaataatgagtcatccgacaattcatgatttagattcaactacttatacttattaataaactaatagcaaggaagaaacaaattgagttgatccgtttacctaagtaaggaccaataaaatcaaaaattttgatcttcgaaaccaattaaatgaaattctaagggttccattttatggggcagtgcgcgagaaattaaatcataaacaaatgatagaatttgagcgccctgaaaatgccataatatataacatcaaaatctataacattaaggtgttcggaaatggttgaagtagatgaataggaggatcgctatgactatagcccttggtaaatttaccaaagacgaaaaagatttatttggtattatggatgac

SEQ ID NO: 89733 - DNA, 713 bp, Arabidopsis thaliana columbia
tacgccgagacctaatacgacttacttagggaacgctggtacgcctgcaggtaccggtccggaattcccgggtggagccacgcgtccgcccacgcgttcgcggacgcgtgggcagaaaggtgtaatgcttgactgggtgaagaagctgcaccaagaagggaaactaaagcagttaatagacaaagatctaaatgacaagttcgatagagtagaactcgaagaaatcgttcaagttgcgctactctgcactcaattcaatccatctcatcgaccgaaaatgtcagaagttatgaagatgcttgaaggtgacggtttggctgagagatgggaagcgacgcagaacggtactggtgagcatcagccaccgccattgccaccggggatggtgagttcttcgccgcgtgtgaggtattactcggattatattcaggaatcgtctcttgtagtagaagccattgagctctcgggtcctcgatgattatgactcactgtttttaaaaaatttcttttcctgggtttgttttttatttgtcgttttataatgttgatatagatgtcaaggtgagtgtgtaatttttatgtaaagaaaaaatatgaaatgcaaaagaaaatgttgatttaaaaaaaaaaaaaaaaaagggcggccgctctagaggatcccagcttacggacgcgtgcctgccacgtcataacttctttctatagtgtgcccc

SEQ ID NO: 89734 - DNA, 440 bp, Arabidopsis thaliana columbia
atgtgctccaagcaaaaacatgtgtaagatatacttgcatgtgcagacaaccaacgaagacgcaatcaagttctacaagaagttcggctttgagatcacagataccatacaaaactattacatcaacattgagccaagagattgctacgttgtcagcaagtcctttgctcaatctgaagccaacaaatgatgaaaaataccaaacttggggaagccattcctccccagtttctttgttgcattcagttcaagatctattaatgttatgatgatccttcggtttccgagttttgcttgttttgttgaccttaatttttcttactgattctaaatttataaattcctggttatatacttgcatgatttctctaatgtcctcttggctttggacattttcgtttggaaaagtttttaactttgcaactcaaagctttactacc

SEQ ID NO: 89735 - DNA, 523 bp, Arabidopsis thaliana columbia
agctctcatacgactcaccttagggaaaggcttggtcgccttggcaggtccctggccctggatttccacgggtcgccccaccctgtccggaaaagggggcctctttcacgccgagggaatccaaatttaagaggttgttagatgaatgcaattttctattcacagaagaagagaaagatttggttcacccggtgccttcgactttgccttcaagtgtgacagcaccaccagtatctgatcttgatgtcacccctacagccaagtccaggcacgagtactaccataagccagaggaagctgtggtatctgtctttgcaaaagggatacccaagcagaatgttaacatcgactttggtgaacagattctgagtgttgtgattgaggttcctggagaggatgcgtattatctccaaccgagattgtttggaaagataatacccagatagtgcaaatatgaagtattggcgaccaaaattgagatctgtcttgcaaaagccgatataatcacatgggcctccctcga

SEQ ID NO: 89736 - DNA, 695 bp, Arabidopsis thaliana columbia
tcactataccgatagctggttcgcctgcaggtaccggtccggaattcccgggtcgacccacgcgtccgaagaaaaggaactgcctgtatgttgcttgaagagtatcggactgctaaaacagctcttgaaaagggtgcctctatcacgccgagtgaatccaaatttaagaagttgatagatgaatgcaattttctaatcacagaagaagagaaagatttggttcaaccggtgccttcgactttgccttcaagtgtgacagcaccaccagtatctgaacttgatgtcacccctacagccaagtacaggcacgagtactaccaaaagccagaggaagttgtggtaactgtttttgcaaaaggaatacccaagcagaatgttaacatcgactttggtgaacaaattctgagtgttgtgattgaggttcctggagaggatgcgtattatctccaaccgagattgtttggaaagataataccagataagtgcaaatatgaagtattgtcgaccaaaattgagatctgtcttgcaaaaagcccgatattaatcacatggggcctttccttcggaacaccgggaaaaagggcccagccggtttttggcccaaaggccctaaatggtccttcaatcaagaggggtttttcaccaagaagggcccaagcctttaattcccaattcttttcttaaaaaaaaaaggt

SEQ ID NO: 89737 - DNA, 412 bp, Arabidopsis thaliana columbia
tggatacaaagagttaggtgtggagaaatctggtaaaaattctgagggtgactcttggtgggaaacttggcaagaagtccttcatcaagatgagtggagtaatctagcaaggattgaaaggagtgcacaaaagcaagcaaaatcaggaactgaaaatgctggttggtacgagaaatggtgggagaagtacgatgctcaagggtggacacagaaaggagcacataagtatggtagacttaatgagcagccatggtgggagaagtggggggagcattatgatggaagaggatctgttctcaaatggacagacaactgggctgagacagagttggggaccaaatggggagacaagtgggaagagaaatttttcagtgggattggttcacgtcagggggagacatggcatgtatca

SEQ ID NO: 89738 - DNA, 1032 bp, Arabidopsis thaliana columbia
taggtgcactatagaagagctatgacgtcgcatgcacgcgtacgtaagctcggaattcggctcgagaggggttagcccagtcttgtcagtaatcatcaaagttgggactcgctccagttctttggatcatgatcctgctgcttctgctcgtatatacgaattcggttgttttggcatccaatctgccaaagttaacgactgggattggtgcgcttgcatggctgggattcattcttgcaactgcaggattatttttgttctaccgctgtagcaggaaggatccaggttacatcagaatgaatatccatgatccgcaaaccatgaaagatgatgaaccactcttaaaaatagagctaaacaatcctgctttgcttgctgggaattggacacagctctgtgcaacatgcaagattatcagacctcttcgagctaagcactgttccacctgtgatcgttgtgtagagcaatttgatcaccattgtccttgggtatcaaattgtggtggaaaaaaaaacaagtgggaattttttctttttcttctacttgaagttctagcgatgctgataactggtggcgtcactcttgcaagagtcttgagtgacccttcagctccatcttcttttggagcatggatgagccatgtcgctagtaatcatgtgggtgctttatcctttctgctagtggaattctgcctcttcttttctgtcgccgtcttaacagtcatacaagcgtcacaaatatcaagggacataaccacaaatgaaatggccaacgccctgcggtacaagctacctaagaggtccaggtggtcggtttaggaatccttatgatctcgggtgcagaaggaaacttgctcggacttcttagtaaaaggttataacggaggtaattgagtgtcatgaagaagacgcaacacagagaccagagggtattagcatgatgcagatgcagcggaatccaaatctttaaaaaggcaatggccatgttgctatcgatgttaacccgacacataattcacagtcagcacatgtt

SEQ ID NO: 89739 - DNA, 744 bp, Arabidopsis thaliana columbia
  unsure (1)..(744): unsure at all n locations
anaaaggggggnttcccttcncngggnaccccccttttttttggccncttttnnagntttcagggtccccaatttcgggggccatacccccaattgaaatggccaaccccccgcggtacagctccctaggaggtccaggtggccggtttaggaacccttatgatctcgggtccagaagaaactgctcggacttcttagtaaaaggttataacgaagatattgagtgtcatgaagaagacgcaacacagagaccagagggtattagcatgatgcagatgcagcggaatccaaatcttcaaaatggcaatggccatgttgctatcgatgttaacccgacacataattcacagtcagcacatgttcattctgccaactgcagccatagccataatagtaagtcaaagagtgacaatgttcctttgggtttgggacttggtcttagccgcaacccaacccgacctgttgtatctccataatatggcccgtgtcccaaatgtgcatttgtgttgtaagaaacacgttttctctcctcgagtcattgattacatcattatccgtttcatgtgaagatagtaatactcccttgttttcaattttctatgcaaaaattaaatgtcatgtttcttaaaaaaaaaaaaaaaaaaggaaaaaaaaagggcggccgctctagaggatccaagcttacgtacgcgtgcatgcgtgttcatagnngtcctaaannnnnnnnnnnnnnnnnnnntagct

SEQ ID NO: 89740 - DNA, 614 bp, Arabidopsis thaliana columbia
  unsure (1)..(614): unsure at all n locations
gctaaagagggttcggttctttaaacccctccatctctctctccttcattacactgtagagtgttaaagtaccactctatagccatggcttcctcttcttcatctctagctttctctctttctcttcttctagctttaatcctctgtttctcacccacccaatcctacaaaaccatcggcaaaggctaccgtttggtctccatcgaagaatctcccgacggtggtttcattggttatctccaagtcaaacaaaagaacaaaatctacggctctgatatcaccactcttcgtctcttcgtcaagcacgaaactgattcacgtcttcgtgttcacatcactgacgcgaaacaacaacgatgggaagttccatacaatctcctcccacgagaacaaccaccacaagtcggaaaagtcatcgggaaatcaagaaaatctccaatcacagttcaaggaatctccgggtcggaattatcttcagtnnnncaaanggttccatttaattttngcggnnaangnnggtntaacccgggaaaacctttaaanaaaaagcctttggggntaangggnaaaccggggggttaatttttttccaaanggttcccctggggtngggc

SEQ ID NO: 89741 - DNA, 451 bp, Arabidopsis thaliana columbia
ggaaaaaatctctctttcgaataaaaaaaaaactccagaatccaaaaatgggtcgtgtccgaaaatcagatttcggttccattgttcttgttctgtgttgtgtcctaaatagcttactctgtaatggaggcatcaccagtagatatgtcagaaaattagaagcaaccgttgatatgcctcttgatagcgatgtttttcgtgttccttgtggctacaatgctcctcaacaggtgcatataacacaaggagatgtagaaggaaaggcagtgatagtatcatgggtgacacaagaagcaaaaggatctaacaaagtcatttactggaaagagaatagcaccaaaaagcacaaagctcatggcaaaaccaatacttacaagttctacaattatacttctggttttatccatcattgccctatcagaaacttagagtatgacaccaagtactatta

SEQ ID NO: 89742 - DNA, 1044 bp, Arabidopsis thaliana columbia
cttccgttgcttttttttttcaatccgccgccacttttcgtttctcgtagcgttaaaatggcggtatcgtacaatgcattagctcagtctttagcgagaagtagctgcttcatccccaaaccttattcctttagagatactaagctgagaagcagatccaatgtcgtattcgcgtgcaatgataataagaacattgctcttcaagctaaggtagataacttgttggaccgcattaaatgggatgacaaaggattagctgtggcaatagcacaaaacgttgatacgggagcagtattgatgcaaggctttgttaatagggaggccctctccacaaccatcagttctcggaaagctacattctttagtcgatcaagatctaccttatggactaagggagagacatccaataacttcatcaatattcttgatgtgtatgttgattgtgatcgtgattcgattatttaccttggaacacctgatggacctacctgtcacacaggggaagagacttgttactacacatcggtttttgatcaattaaacaatgatgaggcttcaggaaacaagctagcattaacaacattgtactcgctagaatcaatcatttccaagcggaaagaagaatcaacagttcctcaagaaggtaaaccatcatggactcgacggttgttgacggatgacgctctgctttgctcaaagatcagggaagaagctgacgagttatgcagaacactggaggataatgaggaagtttcaagaacaccatcagagatggctgatgttttataccacgcaatggtgcttctatctaaaaggggtgtgaagatggaagatgttcttgaagttcttaggaaacgcttctctcaatctggaatcgaggagaagcaaaaccgtacaaagtaaccattttcttcgattgtctgtttagtatttgcgagaatttttttagttactcggaacttatactgttgttcattgtgcaactttgtattgtataaatagatatcctttgtgataaaagaaataaatgagtcctttttccat

SEQ ID NO: 89743 - DNA, 528 bp, Arabidopsis thaliana columbia
  unsure (1)..(528): unsure at all n locations
cccacgcgtccgcccacgcgtccggaagacattgtgaccatcattcatgagtatttcaactctgatgacataccagaactcatacgcagtcttgaggatttaggagcacccgagtacaacccaatttttctaaagaagctgataacacttgctttggacaggaagaatcacgagaaagaaatggcatctgttcttctctcatctcttcacatcgagatgttcaccacagaagatgttgcagatggtttcgtcatgctcctggagtctgcagaagatacagctcttgacattctggatgcgtccaacgaacttgctctgttcttagctagagctgtgatcgatgatgttttagcaccttttaacctggaagagatcagtagcaaactacgccctaactcaagcggaactgaaaccgtgaagatggctaggtcactcatctttgctcganatgcaggngagaggcttctaagatgcnggggaggtgggagcggttgggcagtggaagatgcaaaggtcaagatatcaaat

SEQ ID NO: 89744 - DNA, 480 bp, Arabidopsis thaliana columbia
gaaactgccccttgagtcaaaacaggctttttcgttttcgattctgaacgagctcgctctttctcatccaattctctccaccgtcttctactccgatcaatcttcaaattttcttaacactcatcgaccagatcgagtttccatcgatctaatcaatcaatcatcagatttgatcttctcaagaagatgagcttgaagggtacgatcgtattactagggctcttatggagcttccaggctacgttagggattagattcgtgatagaccgtgaagaatgtttctcccacaaggctgaatatgaaggtgatacgcttcatgtctctttcgtcgtcatcaagtctgactctcaatggcattttaacgaggatggtgtagatcttgtgatacatggcccaacaggcgaacaaattcatgacttcagggagcagataagcgcaaagcatgattttgttgtccaaaaaaaaggggtttacagattc

SEQ ID NO: 89745 - DNA, 968 bp, Arabidopsis thaliana columbia
cagtaccggtctggaattcccggctcgacccacgcgtccgcactcatcgaccagatcgagtttccatcgatctaatcaatcaatcatcagatttgatcttctcaagaagatgagcttgaagggtacgatcgtattactagggctcttatggagcttccaggctacgttagggattagattcgtgatagaccgtgaagaatgtttctcccacaaggctgaatatgaaggtgatacgcttcatgtctctttcgtcgtcatcaagtctgactctcaatggcattttaacgaggatggtgtagatcttgtgatacatggcccaacaggcgaacaaattcatgacttcagggagcagataagcgcaaagcatgattttgttgtccaaaaaaaaggggtttacagattctgtttcacaaacaagtctccttatcatgaaaccattgacttcgatgtacagcttggtcactttgcatactacgatcaacacgcaaaggacgagcatttcactcccttgatggagcaaatatcaaagttagaggaggctctttacaacatccaatttgaacaacattggttagaagctcagaccgatcgtcaagctatcgtgaacgagaacatgagccaaagagcagtacacaaagctttgttccgagtcgtttgcactgattggggccaagttttctccaaggttatcttctgcgtcgcttgtttgaacgcaaactcggcatggctcccggtgtctaaaagtatcgagtttattatgactttgaacttattttgccttaaaatgtaccagggaatctttacttaaaacctttttacagacagatcgtagttcattggaagatttgctttctcccatgttcaagaactaatcctctcgtgatgataattcttttttttctctttattaacagacaacttttccacaagctaggttttcatttcaatagagaaaatagtgattcctt

SEQ ID NO: 89746 - DNA, 440 bp, Arabidopsis thaliana columbia
cccacgcgtccgctttgattctcgttccaataatacttcctccaccatctctcctcctctcgttagatctaagaaacagagaaaacaagagagatagaatgagaaagggagttctaaatcctgacagagatcgtcagatagtggcacatgagttgcaggaaactgggtttagtccagaaacagagaaagtcaagaacaagaattttgaagaagatgaagaggaagaagatgaatctgtggagaagatatttgagagtagagaagtaccttcttggaagaagcagttgacggtgagggcttttgtggtgagctttatgcgaagcatcttgtttagtttcattgttatgaagcttaacctcacaacgggaatcatcccttcgctcaatgtctctgctggtcttttgggtttcttctttgtcaagacatggactaagatgctt

SEQ ID NO: 89747 - DNA, 495 bp, Arabidopsis thaliana columbia
ctctacgacttactatagggaacagctggtacgcctgcaggtaccggtccggaattcccgggtcgacccacgcgtccgaacgaagcatagtggcaaacccgtaaatacataataccaatgacgaccaatgattgcggaaaccacggcggcggcggaggaggaggaaccgccagtcgaatctgcggagtaatcatcggcttcatcatcatcggcttgatgaccatattcctcgtgtggataatcctccaaccgacataaccaagattcatcctccatgacgccaccgtctacgcctttaatctctcgcagcctaacctcctcacctcaaactttcagatcacgatcgcttcacgtaaccgaaactcaagaatcggaatctactacgaccgccttcacgtctacgctacttaccggaaccaacacatcactctacctacagcaatccctccgacgtaccagggccataaagaagacaacgtttggtctcctttcgtt

SEQ ID NO: 89748 - DNA, 452 bp, Arabidopsis thaliana columbia
ccatgatcatgagggggattcacaagtagagtctagagaaaagagagaatgggtgagaacaataccaaattccttatgcaatttgcaacttttgcaatggttttaacctttgcgatgatggtcaaagaagctacaagcatgtccatttgtgacatggacataaatgatatgcagaaatgtcgcccagccatcactggaaacaatcccccacctcccgtcaatgattgctgcgtagtggttcggaaagctaatttcgaatgcttatgcagatttaagttttatctcccaattttacgaattgatccatctaaagtcgtggctcttgtagctaaatgtggtgttacaacagtccctcgttcttgccaagtttgaagaactaagctgaggacaaatctctctatggggctgcaaacatcgctggatcttgacaagatcttgtcttgcatctgaag

SEQ ID NO: 89749 - DNA, 691 bp, Arabidopsis thaliana columbia
gatgagggaactccagaacgaacatcacatgaaggcttttggtttgcaggtttcagctgctggttatgaccgccaaggtgtggctgaccacgcaagtaacctggctaccaaaattaggaataatctcaccaattctatgaaggcacttggtgttgacatattgacagggtttggcgctgttctgggcccacaaaaggttaaatatggtgacaatattatcaccggaaaagatataatcatcgcaactggatctgtaccgttcgtcccgaaaggaattgaagttgatggaaagactgttatcacaagtgatcatgcattgaaattggagtccgttcctgactggattgcgatagtaggaagtggttatatcggtcttgagttcagtgatgtttacacggcccttggaagtgaggtaacttttattgaagcactggatcagctaatgcctggatttgatcctgagatcagtaagctagctcagagggttttgataaatccaagaaagattgactatcatactggagtctttgcaagcaaaattactccggcaagggatgggaaaccagttctgattgagcttattgatgccaaaaccaaagaacctaaggattctttggaggtagatgcttgctcttattgctactgggagagctccattcaccaatggactttgcttgggaaatgttattgt

SEQ ID NO: 89750 - DNA, 854 bp, Arabidopsis thaliana columbia
  unsure (1)..(854): unsure at all n locations
ctctatacgactcactatanggaagctggtcgcctgcaggtccggcccggaattcccgggtcgacccacgcgtccgagatgatgagacagagagctgcagaagtcgctggaacctcgggttgattaatttttgtaaatactaatttcatttaggatctaagcagaagtggaaatgtaatcttcttccgaaagttaagaagataaaagaaactggtgtttatgatctccacttgaagaaggtgaagaaaaagtgaataacagcagctagtgaagacatgaaacagccatataacgatttaatttagatggattcctatttaacagtcgcaagtcgtggagtgatgatgatgaataacttgagtgacttgaagagtttctcagcttaagtgccaattgaagcagaagaatcgtcgtagatgctaacttatgctgtgtgtaaggtcgcgaaaaggaagaaatgagattccagactcttcgattagttcagtggcttgatctggctggtgattctttgactatacatatattactctgtgactgattactgtcttctacctctccgtcttttttttgtagtctggtacaatttgtaaaatagcttatatccctttgggggatgtggcaggaatgtaatatatatacatataaatagataacttgctagataagtaagaaagatgaagtgtgtctctttaaggatgtttccttcgcttacatttttgggcgaacttgtattaacattttagtatcgtttcaaaaaaaaaaaaaaaaaagnnnnnnnnnnnnnnnnnnnnnnnnnnnnnnnnnnnnnnnnnnnnnnnnnnnnnnnnnnnnnnnnnnnnnnnnnnnnnnnn

SEQ ID NO: 89751 - DNA, 632 bp, Arabidopsis thaliana columbia
  unsure (1)..(632): unsure at all n locations
atctgaaacaaaaatggtgaatcaaagaaagctacaagtagtagtaagaggaaaaggagaattatcctctcattacaaccaaagtagttgagtatttgcagccagtaatgtgtcgagagcttctctgcaaatttccagataactctgcttttggattcgactactcacagagctctctttggtctcctctcttgcctcgaaattacgccagtccttcagatctagactccgacagttgcgtttgtcggaatcttaagctaggggagtttcaagtaggcaagaagaagaagatgaagatgatgtcaatgaagaagaacaagaagaagagtaaattactgaaactagacataccttcaatgaagaatgatgattcttctcctaaaattggctgttttcctcttcctaccaagggatggaatggtgtgttaaaggcagcttcaaaacatttcaagaaatcgaaaaagaaganagantcattcgctgatgccaagcttctcgacttcaaatactaagattatagcaacttcaattgcttttcattgtantcaanaattactagacctttgatgaattgtgaagttgagctgtttctattatggtcatcatgtaatcatttggagtgtttgatcaaa

SEQ ID NO: 89752 - DNA, 500 bp, Arabidopsis thaliana columbia
  unsure (1)..(500): unsure at all n locations
tgannnnnnnnnnnnnnnnnnnnnnnnnnnnnnnnnnnnnnnnnnnnnnnnnnnnnnnnnnnnnnnnnnnnnnnnnnnnnnccacgcgtccggtgcaagtcactcttcaaggatctgaagtttttcttgagccgtgaggttccaagagagtccctgcaattggtgattactgcttttggtgggatggtgtcttgggaaggagaaggtgcacctttcttggaggatgatgagagtattacacatcatatcatcgataagccaagcgctggccatttgtacctttctagggtatatgtgcaaccacagtggatctatgactgtgtgaatgctcgcataatcttgccaactgaaaagtacttggtcggaagaattccaccgccacacttgtcaccatttgtggacaatgaagcagaaggatacgttcctgattatgccgaaaccatcaaaagactacaggcagcagcaagaaacgaagtgcttccattgccaggtgttgggaa

SEQ ID NO: 89753 - DNA, 818 bp, Arabidopsis thaliana columbia
  unsure (1)..(818): unsure at all n locations
gaattgcactccccgcnnnnnnnnnnnnnnnnnnnnnnnnnnnnnnnnnnnntgccgtaccggtctcgaattcccgggtcgacccacgcgtccgcactatcaaatgaaagtctgaagacaaattcttccattagaagaagaagatggctcttctctgcttcaattctctcccttctctctcttctctttcttcttcttcttcctcgcgccttcttcaatctccgtctttcgcttctccagttttgagccttaaacccaacgctgtcgagtccaagaacagagtctctctcagtgcttacagcttgaactctagccatggaagaattgtggtgaaggcggctgcttctggcgtggacggggctgagcctgagagcaaggaggaaccaaagactgttgttgctgctgttccagtggataaactaccgttggaatcgaaagaagctaaagagaaactgctcttggaattgaggctgaagatgaagctggccaaaaagattaggctacgcaggaaacgtctggttcgtaagcgtaagatgaggaagaagggtcgatggccaccttccaagatgaagaaaaacaagaatgtctaagtgactcaactgtttgctgcttttcgtattcgttttttggaatggtctttttggtgttcaaagaccattaatgtacttcaaatgccacccattggtttggaattaactttcaaagctgagttcctttaaagaaaaaaaaaaaaaaaaaagggcgggccgctctagaggaaccaagccttcctaccccttgcctggcgacggcaatagctctttcttttgggggccccc

SEQ ID NO: 89754 - DNA, 432 bp, Arabidopsis thaliana columbia
accacgcgatccggtaaaaaatgtcgttgtgtttggttatagcttgtatggtaacatcatggatcttcttacaccgatggggacaaagaaacaagagtggtccaaagacttggcctttggttggagcagcgatcgaacagttaactaattttgatcgaatgcatgattggctcgttgagtatctttataactcaagaacagtagtggttccaatgccattcactacttatacatacatagctgatcccatcaacgttgaatatgtcctgaaaacaaacttctccaattaccccaagggagagacttatcattcttatatggaagtattgttgggagatgggattttcaattctgatggagagctttggaggaaacagagaaaaaccgcgagtttcgaatttgcttccaagaatcttagagattttagtactg

SEQ ID NO: 89755 - DNA, 373 bp, Arabidopsis thaliana columbia
ctaactaagacatttaccttgcacttttgatctgtgttctcagtagattattcgtaccaccatggtcggcggggaagttaaaattcttcgcgggtacgaactccgtctcatccggtgcaccgtctctttgccactatcagatcctcctctcgatgaatcccaacccggaacccatccacacgactctcttataatgtcccttttgtcttcaatcgacgctgggaactatcttgaagctttagcctccgaagctactaatctaatacgcggagagtacgagttcgacccggttgattccgccgagcgagtttactccgagcttctcaacaaagtcgaatcgttcgtgttgaacgattcttcggatgaaatcgat

SEQ ID NO: 89756 - DNA, 656 bp, Arabidopsis thaliana columbia
  unsure (1)..(656): unsure at all n locations
ggganccgaagctttggctaantccggccaggaatccttttctacccgtcgtntccctgagatcaaaaccgacttcttgactggtcttgcagcggttgaatccccccgcgagacacagccttatctcccgtggtcttgatcccagtgctctacgctggatccgcaagagcctcacacgatgaatcaacagaagaagctatcgagtttgctactcagtacgggaaagagaaagagctatgcaagactggagattccgttgttgctctactccgagtcggtaatgcttccgtgatcaagatcttgaccgtcaagtgatgattccactcaaaaattcacgtttttggcgtttggggaacgctactttaaacgttttattatgaaactattcaagattgtgattaaaatcttgagatagaaaactcaagttctattttttgcttattaccacaactactgtgaccggtgaatccacttaacagctccttttgggatattttggttgtattgaaacctattggatcattcatacacgtatcaattatcatgatttcttttgttgtccaaataaaaaaaaaacaaagggcgcccgctctagaggatcccaagcttacgtacgcgtgcaggcgacgtcatagatcttctatagtggttcctaa

SEQ ID NO: 89757 - DNA, 869 bp, Arabidopsis thaliana columbia
cgctttttgtttcagaaaaaaaaaacagagaaagaggtgtttagagtatctttgtcattggcgatcctcaaaaaaacctttccgaatttgacccttattgatatcctgaatcttctgctcggttctcgccggagagaagacacggagaagagggttttcgaaaaggaggatgagaggttccaataacaccgatctatttgaccctaagacggagatggattccaatttctctcgccatggttcttcctccgaaggtgattttggtttcgctttcaatgacagtaacttctccgatcgtttgctccggatcgagatcttgggtgggccttcggattctaggtctgatgctgaaggatgtacgagtattgccgattgggctcgtcatcgcaagaggagaagagaggacaacaagaaggacaatggtgttgcgatttcagacattgtggcatgtgctgaagaacagattctaaccgataacaaccatcctgatttcgatgatgctcctggtggtgataatcttgacgatgaacgataggcaatggttgaagaggctttatcaggtgatgatgatgcatctagcgagccaaactggggtattgattactactactgttgttagagtttaagaactgcatattaactctcctatcttggcctgcaaaagcccctttttctacaagctgttctctaatggaatgagggaattagaacacagacatgtgccccttataatttctgcacaagacgaaggtgcttttgatgggatcttttgaaactttatggtttaggcaacttattctaaagtgtcaacaaccaggcaccccgcttttatttaaaatgttcatttattggcttgcctggacaaagtt

SEQ ID NO: 89758 - DNA, 302 bp, Arabidopsis thaliana columbia
tttttagtgatcacagaggccagagttgagagtttgacaccgtcatcaatggcagaaccggaggtgattcactcatggtctgcaccaagatctctcagcaccagcctcatgtactcctttgctcagagacttgacactgaagttgtcgacgagccgttgtatgcatcatttcttaaagctacaggttttgataggccatacagagacgaagttctctccaagatggagtgcaatggagagaaagttgtgaaagatgtcatatatggatcaggatctaagaagtaccggtattgtaagcatat

SEQ ID NO: 89759 - DNA, 804 bp, Arabidopsis thaliana columbia
  unsure (1)..(804): unsure at all n locations
gcggnnnnnnnnnnnnnnnnnnnnnnnnnnnnnnnnnnnnnnnnnnnnnnnnnnnnnnnnnnnnnnnnnnnnnnnccacgcgtccggtcgttcggaactctgcaacgagagttagggtttatacagagcaaagagaaggagaaagcgaaaccaaaaatcgacattaatggctgacgaagattacaacgacgtcgatgacttgggatatgaggatgagccagcagagcctgagattgaagaaggagtagaggaagatgttgaaatgaaggagaatgatgatgtcaatggtgagcctattgaagctgaagataaagtcgaaacagaacctgtgcaacgtccacgcaaaacgtcaaagtttatgaccaagtatgagcgtgctcgtatcctcggcactcgcgctttgcagattagcatgaatgctcctgtcatggttgagctagagggtgagactgatccacttgagattgcgatgaaggagcttaggcagcggaagataccattcactattagacgctatctacctgatgggagtttcgaggaatggggagttgatgaactgatcgtggaagactcatggaaacgtcaagttggtggtgattgataatctgaccagagacaaatcgacaaatacgtatgtaacttgcaagctttcctctcttatggatgataaattttctgatgttgtaatggaactaaaaatcagtgaaacttatggataaaaaaaaaaaaaaaaaaagnnnnnnnnnnnnnnnnnnnnnnnnnnnnnnnnnnnnnnnnnnnnnnnnnnnnnnnnnnnnnnnngtc

SEQ ID NO: 89760 - DNA, 571 bp, Arabidopsis thaliana columbia
  unsure (1)..(571): unsure at all n locations
nnnnnnnnnnnnnnnnnnnnnnnnnnnnnnnnnnnnnnnnnnnnnnnnnnnnnnnnnnnnnnnnnnnnnnnccacgcgtccgaaaaaagccagcgagagagacaaaggtcagaagatttgatttttcttattcctcttcaaaggcaaacaatttacacagctatatatatatttttagggtttttgagtatctcgcgaggttttacatagatttctccattatggattcgatgatgaatcagaagactgttttggctgtgacggatgatgtggtgttacctgttagctctgttttagctataatgaaagagcttggaaaggaagtgattgagagttttgatcctctgattattactcaagcatccacaataaatcagtttcctttggatgcttcctctgtggaggcggtattagccatttccaaaacatctgatttcccaagtgataaaatatgtggtgagttctcaagaatcttgaagcctggtggtacggtttttgtgtgcaaagttttggagggtgaaacgggagaaattcaacagaccattcaaaggagagtgacattggctggttt

SEQ ID NO: 89761 - DNA, 1635 bp, Arabidopsis thaliana columbia
  unsure (1)..(1635): unsure at all n locations
nnnnnnnnnnnnnnnnnnnnnnnnnnnnnnnnnnnnnnnnnnnnnnnnnnnnnnnnnnnnnnnnnnncccacgcgtccccaccacttttttttcttttgtaattttcctttctttttttttttcttttgaattttcgggaagcagcatttccactggagctgcaaaatcttcctatcaaaattatagatcgatccaagttttagattcgagaattattttctccaaattagatttatatatcaaaaggaatcgaaaatagacagcaatttttgttttgtcggatcgtattgaatcagctgtgaattttagcgccaatttaaccactgaatcgtttgattagaagctaagatttggtcttacgatcgatctaagtagggttcttcttcttaagtgtgtgttttgttaaaattagtaaagagagatggagaagaagaaagtcgcgactccgctagtgtgccatggccattcgagacctgttgtggatttgttctacagtccaatcactcctgatggtttcttcctcatcagcgcaagtaaagattctcaaccaatgttgagaaatggggaaactggagattggattggtacatttgaaggtcataaaggtgctgtgtggagttcttgtcttgataacaatgctttacgtgcagcttctgcatctgctgatttttcagcgaagctttgggatgctttgactggggatgtcttgcattcttttgagcacaagcatattgttcgagcatgcgccttctctcaggatacgaaatatctaatcacaggaggatttgagaaaattcttcgtgttttcgacttgaatcgcttggatgcacctcctacagaaattgataaatctcctggttctatcagaacactaacatggcttcacggtgatcaaacaatattaagttcttgcactgatattggtggtgtgaggttatgggatgtgaggagtggcaaaatagtgcaaactctagaaacccagtctcctgtcaccagtgctgaagtgagtcaagatggacggtatataacaactgccgatgggtcaactgttaaattttgggatgcaaatcattttggactagtgaaaagttacgacatgccctgcaatatcgaatctgcatcgcttgagccaaaatctggcaacaaattcgttgctggtggagaagatatgtgggttcgactctttgatttccacaccggaaaggagattggatgcaacaagggacatcatggtccggttcactgtgtgagatttgccaccaacaggtgagtcttatgcttcagggtctgaagatggtacaatcagaatttggcaaactggaccggtgaatcctgaagagatcagcgagtcaaagccgaagcagagtgtggatgaggttgctcgtaagattgaaggctttcacattaacaaggaaggaaaaaccgcagagaaaccatctgatgcttaaaccaagaaaagaaccaagaaaaatggctgcttctctttgtcttcttactgtgtttttacttccagactgaatatacggaaattcaaaacaagtgtttgaaaaacagtcgttgtcaatcttcattcgagtcaagtttatggatgtggctgaaaatttacgnnnnnnnnnnnnnnnnnnnnnnnngcc

SEQ ID NO: 89762 - DNA, 1049 bp, Arabidopsis thaliana columbia
tctgcagtacccgtccggaattcccgggtcgacccacgcgtccgagggcataaaggtgcagtttggagttcttgtctggataacaatgcattacgtgctgcatctgcttctgccgatttttcagccaaactttgggatgcgttaacaggggatgtgctgcattcttttgagcacaagcatattgtccgagcatgcgccttctcagaggatacaaaatcgttgctcacaggagggtttgagaaaattcttcgtgtttttgacatgaatcggttggatgcacctcctacagaagttgataaatctcctggttctatcagaaccctcacatggcttcacagtgatcaaacaatattaagttcatgtactgatattggcggtgtaaggttatgggatgtgaggagtgggaaaattgtgcaaacgttagaaactaagtctcctgtcaccagtgctgaagtgagccaagatggacggtatataacaactgctgatgggtcaactgttaaattctgggacgctaaccattttggactagtgaagagttacgacatgccctgcaatattgaatctgcatcgttggagccaaagtctggagaaaaatttgttgctggtggagaggatatgtgggtccgagtgtttgatttctacactggcgaagagattggatgcaacaagggacatcacggtccagtacactggggtaggtttactcccactgggttatcctatgcctcgggatctgaagacgggacaatcagaatttggcaacaacacccgcaaattccgaagagaaccaaacttgctcaaagccgaagcagagtgtggatgaggttgctcgtaagattgaaggctttcacattaacaaggaaggaaaaaccgcagagaaaccatctgatgcttaaaccaagaaaagagccaagaaaaatggctgcttctctttgtcttcttactgtgtttttacttccagactgaatatacggaaattcaaaacaagtgtttcaaaaacagtcgttgtcaatcttcattaaaatcaagtttatggatgtgagctg

SEQ ID NO: 89763 - DNA, 464 bp, Arabidopsis thaliana columbia
ttcattcttgtagctagtgcgctcgagagatgcaatgtacaaaccaaaagaaatggggcttctggagaatggggaagtagctaaattattttccttacgggttagtattaattctagtcaacttgtaacagctactggcttctgttactttctgtattaatatcaccttcccatttcttttagcagcatgtgaacacagatatgtcatcacctgatggaggccatgttagggagagagaatcgcatcctgaacatgacaaacgtgctcagctgagcaatcaagctgaagcagttggtgttgggagaatggaacagtctgattcaacaagtccattaccgaataatctggcagtagaaaggagtttaacgacctctcttcagaaagttgcaagttttttggcccgttttatcctccaacttcttggcagtctatgtctcatgttccggatcttgggaagacttgt

SEQ ID NO: 89764 - DNA, 350 bp, Arabidopsis thaliana columbia
ggtcctacaagattgggcttagcggtgaagctatgagccttcacaccttagctggcagttcagctgtgaaatggtggctcaaaggattcgtggtcaagaagcaacccttgacctgggacaagtcttcttttgatacaccgagaggcaacgaaccactggctttggacatgaacacaatggggaaaggtcaagtttgggtaaatggacataacattggacgccactggcctgcctacacggctcgtgggaactgtggacgttgcaactatgctggaatttacaacgagaagaaatgtctcagtcactgtggtgaaccttctcaaagatggtaccatgtacctcgttcatgg

SEQ ID NO: 89765 - DNA, 505 bp, Arabidopsis thaliana columbia
  unsure (1)..(505): unsure at all n locations
cccccntgcctgtnagcnttttgtcccggggcacgnccntgcttggcttgcccaggggaggncagttgggtaatggcanacntggcccccactgcctccttcacggctcggggaactgtggccgttgcaactntgctggaatttacaccgggaagaaatgtctcagtcactgtggtgaaccttctcaaagatggtaccatgtacctcgttcatggctaaaaccgtttgggaaccttctagttatatttgaggaatggggtggtgatccaagtggaatctctcttgttaaaaggacagccaaatgaagcttcttacttcaaattttttccggaagcatgcagagattgtcatgtacagatatagttgcattcattggctcattgtggaagaatattatatatatatgtatcctgctctaaaaatgtattgcaattgtataaaataatatttatacaatagaccaaaacaagccaatctcaatcnccccataagaggggttcttctt

SEQ ID NO: 89766 - DNA, 536 bp, Arabidopsis thaliana columbia
agctctattacaactcactttagggaagagctggtccgcctgcaggtcccggtccggaattcccgggtcgacccacgcgtccgtgtaaaaccagagaattttctgcttgggcctcctggaactcctgaagagaaaaaacttttccttgtagacctcggcttagcatccaaatggcgagatactgcaactggactacatgttgaatatgaccagcgtcctgatgtttttagaggaacagtacgttatgctagtgtacatgctcatcttggcagaacttgcagtcggagggatgacctggaatctcttgcttacactcttgttttccttcttcgaggccggcttccatggcaagggtaccagggagagaacaaaggtttccttgtttgcaagaagaagatggccacttccccagaaactctttgctgcttctgtccccaaccttttcgtcagtttgtcgagtatgtggtcaatttgaagtttgatgaggagcctgattatgctaaatatgtctccctttttgatggaatagtcggccc

SEQ ID NO: 89767 - DNA, 589 bp, Arabidopsis thaliana columbia
  unsure (1)..(589): unsure at all n locations
ctctnnnnnnnnnnnnnnnnnnnnnnnnnnnnnnnnnnnnnnnnnnnnnnnnnnnnnnnnnnnnnnnnccacgcgtccgcttctctctctctctctcgaagttcatcaatggctcttcatccacaccttcaagactccaagaatttcagagacttttgcggaatcgacggccagatttcgccggaattaggatttaaccgctcagagaatctccatgatcaatctcagcatcctccatatattcctccatttcatgttgctggttttgcaccgggaccggtggttcaaattgatggttctgatggtggtaatggagctgactttgagtggaactatggtcttggtcttgaaccaagacgtgagaggataaaggaacaagatttcttggaaaacaattctcagatatcttctattgattttttgcaagctcggtctgtatcaaccggattgggtctgtctcttgacaatgctcgtgtcgcttcttctgatggctctgcgttgttgtcgcttgttggagacgatattgatcgcgagttacagcggcaagatgcagatatcgataggtttctcaagattcagggggatcagt

SEQ ID NO: 89768 - DNA, 354 bp, Arabidopsis thaliana columbia
atcatctctcttcttcttcttcctctcaagtatcgaaaccgaaacagagaaacatcaccaccaatgggatgttttatgggttgtttcggtctctcttccaacaaaaaacgcagaaattccattaggaagatccttcctcgagatcaaagaatctgtagctatgagccgctgctttcttcagatccgacagatttcagtactgtttcagataaccctgaaaagatctcaaattcgaacctcaggagtgaggtaggggacgaggaggagaagaagaaggtgactaagaagacgaggaagagagtcagatttgacttgaatgtacaaacctatgaacctattgtaccttcaagatat

SEQ ID NO: 89769 - DNA, 471 bp, Arabidopsis thaliana columbia
gcgtcccttcttcttcttctttgagttttttttttttatcattcttgacgtcatgataaagatactcaacccccactcacaccattctcaaaccacaactcttaaaacagctgagatcttgtctaaatacagacccattgcaccaaagcccgggacgcctcgagtgaacgacgatgatccttcttcctctatgtctcacaaaatcagccaatctccttaccttcgtaacctctggcctcagcttcaagcgcgacctacaagaacccgcaagcgaggccgaggcgggatgggtccctcttctcttgctatgaagagaccaaagtcgtcatgcggttcttctagtacttctactatttctacacaacgtgttcttggacctattaaaacactgtcgtttcaggctttcactcatcataggttacctaacctacctcaagttggctacggttttgagaatggtgtcctttctac

SEQ ID NO: 89770 - DNA, 448 bp, Arabidopsis thaliana columbia
  unsure (1)..(448): unsure at all n locations
cggancccagggccgagggagtcccacgcgtcctctcctatagttttgtttaatcgttttcgcggcggtgaaattcatgagagcttaactggtgttgttttgagcttttgagcgatcttttgggtcttgctcttgctcttgaggcagagaacccatagacagttgttttgtctgtttgttggtgtcagatccaaaatcaagaggctgttatagctttgacttggaagtgattcgacacaatgaaggaagaagattcaaaaaaaataagagggtaggaatctatttggtcgcttttgcttcctcctattctggggagaatttgggatcttggagtcgaatccgttgtgagaagaaggatctttttgagcttgtgtactgtgtcctctcagttgattcatcgcagagagaagaggtcctgtcatgtctatgagtattgtattcatctgaa

SEQ ID NO: 89771 - DNA, 385 bp, Arabidopsis thaliana columbia
cgatattatccagaaacagtagtgtcgaagaagaagaagaagaagaaggagagattctgagtttagggttttgtttgtgttgcttcgaattgagcagctatggcttccgtgttgctacttcttctggtgttcgtgtttgatctcattgcttttggtcttgctgttgctgcagagcaacgaagaaccacctggcaaatttctagagaatcaagagatttgagctactgtgtgtatgacaaggacatagcaacgggtctcggagtcggttctttcttggtcttattagcgagtcagctcttaataatggtggcgagccgatgtttatgctgtggaagagcattgacaccaagtggttcaagatcttgggcaatttttctcttcatca

SEQ ID NO: 89772 - DNA, 735 bp, Arabidopsis thaliana columbia
  unsure (1)..(735): unsure at all n locations
nnnnnnnnnnnnnnnnnnnnnnnnnnnnnnnnnnnnnnnnnnnnnnnnnnnnnnnnnnnnnnnnnnnnccacgcgtccgcgttaggaacatgggttgggacggagcgctagcgaacgagtcgtaccagtgggttgaagctaaggtggcgtttcagcctccgatggggcggtggcaaacggccgtgagagacggcttattggaggctgggattgtccctaataatggtttcacctatgatcatatcaatggcaccaaatttggcggtactatttttgaccgcaacggcaatagacacaccgccgccgatttgttagagtatgccgatcctaagggtattaccgtccttttgcatgccaccgtccaccggatcttgtttcgtactcgaggtacgaccaagccaatagccaacggagttgtggtaccgagaccggaccggtcaggctcacagagcttacctaaaggaaggcgccttgagtgagatcatcctatcggccggaaccctagggagcccacaacttcttatgctaagtggtgttggcccatcggctcaattacaggcccaaaacatcacggtggtgatggaccagcctcatgtgggtcaaggnatgtatggcaaccctatgaatgccgtgtttcgttcctttttccagtcccccgtttagggtcttactcatttgaggtttttggggatttaccgggggaaggcaacattttttggaagcccccggttnggt

SEQ ID NO: 89773 - DNA, 367 bp, Arabidopsis thaliana columbia
tttcttcaatcgagattttatcgctttttgattcgagaatttcgaaatcggaacccaccaccaccaccctccatcgtcgccaacagatccaacggttctctgattatttttatttgaaaattgtcttctttgttctccctctcgctgggtttgattctgagattgattaatctaaatgggtcgcatcgagatttagaagaaaagggaaatgttggcaatggagaaagaatttgattcaaagcttgttcttcaagggaactcatccaacggtggctaatgtttctagaagcaaaaagcttctccctttaaagctcctcaagaaaatttcaccagccatgatttcgaatttggcaagatctatggtgtt

SEQ ID NO: 89774 - DNA, 441 bp, Arabidopsis thaliana columbia
  unsure (1)..(441): unsure at all n locations
gggttgtggaccatggactaattatcaaaactcgatgcacggtggtgattgcagaagaaactgttgtaagaagtgttaccttgcagaccagtgcattggagggtggtgtacgaacctatggacagactttgcaaaagtagttcgtctcacacattaccgaaaacggtgatccattttgccagtcaatttataagtcagttcatagagcaatgccgtaacttctacaagttctttttctataatcagttcattccaaacaacaatcaaggtataaattgattgtactcattatataattctgtcgtcatcttatatgttggaaaaattcttaagattatattatagcctacgttacagggtcagtgatgtagtataccacaaattttccatgaaaatatcattaaataattatatttggtggtaggaaacatncatgaaccc

SEQ ID NO: 89775 - DNA, 666 bp, Arabidopsis thaliana columbia
atccaattgaatcatagcaaattaagtttcgcattcgaagtttttcttgatttgataaaaatggcggccatgcaactaacaagaaccgctctagttggtctctcaaaggctttccctggaatcaaagctccggctactctcgctgcttcttcccggaaagtctctcgcatctgcttcgccacctccgttagccaaaacgagggaagagatcctctagataacgctagagactcgagagctgattcagcttacggatcgaagaaatggagggaggacatcggagaaaactatgcccaagcggctaaagacaaggctaacgaaggagcaagcaaagctgcagataaagcctacgagacaaaagagcaagcaaaggataaagcctacgaaactaaagagaaagcaaaggatacagcctacaatgcaaaagagaaggctaaggattatgctgaacggactaaagataaggtgaacgaaggggcgtataaggcagcggataaagcggaagatacaaaagaaaaagcaaaggattacgcagaggatacaatggacaatgcaaaagagaaagctcgacatgcaaaagagaaggtgaaagagtatggagaagatactaaggagaaggcagaagggtttaaggagactgtgaaaggtaaagctgaggaacttgga

SEQ ID NO: 89776 - DNA, 628 bp, Arabidopsis thaliana columbia
  unsure (1)..(628): unsure at all n locations
nnnnnnnnnntcagggaccnggcctgaattcccngggcggcccactgcagtccggactaaaagaagcaaaatcttgagtagaaacaaattttcctgtatctctctctcttgtaatctccgacgaagaaacacagttttatggcaaccaccagatcgaagagctttcagttgatcaccagcttaaggaaacacctagttaacacacgcgcttccacacgcgccaccgcctctgctctcttcccttcacgtcggagtggacattcctcggcgtatgacaagaacgtggaggatgaattgcatgcaagtgcagtacctgacgaagttataaagccagattctgataaatattggtctcctcaccccaaaacaggagtcttcggtccctctacgactgagcacagcgccaccgccgagggtgcacaccaggacacagcagtgctggaggagaccgcctggtttcgcccaacaagtctcgaggattcggacaagactcaccatgtttgagtctctctttctctctgctttttactggcgtaatgttgtaataaagttctacggaaacaaactgtaatgtaaatagggcccctgctaaaataaaatggttgacatgtgtaagggttgtncgttc

SEQ ID NO: 89777 - DNA, 1059 bp, Arabidopsis thaliana columbia
accgttaccaaaactcgccggaagagatggcggacgagatggagaccaaaggagagaagaagtacaagtatagcatgatgattcctacctacaacgagcgcctcaacatcgctatcatagtctacctgattttcaagcatctccgggacgttgattttgagataattgttgtggatgatgggagtcctgatggcacacaggaaattgtcaagcaactgcagcaattgtatggtgccgcccgtccccttttaagagctagagccaagaagcttggtttgggaactgcatatattcatggtttgaagcatgctacgggtgatttcgtcgtgatcatggatgctgatctttcacatcatccaaaatacttaccaagtttcatcaagaaacaactagagacaaatgcaagtatagtaactggtacacgatatgtaaaaggtggtggtgtacacgggtggaatcttatgcggaaactcactagtagaggagcaaatgtgctagctcaaacacttttatggcctggtgtatctgatttaacaggatcattccggctatacaagaaatcggcgcttgaagacgtgattagctcatgtgtgagtaaagggtatgtctttcagatggaaatgattgttcgtgcaaccacaaaaggataccatattgaagaggtaccgatcccttttgttgacagagtctttgggacttccaaactcggaggatctgaaatagtggaatatctaaaaggcctcgtctatttcctgcttgcaacttaagacacacccagcaattcaaccacccacgagtctctctttaaactcctcatttgttccatggcttcatagatttctcttaacagttgaactctgatcatgtcgtttagaaacttcacttactttgacttcaaagagtcgcatcttttaagactcaaaagttcatattatagacaatgttgattttgaatgttggaaaaaaaaaaaaaaaaaaaaaaaaaaaaaacaaagggcggccgctctagaggatccaagcttacgtacgcgtgcatgcgacgtcatagctcagctatag

SEQ ID NO: 89778 - DNA, 569 bp, Arabidopsis thaliana columbia
gacttactatagggaacgctggtacgcctgcaggtaccggtccggaattcccgggtggagccacgcgtccggtcgtctcttttcttctctccgagtagcttaagctttcgtcgtcgagctctttcccgcttctggcgatgttcatcctcagagttcattccgttgactccgagagaccaatctccgttgaagaagaagaatcaggtttcacttacgcatcgaaaagagctcagcctcctcttaaactcatacaaccatctctcaaactcaccgaccgcaaaggcttgatccatctctatcgcaaatcttcacatagctctctgcctaaccctagctcccgatccaccactctcttcatcgtcgctgttcccaattatctctcctctctcgattttatccgtttctgtgattcccgcatctcccaagtctccgacatcctcttcatcaggaacgatggaatggaagatagatataggggttcttatcacattttctgatcaacccgaagctggtggtttctacaaccccttggatgggaaaaagctcccacccatttgagggtgggggtt

SEQ ID NO: 89779 - DNA, 424 bp, Arabidopsis thaliana columbia
ctttgattgcttttcttttcactgcttaggttctttgtctgttaggtttagagagatcctttccaaagatccaaagctggaaactttctagtcaatgctgcttaagatctgactttttcccttcaatgtcgctctgaaatcccctaaatttttgggcccatcaggtgaataaagcggaggtcagaagatgggttctggtttaaatgacacattatctcggaactacaatggtttggagctatgggagataatagtgattgttctctccgcgatattcgttgtagttttagctatatcgctatggcttactttcagaagaaaaacctctagatcttcttctaatctaatccctgttagtcgccagattcctcctagtgttcctgaagagattaaagagattagagtcgacgaggtttcttcaagc

SEQ ID NO: 89780 - DNA, 1184 bp, Arabidopsis thaliana columbia
  unsure (1)..(1184): unsure at all n locations
accggactttccgggtcgacccacgcgtccgcagagtaaggagaaaacattggcaaagatggagagaggtgggctctctgaaaaggttgctagagacagtgttctcgttttccgttttgctgatgttgggaagcttccaccgccagtgcttcagtttgttgaagtgtcttttggttacacaccggactatcttatttacaagaacattgactttggtgtcgacttggactcgagggttgcccttgtgggacctaatggagctggaaagatacacttttgaagctcatgactggtgaattgcacccaactgaaggaatggtgcgacgtcacaaccacttgaagattgctcactaccatcagcatctggctgagaagctagacttggaattgcctgcacttctctacatgatgagggagttcccgggtactgaagaggagaaaatgagagctgcgattggtaggtttggtctaactggtaaggctcaagtgatgccaatgaagaatctatctgacggacaaaggagcagagtgatctttgcgtggttagcttataagcagcctaacatgcttcttcttgatgagcctactaaccatttggatatcgagacaatcgactcgcttgctgaggcattgaatgagtgggatggtggtttggttctggttagtcacgacttcaggttgatcaaccaagtggctcatgagatatgggtttgcgagaaacaatgcatcactaaatggaatggtgacattatggacttcaagaggcaccttaaggctaaagccggacttgaagattgaagatagagagtcgagtcttcttctcttgatggaaaatggaaaagactcagattggggtcacatgctaagagagagagagggaaggctttggtttttttgatgggtttgggaatggtttttaacgagttctaaagccacacacttgagagacagagaaaccatactcactaatctctgcatttccttaagaggtcagagattctttctatattagtattatcattatcatgtgcaccttctttttttttcgttattgttgttgaacgtttttttgaaggcgaaacagagagaaaagtaataaaaaaaaaaaaaaaaaataaaaacaaagggcgaccgctctagaggatccaagcttacgtacgcgnnnnnnnnnnnnggtgagcttg

SEQ ID NO: 89781 - DNA, 951 bp, Arabidopsis thaliana columbia
  unsure (1)..(951): unsure at all n locations
ttctatccaactcattttagggaaggctggtccgcctgcaggtcccggcccggatttcccgggccgacccacgcgtccgaaaaaatctcaatttcaattctctcgatttctctatcatcatcatccatggcttcgcaagctagccttctccttcagaaacaactcaaagatctctgtaagcatcctgttgatggattctctgctggtctcgttgatgagaagaatatattcgaatggagcgttaccattatcggacctcctgatactctctatgaaggaggattctttaacgcgattatgacatttccgcaaaactatccgaatagtccgccaaccgtgaggtttacttcggatatgtggcatcctaacgtttattctgatggtcgtgtttgcatatctattcttcatcctcccggtgatgatcctagcggttatgagcttgcaagcgagcgttggactcctgttcatacagttgagagtattatgttgagtatcatatcaatgctttctggtcctaacgatgagtctccagcaaatgtttgaagctgccaaagaatggcgagataagagagatgagttcaagaagaaagtgacccgttgtgtcagaaagtctcaagaaatgttttgatcaacgtcaaacttcacacctttgagatctctggagtttcaatcaaaagttcttcatattcctatctgaaaccctttgaaacgcaacttgttataactcggtttacatctctttttgtcgcgttcgagaaccagagcgttttgaaaggtgtttggttgagaaaagtgctgttcttgaggagctggtattaaaattataaatttcatttgttaagaatcttctttgctaataaaaaaaaaaaaaaaagnnnnnnnnnnnnnnnnnnnnnnnnnnnnnnnnnnnnnnnnnnnnnnnnnnnnnnnnnnnnnnnnnnnnnnnnnnna

SEQ ID NO: 89782 - DNA, 530 bp, Arabidopsis thaliana columbia
  unsure (1)..(530): unsure at all n locations
nnnnnnnnnnnnnnnnnnnnnnnnnnnnnnnnnnnnnnnnnnnnnnnnnnnnnnnnnnnnnnnnnnnnnccacgcgtccgcttgaaaagagaagaagaagattgcttcaatgagctgggtgtagtgtcaaattgtgatgctactgaatctgtaagcacggaaatattggaatctatgaacattggttgtagtcaaggtcttaaagattctggaaacataagaccacagaacaacattctaggatgttgtagtaatgctgtagagaattttaatagagtcggagaaactgaaaggagtgatgatcttgaacatctcacactgaaggagcggcgcaaaatgcttcttgaaaggggtgctataaggttgcctgaatctaacgtagaggataatactgaagattgcgatgaaactgaactttataaaataaaagcggagatttcatgcgaaaatgggatagcttcgtcttctggagtccaattcagcggctttctataaaaattgattctgtcctctgtagaaatttaatatat

SEQ ID NO: 89783 - DNA, 527 bp, Arabidopsis thaliana columbia
  unsure (1)..(527): unsure at all n locations
nnnnnnnnnnnnnnnnnnnnnnnnnnnnnnnnnnnnnnnnnnnnnnnnnnnnnnnnnnnnnnnnnnnnnnnccacgcgtccgccattttcttcctctctgttccggcgacgcttctcctcgccgttccaatcctctccggcatagaaactcggtgtctccttcatcttcctttcccttctgttcgacttcttccttttcttctttctacattcctatggcgggaggagatggtcaggtgtctcattcgcttgagaagcagttcgagagtttccgtgttcaattggaagaatctgcagctttgagagagcagattcgtgctgtggttatggagattgagtctgctactaggcttattcaagctaatcttcttctcgttcatcaatcgcgtcctattcctgaggttatcgagaaagctaaggaaaaaatcgttgatttgaagcagtattatggtcggcttgctgaaattcttgaggagtgtcctggacaatactataggtaccatggagactggagaagtgaaacacag

SEQ ID NO: 89784 - DNA, 513 bp, Arabidopsis thaliana columbia
caggacccggtccggatattccgggtcgacccacgcgtccgatcttcaattcagtcttcttcttcttcaccaacccaatttcttttcttcaactctctcttctccccaaacccgacttctgatccgcatcgatttccatggcagccaacaccatttctctttccaacgtcgccgcctccaagaatctcaactcctttcaaagccgtgcctttattgctccaccaactatttttttccctgtggcttctgcaaagtctaaacctggggaactttctttatcttccacgactctttccaggtctcgtgtgcgcgccggtgctagccagctcatgaacgaaccgcttaacgatcaacgctccatctcttctcccactgtcgtcgaggttgatcttggtgaccggagttatccgatctatatcggcgccggcttgcttgatcactcagaacttcttcaaaggcatgttcacggaaagagagtgcttgtggtcaccaatgatcgagttgctcctctct

SEQ ID NO: 89785 - DNA, 773 bp, Arabidopsis thaliana columbia
  unsure (1)..(773): unsure at all n locations
cggacgcgtgggcggacgcgtgggcggacgcgtgggcggacgcgtgggtgaattctcaacgaagctaagatcaattcgatagagagtgaaaactatgaggaatctgcgaatcatctcctctcacttctcacgagttttgaaatccaccgagacacgctcaagttccgttcaattattcacgatccaatctcggagctactcatctccggcgacgcaatcggagaacgtgtccaaaatcgtcaatgagctatcgaatctcactcttttggaaacaatggatcttactgagatccttaggcagaagctaaacatcagtgaattgcctgtgatggcggcgatgatgccagggatgtcattaccgggatctggagctagtaaatccgccggcggagaagggaaagagaagaagaaggaagcaaagactgcgtttgatgtgatgcttcaagcgtacgatgcagtgtcgaagataaaggtgattaaagaagtgagaacgattacggcattggggttgaaggaagcgaaagatttggtggagaaagctccaacattgttgaagaaaggagttagtaaggaagaagcagagaagatcattgagaagttgaaggctgttggagctaaagttgctatggagtgaccatttttaggtggtattaaaattggacntgagcaagaccaaatgaagctcctcctgagagcctcccagtgttattccaatgnagatgtgatgaagcnccacagccttccttagnangaccanttttgcnccncaangc

SEQ ID NO: 89786 - DNA, 798 bp, Arabidopsis thaliana columbia
  unsure (1)..(798): unsure at all n locations
gggaaggctggtccgcctgcaggtcccggtccggatttccggggtcgacccaggcgtccgggaacagctgaaattccccagatcattaaggggctatcgaaaatggttgatgatggtgacaacagaaacctacctttctatagagctaaaactccagaacttgttccagaaagcgctgaaccgatgagatcaggagtcccaaagaccgtaaaagcaactcagaaattgttgagcttatggaacagaatcaaagactacctagctgatccaagaatggggcctacattgcttctaggagcgttgttatctgcaggcaatgtttggtggatgagaagccgatcatcaacacaacaacctgctcagacaaatcagccatcaccaaatcaaccagccgataacgtggaggagaagaagaagaaagagagaaagagagaacaacgaaggaggaatgcaaaggaagaagaggttcctgcttcgatcactgataacgaacctaaagatgctgtccaaattctgtcttcaggttccgattctgactaatatattaagccttaggattcttcggactttcttttttttttgacattcacgtctgtgatttcttcttttctttgtgaaagtcataaggtttcaattttaagtggctaaatagagtaattcaccttactcattttgaacgcttccaaatgatctgggaaatttcagctgttcccgaacgcatagnnnnnnnnnnnnnnnnnnnnnnnnnnnnnnnnnnnnnnnnnnnnnnnnnnnnnnnnnnnnnnnnnnnnnnnnnnn

SEQ ID NO: 89787 - DNA, 553 bp, Arabidopsis thaliana columbia
tcccacgcgtccgcttttccggaggaatagaaaattgggggctagggttcgcaattgtagttttcgagcgaagaagatgatcgaggtggttctcaacgatcgtttagggaaaaaagttagggtgaagtgtaacgatgatgacacgatcggtgatctgaagaagcttgtcgcggcacaaaccggaacacgagccgagaagatcagaattcagaagtggtacaacatctacaaggatcacatcactctcaaggactatgagatccatgacggcatgggtcttgagctttactacaactaggccaatcgaaggagctaagctgaaggagtgttgttgatttggacacctacataaactcatatcaaccatgttacatctaaaaaaggcacaagtatgttgtaagacgtgataacttcaaatttgtggtaataataatacattcactgtcaaaaaaaaaaaaaaaaaaaaaaaaaaaaaaaaaaaaaaaaaaaaaaaaaaaaaaaaaaagcggccgccccacaggatccatccttacttactcgtgcatgcgacgtc

SEQ ID NO: 89788 - DNA, 292 bp, Arabidopsis thaliana columbia
tcttttgtttcacagaccactttagtaagtggcaccacaacatcgagagttactgaatcaggaaaagcaattcgcacatcatctcctgctcggcaagaaaacaatgcatgcggatcaagttgttctaacagttctagtagtgactcaggatcttgctctagtgatactgacagtgacagctcttcaggacgtggatcagataatggtaattaggccaacaagtcgaaagtcttttagctttagagtcagaaccgtcatgctgtttgatctctttcaatagcacagttagatt

SEQ ID NO: 89789 - DNA, 483 bp, Arabidopsis thaliana columbia
  unsure (1)..(483): unsure at all n locations
gacattacttatctccggtaacggacaaccactcgtttcccgaaacagcaactcacagactcacaccactccagtctccggcttaactaccaccagagacgattctctcttccgtcggttctatgacttcgattctcaacactgtctccaccatccactcttccagagttacctccgtcgatcgagtcggagtcctctctcttcggaattcggattccgttgagttcactcgccggcgttctggtttctcgacgttgatctacgaatcacccgggcggagatttgttgtgcgtgcggcggagactgatactgataaagttaaatctcagacacctgacaaggcaccagccggtggttcaagcattaaccagcttctcggtatcaaaggagcatctcaagaaactaataaatggaagattcgtcttcagcttacaaaaccagtcacttggcctncactggtttggngagtcgtctgtggtgctg

SEQ ID NO: 89790 - DNA, 524 bp, Arabidopsis thaliana columbia
accacgcgtccggttgggtaaggacaggcctgcttgtaaactggaaatggtgaaagctggagttatcgactgcgtacttgatattctccacgaagctccagattttctatgtgctgcgttttcagaactgcttcgaatcctcacaaataatgctactattgcgcaagggacaatctgctgcgaaagtggtggagccacttttccatttgctgacgaggttggagtttggagctgatggacagcacagtgctctgcaagttctggtaaatatcttagaacatccacaatgccgcgctgattatacacttacaccgcaccaagtaattgagcctctaattccgctactggaatctccatccccagcagtccagcagttggcagctgagcttctatctcatcttctctacgaggagcatctgcagaaagatccattaactcaacttgcgattggtcctctaatccatgtgctgggatccggcatacaccttttacagcagagagctgtgaaagctctcgtcagcatt

SEQ ID NO: 89791 - DNA, 228 bp, Arabidopsis thaliana columbia
atttatttgacgaacacaaaaaattattataatttttttggttggtgttggagagagatttcatgagcgtttggttgtgttttcaattattattgagaaaattgtatgttcttgagaggatttgtgatactatttaatcatctctggattccaaaaatttctggggattattggatgttgatgagaaattaatttgattcattatttttgtttgacttcgttcggatt

SEQ ID NO: 89792 - DNA, 481 bp, Arabidopsis thaliana columbia
  unsure (1)..(481): unsure at all n locations
atgannnnnnnnnnnnnnnnnnnnnnnnnnnnnnnnnnnnnnnnnnnnnnnnnnnnnnnnnnnnnnnnnnnnnnnnnnnnngccacgcgtccgaaaaaaaatggagaacgaaagctcagagagtagaaacagagctcgtcttgccattatggagcttgctaacatgattagcgttcccatgtctctcaatgccgccgtgcgactaggcattgccgacgccatttggaacggcggagccaattctcctctctctgccgccgagatcctccctcgcctccacctaccatctcacactaccattggtggcgaccccgagaatcttcagcgtatacttcggatgctcaccagctacggtgtcttctccgaacaccttgttggatccattgagaggaaatactctcttacggacgtcggaaaaactcttgtaaccgactccggcggcctctcttacgctgcctacgtcctccagcatcaccaggtt

SEQ ID NO: 89793 - DNA, 711 bp, Arabidopsis thaliana columbia
aaaaaagaatagatacgattgcattgcatatacttacggatgcgatcataccagcactaatgcaccggatcccatcagaactccgcagttaagcgtgcttgggcgagagtagtactaggatgggtgacctcccgggaagtcctcgtgttgcatccctctttttttgctttttttttttggttaaaactttatgactctataacttctataccgtgaggccaaacttggcatgtgataccttttcggaaagcccaaagagagccctccgacgaaagaagcaagacaatggaacttttccattgactttttgtcgactccaaattttgacctttaagtactttttcgggcattttcgtgatttgtgctatattacggacccaaaattactctttcaagcattgttttcgaatatttttcatgcatcaaagctcgttaagactagatggggtatccctacatggcgggtgggacccacggcgaacggttcatcaagacttaaaaaaagaatatatacgattgcattgcatatactaacggatgcgatcataccagcactaatgcaccaggatcccatcagaactccgcagttaagcgtgcttgggcgagagtagtactaggatgggtgacctcccgggaagtcctcgtgttgcatccctcttttatgtttaacctttttttttttggttaaaactttatgactccataactttt

SEQ ID NO: 89794 - DNA, 1201 bp, Arabidopsis thaliana columbia
  unsure (1)..(1201): unsure at all n locations
actcactatagggaaagctggtacgcctgcaggtaccggtccgctattcccgggtcgacccacgcgtccgcccacgcgtccgtacgggcgagaagacgacagaagggggatgcgatcataccagcactaatgcaccggatcccatcagaactccgcagttaagcgtgcttgggacctcagactgagaatcgcccaagatgcagctcgcggattaacatacctgcatgaagaaatggagtttcagatgatattccgcgatttcaagtcctcgaacattcttttggatgaggactggaaagcaaagctctcagatttcggtttggctcgtttaggtccatctgaaggattaacccatgtttctactgatgttgtaggtacaatgggttatgcagcacctgaatacattcaaaccggccgtctcacatcgaaaagcgatgtgtggggttatggagtcttcctctatgagcttatcactgggaggcgaccggtggacagaaacagacccaagggagagcagaatcttctagaatgggtgagaccttatttatctggcacaaggaagttcaagctcatattagatccaaggctggaagggaagtacccgatcaaatcggttcaaaagctagcagttgtggccaacagatgtttggttaggaactcaaaggcacgtcccaagatgagtgaggttttagagatggtgaacaaaattgtggaagcttcttcaggaaatggcagcccacagctagttccgctgaacagtgtaaaagcttcgagagacgcgagaggaaagaacaatggtggtggcggtgaaggaggttggtttggcaagttatggaatccaaagacaataagagcttgttgactgcttatagaattcaacctcttcttacagcaaaaaaaagagtcaagaaaggtttcatggagattccgaaggttgaagattctagcgagatcaagatgaagctcatatacatacataaagataattatatatgaagatttgtgaaagattctaaaatgatgaaatatgatttttgtatgaacttatgaatagtaaccacagctaaattagtaagatatgtatattaagccggccccgcattcgatatcaagcttatcgataccgtcgacctcggggggggtgcccannnnnnnnnnnnnnnnnnnnnnnnnnnnnnnnnnnnnnnnnnnnnnnnnnnnn

SEQ ID NO: 89795 - DNA, 564 bp, Arabidopsis thaliana columbia
gcttataccactcactatatggaagctggacgcctgcggtaccggccggaattccgggtcgaccacgcgtccgccacgcgtcgagcttggccacttgcaagaagcagctcgtgaaatgaggtatgagatgatttcgaatgtgtgttttcgacaacagattgaggtcttgcttatagcgcatcatgcagatgaccaggctgagttattcattctcaggttatctcgtagtagcggtgtacttggtcttgcgggtacagcttttgcttccgagattttctccagaaatctgcagttagatgcaaaacatatgaagaaccaatctattcgcttagtgcgtccgctactagatttatggaaagaagacatgtacaagatatgtcaatggggtagacaagattgggttgaagatccaactaatcgtagtcagttgtttgttcggaataggattcgaacatcaataggaaatctagaatcaggtagcttcaagtcagagctgcaagcagtcatttctgaatgcaggagaacacgttcatttgttgataaagtttgtacagacttaataca

SEQ ID NO: 89796 - DNA, 558 bp, Arabidopsis thaliana columbia
tttattccaactatttttgggaaggctggtccgcctgcaggtcccggcccggatttcccgggtcgacccagccgtccgcccacgcgtccggaggaagtcatggatgcagcagaagctggtcagatcatcgaaagttgttgcccggttctttgtggcattgcatgcaagaaaggaagtcaatgtggatttaaagaaagaagctgagtactttggtgatattgtcatagtaccgtacatggatcattatgaccttgttgtgctcaagacagttgccatctgcgaatatggggtgaacacagtggcggcaaagtacgttatgaaatgtgacgatgatacatttgtgcgtgtggatgctgtgatccaggaagcagaaaaggttaagggaagagagagcctttatattggaaacattaattttaaccataagccattgcgtaccgggaaatgggctgtgacattcgaggaatggccagaagagtattatcctccatatgcaaatggtccgggttacatcttgtcatatgatgtagctaagttcattgtcgatgattttgaaca

SEQ ID NO: 89797 - DNA, 443 bp, Arabidopsis thaliana columbia
accacgcgtccgagaatttcaaacaaagtttcaaactttgctcaccaacttttatttatttattttggtggtagaaaacagactttgatggctttgtaggaatactagatgtgtagatctaaagattataaccattttctgtgttcttgttctttcagaacataacctcatgtctttttgtctctctgttcactagctctctgtttccatggactccacactatcttcttcttacagatttatttcatacacatacactgacacacatgtgtgtatacgtatgtgtttatgtgtgcttagtatacgctttttggattcaagaaactaatctttagtatttttgacattctggtagatttatgctcacttcttaggccttgttgacttttacagtgatggattttgaaactctggttgatttgattttctttttggtttgatgc

SEQ ID NO: 89798 - DNA, 562 bp, Arabidopsis thaliana columbia
atttagcagacagtcaccaaattggtgaaggaggctttggtgtagtctttaaaggcgttctagatgatggccaggttgttgccataaaacgagccaaaaaggaacactttgagaatctgcgaacggagtttaaaagtgaagttgaccttttgtctaaaattggccaccggaacctagtgaagcttcttggttatgttgacaaaggagacgagcgacttatcataactgagtatgtcagaaatggtacactccgcgatcacttggacggtgctcgtggaactaaacttaatttcaatcaaaggttggagattgttattgatgtctgccatggcttaagcctatctccattcttatgcagaaagacagataattcaccgtgacataaaatcgtcgaacattctactcacagatagcatgagagccaaagtagcagacttcggctttgcgagaggcggtcctactgactcgaaccagactcacattttaactcaagtgaaaggaaccgttggttatctcgatcctgagtacatgaaaacttatcatctcactgctaaaagcgatg

SEQ ID NO: 89799 - DNA, 514 bp, Arabidopsis thaliana columbia
taggtgacactatagaagatcttgacgtcgcatgcacgcgtacgtaagctcggaattcggctcgagatcacccactctgcttttacatccacaaagctcacttttattaaaccaaatcacaatctcaatatcacattcgttgcagagacaaagatgtctgagtatttggtaactggaggaacaggtttcattgcttcttacatcatcaaatcacttctcgaactcggacacaccgttcgaacaactgtccgaaacccacgtgatgaagaaaaggttggatttttatgggaatttcaaggagcaaaacagaggctaaagattctccaagctgatctaacggtagaaggaagttttgatgaagcagtgaatggtgttgatggagtattccacactgcttctcctgttcttgttccacaggatcataacattcaggagactttggttgatccttattataagggtacaacaaatgtgatgagctcttgtgccaagtctaaagccacattgaaaagga

SEQ ID NO: 89800 - DNA, 534 bp, Arabidopsis thaliana columbia
actatagggcaagctggtacgcctgcaggtaccggtccggaattcccgggtcgacccacgcgtccgggtaactggaggaacaggtttcattgcttcttacatcatcaaatcacttctcgaactcggacacaccgttcgaacaactgtccgaaacccacgtgatgaagaaaagggtggatttttatgggaatttcaaggagcggggcagaggctaaagattctccaagctgatctaacggtagaaggaagttttgatgaagcagtgaatggtgttgatggagtattccacactgcttctcctgttcttgttccacaggatcataacattcaggagactttggttgatcctattataaagggtacaacaaatgtgatgagctcttgtgccaagtctaaagccacattgaaaaggattggtcttacgtcttcttgctcttcgatacgctaccgtttcgatgcaactgaagcttctcctctcaatgagtctcattggagtgatcctgaatattgcaaacctttcaatctttgggatgg

SEQ ID NO: 89801 - DNA, 853 bp, Arabidopsis thaliana columbia
  unsure (1)..(853): unsure at all n locations
caaggtgggcccacggaccaggtcttttcccccaccctggacaaaggggggacaagttaaggcccccacccacaaagtttaatgtggaggttagcttccccttcccttagggcaccccccaggccctgtacccttttagtgcgtccggggttagtatttttgtgtgacacttgccaagggattacnnnnnnnnnnnnnnnnnnnnnnnnnnnnnnnnnnnnnnnnnnnnnnnnngtcgacccacgcgtccgtactgctgcgaacgacagaagggggaagacacacatacacacactaccgataaagaaaaaccagagaagagagagagataacaacaatggtttcttcgcttcttatgtcatttgctccggccaccgtgagggtttacgccacaagcacaaagggaggttcaggcggcccaaaggaggagaagaatcccatcgactttgttcttgggtttatgacaaaacaagatcagttctatgagactaatccacttctaaagaaggtggatgagaaagaaggcaccaccaccggaggccgaggaaccgttcgcggtggtaaaaactcagctccgacgcctgtgccgaagaagagcgagggtggatttggtggcttaggaagcctcttcaagaaatagaagaaaaaaatgtatagtaatttgcattattcatgcctctgttttcattctctataattcttcggatttcacttatatataagctactctttcttaatcttatttgacaacaaaaaaaaacacaaagggcggccgctctacaggatccaagctcacgcacgcgtgcatgctacgtcatagctggtctannnnnnnnnnnnnnnnnnnnnnnnn

SEQ ID NO: 89802 - DNA, 859 bp, Arabidopsis thaliana columbia
  unsure (1)..(859): unsure at all n locations
cnnnnnnnnnnnnnnnnnnnnnnnnnnnnnnnnnnnnnnnnnnnnnnnnnnnnnnnnnnnnnnnnnnnnnnccacgcgtccgcggaccctggggttcaagaaggcggagcaatctgactattcactgaagatccaagatctgcagaagcaactaacaatggataaagaagaagcagaaaaactgcaggttgacagggataactttctgaaacttgcattggagggttataaacgttgtctgggaaattggtgacaagtatgatgttcgagtggtatttcggcaagtatccatgtggttcagtcttgcctcccagaaaaatgttattgataacatgttgagcaccattaaagaggtccagtcctacaaatttatcccccttgtttatcaaattgcttcaaggttgggcagttccaaagatgaatcaggatctaacagctttcagtctgcattggtttcgcttatcagaaaaatggccattgatcatccataccatacaatcttgcagcttctggctttggcaaacggtgaccgtatcaaggataaccaacgcagtagaaattcttttgtggttgatatggataaaaagcttgcagcagagcatctcctgcaggatgtatcacattatnatgggcctatgattagacaaatgaaacaactggtagatatctacatcaagcttgcagagcttgaaacaaggagagaggataccantagaaaggtngcactaccaagaggggtttcgtagtgtgaacaactgggacctttttanccnttggnggcttnaannanttncntnttgatccggngnttgccaattacaatgaaggggtnattcccgttttttcaagagggtttatc

SEQ ID NO: 89803 - DNA, 877 bp, Arabidopsis thaliana columbia
  unsure (1)..(877): unsure at all n locations
gccaatttaaccactgattcgagaaaggaaaaactaagatttgctccaaggttaaccaattgtgccactgtcggcaacggtgctgttggaaaaacttgtctcctcatctccaacactagcaacactttcccctcggattatgtgccaacttgtgttcgatagttccagtgccattgtgattgttgatggcaccactatcaacctgggattgtgggatactgcagggcaagagggctcacaatagcctaggacctttgagctgtcgcggtgcagaggtcttcgggcttgcattctcacttgtcagcaaggctagctatgaacatgtttctaaaaagtgggttcttgaactgagacattatgctcgtggtgttcccatcatcgtagttgggaaagagcttgatcttcgacctgataagctattctaagcggagcaccatggtgctgtgcctatgtttaccgctcagggtgaagaactaaagggtctcattggggcgcctgcttatatcgaatgcggtgcatatattcaacagaatgtgaaagcagtgtttgatgcggctatcaaggtagtttttcagcccccaaggagcaagaagatgaaaaaaagcgaatttcggtaaggctgttgtacactctgattcaacaagaagaagggaatcatcaggaaaattagagctatgggtatttgttttctcctttatcataacctgtggacccagggaatcaaaaatctgttgtttgtggtctgacaatgtcaaaagtttaatggctagtagcaagtatttgtatttttgaaagcaaaaaaaaaaaaaaagnnnnnnnnnnnnnnnnnnnnnnnnnnnnnnnnnnnnnnnnnnnnnnnnnnnnnnnnnnnnnnnnn

SEQ ID NO: 89804 - DNA, 1019 bp, Arabidopsis thaliana columbia
aaaaaaaggaagaagaagaccagtcgacccacgcgtccgtgaggatgagtagtaaaaattaggaagactctagtctgggagagactttcagcagctatttctttgtcttctttctctttaaagaacctcactctctctctctttagtcaaaaatccccaattcgtgaacaaattagggtttttgaagtttgaagaaggagagaaagatgagtgcttcaaggtttatcaagtgtgtcactgtcggcgacggtgctgttggaaagacttgtcttctcatctcctacactagcaacactttccccacggattatgtgccaactgtgttcgataatttcagtgccaatgtgattgttgatggcaacactatcaacttgggattgtgggatactgcagggcaagaggactacaatagactaagacctttgagctatcgcggtgcagatgtcttcttacttgcattctcacttgtcagcaaagctagctatgaaaatgtttctaaaaagtgggttcctgaactgagacattatgctcctggtgttcccatcatcctcgttggaacaaagcttgatcttcgagatgataagcaattctttgccgagcaccctggtgctgtgcctatctctaccgctcagggtgaagaactaaagaagctgattggggcgcctgcttatatcgaatgcagtgcaaaaactcaacagaatgtgaaagcagtgtttgatgcggctatcaaggtcgttctccagccaccaaaaaacaagaagaagaagaagagaaaatctcagaaaggttgttctatactctgattcaacaagaagaaaggaatcaacaggagaattagagctataagtatttgttttctcctttttcataacttgtttacccaaggaatcaaaaatctgttgtttgtagtctgaaaatgacaaaagttgaagaactagtaacaagtatttgtattcttgtttgcattttgatctgtaaatagcccacgaatccttgatttctctgtttcctaaaaaaaa

SEQ ID NO: 89805 - DNA, 511 bp, Arabidopsis thaliana columbia
atctctctctctcacagagattgtgacttcacgcacacgtaacctaattcgaagatggtgagaaaatatagaaaagctaaaggaattgtagaagctggagtttcgtcaacgtatatgcagctacggagccggagaattgtttatgttagatcggaaaaatcaagctctgtctccgtcgtcggtgataatggagtttcatcgtcttgtagtgggagcaatgaatataagaagaaagaattaatacatctggaggaggaagataaagatggtgacactgaaacgtcgacgtatcgacggtgagtgttaaaaaaaaaactgaaaatgatttgaattttgaaggttttattattttcccggtaatttatttgactctctcttcaataaatttagaatcttgcttgtgagttattttaggggtacgaagaggaagctttttgaaaatctgagagaggaggagaaagaagaattaagtaaatccatggagaattattcatcggaatttgaatcggcg

SEQ ID NO: 89806 - DNA, 954 bp, Arabidopsis thaliana columbia
accaaattcatcatctttctttcttcttcttcctcatcctctcaatcatatctcgctctctcacagagattgtgacttcacgcacacgtaacctaaatcgaaagatggtgagaaaatatagaaaagctaaaggaattgtagaagctggagtttcgtcaacgtatatgcagctacggagccggagaattgtttatgttagatcggaaaaatcaagctctgtctccgtcgtcggtgataatggagtttcgtcgtcttgtagtggaagcaatgaatataagaagaaagaattaatacatctggaggaggaagataaagatggtgacactgaaacgtcgacgtatcgacggggtacgaagaggaagctttttgaaaatctgagagaggaggagaaagaagaattaagtaaatccatggagaattattcatcggaatttgaatcggcggttaaagaatcgttagattgttgttgtagcgggaggaaaacgatggaggagacggtgacggcggaggaggaggagaaggcgaaattgatgacggagatgccaacggaatcggaaattgaagatttttttgtggaagctgagaaacaactcaaagaaaaattcaagaagaagtacaatttcgatttcgagaaggagaagccattagaaggacgttacgaatgggtaaagttagagtgaagaagaagaagaagtttatggttttttttttaactttttagattttaatatttcagggaataagttaattttattttgttgatttggaaatataagatttgtaggaggaatgtttttagaagtacgaaattgcacagaaaaagaagaaagctttttaacagattttagagcccagaaaagtcgtgtcttttagctctacttttacctcttcttcgaatcttgtgtatcttttagcatattctttagtacatttttatgtttttggtgactgata

SEQ ID NO: 89807 - DNA, 536 bp, Arabidopsis thaliana columbia
  unsure (1)..(536): unsure at all n locations
nnnnnnnnnnnnnnnnnnnnnnnnnnnnnnnnnnnnnnnnnnnnnnnnnnnnnnnnnnnnnnnnnnnnnccacgcgtccgcggacgcgtgggcggacgcgtgggcggacgcgtgggcggacgcgtggggaaaaagagagtcaagtacttcattgttgatgcattcgctgaatctgccttcaaagggaatccagctgctgtttgctttctagaagacgataacgagagagacgacgcgtggcttcagtctcttgccaccgagttcaatatctccgagacttgtttcctcactccgatcatcggagacttgcctcgcttccgtctccgttggttcactccagtcgctgagggttccgtgttttcttttggttttggaattcggaattgttcgggtgacttgttatcattgacttgatagatcctgataactagaacttgtactcattcactggctcttgtgaatctctctttgctttggctggattgtgcaagtggatttgtgtggtcatgcaactttaacatctgctcacgttctct

SEQ ID NO: 89808 - DNA, 613 bp, Arabidopsis thaliana columbia
  unsure (1)..(613): unsure at all n locations
gttcagtaaaaagtagacgaagaagaagaaattaagtcacttgaacaatggcgttggtccgaaatgcaaggccttgagcttctccctcataacaccaacaacaactcacgaagctccagagaaactcaccggaaatggataatgacggtggtgctcctcctcctccgccgacactagtggtggaagagcctaagaaagcagagattcgtggagttgcttttaaagagctattcagattcgccgacggattagattatgtattgatgggaattggctctgttggtgcttttgtccatggctgctctttacctctgtttcttcgattcttcgccgatcttgttaattcctttggttctaattctaataacgttgaaaagatgatggaagaagttctcaagtatgcgctttactttttagtggttggtgctgcaatctgggcttcctcttgggcagagattccgtggtggatgtggagtggagagagccaaacaacgagatgangggtaaggaataagagcagcttgnatcaancatcagnccntggacanagncgaactcaaatgtgctcgcataaaccgcncgaanggcancnctagggaactggatnccnntc

SEQ ID NO: 89809 - DNA, 636 bp, Arabidopsis thaliana columbia
  unsure (1)..(636): unsure at all n locations
cccacgcgtccgtctctctctatcctcaaacaaagtatggccctttatcctttcttcatctcaatcttcatcttctctttgaccctcttcactacgacgacccattccctcaacgaacccgacccggattcgatttccaccgtttacgaactcctcccaaagtacggtctcccaagcggtctcttaccggacaccgtcaccgatttcaccctctccgacgatggccgattcgtcgttcacttgcccaattcctgtgagattgaatttgactacctcgttcactacgataagaccatatctggtcgtatcggttacggttcaatcaccgagctcaagggtattcaggtgaagaaattctttatttggctcgatgtcgatgagatcaaggtcgatcttccaccttctgattcaatctacttcaaagttggctttatcaataagaagcttgatattgaccagtttaagactatacattcttgtcacgataatggtgtctctgggctcttgtggagattcatggaagagtttctcgagaaagggcaaggatgatggataagcggaaatgttaatcnccggggaaaaancncttgggagncaaanngnttnnggaanannncnnnanagttnnccccaagg

SEQ ID NO: 89810 - DNA, 721 bp, Arabidopsis thaliana columbia
taatacgactcactttagggaaagcacgtacgcctgcaggtaccggtccggaattcccgggtcgacccacgcgtccgtacggctgcgagaagacgacagaagggggagcttgagtttgtaaagaaagtagcaagttccactggtgttattcttgatccggtttacagtgggaaagctgcgtatggtttgataaatgagatcaccaaagatcccaaatgttgggagggaaggaagatattgttcatacacactggtgggcttcttgggttgtatgataaggttgatcaaatggcatctctgatgggtaattggtcccggatggatgtttcagaatccgttccaaggaatgatggatgaagcggaaatgttaatcaccgagtaaaacactcttggcagtcacagagtctgcgacaacacgcagatagagttgagtctctaagtcatgtttgtacatatacatacaataactagacaagtcttttctgtaagacttggtatgaaatgtcgatatatccattatgtacgtcctgttaaaactggtttccccgaaaatgttgtatctcatgactcaatgtccccgagttcgttcctcaccaccatagttagactgtgtggccgttaagctccttaaaaaaaaaaaaaaaaaaaaaacaaaaaagcggccgctctagaggatccaagcttacgtacgcgtgcgtgcgacgtcataactcttctagag

SEQ ID NO: 89811 - DNA, 634 bp, Arabidopsis thaliana columbia
  unsure (1)..(634): unsure at all n locations
actctcgtgaaattgtccccatccccaatcccaaaggaaaaggttatcccatgaacccttcagaggggcttaagtttgtaaaaaaagaaccaagttcacctggtgttattcttgatccggtttacagtgggaaagctgcgtatggtttgataaatgagatcacccaaagatcccaaatgttgggagggaaggaagatattgttcatacccactggtgggcttcttgggttgtatgataaggttgatcaaatggcatctctgatgggtaattggtcccggatggatgtttcagaatccgttccaagaaaagatggtgttgggaaaatgttctagcacaccaaaatctgatttgtaataatcctgtgaaaataagacagattgaaccatttgtgcctttggcagtgaataaacacatctctgttttctattctgatgtattatgttcataggcttgggacgattccgataaataaatggtgtgtccacactctctttgtttgtttataacnnnnnnnnnnnnnnnnnnnnnnnnnnnnnnnnnnnnnnnnnnnnnnnnnnnnnnnnnnnnnnnnnnnnnnnnnnnnnnnnnnnnnnnnnnnnnnnnnnnnnnnnnnnnnnnnnnnnnnnnnnnnnn

SEQ ID NO: 89812 - DNA, 768 bp, Arabidopsis thaliana columbia
  unsure (1)..(768): unsure at all n locations
cnnnacaatacgactcacattagggaaagctggtacgcctgcaggtaccggtccggaattcacgggtcgacccacgcgtccgcacgagagaagtatgcaaatctatcaaaatctggaaagcagcctgatgttttacacattcacaactggcaaactgcaatagttggaccgttgttttgggatgtttttgttaatcagggacttgaaggtactagaatactcttgacatgccaagactttgacaagggtcttgtacctcctgaaaaattggagctatgtgggctcgatccagctgaacttcaccgtcttgatcgcttacaagataacacaaatccacattttgttaatattttgaagggcggtgttgtctactccaacaaagttgtaataatgtcatcctcacatagctcaatccctggtctcgaaccaactttagctatccacaaggacaagttgttttttgctccctttggaatggacaactcaatggagaaagacttgtgttgtgaccttcacgtctttgcatatacttccattaagaacctaatgaaaatccccattgatgaccaggatgaatgattatttatcataattttcccattaaaaaaaaaaatggggccctggggtttagtgggaatagtggtatctacttaaaggtttttccactaacaaaattggataaaaaaaaaaaaaaannnnnnnnnnnnnnnnnnnnnnnnnnnnnnnnnnnnnnnnnnnnnnnnnnnnnnnnnnnnnnnnnnnnnnnnn

SEQ ID NO: 89813 - DNA, 526 bp, Arabidopsis thaliana columbia
  unsure (1)..(526): unsure at all n locations
nnnnnnnnnnnnnnnnnnnnnnnnnnnnnnnnnnnnnnnnnnnnnnnnnnnnnnnnnnnnnnnnnnnnnccacgcgtccgggagaaagaaaaaaatctgggtttttgggagctgattaggttttgttccttcaatctctgggaattttcgctatgcactcagattcaggcgaagcgaccgctgatggcgataaagcttctacagaaaacagcaaaaaacggaagcttaagactcctatgcaagttatggcgcttgagaatttctacaatgagcataagtatccgactgaagaaatgaagggcaagttagcagaggaagttggattaactgagaagcaagtttcaggttggttctgccatagaaggttaaaagacaaacgtcatgtaaaagaagatgggaatgccattgggagccaagatcggtcaagcgttgttcttcaggatcgtggaagtgggcttcgacaggattcatgtggtagtacaaagcaaacggattattggaaccccaagcctagggaagttgaaag

SEQ ID NO: 89814 - DNA, 454 bp, Arabidopsis thaliana columbia
accacgcgtccgggaaaaaagatgcaaacgcttctctgtcagccatgtaagtctcttcctatactcactgcttcgtcgtcgtcgtcgttgattcgtagctccggtgatgtgcgagaatgtatcgattttagagcgtcggagaaagtctcgaagtttcaatttcatgtaaccctaagcccctttgcctttcgtggtttctcaatatgtcgcgaatttgctgttcgtggagcttatgggattagattttgctcacgagaagatgtttccggtgttggaaatggaggaatcgtggcggaggaggagattgagctattgaacaagccgaatcctttaccaaaatcagaaaatgaggagagtggtaaagcagacgatgacgcgattctggagccgtttttgaaattctttaaaccggaagaagaaggggaaggaattgaatcggaagtttcggatgaga

SEQ ID NO: 89815 - DNA, 383 bp, Arabidopsis thaliana columbia
ttgttcattgccggttttatttgtgaagctattcagggtgttggagggatcgcggaactagcaccgggatatttgtcagcggcttacgatactgttaagaaagctggtggattgttcattgcggatgaagttcagtctggtttcgcacgtactggtaacttttggggattcgaggcacacaatgttgtccctgacatagtaaccatggcaaagggaattgggaatgggtttcctttgggagctgttgtgacaactccagagatagcaggagtgttgactcgccgtagctacttcaatacatttggtggaaattctgtgtctactacagctggtctcgctgttctgaatgtgattgagaaagagaagcttcaggaaaatgctgc

SEQ ID NO: 89816 - DNA, 692 bp, Arabidopsis thaliana columbia
ctctgctccaattaaggctgcctagatcagattcagatggagagcacaagaatcttgttcagatttacggtccaaagatcaaatacgagcgtggatcttccgtggcattcaatatcagggatttgaaaagtggaatggttcatccagagatagtgcagaaactagctgaaagagaaggcatttctctaggaattggttacctaagtcacataaagatcatcgataatcgaagcgaagattcaagttcttggaaaccggtggatcgagaaggaagaaacaatgggttcataagagttgaggttgtcacagcttctcttgggttcttgacaaactttgaagatgtttacagattatggaatttcgtggccaagttcttgagtccaggttttgctaaacaggggacactcccaacagttattgaagaggatgattcgtcagaaacttaaaagacatgagcattggatatattttttccagcacttcctttactgtacttatatgttattatccgagaacattttcttgtatgattttgggaagttatgtgagcagagatgatctcagacacgatttcagatgtctgcatattggaactgttcatcccccctctatctttgtggtgccccattccttgattcatatccaaattaaaaaaccagaagaaatatttaaaaaaaaaaaaaagggcggcc

SEQ ID NO: 89817 - DNA, 866 bp, Arabidopsis thaliana columbia
acgactcactattgggaaagctggcacgcctgcaggtaccggtccggaattcccgggtcgacccacgcgtgcgcggacgcgtgggcaattttctcatagctctattgttcgaaaattctgaaacgaacgttaccactatggacactaagatcggatctatcgacgcgtgtaacccgaccaaccacgatatcggcggtcctccaaacggcggagtctccaccgttcaaaacacaagtccacttcactccaccaccgtcagcccctgcgacgcgactcttggccgttacctagcaagacggttagtcgaaatcggcgtcaccgatgtcttctccgttcctggtgatttcaacctgacgcttctcgatcacctaatcgccgaaccaaacctcaagctgatcggttgctgcaacgagcttaacgccggatacgctgctgacggttacgctagatctcgcggtgttggtgcgtgcgtcgttacgttcaccgtcggtggattgagtgttctgaatgcgatcgccggtgcttacagtgagaatctgcctctgatttgcatcgtcggtggtccaaactccaacgattacggtaccaataggattcttcatcatacaattggtttacctgatttcactcaagagcttaggtgttttcaagctgttacttgttttcaagctgtgattaataacttagaagaggctcatgaacttatcgatactgcgatttcaactgctttgaaagaaagcatacctgtttatatcagtatcagctgtaatttaccggcgattcctcttccgacgtttagtcgtcatcctgttccgttcatgcttccgatgaaggttagcaatcagattggtttagatgcggcggtg

SEQ ID NO: 89818 - DNA, 433 bp, Arabidopsis thaliana columbia
  unsure (1)..(433): unsure at all n locations
ctcccacaaagctgtgaccagaagatcagtgattntccgatgaacgaagaggagccagacaaagaacacgtggcggattctactatgtcggcggcggcgattgatggtgtggcggctctgagatcggtgtttcagcgggtaaaccaggcggcggagaaagcgggtcgtgggtcggatcagatacgggtcgtagcggtgagtaagacgaaaccagtttctctgattcgccaagtatacgacgctggtcagaggtcttttggagagaattatgtgcaagagatcattgagaaggcacctcagcttccagaagatatagagtggcatttcattgggaattttcagagcaccaaagtgaagcctttcctatctggggttcccaacctttttaacccggggaaagttttggttgataaaaatgcatatatgcttgatc

SEQ ID NO: 89819 - DNA, 591 bp, Arabidopsis thaliana columbia
  unsure (1)..(591): unsure at all n locations
gagctctaatacgactcacttagggaacagctggtacgcctgcaggtaccggtccggaattcccgggtgcggcccacgcgtccggccagacaaagaacacgtggcggattctactatgtcggcggcggcgattgatggtgtggcggctctgagatcggtgtttcagcgggtaaaccaggcggcggagaaagcgggtcgtgggtcggatcagatacgggtcgtagcggtgagtaagacgaaaccagtttctctgattcgccaagtatacgacgctggtcagaggtcttttggagagaattatgtgcaagagatcattgagaaggcacctcagcttccagaagatatagagtggcatttcattgggaatttgcagagcaacaaagtgaagcctttgctatgtaaattgactttgctatttcaaagtcctcatctttagtttttttgtattgagttactaaattgggtgtaaaactccacacttgagttctattcttaattctttggtttgatcagctggtggtcctaaccttgtgaccgggaaagtggtaatgatgaaaagattgcaatatgcttgatcgngtgggtggaata

SEQ ID NO: 89820 - DNA, 418 bp, Arabidopsis thaliana columbia
  unsure (1)..(418): unsure at all n locations
cggacgcgtgggccggaatttagagtctttattgagtttgatcgattttgggattataagtttcgcaaaattcatgttttttacattaagtctattcgatttcagctgtattgggaatttaagttttcctgtggcttgattctattgagacagttttgtagaagatcgtccagctccgcttgatgctacttctgatccaccgtctctcttcgacggaaccacaaggttgtacacaagctacgtttgcccatttgctcaacgagtttggatcactcgaaacttcaagggtttgcaagaaaagattaaacttgttcctttggatcttgggcaataggcctgcttggtacaaggaggaaaggtatatccagagaaccaaggtgcccagccgcttgngcaccaatgggaaaatcantngggg

SEQ ID NO: 89821 - DNA, 476 bp, Arabidopsis thaliana columbia
  unsure (1)..(476): unsure at all n locations
cctgggnggcccactgnngtccggacacaaaaaaaatccggtagtttcttctacagaatcagatctttgtatcgtcaatggctccttcttttatttttgtagaagatcgtccagctccgcgtgatgctacttccgatccaccgtctctcttcgacggaaccacaaggttgtacacaagctacgtttgcccatttgctcaacgagtttggatcactcgaaacttcaagggtttgcaagaaaagattaaacttgttcctttggatcttggggaataggcctgcttgggtacaacgaggaaaggtatatccaggcggaacaagggtgcccagcgctttgggcacaattggggaaaaatcattttgggggaggagtcttgggattttgattaaactatcctcgataacacttttttgaagggcccttttctctttaccccgaagatcatgcaaatacagagtttggggacgaattgctca

SEQ ID NO: 89822 - DNA, 509 bp, Arabidopsis thaliana columbia
gcttgccattgagcgtggatggagcgagtcttcctttcccaacgtccgtagcccaccagctgtcggttatgatttctctgagcgtcgcgagaagctcaaatccggctacaaagctacaacaactgggaaattcactgaggctctccgtctcttcctttctatcctgcacaccatccctctagtggtagtcgagacaagaagagaagtggatgaggtcaaggaattaatcgttatcgttaaagaatatgtccttggtcttcaaatggagctcaagaggagagagatgaaagatgatccggtgaggcagcaagagctcgctgcttacttcactcactgcaacctccaaacacctcacttacggcttgcgctgcttagtgcaatgggtgtctgctacaaggcaaagaacctcgccactgcttctaatttcgccagaagactgttggaaacaagcccagttgatagccaagccaagatggctagacaagttgtgcaagccgctgaacgtaaca

SEQ ID NO: 89823 - DNA, 641 bp, Arabidopsis thaliana columbia
  unsure (1)..(641): unsure at all n locations
tttttcgcgtgggtggctatcgataataatagtggatcagaggcacatgctccctcaaagaaattaggatttgggcttgtgggatccggaaagcgaacttctgtgcctttctgttttctatgaggaggatgaagatgaagcacgtaaggctaaaaagatgaaacctttggttcctatagattactcaaccgaggaacaagaggctgtggcccatggtggctcagggaatacaccacctcatttggctttagccgctgaatttgcaaaacgaatttcgagtaccaatcccaaggaagagacgatagaaaccgaaaaacaaaggagcagacgttctcatgataaggcaagccaccgggacagggaaagggaaagggaaagggacagggacagggatagagtcagggaccgaggtgacgggcatagtggtcccaccaaagacggcaaagagtctggaaaagcaaagataattgatactaagtttctggatgcgaaacaattgataggtacaatcccaaagacaaaggaagatttttttttcttacgggataaactgggcttattttatnacaaggcaccaagttnacgnaagaattagaccntggttttaaagaaaattattgngttntcggggnngnggaaac

SEQ ID NO: 89824 - DNA, 656 bp, Arabidopsis thaliana columbia
  unsure (1)..(656): unsure at all n locations
tatacgactcttttagggaaagctggcacgcctgcaggtaccggtccggaattcccgggtcgacccacgcgtccgtacaacttggccaatcaggctattgacagagcagctggagtggatggctcagacggttacttacactctcatcaaacatcgcttgggagatcttttctaccgcttagtgtttcagaagtttgaagatccagctgagggagaagatacacttgtagccaaattcaagaaactgtaataatgatctgacttctggagaacgcgccttggaagatggaactcgagaagcaagcagttttcagaaatcggaagtattcgagcatcgagcatcatctcagtggggtaatgatgagtccatgaatccaggttttgagcccgaaagaaataagtggttgttgtgatatatgttctcgcttcctctcttcatgatttcatttagttgttggtgtacagacaaaaggaatattaactcttacgacaaggttcacaaaggttaaatttcacaattttttagaaagtgagaagcagaagtgatatttcaagagcatgataggaacaatagaaagaacagaaaggtcgannnnnnnnnnnnnnnnnnnnnnnnnnnnnnnnnnnnnnnnnnnnnnnnnnnnnnnnnnnnnnnn

SEQ ID NO: 89825 - DNA, 441 bp, Arabidopsis thaliana columbia
ctcaaattttgaaactaatcatctctctccttttttcaaacatacacagagaatggtggattcgaaaacccctgcgaaaaccaaattgttagattcgtcttcgatttctaatgtcagagtcgtccttagggttcgtccttttcttccccgggagatttcggacgagagttgtgacgggagatcgtgcgtttccgtaatcggcggcgatggaggagataccagcgaagtggcggtttacctcaaagatccagatagctgtcgtaacgaaagctatcagctggatgcgttttacgggagagaggatgataatgtgaagcatatattcgatagagaagtaagccctttgattcctgggatctttcatggtttcaatgctactgtgcttgcttatggagccaccggaagcggaaagacttttacgatgcagggaatcgatgagct

SEQ ID NO: 89826 - DNA, 302 bp, Arabidopsis thaliana columbia
gccaaccagattgtatgcgtgaattgctggtagctggagccgatccaaatgcagtggatgatgaaggtgaaactgtgcttcatcgagctgttgccaagaaatacacagattgtgccattgttatattgggaaatgggggatctagatcaatgactgtttcaaatgcgaagtgcctgacaccgttacatatgtgtgtagcaacatggaatgttgctgttatcaagagatgggtggaagtttccagtccagaagaaatttcccaagcaattaatatcccaagcccagttggcactgctctgtgt

SEQ ID NO: 89827 - DNA, 526 bp, Arabidopsis thaliana columbia
cggcactatacgactcacttagggaaagctggtacgcctgcaggtaccggtccggaattcccgggtcgacccacgcgtccggaagtttccagtccagaagaaatttctcaggcaattaatatcccaagcccagttggcactgctctgtgtatggctgcttctataaggaaagatcatgaaaaggaaggtagagagctggttcagatattgcttgcagctggggcagatccgactgcgcaagatgctcagcacgggcgaacagcgttgcatactgctgctatggctaacaatgtggaacttgtgagagtcattctagatgctggtgtgaatgcgaacatccgcaatgttcacaatacaattcctcttcatatggctttggccagaggcgcaaactcctgtgttagcctacttctggagtctggttcagactgcaatatacaggatgatgaaggagataacgcatttcatatagcagcagatgcagcgaagatgatacgtgaaaaccttgattggttaattgtcatgc

SEQ ID NO: 89828 - DNA, 724 bp, Arabidopsis thaliana columbia
tccggaatcgccggacgcacccacgcgtccggagatttcatgagagatacagttcgatgagtatcagatcgattacattatccatggtgatgatccttgtgttcttgctgatggtactgatgcttatgcacttgctaagaaggctggtcgttacccgcgcgtccggcgcactgaaggagtttctagcactgatatcgttggtcgtatgcttctttgtgtaagagaaagatccattagtgacactcatagtcgttcctctctgcaaaggcaatttagtcatgggcatagtagcccaaagtttgaggatggagcttcttctgctggtactcgtgtctcgcattttcttcctacttcccgcaggattgttcagttctccaatggaaaggggccaggacctgatgcacgcattatctacatagatggtgcttttgatcttttccatgctggccatgttgagattcttagacgtgctcgagagcttggagactttcttcttgttggtatacataatgaccagactgtcagtgctaaacgaggagcgcatcgccctattatgaatctccatgaaaggagcttaagcgttctggcgtgccgctacgtggatgaggtgataattggtgctccatgggaagtgtcgagagatacgatcacgacatttgacatcacgttggtggtacatgggacagtagccgagagcgatgattttcgaaaggaggaagataat

SEQ ID NO: 89829 - DNA, 878 bp, Arabidopsis thaliana columbia
acgacttactatagggaacgctggtgcgcctgcaggtaccggtccggaattcccgggtcggccacgcgtccggcgcaagcaatggtggatgcagctataaaggctgcatcatctgtgaaggaaggggaagatgtgaacacaatgatccaagaagccttagagttggttggcaaaaatcagctattacgcagctctatggtcaaacatcacgagcatgtaaatggcagtatagagcatcatcacaacccatctccttcaaatggatcagagcctgtggctaacaacgatttaaactcacaagatggttcagagaaaaacgctcaaatgccttcagagcttatcacctcctgtgttgccacttggctcatgattcagatgtgcacggagagacagtaccctccagctgatgtcgcacagcttatagacgcagcagtcacaagcttgcagccacgatgcccacagaacctaccgatctacagagaaatccaaacgtgcatgggacggatcaagactcaaatcatgtcccttgtaccaacttgaaaagctaactcatttgggttggttttgttttgaatcttcgttaggtaagtctagtctcctttttactagagtagatgatgacatcttcacctgagaaaatggtgttataagttcacgaattcaagatagcttgaccagaggtattgtagttgctgaacaagcttttggcttattcaggggcttttggtagtgaaccattggttctgcaacgtaaaatgatgtttatgcttatattaaaattctcatcaatgtcgttcagcaatcgctaaaaaaaaaaaaaaaaaaagggcggccgctctagaggatccaagcttacgtacgcgtgcatgcgacgtcgt

SEQ ID NO: 89830 - DNA, 898 bp, Arabidopsis thaliana columbia
  unsure (1)..(898): unsure at all n locations
nnnnnnnnnnnnnnnnnnnnnnnnnnnnnnnnnnnnnnnnnnnnnnnnnnnnnnnnnnnnnnnnnnnnnnccacgcgtccgttcttcttcttctcctctgcttttggaatcattatagtgataagaggagatggcggatataacagaatatctagagagatcgatgcagaattgttcacttattgatcggagaagtagtatgggagatggatttggtatgagcgatgaacatatcccgatctcagatagattcttggagctcagttctcacttctctgttccttctcatttggaacagtgtcttgatcttaagacaggagagatttactacagaagctggaatagtggaatgagagtgaaagaagatccgagaaaatcgatgagtcgtggtaactatgcagaccaatccagtggtgaatcgtctggaacagttttttcatcagaagaagttagctcgtattatgaaagcgaagagtcttcatcagagtcgtctccttcatcaagaaagtatcacaaagaggaacaagacgaagatgttcttgtggtagctggttgcaaagcttgtttaatgtatttcatggtacctaaactctttaaggattgccccaaatgtgcaactcagcttctccactttgatctacttcactctacttctccttgaacctatctttcgttgctgatttttttctcatttcattttcaggttttcttcacatagatttgagggttgtcttctctcgtttcgtcttttaatctcttaactcgtatatgtataaactagtgttcgtgttgtggcattatatttaaaaaaaaaaaaaaaaaaaagnnnnnnnnnnnnnnnnnnnnnnnnnnnnnnnnnnnnnnnnnnnnnnnnnnnnnnnnnnnnnnnnnnnnnnnn

SEQ ID NO: 89831 - DNA, 610 bp, Arabidopsis thaliana columbia
  unsure (1)..(610): unsure at all n locations
ctttccgatttccaancttcacccnggttaaagccccntggncatttngctcccnccggcaagcaanttgtccttgagncctcaaaggatctaggcttggagtgaagggaatttgggggcttctagggtgccccttcacaggtttgggaaccacttcttaccagtggaatctggtatgagttggcttacatggaggccaaggaaagtgttcgtagaggcgatagggtttggcagatcgctttcggttctggttttaagtgtaacagtgtggtgtggaaggcaatgaggaaggtgaagaagccaaccaggaacaatccttgggtggattgcatcaaccgttaccctgtgcctctctaaattatcattcttctaaattaaatcaagtaagatctctaattactccaaccaaaagatacagtttggttggatgataggagttatttactgatcattcgtatctaagtctgttataagaatggatgtggctagagtcctgttcagcttcaacttgttttattttttggaaaaaaaccaaagggcgaacnnnnnnnnnnnnnnnnnnnnnnnnnnnnnnnnnnnnnnnnnnnnnnnnnnnnnnnnnnnnnnnnnn

SEQ ID NO: 89832 - DNA, 2054 bp, Arabidopsis thaliana columbia
caacacaactccttataagacatacacttcatcaacctatagatctcactcacataatcaacctacaaaacaaaaacaagaatgggtagatccaacgagcaagatctgctctctaccgagatcgttaatcgtgggatcgaaccatccggtcctaacgccggctcaccaacgttctcggttagggtcaggagacgtttgcctgattttcttcagtcggtgaacttgaagtacgtgaaacttggttaccactacctcataaaccatgcggtttatttggcgaccataccggttcttgtgctggtttttagtgctgaggttgggagtttaagcagagaagagatttggaagaagctttgggactatgatcttgcaactgttatcggattcttcggtgtctttgttttaaccgcttgtgtctacttcatgtctcgtcctcgctctgtttatcttattgatttcgcttgttacaagccctccgatgaacacaaggtgacaaaagaagagttcatagaactagcgagaaaatcagggaagttcgacgaagagacactcggtttcaagaagaggatcttacaagcctcaggcataggcgacgagacatacgtcccaagatccatctcttcatcagaaaacataacaacgatgaaagaaggtcgtgaagaagcctctacagtgatctttggagcactagacgaactcttcgagaagacacgtgtaaaacctaaagacgttggtgtccttgtggttaactgtagcattttcaacccgacaccgtcgttgtccgcaatggtgataaaccattacaagatgagagggaacatacttagttacaaccttggagggatgggatgttcggctggaatcatagctattgatcttgctcgtgacatgcttcagtctaaccctaatagttatgctgttgttgtgagtactgagatggttgggtataattggtacgtgggaagtgacaagtcaatggttatacctaattgtttctttaggatgggttgttctgccgttatgctctctaaccgtcgtcgtgactttcgccatgctaagtaccgtctcgagcacattgtccgaactcataaggctgctgacgaccgtagcttcaggagtgtgtaccaggaagaagatgaacaaggattcaaggggttgaagataagtagagacttaatggaagttggaggtgaagctctcaagacaaacatcactaccttaggtcctcttgtcctacctttctccgagcagcttctcttctttgctgctttgctccgccgaacattctcacctgctgccaaaacgtccacaaccacttccttctctacttccgccaccgcaaaaaccaatggaatcaagtcttcctcttccgatctgtccaagccatacatcccggactacaagctcgccttcgagcatttttgcttccacgcggcaagcaaagtagtgcttgaagagcttcaaaagaatctaggcttgagtgaagagaatatggaggcttctaggatgacacttcacaggtttggaaacacttctagcagtggaatctggtatgagttggcttacatggaggccaaggaaagtgttcgtagaggcgatagggtttggcagatcgctttcggttctggttttaagtgtaacagtgtggtgtggaaggcaatgaggaaggtgaagaagccaaccaggaacaatccttgggtggattgcatcaaccgttaccctgtgcctctctaaattatcattcttctaaattaaatcaagtaagatctctaattactccaaccaaaagatacagtttggttggatgataggagttatttactgatcattcgtatctaagtctgttataagaatggatgtggctagagtcctgttcagcttcaacttgttttattttttgtttgttctctattggatcttcataaactttgagagattaaagaaaaaaactcttctttagtttgatagaacagatggtcattgtaatttctttaatatgtcagaggccgcgaattcgatatcaagcttatcgataccgtcgacctcgagggggg

SEQ ID NO: 89833 - DNA, 531 bp, Arabidopsis thaliana columbia
gaaaaagcctacggttgttctgttcctttcaatctcaccaaattttcatcttcaccttcacttttgatagattctcttcaccgaaccaaatccgtaaccctagcttcttcgtaaattatagagaaagagagttaattcgaatctggatgaaattggttttgtctagatggaaatctagatgtgtctgattccgaaatctgagtctgagagatgctaggagcgattcatttgggagtattagcagcttgtttcgtcctcttcgttcccatggcaatggctggttggcatctgagcaggaacaagatgctcttctttagtggcgctttgtttatttctctcccggtttgtgttcatctcacgccttatttcccttccgtttccgacatcggtgcctctggttactgtgctgttgtctacgatcatcgtatctcttgtatcaacgaggttaatcagattgtctgggatgttaaaccggtaccgaatcccgagtctgctcgtttgaacaatggctcaacaaagcttgattatttc

SEQ ID NO: 89834 - DNA, 574 bp, Arabidopsis thaliana columbia
  unsure (1)..(574): unsure at all n locations
gaaagaaatacaaggttgatcgtacaaagaaatcgaaaaantggcgaggacgacgcgagaaagantgaaatctttcataaacaatagatggctagtttttttngcggccatgtggattcattnttgccctggcatcggttacttntncggcagcatctttcctgtnatcaagagctccctcaactacaaccagaaacagctctccaggctcggtgtcgccaaagatctcggcgatagtgtcggcttcctcgctggtaccctctccgagatcttgcctctctgggccgctcttctcgtcggctctgtccagaaccttgtcggctatggctgggtttggcttatcgtcaccggtcgtgctcccattcttcctttatgggctatgtgtatcctcatttttgttgggaacaacggggagacctacttcaacaccgctgcattagtttctggtgttcagaactttcccaagagccgtggtcctgtcgtcggtatcctcaaggggtttgctggcctcggcggtgccatcctctcccaggtgtacacaatgatccactcctctgaccgtgcatccctcatc

SEQ ID NO: 89835 - DNA, 473 bp, Arabidopsis thaliana columbia
  unsure (1)..(473): unsure at all n locations
ccgagcnnnnnnnnnnnnnnnnnnnnnnnnnnnnnnnnnnnnnnnnnnnnnnnnnnnnnnnnnnnnnnnnngccacgcgtccgattcgatctagtagtcacgcgactccgccgtcgattacatggcttctcaccaccaccacaaccataaccacgtgtgctcacgccaccaaaaccaccacaataacacccctcaattcgccacgtcaccaaactgctgcaacgagatccaaccacccttctccgccgccagcggaggataatcttctccatctcgtcgctacttacctccaaaatcatcaacaagaaactcaatgctcctgcgagacttcttggcaaaacttcaatggtattagaaggcagaaccgtgttttgcgtcagcataagaatggtccacgagaataccaaccaagctggtctggcttggcttctccgcaaaatcgatgatcttgaatcttcactcaacaagttttc

SEQ ID NO: 89836 - DNA, 1130 bp, Arabidopsis thaliana columbia
gcaagtgcgtgatggaagtactattcgggtttatcttcttccagagttccagtttgtgcaaggatttgttgcgggagtccaggctccatcaatgggaaggcgaaccacaaatggaagtgttgttgagacagttccagatgagccgaatggagatgtttctgctgagtcacgaggtcctctaacgacagctcagagacttgctgcctctgcagcatcgtctgtcgaggtttcctctgatccatttgcaactgaagccaagtactttaccgaacaccgtgttcttagtagagatgttcgcattgttcttgaaggcgttgacaaattcaacaatctgattggttcagttcattattctgatggggaaacagttaaagacttggggttggagctcgttgaaaatggtcttgctaaatttggtgaatggagtgccaacatgatggaggaggaagctaagaaaaagttgaaagctgcagaacttcaatgcaagaaagataaggttaaaatgtgggcaaactacgttcctccagctacaaactctaaggcaattcatgaccagaactttacgggaaaggtagtggaagtggtgagtggggaggggctaatagttgccgatggtgctgttccatttgggagtccagcagcagagagacgggtctgtctttcgagtatcagatctccaaaaatgggcaacccacgtagagaagagaaaccagctccttatgctcgggaagcaagagaatttctgtgaccccgacttattggcaaacaggttattgttcaaatggaatattcaaggaaagtcacccaaggagatggtcctaccacatctggagctgctgataggttcatggattttggctcagtgttccttccatctgctgccaaagccgattctgatgaagtgactgcaccacctgctgcagcaattgctggcagtcagccggttggtgtgaatattgctgagctcgttcttgtccgtggttttggaaatgtggttagacatagagattttgaagagcgatcaaaccattatgatgctcttctggctgctgaagctcgtgctctggctggaaagaaaggaatccattctgcaaaagaatctccagccatgcacatcacagacctaactg

SEQ ID NO: 89837 - DNA, 676 bp, Arabidopsis thaliana columbia
  unsure (1)..(676): unsure at all n locations
aaaatggtggtattgataccgaagcggattatccttacaaggctgctgatggtcgttgtgaccagaacaggaaaaatgctaaggttgttaccattgattcatatgaagatgtccctgagaacagcgaggcgtctctaaagaaagctttggctcaccagcctattagtgtcgccattgaagcgggtggtcgcgctttccagctctattcttcgggtgtatttgatggactttgtgggacggagttagaccacggtgttgtggctgtgggttatggaaccgagaacggaaaggactactggattgtaagaaactcatggggaaacagatggggagagagcggatacataaagatggcacgtaacattgaagcgccaacaggaaagtttggaatcgctatggaggcttcgtatccgatcaagaaaggtcagaacccaccaaaccctggcccgtcaccaccatctcccattaagccaccaaccacatgtgacaagtactttttttgccctgagagcaacacttgttgttgtctctacaagtatggtaagtactgcttcggatggggatgtttgcccgctcgaagctgctactttgctgcgatggtaactcaagtggctgtcctcatgaggancccgtttttnacgtnacccnggnanctnttttttggcaananaanncc

SEQ ID NO: 89838 - DNA, 1151 bp, Arabidopsis thaliana columbia
  unsure (1)..(1151): unsure at all n locations
nnnnnnnnnnnnnnnnnnnnnnnnnnnnngggaaagctggtacgcctgcaggtaccggtccggaattcccgggtcgacccacgcgtccgattcatcttcttcttcttcaaacaaaaaatgggtttcttaaagttatctccaatgatccttctcctagcaatgatcggcgtttcatatgccatggacatgtcaatcatctcctacgacgaaaaccaccacatcaccaccgagaccagccgtagcgactcggaggttgagagaatctacgaagcgtggatggtggaacacgggaagaagaagatgaatcaaaacggtcttggtgcagagaaagatcaaagattcgagatctttaaagataatcttcgtttcatcgatgaacataacaccaaaaacctcagttataaacttggtttaacccggtttgctgatttaaccaatgaggagtaccgatctatgtaccttggtgctaaaccgaccaagagggttttgaaaaccagtgatcggtatcaggcgcgtgttggtgacgcgcttcctgattcggttgactggagaaaagaaggtgccgtcgctgatgttaaagatcaaggaagctgtgggagttgttgggcattctcaactattggagcagtggaaggaataaacaagattgtgacaggagatttaatatctttgtctgaacaagaattggttgattgtgacacatcttataaccaaggatgtaatggtggtttaatggactatgcgtttgagtttattatcaaaaatggtggtattgataccgaagcggattatccttacaaggctgctgatggtcgttgtgaccagaacaggaaaaatgctaaggttgttaccattgattcatatgaagatgtccctgagaacagcgaggcgtctctaaagaaagctttggctcaccagcctattagtgtcgccattgaagcgggtggtcgcgctttccagctctattcttcgggtgtatttgatggactttgtgggacggagttagaccacggtgttgtggctgtgggttatggaaccgagaacggaaaggactactggattgtaagaaactcatggggaaacaaatggggagaaaggggcttcataaaggtcggaccctgagcgcacaggagttgctcnntggggtcngc

SEQ ID NO: 89839 - DNA, 312 bp, Arabidopsis thaliana columbia
gtcttcgtacctttctgcttctacgccgtcaaaatctaactgctcgacagtgaccatgcaaagctcaatgacaatggaactacgaccatcaggtgattccggttcatctgacgtcgattgctgagatcagcgatggcttttcaccgctcgatacttctcacagagactgtcccgtgatgaaggttcgttgctgagaagagcagagatgtatcaagactacatgaagcaagtaccaatcccgacgaatcgtggctcgttgattccgttcacaagctgggttggattaacgatttcaatgaaactgctttatgg

SEQ ID NO: 89840 - DNA, 546 bp, Arabidopsis thaliana columbia
  unsure (1)..(546): unsure at all n locations
nnnnnngtattaattgggttttgagaaaaggagaaaactttcgtcgatcggaagatttttcagatacgaaaaatggcggtacagtggcttttggtgtgtcacgggatgatgacgttgacggtggtcatctccttcctctgtggtcaatggccaatcttcaaaggcacaccttttcaatggattcactacttcctcactttcggcgcctacgattacttcctgagatttgtcggatttgtgtttggttccaagggtacggacgtgattctttctgtggagtatttctgctgcgatcgtcctaatccgattctgcaagtcatatatatagccattatgggatcaacctactttttgactgcaaaatcttctttcatctatatacctggatattatcttggcgatgttcacaagtacacaagctttctagctgttattggtggtgtcatacttttcttattaacatgcttttctgatccaggtactgtgaacgctgagaaatgttcacggtacatttctgcttacccctatgatgatatcatttactcc

SEQ ID NO: 89841 - DNA, 284 bp, Arabidopsis thaliana columbia
ttgtgacccgtgtggggacaataagttggtggaacactggctcggcccacgggtcggatctgttgtggcattgttccgggctgcccagtccaagctgagagtgatccgtgtgtgttaagcgaaggcttggctcaggcggttcttgcagtggagggcaatgcgtgaggctggtttcacagagcagcgatcacctcccgctctcagcagtggacggatcacagctcgacgccactcagattcaccatggcctgctggctcgttcccagctggaccaccaatttttg

SEQ ID NO: 89842 - DNA, 431 bp, Arabidopsis thaliana columbia
gccgccgatgaatccttctcacggtggcgacgacaagcaacgaccggcgatgtatccccaagttgatcaatccattcctgataatccttttgcttctacaaatccttacgtcgcttcttccccttatctctatccttctctatcctctcacaatctcggacctaatctcttcccagaccacggagatgcatccaacgaccaatcaccatctgctcctcctcaggcgacggaggaggttctcatccgtgttcccggcgctattctcaaccttatcgacaaatcctacagcgttgaactcgcgtgcggtgatttcaccatctttcgaatcatccaggggcaaaatattgtagcggttctagctaatgttgggaatgagattcaatggccgttgacgaagaacgaggttgctgcgaaggttgatggatcacact

SEQ ID NO: 89843 - DNA, 827 bp, Arabidopsis thaliana columbia
agctctctacgactcactatatggaaagctggcacgcctgcaggtaccggtccggaattcccgggtcgacccacgcgtccgcggacgcgtgggcggacgcgtgggcttccttgattatcggccaatcatagaacaagaagtagagaaagcagaagatacactacagagacagagagagatcttgacaagatgggtaaagcaagaggagtgaacaatggcgtgaatgaaagttctctcggttatctttttggttccggccagccttcttccgctgctgctgccacaatggggactactactactacaaccaccacaactaccaccgatgggaccggaggcagaccgataaccaccacgacgaccacagtcactgataacaagaagacatctgcaggtgttagaggaagtcctaataattacttcagatcagaaggccaaaactgtggaaactttctcacggacaggccatctactaaggttcatgcagctcctggtggaggatcttctcttgattatctgtttggaggaccaagtcctgctggatctggaaacaaatgaagttacttgtagtttttttcccactattcagattcgtgtaaatcatcaaaagtgttggcttttatcccttagtgaaccctgtgtgattcaattgtgatgtttgccttttgttctcttctttgtcttgttaaaaggaattttcagacaatgttctctttaagagttccaagaaaataaactaagtactgagcaaaaaaaaaaaaaaaggacggccgctctagaggatccaagcttacgtacgcggctatgccacgtcaaagctcttctat

SEQ ID NO: 89844 - DNA, 709 bp, Arabidopsis thaliana columbia
  unsure (1)..(709): unsure at all n locations
ctctaatacaactcattttagggaaagctggtccgcctgcaggtcccggtccggaattcccgggtcgacccacgcgtccgcccacgcgtccgtacggttgcgagaagacgacagaaggggataacaccaaattcgattcttataactgtttccctctcatctttacacaaaagtattctaatcgatttcaatggcgggtcgtggtaaaacactcggatctgggtctgcgaagaaggcaacaacaagaagcagcaaagccggtctccaattccctgtgggtcgtatcgctcgtttcttgaagaaaggcaaatacgccgaacgtgttggtgccggagctccggtttacttagccgccgttctcgaatacctcgccgctgaggtattggaattggctggaaacgcagcgagggataacaagaagacgaggattgttccaaggcatattcaattggcggtgaggaacgatgaagaattgagcaaattgcttggagatgtgactattgctaatggaggtgtgatgcctaacattcacaatcttcttcttcctaaagaagaccggtgcttccaagccatctgctgnaagccggttgnttaatcaaccaaancacccccttgnggttttttnagttttaaggttttaaanngaattntggtntnccaatggtnaaaaaaactacccctggggtttttnattaattnatgnccattg

SEQ ID NO: 89845 - DNA, 772 bp, Arabidopsis thaliana columbia
  unsure (1)..(772): unsure at all n locations
ataggaaaagctggaccgcctgcaggtaccggtccgaatttcccgggtcgacccacgcgtccgccgattcttataactgtttccctctcatctttacacaaaagtattctaatcgatttcaatggcgggtcgtggtaaaacactcggatctgggtctgcgaagaaggcaacaacaagaagcagcaaagccggtctccaattccctgtgggtcgtatcgctcgtttcttgaagaaaggcaaatacgccgaacgtgttggtgccggagctccggtttacttagccgccgttctcgaatacctcgccgctgaggtattggaattggctggaaacgcagcgagggataacaagaagacgaggattgttccaaggcatattcaattggcggtgaggaacgatgaagaattgagcaaattgcttggagatgtgactattgctaatggaggtgtgatgcctaacattcacaatcttcttcttcctaagaagaccggtgcttccaagccatctgctgaagacgattgattaatcaaccaaatccactctcttgtgttttttgagtttttaaggctttttaagagtaatttagattagatctatggtgaagaaagaatctatcttctgtgttttttgaattgaattgaatgttcatatgcttccaattcttatggaatcaagattttaacttttcaaaaaaaaaaaaaaagnnnnnnnnnnnnnnnnnnnnnnnnnnnnnnnnnnnnnnnnnnnnnnnnnnnnnnnnnnnnnnnnnnnaac

SEQ ID NO: 89846 - DNA, 647 bp, Arabidopsis thaliana columbia
atcacaaatcgtgtcatcactttgtggtataggccccctgaattgttacttggtgcaactaaatatggaccagcgattgacatgtggtcagttggatgcatatttgctgaacttttgaatggaaaaccaatcttgcctgggaaaactgagaatgaacaattgaataagatttatgagctttgtggatcacctgatgaaagcaactggcctggagtttccaagatgccttggtataaccaaatgaaatcatctcggcccttaaagagacgcgtaagggagatctacagacactttgatcgccatgcccttgaactacttgagaaaatgttggtacttgacccatctcagagaatatgcgcaaaggatgctcttgatgctgagtacttttggactgatccgctgccatgtgatccaaagagtctaccgacatatgaatcatcacatgagttccagacaaagaaaaaacggcaacagatgcgtcataatgaggaagcagccaaaaaacagaaactgcagcatccacagcagcaacattctcgtttacctccacagcaacatggtgttggccagtctcatgccgctccacttttggcctgctggacaaaccaccctatgaacaacaacgcaccaaacacccaaatacctgc

SEQ ID NO: 89847 - DNA, 550 bp, Arabidopsis thaliana columbia
  unsure (1)..(550): unsure at all n locations
nnnnnnnnnnnnnnnnnnnnnnnnnnnnnnnnnnnnnnnnnnnnnnnnnnnnnnnnnnnnnnnnnnnnccacgcgtccgcaaaatgccaagaccaagagtttcagagttgtctcagaggcaagctccaaggctgaggtcatcgtcatctacttctgattccaatcattccaaccgtctgatcactacggatcaaagttttaagcccggtgttgacgcggaaatctcctcgaagcggtggacctaacagtgatccgcttggtcagaagaaacttgggggacgaatatcggatctagagtcgcagttaggacaagcgcaagaggaactgagattgctcaaggagcagttggctaatgctgaagctgtgaagaaacaagctcaagatgagcttcataagaagtccaagaaaccaaaccccctggctcgagtggaggaatctgcaactgaggctgagaggattgatagacaccaaatccctggtgatgtgcaaaaagaaactggtgtgtttgaggttcccgctgaaaagattgccgganaagaaaaagaactgg

SEQ ID NO: 89848 - DNA, 556 bp, Arabidopsis thaliana columbia
ttctatccaattcatttagggaagagctgtgccgcctgcaggacccggcccggatttccggggtcgacccacgcgtccgcccacgcgtccgtttttttatccaactttcttcaccaaatcgattcttcttaaaccatgtcttccttcacctccaaattcgccgatgagctgattgctaacgctgcttacatcggaacacctggaaaaggtatccttgcggcagatgaatcaactggtactattgggaaacgtctcgctagcatcaacgttgagaacgttgaatccaacagacgtgctcttcgtgagcttctcttcactactcctggagctcttccttgcctcagtggtgttatcctctttgaagaaactctttaccagaagagctctgatggtaattgacagtttaacatcgctatatgtctgaatctgtgtatcatcgttgactttgattggggttgattttggttgtgatgcaggcacgccttttgttgatatgttgaagagtgcaggagttttgcctggtattaaggttgataagggtaccgttgagcttgct

SEQ ID NO: 89849 - DNA, 896 bp, Arabidopsis thaliana columbia
  unsure (1)..(896): unsure at all n locations
aatatcttctggaagctaccatcactctctcctatataactcaaaattcaccatcatcttcatcatcatcatcatcatcatcctttctttatccaactttcttcaccaaatcgattcttcttcaaccatgtcttccttcacctccaaattcgccgatgagctgattgctaacgctgcttacatcggaacacctggaaaaggtatccttgcggcagatgaatcaactggtactattgggaaacgtctcgctagcatcaacgttgagaacgttgaatccaacagacgtgctcttcgtgagcttctcttcactactcctggagctcttccttgcctcagtggtgttatcctctttgaagaaactctttaccagaagagctctgatggtacgccttttgttgatatgttgaagagtgcaggagttttgcctggtattaaggttgataagggtaccgttgagcttgctggaaccaatggtgagactactactcaaggtcttgatggtcttggtgaccgttgcaagaaatactacgaggctggtgctcgtttcgccaagtggcgtgcggttcttaagattggtgttaatgagccatctcagttagctatccatgagaacgcttatggattggctaggtatgctgtcatttgtcaggagaacggtcttgtgccgattgtggagcctgagattcttgttgatggctctcatgacattcagaaagtgtnccncggtgacagagcgtgttctttcanncttnctacaagggtctgagtgatcaccatgtcttnctaagaaggnanactctttgaaacctaacaataggttactccanggtcacagagttcgaaggtttcaccnnaaggggtttcttnggacanatttccntgcncnttaaagggca

SEQ ID NO: 89850 - DNA, 883 bp, Arabidopsis thaliana columbia
  unsure (1)..(883): unsure at all n locations
ccgaaacaaagtagcagaacaaagcatatacaaaagcttcattgcctcgagattaaacagcatcaagacaacatccaaaaattacccaggtttttgtgtttgaaactccaagattgttgcggtattcctgaaagactaaggcttttagctccaggtttccaagagtgctgtgaatcagctcccactctgtctctgcatattgcaagacaccggttttgtttcagaagtttgtttcttcttgtctcatgatcacgagttttcagcaatggggtatgtaaacgtggagaagagatgggtttttcctcttgtcatcacatctgtcgtctgcgtttttcttcttgcaacttctttcaacatgggactagtctcttccctccgaacaatcaacgggattttctccatcataccttcccgtctcgtcaagaaccaaacgagacttgattttgcagagtctaaagttgctagacaaacccgtgttttgcctcatgaagacaagcttccccgttttgcataccttgtttccgggtctaaaggggatgtagaaaagctttggagaacacttagagcagtgtaccatccaagaaaccagtatgttgttcacttggatcttgaatcacctgtgaatgagagattagagctggcctctcggattaataacgntcctatgtactctaaaaccgggaatgtatatatnataaccaagggtaaccttgtggcatnttaagggcccacggntggtggaaatacttttnaaggttnncctgttcttctcaaggggaattngncctggggttggtttttaaccttngnntttaaatttncctttggggcccaggtgnctggntnancggttaacantgggccggacctanttttttggcca

SEQ ID NO: 89851 - DNA, 483 bp, Arabidopsis thaliana columbia
atacgactcactttagggaaagcacgtacgcctgcaggtaccggtccggaattcccgggtcgacccacgcgtccggccattattggataacagttattcgtctgggttcagtgaagatggagcagaacgagttcatggaggcaataatgtacgttaatggtgttcgtagagttttgcctgatggattagctcacatgacgcttctcgaatatctcagagatttaggattgaccgggacaaagctcggatgcggcgaaggtggttgtgggtcttgcaccgtgatggtgtctagttatgaccgagagtcaaagacatgtgtgcattatgctgtcaacgcttgcctagcacctctctactctgtagaagggatgcatgtaatatccattgaaggaggtggtcatcggaaacttggcttgcaccctctttaggagtcatgggcattttcgcatgggtcttaatgtggggttttgtacttccgggttt

SEQ ID NO: 89852 - DNA, 423 bp, Arabidopsis thaliana columbia
  unsure (1)..(423): unsure at all n locations
gtactggttatggttatggaagcaatngtgtaggttatnggggttttggtgggtatggcaatccanctggtgcgcctnatgggaatcctagtgtccctggagctgggtttggaagtggtccaagaagttcatggggcgctcaagcaccatcgggttatgggaatgtgggatatggaaatgcagctccgtggggtggttctggtggtcctggttcagcagtaatgggtcaagctggtgcatctgcaggttatggcagtcaaggttatggctatggtggaaatgattcctcttacgggactccatctgcctatggtgcagtaggggggcgatctgggaatatgcctaacaagcatggtggcggtggctatgcggatgctttagatggctctggaggctatgggaatcaccaagggaacaacgggc

SEQ ID NO: 89853 - DNA, 657 bp, Arabidopsis thaliana columbia
  unsure (1)..(657): unsure at all n locations
nnnnnnnnnnnnnnnnnnnnnnnnnnnnnnnnnnnnnnnnnnnnnnnnnnnnnnnnnnnnnnnnggagccaagcgtgcgcccacacgtgcgcccacgcgtccgtgttcgtgttcgtggagcggaggacaacgtagttggtttccgcgtgctgtacgagacagataacttctacagagagaaacaaagatcgagacaaaaagaaacccttaaaggatttgaacggagaagacgaggaaaaacaaagacacaactctaacctttagagagagaaaaacaaatgtcgttccgtagcatagttcgtgatgtgagagatagtataggaagtctatcgaggcgtagtttcgactttaagttaagcagcttgaacaaagaaggtggtaaatcccgtggttcggttcaagattctcatgaggaacaacttgtagtaacgattcaagaaacaccgtgggcgaatctacctccagagttattacgtgatgtgatcaaaagacttgaagagagtgaaagtgtgtggcctgctcgtagacatgttgttgcttgtgcttctgtttgcaggtcatggagagatatgtgtaaagagattgttcaaagtccggagctctcatgcaaaatcacattttcttgtttgttgaaaaagnctggaccaagagatgcaa

SEQ ID NO: 89854 - DNA, 1072 bp, Arabidopsis thaliana columbia
  unsure (1)..(1072): unsure at all n locations
atgattcatnnnnnnnnnnnnnnnnnnnnnnnnnnnnnnnnnnnnnnnnnnnnnnnnnnnnnnnnnnnnnnnnnnnnnnnnnnccacgcgtccgaacgaacgaagatccaaagatgagtgaagaagcatatgaagaaactcaggaatcaagtcaatctcctcgtccggttccaaaactgaacgagaggattctctcaacactatccaggagatctgtagctgcacatccatggcacgaccttgagattggtcctgaagctccattggtcttcaatgtggtggttgagatcacaaagggaagcaaagtgaaatatgaactcgacaaaaagaccggtcttatcaaggttgaccggatcttgtactcctccgttgtttatccacacaattacggattcatcccacggacattgtgtgaagacaacgatcctcttgatgtccttgtccttatgcaggaaccagtgcttcccggatgtttcctccgtgctagagccattggattaatgcccatgattgatcagggagagaaagacgacaaaatcatagccgtatgtgctgatgatccagagtacaaacatttcacagacatcaaacaactcgctcctcatcgtctccaagaaatccgccgtttcttcgaagactataagaagagcgagaacaagaaagtggctgtcaacgatttcttgccatcagagagtgcccatgaagctattcagtactccatggatctatacgctgagtatattctccacacgttgaggagatgagcatcaacagcaacatatgattctcttcgcagcatccgcatataaatatatttaaatggaatattattttacataattcatagccatatgattggctttttgcagttttttgttttgttttgttttctgtttgtttttttccttgtgatgatgcaattttgttcaattgtataatttgaaactggtaagatataatgacaaacgcagttttgcctaaaaaaaaaaaaaaaaaagnnnnnnnnnnnnnnnnnnnnnnnnnnnnnnnnnnnnnnnnnnnnnnnnnnnnnnnnnnnnnnnnnnnnnnnnnn

SEQ ID NO: 89855 - DNA, 533 bp, Arabidopsis thaliana columbia
  unsure (1)..(533): unsure at all n locations
tacttcagctctctacgactcactattgggaaagctggcacgcctgcaggtaccggtccggaattcccgggtcgacccacgcgtccgcggacgcgtgggcgtcgctgtcgctgtgtctctctttctccctctgttccatagatctgagcttctatcaatattctcggatcgctatcagtcaaatcttaagaatttcgtcgctttagctcaattcggattgtggaggaagttttaggatttgatctccatctcgtatccaagcatggttgctcctgtgcctccaggggcacctagacccaacagccagcaaaattccgggccacctaatttctacccgggttcacaagggaactcaaatgctttagccgacaatatgcagaacttgagcttgaatcgaccacctccgatgatgcctggctcaggtcctagaccacctcctccttttggtcagtcaccacagcctttccctcagcaatccccttcttatggagcntccgcacgtgngccttcacccatgtcccggcctggacctc

SEQ ID NO: 89856 - DNA, 636 bp, Arabidopsis thaliana columbia
  unsure (1)..(636): unsure at all n locations
nnnnnnnnnnnnnnnnnnnnnnnnnnnnnnnnnnnnnnnnnnnnnnnnnnnnnnnnnnnnnnnnnnnnccacgcgtccgcccacgcgtacgaaaaaaaagtgtttactttttgggttcctcttcggtgggttcactacactagtaacatctctgaacctgttctctgtctctcagcagcaaaacctcgaggcttctttttctttcattctctcaatttcttctctctgatctgaattctcgccgagtgaatctagaaccaggcaagctccaattaggtttaaggttttcaagcactctgtttccaatgctgcttccgagatggtttgcagaagcgttgttgctcctactttcaattcttgcctgttcaaacgctgcatttatcggtgtaaacattggcactgatctcaccaacatgccaccgccttcagacattgtaacacttctcaaatcacaacagatcacacaccgtccgtctctatgatgctaatagccatatgctcaaagcatttgccaacactagcatcgaagttatggtcggtgtaccactgaagaaatcctcaaaatcggacggtttccttcagctgcagctgcttgggttacaaaaacgtcgctgctgatattccttcaactaatat

SEQ ID NO: 89857 - DNA, 360 bp, Arabidopsis thaliana columbia
tatattatgtaaagaacctgaaaatgattgatattagaagtgtgcgcagtttattagatgagttttttttctatagatcatttggaaccaactccgttgatggaaggtgaggggagatctttcagagtactgggtttcaaccagagtcaaagggccatttttgtacagactttgatgaggtatctactttccattaaggcctttagacgccagaagctattctgtctaaattttacagtttcatcccccgatgtatctaaattatcatcagtcgtgtggtgctcaagccccacaagtttttccaggttgcgcctaataattgcaggtatggagctggcgattttgattggtaggagtttg

SEQ ID NO: 89858 - DNA, 606 bp, Arabidopsis thaliana columbia
  unsure (1)..(606): unsure at all n locations
nnnnnnnnnnnnnnnnnnnnnnnnnnnnnnnnnnnnnnnnnnnnnnnnnnnnnnnnnnnnnnnnnnnnnnnnnnccacgcttccggtgaggggagatctttcagagtactgggtttcaaccagagtcaaagggccatttttgtacagactttgatgaggtatggagctggcaattttgattggaaggagtttgttcctcgcttaaagcagaagacctttgaagaaataaatgaatatggaatactcttcttgaagcacattgctgaagaaatagacgagaattctccaaccttttcagatggtgtgcccaaggaaggacttagaatagaagatgttctagtcagaattgctcttctgatactagttcaggagaaggtgaaatttgtagaagatcatccagggaaacctgttttcccctctcgcattcttgaaagattccccggactgagaagtggaaaaatttggaaggaggaacatgacaagataatgatacgtgctgttttaaagcatgggtacggacggtggcaagctattgttgatgacaaagagttggggatccaagagcttatctgcaaagaattgaatttccctcacataagtttgtct

SEQ ID NO: 89859 - DNA, 613 bp, Arabidopsis thaliana columbia
  unsure (1)..(613): unsure at all n locations
accacgcgtccgcccacgcgtccgcccacgcgtccgctgattccaaagatgatcttctgaaaacatcgaccatgcaggaaaaagcaagcaccttcgccgtatagtcttcgctctgaccgtcctcacagctatctcagagatccaggaagggcgtcagtacctgtcctatgtcgtgatttcgacctcgatgccctctgcctaatataataagagtcagattggtcttatttgtggtttacatgacttggatttgatttagttttctttctagttgtagatatatctctttcgctagctgctcttatggtaagtctttcccactcgtgctcgacgtctctgttgtctggatcttgaaagtttcattcaatctaggagccaaagattgaaagcagggaagcgattagtactttatcgaacttttgttagagatatactgttgcttccagagttcttacttggaagttgattgtgttatatgtgaacggagctcttcaatatttgaattcatagtgaaaagtggtttaaaaaaaaaaaaaaaagnnnnnnnnnnnnnnnnnnnnnnnnnnnnnnnnnnnnnnnnnnnnnnnnnnnnnnnnnnnnnnnnnnnnnnnnn

SEQ ID NO: 89860 - DNA, 631 bp, Arabidopsis thaliana columbia
gtaccggtaccggaaattcccgggtcgacccacgcgtccgccttttatatatgtggaaaactgcatttattaagaacagtttagaaagtgtcaacccctaaaggaatgtttttagtttagaggaaagagagagaagaagaagcagcagcagaagttgttaatttgaagactatttgaggaaagacacctatatctaaatactcaaagttacaaaaatattacttcagaaaacagttccattagagagactcataaagcttctcatctaattatgagtggattgatgagttttggtgaattagaagaccaatttggtcagattttcagacactactatggaagagaggataccatttctgcaaatgcttcaatgcttagaacacccttttcacaacaacagaaccaaatcagtttctccaatcacttctccagatccaaaccctagaatcaaagagctgtctcacccttgaaacaaacatcaaaagagatccgggtcaaacagatgacccggaaaaggatccaagaacagaaaacggagcagtaacggtcaaagaaaaaagaaaacggaaacgtacaagagctccaaagaacaaagacgaagttgaaaaccaaaggatgactcacattgccg

SEQ ID NO: 89861 - DNA, 399 bp, Arabidopsis thaliana columbia
agctacctcgcctagcgtaagggaaaacgcggtgactgtgatctgctctctagcggaatcaggcggatgcgaaaactggcttatctctgagaacgcattgccttcattgataaggctactagaatcaggaagtattgttgctaaggagaaagcggttatttcgttgcagagaatgtctatttcatcagagacatcgcgttcaattgttggtcacggcggggttggtccgttgatcgagatttgcaaaacaggggactctgtttctcaatccgcttctgcttgtactttgaagaacatttccgctgtgcctgaagtaagacagaatctagcggaagaaggaatcgtgaaagtgatgattaacatacttaactgcggaatcctattgggatctaaagaata

SEQ ID NO: 89862 - DNA, 841 bp, Arabidopsis thaliana columbia
  unsure (1)..(841): unsure at all n locations
atttctcctccaatttcgtcgcacacaggaaaacaaaatgcttctcaaagctgcttctactttcgctctattgaacattcatggggagaagaaagacatctctcctctcttctcctcctcctcctccatttcgtctccggtttcttctggaaaatccggcaatctctctttccctcttcgtgcttccaagagttcaaccactaccacaagcacgttgagcggcgttgtgttcgagcctttcgaagaggttaagaaagagatggatctagttccatctggtcaacagctttctcttgctcgtcatttgtactcccctgagtgcgaagccgccgtcaatgagcagatcaatgttgagtataacgtgtcgtatgtgtatcacgctttgtatgcatatttcgatcgtgacaacgttgccctcaagggtctcgccaagtttttcaaggaatcgagtgtggaagaacgagagcacgctgagctgttgatggagtatcagaacaaacgtggtgggagggtcaagttacagcccatggtgttgcctcagtctgagtttgatcatcctgagaaaggagatgctctctatgctatggagttggctctttcattggagaaactagtcaatgaaaagctcctaaacctgcacagtgtggcttccaagaacgatgatgtccagttggcagattntattgagagtgtgtttctgaacgaacaggtggaagccattaagaaaatctcagaatatgtttctcaacttaggagacttggcaaaggacatggaacatggcatttcgatcaggagcttcttggggctgctgcttaatctgagttttagctggaatctcgc

SEQ ID NO: 89863 - DNA, 726 bp, Arabidopsis thaliana columbia
  unsure (1)..(726): unsure at all n locations
cctttccccaccttatcgccccttgggaactgtccccntcgntccgnccggatcccggcacccacccgtccggcataataggtggctcccaagaacgatgatgcccagttggcagtttttattgagagtgtgtttctgaacgaacaggtggaagccattaagaaaatctcagaatatggttctcaacttaggagacttggcaaaggacatggaacatggcatttcgatcaggagcttcttggtgctgctgcttaatctgagttttagctgtaatctcgcagtttggttaacttttgagttattttgagtatgagatgtaacttttaaggtagatttgatcaatatcgattctgttgtgagagaaaacaagctattacgctccttggggttaactttctttgtgttttcagtattatgggtttggccacttccgaatatcactttcctttagaacatttcaaatcagcagttgttttgaggtgtaatgccatggccactgattttttctaacaaaaaaaaaaaaaaagggcggccgctctagaggattcaaagcttacgtacgcgtgcacgcaaacctgtagcttttttattgtgtcacccaaaaataactcgctggccggcgttttacaacgtcgtgaagtggggaaaaacccctgggggggtacccccaaacctttaacattcccccttttgccaatataacaatatcctccccctttttttccg

SEQ ID NO: 89864 - DNA, 553 bp, Arabidopsis thaliana columbia
cggacgcatgggtcctaatgttcgttctgctctgggttcgccattagccaaatctatttactccattgatggtgtagttcgagttttctttgggtcagattttgtcactgtaactaagtcagatgatgtatcatgggatattctcaagcctgagatatttgcagcagtcatggatttctattcttctggccagcctttgtttctcgactcacaagctgctgctgccaaggatactgccatcagcgaggtaaaacccctcccgctctattaccctcgtgatcgcttcctcactttcccattagtttgttttgtttagagtgtgattttctggacctcctggattcttcagggtgattgtttcttatatagtttgtgttggttgtctggtgcatgattgaacatcttcttgagcatttgttgagggattggagagtgatagtttgctgtaaactttatatagacatgatatacttggttatggcatccatgccagttgctttaatgagctaatagaatatgagtaaagatcttcaagcgaacgcgtggatccccc

SEQ ID NO: 89865 - DNA, 461 bp, Arabidopsis thaliana columbia
gctgacccgcctgcaggtaccggtccggaattcccgggtttacccacgcgtgcgggaacggtgacgattctatcaactcctctctctccaagacttacatttctctgtgaaacaaaactgtcattatctcggagcaatcgctcggtatgttgttcattgagtgaagaaccaaaagaccaatgcttgagtcggagaagtcttgtttatgttttagttgcttcgccgtgtttgttgttaccagcgttgtcttcatctgcgaagactaaatcaaagagtccttatgatgagagacgggtactagaacagaacaggagggtaccgagagggaacaatgcttcctgacgaggttcctaactttggtaagagaaggttttagggaaagggatcacgctctcgaaagttacataagggttggttcggggcctgaaatggggggggttggaagggcgggacagggcgcc

SEQ ID NO: 89866 - DNA, 609 bp, Arabidopsis thaliana columbia
cgaaattgggatggtggggtaaatgcaaggagtattggaagaagatggatactgaaggtgttactaaggatcttttttcgtattccatttacatggatatcatgtgcaagagcgggaaaccgtggaaagctgtgaagttgtataaggaaatgaagagtagaaggatgaaactcgatgtggttgcttataacactgtgattcgagccattggagcgtcgcaaggtgttgaattcggtatcagggtatttcgggagatgagggaaagaggttgtgaacctaatgttgcgactcataacacaatcattaagcttctatgtgaagacgggaggatgagagacgcgtatcggatgcttgatgagatgcctaagagaggttgtcaacccgattcgattacttacatgtgtctcttttcccgtttggagaaaccgagtgagatcctaagtctgtttggtaggatgataaggagtggagtgaggccaaagatggatacttatgtgatgctaatgaggaagtttgagagatggggatttcttcagccggttttatatgtgcggaagacactgaaagagtctggggattctcctgattcaacggcatttaatgctgtga

SEQ ID NO: 89867 - DNA, 474 bp, Arabidopsis thaliana columbia
gtgagagagaacgtaggaggatctccggtaagcgttgtaagctgtttctctcatgaagatgtaacgttcctggaggaacacgggaagagcatcggcgcaagtgtagaacattgttgacattgcgaatgcgaagaaccctaaccgctcttgaactccttttggtgaattatccaatcgccagaatacggtggctaagatgaatccggtgacgattacggtggctaatcgcattccgagtagctccggttgtcgtcgggagttgaggattgagcgtctggtgagagttttgatttcgatccagaacggattcgcgaatgcagggacggctaaggttccgccaccgtggtttatgacggaggaaccaccgccgccaccggagactagatttcctctgcttatgctggcggaaatcgcttctttcaaggttaaatttgggtttggagaagccggcggagttagggtttgaggattgct

SEQ ID NO: 89868 - DNA, 451 bp, Arabidopsis thaliana columbia
ttcaccgtcacaacttgtgcttcctttcgtcctcgtcgccgtcgtcagagagaaaacgattaaagctggtggtatggggagagataaagaagataagacagagatggattcggttgttccatggatgagagctccggttgacgtcagcaatgtcgaaaactgcgctctcgataccctcccttgccttaatcccaagttgaagaaggcattggagaacatgggcatatcttcactatttccagtgcaagttgcagtttggcatgaaactatagggccaggtggttttgaaagagacatctgtgttaactctccaacaggaagtggaaagactctttcttatgctttaccaattgtgcagctccttgcatctcgtcctgtgagatgccctcgtgctttagtcgtattgccaacacgtgatttagccttgcaggttaaagatgtatttgatgca

SEQ ID NO: 89869 - DNA, 505 bp, Arabidopsis thaliana columbia
  unsure (1)..(505): unsure at all n locations
tgggaaaacttgntnccnccncaggntccccgggtcccgggaanttcccccccgggnnnggnccccnttggggnccccggntcgcncccccggtccgggcagttgggaattatcctggacttctaaagatgccgtcgcacaagtcgtttatgattaagaagaagttgggaaagaagatgagacagaacaggcctattcctcactggattcgtcttcgtaccgacaacaccatcaggtacaatgccaagcgcaggcactggcgtagaaccaagctcggattctaagtgataagccttctaaaagagtcttctttatctgtttggtttagcatttcctcaagtcttctttttgttttaagttatgacattttcatatttctgtaagacttttactctattatgattcatgttaccaaattttcttcgtattgggagttgattcttaacatttgcgtgatttgactattgaagtatctcttggtttgcttccatgtaaagttgtttct

SEQ ID NO: 89870 - DNA, 540 bp, Arabidopsis thaliana columbia
  unsure (1)..(540): unsure at all n locations
nnnnnnnnnnnnnnnnnnnnnnnnntggtacgcctgcaggtaccggtccggattcccgggtcgacccacgcgtccggtttctcagtgtttcggctcggcccagaacaagatcgcaagacttcaagatgccgtcgcacaagtcgttcatgattaagaagaaattggggaagaaaatgaggcaaaacaggcctattcctcactggattcgtcttcgtaccgacaacaccatcaggtacaatgctaagcgtaggcattggcgcagaaccaagcttggattctaagaggtttacttttgcttattgtgagagctttgttcttttgaaaaagactttgttttctttatcagttttgattgttcacatttgtgtaagacgatctttaatcatttatgtttccaaagtttcctgtagtaacattgagtttttcattagtttaaagatttggaaaaaaataaaataaagaaaaaaaaaagggcggccgctctagaggatccaagcttacgtacgcgtgcatgcgacgtcatagatcttgtatagtgca

SEQ ID NO: 89871 - DNA, 666 bp, Arabidopsis thaliana columbia
  unsure (1)..(666): unsure at all n locations
tgcagtttcatcccttgatcatatccttagtcaagatgctacacgaatgcagaaagagcttgtgaatgtcttagtcaggtccaacagaggtgaagcttggagatggcaacttatgtccaagcatttctaccctgaatctgtttacggtgatgaaggagacaaacctcaaatgcgttggcgtagaccgtccgctttcactgaaattgcctcttcttatgatgatgtcaatgcaaccaaatctcagagaaaccccaatggcttaccaaacccttctcatcgaagaatttccggtggatctgatgcttcaaagactaaacagacgctccaaaatagctctggaaactcggatggcgaaatggcggaagaagatgttcttgacattgtatttggttgttcagaagcaacagagagcattcctgcgccagttatttcaaaacttgctagcaaaacgcaaactngcaaacagnaaagagctcaacggagacagaggcttaaaaaccgtgaagcttccacaaatactcctcagtatgaacttgcatagagaaaacaaaacaattatgcttcttctgctttatgtttatcacacatgtatttgtctctttatcgattgcttaagttcttattccaatttatcattttgaatctcattttatgaaggatgattat

SEQ ID NO: 89872 - DNA, 627 bp, Arabidopsis thaliana columbia
gaatccagttcatcactattaggaagtggtcgctgcagtccggtcgattccgggcgccacgcgtcgcgtggaaactgagtcttgcttaaaaatgtggagcaagatcaaccattatcaatgcaaagtgccctaattccatccaggaatgctttggtatcagttgaccttttaagccatcctgattctgatgttagggtttcagttgtctcttgcttaaccgagattgtgaggattactgccccagaaaccccttacagtgatgatctaatgaaggagatcttcaggttgacaatagaagctttcgagaaattagctgatgcctcctctcggagttataagaaagccgagtttgttcttgataatgttgcaaaggtcaaatcgtgtttggtgatgttggacttggaatgctatgacctcatcctacaaatgtttcggaacttcttcaaattcataagatctgatcatcctcaactggtcttttcgtcaatggaattaataatgattgcaataatagatgaaaccgaacaagtgtccacggatttgcttgatagtctcttagcaactgtcaaaaaggaaaatcagaatgtttcaccaatgtcttggagtcttgcggagaaggttcttagt

SEQ ID NO: 89873 - DNA, 500 bp, Arabidopsis thaliana columbia
ctgtgatccagagcttgactcctgctatttcaaaccccttcagggtttatagaatttttaggaatccgagagagaaaaattcagggaagctcatttccctttctcaattcctagacttggcaaaaacttacacttctctctccggtgttttgatcagtgtagagaatgcagcatacttgagagagaagcaagggcttgacgtggttcaagcggttctcgatacactcaccgaagctggttacagcaatggaacaaccacaacaaaggtcatgattcagtctacgaacagctcggttctagttgacttcaagaagcagagcaagtacgagactgtgtacaaaattgaagaaaccattggtaatattcgtgactcggccatcgaagacataaagaagttcgctaacgctgtttgtcatcaacaaagattcagtctttcccaaactctgattcgtttctcactggccaaaccaatgttgtgagagggttgcagaagtctcagc

SEQ ID NO: 89874 - DNA, 523 bp, Arabidopsis thaliana columbia
cggtcgcgtgggttccattgagaatattcgtctcttctttctttcgttctcaattcccatcccatattccccatggcagcttctttttgcggcagccggagatacgatgttttcccgagcttcagtaaggtagatgtccgcaggtcattcctcgcgcatcttctcaaggagctcgaccgcagattaatcaatacgttcacagatcatggtatggagagaaacctcccaatcgacgctgaacttttatcggcgatagcagaatcgaggatctcaatagtcatcttctctaaaaactatgcttcttccacgtggtgcttagatgaattggttgagatccacacgtgttataaggaattggctcacatagtggttccggttttctttaacgtacatccttcgcaagttaaaaaacagaccggagaatttggtaaggtttttggaaagacatgcaaaggtaaaccagagaatcggaaactaagatggatgcaagctctagcagcggtagcaaatattgctggatatg

SEQ ID NO: 89875 - DNA, 739 bp, Arabidopsis thaliana columbia
  unsure (1)..(739): unsure at all n locations
cccacgcgtccgccggaagcgaaaccatccgctcagctcggtctctgatatccgctcgacacgcaggagaaagactcctgagaagctggggtgggggaacgggctgggcagtggaagacgctaaagacaagatctggaaacttctagaagaatacgaagtaggaggagtaatatcagaggcttgtcgatgcatacgcgatctaggaatgccgttttttaaccacgaggtggttaagaaggctttggtaatggcaatggagaagaagaacgatcggatgcttaatctcttgcaggagtgttttgctgaagggatcattactactaaccaaatgacaaaagggtttggtcgagtcaaagatagtcttgatgacttatctttggatattccaaatgcagaagagaaatttaactcgtatgttgcgcacgctgaagagaacggttggctacaccgcgattttgggtgttctacagattcttgactgattctgagtctctacatatatagaaatatggagttggttggttttgggtgttcttcaaactgttctttgtacttgtttccgacgaaagatcattctatgtactttttacataggtttttataaacgtcacatgcatatgttctctgnnnnnnnnnnnnnnnnnnnnnnnnnnnnnnnnnnnnnnnnnnnnnnnnnnnnnnnnnnnnnnnnnnnnnnnnnnnnnnnnnnnnnnnnnnnnnnnnnnnnnnnnnnnnnnn

SEQ ID NO: 89876 - DNA, 651 bp, Arabidopsis thaliana columbia
  unsure (1)..(651): unsure at all n locations
nnnnnnnnnnnnnnnnnnnnnnnnnnnnnnnnnnnnnnnnnnnnnnnnnnnnnnnnnnnnnnnnnnnnnnccacgcgtccggtttcgattcccacatttgaatcaaattcaatcgggatggagaattctgatattgacatggtaatcatacctgatactccagatagatcggtacaccatagagaggttaagagaaggccacattctccagtagcaccattaagatatcaaagagaggaataccgtaatcatcatcttcacggaagagccagaccagtccctgaaattggggacaaccgggaaagttctgatacacgaactgagagtggacatcgccctcgtgcttctgtaggcaatgctttgtttaggagaactgttgttgagaaggataaagggaaatccatctccactgatccatgtgcgcctcgtgtagagaaaaatccggttttaaatctgaatcagcgtaacggacatgttcatgttgctgcatcgagataccaaccatctgaagatataagagagttgcgcacaagntaatggttgttctcctttacgaggtgatcataactcctttgtgctgccggngaacagtaataaaggtaaagaaaaagcagattctggctctgttcctcatagagaaacaattgacct

SEQ ID NO: 89877 - DNA, 522 bp, Arabidopsis thaliana columbia
acgcctgcatgtaccggtccggaattcctggttcgacccacgcggtacagatcacaatcacaagtaaatacaaaaatcaccatagaaaaatatgaagcgatttattgttcttgcgctttgcatgcttatggttcttgaaaccacaaagggtttagatttccataacaaagatgtggaatcagagaatagcttgtgggagctatacgaacggtggaggagtcaccacactgttgctaggagccttgaagagaaagctaagaggttcaacgtgttcaagcacaacgtgaagcacatccatgagaccaacaagaaggataaatcttacaagctcaagctaaacaagtttggtgacatgactagtgaagaatttaggagaacatacgctggttcaaacatcaaacatcataggatgtttcaaggcgaaaaaaaggccacaaagagcttcatgtatgcaaatgtaaatactctcccaacctccgttgattggagaaagaatggagccgtcactcctgttaaaaacca

SEQ ID NO: 89878 - DNA, 708 bp, Arabidopsis thaliana columbia
  unsure (1)..(708): unsure at all n locations
nnnnnnnnnnnnnnnnnnnnnnnnnnnnnnnnnnnnnnnnnnnnnnnnnnnnnnnnnnnnnnnnnaactgacacccgtatgtccccgcgtccctctaaccactcaaaaaaatatctctgctctgctccaatggcgtcgttactcgattccgtcaccgtgacccgcgtgttttctctgccgattgcggcttcggtctcgtcttcttcagctgctccgtcggtttcacgacgccggatttctcccgccaggtttctggaattcagaggtttgaagtcttcgcggagtttggtgactcagtcggccagtctgggtgcgaatcgtagaaccagaatcgctcgcggtggacgaatcgcctgtgaggctcaggacaccactgccgccgccgtcgaagtaccaaatctgtctgattcagaatggcaaacaaaggttctggaatcagatgtcccagttctggtcgagttctgggcaccatggtgtggaccttgccgtatgattcaccccatagttgaccagctagccaaagatttcgcagggaagttcaaattctacaaaatcaacactgacgagagcccaaatacagcaaaccgttacgggatacgaagcgttccaacagtaatcatcttcaaaggcggtgagatgaaagatgcccattgtgtgtccataaaacgttgngaaacttanaaatttggcggaanaatttnccttnga

SEQ ID NO: 89879 - DNA, 831 bp, Arabidopsis thaliana columbia
ccccccttagagggttggacggggttatccaaataaagctgtggattttcagaatttcccccgtccccccttgccgaatttacgggatttgggttttggtttttctttaaaattgctccgtcgggttttcaccgacgcgggaatttctcacgccaggttttctggaattcaaaggttttaaagtcttcccgagtttgggtgatcagtcggccagtctgaggtcgaatcgtagaaccagaatcgctcgcggtggacgaatcgcctgtgaggctcaggaccccactcccgccgccgtcaaagtaccaaatctgtctgattcagaatggcaaacaaaggttctggaatcagatgtcccagttctggtcgagttctgggcaccatggtgtggaccttgccgtatgattcaccccatagttgaccagctagccaaagatttcgcagggaagttcaaattctacaaaatcaacactgacgagagcccaaatacagcaaaccgttacgggatacgaagcgttccaacagtaatcatcttcaaaggcggtgagaagaaagatagcatcattggagctgtgcctagagagacgttggagaaaactatagaaagattcttggtcgagtaacaaaatttgactcttttgtcactctgaaccattttaccttatcttctctcttgtaatctctgtaaagtcttttaagtttttgactattatgttatcgtgggtcctctttgtcttcttcaataaaaagcgaacacgaattcctgcagcccgggggatccactaggtctacagcggccgccagcacggtggagctccaactttgttagggtta

SEQ ID NO: 89880 - DNA, 654 bp, Arabidopsis thaliana columbia
  unsure (1)..(654): unsure at all n locations
nnnnnnnnnnnnnnnnnnnnnnnnnnnnnnnnnnnnnnnnnnnnnnnnnnnnnnnnnnnnnnnnnnnnnnccacgcgtccgagcagctcaagtttacttcattctctgcgaaactatactgcatataagcttactgggtttttcttggataagatttcaatttcgaaaaatgcagctttagcaataagataattcataggagttttgaggctagatttgttctttcaatctgaagtttctttctttttgtttgtctgaaatgagcagtgacagctttggttgctgtgaagaatgaattgaatgatccgtacaaagttcttgagaattgggatgtgaattcagttgatccttgtagctggagaatggtttcttgcactgatggctatgtctcttcactggatcttcctagccaaagcttgtctggtacattgtctcctagaatcggaaacctcacctatttacaatcagtggtgctgcaaaacaatgcaatcactggtccaattccggaaacgattgggaggttggagaagcttcagtcacttgatctttcgaacaatgcattcaccggggagataccggcctcacttggagaactcaagatcttgaattacttgcggctaaacaataacagtcttataggaacttgccctgagt

SEQ ID NO: 89881 - DNA, 870 bp, Arabidopsis thaliana columbia
ctaactactcataaccctagcatgcagcattcaatgatgttatgccgatcgagcttctagcaataggtgagaggtatgaccacggatatcgaacatatcacctcaaagatttacagtgtggtgtgcctcccatcttctgctcctaccagcaccgttgccgttggggggacgacggagtcaggtgactactaaagcggacacaagtctaagaccgccttatgttacaccgacttcacatccttttgtgatcccatctgaaaacttaccagtgacttcgtatcctatggagactccagagacggtttgtgcgagtgaggcggtggaggaaactacgaaaccgaggctacaggcgttacattgggataaagttagagcaagttcggatcgtgagatggtttgggatcatcttcgatcaagctctttcaaattagatgaggagatgattgagacgttgtttgtggcgaagtcgttaaacaacaaaccaaatcagagtcagacaactccaagatgtgttctcccgagcccgaaccaagagaacagagtcctggacccgaagaaggctcagaatattgccatcttgcttcgtgcacttaatgtcactatagaagaagtttgtgaggctcttcttgaaggcaatgctgatacactggggactgaacttcttgagagcttactgaagatggcaccgacaaaagaagaagagcgcaagttgaaagcgtacaatgatgattcgcctgttaagcttggacatgctgagaaattccttaaggcaatgttggacatccctttcgcctttaaaagagttgatgcaatgctctatgtagccaactttgagtccgaggttgaatacttgaagaaatcttttgagac

SEQ ID NO: 89882 - DNA, 837 bp, Arabidopsis thaliana columbia
  unsure (1)..(837): unsure at all n locations
acgcctgcaggnaccgggccggaatacccgggtctgcccacgcgtgcgcagcaaaccaaagcagagncagacaacnccaagaggagancngccgagcccgaaccaagagaacagagnccgggacccgaagaaggcncagaananagccancnagcnncgngcacacaaagccacnacagaagaagnncgngttttttttccangggttaacgcagatacactggggactgaacttactgagagcttactgaagatggcaccgacaaaagttgaagagcgcaagttgcaagcgcacaatgatgattcgcctgttaagctcggacatgctgagaaattccttaaggcaatgttggacatccctttcgcctttaaaagagttgatgcaatgctctatgtagccaactttgagtccgaggttgaatacttgaagaaatcttttgagactcttgaggctgcttgtgaagaactgaggaacagtaggatgttcttaaagcttcttgaagcggttctaaagacaggaaaccgtatgaacgttggaacaaaccgaggagatgcacatgcgttcaagcttgatacacttctcaagctagtcgatgtcaaaggcgctgatgggaaaacaactctcttgcatttcgttgtacaagagataatccgagcagaaggcacacgtctctcaggtaacaatacacaaacagatgacattaaatgccgggaaactagggtctccaaggttgtatccaaggtctcctgtttctgagctttgggtaacgtcaaggaaaagcttcttccgatggcctcagaaggtnctttgnnngcttanggnnncaaaggtttttt

SEQ ID NO: 89883 - DNA, 421 bp, Arabidopsis thaliana columbia
gcttgattgcaggagataaaaacttcatttgccagcaggattggcacaaaactcgagcagaggacatctgtaggagttgtgtcgtggtcgtctttggttaagagaagaagaaatgggttcaatgttcagtggaaaccgaatgagcaaggaagagatggaggtggtggtgaacaaggctaaagagatcgtctctgcttatcccgttgttgtcttcagcaagacatactgtggttattgccagagggtgaagcagttactgacgcagctaggagcaacttttaaagtacttgagctcgatgaaatgagtgatggaggtgagatccaatcagctttatcagagtggactggacagaccacagttccaaacgtcttcatcaaaggaaaccacatcggtggatgcgatagagtgatggagaccaac

SEQ ID NO: 89884 - DNA, 612 bp, Arabidopsis thaliana columbia
agctctccacgactcactattgggaaagctggtccgcctgcaggtaccggtccggaattcccgggtcgacccacgcgtgcggattaaaactgctgctcaagagaaagcacatgtagagcttctggaagaacagttagagaagcttcgtcatgaaatgatctcccctatagaaagtgatggttatgttctagctcttagcaaagagcttgaaacattgaagctggagaatctatctttgagaaacgatatagaaatgcttaagtcagaacttgacagtgttaaagataccggtgaacgtgtggttgtgttggaaaaggagtgctccggtttggaatcttctgtaaaggatttggaatctaagttatcggtttctcaggaagatgtctcgcagctttctactcttaaaatcgaatgcactgatctatgggcgaaggtagagactctacagctgttgttagatagagctaccaaacaagcagagcaagcagttatagtgttacaaccagaaccaagatctaagagataaggtcgacaaaattgaggaatcacttaaagaagccaacgtttataaagaatcttcagagaaaattcaacagtacaatgagctaatgc

SEQ ID NO: 89885 - DNA, 1052 bp, Arabidopsis thaliana columbia
attctctatcttattgacacataaacatggaccggtccactttcatcttatctctactcttcacactcaccgtctcgactacgaccctcttctctccggttttcgcaggaacgttcgacacagaattcgatatcacttggggtgatggtcgtggcaaggttcttaacaacggagagcttctcactctctccctcgacagagcctccggctctggttttcaaaccaagaaagagtatttgttcgggaaaatcgacatgcagctcaaactcgtccctggaaactccgccggaaccgtcactgcctactacttgaagtcaaaaggtgatacgtgggacgaaatcgatttcgagtttcttggtaatctaactggtgatccgtataccatgcatacgaatgtgtatactcaaggcaaaggtgatagagaacaacaatttcatctctggttcgatccaaccgctgacttccacacttactctgttttatggaaccctcatcacatcgttttcatggttgatgatattccggtaagagaattcaagaatctacaacatatgggtatccagtatccaaaattgcagccgatgaggttatacttcgagtctatggaacggcggaccacgtgggctacaacggggaggtcttcgttaagactgactggtccaaggcaccattcaccgcttcttacagaaactttagagcggatgcatgtgtttcctcgggcggaagatcatcttgtcctgccgggtccacctagatggttctctccccaggcttgatctaacagcggaagataagatgagagtggtgcagaggaagtacatgatctataactattgtgcggacaccccaaggtttcctcaaggatttccccaggagtgtagacactagctacgagaattaatgtgtgatccgaaacccccaagctagtattgtataggttcgtctaaaataaaaatgtaatgtttatgtttatttaggttctgtaataaacaatttcccctgtttgctatgtagatattctcataataaaatgggcgtgagttatgttggtt

SEQ ID NO: 89886 - DNA, 472 bp, Arabidopsis thaliana columbia
cccacgcgtccgcatcttcttcgtgaactttttgttttctcctttttttgattttcaccgccggagatttttgtatttttccgattattcgccggcggtttagagataatgaaggggaggatatcaaaaataggaagctatgcaatctcgtcttccattagagatcagcatcagcaaccttgtagttcttgtactactttcaagatccctgctccgatctataaacgtctctctcacaaggatcaaagtcttcgcgaaagtgataatcgagcgtattggcttggaaggaatcatcgaatcattgattggctattgtatgaagagatcttcaatcatatgtttacaggagttttgggtaggcaatgaagagcttgttaatttgtacgacaagagacttggagacgctggttatctaagttacaaccttggtcgtacgaataatcgtggtgatggtttgcttacggctgttcat

SEQ ID NO: 89887 - DNA, 547 bp, Arabidopsis thaliana columbia
ctttctttaacacagagaaagagcctgagagacaagtgagaaacgcaacaacaccaccgaaagagagagtccaaattcgaaagagaaaaagaatcaaattccttcttcttccttttttgattttcaattattactttaatcttctttcccgctctctattcttcttcttctttaggatcaatcaccgtttagctttcttcccatacgtctctccgtttacgaccagtatacagaggctggagctggggaagaaaaggattgtctatggagggagacgtcggaataggtttggtatgccagaatactatggatgggaaggcgagtaatggaaatggtttagagaagactgtaccttcttgttgccttaaggctatggcatgtgtacctgaggatgatgctaagtgtcactccactgttgtttctgggtggttttcggaacctcaccctcgctctgggaaaaaaggcggcaaagcagtctatttcaacaaccctatgtggccaggacttgctcacccactgaaagttgagaaagttctgttcaaagaca

SEQ ID NO: 89888 - DNA, 675 bp, Arabidopsis thaliana columbia
  unsure (1)..(675): unsure at all n locations
cgcgtncggatttgcatagaatcgtcgctgatcgaagtgattctgctcgattttgctctcacttgaaagatctgagtgatttgtttcagatcttctccgaaaggatgaagcggattggagataaagaaatcgacggttctgggtctcaaaatcaacatccagtgggctcccctcgaaacgaattacaagggcaatctccaaaacctggaaacggtaacaccaaagatgctttgacaaccgatgatgctttggcctacttaaaggaaataaaggacgtgtttcatgatcaaaagtacaaataccatctgtttctcgagattatgagcgacttcaaggcacaaaggaccgatacttctgtcgtgattgcacgagtcaaagacctgttaaagggacataaccatttaattctcgtatttaacaaattcttgccacatgggtttgaaattactcttgacgatgaggatgaggattaaggatcaagacgctagcatttgaatgagacggatatatcaaattagctctctgttcgaccttttttttaatatcttcttagctctactacaagttacaattggttatttttagtattggagaaacaggttgtgttgttacttctgctcagaattatgaatgttttttctcatagatccaaagatctctgaagtctgacatgtg

SEQ ID NO: 89889 - DNA, 599 bp, Arabidopsis thaliana columbia
  unsure (1)..(599): unsure at all n locations
agagacaagaggaacagggangattcttgggtcttagngcgcagacaaagcnngggtgngacagatacatcattaagccagatcttgtgaccttagctaaggcactgtcttcagcatatatgccgattggagccattcttatgagccaagaagtggcagatgtcataaattctcatagcagcaagctaggcgtgttctcccatggatttacttattctggtcatccagtttcgtgtgctgtagcaattgaagcgttaaagatatacaaggagaggaacataccagagtatgtcgccaaagttgccccaaggtttcaagatggagttaaagcttttccctctggtagtcctattattggagagacaagaggaacaggtttgattcttgggactgagtttgtagacaataaatctccgaacgaaccatttccaccagaatggggtgttggcgcattctttggagccgagtgccagaagcacgggatgttagtccgtgttgcaggtgatggcattttgatgtctccaccgctcattatctcacctgaagagattgatgagttgatttctatctatgggaaagcattgaatgcatcggaagat

SEQ ID NO: 89890 - DNA, 1038 bp, Arabidopsis thaliana columbia
  unsure (1)..(1038): unsure at all n locations
cgatcatattcatattacagggagaggaacattctcagagtatgtcgccaaagttgccccaaggtttcaagatggagttaaagcgtttgcctctggtagtcctattattggagaggttaccatttctcttggtcctttacttaccagttttattcaataagaattatttgactgaggacattttgtgatggttatcagacaagaggaacaggtttgattcttcgggccgggtttgtagacaataaatctccgaacgaaccatttccaccagaatggggtgttggcgcattctttggagccgagtgccagaagcacgggatgttagtccgtgttgcaggtgatggcattttgatgtctccaccgctcattatctcacctgaagagattgatgagttgatttctatctatgggaaagcattgaaggcaacggaagagaaggtaaaagaactcaaggctcagcacaagaagtgaaaagcagagtcaaaatgatgttgatgaaaaatgttttttagattctcaaagtttggatcctttgtttttttttttaacacacaacaagtctttaaataagtacattttaatgaggaataaacaataatgggacaacatctgacgatgtgatcaagatcatctactaaaccaaaaatgcagccatagttaacaataaccaaactcttttgaattgtttatttgtacgaacattgaaaagcaaaacgaccatggatcatggtgatttttggaatcaagatttaggacgttttttgtttgcttctctctttgatcttctctcccttgaacttagagaagtcttgaacccaacttcgttctccgagtcggtacacatctttaaacgatttcccctctgatctcgggcaaagctaacngggcatagaatggttaccgaccgggactggngacgattnccaagacangggngtgncgaaaagggnttaacccctccaatttctcccctctttncccggagcgnggggnnancccgggaatccggnccgggacnngangggganagttncccaa

SEQ ID NO: 89891 - DNA, 574 bp, Arabidopsis thaliana columbia
  unsure (1)..(574): unsure at all n locations
taccggtctggaattcccggctcgacccacgcgtccgaccatttgtgttgcacacagattgccctcattattggcgttttcatcttccaggcgaaacggaagaggagttctcaaccagattagccaagaatttagaggatctaatcatcaaagaaggaccagaaactattggtgcttttatagctgaaccagtcatgggtgctgggggtgtgatacctccacctgctacctactttgaaaaggttcaagctgttgttaagaaatatgatatcttgttcattgctgatgaggtgatatgtgcatttggaaggctcgggacaatgtttggctgtgacaaatacaacattaagccagatcttgtgaccttagctaaggcactgtcttcagcatatatgccgattggggccattcttatgagcccagaagtggcagatgtcataaattctcatagcagcaagctaggcgttcccccccggggacttaccttggcaaccagttcgggtttgtgtaatnangggtaaaggtttccagggggggccatccnagttttngccaagttccccangtttannnc

SEQ ID NO: 89892 - DNA, 833 bp, Arabidopsis thaliana columbia
  unsure (1)..(833): unsure at all n locations
gcaggtaccggtctggaattcccgggtcgacccacgcgtccgcgtactactaaaccttctctggatcttgctaaggttcttttagagatgttcacggccaacaaaatggccaaagcattttttacaagcggtggatcagatgccaacgatacccaggtcaagctggtttggtattacaataacgcacttggaaggcccgagaagaaaaagtttatcgcgagaaagaaatcgtaccatggctccactctaatatcagcaagtttgtccggccttcccccgctacaccaaaattttgatttacctgcaccatttgtgttgcacacagattgccctcattattggcgttttcatcttccaggcgaaacggaagaggagttctcaaccagattagccaagaatttagaggatctaatcatcaaagaaggaccagaaactattggtgcttttatagctgaaccagtcatgggtgctgggggtgtgatacctccacctgctacctactttgaaaaggttcaagctgttgttaagaaatatgatatcttgttcattgctgatgaggtgatatgtgcatttggaaggctcgggacaatgtttggctgtgacaaatacaacattaagccagatcttgtgaccttagctaaggcactgtcttcagcatatatgccgattggagccattcttatgagccaagaagtggcagatgtcataaattctcatagcagcaagctaggcgttttcccccatggatttcctaatcctgggcatccagttccgnggnctggaccaattgaagcgtaaaggtttccaggggggggcancccgnggntgccncc

SEQ ID NO: 89893 - DNA, 715 bp, Arabidopsis thaliana columbia
ccgggctgactggttgggtgttggggagatcggacttttcaattttaaaccaagcgtcaggcctgtaccaattgaagttcatattcagggttatcctggaaagtattactgcccaaggatgaatagcatgaacaagccagcatatgcagccatatgtactcattcacctacgaaacctgttcttatctttgtttcatcccgtaggcagacaaggcttactgcattggatcttattcagtttgctgcctccgacgaacatccgcggcaatttctgagtgtgtcagaggaagacttgcagatggtcctctcacagataactgatcaaaaccttcgacatacgttgcaattcggcatcggactgcatcatgcaggtttaaacgaccacgatagatctgcagtcgaagagcttttcacgaacaacaagattcaggttttggtctcaacaagtaccttggcatggggagtgaacctaccagctcacttagttattataaagggaacagaatatttcgacgggaaaaccaaaagatatgttgacttccctcttacagagatcttgcaaatgatgggacgtgcagggcgaccacagtttgaccaacatgggaaagcggttattcttgtacatgaacctaaaaaaagcttttacaaaaagttcttgtacgaaccattccccgtagaaagtagtttgaaagagaagctgcacgatcacttcaat

SEQ ID NO: 89894 - DNA, 660 bp, Arabidopsis thaliana columbia
  unsure (1)..(660): unsure at all n locations
nnnnnnnnnnnnnnnnnnnnnnnnnnnnnnnnnnnnnnnnnnnnnnnnnnnnnnnnnnnnnnnnnnnnnnnnccacgcgtccgaccagcgagagtgagtgagagagtagagagtgtgtggagagatactaggaagttgaaggaaaaagcgagaaagatggctagaaacagtgacaatgatatgtgcaaagaagaacggaagagagagatcttcttcaaggttctacagagagttgatatttcttctgagaacatgagagcacttccttacgactttgtgagaagcttctccaacaatgagctctctcgtaagatgaagataaaagctcgatggggaagttcttgggaagtagaaatctgcaaaaatccaagattctatttcatggagaaatccggatgggagaagtttgtgagtgacaatgccttgggagccagtgagtttcttaccttcactcacaaagggaatatgcgttttacagtgaacatcttcatgcaagatggcaaggagatgctacagcctccacaatccatgtccttcatggcttcttctaggccacctaanagagaacaaggaataccttctcttgccacgacaatagcagctgaatctaatggaggagggaactacaaaaggaagctcaactntgagaagaagaaagct

SEQ ID NO: 89895 - DNA, 543 bp, Arabidopsis thaliana columbia
ccacgcgtcagagaaactaaaacagagcttttttcacatgggaaaggataagactttgccgttgcttgaccctcgtgagccaccggaactcaccggaaccaagtcggcgtcaaaagtatgggccaaagagttcggcgaagagtcgaagcggctttgggagttagcaggaccagcgattttcactgccataagtcaatactctcttggtgctctcactcagactttctccggccgtctcggtgaacttgagctcgccgccgtctcagttgaaaactctgttatctccggtcttgccttcggtgtcatgttagggatggggagtgcattggagacgttgtgtggacaagcatatggcgcgggacagattaggatgatgggaatatatatgcaacgttcatgggtcattctctttactactgctttgtttttgcttcccgtctacatttgggctcctcctattctttccttcttcggcgaggctcctcacatctctaaagccgcggggaagttcgcattgtggatgatcccgcaactatttgccta

SEQ ID NO: 89896 - DNA, 652 bp, Arabidopsis thaliana columbia
  unsure (1)..(652): unsure at all n locations
tgattcttnnnnnnnnnnnnnnnnnnnnnnnnnnnnnnnnnnnnnnnnnnnnnnnnnnnnnnnnnnnnnnnnnnnnnnnnnnccacgcgtccgcccacgcgtccgaacagaaagaaagtccacgcgaggacataagcgcgtgtgatttaaaatcgtcgtcgtcgtcttccacaccgactttaatctgattcttagaatcgccgtttggtttttaaccagagagattatctaccaaggaacgatgattattgaaagagctcgagttccgttgagccgatggcaacaagcggccgtggcgatgggatctgctctcggtgcgttggttgatcctcgtagagcggatctaatcgctgctctcggcgaaactaccggtaaaccagcttttgaaatggttcttgagagaatgaagaagagcgaagaaggaagagtacgtttttcaaatcactcaatttctctcttattgttgatcaaatcattgattttgcttaagaatgattgatttagaaattgttcgatttagtaattctggagtaagcaatgagtgatgttaaattgattaacatttttacttgatgttggttatattgttgagtaagcaatggtgttttgatctttggtggtatctttactttgaaggctatattattggagc

SEQ ID NO: 89897 - DNA, 542 bp, Arabidopsis thaliana columbia
cccacacgtccgaacagaaagaaagtccacgcgaggacataagcgcgtgtgatttaaaatcgtcgtcgtcgtcttccacaccgactttaatctgattcttagaatcgccgtttggtttttaaccagagagattatctaccaaggaacgatgattattgaaagagctcgagttccgttgagccgatggcaacaagcggccgtggcgatgggatctgctctcggtgcgttggttgatcctcgtagagcggatctaatcgctgctctcggcgaaactaccggtaaaccagcttttgaaatggttcttgagagaatgaagaagagcgaagcaaggtagagctatatttttgcgagcgtccctcgaggtttgtgtcagagcaagtaggtcatgccttgggatctaccagaaaacacatttggagctgcatatgctaaattcatgggatctagaaacttctctcccgatgatcgtccgcccgtaagattcatggagacggatgaattggcttacgtagcgacacgggcacgcgaagttcacgacttat

SEQ ID NO: 89898 - DNA, 525 bp, Arabidopsis thaliana columbia
  unsure (1)..(525): unsure at all n locations
nnnnnnnnnnnnnnnnnnnnnnnnnnnnnnnnnnnnnnnnnnnnnnnnnnnnnnnnnnnnnnnnnnnnnccacgcgtccgaaatctttctctcctctctctctctgatattcttcgtcgtcccatctgcgaattgtttacacagagatatagagaggaagagaaccgcctaaggaaaatggcgaacagtcacaccgatgacttggacgagcttctcgatagtgcattggatgatttcaaagatctcaatctttctcatcaaagaaatcaaagggaagctcaagaggaggaggaaaagaagaggaaagaagagacggttttattaccgagtggagttcaaggtcttggaatgggattaccagatatgagaagcaagaagagaggaaaacaaaaggtttccaaagaggatcatgttgctgaagctcttgataagcttatggaacaaactacggaaactgtcaaaggattggaatccatttcttctaagcagatgcctgcttctgattatgatggaatgggtgaggat

SEQ ID NO: 89899 - DNA, 790 bp, Arabidopsis thaliana columbia
ccagctctatacgactcactatagggaaagctggcacgcctgcaggtaccggtccggaattcccgggatacgcttggccctttagacggagagactgatatgcgacagaggatccaacgtcgcgactgaaacctagatcccaattctccgtttccaccactgtctctcctccgtcgttagggtttctcaggttcacatctgttggaaacttattgcaactcctaaaggcatttcacatatttgcttttatgcgtacgaggcttgggggatatttatataatccgaaataactcttttcttatcatggagactctgtggactcttttgtatttgctagaacctgctccagctactctcattgtcacagctgtcaccgtgacatttgcatccgctttccgtgcacttaactacgggaaagagatggagagaaaccgtgacttctctgaagcatccataacactagatagctctcaggccttgatgatcccagttatgagctcttgcagtttgcttctcatgttctatttgttctcttctgtttctcagctcctgaccgcgtttacagccatcgcctctgtttcttctctcttctattggttatcaccatatgcggtatatatgaagacgcagcttggtctatctgatccctttctttcacgctgctgcttcaaatcgtttacaagaatccaaggattgctacttgtggcttgtgctatgcaattgtggcatggctatttttggcattgggtgttgaacaatttgcttgggaatctcatttgtattgcgtttg

SEQ ID NO: 89900 - DNA, 497 bp, Arabidopsis thaliana columbia
gaatgacgaaaccaggatcgtgaccgtcagggcgatagctcgtgggaggccaggatcgtttgacgatggtgacccacaaactacgaatctgtatgttgggaatctgtccccacaggttgatgagaatttccttctgcgcactttcggaagatttgggcccatagctagtgtcaagattatgtggccaagaacagatgaggagaagaggcgacaaagaaactgtggctttgtttccttcatgaatagggctgatggacaagctgcaaaagatgaaatgcaagggatcatcgtgtacgagtatgaactgaaaattggatggggtaaagcagtttctctaccgtcacaagcattacccgctccaccacctggacatatggctattcggagtaaggagggctgcaacttggttttttctggtcaaacgggtccaccgataataacttctgttccaaatcaaaattctgagctggttcttacccctaatgttccggatatca

SEQ ID NO: 89901 - DNA, 476 bp, Arabidopsis thaliana columbia
  unsure (1)..(476): unsure at all n locations
ggtagagagagagcaaaagtactttcattcagacttcagtttaagctatggcggcgaacgattcttcaaatgctattgacatcgacgggaatctcgactccgattcgaatcttaacactgacggtgacgaagcgaccgataatgattcctcgaaggcattggttactatccctgctccagccgtttgtcttttccggttcgccggagatgctgctggtggcgccgttatgggctctatcttcggatatggttcaggattgttcaagaagaaaggcttcaaaggatcatttgcagatgcagggcagtctgctaagacttttgctgttttatctggagtccacagtttggttgtttgccttctgaagcaaatccgaggcaaagatgacgccattaatgttggagtagcacgggtgttcacttggactttcccttaagttnccccggggntccaaagggttttttaaaaaggtttnnnc

SEQ ID NO: 89902 - DNA, 630 bp, Arabidopsis thaliana columbia
tcgcgttcgcgtgggctttccttgtgttccctccaccgaacgaggccgcggcattttgatctccggcgattccaaatccgacaccattctctactgcaacggccgctctgtcttcatccggagcctccgccaactccaagacgtccaagtttacggcgaacatggctatgctgttaccgttgctcgctactctcccaacggcgaatggatcgcttccgctgatgtctctggtactgttcgcgtttggggaacgcacaacggcttcgtgctgaagaacgagttcagagtccttgctggtcgtgtcgatgatctccaatggtctttcgatggacttcgaattgttgcttccggcgatggaaaaggcaaatctcttgttcgatccttcgcatgggactctggcaatacaatgggggattttgatggccattctcgtagggttttgagttgtgccttcaagccaacgagacctttccgaattgccacatgcggtgaagacttcttggttaacttttatgatggaccaccttttaagtttcactcttctcacagggagcattccaacttcgtcaactgcatcagatattcacctgatggtactaaattcattaccgtaagctctgacaaaaaggg

SEQ ID NO: 89903 - DNA, 590 bp, Arabidopsis thaliana columbia
gccaagccctatacgactctcttagggaaagctggtacgcctgcaggtaccggtccggaattcccgggtcgcccacgcgtccgcccacgcgtccgccttgaccggatctagacacataagctactcaggttctctcctcttattctctctccctgtctcttggtctccagtaggaaagttgaacactttctgtcttctcatctcttacaagactgtttttgtgttcaattttgagtagatatggaagtggttgctgttgggtcaatgaagacgcagagacaggagacatgggcttgctctgtcactgagtcttttctcctcctcgtcggaaagaatctggcttgtcttctccttgtggcagaatcattactgataggtttggttgctgttgaccagaggttgtctgtcaaggagggttacaaaagaggaagccgtattgaggaaaacaaagatgctagtgacagtgacgatgacgacgatgatgaagacgctgatgaggacgacgatgatgaggatgatgctaatgatgaagatttctcagggggtgaaggggatgaagggagaagaagaagctgatccagaggatgatc

SEQ ID NO: 89904 - DNA, 362 bp, Arabidopsis thaliana columbia
aattaacttacccaaacaagaaacccaagaatccaaaatggaaatgctcaacgcaataattctcatcctatttccaatcatagggtttgtattaatcttctcattcccaacaaaaaccctaaaagccaaaaccgcatcaccctctaatccgacatcgtaccaactcatcggctctattctctccttcaacaaaaaccgccaccgtcttctccaatggtacacagatctcctccgtctctctccgtctcaaaccatcaccgtcgatctcctcttcggtcgtcggactatcatcactgcaaaccctgaaaacgttgagcacattctcaaaacaaatttttataacttccctaaaagcaaacctt

SEQ ID NO: 89905 - DNA, 259 bp, Arabidopsis thaliana columbia
gtgatgcccgcaatactctctcctctctctttttttttttttttttctgggtcgaagtttggttctttgttggataatgatggtttttgacagtgaatcgggccgacacccattcgtacccatgcactacaccgattgtgcctgcctattccctcccaaagacacagatcaagaaccttaatcctctatggtatccgttggagagccagagcgtcgagtatttcacgttgggagatttttgggattggttcgacgagtg

SEQ ID NO: 89906 - DNA, 506 bp, Arabidopsis thaliana columbia
ggaaagctggcacgcctgcaggtaccggtccggaattcccgggtcgacccacgcgtgcgcggacgcgtggggtcagctatagctcaatcagtccgcgttttatatggtgaagactctacaaccattccaccggttgtgataccagagccgccacctcctgctcccagagatccaagacacagtctgcgtaagaaaaggaaacgtaaattgcattcatcggagtcgaaagactacagacattggtagtagcagccacaatgctgtagaaagcagctctcaaggcaatccacaaacatctgcaactcctcctttgcctccacccgctctggcgggggaaacttcagggtcttctcaacccaaattacctcctcacaacctaaatagcacagaacccctggcctctgaagcattcataattccaccacctgaagaagattctgggatagcagcagcgccatttgaagaccagggcctagtctagggggatcactggtccacaaagtcat

SEQ ID NO: 89907 - DNA, 714 bp, Arabidopsis thaliana columbia
  unsure (1)..(714): unsure at all n locations
nnnnnnnnnnnnnnnnnnnnnnnnnnnnnnnnnnnnnnnnnnnnnnnnnnnnnnnnnnnnnnnnnnnnnnnnccacgcgtccgcggacgcgtgggcggacgcgtgggctctcgtatgctacatcaaaggcattctttctcccaaaatgttcaaagttgctgtgacacttgttgtgtctatcggcatggttgtgtgtttcatagttgtggcaattcttgtggcattggtggcttcaagtccaacaggaggatggagtggtaggagtttaagtttacttgatccaacttatgcaagcaagtatattccaattattgcaagtgtcagtgaacatcaacctccaacttggccatcttatttcatggatatcaatgttttggctttcttggtccctgctggcatcattgcgtgcttttcgcctctatctgatgccagctcttttgtggtcctttacattgtaatgtctgtatacttttctggagttatggttcgtcttatgctcgtgcttgctccagcagcatgcatcatgtctgggattgcgctctctcaagcttttgatgttttcacgggttccatcaaataccagttaggcgcatcgtctaattccacagatgatgcagacgacaacacttccacgaacaatgccccaaaagatgatgtttctgctggtaagactgacaagggtgaagagattgtaaaagagcggtcttccaaaaa

SEQ ID NO: 89908 - DNA, 319 bp, Arabidopsis thaliana columbia
attctatgagcggtgatgataaggcgatcttgtatatgaagaggcaagatacacaagctgaactaagaacatgcataaacatactcgcattgacagaggttttgcatgcagaagtgccttcctttatcggggacaccaatgttgttaagctttcttggaaagaagccacaaagccattagcctatacaagagctttatatacagacctaatgtatggcatacccccggatattgatgcgtgtcataattttatggacaaactctcagaagacttgctgaataaactagatatggagggaatgtgcgaattagaagatga

SEQ ID NO: 89909 - DNA, 832 bp, Arabidopsis thaliana columbia
  unsure (1)..(832): unsure at all n locations
acccacgcgtccgaaacaaacatcactaatctctgcaatttttactctcctccttcacgtcttttcctcttaattttttctaggaaaattctcaaatccatctccgcgatacgaacagagagaagaagacttagaaaaatggctgttcaacctacaagaataggtctagctggacttgctgtgatgggtcagaacctagctctcaacattgcagagaaaggcttcccaatctctgtttacaacagaactacttccaaagttgatgagaccgtcgaacgagccaaaaaggaaggcaatcttcctctttacggcttccatgaccccgagtcttttgtcaagtccattcagaagccacgcgttattatcatgcttgttaaggctggttctcccgttgaccagaccatcaagaccctctctgcttatttggagaaaggtgactgtattgtcgatggtggtaatgaatggtatgagaacactgagaggagagaaaaagccgtggcggagaacggtttcctctaccttggaatgggagtttctggtggtgaagaaggtgctcgtaatggcccatctatgatgcctggaggctcttatgaagcctacaagaatatcgaagacattgttctcaaggttgctgctcaggttagggatagtggtccctgtgtgactttatatcggtaaagggcgggtcttgaaactttgtcaaaatgggccccaatgggatccggtacggtgatattcagctgatttcaagaacgcttttttcggcccccaaggccttttgggaaaatattccnattngggggntttcaaaagngncttcntttacntngaa

SEQ ID NO: 89910 - DNA, 741 bp, Arabidopsis thaliana columbia
ctcagccgttgctgagataagccgtgttcttagacctggaggagtatttgtggccaccacatttatctatgacggtccattcagttttatccccttcttgaagaatcttcgtcaggaaataatgagatattcaggttctcacattttcctaaatgaacgtgagcttgaagatatctgcaaagcctgtggtctcgttaacttcactcgtgttagaaacgggccatttataatgctatctgcaacaaaacccagctaagctcaccctctttaaagtatatatacttttctgtaaaaaattggtataaagttataaacattataacaacttgagttccatacagtatacctaatttgtaaagctttttgcaaatgttcctattatctagcttgtaaattggggttaacatggtttgcaaaggggtcttcttcttgtgaaaactcaatgtctcgattggaactttctggaagaagttcacgcatctcagaatctataaaagcttccatccgagcacgatctctgtctagaggataggaacggtaaagaaaggagtatatgaagcagcaagccgccattgggagtcctatagatgtataaagagcttttgccagagatgctgcattctctctatctgtggctatctctgttgacctcgatgacccttcagggattggcttgtatccataaacatgttgtgccaggattccaactataggaggtgcatacgatgacaagatagactc

SEQ ID NO: 89911 - DNA, 395 bp, Arabidopsis thaliana columbia
aataaatatcccaaaatttagtggcggcgagagggaaaccaaaattcgcgagagagaagtatgtcgaagacgctggtgcaaccggtagggcaaaagaggttgactaatgttgcagtggttcgtctcaaaaagcaaggcaatcgcttcgagatcgcttgttacaagaataaggtcctttcatggcggtctggcgtggagaaggatatagatgaagtgctacagtcgcatactgtttattcaaatgttttcgaaaggagttcttgcaaaatcgaaagacttgatgaagtcgtttgtgttcagatgatcatacggcaattatgcatcgatattttttggagaaaggagagcttcaagttgctggaaaagaaagagaatcacagttctcaagccagttt

SEQ ID NO: 89912 - DNA, 669 bp, Arabidopsis thaliana columbia
tctattctgacttacattagggaaagctggtacgcctgcatgtaccggtccggaatttcacgggtcgacccacgcgtccgcgactaacaaaaattcagacgacactgccaagcgtccgatttaattggttcaaaatcatcctaaatcgagtagattgttttgaatcgatttttgaagttgattcgaagttcagtgattgtgattagaatttataaccagacccagtttttgaggtgaagaaaaagcagattttgtgttcaatttccatggaagacgaaccaggaagcgaaaatgaagcagacaccatagttgcttcaccacttgcaaaatggagaatcgaattctcgaaatcgtttcagaattacttagacagatctgctcctaacattgttcgaagatggcttgtgactttagtcgctgcagtgatctatatctatagggtttactctgtttatggatacttcgttatctcttatggcttagctacttatatcttaaatctcttgattggtttcctttcccctaaagttgatcctgaacttgaagctttggatcctgattctttacctgttgatgagtctgatgagtataagccctttgttcgtcgtcttcctgagttcaagttctggttagatttctctgttactttagatgatggatgattttgat

SEQ ID NO: 89913 - DNA, 1029 bp, Arabidopsis thaliana columbia
  unsure (1)..(1029): unsure at all n locations
gcactccagtnnnnnnnnnnnnnnnnnnnnnnnnnnnnnnnnnactcctgcagtaccggttcggaattcccgggtcgaccacgcgtccggatattctcgaaatcgtttcagaattacttagacagatctgctcctaacattgttcgaagatggcttgtgactttagtcgctgcagtgatctatatctatagggtttactctgtttatggatacttcgttatctcttatggcttagctacttatatcttaaatctcttgattggtttcctttcccctaaagttgatcctgaacttgaagctttggatcctgattctttacctgttgatgagtctgatgagtataagccctttgttcgtcgtcttcctgagttcaagttctggtatgcagcgactaaagcatttgttgttgcatttgtgatgacattcttctctttcctggatgtgcctgtgttctggccgatcttgttgtgttactggttggttttgtattctttaactatgaaacgcttaatcgtgcacatgttcaagtatagatactttcctttcgatgtaagaaagcctgtgaagctgctcaagtttcttgtaaacagtgtcctgacctttttaagactcaagaagggtgatggtggagatgataggcccagcagcagcaattcatctcagggaaatgaaaaacaagattagatgcgaacagtagatcaggtactgatctcgacgtggtgataggcgaagcaagaaaggattccaactaaggatatcaaagtaaaatatactatagccatgctggtggaataggaaaacaaagttcttgaagcttaacagaactaagaaatctctctgagttttgagtaatctcctgcattttccggtttttgcattgtaatgtgtaacagtgtattttacaattatacgtttaaatgaatttgggaatcccaagtaaaaaaaaaaaaaaaaaaggcgcnnnnnnnnnnnnnnnnnnnnnnnnnnnnnnnnnnnnnnnnnnnnnnnnnnnnnnnnnnnnnnnnnnnn

SEQ ID NO: 89914 - DNA, 1032 bp, Arabidopsis thaliana columbia
agaagatccaaacacggcgctaagctaagctccgttctcctcctcaaaactatccgacaaaagacagaagcagaaacctaaccctaatttccttttctcaaaatccccgaaaggtccgtctctctctctatctatctctctaacttagctctcctccaaattcggatgattacccattacgaatttgcagagaagaacaaatcctctctttcttcttcctccgtctctctacccctttcatgtcttctcaagtctacgactctcatccagggttgttggtgcatcaaaccctagtttttgatttcgcttttgagatttctcatgcttctttccgttcggatctctcttctgaatcagattacgtcttttgggctcttgttgttgttgtgctgctcttcaatctcttctccgttgcgttctatgtgccaaatatgagtgaaaagaaggtatttgtgtttggatcctttacagaacatgaaactaggtcattttttgagcagaaacccactaaggatcctcagaattctaaagacaagtgtgtgggaagtattcaatttggctccttgaatcttgctgcggaaaattcttcagtaaatactaatggcgagttgaagaaaggtgaggctgatgggacagtgaaagctgctgggtctcaagagagacttgatgcttctagacctgccagctcggataagaacaatgatagtgatgcaaaactcccaagaaagaactctttgagagttccagagcatgtggtacaaaatggaatcataaaagagatctctgaaagcaacaaatctctcaacaatggtgtggcggtgaaaacagatcctattggtttggataacttgtctatgtctgatggtgaaagtgatcctgtgtataaagcttcgagctctaaatttcaagcgctggacaatgaagatttctcaagtgactcttcgtctggaagcattcaaagaaagaaaaacctgaaggttcctactgaatctgttccacctgttaaagactttacaccaagaggattaataa

SEQ ID NO: 89915 - DNA, 649 bp, Arabidopsis thaliana columbia
  unsure (1)..(649): unsure at all n locations
tgatactctcnnnnnnnnnnnnnnnnnnnnnnnnnnnnnnnnnnnnnnnnnnnnnnnnnnnnnnnnnnnnnnnnnnnnnnnccacgcgtgcgcgcagcgccgattctccttcaaaaacttttcctaagtcgtcactttttacgatggcagaaacgaagaagatgatcatccttaagagctccgacggtgaatccttcgagatcgaggaagccgtcgctgttaagtcccagacgattaagcacatgattgaggacgactgtgccgataacggaattccacttcccaatgtcaccggagccatcctcgccaaggttattgagtattgcaagaagcacgttgaagccgctgctgaagctggtggagacaaggatttctatggttccgctgagaacgacgagcttaagaattgggacagcgaattcgtcaaagtcgatcagcctactctcttcgatctcatcttggctgcgaactatttgaacatcggtggacttcttgaccttacgtgcaaggccgtggctgatcagatgagaggcaaaactccagagcagatgcgtgcacacttcaacatcaagaacgattacacacctgaggaagaggcggaggttcgcaatgagaacaagtgggcgttcgagtgattggatcggatctg

SEQ ID NO: 89916 - DNA, 414 bp, Arabidopsis thaliana columbia
  unsure (1)..(414): unsure at all n locations
ctccgacagaccaacccttcttttccacctcnagggnnctaattgtgcgattaggataatggccggcgccatggttagttccgccggtgggttactggcaatgctcaacgaaccccatccttccttgaaacttcacgctctctcatatctcatcagattggttgaccaattttggcccgagatctccactagtgtcccaatcatagagagcttatacgaagatgaagagtttgatcagcatcaaagacagcttgctgccttgttggcctccaagggtttctattacttgggtgagcgtaacgattccttggcctatgcccttggagctggatccttgtttgatgtgtcagaggattctgattatattcatactcttctatccaaagcaatagatgagtatgctattctcagatc

SEQ ID NO: 89917 - DNA, 2530 bp, Arabidopsis thaliana columbia
  unsure (1)..(2530): unsure at all n locations
atggttaaagaaatagcttcttggttattgatactatcaatggtggtgtttgtttctccggttttagctataaacggcggtggttatccacgatgtaactgcgaagacgaaggaaacagtttctggagtacagagaacattctagaaactcaaagagtaagcgatttcttaatcgcagtagcttatttctcaatccctattgagttactttacttcgtgagttgttccaatgttccattcaaatgggttctctttgagtttatcgccttcattgttctttgtggtatgactcatcttcttcatggttggacttactctgctcatccatttagattaatgatggcgtttactgttttcaagatgttgactgctttagtctcttgtgctactgcgattacgcttattactttgattcctctgcttttgaaagttaaagttagagagtttatgcttaagaagaaagctcatgagcttggtcgtgaagttggtttgattttgattaagaaagagactggctttcatgttcgtatgcttactcaagagattcgtaagtctttggatcgtcatacgattctttatactactttggttgagctttcgaagactttagggttgcagaattgtgcggtttggatgccgaatgacggtggaacggagatggatttgactcatgagttgagagggagaggtggttatggtggttgttctgtttctatggaggatttggatgttgttaggattagggagagtgatgaagtgaatgtgttgagtgttgactcgtccattgctcgagctagtggtggtggtggggatgttagtgagattggtgccgtggctgctattagaatgccgatgcttcgtgtttcggattttaatggagagctaagttatgcgatacttgtttgtgttttaccgggcgggacgcctcgggattggacttatcaggagattgagattgttaaagttgtggcggatcaagtaaccgttgcgttagatcatgcagcggttcttgaagagtctcagcttatgagggagaagctggcggaacagaacagggcgttgcagatggcgaagagagacgcgttgagagcgagccaagcgaggaatgcgtttcagaaaacgatgagcgaagggatgaggcgtcctatgcattcgatactcggtcttttgtcgatgattcaggacgagaagttgagtgacgagcagaaaatgattgttgatacgatggttaaaacagggaatgttatgtcgaatttggtgggggactctatggatgtgcctgacggtagatttggtacggagatgaaaccgtttagtctgcatcgtacgatccatgaagcagcttgtatggcgagatgtttgtgtctatgcaatggaattaggttcttggttgacgcggagaagtctctacctgataatgtagtaggtgatgaaagaagggtctttcaagtgatacttcatatggttggtagtttagtaaagcctagaaaacgtcaagaaggatcttcattgatgtttaaggttttgaaagaaagaggaagcttggataggagtgatcatagatgggctgcttggagatcaccggcttcttcagcagatggagatgtgtatataagatttgaaatgaatgtagagaatgatgattcaagttctcaatcatttgcttctgtttcctccagagatcaagaagttggtgatgttagattctccggcggctatgggttaggacaagatctaagctttggtgtttgtaagaaagtggtgcagttgattcatgggaatatctcggtggtccctggctcggatggttcaccggagaccatgtcgttgctccttcggtttcgacgtagaccctccatatctgtccatggatccagcgagtcgccagctcctgaccaccacgctcacccacattcgaattctctgttacgtggcttacaagttttattggtagacaccaacgattcgaaccgggcagttacacgtaaactcttagagaaactcgggtgcgatgtaaccgcggtttcctctggattcgattgccttaccgccattgctcccggctcgtcctcgccttctacttcgtttcaagtggtggtgcttgatcttcaaatggcagagatggacggttatgaagtggccatgaggatcaggagtcgatcttggccgttgattgtggcgacgacagtgagcttggatgaagaaatgtgggacaagtgtgcacagattggaatcaatggagttgtgagaaagccagtggtgttaagagctatggagagtgagctccgaagagtattgttgcaagctgaccaacttctctaagttgttatctcaacttctcttctaccttcaaaatttttacaccataggtttatgtcgaatatatccaaatgaaatttcgaaattgttattatatattccacccatatctctatgatttgtacatcccgcttttttgggttcttgctctccttttgaaccacccaagattgcattgaaaaaaaaaaaaaaaaaaaaaaaaannaagggc

SEQ ID NO: 89918 - DNA, 247 bp, Arabidopsis thaliana columbia
ccgcccttttttttttttttttttttaagcataaacaaaagaggcaggctttattaaagttttcagttttttcaccatcgaacttacttggaaggtatttacaaagccaatgccttcaaaactacaaaggactttgagtcgtagtagaaatggtggcgcagttccttttaagttgtttcctaacgaaaaaaggcctttgtagttttgaaggcattggctttgtaaataccatcgaacttacttagaa

SEQ ID NO: 89919 - DNA, 581 bp, Arabidopsis thaliana columbia
  unsure (1)..(581): unsure at all n locations
gtcgtctcgttcaagcacatatgagatgaatggaaaagctgccgcaattcattacggcactggagcaattgctggtttttttagtaatgatgctgtcacagttggcgatttagttgtcaaggatcaggagtttatcgaggcaaccaaggagcctggtataacatttgttgtagctaaatttgatggtatccttggtcttggattccaagagatctctgttggaaaagctgctcctgtttggtacaacatgctcaagcaaggccttatcaaggagccggtttttccattttggcttaaccgtaatgcagatgaagaagaaggtggtgaacttgtatttggaggtgttgatcccaatcatttcaaggggcaaacatacatatgtccctgtgacacaaaagggctactggcagtttgacatgggtgattgttcttattggcggtgcacccacttgggttctgtgaaagtgggcttttcttncgttaaaaatttcctgggtaacatcttttgcttnccgggtccaacgnctttaatcaccnatggtaaanccatncntttgggnnnaccttggagttnttnagcc

SEQ ID NO: 89920 - DNA, 916 bp, Arabidopsis thaliana columbia
  unsure (1)..(916): unsure at all n locations
cctacganggtacgcacggtnatcgcatcaagtcttgttcccgtgttcttcaacaaaaatcctcatttctctgagaatctggtgctttagctttggtaaaatgaagatatactctagaacggttgctgtttcactcattgtgtcattcctcctgtgtttctctgcctttgctgagcgcaatgacgggaccttcagagttggactgaaaaaactcaagttggattcgaaaaatcggcttgcagcacgcgtcgaatccaagcaagaaaagcccctgagagcttacagacttggagattctggagatgctgatgttgttgtgcttaagaattatctagatgctcagtactatggtgagatcgccattggtactccacctcagaagttcactgtggtttttgacactgggagctctaacctctgggtgccatcatcaaaatgctatttctcacttgcatgtctcttgcatcccaaatacaagtcgtctcgttcaagcacatatgagaagaatggaaaagctgccgcaattcattacggcactggagcaattgctggtttttttagtaatgatgctgtcacagttggcgatttagttgtcaaggatcaggagtttatcgaggcaaccaaggagcctggtataacatttgttgtagctaaatttgatggtatccttggtcttggattccaagagatctctgttggaaaagctgctcctgtttggtacaacatgctcaagcaaggccttatcaaggagccggttttttcattttggcttaaccgtaatgcagatgaagaagaaggtggtgaacttgtatttggaggtgttgatccaaatcatttcaagggcaaacatacatatgttccgttcccatttgacgaaaaaaagggntncntggcaagtttttccaattgggggntg

SEQ ID NO: 89921 - DNA, 1298 bp, Arabidopsis thaliana columbia
  unsure (1)..(1298): unsure at all n locations
tacgactcactatanggaaagctggcacgcctgcaggtaccggtccggaattcccgggtcgacccacgcctccgccggcgcgtgggcaacatgctcaagcaaggccttatcaaggagccggttttttcattttggcttaaccgtaatgcagatgaagaagaaggtggtgaacttgtatttggaggtgttgatccaaatcatttcaagggcaaacatacatatgttcctgtgacacaaaagggctactggcagtttgacatgggtgatgttcttattggcggtgcacccactgggttctgtgaaagtggctgttctgcgatagcatattctggtacatctttgcttgccggtccaacgactataatcaccatgataaaccatgctattggagcagctggagttgttagccagcagtgcaagactgttgtggatcaatacgggcagaccattttggatttacttttgtctgagacccaaccgaagaaaatctgctcgcagattggtctgtgtacttttgatggtacccgtggtgtcagtatgggcattgagtcggtggtggacaaggaaaacgccaaattgtctaatggtgttggagatgctgcgtgttctgcatgtgagatggctgttgtgtggatccagagccagttgaggcaaaacatgactcaagagcgcatattgaactacgtcaacgagctatgtgaacgcctccccagcccaatgggagagtctgcagttgactgtgcacaactgtcaacaatgcccactgtttcacttaccattggaggcaaagtatttgatcttgctccagaagagtatgttctgaaagttggtgagggacctgtggcacagtgcatcagtggttttattgctcttgacgttgctccacctcgtggacctctctggatcttgggagatgtgttcatgggcaaataccacaccgtatttgactttggtaacgaacaggtcgggtttgcagaggcagcctaaacacgatcgggttggtgtcgcgtatggttttagtatgaacaatctgcgtctcaagtgttgtttgtatgttttctggagttgaggactttgagtcgtagtagaaatggtggcgcagttccttttaagttgtttcctaacgaaaaaaggcctttgtagttttgaaggcattggctttgtaaataccttctaagtaagttcgatggtgaaaaaactgaaaactttaataaagcctgcctcttttgtttatgcttagtaagttgtatcaaatagttcggtnnnnnnnnnnnnnnnnnnnnnnnnnnnnnnaagtt

SEQ ID NO: 89922 - DNA, 540 bp, Arabidopsis thaliana columbia
  unsure (1)..(540): unsure at all n locations
nnnnnnnnnnnnnnnnnnnnnnnnnnnnnnnnnnnnnnnnnnnnnnnnnnnnnnnnnnnnnnnnnnnnnnnnnnnnnnnnncaccacgcgtccgtactaaacaaaaagcttgcgaggaagaagacgaagaaaatggcggatttgattttgagttcctcctctgcacaatcctctctccttcacgtcagacctaatcactatctactcaatacctccactgcttcaccgatccgaagtgtcagattccaaaattccaacggttttcatcctctggcgttcgcatctggtcaccgacgacttcctctcggtgcagtagttccctctgactccactaagacgatcaccagtacgattactgctaactgcgttgattcgggagtcaaagctgttgaagtcgagcctatgatcgattacggaggtggtggtggaattggaggtgataaatttggcggcggtggtggaggcggcgatggaaatgacgacggaggggaagacgattaggaggagagtgacgggaagaagagcacgcctctgtctatg

SEQ ID NO: 89923 - DNA, 614 bp, Arabidopsis thaliana columbia
cggacgcgtgggcggacgcgtgggcggacgcgtgggaagcgatcatgtgaaaacaaggcagacgttgtatcacaagatgagaaagaaggcggccggcgcgccacctttaatttgggtcatacctttggccatgccatagaaactggctttggttatggagagtgcctccatggagaagctgttgcagctggcacggtaatggcagtggacatgtcatatcgtcttggttggatcgatgaatcgattgttaagagagtgaacaagatcctagtacgggcgaaattgcctacaactccgccagagagcatgaccgtcagcatgttcaagtccataatggcggtggacaagaaagtggcagatggactgctgaggctgattcttctcaaaggcccgctgggaaactgcgtgttcactggagattatgatcgggaagcgttggatgccacgcttcgtgcattctccaaatcctgagcatttcatatttgagataattttggtgttgttttgttcacatacgcatatgtactcatatatactgaccttgtaactagctttgtggaatgtgataataatgagatatttaaccgaaaaaataaatatttattaatatattt

SEQ ID NO: 89924 - DNA, 570 bp, Arabidopsis thaliana columbia
agctctctacgactcactattagggaagctggcacgcctgcaggtaccggtccggaattcccgggtcgacccacgcgtgccatttccaaattatttctaagctaagaaaatctttaaaaataacaaagcttctaaaataataatccgacctaccggattcaaaccattgatctgaagatcatctataaaccagtccttgatctataaactaaaataagggaagaaaaaaacaagagagagaaatagagaatgaagtcttttgcggctaaggtagaagagggagttaaaggaatagacggaaagccgtcggtaggtccggtgtaccggaatcttctgtcggaaaaaggttttcctccgattgattctgagatcaccactgcttgggacattttcagtaaatcagtggagaaattccctgacaataatatgcttggatggcgtcgaattgttgatgagaaggttggaccatatatgtggaaaacgtacaaggaggtttccgaagaagggttgcggattggctctgcactacgagccgccggagctgaacctgggagtcgagtggggatctac

SEQ ID NO: 89925 - DNA, 406 bp, Arabidopsis thaliana columbia
tcgcttgcaatgtgtagaatgtgtgctgttaatctctttagggtctttcctccgaattatcggtctagttctggtggcgaaaacgatgatgatgaaccgatgtttgaccctgcttggcctcatttgcagattgtgtatgatttgttgcttaagtttatcacttctccgtgtcttgatgctaaagtggcaaaaaagtatttagatcatgctttcactgtgaggttgcttgacttgtttgattcggaggatcctagagaacgggagtgtttgaagacgattctgcatcgggtatatgggaagttcatggttcataggccatttgtacgcaagtccatgagcaatatattctaccggtttgtgtttgagacagagaagcatagcggaatcgctgagcttttggagattt

SEQ ID NO: 89926 - DNA, 504 bp, Arabidopsis thaliana columbia
gtccgcaaaatcctgattgataccaaaggatcatcaaatgacataactgggatggaacaaattgtggagacaatgaaaagtgaaggtgttgagcttgaccttcgtgcacgagctctcattgcaagacactatgcatcagctgggcttaaagagaaggctgagaaagtgctgaaagagatggaaggtgaaagcttggaggaaaatcggcatatgtgcaaggatttgctttccgtctatggctatctccagagggaggatgaagtgcgcagagtttgggagatctgtgaagaaaacccccgttataacgaggtccttgctgcaatcttggcttttggaaagatcgataaagtcaaagatgcagaggcggtttttgagaaggtgttgaagatgtcccatagagtttcttctaatgtttactccgttctcttgagggtttacgtggatcacaagatggtctcagagggtaaggatcttgttaagcagatgtcagacagcgggtgcaat

SEQ ID NO: 89927 - DNA, 765 bp, Arabidopsis thaliana columbia
cgactcactattgggaaagctggcacgcctgcaggtaccggtccggaattcccgggtcgacccacgcgtccggggcactggtttgccgctggtctctctcctcatgtatcagggagaaccagaatcccgatgcacaatagtccccattttcagatgatgccttattcacatgcaaatagttatgggagcattggaagctatggtagctacaatgatggtactatacaggacaatagctatgggagctatggagggactggcaatatgtttgcatactattctcctgtgaatcatccaggcctatacatgcaaaaccaaggtggggtctcaatgcttggaactagtcctgatgccagacgtcgggttatgcagtacccacatggaaatgggccaaatggccttggtacaagtccatctgctggaaattttgcaccactaccccttggcactagtccgtcacaatttactccaaatacaaacaatcaatttttagctgggtctcctggacaccatggcccgacatctccagtacgacacagctgccatgggtctcctttgggaaagatggctgcatttagtcagggtaatagaagaatgagcgctggatattctggaggttctcagtcccaagattcttccctgtcacaggcccaagggcatgggatggataacttttatcaaaatgaggggtattctggacaattctctggttcaccttcacgccggcaactggattctggtgtcaaaaatcgtaaacaggacaca

SEQ ID NO: 89928 - DNA, 661 bp, Arabidopsis thaliana columbia
  unsure (1)..(661): unsure at all n locations
nnnnnnnnnnnnnnnnnnnnnnnnnnnnnnnnnnnnnnnnnnnnnnnnnnnnnnnnnnnnnnnnnnnnnnnnnnnnnnnnccacgcgtccggagagatcggagctaaaaagccatctctcgccggaaaatttctcagttttcttattaccttagccacagacaacaagacgacagaggaatctaatcttagccccctttcctctctgtctctctctatatctctgtctttaggctttgagatatcttcaacacgaagctttttgcttcttttttttatctctttaaaaaattccagccaatggttcgaatccaatagtagcttcaaaggtcatggatttagtcaggggtttgtggaggaaacatagaaggaagattttggtgacgacgacttgtttgggaagtgggtatttgctctataaactatacaatgcccatactcgtaagctcgctgatttggaacgagagcttgctaatgagcgtgaaaacgacgagatcatcaaaacccaaatgaaggcacatttcgataacattcagatgattgctgatactactacattgcctcacgcaattcatcacttgagtagtcgtgtagttgaagagattgatgtctcgagtattatggataagctaagcaaaggcaaaggaatattgattccttct

SEQ ID NO: 89929 - DNA, 637 bp, Arabidopsis thaliana columbia
  unsure (1)..(637): unsure at all n locations
atgttctccagctctatacgactcactatagggaaagctggacgcctgcaggtaccggccggattccggtcgcccacgcgtcggggattatcgatgagtttcgtatgttctcgttcaagatccgcccatgttctcgagcatattcccatgactggactgaatgtccatttgcacacccaggtgagaatgcaaggagaagagacccgaggaagtttcactatacgtgtgttccatgcccggattttaagaaaggatcctgtaagcaaggtgatatgtgtgaatatgctcatggggtttttgaatgctggctacaccctgctcagtacagaacacgattgtgcaaggacggaatgggttgcaaccgaagggtttgcttctttgctcacgcaaatgaggagttgcgtcccttgtacccttccacaggatctggattgccatctcctcgggcttcgtctgctgtttccgcctctactatggacatggcgtcagttntgaacatgttaccaggctcaccatctgctgctcaacattcgttcaccccaccaatatctncttctggaaatggtagtatgccccattcatcgatggggttggcctcagcagaacatacccggcgttgaatcttgctggaagcata

SEQ ID NO: 89930 - DNA, 742 bp, Arabidopsis thaliana columbia
  unsure (1)..(742): unsure at all n locations
nnnnnnnnngccagctctatacgacttatatagggaaagctggtacgcctgcaggtaccggtccggaattcccgggtcggcccacgcgtccgtgtcggcgagacatcatcaatggaggaagtagcgagagaagaagtagagatcgacaaggatctgcggaggaaaataaagaagacggtgaagaagatcttggaaagttcgaacttgtacaagataacagagattaaggcgcgagaagaagcttcacttaaattggatcttgatctgtctcaagatccttacaaggtaatcgtgaaagaagaagttgaaaatttcctcgaagaagcagtaaagttgatcggcaataaacttgcgatgcttcccaagagaatagagtcgacgagtatttagatattattaatctaaaagtatgtcgatccaaaattggatagttttaatgtaatttcctcaaagattgtctctgtttgtttttttaatagtgtttctggttcatggaagctaatgtttttgtccgatatgaaacatgtgtctaagcaataagacaatgtgtctgaggaatttgagctcttgcaagaaaatttgcaggacacctcttcaaacttggcttgccaagtcctaatgtgtcgaattcagttacagattctggaaaaaaaaaaaaaaaaaaaaaaaaaaaaaaaaaaaaagggcggccgctttaaaggatcccagcctacggacgggggccagccacgtcaaaagtctt

SEQ ID NO: 89931 - DNA, 961 bp, Arabidopsis thaliana columbia
cccccctcgaggtcgacggtatcgataagcttgatatcgaattcgcggccgcaaatctgcaaccttttggaattagttatcaagctcctccttcaaatatggactctgaatatatgcctgtaatgaaaatattgcgaagaagcgaagatagtttgaaaaaagtcgatagtttttctaagtgggctattaaagaacttggggagatggaggatttgcagatgcagtcttcacgtggagatattgcatggaccactgttgaatgtgaaactgcagcagctgggatctccttgagcccttctctctctgaggatcagcgtttcaccatagttgatttttggccaaaaagtgcaaagacagacgcagaagttgaggtcatggttattgggacatttctacttagtccgcaagaagtaactaaatataattggtcatgcatgtttggtgaagtggaagttcctgctgagattttagtagatggtgttctttgctgtcatgctccaccgcatacagctggtcacgtccccttttatgttacatgttccaacagatttgcttgcagtgaagtacgagaatttgatttcctttctggttctacccaaaaaatcaatgcttcagatgtttatggtacctatgcagatgaagcatcacttcagttgcggttcgagaagatgcttgctcacagggattttgttcacgaacaccatatattcgaagatgttggggacaaacgaagacaaatcagtaaaattatgttgctaaaggaggagaaagagtatctccttccagggacatatcagagagactcaaccaaacaagaaccaaaaggacagctttttatggaactgtttgaagaagaactatatatatggctcatacataaagtgactgaagagggtaaaggtccaaacattttggatgaaaatggacagggtattttacacttttgtgcagcgcttgggta

SEQ ID NO: 89932 - DNA, 856 bp, Arabidopsis thaliana columbia
ctcactatatggaaagctggtacgcctgcaggtaccggtccggaattcccgggtcgacccacgcgtccgaaaaggacagctctttagggaactgtttgaagaagaactatatatatggctcatacataaagtgactgaagagggtaaaggtccaaacatattggatgaagatggacagggtattttacactttgttgcagcgcttgggtatgactgggccattaaaccggtgttagcagcaggagttaacattaacttccgtgatgccaatggctggtctgcccttcattgggctgcgtttagtggcagggaggaaactgtcgctgtgcttgtctctctaggtgctgatgctggggcattaacggatccatctccagagcttccattgggtaaaacagcagctgatttggcttacgcaaatggacacaggggaatttcgggatttcttgcagagtcttccttaactagttatcttgaaaagctaacagtggactcaaaggaaaatagccctgccaactcttgtggagaaaaagctgttcaaacagtctctgagcgaaccgctgctcctatgacctatggcgatgtaccagagaaactttccttgaaggattcacttactgctgtccgtaatgctacgcaagcggctgatcctctccatcaagtatttcaggatgcaatcatttcaacgggaacagctgtgtgatattggcgttgatgaaaagattgatatctccggccagctagctgttttcttttgcagcttctaaaacttagaattcctgggcaaggggggtgcttcttttagatgggctggtacccatatccaaaagaaatatcgtgcttgtgaagaagaaaa

SEQ ID NO: 89933 - DNA, 533 bp, Arabidopsis thaliana columbia
gtagttttcctgtaatccatacggcgcactgtttttaaattcacagcatatagaatcattagaggtcaaatgacgagccaagatttgtatcttcgtcgtctgcgatgctaagctccatcatcgacgacaaacctgcctcctccacttggctcaaccgcctccgattaaacagaggcctcacaaccgacgatgacgatgcttctggcaatccacttactctcgacgactttctccgccgcaaccaccacacggaaatcgccgccactagttccgcttccgattcacctccatctgctccaattccttcagatccagaattagctgaatgtccatcggaggagccagttcctggacaatggtacggcgtgatgagcgatgttctcttcgagctattcaatttcagcggctcctctaaatcttccacaattcccgggaagaagaagttaccaaggaaacaatcaaaccctaggcattgctctttagagactcctgaagacgttgttgttcccgtgggtaatcagaaaagcgacgac

SEQ ID NO: 89934 - DNA, 913 bp, Arabidopsis thaliana columbia
  unsure (1)..(913): unsure at all n locations
nacgcgcnnnnnnnnnnnnnnnnnnnnnnnnnnnnnnnnnnnnnnnnnnnnnnnnnnnnnnnnnnnnnnnnnnnnnnccacgcgtccggagagaaggagcttaagagagcattcgtcgtcgtcaatggagatcttctctgcgtctgcttctctaactttaactggattcgttcctcgtcttcttcccttgctctctcctcaagctcgaactactctctgcaagccgttgctgtcttcttcttctactagactcatttcttgtcacagtcgtatagctccgtctcggtctctcgcagatcaatccgcctctactgggatcagtgttgttgattcggatcccattgatgttgtaaagaggaaagctatggacatagcccctgaactgaaaggagcttccatatttctggttggaattaataactctattaaaacgaacacggggaagcttttggctgaggcattacgatattactactttgatagtgataatttgatcacagaggcggctggtggaaatgtgtctgctcaagctttgaaggaagctgatgagaaggcttttcaagaatcagagactgaagtgctgaagcagctatcatctatgggtcggcttgtagtttgcgctggagatggtgcgggccaaagcttgagaaatcttgcacttcttagacacgggatctccatatggatcgatgttcctctggatatcactgctaaaggggatgatgattcattccactcagaaccttccctgagttgtttgacacactaanagcgagttacgagaaatcaagaaagggttacgaaacagcagatgtatccatttcccttgaaaaatagctacaagctagaatttgagacttggaagcagaacttctgagacttgctttgagatctgaagaatagagagtggcag

SEQ ID NO: 89935 - DNA, 412 bp, Arabidopsis thaliana columbia
acggacgcgtgggtttaaagatagggatgagctgaagaaggcggtggactggtgttccattagagggcagcaaaagtgtgtagtacaagagattgagaaggacgagtatacgtttaaatgcatcagatggaaatgcaattggtcgcgtcgggcagattgaatagaagaacatggacttgttaagataactaagtgtagttggtccacatacttgttgctctattaagccggaaaacttcaacttgtaatttgcagcagaagagattgagtgtctgatcatgaatttgcatccttcggtggcgcgttttgggcgtttccacagtccattgaagggtttcaacactgtagacctctgatcatagtggattcaaaagacttgaacggcaagtaccctatgaaattgatgatttcc

SEQ ID NO: 89936 - DNA, 433 bp, Arabidopsis thaliana columbia
ttgtaaattccgattctgcagaaatgggaaatctgaaacttgctttgatcatcaagagccctagagacgacgttgagttccgactcgagaagcacaaacagccggcgaaatttggagatgaagcttacgattcctttgtcgattccgatctctgggacttaccgtcaacagatttacaggctctggaagacggagtgaggtccggatttagtatttctagacttgactcatgctcggaggaggttgatttgatgaatttcgacttcgaatccacactgattctgctgctggagaatttagggattgatattagcgatgtaggagagtggagattcgtcaggtctgtagaaggacctgagtttggacctgactcttgtgtccgtacgtgttttatctccgggaagctcttaaatacagatcaaagtttacaaga

SEQ ID NO: 89937 - DNA, 419 bp, Arabidopsis thaliana columbia
cgcgtccgatcaatctcttttctctatctcagtctcaccttctcaatttacagttttgccatccatcaacaacgagagacgacgccttgctatcgccgctcgatctcaccgactatcacgccggaagattcgtaagagacctcctgatagagatatgtcctccatagtttcaatcccggagcttcctcgccggcgggattctgaggaaagcctgcttttagattctcgaatcagtgtagctgaaggagatacatcgaatacagatgtagaaggagacagagatactacttctagtattagaacacagcctccccctcgtaaaggaagaaatcttagtagcagcagaatcaaattctacggtgttgaattatcaccagataatgttgctgtagcaatggtgtattttgttcaaggtgttt

SEQ ID NO: 89938 - DNA, 533 bp, Arabidopsis thaliana columbia
  unsure (1)..(533): unsure at all n locations
gagaaaaggaggtaagaaaggccgaggaggaggtggtggaaacaaaggngtacgtggagttgattttggtcttggtattggatttagctcggaatctagtaggacaccttcttctaaagctgcaccaagtagaagtggggcaatcaattcagtgagaactggagtaatggcccaattcaagaatagttttgtcgctgcaacgccatcaaatccacaaaaccaagcttatccaaacaagagaccatccctaatgggctttgtctcaggtggtactattggtggagacatgggtagaactcagagtcaagctcccccagtagcacctactcaaaacggctcatcacacaactccagccagaatcactcacaagagttctgagaatcggccttgaagagaggaaggtgaaggttcttggtttggggataattttgaggttgagccacgttttgcattgattgtaagtgggagtgttttgcacaacaatgtaatgaaatgttngtataaatttggtttttatccttttcccggtttc

SEQ ID NO: 89939 - DNA, 516 bp, Arabidopsis thaliana columbia
cgactcactattgggaaagctggtccgcctgcaggtaccggtccggaattcccgggtcgacccacgcgtgcggtgagaactggagtaatggcccaattcaagaatagttttgtcgctgcaacgccatcaaatccacaaaaccaagcttatccaaacaagagaccatccctaatgggctttgtctcaggtggtactattggtggagacatgggtagaactcagagtcaagctcccccagggagcacctactcaaaacgcctcatcacacaactccagccagaatcactcacagagttctgagaatcggcctagagagaggaacagaagatctggttgggataattgagtgagccacgttttgcatgatgatagtggaagtggtttgcacaacaatgtaatgaatgtggtataattgggtaatgctttgcgtgtgacgctttggattttagaggggggagagggaacaggaaaagtgcgccgcttctaaggcgctctgttccacgcggggcccgtgga

SEQ ID NO: 89940 - DNA, 429 bp, Arabidopsis thaliana columbia
  unsure (1)..(429): unsure at all n locations
atctctcattactctctagtcaatatcccaaaatccctaattcatatctttgaaactgataaagataacaaagaaatggcctctcaattgcttttacctccaaaccaattcactaaatcagtctcacctcaagttttcattactggtgattgtcaaggatttagtgacttaactctgaaaagaaaatcaaaccaagctacaagagtttcaaatggatctagcttaagagtaaaagcagctttgagatctactcacaacaaatcagtggttgagattccaaaacaatggtataatctggttgctgatctttcagtcaagcctccttcaccgttgcatccaaagnctttcggaccgntaaaaccngtngatttggctcancttttccccaatgngttgntttaacaaggggntcacangnggggttttttg

SEQ ID NO: 89941 - DNA, 475 bp, Arabidopsis thaliana columbia
  unsure (1)..(475): unsure at all n locations
cccacgcgtccggtggaaattcaaataaagatggatgattatgaaacccctcttttgtccaaggactcatcatcatcatcatctgtgattacttcatctttggaatggatattgaaagttgtaatgtctatgatttttgtgacttgggttgtttttcttatgatgatgtaccctgaacaactcggtgatgatttcctcacatttgtctcctccaagactttcctaggcaccacaggaaccatgttcttgattttcagttgtccgattcttgtcatctctgtcttagcttctctctatctcattatctccggggaagacaaggtcttcactaagaagaagatatcgaaattcccgaggtttaggctatggacattccctgttcttgtggatggaccatttggagttgtttctgcagctgagtttcttggaaatatgggcttctctggttttttcctttggnctatctatgcttata

SEQ ID NO: 89942 - DNA, 364 bp, Arabidopsis thaliana columbia
actttcagagtttggaattcataccataagcaaagatgtgcagagaacagaggatataattgcatgacaccttcccaaatgtttgggatgaactaatcaagaagcttcagtgtctcacactatgtgttaaaccagcaaaggatggatgttccactggcgttgcaagattatgttcctctgaagaccttgctgtagatgtacaagctttgaaagattgtataccaggaattcctccacacactctttctaagacacatgggatgattgagatgccaaatcctactccagaactcttgatttttgaaccatttgtcgaaaccgatgaaatcatagtttcatccaaagccaagcagcagctctcttg

SEQ ID NO: 89943 - DNA, 519 bp, Arabidopsis thaliana columbia
cccaacgggtcctgagcttcttacttatatgcatatcttgtatgaagcctgcccttatttcaaattcggttatgaatctgctaatggagctatagctgaagctgtgaagaacgaaagttttgtgcacattatcgatttccagatttctcaaggtggtcaatgggtgagtttgatccgtgctcttggtgctagacctggtggacctccgaacgttaggataacgggaattgatgatccgagatcatcgtttgctcgtcaaggaggacttgagttagttggacaaagacttgggaagctagctgaaatgtgcggtgttccgtttgagttccatggagctgctttatgctgcacggaagtcgaaatcgagaagctaggagttagaaatggagaagcgctcgcggttaacttcccgcttgttcttcaccacatgcctgatgaggagtgtaactgtggagaatcacagagatagattgttgagattggtcaaacacttgtcaccaaacgttgtgactctggttg

SEQ ID NO: 89944 - DNA, 506 bp, Arabidopsis thaliana columbia
tcgggagactgctacacagcgaagcaaatccagaagcaattcacactcttctctgaatcattcgatgacttctacagataatgaggttcaaaagtatcaggatttcagtagggaatttaaagatgtgtatgaaacatggcagtcacctcagaaggtgagtcgctcaagggattgctcgcctagaaaaggaagatatgatgaaagtacgactgagaaacaaatggctcttgttcgtcaaaagttctcagaagcaaaacgccttgtaacagatgatagtcttcaccaatccaaagagttccaagatgcacttgaagtgttaagctcgaacaaggatttgtttgttcaatttctccaggaatcaaattctttctctcagcagaatctttctgactttcaccatgttcctcctcattcagaggcgaagcggatcacagtattgagaccttcaaaggctggtgaaactgaaaaatatgtggttcaagggaggaggaacaagcaggttaaga

SEQ ID NO: 89945 - DNA, 550 bp, Arabidopsis thaliana columbia
cccaaaacaacctttagtattggaacggaagcgatttctctctcgtcgccgtcgtatcaaacctcgccgccgtagccgtcaacgcatctttcatttcgggaatggcgaacaagattgcaatgtttctctcggaagcaatgaacaacaatgctgtgataaacacgtgtctaggagtatcgtttgtggttttgggattgagatctgataaacagcagaagtatgttgaggccttagcagagcagaaggagtcactcttcaagtctaataaggcaatgaaactcaccatgtgggagtggaaacagcagctctttgctgaagctgcctctgcgggtaatgccgcggttgttcctttgtcgacgcttaaggccatctatggtgaagttaccaccacaaccaatcaatctggtgacacagccaaggaagattctaaagtgtccactcccaagatcatgatatgagaggttgttaaatttttggtaggttcatttcacttcaaattattcactcggctaaagtaaagattagcatttagtctcatcatttgcataaa

SEQ ID NO: 89946 - DNA, 371 bp, Arabidopsis thaliana columbia
cggacgcgtgggcggacgcgtgggcccggagatcgtgttctaggctcttatgcatttgagataacaaaacaacctattgcagtgcacttgcgctccacctctgagaaacctgaaaggacattgttgctatctatctgtgctgaaggagctacaaaggttttcagtgttgtagattcaggttatcacgccataaaagatataaaggaaacatttgactccagattccatgagaagggaaagaaaaagcttcaaactgacaatatcatccgttacacagaaacgttcttgcttgtcctgccaagcattggtatagctttggttaattctcattcacacgaattggtttatgcttgtgcatcaaatgttgtgtt

SEQ ID NO: 89947 - DNA, 813 bp, Arabidopsis thaliana columbia
  unsure (1)..(813): unsure at all n locations
gagttagtaagaagttggggtttgattaacgttttgcatcggagatgggtttggtcatgaggtttgatctttaccgtatgtttgtgatgttgatgggtttagggtttacgatatcaaatggatacaagttctatgttggtgggaaagatggttgggtcccgactccttccgaagattattctcattggtctcaccgaaaccggtttcaagtcaacgacactcttcattttaagtacgccaagggaaaagattcagtgttggaggtgactgaacaagagtacaacacatgcaacacgacacaccccctgacttccctctcagacggagactctctcttcctacttagccactcaggttcctactttttcattagtggcaactctcaaaactgtcttaaaggtcagaagctagccgtcaaggtcttgtccaccgtccaccacagccactctcctcgtcatacctctccctccccgtctccggtccatcaggagttgtcttcgccggggccttctccaggagtggaaccatcatctgattcaaactctcgtgttccagctccaggaccggctacagctcccaattcggccggtttggttggtccggggatggtggttcttgtgattatgataagttctctgctttgaggggtttatatattgtcgctagtcattaaatttgtgaggggcattaattactctaccatttgagattcaatattaaggggccttttaatttgaatgntttaaggatcttggaacccattttaaaggttccggtggctggttttgtctaccaaagaaatnttaaggggtt

SEQ ID NO: 89948 - DNA, 650 bp, Arabidopsis thaliana columbia
  unsure (1)..(650): unsure at all n locations
nnnnnnnnnnnnnnnnnnnnnnnnnnnnnnnnnnnnnnnnnnnnnnnnnnnnnnnnnnnnnnnccacgcgtccgcccacgcgtccggagtatcttagcccgcgtctcgagattgtcttatcgatctctctccttagtctgcaagcgcttccactcgctccttacttcaggagagatttaccggttccggtcactatcaggttataccgagaattgtctctatgtgtgcttacgtttctctcatactggccgtagccatcgctggttcatgcttcgtgagaagaacaagtcaagtgggtatgttttggcaccaatcccaatttcccattctccttctttgcacgcgtcgagtatcgtggcggttggttctaaaatctacaaaattggcggagtcatggatggatctagtgtttcaatcctagactgctggtctcacaggtggctcgaagctccaagcatgcagatggaacgggaccgcccatcagccaatttaattgatggaaagatatacgtaacaggaggctgtcacagaggctcctacaatccatcaaagtggatggaggttttcgatctaaaaaccgaaacttgngagcctgtattgtgccgttcagatagattgacgttcgagagttatcatgaacgaactaataa

SEQ ID NO: 89949 - DNA, 698 bp, Arabidopsis thaliana columbia
  unsure (1)..(698): unsure at all n locations
ttctnnnnnnnnnngactcactatagggaacagctggtacgcctgcaggtaccggtccggaattcccgggtcgggccacgcgtccgcccacgcgtccgcttacatacatacacgtcttccacaagactcaaactccacagcatgggattctcacggtcgctcaaccgcaccgtgggcgtcttcgtcttcttcatcctcgacattgttgatttcctgctttgctttacctacaagactcttgatttcttcttcgagtccgagtggaaaccctgctactgctgtccgccgcccgaggccaaaccaatctcggctggagggaacagaggcggtaagatgatagtgtcggaaagatcaggagactactcgaaggtggtctcactcacaaggacaaagatctatctggatgagatctccgacacactctactctcgcccttcactcctcaccaagctcactaagctggtgaagtgcttcaagaaagatgttgttaaatgctgtgatgagtccaagaagagatcaccgtcaactaaaaagacattactcactgtcaactccacggtggtcgagaagttgcanagaacaccaagatggtctgattgccattgcactntctgcacttcttggctttcctcttccaaccaatctctctgtgtcaatgtccaacagcccacagacaancaggcacaagagaacgtagt

SEQ ID NO: 89950 - DNA, 504 bp, Arabidopsis thaliana columbia
gtctggttttgttgcgttcttccgatttgggttggagaggaaatggcgtcgggatggggaataacgggaaacaaagggagatgctacgatttctggatggatttcagtgaatgtatgtctcactgcagagagcccaaagattgtacccttcttcgtgaagattacctcgagtgtctccaccattccaaagagtttcaaagaaggaacaggatatacaaggaggagcagcgtaaactaagagcagcttcgaggaaaggtgaagaagccggagatgggactcacaaccatcactagtctcaacaatcctccttcaagcttcatccgattccagagaagaataataaaaggttcatggaagattttgtatcttggaatctctaaacgctttgattgtttttcagttttcaattttatccaatcatggtcagctttctttttatgttaaatcgtctctttgagacgtatacttttccacctgaattatggacatgtggattgtggatc

SEQ ID NO: 89951 - DNA, 589 bp, Arabidopsis thaliana columbia
  unsure (1)..(589): unsure at all n locations
ccctatttttannnaagagaccccccctatggctgctggtatcgaataggcttgatatcgaattcgcggccgctacgagacaatcctcaactcgcaaaaagtcgggcgactttcttatcgcaatcgcttatttctcgatcccaatcgagctggtttacttcgcgagccgaaccaatgtgccttcaccttacaattgggtggtctgcgagtttatagccttcattgttctctgcggcatgttcccatttgctcgctggtttcacctacgggcctcactggccttgggtcatgacagctgtcactgtcttcaagatgctgactggtatcgtctctttcctcacggcactctcgttagtcactctcttaccattgcttcttaaggctaaggttcgtgagtttatgttgagtaagaagaccagagagcttgatcgtgaggttgggatcattatgaagcagactgagacgagtttgcatgtccgcatgctcactaccaagattaggacgtctcttgatcgacacaccattctataacaagcttgtggagttgccaanaccnngggggcaaaaantggggggtgggcccgnatgg

SEQ ID NO: 89952 - DNA, 2299 bp, Arabidopsis thaliana columbia
  unsure (1)..(2299): unsure at all n locations
atgttaaagacattgttagtccaatggcttgtcttcttcttcttcttcttaatcggttccgtcgtcaccgccgcagaagacgacggtagcttgtcgttatgcaactgcgacgacgaagacagtctctttagctacgagacaatcctcaactcgcaaaaagtcggcgactttcttatcgcaatcgcttatttctcgatcccaatcgagctggtttacttcgtgagccggaccaatgtgccttcaccttacaattgggtggtctgcgagtttatagccttcattgttctctgcggcatgacccatttgctcgctggtttcacctacgggcctcactggccttgggtcatgacagctgtcactgtcttcaagatgctgactggtatcgtctctttcctcacggcactctcgttagtcactctcttaccattgcttcttaaggctaaggttcgtgagtttatgttgagtaagaagaccagagagcttgatcgtgaggttgggatcattatgaagcagactgagacgagtttgcatgttcgtatgctcactaccaagattaggacgtctcttgatcgacacaccattctatacactacgcttgtggagttgtccaagactctggggctcaagaactgtgcggtttggatcccgaatgagatcaagacggagatgaatcttactcatgagttaagaccgaggattgatgatgagaatgagaatgagcattttggtggttatgctgggttctcgataccgattagtgagtctgatgttgtgaggattaagagaagcgaagaggtgaatatgttgagccctggttctgtgcttgcctcagtgactagccgagggaagtcaggtcctacggttgggataagagtccctatgcttcgggtttgtaactttaaaggcgggacaccagaggcgattcacatgtgttatgcgatattggtgtgtgtgcttccattgagacagccgcaggcttggacttatcaagagcttgagattgttaaggtggtggctgatcaagtggcggttgcaatctctcacgccgtgattcttgaagaatctcagcttatgagagagaaactcgctgaacagaaccgagcgcttcaggttgcgagggagaacgcactgagagctaatcaagccaaggctgcgttcgagcagatgatgagcgatgcaatgaggtgtcctgtgcggtccattctcgggttgcttcctttgatacttcaggatgggaagttacccgagaaccagactgttatcgttgatgcaatgaggagaaccagcgagttacttgtacagcttgtaaacaatgccggagatataaacaatgggacaatccgcgctgcagagactcattatttcagtttgcattcggttgtgaaagagtcagcttgcgtggcgaggtgtttatgcatggcaaatggttttggtttctcagctgaagtttatagagcattgcctgactacgtcgtaggtgatgatagaaaggtctttcaagcgattttgcatatgcttggggttctaatgaatcgaaagatcaaagggaatgtgactttctgggtttttccggaaagcgggaactcagacgtatcagagaggaaagatattcaagaagcggtttggcgacattgctattcgaaagaatacatggaagttagattcggattcgaggtaactgctgaaggtgaagagagtagtagtagtagtagtggtagtaacctggaggaggaggaagagaatccgagtctcaacgcttgccaaaacattgtaaagtatatgcaagggaatattcgggttgttgaggacggtctaggtttggtgaaaagcgtctcagttgttttccggtttcaactccggcgatcgatgatgtcgagaggcggtggatattctggagaaacgtttagaacctcaactcctccgtctactagccactgatcattgacgtcaggaaggggggcaggggaatgtagtgcaaaagaaagatttaaggggtggaatctgagaatttgtaaaaacagtaggggctttaatgagattaacagagagaggtctaaaacgttgtcgttcggttgtaaaaacctgaaagttaactaggttttaacctatcgtgtaggcaaaaggtatgatgcagacttgttgtaacttgctggtgatagcagaattcaaagtaaaagaatgtgtcggagaatgttccgcggccgnnnnnnnnnnnnnnnnnnnnnnnnnnnnnnnnnnnnnnnnnnnnnnnnnnnnnnnnnnnnnnnnnnnnnnnnnnnnnnnnnnnnnnnnnnatggg

SEQ ID NO: 89953 - DNA, 724 bp, Arabidopsis thaliana columbia
  unsure (1)..(724): unsure at all n locations
cttggtccttattctctctttcttgctactggaatctgcaatgagttctttgctttcgaagttgccgcaacctaaacagaattgaagacagtacgtagtaccatgagtcaaacaatggaggaatatcagtctaatgagagtgaagataaaagaagttggatttggagtaaggcggtaagtgttgggaagaaagttctgacagctggtgttgtagtgtcttcagctccacttcttgttccttcactttttgtcgcctcgacactcgcctttctctcctcggttccgttttgtctcttcttggctaattatgcttgtacacaaaaggtcatgagtactctgcttcctgatactgaagaaactggtggagttggcaaggaggatgatgacgaatctagatttgatgagtacagcaagattggtcacggtgaaggcgcggctggagttggtgaggctgcacttttcaggggtaaagaagaacccattcccattcaggttaaggaagatgaggagatggcgaaagagtcaacgagcttgctagagaaaattagggatgagggtagaactgacaaagaaacctctgagagaactttacaagatgataaaaagtccggaaatgctaagtcagaggaggttcaagaacagcctgaaaagcgggaagcgcctgagactagacgtgaaggggaaactggggctacaaaaactgaaacttntacgggcaaggacg

SEQ ID NO: 89954 - DNA, 567 bp, Arabidopsis thaliana columbia
ataatatattgcttcctatagtgtctttatccctctcaaattttcttttctctctgcctctcccacaatcacaagataggaaaattgatccacaaagaatcgtctgaatgaagacaacagttgtttatctggtgattctatgtctcattgtttcatgtaccaatggagaaaccaaacatgtaagaaaaattaactccgatggatccgaagcttggggatacgtcgaagttagaccaaaagcacacatgttttggtggcattataaaagtccatatagagttgaaaatccttccaagccatggcctatcatcctctggctccaaggtggacctggagcttcaggggttggtatagggaattttcaggaggttggaccattagacacatttctcaagcccagaaactcaacttggttgaagaaagccgatcttttgtttgtggatagtccagttggggcagggtacagtttcgtggagggcaatcaaaaggatttgtatgtgaaaagtgatgaagaagcagcacaagatttgaccaaactgttgcaacaactcttcaacaaaaaccaga

SEQ ID NO: 89955 - DNA, 481 bp, Arabidopsis thaliana columbia
tcgttgatgtgactaaagatgagaaacaggtgatgcacatgtggaactcgtttgtgaggaagcagcgagtattagcagatggtcacattccatgggcatgcgaggcattctcaagattgcacggacccatcatggttcgaacaccgcacttgatttggtgctggagagtgtttatggtgaaactgtggaaccacggtcttcttgatgcccgaaccatgaacaactgtaatacctttctcgaacagctccaaatttgaaaacccaagaaatcattaatttaagtagaaaaacaaagaaagacaagagaagaagagttttgggttctcatttaactacttttggtgttttaagagaaagaggagcatatttatgcatgaatttgtcctcatcttttttttttttttttttaattataaatgtgtacattggcttatctttgacgcttgttcttcgagtaatgctttatacatgttccttactc

SEQ ID NO: 89956 - DNA, 494 bp, Arabidopsis thaliana columbia
tttccacgcgtccgttctcatttctctctggtctatatcgctctcagaatgcaattggaaaaaagaacaagggaagagaacacaaaacgaaatggttagagaagaggagaaatcgagatggtggtggttcgagagccacaagagctccaaacattctcaatggcttcaatcaacactcgctgagattgatgcaaagacaaaggcaatgttgaagttgttagacggaaacgcagactctttcgctcagcgtgctgagacttactacaagaaacgtcctgagcttatcagctttgtcgaagacttttatcgagctcaccgttccttagccgtgaacttcgaccacctcaagtcttccgaccactatggatctcgctccgctaaggttccccaacaatccatggagtccgtttgtgacagcaattctcactttgaagatgccgattctgagattgaagacccccttcaagatgatgcctccgcagctgattgcaaag

SEQ ID NO: 89957 - DNA, 495 bp, Arabidopsis thaliana columbia
  unsure (1)..(495): unsure at all n locations
ggacgcatgacccatcggccgacacagcgatggagatgcgcaaccctaattttcaattgtggtcgaaaattggaagaatgaggaggaggaggtgcgatcttcaaccgaagagaacgagaatgtgcgatcttcaaccgaagagaacgagtatgtgcgatcttccaccgaagctggtaggggagaagatcctcacgaggattccgataacatctctgagagcggtgcgatccacttgcaaattatggaacgctttaaccaaagatcgggttctgggtaaagcagcggcgcagtttttggggtttatgacgatggattcaaaggtctgttcagttagattccatctccgtcgcagcaaggaggaagaagaagacacgatggatctatctataaagcaggtagatttgcttaatcaagtcgagatatctagggtgtatcactgcgacggcttttttgttatccgtggctnaagggccactcgnggggncnnggntttga

SEQ ID NO: 89958 - DNA, 855 bp, Arabidopsis thaliana columbia
acgactcactattgggaaagctggcacgcctgcaggtaccggtccggaattcccgggtcgcccacgcgtgggacaaacggttttatcagttaaagcttttttaaacaatgcacttcttcttcgtgccgaattcttcgtcttcatctccttctccggccaatacttcttcattctcgctatcgtttctcactcctcaaattcctgagaatctctgtaagtcaccgacgaaaatccacatcggaactcatggaatctccggtcaatcgtttctcagtcatcctactttctcatctaagaacacgtatctgtatgcagtcgtcgacaggtcttcttcaggtgtattttcgccgcaaaaggaatctgccaatggcgagggagaggaatctaacacggaggagggagtattagtagttcgacggccgttgttggagaattccgataaggaatctagtgaggaagagggaaaaaagtatccagcgaggatcgatgctggtctgagtaatatagctaagaagatgccgatatttgagccggagagatcggaatcgtcgtcgtcatcttcagccgctgctgctgcaagagctcaagagagaccgcttgcggtgaatttggacttgtctctgtacaaagcaaaggttttggcgagaaatttcagatacaaagacgccgagaagattctagagaagtgcatagcttactggccggaggatgggagaccgtacgtggcattggggaagatactaagcaaaccaatccaagttagctgaagctccgaatcctgtttgaaaaggggtgtcaatcttacccaaggggggattccatttttttggcagtgttgggctgtcctggaaaaca

SEQ ID NO: 89959 - DNA, 359 bp, Arabidopsis thaliana columbia
caagaaaatgttggagattgggtacaagagaagtgccaaaagatgcaaagagaaatgggaaaacatcaacaagtattttaggaagacaaaagatgttaacaagaagagaccacttgactcaaggacttgtccttattttcaccaactcacagctttatacagccagccaccagcagggaccaccgccaccaccgccaccacggccacgtcagccagagatctagacacccgacccgaggaaaaccgggttggatcccaagatcctgatatttctgtacccatgcatgtagatggagatggtgctggcgataaaagcaatgttcagttttcaggtttcgatcttgagttctaataaatcc

SEQ ID NO: 89960 - DNA, 389 bp, Arabidopsis thaliana columbia
ctctatggtctaatgcggggattgccctccctgcgttggacccgtttacccgacccgggtcgatactcacgccgccacccggaaactctcctctgacaattaatttattatgggttgcttcaactccaagcattcttctccggcgggtcctccacgccctgtccgccgtcgcttggacaccaacgtccaccgaagtcatacccaagatccccataaccgccatgttcttcccggtccaccatctcaccgccgtgtcgtcaactcatctccgaaaaaacatcgcaacaatgacgacgatgctccaaaatcgaggacgactggtgttagcctaagatcgggattgccgcacagcaatgtagaggctgagcacgtggcggctggttggccct

SEQ ID NO: 89961 - DNA, 749 bp, Arabidopsis thaliana columbia
tatatatccggttattaagttgttgttctgttacaaatgtcggcgaagactctcaacgaactgcaacctcgtcttctccgtccacttcactctctctaaactctctctcagatctctctctctctgtgattcaacaatggcggtttcttcttcttcgtttctatcgacagcttcactaaccaattccaaatccaacatttcattcgcttcctcagtatccccatccctccgcagcgtcgttttccgctccacgactccggcgacttctcaccgtcgttcaatgacggtccgatctaagattcgtgaaattttcatgccggcgttatcatcaaccatgacggaaggcaaaatcgtgtcatggatcaaaacagaaggcgagaaactcgccaagggagagagtgttgtggttgttgaatctgataaagccgatatggatgtagaaacgttttacgatggttatcttgctgcgattgtcgtcggagaaggtgaaacagctccggttggtgctgcgattggattgttagctgagactgaagctgagatcgaagaagctaagagtaaagccgcttcgaaatcttcttcttctgtggctgaggctgtcgttccatctcctcctccggttacttcttctcctgctccggcgattgctcaaccggctccggtgacggctgtatcagatggtccgaggaagactgttgcgaaccccgtttgctaataagcttgcttaacatcacaaggttgtgattgaa

SEQ ID NO: 89962 - DNA, 512 bp, Arabidopsis thaliana columbia
catgtgagagccttttctttcggagttttcaacgcaattcttcagagaagcagaagagatgttgtacattatagggttaggtttaggagatgaaaaagatataaccttgagaggactcgaggctgttaagaaatcacagaaagtatacatggaagcttacacttctcttttgtcctttggtctctctgctgatggactttccaatcttgaaaagttctatgggaaaccaattatacttgctgatagagaaatggtggaagaaaaggctggtgatatgattgatgaagccattgataatgatgtcgcttttctcgttgttggtgatcctttcggagctacaacgcatagtgatcttgttgttcgagctaagacactcggtgtaaaagtagaggtagtgcacaatgcatcggtgatgaatgctgatgggatttgtggattgcagctttaccattatggagagactgtttcgatcccattctttaccgagacttggagacctgatagtttttatg

SEQ ID NO: 89963 - DNA, 581 bp, Arabidopsis thaliana columbia
gctccctacgactcactatagggaaagctggcacgcctgcaggtaccggtccggaattcccgggtcgacccacgcctggcgaaccgatacaagatcgaagctttgccttctgtttcttcgaaaatctaccatggctgctctacaataccttgaatcgcagaaaaatgcgcacccagagcttggtgagtggtacaattcgctcgcagatctgtaccagaagaagctctggcatcagctcactcttaagctcgagcagttcatcgctctctctgtctttcaggctggagatgctttaatacagctttacaacaatttcatcactgactttgagacgaggatcaatcttctgaagcttgcgcatttcgctgttgtagtctcccgacagtatcctgagaaagaagctgcagttagttatcttgaaggagtgattgagaagcttaaagctactaaagagtcaagggttaatgaagccaattagctatatagaaacacaaatagctttggtcaagcttgagcaaggtgaccagaaggagtgcaagaaaatcttggacgatggaaaaagcctgcttgatagtatgact

SEQ ID NO: 89964 - DNA, 535 bp, Arabidopsis thaliana columbia
agtgaaatgcaagttgtttgaatatgacacattttcttctgatgacataatggaagaagctgagatttatatccagcctctgattacatctgcaatggcttttggaaacccttaaatgtttggagatatgcagattggaaaatggctgaaatcgcacgacaatgctcttatagaagatagcatcatcaacattgcagatggtaaagtgaagcaagaggttcaaatcaagcttcagaatgttgaatctggtgaactagaactagaaatggagtggctacctcttgagcaataaataatcaactatataatagggtcattatatataccaaacaaattttattactgtattcattattttaacattcccccttggttcttgtttgacaaatttttgaaactttgatctcattgaaaactttctttcgtactttgttgttgtaatgttcttttggcagattacatatttgtataactcatatgattatatgttttgactcatgttcttcaaaaaaaaaaaaaaaaagggcggccgctc

SEQ ID NO: 89965 - DNA, 506 bp, Arabidopsis thaliana columbia
acgcactcacaatagggaaagctgacacgcctgcaggtaccggtccggaattcccgggttgacccacgcgtgcgataaagtaaagcaagaggttcaaatcaagcttcagaatgttgaatctggtgaactagaactagaaatgcagtggctacctcttgagcaataaataatcaactatataatagggtcattatatataccaaacaaattttattactgtattcattattttaactttccccccgggggctggcccgacaactttttgaaactttgatatcatcgacaccttgtttcgtcctctgatgctgccatgtccctttctgattctcatctctcgtagtcttccgctttttccaccgcatctctaccctgcccccacgcgagaaaagaaagaatatctatctcccctctttctttagtttataatttataatgtgattgtgtgtggagtcgttgggcgccccccctccccacttacacgtttcacctatgagcgaccttca

SEQ ID NO: 89966 - DNA, 532 bp, Arabidopsis thaliana columbia
  unsure (1)..(532): unsure at all n locations
tgcnnnnnnnnnnnnnnnnnnnnnnnnnnnnnnnnnnnnnnnnnnnnnnnnnnnnnnnnnnnnnnnnnnnnnnnnnnnccacgcgtccgcggacgcgtgggctaagaaacacgaaaatctctgaaagtctttttgtttgaagaagatgacgcatgttgaagatgataaggaattcaaggagaaacctttggttcaggttctgagcgacgacgacagtgaagtgaaggaagccaaagacggaggaggtgaagaagttaccggcggcgacggtgaaggagaggctaatgtagaagaggaagacgacgaagcagaaaatgaagacgatgatgatgatgatgatgatgatgatgacgacgacgaggacgaggacgatgaagaaggggaggaggatcttgggacagagtacctagtgaggccggttggtgaggttgaagatgaggatgatgcaagtgattttgaccctgaggagaatggcttggatgaagaagaaggtgatgaagagattgaagaagatgatgttgatgaggacatc

SEQ ID NO: 89967 - DNA, 426 bp, Arabidopsis thaliana columbia
gtagagttttcgaaaccagcgagattaatggcatcttccaccggtctcaccgtcgccggagctctgcttgccggagattttcgattaccagctgtatcgtctctaatacccagaaagacttcttcttcattgtcatgccttagcaacagagatttatcgtctccttataattgctgttggcgactatccagaggcaaaattttgacttctctcagtaactcacggaaatttgctgtgggaaaggaagcagaagatgggtttctatcgaatgtgagcgaagatactgatgagatgttcgacgacttgttcaacaaatatgggaaggttgtttttagaagcactgatgttaagtctccaacagctgaggttgacgatgatgcagagagtttagcatttgctgttgaattggctaaagttgctagtgat

SEQ ID NO: 89968 - DNA, 468 bp, Arabidopsis thaliana columbia
  unsure (1)..(468): unsure at all n locations
ccctatcttcttcatcagattttgctagttcgtcacacacacggatcatgtaatctgcttcttcttcgtttttacgatttgatcccaaagtttttcaattctataaatttgtgaaagcgaatcgtttgatttgacttataggttgactcttttctttggaaatggcagcgtcatcatcttctcttcttcttctccacaagcccacctacaatttccatttcgccgcttcctctgttcccacttacatcaattccgctcgatttcgaatttcgagctcaatcttccctttggatcgaagaagaagaagaagaatctggtctgtctctggctttaaatctatggccgatttggttaaaaccaatgctcgcagaggacgggtgaagatcgattctcaagcgctctgagcaagcaggctttcatcaataattcgggctccggggctccaanacggggttnggttccgcggcg

SEQ ID NO: 89969 - DNA, 601 bp, Arabidopsis thaliana columbia
  unsure (1)..(601): unsure at all n locations
atgatactgccagctgnnnnnnnnnnnnnnnnnnnnnnnnnnnnnnnnnnnnnnnnnnnnnnnnnnnnnnnnnnnnnnnnnnnccacgcgtccgcggacgcgtgggcggacgcgtgggtgagagtattgagcaagattctgattcaatttctgcaatatcatcgatggcgttatccaaagatttgatgttgaaatgctcggaagacatgatgagtgcttacaaatctgcttgtgaagaacacccaaaactaaaatcctttgatgcttcccttcagcagcgaaccaacaaaatgatagactcactcaccgttgaagacaagaatggttcgtcctccccacacgacgcacacatggagctctccaagcacctagttgaagttacccaaggtgtggcagacttcattaccgaaatcgaagacgatgtgtgggacaaccaagctctaaagtatttggtcctggcctattttgaaaatactaaaaagactttagagattttcaaaactatagagaactgcgtcgagaacgcagaaatgggccaacttctcattcgagaggccttggccgagtttgagaaagagtcggcagaaaaagatgttggtgg

SEQ ID NO: 89970 - DNA, 405 bp, Arabidopsis thaliana columbia
ataatatttcagtatttgaacttcactgaagattctaattggcttgtggagtataatgcagcactagcatctatttgcttcaggattttgcttggatttgtagatgatgtccttgatgtgccttggagagtaaagcttgtcctgccatcttttgctacccttccacttttgatggcttatgctggtcagacaactattgttataccaatacctcttgttgcttatattggcttggaagtgcttaatctacgaaggatatataacttatatatggggctacttgctgtcttttgtacaaactctattaacatccacgctggtctgaatggccttgaaatcggtcatacagttgttattgccgctgctatcctgatacacaacgttatgcatatcggagcatctgtt

SEQ ID NO: 89971 - DNA, 484 bp, Arabidopsis thaliana columbia
ttttccgacacaaacagagcattgacgtccgttaacgttaagctcctttaccgttacgtcttaaccaactttttcaacctctgtttgttcccgttaacggcgttcctcgccggaaaagcctctcggcttaccataaacgatctccacaacttcctttcctatctccaacacaaccttataacagtaactttactctttgctttcactgttttcggtttggttctctacatcgtaacccgacccaatccggtttatctcgttgactactcgtgttaccttccaccaccgcatctcaaagttagtgtctctaaagtcatggatattttctaccaaataagaaaagctgatacttcttcacggaacgtggcatgtgatgatccgtcctcgctcgatttcctgaggaagattcaagagcgttcaggtctaggtgatgagacgtacagtcctgagggactcattcacgtaccaccgcggaagacttttg

SEQ ID NO: 89972 - DNA, 765 bp, Arabidopsis thaliana columbia
  unsure (1)..(765): unsure at all n locations
nnnnnnnnnnnnnnnnnnnnnnnnnnnnnnnnnnnnnnnnnnnnnnnnctctctatctctcttagccagctctgaccatttcgatttttttccggtgaaaagggaggagaaacatggttgtacgtatcagactgtcgagatttggatgcaaaaatcggccattttttagggttatggctgctgatagcagatctccaagagacgggaagcatcttgaggtcttaggttacttcaatcctttgccaggccaggacggtggtaagaggatgggtctcaagttcgatcgaattaagtactggttatctgttggtgctcagccatcagacccggttcaacgtctcctattcagatccggtttacttcctcctcctccaatggtggctatgggacgtaaaggtggagcacgagacacacgcccagttgatccgatgactggtcgctatgtggatgcagagaataaaacagttaatgccaatgataaccagcctaaggaagaggatacagaagccaagagtgcatgattcattagccttctgtcagcgtaaccttttcaagttcactttgttgtcgattatattgtgtaatgcagcattagacaactgacttgtttcctttgtttggcgataaacggcaaggtgtttggcactttttgccggtagtgttgttgttaaagaaaaaaacaaaaacacataaagggcggccgctctagaggatccaagcttacgtacgcgtgcatgcgacgtcaagctcttctataagtcacct

SEQ ID NO: 89973 - DNA, 852 bp, Arabidopsis thaliana columbia
  unsure (1)..(852): unsure at all n locations
ccggctggaaaaccgggccgccacgcgtcgagggtcgtttcacgcaaaggccangttaatttagngaaangcngnacaaagaagatgttgggacaggaagccttcttgcctctcttgcagaagctgcgtttctcattggtcttgaaaagaatagtgacattgttgaaatggcaagttatgctccactctttgtgaacacaaatgatagacggtggaaccctgatgcaatagtcttcaactcctctcatctatatggaacacctagctattgggttcaacggttttttgcagagtcaagcggagcaactcttctcacttcaacactcaagggaaactctacttctcttgttgcatctgctatctcttggaaaaacaatggcaaagattacatacgcataaaggctgtaaacttcggagctaactcagaaaatatgcaagtgttggtaactggattggacccgaacgtgatgagagtttcgggatcaaagaagacagtacttacctctaccaatgtgatggatgaaaattccttctcacagcccgtgaagggttgttccacatgaaagcttgctagagttggcagaggaggatatgaccgttgttctnccggcacattccttttcttcattcgntttgttgaaggaatcttcaaagntaaggatgccaatctctgatcttctttcccatcagnaacntccnctttgtgaagggnacaattgcaaggaggntcacctttcatggaaaaggctttttgnggtnaaactaattacatncntaaatcgtttaacgncccttggnanataaaanagcctggggnaaattncttnttaccaaaaaaaaaggggcggtngc

SEQ ID NO: 89974 - DNA, 791 bp, Arabidopsis thaliana columbia
  unsure (1)..(791): unsure at all n locations
aacccaccaatattaatatagggcccgggttggaaacccccttatattgcaaataagtttttttcaaaacttcctttttcaatctaaaaattggagacaccctaaggctatttgggtttcaaccggtttttttgcagaagtcaaagcggaaccaactcttctcacttcaacactcaagggaaactctacttctcttgttgcatctgctatctcttggaaaaacaatggcaaagattacatacgcataaaggctgtaaacttcggagctaactcagaaaatatgcaagtgttggtaactggattggacccgaacgtgatgagagtttcgggatcaaagaagacagtacttacctctaccaatgtgatggatgaaaattccttctcacagccagagaaggttgtaccacatgaaagcttgctagagttggcagaggaggatatgaccgttgttctcccgccacattccttttcttcattcgatttgttgaaggaatctgcaaagataagaatgccaatctctgattcttcttcccatcagaaaactaccactgtgtgaagagaaacaatgacaaggaagtatcaactttcatgtcaaaagtctctttgtggttcaaatctaattacattccataaatgcttataacgtacccttgtgtatatataataatagtctggtgaataaatttactttctttaaaaaaaaaaaaaaaaaaagggcggccgctctagaggatccaagcttacgtacgcgtgcatgcgacgtcaagctcgtgttgggtgtnntagaatcg

SEQ ID NO: 89975 - DNA, 460 bp, Arabidopsis thaliana columbia
acgcgtccgaccacgcgtccgttaaagagagcaaattaattttgttttgaataaaaatttcaatttcattatggaatataattatattagcatctacaatatgggtagcttgaaataagtgttatatgttttgttgattttgaactcattaaatttgtttttcttttgttataatttatatgaattcatgtggtgtaaaataatttattaataaatatataattaaagtttcaattagcatgtcaatatgacatattacatttttactttcacaataaataatatctactcaagatttggttttttaatcgacaaaattgatatattggtaagtcctgattttcaaaatcaactgacgacctttatgttattgaaaaaactaaaatgatctcctaacttctaaattacacactttcattgtttcacatcatcatcatcatctattgtttgagagaaatgc

SEQ ID NO: 89976 - DNA, 380 bp, Arabidopsis thaliana columbia
acattcttcaaagtggttccgttagtgacaggatatgtctctgagatccaaaccttgagcttgaagttgaaaggctttgtagaaaaggacattcccactgcttgcttaaagataataatcgaacaacgggcagaatttcgacccggagcaggtattccagagctgtacgatgcatccctatcggttgaatccggtcttcccttcttcagaaaaattatatggaaatggcggaagactttgttcgtctggatcagcatgagtttgttcattacggaattgcttttcacgttggtttgttgtagacctcttagcatcccaagaacacaacctagagacagatcgccttcaaacccaactggagtctggaggtacattatgat

SEQ ID NO: 89977 - DNA, 594 bp, Arabidopsis thaliana columbia
  unsure (1)..(594): unsure at all n locations
nnnnnnnnnnnnnnnnnnnnnnnnnnnnnnnnnnnnnnnnnnnnnnnnnnnnnnnnnnnnnnnnnnncgtgggtcgacccacgcgtccgtacggcggcgtgttgtccacagaagggggccgtttctgttttaacaaaacaagtatcaggccgttccaagcgttcactaacgacacgacgtttgtttatgaaccaaaaagacgaatttttcaaaacctcgtcggagaggtttaggcttaaagaaacaaattgttggaatctcaattctcgaatctgacatctcggagaagagatatggcgacagagtcatcggaatcggaagaagaaggaaagattagtggaggaaactataagctaatcatagacgacgatctaagagagatgggtaaaaacgcagcttggagcgttagctcttgtaagcccggcaatggcgtcaccactctccgcgacgacaatctcgagacttattggcaatcagatgggttacaaccacatttgattaacattcaattccagaagaaagtgaaactgcagttagtggttttgtacgttgaccttaagcttgatgagagctatacaccaagtaaaatctcta

SEQ ID NO: 89978 - DNA, 784 bp, Arabidopsis thaliana columbia
  unsure (1)..(784): unsure at all n locations
tgattctccnnnnnnnnnnnnnnnnnnnnnnnnnnnnnnnnnnnnnnnnnnnnnnnnnnnnnnnnnnnnnnnnnnacccgccacgcgttcgtggacgcgtggacggacgcgtgggttgagaaacctcctctccccaaaaacgacgtagtttcacatttctcgacttcttgaatggagtttgaagacaacaacaacaacaacgacgaagagcaagaagaggatatgaatcttcatgaggaagaagaagacgacgacgccgtttacgactctcctcctctctctcgtgttctccccaaagcctcgacagaaagtcatgaaaccaccggaactacttccacaggcggtggcggaggattcatggttgttcacggcggtggagggagcaggtttaggttccgtgagtgtctcaagaaccaagcggtgaacataggaggacacgcggtcgatggttgtggtgagtttatgccagctggaatcgaaggtaccatcgacgctctaaaatgcgccgcttgtggctgtcaccgtaacttccaccgcaaggaattaccttacttgcatcacgcgccgccacaacatcagcctcctcctcccccgccaggggtttaccgtcttccagctccggttagctaccgaccaccaccgtcacaagctcctcctcttcagctcgctcttccccctccacaaagagagagatcagaagatccaatggagacgtcttcagctgaagcaggaggagggattaggaagaagcataggactaagtttacggctgagcaaaaggaat

SEQ ID NO: 89979 - DNA, 1555 bp, Arabidopsis thaliana columbia
cacgcgtccggatcagtccacgcgtccgagttttagcagagttggtgaaatcaatgggccaccaaaacgccgccgtttcagagaatcaaaaccatgatgacggcgctgcgtcgtcgccgggattcaagctcgtcggattttccaagttcgtaagaaagaatccaaagtctgataaattcaaggttaagcgcttccatcacatcgagttctggtgcggcgacgcaaccaacgtcgctcgtcgcttctcctggggtctggggatgagattctccgccaaatccgatctttccaccggaaacatggttcacgcctcttacctactcacctccggtgacctccgattccttttcactgctccttactctccgtctctctccgccggagagattaaaccgacaaccacagcttctatcccaagtttcgatcacggctcttgtcgttccttcttctcttcacatggtctcggtgttagagccgttgcgattgaagtagaagacgcagagtcagctttctccatcagtgtagctaatggcgctattccttcgtcgcctcctatcgtcctcaatgaagcagttacgatcgctgaggttaaactatacggcgatgttgttctccgatatgttagttacaaagcagaagataccgaaaaatccgaattcttgccagggttcgagcgtgtagaggatgcgtcgtcgttcccattggattatggtatccggcggcttgaccacgccgtgggaaacgttcctgagcttggtccggctttaacttatgtagcggggttcactggttttcaccaattcgcagagttcacagcagacgacgttggaaccgccgagagcggtttaaattcagcggtcctggctagcaatgatgaaatggttcttctaccgattaacgagccagtgcacggaacaaagaggaagagtcagattcagacgtatttggaacataacgaaggcgcagggctacaacatctggctctgatgagtgaagacatattcaggaccctgagagagatgaggaagaggagcagtattggaggattcgacttcatgccttctcctccgcctacttactaccagaatctcaagaaacgggtcggcgacgtgctcagcgatgatcagatcaaggagtgtgaggaattagggattcttgtagacagagatgatcaagggacgttgcttcaaatcttcacaaaaccactaggtgacaggccgacgatatttatagagataatccagagagtaggatgcatgatgaaagatgaggaagggaaggcttaccagagtggaggatgtggtggttttggcaaaggcaatttctctgagctcttcaagtccattgaagaatacgaaaagactcttgaagccaaacagttagtgggatgaacaagaagaagaaccaactaaaggattgtgtaattaatgtaaaactgttttatcttatcaaaacaatgttatacaacatctcatttaaaaacgagatcaatcaaaaaatacaatcttaaattcaaaaccaaaaaaaaaaaaaaaaaaaaaaaagggcggccgct

SEQ ID NO: 89980 - DNA, 522 bp, Arabidopsis thaliana columbia
  unsure (1)..(522): unsure at all n locations
aagacacccctagggagaataacgcagcaacggatttcataaagtgggtatttgacaacacaatggttaaggccacggaagtgtttgtgaaaataacaaaggtcgtgaccgagctcttcaattgttacaatggtgatggtgttaacaacaaggggaaagatgccaaattcaacaattggctcgaggaaaagctgaccacttcggtcctgctatccatcatcgttatgctggtcgtgatggtatcccgagcctgcaactagtcttgatcgtttcaaattagccgacaatacatttggtcttcatcatgctgcttgtttagcttttgtttcaggtcatattgtggtttgtttgatactactttggttctgtactccattgttgacattttagtagatttcgataataagaacactctgaatgtgtcaaaaaaaaaaaaaaaaagnnnnnnnnnnnnnnnnnnnnnnnnnnnnnnnnnnnnnnnnnnnnnnnnnnnnnnnnnnnnnnnnnnnnnnnnnnncattc

SEQ ID NO: 89981 - DNA, 1050 bp, Arabidopsis thaliana columbia
aagatctgcttctgcaaaaaaccttatcctgctatggcttccactttcgtctgctctctaccaaatcctttctttgcttttccggtcaaagcaactactcctttgacgggtaaccatacgcttctgggaagtcgaagaggtttcttagaatcaaagcgatttccactaaatgggaaccgacaaaggtactgtcttttccgaaaaatgtattggtttctctgtttttaaaaactggtgattaatcttagtgttgaggtgataattgcaggttgttcctcaggcagacagagttcttgttcgtcttgaagatcttcctattgtcagtttagctcctttattgtctgaaatgtcatgattattatcaataagctattaatttgatgaatcattaaattgaatttccattgccaaaaaaactttattggggcttccttaaaaatgtggtttattttcctgaaaggaaaaattccccttcaagggttgggaagttattttgtttgcctctaaaaaggcaaggcttggttgaaaagttttttgaaggaaggaatattctcttaaaaccagggaaaggaaggaattttaataattcctggtttggggtttccttaaggggtttggggaaccaaacccaaggtttggggaaccccttgggaataaagaaaggggggttttttttggggttcctcccctgaaaaatggttgagaaggccggcccttttaatggaaaggggttccggaatttctttggggggaaaaaccccggaatagtgccttaggggggccaatattggccttttcttgggtaaaaaaggaaggaaggttgggaccttgggttgtggccccttcgttgaagtgaaagttttggtccaagagggagagatttgaagatttttccaggtttttggaattttcagccagccattggtggtttaaggttaatccttccatttaaaatccattgaggtccccttcagagaaagttattttccaaaaaaagaacaaagtttttcccaaaaaaaaaaaaaagggcggccgctctagaggatccca

SEQ ID NO: 89982 - DNA, 680 bp, Arabidopsis thaliana columbia
  unsure (1)..(680): unsure at all n locations
ggccgacccacgcggccgggaagaagaagatctgcttctgcaaaaaaccttatcctgctatggcttccactttcgtctgctctctaccaaatcctttctttgcttttccggtcaaagcaactactccttcgacggctaaccatacgcttctcggaagtcgaagaggttgtcttagaatcaaagcgatttccactaaatgggaaccgacaaaggttgttcctcaggcagacagagttcttgttcgtcttgaagatcttcctattaaatcctcaggtggagtattgttgcctaaagcagctgtgaagtttgagagatacctaacaggagagattatatctgttggttctgaggttggacaacaagttggacctggaaagagggttttgttctctgatgtgagcgcttatgaggtcgatttgggaaccgatgctaggcattgcttctgtaaagagagtgacttgttggccctcgttgagtgaagtcttgtccaagagggagagatttgaagattttacaagttttctgtaattttcagacagcaattgttgtttctagttaatccttcaatttaatatcaattgagatcactttcagagataaaaaaaaaaagtcatattcnnnnnnnnnnnnnnnnnnnnnnnnnnnnnnnnnnnnnnnnnnnnnnnnnnnnnnnnnnnaac

SEQ ID NO: 89983 - DNA, 541 bp, Arabidopsis thaliana columbia
cgattcattagaaaccaaattacaaaaaaaaacgtctatacacaaaaaaacaaatgggagagaaagaggaagtgaaactattaggagtatggtacagtccatacgccataagacctaagatcgctcttcgtctcaaatcagtggattatgattacgttgaggaaaatctgtttggatccaagagtgagcttcttctcaaatcaaacccggttcacaagaaagtccctgttctcctccacaacaacaaaccgattgtcgagtctctcaacatcgttgaatacattgatgagacgtggaactcatctgcaccgtccattcttccttcacatccttatgatcgtgctcttgctcgcttttggtctgacttcgttgataacaagtggtttccggcgttgagaatggcggcgatcactaaatcggaagacgcaaaagcgaaagcccatgggaagaaggtggaggaaggggtttttgcaactcgaggatgcgtttgtttctataagcaaagggaaaccctttttcggcggtgagcaatcgggttatg

SEQ ID NO: 89984 - DNA, 450 bp, Arabidopsis thaliana columbia
caatggtcgtaatgcgtttaatccagctgatttcccagtgaaggagccatttgatttgcctcctcttggagatggcttgggtccagttgtgcagacaaagaatggagggttcttgcgatcaatgaatcccttactgttcaggaactctaaagctggaggcagcttgatcatgcaagtgtcaactccagtggtggtgcctgctgagatgggctctggtatcatggagatacttcaaaaactagccactgctggaattgagaagctctcgatgcaggcaaataaagtaatgcctttggacgatataacagggaaaaccatggaagaggtgtcgtgggaaacttcacctacaattgacattggggacagggatcatgtatcagagcgtgaatctggtgatgcatctggttttgtgaggggaggtgaaagacgaacatcatttgcagctaagcc

SEQ ID NO: 89985 - DNA, 583 bp, Arabidopsis thaliana columbia
cccacgcgtccgcttctatcgtgcgcacctctctctcttaatcctttatcctgcgcaccaccaccaccatcttcttctccggcgaaaacaaacccaccgccatggggaaaggtcgtgcactttccgacggagtgatcaaaaagatcatcctttcatacacctatgtcgcaatctggatcttcctcagcttcacagtcatcgtctacaacaaatacatcctcgacaacaagatgtataattggccattcccaataactctcaccatgatccacatgggtttttgctcttccttagctgtgattctcatcaaagtcttcaaagtcgtcgagcctgtttcaatgtcacgcgagacttatctcagatccgtcgtaccaatcggcgcgttgtactcactttctctctggttatcaaactctgcttacatctacctctctgtttccttcattcaaatgctcaaagccctaatgcctgtagcagtttactcaatcggggttttgttgaagaaagagactttcaaatctcagactatgactaacatgctttcgatctcgtttggagttgctattgctgcttatggtgaagc

SEQ ID NO: 89986 - DNA, 645 bp, Arabidopsis thaliana columbia
caccccgccgcccccatttgtttaaggttttgttttaatcccggacacgatgggacggtttttccatggtggaccccccaattcatcaaaaggtgttggaagaaaatgaaagatcattccccaatatgggtgccccctttgctcaaaatttgtaatccacatgttaaaaagggtggaggagtttgacatggagattgcggctacaccaatgccagaaccataccagaacagaatggttcagattctctgcaacgactgtgggaagaaagcaagaggtacagtaccatgtggtggctcagaaatgcccaaactgcaaatcatacaacactcgccaaaccagaggctgaagctttttttgaagttgatttgctatcaaatgcaattaagagcttttcacttgatccaatagtgtcattggatccttaacttgaggactgggtctctcgagtctatctcttctcactctcttcttcaatattctctgagtcgtctcttgttcactagtctatatgtttccttggtgttgtttgatggtctggttagtttccattgtgattcatctcctttgtaattctgcggctttattgaaaagtttcgtttaaaaaaaaaaaaaaaaaaagcgcgcccgctctagaggatccaagc

SEQ ID NO: 89987 - DNA, 884 bp, Arabidopsis thaliana columbia
  unsure (1)..(884): unsure at all n locations
ccgacttatatggggaacgctggtacgcctgcaggtaccggtccggaatttccgggtcgacccacgcgtccgcccacgcgtccgggaatttgcagaatcggaggacgtgaaaatttctttcactgttaccaagtgtggcgtgttgttattcaatcctcctcaagaacggacacccttgtgtcgaaggagcaatgcatcacgactgccccatttgctttgagtttctgtttgaatcacggaacgatgtgacggttttaccatgtggacacacaattcatcagaagtgcttggaggaaatgagagatcattaccaatatgcgtgcccactttgctcaaaatctgtatgcgacatgtcaaaagtgtgggagaagtttgacatggagattgcggctacaccaatgccagaaccataccagaacagaatggttccagattctctgcaacgactgtggggaagaaagcagaaggtacagtaccattgtggtggctcagaaatgcccaaactgcaaatcatacaacactcgccaaccagaggctgaagcttttttgaaggtgttttgctttcaaaggcattaaaagctttcacttgatccaaaaggggcatggacccttaactgaggacggggcttccaggctactcttccaccttttcttaaaatttctgggccgcctttggtactagactttatgttctctggggggtggagggctgcgaatccccttgggatcatccccttggaattcgggggttattgaaagtccctaataaaaaaaaaaaaaggggggccctttagggtcaaatttacttccgcgcgtgcgggcctatttttttatagggcacaatataaaactggccggntttcaccgcggagggaaaccggggc

SEQ ID NO: 89988 - DNA, 347 bp, Arabidopsis thaliana columbia
tttctcatttcctcttccgttttccacgggaagacacttcccttctcttctttatcttctctcaaattcttcagttccttctcgaaatcattgatcttgatttgagctttagagaagagaagaacaaaattcataagagaacatagaataagtagtgagatctaatcctcttcccatgtttttgtctataaagtagcaattagaacttcaatcttcaatttcatttccattaacattgtttcccattcacaaagttgacttttttttctttggttttagcttcagttcaagattcttcagttgggtgtactaaagttttgaaatttctttgtttaaacattaaaagt

SEQ ID NO: 89989 - DNA, 760 bp, Arabidopsis thaliana columbia
  unsure (1)..(760): unsure at all n locations
ggtttgtggcggtggaggagacttcgggagggaagagaagagagattgagcttgttgttggtggagaagacgaagttgaggaggataggcggaggagtcgtcggagacatgttttcgaggggcttgatttaagtgagatagagatgaagacggagaagaaagagagaggagaagaagttggacggatgagtatttgttctccgccgaagaatgctttgttgttgatgcggtgtagatctgatccggttaaggttgcggcgttagctaaccgggttcgtgaaagacagttgtcgttaaacgacggcgtatacacagaggaggaagaagatgagagaagaagaaggtttgagctggaaattgaagataagaaacggatcgacttgtgtgagaaatggatctctggtgagactactgtggaaacagaagaagtttcagtagcagttgcagaagcagaagcagaagcagaagcagaagctcctttgccttcaaatccagctacagaggaagaagaaagagtcaaagttgtggaagattcgattnttgaagaagaacaagaagcttcgaaaattctggattcgtttgaggaagaaatagaagctacgatcatgaaaaaaattnaagacgnaatcagaaacgctatagaagaagaggagaaacttgctgagatggnagaattagcggttttngcggtggcttnagacggaggaggtagaagaagcaaagaggttgttcctcnttgtttacctcanaattangnaag

SEQ ID NO: 89990 - DNA, 404 bp, Arabidopsis thaliana columbia
aaaagactaaaagtgttttctctaaatatacactttgttatcaaattacaagtaatcaatcaaaagatggaaggcaaaactgtgatattcagtgtactcgtaatgggtctggtcatctcgcaaattcaagtagaagcacaaaaaacttgctgcccgagccagtcaactaggaaggagtttgaagattgcatttcagaaggaaatttgcagatactttgttcagctgaaagtggatgccgagacacttacgtgggttattgtccttcggggtttccttacgggagtctcacaaactctggtgatgttgtcaatgtatattgtaagttggggtgtgtatcctctctgtgtggtgccttaacgagtctccaaaaacttgacacacgtggaaaagtgtatgtcgcggt

SEQ ID NO: 89991 - DNA, 424 bp, Arabidopsis thaliana columbia
ttctaaaaccctagaaactcacttcctcagtttctccaactctgtacttcgtatcatcaagcgaaaccctaaaagaagcaatctttagtctcttctcttctttattttttctggggagaaagaaatttcacttttttttatccgatttctgcttcatctgggttttggatttttgcgatcgattttgagaaattagcaaacaatgtcgggttctggaggagtttcaatcgcacgtacagcgatccgtggtgagaatcggttttataatccacctccgatgcgtaggatgcagcaagaggcccaattgcagcaacagattagggagaagcaacgtcgtgatgatgaagatgaggttttgatggataaggaaaggagaaaggctgctactgttgctccgaggactactaggaaaggtcttggtgtg

SEQ ID NO: 89992 - DNA, 810 bp, Arabidopsis thaliana columbia
  unsure (1)..(810): unsure at all n locations
gcgatatgtggttcgagtcaaggagaaaagatatcacctttagcatctggtgtatcttcaggcttatattcagctcagacttttgatttgacgcctcaaaacgttgatttggtgcttgaggatgttagaccggtcttgatctctgatggtggaaacgtcgacgttgtctccgttgaagatggggtagtctctcttaagctccaaggagcatgtaccagctgtccaagttcttcaacaactatgacaatgggaatagagagggtactcaaggaaaagtttggagatgcattgaaagatattcgacaagtttttgatgaagaagtaaaacagataaccgtggaggcagtgaatgctcatctagatatactgaggccagctatcaagaactatggcggaagtgttgaagttttatcggttgaaggcgagcactgcgttgtaaaatatgttggacgcggagtcgattggaatgggaatccaggcagcgattaaagaaaagtttaaggacatatctaatgtagcctttacaagctacaaagcatgaagaaagccactatattatgtaaaagcattattgctctttgtttgagctaatgtccacttcaatagtcgtcctctccataactgtccttagccatcttgccaggttgatcaagaacggtgtgtagacaaagtagcaagttgttgtccacgtaaccagtcccttcaccagcaaacaaaacaagnaaggaacagagtcatgtgtatgtttttntttgatgatgnctgtataaacacttnattacctggccaaaagatttctatgtttgcttt

SEQ ID NO: 89993 - DNA, 571 bp, Arabidopsis thaliana columbia
  unsure (1)..(571): unsure at all n locations
gatcgtgcttctgattgttttggttaacggatcaaattatcgaacgatgatggcttctctcgcgacttccataagtggaagcttcagaattctggttaaatcatcttcgacgaggaatgggtttcctgtaatctctgatcaaaacccgagtttcgtcttgtttgcgaataaacgcagacatatctctagaacggcgatttttcaccgatctgcgataagtggttcgagtcaaggagaaaagatatcacctttagcatctggtgtatcttcaggtttatattcagctcagacttttgatttgacgcctcaaaacgttgatttggtgcttgaggatgttagaccgttcttgatctctgatggtggaaacgtcgacgttgtctccgttgaagatggggtagtctctcttaagctccaaggagcatgtaccagctgtccaagttcttcaacaactatgacaatgggaatagagagggtactcaaggaaaagtttttggaggttccatttaaaagntttttccggcaagntttttnattnaggggggaaaaccngttacccntngggggcagtnna

SEQ ID NO: 89994 - DNA, 440 bp, Arabidopsis thaliana columbia
tcgcccacgcgtccggggttctcgggttgactacgaagctcctggtcgctggtgtacaacgatggcctacagtgctgatggaactaggctattttcttgtgggacgagtaaagatggggaatcgttcatagttgagtggaatgaaagcgaaggagctgtgaagagaacttatcaaggattccacaagcgttcccttggtgttgtccagtttgatactactaaaaaccgttatctcgctgcgggtgacgacttctccattaagttctgggatatggacaccatacagcttttgactgccattgatgctgatggaggtctccaggcaagtccacggatcagatttaacaaggaaggctctctcttggctgtttccgcaaatgacaatatgattaaggttatggcaaacttcagatggtctaaggctattgcacacagtcgag

SEQ ID NO: 89995 - DNA, 663 bp, Arabidopsis thaliana columbia
  unsure (1)..(663): unsure at all n locations
nnnnnnntactgactcactatagggaaagctggtacgcctgcaggtaccggtccggaattcccgggtcgacccacgcgtccgattcggatttgtactccatactcatggaagcttcgatttcgtttctggggtcaacaaaacccaatatttccttgtttaacccttcttcaaacgtccttcctcgtagagatttccctcttcctgctttgaaattgaagaaagtttcagtgctgcctcgaatcttgcaccagaaacgactcatcagagctcagtgctctgatggattcaaaccagaggaagacgatgggtttgtcctagaagacgttcctcacttgaccaaatttctccctgatttaccgtcatatccaaatccattgaaagaaagccaagcatatgccattgttaagcgaacttttgtcagttccgaagatgtggttgcgcaaaatattgtagtccagaagggaagtaagcgaggagtacactttaggcgagcagggcctcgagaaagagtgtacttcagatcagatgaagtaaaagctgtgcatagtgacttgtggnggcttgtgccctggaatcaatactgttatacgggaaattgtatgtggattgaacaatatgtataggtgtaataacattctcggcattcagggaggatatagagg

SEQ ID NO: 89996 - DNA, 655 bp, Arabidopsis thaliana columbia
  unsure (1)..(655): unsure at all n locations
nnnnnnnnnnnnnnnnnnnnnnnnnnnnnnnnnnnnnnnnnnnnnnnnnnnnnnnnnnnnnnnnnnnnnnccacgcgtgcgcccccttcatctcttagagccttttaaaagtaaccaacgccatgaatatcttccaagactggcctgagcctatagtccgtgtccaatccttatctgaaagcaacctcggagccataccaaatcgctacgtcaagcctctatctcagcgtccaaacataacccctcacaacaaacacaaccctcagaccaccaccatccccatcattgacttaggtcgcctatacacggacgacctaactctacaagccaaaacgcttgatgaaatctcaaaggcttgtagagaattgggatttttccaagtggtgaaccacgggatgagtcctcagctcatggaccaagctaaagcaacatggagagaattctttaatctccccatggaactcaaaaatatgcatgctaattcgccgaaaacttacgagggatatggaagccgactaggcgtagaaaagggtgctattcttgattggagcgactactattatctccattaccagccttcgtctttgaaggattacaccaagtggccttccttgcctcttcattgccgagaaatattggaggattattgcaaggg

SEQ ID NO: 89997 - DNA, 420 bp, Arabidopsis thaliana columbia
acccgtctttgccggcgacacttctctactgaatatttcagtaaataatctcttcttagatctctccggcaatggcaattccgttgcctcttacctcttgctccccaatctcaacttcttcgtctatttcccgaacctccttcgtccctcttacacttcgcaatcgtactttcttctccaaccagaattacagtaggcgtgtacttatcagctgctcttcttctttgtcctcagacaatggttcatctccagactccatgaacggaaacgggaacgggaacgggagtagcttaaacgggcaatcatctttcccacgactgccttcctttgatggaacatccaaaccaccgcttaaatggagaatggttttactcaaagtcagtggagaagctcttgctggagacgaggagcagaatatcg

SEQ ID NO: 89998 - DNA, 463 bp, Arabidopsis thaliana columbia
aacccacgcgtccggtccgtcgtctttcttctacctccgaccgcttcatctcttcagttcaactgcgaaagttcctttttgtccctctcttcccagacaatttcgattaagcccttctcgatcttcttcctttcgtcggatggaatcttctccggcttcttcttcgtctccgacgccggtaaccgattcatctgctgattctttagcgaaagatctgcagaatcaaagtctgggagctgttgatgaaggtgttaagattaaaaagaagctcgaagattttaactgggaccattcctttgttaaggaattgcctggtgatcctagaaccgatgttatctcgcgtgaggtattacatgcttgctattcaaaagtttccccatcagtagaagtggatgatcctcagcttgtagcatggtctgtctctgttgcagagctattagatttggatcctaaagaatttgaa

SEQ ID NO: 89999 - DNA, 552 bp, Arabidopsis thaliana columbia
cagctctcactacgactcactattgggaaagctggcccgcctgcaggtaccggtccggaattcccgggtcgtcccacgcgtccgataagctcgaagattttaactgggaccattcctttgttaaggaattgcctggtgatcctagaaccgatgttatctcgcgcgaggtattacatgcttgctattcaaaagtttccccatcaggtcgaagtggatgatcctcagcttgtagcatggtctgtctctgttgcacagctatcagatttggatcctaaagaatgtgaaaggccagattgccctctcatgttcgccggcgctaaacctttaccaggagcaatgtcttatgctcaatgctatggaggacaccagtctggcttgtgggctggactactagggagatggacgtgccattactctgggagaagttttgaactccaaaggtgaaagatgggacctcgcagcttaaaggggcgggtagaactccatatagaccgttgcgctgatggccttgcagtagctccgcaggagcatcagggagttcctttgcagtga

SEQ ID NO: 90000 - DNA, 914 bp, Arabidopsis thaliana columbia
  unsure (1)..(914): unsure at all n locations
ctgcaggtcccggttccggattcccgggtcgaccacccgtccgtctgttgcagagctattagatttggatcctaaagaatttgaaaggccagatttccctctcatgttgtccggcgctaaacctttaccaggagcaatgtcttatgctcaatgctatggaggacaccagtttggcatgtgggctggacaactaggggatggacgtgccattactctgggagaagttttgaactccaaaggtgaaagatgggaacttcagcttaaaggtgcgggtagaactccatatagccgttttgctgatggccttgcagtgctccgtagtagcatcagggagttcctttgcagtgaaactatgcattgtcttgggatccctaccacgcgtgccctttgtcttctcaccacaggtcaaaatgtcactcgcgacatgttttatgatggcaatccgaaggaagaacccggcgcaatcgtttgcagggtttctcagtcatttctacgctttgggtcataccaaatacatgcctctagaggaaaagaggatcttgatattgttcgtaagttggcagactatgccattaaacatcatttcccacatatagagagcatggatagaagcgatagctatctttcaaaaccggtgatgaagatgattcggttgtggatctaacttccaacaagtatgcagcatggttcgttgaaattgctgagcgtacagctaccttagttgcaagatggcaaggtgtaggtttcacccatggtgtgctcaacactgacaatatgagcattttgggtcaaaccattgactatggcccatttggtttcttggatgcttttgatccaagttacaccccaaacacggcagatctcccagggaggaggttctgnttttncaattaancctcncangggttttggat

SEQ ID NO: 90001 - DNA, 524 bp, Arabidopsis thaliana columbia
ctgaagaacttatttttgatggcaaggctactgttaatggtattctctgcaacactccacagactcgagttgatccatcaagagacattatttatgttaatggaaatcgtattcctaagaaacttcctccaaaggtttattttgctctgaacaagcctaaaggatatatttgttcttccggagagaaagagatcaaatctgctattagtttgtttgacgagtacttgtcctcttgggataaaaggaatccggggactcccaaacctcgcctttttactgttggtcgtcttgatgttgccacaacgggattgatagttgttacaaatgatggagatttcgcacagaaactttcacatccttcatctagtttaccgaaagaatatattaccacggttgtcggtgatatacacaaacgacacttaatggctatcagtgaaggcacaatggtggaaggagtccactgtgtcccagattcagttgagttgatgccaaagcagcatgatataccaagagcaaggctgcgt

SEQ ID NO: 90002 - DNA, 541 bp, Arabidopsis thaliana columbia
aggtctctacgactcactattgggaaagctggcacgcctgcaggtaccggtccggaattcccgggtcgacccacgcggggcgccacgcgtccgcccacgcgtccggcagaatcaaggagttcatattcaagagactcttctgctaactccaggggtagagaagataggcgttttgttgccaaagagttagatacatttcagggacgtgataaagcttatgatgaggtttataatcctcgaaggttcactgataatgagaaaggactcagaggaggatcacattcaaaaggctctgatactaactctcggggttggggtgataggcgttctgttgtatatacaagagatatggatgattggagagagaggaataaaaccaaggatactacgggagactggcttttttagccggaaaacttttgcagaaattggatgtagtgaagatatgatgaaggccttaagggaccagagtgttgatcgcccggacatattcaggctttggttgttcaccaggtattgttggaaagagtcgctgatacct

SEQ ID NO: 90003 - DNA, 514 bp, Arabidopsis thaliana columbia
cggaaggaagaaggatcaaaaatgccgctctacgactgtatgcttctgttcaagcctataatcaggaaggagggcctcatcgacctcgttgcgcgcattggtaaacacgtttacagcagaaatggcgtcctcaccgagatcaaatcctttggcaaggtcgaattgggttacggtattagaaagctcgacggaagacactatcagggacaattgatgcagataacaatgatgacaactccaaacatgaacaaggagcttcactacctgaacaaggaagacaaactgctgcgctggctcttagttaaacaccgtgacatcaagattggacagtcggaaaaggaagatagtctgactgtgcctaacagactcactagtgggagcttatatgatggatcctcctcggacgaagatgacaacaacattttaggggtatccccgtggggaaatcacattctctgaaatgtttccccagacaatttcttcatgggagtccccttcaatggttatgaatgtt

SEQ ID NO: 90004 - DNA, 625 bp, Arabidopsis thaliana columbia
tagatgatgacagtcttaaatcactcatacatgattgcaagtcattgaagaagcttgatgcatccagctgccagaatttaactcatagaggtttaacctcacttttaagcggggcaggatatcttcagcgacttgatctatcacactgttcttctgtgatatcattggattttgcgagtagcttaaagaaggtttcagcattacagtcgatcaggttggatggttgttctgttacgcctgatggtttgaaggcgataggcacattgtgcaattccctgaaagaggttagcctaagcaaatgcgtgagcgtaactgatgaaggtctttcttctctagtaatgaaactgaaagacctcagaaaacttgacatcacatgttgccggaaactaagtagagtttcaatcacccaaatcgccaattcgtgtcctttactagtctctttgaagatggagtcttgttctcttgtttccagagaagccttttggttgatcggacaaaagtgtcggctacttgaagagcttgacttaactgacaacgagattgatgatgaaggactgaaatccatatctagttgtctgagtcattcctcgttaaagctgggaatttgtcttaacataacagacaa

SEQ ID NO: 90005 - DNA, 754 bp, Arabidopsis thaliana columbia
  unsure (1)..(754): unsure at all n locations
atgannnnnnnnnnnnnnnnnnnnnnnnnnnnnnnnnnnnnnnnnnnnnnnnnnnnnnnnnnnnnnnnnnnnnnnnnnnnnnnccacgcgtccggcagggagaagctcgtttctagaagctttaaagtttgggatcttgctacttgcactgtgaaccttcaggcttcacttgctagcgagtatactgcagcagtaaaccgagttgcttggagtcctgatggaggtctactgggtgtcgcatattccaagcatattgtgcatatatattcatatcatggtggcgaggatttacggaatcatctagagattgatgcccatgctggtaatgtcaacgatcttgctttctcccaaccaaaccagcaattatgtggtgtgacttcgggagaagacaagacactcaaggtctgggatagctgttaccggaaataaattgcacacttttgaaggtcatgaggcacctgtttattccgtgtgcccacaccagaaagagaatattcagttcatattctcaactgctgttgatgggaaaataaaggcttggttatatgacaacatgggttctagagtggattatgatgcccccggtcgatcttgcacgtcgatggcatattgtgctgatgggactagattatattcttgtggtctagtaatgnnnnnnnnnnnnnnnnnnnnnnnnnnnnnnnnnnnnnnnnnnnnnnnnnnnnnnnnnnnnnnnnnnnnnnnnnnnnnnnnnnnnnnnnnnnnnnnnnnnnnn

SEQ ID NO: 90006 - DNA, 500 bp, Arabidopsis thaliana columbia
tccacgcgtccgcatctttcagagctagtaagcagaagctggaaagtttattacagaaatggtcagaatgggaggctgaaaatacgtccttggctcaggatcaagaacaactattcgaatctggtgaagagacatgtttccccgccatacgtgttggattgcagaagacttcgtctgtgtcattctggatcgacaaccaaactggtcataagccgttggaagattttgttctagtggaaagtagcaccactcctctttatgaccgtaaatttgctataggtttaaattcagcagatggctcaagaaacgtggaagggggattggagattattgatgatgatcctccacgttgcttcaattgaggtggctatagtcattctctaagagaatgtccaaggccttttgatcgatcagcggttaatagtgctcggaagcttcagaaatctaaacgaaatcacgatagtagtgggccccgtctaccatcaagatattatcaaaaa

SEQ ID NO: 90007 - DNA, 700 bp, Arabidopsis thaliana columbia
cgccaacctctacttcgattcactctatggaaagctgtgccgcctgcaggtaccggtccgctattcccgggtcgacccacgcgtccgtacggctgcgataagacgagagaagggtacggctgccataatactacacatggggattgagggagaagaatcacattgatagattcgccgccgatctagagccgttgattttcttaatcggaaaaagaaaatgagtggaagcagaaggaaggcgacgccggcgagtaggacgcgagtagggaattacgagatgggacgaactctcggagaaggaagcttcactaaggtgaaatacgccaagaacaccgtcaccggagatcaagccgctatcaaaatcctcgaccgagaaaaggccttccgtcacaaaatggtcgaacagcttaaaagagaaatatctacaatgaaactgattaaacatccaaatgtggttgaaatcattgaggttatggcgagcaaaacgaagatctatatcgttcttgagcttggcaatggaggtgaactctttgataaatcgcgcacatgggacgcctaatgaggatgaagctcggagtatttccagcagctcgtcatgctgtggatactgccccgtcgaggtgctaccacgagatctcaaccctaaatctgatccttgacgcaaatggggtttgaaatctctgattttggttaagcccct

SEQ ID NO: 90008 - DNA, 511 bp, Arabidopsis thaliana columbia
gtccgagaaactacggttgaaagttgctcttggtgctgcaaagggacttgcttttcttcacagttccgagacaagagtgatataccgagatttcaagacttctaatatccttcttgactcggagtacaacgcaaagctttctgattttgggttggctaaggatgggccaataggtgataaaagtcatgtctctacacgagtcatgggtacacacggatatgcagctcctgaataccttgcaaccggtcatctaacaacaaagagtgatgtctagagcttcggggttgtccttctggagctgttgtctggtcgtcgagcagtggacaggaaccgcccatctggagagaggaaccttgtggagtgggctaaaccatacctcgtaaacaaaggatagatattccgagtcattgataatcgtcttcaggaccagtactctatggaagaagcatgtaaagtggctactctgtctctgacatgtctcaccacagacattaagctgagaccaaacatg

SEQ ID NO: 90009 - DNA, 517 bp, Arabidopsis thaliana columbia
  unsure (1)..(517): unsure at all n locations
aaaaaaagagagaattaaagtcattcattatttggggaatggagaagaagctcctttcctacagacgccatcattaacaacatcctcttaagcttctgcgattctctccgtttgtcggaagatttcacgacgattcttcaatccttatccgaaccggagaaatcatgtcggacgctttgatcaatggattggctggagctggtggtgggatcattgctcagcttctcacttatcctcttcaaactgtaaatacgcgccaacagacggagcgggatctgaagagggagaagaggaaacttggaactatcgaacacatgtgtcaggttgtcaaacaagaaggatgggagaggttatatggtggattggcgccgtctcttgctggaacggctgcatcacagggtgtgtactactacttctaccaagtgtttcggaatcgagctgaacgccacagctcttgcaccggaagaaggaaggttttggttaccggtccantttggggtnntttcctcactttaag

SEQ ID NO: 90010 - DNA, 552 bp, Arabidopsis thaliana columbia
  unsure (1)..(552): unsure at all n locations
gctggtaccgcnnnctgcagggtacccgggtcccgggaaatttccccggggtcgaccccacgccgtcncgcgtttgtacttctacccggtcagctactatctctctgtctcatggcgaatccgacggagaacctcgacgcgaatccacaaatccgagaaccagaagctgaagaagaagttgaagaactgaacggatacgaaggtgacgatggaggagaagatgacgatggagaagacgatgacaccgagtcgaaatctcaaacgcgcgaaagcggatccagtgtagacagaatcaaggcggaatcgctattccgtcggatgcgagctgctcctgtgccggtgcgtgttcacgacgtgattatcggtggaaacgagaagactaaggaccatatcattgaagcggaagtggatgctgtgagagaggcgaccacgttgcaagagcttctcgaagcatctagggttgccaattcgaatctgccgtgcgttagatatctttgattccgtcaacattacgcttgattctggtccttctgagcttcctggtactaccaa

SEQ ID NO: 90011 - DNA, 582 bp, Arabidopsis thaliana columbia
gataattctttacagtgtatgaggtaactgcacatacttttgttttctttatgtgtaactgtgggctacctgatgcctagtcttcacgtgcgtggtacttcattagttccatctttttgcttactactttattttgggtaatgttcaggcgaaaaagtcgttctatttctcctaggcgccatcgaagtcgatctgttactcctaagagacgttctccaaccccaaaacgttacaaaagacaaaagagtaggagttcaactccatctcctgcaaaaagatctcccgccgcaacccttgagtcagccaaaaataggaatggagaaaaacttaaaagagaagaggaagaacgaaaaaggcgacagcgtgaagcagaactgaagctaatagaggaagaaactgtgaaacgggttgaagaagctattcgaaagaaggtcgaagaaagcttacagtctgtggaaatcaaattggaaattctaacgctgtttgaggaagggcgaaagagacttattgaagaagtcgcggttcaactttgagaggagaaagaggcttcttttattgaggcttaagaaaaaaattgtgtta

SEQ ID NO: 90012 - DNA, 424 bp, Arabidopsis thaliana columbia
  unsure (1)..(424): unsure at all n locations
cccacgcgaccgaggaatttctgcgcagagatttgccatgaacggaaagaagcatgagactccctcccgggtttcggttcgatcccgatgatgaagatcttgtgttccagtatctcgccaagaaggtcctccaccgtccaatggacttcgatctccctgagctccgttcttgcaatgttgatccatgggacttgccaggagagaagaacaaggaagtgtattacttcgggaagaaggaagagcgagagaggaagggaagagagacgttatccggttattgggaagagtgtgaagaagaggaagtaatggaggctggtggtcgtgattgtattcatttagaaggaaggagaaagacatttgctttctttattggaaaaaaacctcgagggacantaactccatggatcatgtacgagttccgact

SEQ ID NO: 90013 - DNA, 893 bp, Arabidopsis thaliana columbia
cgcccccttgatttgacttcctccgcggtaccggtccggaatagggggagacaaatcagaagagagagatttagatattgtagagtgagattctaaagagagagagagagagagatatggctagtggaatcgctcgtggtcgtttagctgaagagaggaaatcgtggaggaagaatcatcctcatggttttgtggcaaagccggagacggggcaggatggaactgtgaatctaatggtgtggcattgcactatacctggtaaagctgggactgattgggaaggtggattctttccattaacgatgcacttcagtgaggattatccgagcaaacctccgaaatgtaaatttccacaagggtttttccaccctaatgtctatccatctggaactgtctgtctctctatccttaacgaggattatggatggagaccagccatcaccgtgaagcagattcttgttggtattcaggatttacttgacacaccgaatcccgctgaccctgcacagacagatggttatcatctcttctgtcaggatccagttgagtacaagaaaagggtgaagctgcagtccaagcagtatcctgctcttgtctaaaacctcaaaaaagagaacgcaccaaaactgatgacaagctctgaatattttctcgtcttgtgtcattatgtttagatgtcattgggtgattgaaaactcctcattttggcaccttaagacactggaatctatttattttcgaaaaaaaactcttctttctctatttaactgttaatattcttggtactgattcagttggtgttgcttctatataatacataattatgttctctggtcgttcatgagtgttgtccaaattctactaagtgaaatatgaagtcttcattccataga

SEQ ID NO: 90014 - DNA, 557 bp, Arabidopsis thaliana columbia
  unsure (1)..(557): unsure at all n locations
nnnnnnnnnnncnnnnnnnntacgactcactatttggaaagctggtacgcctgcaggtaccggtccggaatttccgggtcgacccacgcgtccgcccacgcgtccgcggacgcgtgggcaaatttcgaccgagttttgttgaattccgattagatctttcttccacgaaacccccccaagtacccattccatcttctccggtgagtctcccatgttggcattacgctagggttcttcttctctgtggtttcgcataacccaataatccaattttctacttgggcatcaatgggtcgctctcgagggaacttccaaaatttcgaagaccctactcagagaacgaggaaaaagaaaaatgcggctaatgtggagaactttgagtctacttctttggtaccaggtgctgagggaggagggaagtataactgcgattattgccagaaagacattactggaaaaattaggataaagtgtgctgtctgtccagattttgatctctggatagaatgaatgtctgttggagcagagatcacttctcacaaatgtgatcacccata

SEQ ID NO: 90015 - DNA, 398 bp, Arabidopsis thaliana columbia
cccacgcgatccgcggacgcgtgggactacacaagatggtcagaaagagtctgataaaagaagccaaaaacagaaagtctcggagctgaaggaaggagggattctgaaacctccaaagaaacggtaacccactctactaatttctgtcatcactttttggcgaggttcagccagctcagtgaaggaagttaaggggtttgaataattggtatgctcatgcaattctttttggtaattgcatacctgaaatttagttgcagttgtttttttgacgaagtctcaagcaggaaaggagatggtttcaggagctgcactctttagggttatgttgaatggagtcttcaacctgtttagaagctccatttttaatacctttatgctttaaactgttagctctg

SEQ ID NO: 90016 - DNA, 503 bp, Arabidopsis thaliana columbia
  unsure (1)..(503): unsure at all n locations
nnnnnnnnnnnnnnnnnnnnnnnnnnnnnnnnnnnnnnnnnnnnnnnnnnnnnnnnnnnnnnnnnccacgcgtccgcccacgcgtccgaaacaatcgcttttttatttttctaaatttctctctgttcttttttcctctggttttgattttttcctggcattattattagggtttttttcatacgttgttgaaaatggcgtagttggagaaaggagacgaatcgatcatctacctacttgcccattctttgtcgtcgtttttcgattttccttgattcgccggagaaatagcgtttccggcaatgaaaacctctctccgacggttacgaggtgtgcttcacaagcatgaatctaaagaccggagagatcttcgagctctggttcagaaagatgagcttgcccaagcttctcaggacgtagaagacatgagagattgctatgatagcttgctcaatgccgctgctgctactgccaatagtgcttatgaattttctgaatctttg

SEQ ID NO: 90017 - DNA, 436 bp, Arabidopsis thaliana columbia
catcatacaaacacatatatacaaatacacatacgcttatcaacataaacagcctaaagatgagttctaaaggagaaggctctagttctacggcggagagggaggtgaagaaacaagtagcgagtgtgattcccgttacgaggaagctggtgaagactatggccgcgaaagccattatctctgctctcacgccatccggttgtggccggcactctgactctaccggcgacggcaaaggtaacggagggcgcgtgtaccccggtactcatcgttgatcggccattttcttgggattgaagatatatatgccgtcatgatcgtttatgggttttctttttatgttttttttttatatatctaaatgttggtgttctcgttgataattataagcttttgataattatgcttctctctttctttcttcttaaagatttaa

SEQ ID NO: 90018 - DNA, 891 bp, Arabidopsis thaliana columbia
tttattcgtccggaacttctgggggagatatatgctagaggagctggtgttgaaagaaattataccaaggcacttgaatggcttacacttgctgcaaaagaaggtctctattcagcatttaatggaattggctacttgtatgtcaaaggctatggagtagataagatctactatactaaggcaagagaatatttcgagaacgctgttgacaatgaagaccccagtgggcattataaccttggagttttgtatcttaaaggcatcggagtcaacagggatgtgaggcaggcaacaaaatacttctttgttgctgcaaatgctggtcaaccaaaggctttctatcaactcgccaagatgttccatactggtgttgggcttaagaagaatctggagatggcgacttcattttataagctagtagcacaaagggggccgtggagttctctctctagatgggctcttgaagcttacttaaaaggtgatgtgggtaaggctttgattttgtactcaaggagggcagagatgggttatgaagtggcacaaagtaatgctgcctggatcctcgataaatacggcgaaagaagcatgtgcatgggagtatctggattttgcacagacaaagagagacatgagcgggcacattctttgtgtggcgggcctctgaacaaggcaatgaacatgctgctctgcttattggagatgcatattactatggccggggaactgagagagattttgtgcgtgcggcagaagcatacatgcatgctaaatcacagtccaatgcgcaagcaatgttcaacctcgggtacatgcatgaacatggacaaggacttgcctttgatctccatttagcaaaaccgtactatgatgaatcccttcagagcgatgcaa

SEQ ID NO: 90019 - DNA, 648 bp, Arabidopsis thaliana columbia
  unsure (1)..(648): unsure at all n locations
tgatctccagctcacatacgactcactatagggaaagctggtacgcctgcaggtaccggtccggtattgccgggtcgacccacgcgtncggcgatggaaggagagaagcaattggaagaaactattgaagcggcgtttcagataatttcagccatgaatgatgagctttgtaatccgtctttgtggtctacttcagctaccccgagttccgccgcgacgacgacgggttctaatggttcggctctcgtttccgccgatgcggctgcgattgatggaacatcgcatcattcggaatctgctggtggtggcgggggcggaggaagtggaaatagtgttttggatgaggcgagtcttcggtataagaactcagtgacttcgcttcgtgctgttcttgctgcgattccaaattcgcagaaggcaaaagcatctgaaatgcaaaatggtttaggatctcctgaaagtgaagacgagatcgaaaaattggaggagcaagccttaagtctcagaatggagattgcaaagaagaatgttcatgttaaagaacttatagataaacttcgggaacttatagcagatatctctacatggcanagcccttgntctgtttgagttttatttttttgacatagtgagatcagtttagacaaa

SEQ ID NO: 90020 - DNA, 547 bp, Arabidopsis thaliana columbia
  unsure (1)..(547): unsure at all n locations
acgacgacgaacatggcaacgagcagtgcggcttctgttgatatggaagatattcagactgttgatctcatgtctgagcttcttcgccgtatgaaatgtgcctctaaacctgacaaacgtctcgttttcatcggtccacctggttcagggaaaggtacacagtctccggtcataaaggatgagttttgtttgtgtcatttgtctactggtgacatgcttagagctgctgttgctgctaagactcctcttggtgtgaaggcaaaggaagcaatggataagggagagcttgtttctgatgacttggttgttggtatcatggatgaagcaatgaacagacccaaatgtcagaaaggtttcattcttgatgggttcccgcggactgtgactcaagcagagaagcttgatgagatgcttaatagaaggggggcccagatggataaggggcttaatttttcgtccctgttcggtcccgagaaagatncttgaaggtggtcccctcaagtgnggagnttctctaaatcggcccccaagncngggcgtacttcta

SEQ ID NO: 90021 - DNA, 726 bp, Arabidopsis thaliana columbia
tcccgggcgccactgattttggtgtaacccttgtttatttgcttatgtttatcttttgatctgatctataaatatatatacaggttatcaaaaggcctccaccaaaaccaactcaacatctccgcctccatctccgcctccatctccgccgcgagttccagacgctcaagaattggagtaccttaaatccgactcttttcccgaacacgatgcgtagagttgtcattcggacggaggtgtgcgttccgataaaattaggctaccgccgcggctttcagaccttctagaattggagaaattgtttcccgaacgcgaggcgctgagttgtcctttggacggagatgaggattccaatgaacttaggctacggccgctggttccagacgctcaagaatggaagtaccctaaatccaagttatttcccagacacgcggcgtggagttgtcattcggacggaggtggaggtgaaggcggtgtccgtgtatttacaaataaagtaaatgcggtagaagaattcaacttaggaggactgaaggacagcgaatccgattccgattccgagtagggaacttttaaaacaactttgattatggatttcgatatccagaataattttaattcactgctgttggacttgattaatttcctatcacataacgttttggtttaactttgtacgaccaccacacttgctttgctcgtgtcatccacagttttatttttaat

SEQ ID NO: 90022 - DNA, 658 bp, Arabidopsis thaliana columbia
  unsure (1)..(658): unsure at all n locations
nnnnnnnnnnnnnnnnnnnnnnnnnnnnnnnnnnnnnnnnnnnnnnnnnnnnnnnnnnnnnnnnnnnnnnnnnnnnnnnnnnnccacgcgtccgcccacgcgtccgcacgagagtcacgagagatcgagagaagtctttgattctcttctctcatcaaatcaaaatatcatctcagagactccgattctctctgtttctcctccacttttcaacccaagtccaccctcaaaattctcagaatgattgctcggatccttgccgccttagccgattccatggagatgccggtggctgccggtggtggatcagtgctcggtaccatcaaaatcgctgtgatgccaattgcaaaggtattcaccatgtgcttcttgggtcttctcatggcctccaagtacgttaacatcttgcctccctctggccgcaaactcttgaacgggttggtcttctcgcttttgcttccctgcttgatcttttcccagctcggacaagccgtcactctccaaaaaatgcttcagtggtggttcattcccgttaacgtcgttcttggcaccatctctggctccataatgcggttcatcgntgcttccatcgttcgtccgccttacccttacttcaagtttacaatcatacanattgggagttggcaacattgggcat

SEQ ID NO: 90023 - DNA, 388 bp, Arabidopsis thaliana columbia
ctaatcttgtgcctttagatttcttttcggggagatctagtagttgttggattcgttaaacggagaagtggatttggtacgagtctttaggtttccttcttcaccaaaagctctatatagagagaatctgcgagctctttttggtaggaaattagggttcgtgttgcttggtaaatatagaatcaatgacggaggttgttctgcatatatacgatgtgacgaacagtggatcggagaagactaacaacaccattgttcagatcaataggttcttcaaagacgggatcggtcttggcggtatattccacagcgctattcaggtatatggaaacgatgaatggtcttacgggtattgtgaactaggaactggtgtattcagctgcccgag

SEQ ID NO: 90024 - DNA, 877 bp, Arabidopsis thaliana columbia
  unsure (1)..(877): unsure at all n locations
tgacactatagaagagctatgacgtcgcatggcacgcgttcgttaggctggattcttttaaagcggccgccttttttttttttttttaaaaggattttattttattataccatggacctcattatgtaaggttttggagataatttaatcgattttgagccgaaaataaggatgattaaggcttcgtaaataatataatggtaattttatcgactaaatagtcttctttccatcatgaggtcttccaaaaaaaaacttcaggtagtccgaatacacaatctttctataccgagccatctaatggttcttatctaacacctccggtaacggttcaataaccgaatcatgaaccggtccgaaaaaaaccggaatggaaacccggctacaatacttattgaccaccacacaatgctccacgctcctatacctatcattgctcaatatctgtaatacatctccgatattaacgacaatagctcccggaattggagggacatgaatccatttgtctccatcctcagtggctcgggcgtaaagactgcttaatacaccatcttcttgtaggaggagagtgagagtgttgatgtctgagtggcgaccagttcctatggccaggcttggctcaggacatttcggatagtagttgaagttcattctcattgttcccattagggtttctttattggactcatcgatgattgtgtttagattgttgatgaacagaaggccacgtggcagcgaagtcatgtcgttgaggaagatactcaaacttgaggaaatctctccattccaaaacactttctatgcaaggattgaaacttgtggtcaaccacgccgtctccgacactgaactcnctctccaataccttcttctctc

SEQ ID NO: 90025 - DNA, 1004 bp, Arabidopsis thaliana columbia
  unsure (1)..(1004): unsure at all n locations
nnnnnnnnnnnnnnnnnnnnnnnnnnnnnnnnnnnnnnnnnnnnnnnnnnnnnnnnnnnnnnnnnnnnnnnccacgcgtgcgcccacgcgtccgtttcgattctctcaaaaaatcccataactttcccaacgaaaaatgttccgatcaatgattgttcgatctgcttccccagtgaagcagggtcttctccgcagaggattcgcctctgaatctgttcccgatcgcaaagtcgtcatcctcggtgccgccggtgggatcggccagccactttctcttctcatgaagcttaaccctctcgtctcttctctctccctctatgatatcgccaacactcccggcgttgctgctgacgtcggtcacatcaacacccgatctcaggtttctgggtacatgggtgatgatgatttggggaaagctctagaaggcgctgacctcgtcattattccagctggtgtcccaaggaagcctggcatgacccgtgatgatcttttcaacatcaatgctggcattgtcaagaacctcagcatcgccatcgccaagtattgcccacaagcacttgtcaacatgatcagcaaccctgtgaactccactgttccaattgcagctgagatttttaagaaggctggtacctatgatgagaagaaattattcggtgtcaccactcttgatgttgtcagggctaggactttctatgctggaaaatcggatgtcaatgttgcagaggttaatgctccagttgttggtggtcatgctggcatcacgattcttcctctcttttctcaggctagccctcaagccaacttgtcggatgatttaatcagggccctcacaaagcgtacccaggacggagggacagaagtcgtggaggcaaaagctggaaagggttcagctacattgtcaatggcctatgcgggagcactctctgctgatgcatgcttaaagggactcaacggtgttccaaatgtggtggaatgctcattcgtccaatctaccatcaccgagc

SEQ ID NO: 90026 - DNA, 679 bp, Arabidopsis thaliana columbia
caaattggcgccttaatggcggggaagccacctccctttggcttgaaggccacggcttaaaaagggggacctccacccggtggtttccaaaatggggggggaaaaggctcattcggtcccaatctccccatcaccgaagcttcctttcttcgcctcaaaggtaagactggggaaagaccggaggggagcaagtgctagatctagggccactctcagcctttgaaaaggaaggcttagaagccctcaaggcagaactcaaatcctctatcgagaagggcatcaaatttgccaaccaatgagtttttgcatcttgaaactattgattttggactaaactttaggttaatgtttgtctttccaattttccggtagagttgtcttcttcctctgcggattttataatttcccttcaataaattctccatttctgctcttgaggaaccaaccattgggaactctgtaataaaaagaacaagctgttgtgctgctatgttggttatgattcgttttcctttttccttattgtttgctagaaaaaagaaagaaaataataaatcgttgtgagttgcgttatttgggcacctactactactattcataaaaaaaaaaaaaaaaaaaaaaaagggcggccgctctagaggatccaagcttacgtacgcgtgcatgcgacgtcaagctc

SEQ ID NO: 90027 - DNA, 446 bp, Arabidopsis thaliana columbia
aatctacacacaattaacaaagctcaatctctctcttctcttactctctacctctgtagctgatagggtcagcttcgtcggcgctatttctgccggatttcacggacgatttgagatctgttcttccttcttcttttttcctctcctgatctgattcaactctaatctgcttcagtctctgtgttacgaactgattccggtcagtgaaaaaaaatgttgagcgtttcaagcttctgcagtttaatgggagactgtggtgtcatttgagtgatacgtttggaactttggaaacagatggagtgtcgtttggagttgaagaaggtattaactaaggaaagctcaaaggcatttacaccggataagtttagagacgataaacgcgggttatcttactccgatttccaccgcgagattacgagaaaagttgaagatgtatgtcctaaacg

SEQ ID NO: 90028 - DNA, 940 bp, Arabidopsis thaliana columbia
cccacgcgtccgcaaggagaatagtgattattgaaggatgcaagatttttatattcagctctaatgaagaacggacaggagttgcagtcttctacccaagtttcacatgagtcccaaggtgaacagaaagttaatttatcagtagaagctccaatacaagattctggttctgtatctgcctcaagtaatgacggtaggaaagtgtcaagacaagatattgaacttgtccaaaatttgatagaaagatgtctccagttgtacatgagcagagatgaggtcgtaaagacactcttgacccgtgcaaggattgaccctggttttacaacattagtatggcaaaaactggaagaagaaaacgcagagtttttcaaggcatattacatcagactgaaactgaagaagcaaatagttgtattcaatcatttgcttgagcatcagtatcacctcacgaagtataatgtacattcaaaagttcctctggtcccaatgcagaacggtattcatcctatggcatctgcgcagtgaacaacatgcccatgggatacccagtactacaacatcctcagatgcatgctcaaggtcatccccatcttgatcctatgagctgtggaatgtcaagctgccatgtggttaatggagtccctgcacctgctaatttccaaccaatgaggatcaactcagggaatgatatggtaatagatacaaccatggctgaaccaacttccaatgattccaccaaaataggtggtatgtcgggatatgccagtcaagtccagccttctgtggcggtcaagcgggcaccttttccattttgctgcttcagacaattgtcaggggttgggaatggacacgtcagctcttgactctgctttcacatctgatgtcggaacttcagtagggttacaacttggatcagatggaggagctggaaattctagag

SEQ ID NO: 90029 - DNA, 559 bp, Arabidopsis thaliana columbia
cctccttcttcaatctctctattctcttactaacgttatttcttcaatctcattgatcaaaaaaaaccaaaaccctaatctgcaaaaatctcaatttcctccaaaagtttcagtttttaaaaatgggttttcttcttttgtaacgaaaaaatgtgtcaaactttgaattgaccatttttttttataaggattcgatgaagaaattgagaagctattactcaaatgtgagacatcatcagaatcaccatcatcatcaccatcatcatagcaacattgtttcttcagagaggaaatggatatttttccctctattgattggttcaatcttcgctttgttcttactcttcctcacaacaaccctaacttcaccaaccggaggagtccgatttctcccttttacccgaccccgtttgttaaccggatctggttcatcagctttcgttgaatccaaaatcaaacctcaacaaatctcatcactcccgtcgccaccgcgttttgcttacttgatttctggatccgccggcgacgggaaatctctccggcgaactcttttggctct

SEQ ID NO: 90030 - DNA, 484 bp, Arabidopsis thaliana columbia
  unsure (1)..(484): unsure at all n locations
gaatcccgttcctcttcctctgtctctctccccaagaaaatcactcagatcaaagctcaaatttcggatctcacagctgtcgcttcggtagaggaaaggatgaccagagaacatcctcccgagcctcttgatttcttcatctggactgttgaggatgttgggtcttggctcgaggagataaaccttgggggctaccgccagattttcaaagaaaatggtgtcaatggagaatatctagaaagcatgtctgtgtttactaccgagcagatccttcacttcataaggaggcatcacatgaagtggggagacttcatcaccctctgtaaagaactcagaaggattaaagtggcttgcttgaaaggtgagcagagagttagacgggccatggtgggcaccgccttcgtcctatcccgggggcctttggtaaagggagcccaaacggaaaccccngatcgcgtttggtgttgtacaacctttaaaggtt

SEQ ID NO: 90031 - DNA, 612 bp, Arabidopsis thaliana columbia
  unsure (1)..(612): unsure at all n locations
cctntccacggctttagattggctgcccgngnanaccctgggnccccccagttncaagaaatgnnccatggngattctggaaccatgccgngttacctccgggcagaccttcacttcataaggngccatcccctgaagtggggagacttcatcnccctctgtaaagaacncagaaggattaaagtggcttgcttgaaaggtgagcagagagttagacggcccatggtgggcaccgtcttgtctatcccgtagtctttgttaaggcagccaaacgcaaccgacagtctcgtgttgtatctctcaagcttgaatcttgacattacactttggctgtttatgtacgtacttgtctctcttctcttctcttgttttcttttcctttttttttttttttttggtttgggtttgtttgtggcacatgcactaggaagaaacaaactcaagtcaaaaaagctgtttggcttggtgaaatcttgcaagcgggaaaaaaattatgcgttttgtactttggtggtgtatacaaagcttgctctcagatgtttaatatatggcttgtgcaatctttatgtgacagataatagtgtgacgcatccaaagtagtaatttgattat

SEQ ID NO: 90032 - DNA, 498 bp, Arabidopsis thaliana columbia
  unsure (1)..(498): unsure at all n locations
nnnnnnnnnnnnnnnnnnnnnnnnnnnnnnnnnnnnnnnnnnnnnnnnnnnnnnnnnnnnnnnnnnnnnnnnnnnnnnnnnnccacgcgtccgctgtatttccatatctatttaaaattatgattaaacttgagaatcaactaaaatcatcatcatacatgttttgtaggtgatagcaagagaagcaagagagttcaagattggaggatcagtgttttactatgcattgatagtgatcacaggaataatatggcaaggtttcttcttaggagccatagggattgtgttttgtgcatcatcactagcttctggtgttctgataagtgttctgcttccggtgactgaagttttcgccgtcgtttgtttccgggagaagtttcaggcagagaaaggtgtctctctacttctttctctttggggatttgtctcttacttctacggcgagtttaaatccggcaagaaagttgttgataaacctcaaccgccggagacagaact

SEQ ID NO: 90033 - DNA, 521 bp, Arabidopsis thaliana columbia
gccatagctgccattgccatttctgtctctgaagtcactcagtcgcctgaaattctcgagttatcggagaaaatcaaagagaagatgaaggaagcagatatccacgatcttgaaggcaaaatggatcttaagattagagctcttgagttagtcgaagagatgaggaccaagagagctgaccaacaggcggtgttgctgttggaagccttcaacaaagatagagcatccttgccacagcccgttccagctcaaccaccatcttccgaattacctccaccggatcctcgcactcaagaaatgataaatgagaaactgaagaaggcagaagatcttggtgaacaaggaatggttgatgaagcccagaaagccctggaagaggctgaagctcttaagaagcttacagttagacgagaacctccagcagattcaacgaagtacaccgctgttgatgtgcgcatcacagaccaaaagttgcgtctatgtgacatatgtggagcattcctgagcgtctatgacagtga

SEQ ID NO: 90034 - DNA, 580 bp, Arabidopsis thaliana columbia
gcgggaaaattcagccatcgcctcgaagaaaaaacctcccaaatctgagaaatcggaaaagatgacccacaccgaaaccctaaatctgctcgatgaaatcgagtcttttgtctccgatcagcttcaagtggtatcttacaaatggctgagtcgaaatttctcgctttcatcaaatacggccaagaggttgctcaaggattttgtagagaaacatgggaagggtttggaagttgtatatattgtgtccggattgctaaagaacggaccttccgattaccacgcaaggcttgcttctagtaccgaacttccagaagtagagaaagagttcaatggaaaatattcagtacatatctacagtgttcaagctagtattccaatggatccagcagccatatggaacactgagtttgtacaagcagaagaactcttcaggcagccttctgccactgataattgtttgaaaggcaacaggttttgtggcgtctccaattcttgtgtgaagcgcaatatagagggagccactgaaaatgttaccgccccgcgaactgaaagtgtgagaactacaggacaatctaaaagt

SEQ ID NO: 90035 - DNA, 510 bp, Arabidopsis thaliana columbia
ccggcactaatcgactcatttagggaaagctggtacgcctgcaggtaccggtccggaattcccgggtcgacccacgcgtccggctagtattccaatggatccagcagccatatggaacactgagtttgtacaagcagaagaactcttcaggcagccttctgccactgataattgtttgaaaggcaacaggttttgtggcgtctccaattcttgtgtgaagcgcaatatagagggagccactgaaaatgttaccgccccgcgaactgaaagtgtgagaactacaggacaatctaaaagtagttcaaattttcaaaagagtacagtgccgtcaaaccagggaaagaatttccagcactcaagctcttatgtttggccatcaggctaagagtgaatctattgctgctccagctaaaaatcagtctgcgaaatcctctttggataaagaaaaagcttttcatgtgcccgctaataaaaagatggacagggcgagaagagcgtgactggaactgg

SEQ ID NO: 90036 - DNA, 421 bp, Arabidopsis thaliana columbia
ggaagcgaaatcggaaaagttaacgacggagatggctacagaggcaccaacgcaatcttacagcgagcaatggtattgggacgatcgttacaagaatgaatctgaaccgtttgattggtaccagaagtattcacctttagctcctctcatcaatctctatgttcctcaacgtaatcaacgagtcctcgtcattggctgtggaaactcagcgtttagcgaaggaatggtggatgatggatacgaagatgtagtcagtattgatatatcatcagtggtgattgataccatgattaagaaatactctgatcgtcctcagctcaaatatttgaagatggatgtgcgtgatatgaaagcatttgaagatgcttcttttgatgctgttatcgataaagggaaccttagactccattttgtgtgggag

SEQ ID NO: 90037 - DNA, 655 bp, Arabidopsis thaliana columbia
  unsure (1)..(655): unsure at all n locations
nnnnnnnnnnnnnnnnnnnnnnnnnnnnnnnnnnnnnnnnnnnnnnnnnnnnnnnnnnnnnnnnncttcctcaacatgacatcaagaacattcacaagacattccagtctcattcatgtttttctcctgctttctctcgttttctcagggaatatactacaaacagtaacgtctcttggcatcaattacggacaagttgggaacaatttgccttcaccggataaagtcattaacctcttgagatctttaaggatcacagaaacaagaatttacgacactaaccctcaaatccttagtgcctttgcaaattcaaacatcgagatcatcgtcaccatcgaaaatcaggttttaccattactacaagatcctcaacaagctacccaatgggtagattctcacattaaaccctatgttccggccactaggattaccggaattatggtcggtaacgagcttttcaccgacgacgactctagtttaataggatacatgatgccggcgataatcaacatccacaaagccttggtccaattaggtttagatagatacattcaagtctcgtctccaagctctcttgccgtcctcggtgaatcttatcctccatctgccggaagtttcaagccggaggtttcctccgtgatgcaacaacttctag

SEQ ID NO: 90038 - DNA, 848 bp, Arabidopsis thaliana columbia
ggtgaattaatccgacaatgtgcttaccgaattcatgccctgaattcatatcttaatgcagataatcaggtttcagttgatattaaaaagaaactaggagaaccattgagaagaatgagtttggagtccggcaaagcgatgaaagaaatgtcaatttcgttaaagaaaatgactaaaccatcttcttctgatcttcatgtccaaaacgcaaaatctgcctgtaaatcactcaccaacttacttaattcaggcatcttgaaagaagttgagcctctagaattggtctcccttctgaccgcgatctccttgctcatcgatattataaacctaacagagaaaatcttggaatccctacatgaactagcaaccgctgcaaaatttaagaacaagattgaacatcctttgttttccgagaaaccaaaagccaaaagctttgttagtgtccgatcgatcaaatgtcatgatgatcatgtggtcataattattgaagatcatggtaataatgatgccccatcaaaaaatgataatggctcgaaggaggtttcgatccatgagaaacatgaagccgatgatacgcatgtagacgcaagatgtgtttcatgtggtcaccccagcgtttgtgtgaaaccccgcatgtttattcactcataaaataatgtatgtttattttatttttttaattatgaaatttgttgtttttgtaaaatattggattcattgaagacttaacatggttaaataaaatatgcagattttttttttaataaatagatttgaaaaaaacacaaaccccaaagggcgcccgctctagaggatccaagcttacgtacgcgtgcaggcgacgtcaa

SEQ ID NO: 90039 - DNA, 433 bp, Arabidopsis thaliana columbia
  unsure (1)..(433): unsure at all n locations
tggatacgttacgnggttggcacgttgaggatttcctcgattcctctcttcctacttatggtttctctaagagtggtgatgatgatggggtgttaccatatatggaaccagaagatgacaacaacactaagagaaacaacaacaacaacaacaacaacaacaacaatacagtgtcacttccatctaagaatttagggatttgggtccctcagattccacaaactcttccttcttcatacccaaatcaatacttttctcaagacaacaacatacagtttgggatgtacaacaaagaaacatcaccagaagtagtgtcttttgctccaatacaacacatgaaacaacaaggacaggacaacaagagatggtatgatgatggtggcttcactgtcccacagatcagtgcgtctcctctttcntctaatnaaaagtt

SEQ ID NO: 90040 - DNA, 915 bp, Arabidopsis thaliana columbia
ttcagcgtctctacgactcactattgggaaagctggcacgcctgcaggtaccggtccggaattcccgggctttgttgcagaggatcacaatctaatggcgattccaatgtccatggcaatggcgactcctacagattccgtgagcagagtctggagtatgtcttctctcaaatcagctcttccctccaccgcatcactccgattaccttcctcgtcttctcgccgtccggttactcttcgtctcccaatctcttctccttcactcccatctttctccggtctctctccggtcaatcctctcctctcaatcggacttccagattggcaaagctttgagaatggattcaaaattgttgacggtggtggtcgtatctacgcgatgagacacggacgacgtgttccgaagctgaacagaccaccggaccagcgcaaagctcttctgcgaggactcacgactcagcttcttaagcatgggagaatcaagacgactcgagctagagctagtgcgatgaggaagttcgttgacaagatgattacattggctaaagacggttcgttgcacaagcgaagacaagccttgggatatatctacgagaaacagattgttcacgctctgtttgctgaggttcctgatagatacggtgagagaaacggtggatacacgaggatcatcagaactcttccaaggagaggtgataatgctccaatggcttacattgagcttgtctaaggtcaatatctcttttattttgctcaattgtttcacttttgctctgtaatattgaaaaacagttgttgatgcagatatgagatcattttgttttgtgaaaaaaaaaaaaaaaggatggccgctctagaggatccaagcttacgtacgcgtgcatgcgacgtcaaagctctctataggttcaccta

SEQ ID NO: 90041 - DNA, 516 bp, Arabidopsis thaliana columbia
  unsure (1)..(516): unsure at all n locations
atctagagaaaccacttcgcaacgatgagggagataggtcactcctcaaaattaccaaacacaaattagctccaataattgcaacaaatcactctcacccaaacaaaacttttcaaaagccctaatccgagaaatcattcgacaacaacacgaaggagatggatctagaagattgggaaatactccccaaaatcaactacaagggtctcgaacttgatctcggtcatgaagaggatcatgaagttacgaagatgatgagaaacaccgcaaaaagcttcgacagtgattacttcatctgcccaattcaagattctgtcggaaagacagagtttcttcatcagagatctagcgtggtccccacacaactcctccagattccaataacttgggaacctttgtcccccgtggacgacaaagatcacaataggtcctggttccggattttttcgggaccagacccggancttttacggggtttttccgtggccgggatacctnaagnatngngggaccgta

SEQ ID NO: 90042 - DNA, 654 bp, Arabidopsis thaliana columbia
  unsure (1)..(654): unsure at all n locations
tnnnnnnnnnnnnnnnnnnnnnnnnnnnnnnnnnnnnnnnnnnnnnnnnnnnnnnnnnnnnnnnnccacgcgtccgacggctgcgagaagacgacagaagggcacggcgaacggagaaagatgcggagcacaccgttggggacgacggcggtttcaccagcttcaatcaaacacaactcttatgggtatggccgcttcgtttcctcttcaggagtctctaatttctctatccatcgtcggagacgccactcgtcgttttctatctctcaagctccttcacaaatcaactcaggagcttgcaatgcaagtcaaatagttgatctttttccagcggtttcacctgaaatcgttgttcgtgaagcacggttagaggactgttgggaggtggcagagactcattgcagctctttcttcccgggatattcgttcccgcttgatgttgttctaagagtagataggttaatggcaatggtgatgggattttctattccacctgggtgccagaggacttgtttagtggctgtgatagggagttcagtagatgaaaccatctgctttggaagtgatgattccaaaattgggctttttatcaaanccccttaacaaaggtattttctgnacttncctttgaccttggtgtncctcnanaagcct

SEQ ID NO: 90043 - DNA, 680 bp, Arabidopsis thaliana columbia
attcatcacaaccacaagaagacgattttttattcttgtttccaaactgaatctgacccgggccggcccccgcgtccgctccaggtgactgttattcaaggaaagaaactggtgatccgagatttcaagtcaagtgatccttatgtgattgtcaaattaggaaatgagtcagcgaagaccaaagtgatcaacaattgcctgaatccagtgtggaatgaggaactgaactttactctgaaagatcctgcagcagttctcgcattggaagtgtttgataaagataggttcaaggcagatgacaagatgggccatgcctctctcagccttcaaccgcttatctcagttgccagactaagacacgtagtccgcgtgtcccctggtgagacaacgctttggaaagtattcccggatccagagaactcgcgtatctcgggggagcacaatcagttgcatagacggagaggtggtgcagagtgtgtggctgaggctgtgtgctgttgaatcgggtgagattgagttgaagataaagttgattgatcctcctggaacaaacaagtagcaatagggtattttatgttagtttgtaacacgagacccgtttgtgactagtataattgcaacatcagtatggtcttgtcttgtttccaagtgtgcctttgtgactactcaccaatttatta

SEQ ID NO: 90044 - DNA, 490 bp, Arabidopsis thaliana columbia
  unsure (1)..(490): unsure at all n locations
cacatccattaattctgctgctgcaaattctatcgaactggtgagttttgttaatctctttcctcgttcgtccttgtctgtatatcagatcgatctctattaccgttttagcttgttcttgatctttgtcaacataaaaacaatcaaacaaagtttcttctatgagttctggtctgaacgaagatttcctcgattgtatcgtgcgtttagaggagacacatgttcaacaaggcttcgatgagggttacgaagaaggtcttgtgtccggtcgtgaagacgctcgtcatctgggtttgaaactcgggttcgagacaggcgagctgattgggttctacagaaggttgctctgctccttttgggattcaagctctcccgtaattgatccctacacgcttcccctcctcagctcccataagcattctcaattgnttccnanggttttgncccggnaaaaaccccncttttnggtncccnggggcggggctaannc

SEQ ID NO: 90045 - DNA, 602 bp, Arabidopsis thaliana columbia
ctgctatcatctgatccccaacccgaacttacgtctacatgtacctctcatagttgcggctggaagccttactctcattccaatgactttgctgccaacgcgttcctccttctcatcatcctcttctgttctttcatatgcgtcctctctctccacgctgctatccgttgttgcctccgtccagtcctccaacatgtccctaagcccgacccggaccttgaggccacccatccagacgctcccccgacacttgtctactccccgggcctaaacctagcaggcaatgaagcagagtgcatcatttgtttgtctgaattccaagacggtgacaccttacgcgtgttggagagatgcaaacatggattccacgtttattgcatccagaagtggctctcctcatcccattcttcttgtcccacttgccggacaaacatcttctcctccccacctcaacttcactcacagagcttaccactaacgagtacaccttagtcagatggtagctagttcctggtcttgcccactttttttttatctttattttctttacaacttcacaccactatcatgttttacaacttagtttattttttacctttctc

SEQ ID NO: 90046 - DNA, 536 bp, Arabidopsis thaliana columbia
  unsure (1)..(536): unsure at all n locations
acgactcactattagggaaagctggcacgcctgcaggtaccggtccggattcccgggtcgacccacgcgggcgcttcttctttatctcagtaatggtgacttcatcgacgatctcgatcggttcttgtttaaaagagcatcagaagatctacaaggaatgggtcaacatcgccgattcagatggagatggtcgtgtttcgggtaacgatgctacaaagttcttcgcgatgtcaaagctttctcgccaggaactcacacaggtttgggcagttgcggattcaaagcggcaaggatttctcggtttagcggagttcatcactgcgatgaagctcgtctcagtggcacaagaaggacatgacattacttcagaccttctcaaaggctcaattgacatgaagagtgtggaacttccagtgttggaaggactagaaaacgttgtatcagtaagactctttcttatctgattatctcattttgtttttcaatctttacatgagttnggtttcctaatctaatatatttgcttacagaagcag

SEQ ID NO: 90047 - DNA, 555 bp, Arabidopsis thaliana columbia
  unsure (1)..(555): unsure at all n locations
accngatttggactggttaacctgctgtttaggatccctggatncccaagncgncnaaccccagctgnttcttaggactgccncttagccggagaaggcgttttcttgttcttcccggagcttctggtttgtctgagaaccttatccaggaatgcatggggattggagtgaggaagttcaacgtgaccaccggagtaaggaccggcttacatggaagctcttagctctgggaagaagaccgacattgttgatgtcatgtccgcaacaaaagcagccatgaaagctgtgatcgcagataagatccgtctctttggctctgccggaaaagcttgagttgttgataaaaaaatgtccgatcaattagttaagtacaattgtacatcacatccaaagaataaaaaaacaacaaatattacatcacatccaaagaagatgaatgcattgtatgcaatgcagatgcagtgttgttggaaataaagaaatcatttttagtactgtttaactgttttttttttctttttctcagtcaaatatataaatagaaactaaatgggc

SEQ ID NO: 90048 - DNA, 533 bp, Arabidopsis thaliana columbia
cagctctctacgactcactattgggaaagctggcacgcctgcaggtaccggtccggaattcccgggtcgacccacgcgtccgcacaagccaatggcgcaacttactaattccctcaattatctcttttctgtttctctcttattatttgtatcgttccactgcttatgttttcgtttttcgttggttgcagcttgttcaaactccactgacgatcaacagattcaacaccatcaccaccggaaatgggttggtccctcaggccacaaagtcatcaccgtctcacttaacggccacgctcagtttcgctccgtccaagacgctgtggattccataccaaagaacaataacaagagcatcacaatcaagattgctcccggattttacagagagaaagtggtggttccagctacaaaaccgtacataacgttcaaaggagctggtagggatgtgaccgctatagagtggcacgaccgtgcgtccgaccttggcgctaacggtcaacaggtacgtacctatcaaaccgcttccgtca

SEQ ID NO: 90049 - DNA, 1037 bp, Arabidopsis thaliana columbia
  unsure (1)..(1037): unsure at all n locations
nnnnnnnnnnnnnnnnnnnnnnnnnnnnnnnnnnnnnnnnnnnnnnnnnnnnnnnnnnnnnnnnnnnnnnnnnnnnnnnnnnnccacgcgtccgatttgaagatggatccatcactatgacaattatttttctgccaccttgacttgtacggcttatattccaaaaatttcttttattgttcacctctttttcttcaatccttcaatttctctcaccaaccctaatttccccaaatttggtaatacgatttcgtcaatttacttcgcaatcgattcaattcaattatgtctctattactggaagagatcattagatcagtagaggctttgctgaagctcagaaatcggaatcaggaaccctatgttgacccgaatctaaacccggttcttctagttccaggaatcgctggatcaattctaaacgccgttgatcatgagaacgggaacgaagaacgtgtttgggttaggatctttggtgctgatcatgagtttcgaacaaagatgtggtctcgatttgatccttcaactggtaaaacgatatctcttgatccaaaaacgagtattgttgttcctcaagacagagctgggctacatgcaattgatgtcttagaccctgatatgattgttggccgtgagtctgtgtactatttccatgagatgattgttgagatgatcggatggggatttgaagatgggaaaaccctttttggttttggttatgatttccgccaacgcaacagactgcaggaaacgttggaccagtttgctaaaaagttggaaactgtttataaagcctcaggagagaagaagattaatgttattagtcattctatgggaggactattggtgaaatgtttcatgggtctgcatagtgatatattcgagaagtatgtacagaattggattgctattnctgctccatttcgaggtgctcctggatatatcacatcgactttattgantggatgtccnttgtcaattggttnggacagaactttttcgntnctaagngngcatgcatcantncttattgagtg

SEQ ID NO: 90050 - DNA, 482 bp, Arabidopsis thaliana columbia
cccacgcgtccggcaatctgcatgtcaatctctgcaatgtcgttcatggtgtcagttggattcaacgcagctgccagtgtgagagttagtaacgaattaggtgctggaaatccaagatcagcagcattttcaaccgcggtaactacaggagtgtcatttttactgtcattgtttgaagccatcgtgatcctctcgtggcgacatgtcatcagttacatttttacggatagtccagcggttgcggaagccgtcgccgagctctctcctttcttagccattaccatagttctcaatggagttcaacctgttttatctggtgtggccgttggatgtggatggcaagcatatgtagcttacgttaacattggatgttattacattgtggggattccgattggttatgttcttggtttcacctatgatatgggagctaggggaatatggacagggatgattggtggcacactcatgcaaactattat

SEQ ID NO: 90051 - DNA, 426 bp, Arabidopsis thaliana columbia
gttactttctctgtctgaatttcttttttccaataataaattttacaaatgctgtgttcttgattggcttttttaatcctcactgagatttgtgcttgaatcttgattatcttggtgaagtatgttgtgttcaaccatatgagctctgatggtgattctggtaacaggaaattcatgaactttgtgattcattgcatcaagaatagaagactagaagggggaggttaattagattatcttaaggtgtataaaatggaaaaaaagagtgtaccaaattctgataagttgtctctgattagagtgttaagaggtataatatgtctgatggtgttagtttcaacagcttttatgatgttgatattctgggggttcttatcagctgtagtgttgaggcttttcagcattcgctatagccgtaaatgtgtt

SEQ ID NO: 90052 - DNA, 510 bp, Arabidopsis thaliana columbia
  unsure (1)..(510): unsure at all n locations
nnnnnnnnnnnnnnnnnnnnnnnnnnnnnnnnnnnnnnnnnnnnnnnnnnnnnnnnnnnnnnnnnnnnnnnnnnnnnnnnnnnccacgcgtccgctcagttccatggtgaagtatgttgtgttcaaccatatgagctctgatggtgattctgttatcttctctggtgataaggttccttgcgaggatcgagtattgctcattgcaaaccaccgaacagaagttgattggatgtacttctgggatcttgcactgcgtaaaggccagattgggaatatcaaatatgtgcttaagagtagtttgatgaaattacctctctttggttgggcgtttcacctctttgagtttattccagttgagaggagatgggaagtcgatgaagcaaacttgagacagatagtttcgagttttaaggatccccgagacgctttatggcttgctcttttccccgagggcacagattacacagaggctaaatgccaaaggagtaagaaatttgctgctgaaaatgg

SEQ ID NO: 90053 - DNA, 766 bp, Arabidopsis thaliana columbia
  unsure (1)..(766): unsure at all n locations
atacgtcagctcctatacgacttactttttgggaaggctgttcccccggcaggtcccggcccggatttccgggtcggaccaagccgtccgccaagcgttccgccaagccttccggagagccaccggaggggggaatttgtttcacttctgaaaaaaaaaaaaaaaaatattgtttgctcatcatcttcacaaaccaaacttctcttcttctccgatctcagatttgaatttttatcgattttgagcttcgaagagctcaatctctaactgaatttcgagaaattagagagtttgaaatgggagaggaagtacaaatgagcgattacgatgtttccggcgacggagatagggtttctgaatgggagatgggattaccaagcgacgaagatctagcatctctttcttactctctgattccaccgaatttggcgatggcgtttagtatcacaccggagagaagccgtacgattcaggatgtgaatcgtgcatcggagacgacgctctcgtcgctacgtggtggatcttcaggtccaaatacctcgtcgtcgaataataacgtggaggaggaagatcgagttggatctagcagtcctgggtccggattcgaagaagcaaaacggcatcaaaccgggtgactggggatgacggtggccggtgtggttccggattcggcgatggcggnggangaaggagattcaggaactgaagatctatctgggaaaacacttaaacgaccgcgtttagtgtggacaccgcagcttacaca

SEQ ID NO: 90054 - DNA, 513 bp, Arabidopsis thaliana columbia
  unsure (1)..(513): unsure at all n locations
nnnnnnnnnnnnnnnnnnnnnnnnnnnnnnnnnnnnnnnnnnnnnnnnnnnnnnnnnnnnnnnnnnnnnnnnnnnnnnnnnnnccacgcgtccgaattggccgtgggatttgcccgaggcttggaacgacaaattggtgttcgcggtggtgatgaagaatccgctgagatcaaaaaatgttttcgattttatcatcatcttcttcttcacaactcgtcaattcaactctcaatttccaaaattcgccgaaatctccgatcaccgttatgtcgaagacgtctaaattcaaaaccctgacggagaatttcaccgtgagagtgcttaaagcagagaatcgcgaactgaacgtggctctgctctcacctttcactatcgcttcttcacggcttgattctgtcagtaatgttgcgattcggattgagctcaacgatggatttgtgggttggggagaaactccgattttgccgtcggtnacggcggaagatcagataatgggtctggtaaaagcgcggg

SEQ ID NO: 90055 - DNA, 925 bp, Arabidopsis thaliana columbia
  unsure (1)..(925): unsure at all n locations
tatttggtggacgaagcaaacgttcaagtggtttccataaccggtatgggtggtctaggtaaaaccacacttgctaaacaggtttttaaccatgaggatgttaaacatcagtttgatgggctctcatgggtgtgtgtttcacaagattttacccgaatgaatgtatggcaaaagatcttgagggacctcaaacccaaagaggaagaaaagaaaatcatggagatgacacaagatacactccaaggtgaactaattcgattgttggaaacgtctaagtcattaattgtcctcgatgacatatgggaaaaagaagattgggaactaatcaagccaatatttccaccgaccaaaggttggaaagtgttgcttacttctcgaaatgagagtgtcgccatgcgtagaaatacatcatatatcaactttaaaccagaatgcctaaccactgaagacagttggacactttttcagaggatagcccttcctatgaaagatgcagctgaatttaagattgatgaggaaaaggaagagttgggtgagctaatgatcaaacactgtggagggttaccattggccatcagagtgttaggaggtatgttagctgaaaaatacacatcgcatgattggagaagattatctgagaatattggatctcatctcgtgggaggaagaactaactttaatgacgacaacaacaatacatgtaactatgtattgtctctaagctttgaagaattgccaagttatttgaagcattgtttcctctacttggcccattttccagatgattatgagataaacgtaaagaatttgtcatnnnnnnnnnnnnnnnnnnnnnnnnnnnnnnnnnnnnnnnnnnnnnnnnnnnnnnnnnnnnnnnnnnnnnnnnnnnnnnnnnnnnnnnnnnnnnnnnnnnnnnnnnnnnnnn

SEQ ID NO: 90056 - DNA, 637 bp, Arabidopsis thaliana columbia
  unsure (1)..(637): unsure at all n locations
actatatggaaagctggtacgcctgcaggtaccggtacggaattaccgggtcgaccacgcgtncgctgcagatcactacgcttatactaactttcatgagacacttggttctgagaaattttacagcaatggtagttcccgagataccgtagagatgagatttcatccggggcacgaagctaataatgtgaaggaagtatcagccacaagttggactggcaagagaaatccaagaattgttattgatcttgaagaacctcctcccacatgggtctcccatagagagactacagagcatgctcaggcttctgttagctatgttactgtgagaaatcctgacacaaaaccgtcgttctttgatcggatcagctcaaacattctgatggatgtagaccaatcactcgttgaggatgatagtgataagacaactagtaaggagtcaagtttactggatcttaatagcacaccggttgatgagtctgtttccgagcctcgttactctctcttacaagatctgaactgtgcatacatcgaggaggagacagtaacgagctacgagaagagtggaatagatgatggttctacaccgctttgctctcctcaatgccagaatgttcatgaaaaagactgcacatca

SEQ ID NO: 90057 - DNA, 530 bp, Arabidopsis thaliana columbia
  unsure (1)..(530): unsure at all n locations
tanccnactgctaaacccttaaaatncccgttgttggccggccgtcgggccttttgacctgcaaccancctttgccgatgttgagatcatgggaaaatccagtggttgcctaacgcaatttgttgggtggaaatcttcctatcggggagatggtccccgcgtccaggctgaggggggcctacaattccgaaactcggagtttacaattctcggagactcggttgcagttgaagacgaggttgtggtgaccagcagtattgttcttccaaacaagacactgaacgtcagtgttcaagacgagatcattttgtaactgaaaaacggaagttgaaaaatggaaccaacccagtggggagcagccacactatctccctctgattcaatatctactggagaaccacataagcaaatatttgggaactgattcacatgtatcatttatttacaccaagaattttccaacattgtatcaattccattttctatactcacaacacagctactgtaaaaggcactgaatttttgcccag

SEQ ID NO: 90058 - DNA, 680 bp, Arabidopsis thaliana columbia
  unsure (1)..(680): unsure at all n locations
angnccnttggtggntttcaacnccttgnaaantcccatgnaaggtgccacgtcnaaccttcaanccctttgnccnggcntcngctttgnnctgcatcaccttgcganttgggccatggaaatgcagtggtgctacccaattgtggggngaaatcttctatcgggaaatggtcccgtgtcccaggctgagggagtctccaattcgaaactcggagttacaattctcggagacctcggttgcagttgaaaaccaggttgtggtgaccagcagtattgttcttccaaacaagacactgaacgtcagtgttcaagacgagatcattttgtaactgaaaaacggaagttgaaaaatggaaccaacccagtggggagcagccacactatctccctctgattcaatatctactggagaaccacataagcaaatatttgggaactgattcacatgtatcatttatttacaccaagaattttccaacattgtatcaattccattttctatactcacaacacagctactgtaaaaggcactgaatttttgcccagaataataaagcacttgtgtagttttggcattgataaaaaagaaacatgaaaaaaagatccggacacggnnnnnnnnnnnnnnnnnnnnnnnnnnnnnnnnnnnnnnnnnnnnnnnnnnnnnnnnnnnntagcat

SEQ ID NO: 90059 - DNA, 520 bp, Arabidopsis thaliana columbia
  unsure (1)..(520): unsure at all n locations
nnnnnnnnnnnnnnnnnnnnnnnnnnnnnnnnnnnnnnnnnnnnnnnnnnnnnnnnnnnnnnnnnnnnnnnnnccacgcgtccgcccacgcgtccgctacattcgtcagtttcgcctctcggtttcttgaattctccaaggattcatgcttacacaagttcaagctttcagttgagagggatgatgttgatatgtgtacaatcatgccgtggatccaagacgctgttaatcgtagaatccaacatcttgaagtcgactgtcgcttcagttttcattttgaggcagtgtatctaaccctttacttaagtgagactttggtttcattgagacttcattttgtgacgctgcatcgttacgagtttgtatctttgccaaatctcaaggtgatgcatctagaagagaatatatattattgtcttgagactctggagaacttcatctcatcatgcccggttcttgaagatttaaccgttgttagaattgtagatattatcaccgagaagattttacgggtgcgctc

SEQ ID NO: 90060 - DNA, 448 bp, Arabidopsis thaliana columbia
  unsure (1)..(448): unsure at all n locations
cggaaaggaagggccgggccgagcgacccgtcaggatctgattttaactgaatggacactagcttagagtgagtaagcttcagagtgaggccgggcgtgaagccatcactactagcgacagggaaatccgaggcaaagaaacgtaactttgtcgagactattgagctccagatcggtctgaagaactatgaccctcaaaaggacaagcgtttcagtggatctgtcaagttaccacatatcccccgtcctaaaatgaagatctgcatgctcggagatgcccagcatgttgaagaggctgagaagatggggttggaaaacatgggatgttgagtctctaaaaaaagcttaacaaggaccaaggaactcgtgaagaggcttccaaggaaatttcccatgcttttttggggcccttttaagtctttccattaaaggcnnnttnccncggttt

SEQ ID NO: 90061 - DNA, 588 bp, Arabidopsis thaliana columbia
  unsure (1)..(588): unsure at all n locations
caacgactgcttcacttctagcttgattcttcttcttcgtttatatgtatactgtacattagattattgttgtttctcgagcttctgctatagattttgattcttttttttgttgtctttgtttcgtctccaggatcagatcttagctaaattgagacaagctcaaaatgagtaagcttcagagtgaggccgttcgtgaagccatcactactatcacagggaaatccgaggcaaagaaacgtaactttgtcgagactattgagctccagatcggtctgaagaactatgaccctcaaaaggacaagcgtttcagtggatctgtcaagttaccacatatcccccgtcctaaaatgaagatctgcatgctcggagatgcccagcatgttgaagaggctgaggaagatggggttggnaaacaatggatgttgagtctctaaaaaaagcttntcaaggacaaggaactcgtcaaggagnttttcaaagnaaattaccatgctttttttggccccttangcttgnnattaaagcagnttccncggnttntttgggncccggggtttanaaaggngggaanttccccnccctttt

SEQ ID NO: 90062 - DNA, 746 bp, Arabidopsis thaliana columbia
  unsure (1)..(746): unsure at all n locations
tcccaaagggaacntttcggggnttnaattccaatcccccnccaaatggannccnatnccgnaancccnccntttgaanggcttanaagttgggttggaaaccatgggttgttgggnccttaaaannnttacnaggaccaggaactcggtcaagaagcttgcaaggaattcccatgctttcttggcctctgagtctgncattaagcagatccctcgtcttcttggtcctggtcttaacaaggccaggaaaattcccaactcttgtgagccaccaggaatccttggagtcaaaggtgaatgaaacaaaggcaacagtgaagttccagctgaagaaggttctgtgcatgggagttgcagttggtaacctttcaatggaagagaagcagatctttcagaatgtgcagatgagcgtcaacttcctcgtctcgctattgaagaagaactggcaaaatgtcaggtgtttgtacctcaagagcacgatgggaccaccaccaaaggatcttctgagctttcacctacttaaaattggtggctataagacacttcttcttaccctttcgtttttgtttcagacatatctgttaaacagtgtaagagttgtgctgctactctcctctttaccttttggtttggataaattgaaataactgcagtgattttggttaatggattttgtagcttatattatctttgaattagatgtgcttatttcaaagacgaatcaatccaaaaaaaaaaaaaaaaaa

SEQ ID NO: 90063 - DNA, 594 bp, Arabidopsis thaliana columbia
  unsure (1)..(594): unsure at all n locations
cagctccctacgactcactatttggaaagctggtccgcctgcaggtaccggtccggaattcccgggtcgacccacgcgtgcgcgtcacttctcatttcgtcttcttcgtttcaggatcagagattcgtgacctgagaagacactcaatatgagtaagcttcagagtgaggctgttagagaagccataacgactatcaagggaaaatctgaggagaagaagcgtaactttgttgagacagtggagcttcagattggtctgaagaactatgacccacaaaaggataagcgtttcagtggatctgtgaagctcccacatattcctcgcccaaaaatgaagatctgtatgcttggagatgctcagcatgttgaggaggcagagaaaatgggacttagtaacatggatgttgaggctttgaaaaagcttaacaagaacaagaagcttgttaagaagcttgctaagtcttaccatgctttcttggcttctgagtctgtcattaagcagattcctcggcttcttggtcctgggcttaacaagggcaggaagttcccacccttttnggncccagggtcnttgagcaaggtggntgngcccag

SEQ ID NO: 90064 - DNA, 901 bp, Arabidopsis thaliana columbia
ttcctcgcgtccgccttcccacaggaagcaaatttgtttcagggagtaccaaaatgagtaagcttcagagtgaagccgtgagagaggcaataagctccattatcactcactgtaaggagacaaagccacgcaacttcactgagactattgaactccagattggtctcaagaactatgaccctcaaaaggacaagagatttagcggttctgtgaaattgcctcacgttcctaggccaaagatgaagatttgcatgcttggtgatgcccagcacgtcgaagaggctgagaagattggattggaatctatggatgttgaagctcttaagaagttgaacaagaacaagaaacttgttaagaagcttgctaagaaattccatgctttccttgcttctgaatctgtcattaagcagattcctcgtcttcttggtcctggtctcaacaaggcaggaaaattcccaactcttgttagccaccaagagtctttggaatccaaagtgaatgagacaaaggcaacagtgaagttccagctcaagaaggttctatgtatgggagttgctgtcggtaatctttccatggaggagaagcagatctttcaaaatgttcagatgagtgttaacttcctcgtttctctcttgaagaaaaactggcaaaatgtgaggtgcttgtacttgaagagcacaatgggtccaccaaaccgagttttctaaggttattattattacaaagtttctctaaggtatcatcactctttaggaaatttgattttcttttgctgtcatgagccttcttcttgttgggttaaacttcaaattccagtatcccgacttttgtaggatcaagattttttttaaagacaattttgtttcttttgttgctattattattagtggattttttctcc

SEQ ID NO: 90065 - DNA, 840 bp, Arabidopsis thaliana columbia
  unsure (1)..(840): unsure at all n locations
ggccgtgcctgccccccttccgtaacctggaattccggttcaaggttcgaatcgcggcaactggggtggttcgccgcccgcgacgtcgcgagaagtccactaaaccttatcatttagagaatggagaagacaaaatgcatttcaccttgaggagaaggagaagagagaaaaggaattgttgaagcaaattattgaggaagctgatcattacaaagaagagtttcataagaagattgaagtaacttgtgaaaacaacaaagcagctaacagagagaaggaaaagctgtatctggagaaccaagagaagttctccgcggaatccagcaagaattactggaaggcaatagcagagctagttcctaaagaagttccaacaatagagaaaaggagaggaaaaaaagagcaacaagatcctaagaagccaacagtctctgtgattcaaggtccaaagcccggtaagccaaccgatctaacaagaatgagacaaatattggtgaagctcaaacacaacccaccttctcacctgaagctcacttctcaacctccatcggaggaggcggctgctcctccaaagaatgttcccgaaaccaagcccactgaggcagttactgctgcttaaaaacctcctttgttttcttgttcgttgcttacatctgtgtgaattcagtctttgcatttcattatgtgttataaacagctgagagattttatggttcatgtgtgttattaacatagttatgtcaaaaaaaaaaaaaaagnnnnnnnnnnnnnnnnnnnnnnnnnnnnnnnnnnnnnnnnnnnnnnnnnnnnnnnnnnnnnnnnnnnnnnnnnnttgaatcg

SEQ ID NO: 90066 - DNA, 901 bp, Arabidopsis thaliana columbia
  unsure (1)..(901): unsure at all n locations
nnnnctagttctagatcgcgagcggccgcccttttttttttttttttttttttttttttttttgccataacctcgcgaacacttgaaaagacaagattcgcgagttcttcgttctgcctttttttttttttttgtgtgttcgagagatgtctgcctttgaagacgattccttcgtcatactcaacgatgatgcgtctgagtctgttccagtctcaggctcttttgacgccactgattctttctcagctttcgacggctcactccaagtcgaggactccgtcgacgatgtttttgcagcgccgtcttctgactacggtgcttactccaacggtgacggcatcttcggatccaacggggatcacgacggtcctatcttgccaccaccgtcggagatggaatcagatgagggatttgctcttagagaatggagaagacaaaatgcaattcaacttgaggagaaggagaagagagaaaaggaattgttgaagcaaattattgaggaagctgatcaatacaaagaagagtttcataagaagattgaagtaacttgtgaaaacaacaaagcagctaacagagagaaggaaaagctgtatctggagaaccaagagaagttctacgcgggatccagcaagatttacctggaagggcaatagcagagcttagttccctaaaggggttcccaccaattggggaaaagggggggggaaaaaaggggcaccaagntccctnangagnccaaaggcccntgggnttccaggggcccaaaccccgggtancccncccggtttttccannntggggccaaattttgggnggnncccaaaaaaacccccctttttccccgnggcccntttttaacccccccngggggggggggggnnccccccaaaatttcccngaa

SEQ ID NO: 90067 - DNA, 840 bp, Arabidopsis thaliana columbia
  unsure (1)..(840): unsure at all n locations
ctatggtgtggtcatgccgtctnagtggtgacgattgctgttaatccgttaacgaacgagacctcagcctgctaactagctacgtggaggcatcccttcacggccggcttcttagagggactatggccgtttaggccaaggaagtttgaggcaataacaggtctgtgatgcccttagatgttctgggccgcacgcgcgctacactgatgtattcaacgagttcacaccttggccgacaggcccgggtaatctttgaaatttcatcgtgatggggatagatcattgcaattgttggtcttcaacgaggaattcctagtaagcgcgagtcatcagctcgcgttgctacgtccctgccctttgtacacaccgcccgtcgctcctaccgattgaatgatccggtgaagtgttcggatcgcggcgacgtgggtggttcgccgcccgcgacgtcgcgagaagtccactaaaccttatcatttagaggcaggagaagagtgagatggttggtccttggaaagctaaggtctatgagatgaacaatgttgttgttagtgttaagtcaagaaaggttcctggttcattggctgtagaaggaggcgatgatgatatctgcgatgttttaacagatgaagagcaaaagcaactagaggatgctcttaagctggatttaccagacttcccaaatgtcaatggtgagaatggtttcattgttcatcatcaggaagatcatgttgaggccaacaagaaagcagagaagaaagggtggttaggaggttggagaaagaaagagactaaacaagagaagcagattcaatacgcgccaccgagaaactctctttgtgt

SEQ ID NO: 90068 - DNA, 863 bp, Arabidopsis thaliana columbia
  unsure (1)..(863): unsure at all n locations
gctcctgcacgtgccggtccggaattcccgggtccgacccacgcgtccgggagcttcagattggtctgaagaactatgacccacaaaaggataagcgtttcagtggatctgtgaagctcccacatattcctcgcccaaaaatgaagatctgtatgcttggagatgctcagcatgttgaggaggcagagaaaatgggacttagtaacatggatgttgaggctttgaaaaagcttaacaagaacaagaagcttgttaagaagcttgctaagtcttaccatgctttcttggcttctgagtctgtcattaagcagattcctcgtcttcttggtcctggtcttaacaaggcaggaaagttcccaacacttgtgagtcaccaagagtcattggaagcaaaggtgaatgagaccaaagcaacagtgaagttccagttgaagaaagttctgtgtatgggtgttgctgttggtaacctttccatggaagagaagcagctcttccagaatgtgcagatgagtgttaacttcctcgtctcgctcttgaagaagaattggcaaaacgtaaggtgtttgtacttgaagagcaccatgggaccaccacaaagaatcttttgagctctctcttcttatccttcttccatctcagaattttgcattctgtttttgtttcagagatctgtgcttgttgggatatggtttggatttatattagcagttgttttttgttgacaatatattatgcaatattcgttttaattatcaaaaaaaaacaaagaaaggannnnnnnnnnnnnnnnnnnnnnnnnnnnnnnnnnnnnnnnnnnnnnnnnnnnnnnnnnnnnnnnnnnnnnnnnnnnnnnnnnnnnnnnn

SEQ ID NO: 90069 - DNA, 1010 bp, Arabidopsis thaliana columbia
  unsure (1)..(1010): unsure at all n locations
nnnnnnnnnnnnnnnnnnnnnnnnnnnngtccgtccgcagcaccggtcctgtattccccattcaggatcagatcttagctaaattgagacaagctcaaaatgagtaagcttcagagtgaggccgttcgtgaagccatcactactatcacagggaaatccgaggcaaagaaacgtaactttgtcgagactattgagctccagatcggtctgaagaactatgaccctcaaaaggacaagcgtttcagtggatctgtcaagttaccacatatcccccgtcctaaaatgaagatctgcatgctcggagatgcccagcatgttgaagaggctgagaagatggggttggaaaacatggatgttgagtctctaaaaaagcttaacaagaacaagaaactcgtcaagaagcttgcaaagaaataccatgctttcttggcctctgagtctgtcattaagcagattcctcgtcttcttggtcctggtcttaacaaggcaggaaaattcccaactcttgtgagccaccaggaatccttggagtcaaaggtgaatgaaacaaaggcaacagtgaagttccagctgaagaaggttctgtgcatgggagttgcagttggtaacctttcaatggaagagaagcagatctttcagaatgtgcagatgagcgtcaacttcctcgtctcgctattgaagaagaactggcaaaatgtcaggtgtttgtacctcaagagcacaatgggaccaccacaaagaatcttctgagctttcacctacttaaaattggtggctataagacacttcttcttaccctttcgtttttgtttcagacatatctgttaaacagtgtaagagttgtgctgctactctcctctttagcttttggtttggataatttgaaataactgcagtgattttggttaatggataaaaaaaaaaaaagggcggccgctctagaggatccaagcttacgtacgcgtgcatgcgacgtcatagtacttctatagttcgtcctaaataaattc

SEQ ID NO: 90070 - DNA, 496 bp, Arabidopsis thaliana columbia
atcatgaattcctcagtacatgagctcacggataactatgaaagtcatgcgaagaagaacgtccagattcccaaacccgaccacaggttccttcaggaggacgttcggaatctactgagacaacctctgtcgactcagagcccatggcacacggactatacccgtatccagatccttacgacagaagcgtctttgcacagcaagcgtatcgtccacatccctatcctggggtccaattgcagttaatgggaatgcagcagccaggagttccattgcaatgtgatgcagtcgaggaacctgtttttgttaacgcaaagcaataccatggtatactcaggcgcaggcaatcccgggcaaaacttgaggcacgaaatagagccatcaaagcaaaaaagccatacatgcatgaatctcggcatttacatgcgataagacggccaagaggatgtggtggccggtttctcaatgccaagaaggaaaatggagaccacaagga

SEQ ID NO: 90071 - DNA, 462 bp, Arabidopsis thaliana columbia
gtgttcaaaagcatgtccaatcatttgaaagagcttaaggacaatgctgaagcagaatgcaatcgtgctcgtgaaaaggccgactacaaagccccgctaactccacagcaggagtcgttgagaatcattttcatcaaagaacagtatgacaccaagctgcaggaacttcaatatcaactgaccatgtccaagaagcatggtgaggaaattctgatgaaattacaagatgccattgatgagaatgaagcaaggaaaaaggcagaatccagccaattaaagagatctaaagagctggagggaaaaatattggaactggaggctgatcgacaatctgttatctatgataaacgtgagaaaaccacggcttatgacatgatgaaggcagagctggattgctcattattaagccttgagtgctgcaaagaagaaaaacagaagcttgaagctattctgcaacaatgc

SEQ ID NO: 90072 - DNA, 336 bp, Arabidopsis thaliana columbia
  unsure (1)..(336): unsure at all n locations
ttcatatatggcttatttttaaaagaagaagaacacaaaacagtagagagagaaagagatatagagatagagagagatagggctttgagattattctcttccacgcaaagaagaagatctaaagatgtcgtcatcatcatataacacaagcgttattccttcatcatcatcctctgctcagcctttcttcatcaccagctccggcaccggagataacgactttaaccggaaagatacttttatgtcaatgattcaacaacctaactcctcagctccaccacccaaggaacgangaaaccaacccgggaaacccaaatcctgatgcggaagtggtag

SEQ ID NO: 90073 - DNA, 477 bp, Arabidopsis thaliana columbia
taggtgcactatagaagagctatgacgtcgcacgcacgcgtacgtaagctcggaattcggctcgaggttctttctttgtctcagagttctagcgttctttattgacctttttcttctgggtttctgctctgcatctcaaagactaagaggctttagcagaaaccgaccagctgagaagatgtcctcatcgtacaacacaattgctttggcctccactccgaccttcctcctctcaagtgccgctgccggacccggaccaaacaactttaaccgtcaagaggctgcgatgaccatggttcaacaacaacccacttcctccgttgctccaccacccgagaagcgaaggagccaacccggaaacccaaatccagatgctgaagtgatagcgttatcgcccaagacgataatgggcgacgaacaggttcctatgtggaagtgtgcagcaaagggttccagagggaacagaatctggggctc

SEQ ID NO: 90074 - DNA, 688 bp, Arabidopsis thaliana columbia
  unsure (1)..(688): unsure at all n locations
tacgactcactatagggaagagctggcacgcctgcaggtaccggtccggaattcccgggtcgacccacgcgtccggtttctttctctagatctcagattattctcttccacgcaaagaagaagatctaaagatgtcgtcatcatcatataacacaagcgttattccttcatcatcatcctctgctcagcctttcttcatcaccagctccggcaccggagataacgactttaaccggaaagatacttttatgtcaatgattcaacaacctaactcctcagctccaccacccaagaaacgaagaaaccaacccggaaacccaaatcctgatgcggaagtggtagcattatctccaaagacactaatggctacaaacagattcatatgcgatgtatgtaacaaagggtttcaaagagaacaaaatctacagcttcaccgaagaggacacaatctcccatggaagctgaaacaaaaatcaaccaaagaagtgaagaggaaagtgtatctttgtccggagccaacgtgcgttcaccatgacccgtcacgtgctctcggagacctnaccggaatcaagaagcattattaccgtaaacatggcgnaaagnaagtggaaattttgagaaaatgttcttaagcgttncggcngtttcaaatcgggatttngaaagcggaccttttaggnnttttggg

SEQ ID NO: 90075 - DNA, 765 bp, Arabidopsis thaliana columbia
cgcagtaccggtccggaattcccgggtcgacccacgcgtccgacaaagcaagagagagagagagagatagggttttttgagctttagcaaaaaccgaccagctgagaagatgtcttcatcgtacaacacaattgctttgtcctccactccgaccttcctcctctcaagtgccgctgccggacccggaccaaacaactttaaccgtcaagaggctgcgatgaccatggttcaacaacaacccacttcctccgttgctccaccacccaagaagcgaaggaaccaacccggaaacccaaatccagatgctgaagtgatagcgttatcgccaaagacgctaatggcgacgaacaggttcctatgtgaagtgtgcaacaaaggggttccagagggaacagaatctgcagctctcacaggaggggacacaaccttccatggaagctgaaacaaaagtccaccaaagaggtgaggaggaaggtgtacctttgtccggagccctcgtgcgtccaccatgaccccgcacgtgctctcggagacctcaccggaatcaagaagcattactaccggaagcacggcgagaagaagtggaagtgtgcgataagtgctctaagcgttacgctgttcaatctgattggaaagctcactctaagacctgtggtaccaaagagtatcgatgtgactgtggtaccatcttctctaggagagacagttacatcacccacagggcattctgggatgcactcatccaggagtcagcaagaaaccccc

SEQ ID NO: 90076 - DNA, 771 bp, Arabidopsis thaliana columbia
  unsure (1)..(771): unsure at all n locations
cgcgcaagctctactactgacttactatagggaacagctggtacgcctgcaggtaccggtccggaattcccgggtcgacccacgcgtccgaaaaaactcaagagacaaaaaaaaaaggaaggcgcgtcagtgatggagaagattattgacgtagcttatggcgcatcagtgaaggtgggtttgacgttgttggagatgaatctgttgccggatattgtcattaggcggctcacacgtctgcttctggccggtcgtctccgttccggttacaaacccacggcggagatgcaactctccgatctcctccgttttgttgactctataaagaagatgcctatagctatccataccgagaagccaaagactcaacactatgaattaccgacagctttcttcgaacttgtccttggaagaaacatgaagtacagctcttgttacttctcaaacgattcaagtagcttagaagatgcaggggaagcaattttggctctttattgtgaaagagctaaagtggaagatggtcaaagtgttcttgatatcggatgtggctggggatccttgtctttgtacattgcacgcaagtacagcacatgcaagttaaccggtatctgcaactccaaaacgcagaaagcatttatcgatgagaaatgccggaaactcgggcttcagaatgtcgaaatcattnctgcggatattagcactttttgagcatgaagggacatacgatcggatattctccatcgaaatgttcgagcatatgaaaaactatgg

SEQ ID NO: 90077 - DNA, 584 bp, Arabidopsis thaliana columbia
acatgacagctcttgacgttacctgaaaatggggagacttcctgatgatattgagtatgacgttgatcttaaggtgacatttgcaaaccataggcttaagagagcgtatattgctctccaggcctggaaaaaggcggtgtattcagacccgtttaacaccacaggaaactggcatggccctcatgtgtgtggctatacgggtgtgttctgtgccccggctcttgatgatcctgacgtcgcggttgtggcgggggttgatttgaatggtgcggatatcgcagggcatttaccggctgaacttggtttgatgacagatgttgcgatgtttcatttgaattcaaaccggttctgtggtatcatacctaagagtttcgagaagttgagcctaatgcacgagtttgatgtcagcaacaaccggtttgtcggacctttcccttctgttgtcctctcgtggccggctgttaagttcattgacgtcagatacaatgatttcgaaggtcaagtccctcctgagcttttcaaaaaggatctcgacgccattttcctgaacaacaacagattcacgtctaccattcctgattccc

SEQ ID NO: 90078 - DNA, 454 bp, Arabidopsis thaliana columbia
  unsure (1)..(454): unsure at all n locations
ctttcgcttttcccacaggcgagtnagaagtttgcggttgcgattgtnatcgctgcaacgatgatggcattggtgccttggaacaatctgattttggtggtgtttcttgaactgttcacaagatactcaccaccacgaagagcaagcacggaacggttgatgcggcggcttaaagagtggtggtttagcattccggctgctccggtccttcttgaacagagcatagacgataacaagaaaaccaagtaaaaacatctgaaaaaaaactacgtcgggttttccgtcccacgagagtacgaaaaaaaacaggagaacagagcaatgtgtaattagttacgtctgtttgtatatttacatgtattcatgtatgttgttgggaagtgggtggtttgttccgtgggtaaaatcccattttggctgnattaaatggtnttggnggnaaaatncccntttt

SEQ ID NO: 90079 - DNA, 526 bp, Arabidopsis thaliana columbia
cagctctctacgactcacttagggaaagctgctacgcctgcaggtaccggtccggaattcccgggtcgacccacgcgtccgcccacgcgtgcgcccacgcgtccggaataaattcttctccttttcttttttgttgcaactagtgaaagagaaagagacgatcgcttattttcttcttctcctacactctgcgtttttgctctctttttactccgcattgctcctccgttactatcttcgccggcgaaaatttgttttctttttccctggaggtaaattcgaatcatgtcaaggcctgctccgcttccacctcgttgcccgattccaaagaaactttctttgagtccagttgcagatacattctactcttcttcctcacccattgaatcatacatgtggtcaatacaggtcttctactcaagattccaggctcgaagatcaacctgcttggcttgatgaggtgctctgggacaaaccgggtgggttgctcactagaggaggtcctctgcgccgctcagctagcgac

SEQ ID NO: 90080 - DNA, 461 bp, Arabidopsis thaliana columbia
tttgtgttgtgtctaaattcacaaagtcattttttgccttttgcgcaccgaacagaacaggcagtttaatgggttcgccggataagcaacatcgccgccacgtcgccgccgaatttctccatagcgcggtaacctcaatctcttcctcaatcattcctctcttccctcccaaaacggcgccgtctcgtgtatgcctcccacttagattctcggtatcagacgatgtctcgtcccctttcgaatcgacggtcaagagcacatcatccgcgtcctcctccggccttaattcaacggttaggatatcatctctcagctccgatgggaaacgcggtggacctgctttcgtcggtcaggtgtttagtatgtgtgaccttactgggactggtctaatggctgtttctactcacttcgatattcctttcatctccaagagaacacctgagtggctaaagaaaatgttt

SEQ ID NO: 90081 - DNA, 401 bp, Arabidopsis thaliana columbia
cccacgcgtccgcccacgcgtccgcccacgcgtccgcccacgcgtccgcggacgcgtgggtttgagtctcttggattctgaacgtgggatctggggatttgaatagttacacttttttgtttatgaaaaaacatacgatgaagtctggtgtgatcataaccattgctctgttattatacacaagctttcttcttgtttgtctggcgaaagagtgtacagacattcctacgaagctctcatcgcatactctccgcagcgagcttctgcaatcacagaacgcaaatttgaagtcagaggagttctctcattaccatttaactccaactgatgactctgcttggtctactttgttgccaaggaagatgttgaaagaagagactgatgattttgcttggactatg

SEQ ID NO: 90082 - DNA, 743 bp, Arabidopsis thaliana columbia
tctctttttctctcatgacgagtagtagtggaagcctcaaactagagatccacactgatgacaagacgccgggaaagtggagcgtaccgctcggcgatgatgttttccgaaggttcttgagcgggggaggaggctcggagaaggctgtgttcggtgaggggtctctttttagcccgtttttgttcgggaagtactttgatccgtcagacgcctttccgttgtgggaatttgaagctgaggttttgctggcgagccttaggagcttaggacagtgtagagtcgattggtctcagacggatcaagcttatgtccttaaatccgatatccccgtggtggggaaaaataacgtgcaggtgtacgtggacattaacggaagagtgatggagattagtggccaatggaacagcaacaagaaagcggcgaccaacagtgactggagaagcggccggtggtgggaacatggctatgtccgccgtctcgagcttcctagcgatgccgacgccaaatactctgaagctttcctctctaacaacgacgattagctctttcttagagatccgaatccctaagataaattctaagaacaagttttaatctgatcatgtcgccttgacgagttttaactttagattcttttcgtaattttgttttctttagttaactattattatagatatgaaaattctgtggtagagacccaatggatgaatgatatgttatatatacatactataaaatatatc

SEQ ID NO: 90083 - DNA, 632 bp, Arabidopsis thaliana columbia
  unsure (1)..(632): unsure at all n locations
tctgactcactatagggaaagctggtacgcctgcaggtaccggtccggaatatccgggtcgacccacgcgtccgaaagctttcatttttcaatctcatcagagagaaattaagctatggcgaagaagattggagtaacgatggaagttgggaacgatggtgttgctgtcatcaccatttctaaccctcctgttaactctttagccagtccaattatttctgggttgaaggagaagtttcgtgacgccaatcaaaggaatgatgttaaggccatcgtgttgatcgggaacaatggaagattttcgggtggttttgatatcaatgtctttcagcaagttcataagactggggatttatcgcttatgcctgaagtatctgttgagcttgtgtgtaacctgatggaagactccaggaagccggttgttgctgcagttgaaggattagctcttggtggtggtttggaacttgcaatggcgtgtcatgccagagttgctgctccgaaagctcaattaggcttaccagaactgactcttggagtgattcctagctntggaggaacccatcgtcttacatggttagtaagccttcgatatgcaacggatatgatactggtttctaagtcaatatcctcag

SEQ ID NO: 90084 - DNA, 509 bp, Arabidopsis thaliana columbia
  unsure (1)..(509): unsure at all n locations
catcactcttcaaggttttccaacaactctaacaggtcttggagatcgaaatatcggttagatgaagatgaagaagaagaagactatacttcagactccagtgactctgagtctgagccaaaccaagtttctcatagacaagcacttggcctgagtccctcaggtcccttaaaccttaaagatgtcaaacatgcgtatcgaacttgtgcattaaaatggcatccagatcgtcatcaaggctctaccaaggaggcggctgaagcaaagttcaagctctgcagtgtggcttatcaatctttatgtgaaaagctatctgtgaactaagagttagataggtcttgattacttagagatacctcattacaataatttccgaattgtttcattttggctttgttcaagcaaaaatgcctcggttctgtcttttaaaaattcccccaaatctactnctgatgtgtaatttnaaaanctcttcctcatgaacaaaaaaaaacaanaaagggcggccg

SEQ ID NO: 90085 - DNA, 546 bp, Arabidopsis thaliana columbia
  unsure (1)..(546): unsure at all n locations
cgactcactattgggaaagctgacacgcctgcaggtaccggtccggaattcccgggtcgacccacgcgtgcgtggaaactgcagcggcagagcttgagagactccaaattgaaatcctccacaaaatctccattcttgagagctcttttctcccacagaattcctctgctgctccgtcgccttctctaccggttgatgaaaacgaaactgtgactcgcctctccaccattctccagtccggcggcgttaacgacttctgcttcaagagagttgctaccgattactatgactggcctctcgaatctcgtcgcgacgttctcggcgcttcctcagtcgaccatctctgcaagagtattggtctggttaatactcaagctgcatcaaatattttggattgcagtgatccaaacaactcanaatactatggtgggtgtgggttcagtatactggctagattcaatgctgaagcagtgaagcaggtttttttattcactaaacgaggggcaagatccccaaggaaaagattaaattctgagacttgcttct

SEQ ID NO: 90086 - DNA, 670 bp, Arabidopsis thaliana columbia
ttatcggattagatggaacacaacctggagctccaccgcggtggcggccgctctagaactagtggatcccccgtttctgcttgaattcgcggccgcgaggcaacaagcatggacgcatcggctttgtctccgccgcgttcagcgattagacctctttactatgtacagagtccatcaaaccatgacgtggagaagatgtcatttgggtctggttgcagcctaatgggttcacctacacatccacattactaccattgctcaccaatccatcactcccgtgagtcatccacctctcgcttctctgaccgtgctctcctctcttacaagtccatccgtgaacgtcgccgatacatcaacgacggagacgacaaaactgaccgcggagatgacgacgacccgtttccgaatgtgcgactctacgtttgggtgctcctctccgtaatcttcttgttcacagtcttctctcttatactctggggtgctagcaaatcctaccctcccaaagttactgtaaaggggatgcttggtgagggacttggaccttgcagggctggggaacgatctttatcgggagtggccttccggccatggttgactttttaaaatacgcacggggcagggattattattttcccggtaacccccaatacaacctatttctttttgtccg

SEQ ID NO: 90087 - DNA, 802 bp, Arabidopsis thaliana columbia
atagaatgcatgcttctcgtttgaagctgctaaatgcatgcgggaaacaaaacttagaagccttaaaggtcctcgcttcttattgctttgatgaatctataaaggatacggctatgacaatcattggcacaacgacttttggatcctctcgtacactggaagaagctcaagatggaaacttggaagcatgttatgctaaatctggagaggggtcaattcagatggccgcgcgtccgcatatgctctacaacgacagcctctctgcacttggaatttgtgtagaaggagatcttaaacactttcataaggcgagatacatgcttgctcaaggtctgtacagaaggggtgggagcagtgatctgcaaagagcaaaggaagaactttccttttgtttcaaatcatcacggtcaagttctacgatcaatatgtgggagattgatggcatggttaaaaagggaaggcgaaaaactccacgtttggctgggaacaagaaggctcttgaagttaacctgccagaaagttcacggaaattcataacttgcattcgcaaatacttactgttctatttgagactattggacgaaactgaacatgtcaacacactagaacgagcctttaattctcttcgatcagataagaggttctctctatgcgttgaagaccttgtaccagttgcaataggaagatacgtaaaagcactggtttcctcgatgagtcgggttgagtctgcaggagcaataatcaaccctgatagccagctagagaaaatattctccctctttatagaacaaggaagcatatg

SEQ ID NO: 90088 - DNA, 797 bp, Arabidopsis thaliana columbia
gctctaatctgactcactatagggaaagctggtacgcctgcaggtaccggtccggaatatccgggtcgacccacgcgtccgtactttcacaaagccggagaagattatcggagatcgcaaactatggccggacgagatcgttatattccatcatcagcagtttcaacttcatcatcttcaagattattagaatctcaattaatcgaatccgatcgaaatcgagctcgatctgtaatcctcgaggatcgaatcgcaatccaacaccgtgaaatccaatctcttctcaacgacaatcaacgattagctgtagcacacatcggactcaaagaccagctcaatgtagctaagcgtgagctcgaacggttacttgaaaccgctgttaaagttaaagcggaaggagaagctaaagtgcgtgaggtttatcagaatgcgttgagaatggaggcggaggctcgtgtgattgatggacttggagctgagcttggtcaggttaggtctgatgtacagaggttaggtagtgatagacaggagttagctacggaattggctatgtttgatgatgagatggctaaggctaaaccgaattcggatcgagctattgaggctaaagtggagattgagattcttcgaggagagattcgtaaaggaaggtgaaaatttgaattctctttgttgtttttgttggaacattggatttgttatcttgtagtgtatactcatatgactggttttttggatgcttatgcagtagtaatgaatttgtttgaggtttaggatatgaaacagggctgctccga

SEQ ID NO: 90089 - DNA, 259 bp, Arabidopsis thaliana columbia
tctgacgcgtgggggagatttcagggtccatgagattttaagggtatagatcagagggtagctttagttctgccattgatttaattgaattattgattttgtgtgttttggtgaattcattttgcttaacacgatatgaccactgtagtgttgttttgtgtcctctgtagctgaatctctctgtttgtttaagggaataagcttttgttctttgatgatgttatagtggtacactcttatatgtgatgtttctagttct

SEQ ID NO: 90090 - DNA, 550 bp, Arabidopsis thaliana columbia
  unsure (1)..(550): unsure at all n locations
gctgtgtttcgctggaaagtctgagttccttgttgctgcatcccatattccaagacctgaactatctgtttggaatacatcaaagtnatctttatcatggtcatatgggttacgcatagaagctgtcacctctgcagtggattcgtcagcatttgcagtcttggctgtgatcccaaaaacttttaaaacagatgaatctaaggagaacatcttccgtggtagagatggtgccattcttttgtttaacggatcagatcccaagccggtatctatatggactgtgatgaaggctaggggaggatcaatctcatttttaggaaggagataagtctcagctttcgccttgcatatgtaaatggaagccatgaatatggttgtctttgatcccaatagtgatgagtcacatgagcgtagcgctggtttgactacgattggtcttcctggtctggaagaggcaggagaccgccgggtacacatccttttacgggcgggtaccccattatgccaggagggattgggggtttttagccgttggannccctttttttac

SEQ ID NO: 90091 - DNA, 412 bp, Arabidopsis thaliana columbia
ccaaaacatgcactaaatgttttaccgcagatcgaagaagggatcatcagtgtaaaaatttggcgtcgcattcacaaaactatttatcgaaatcccagaaacgaatttggaacatagtgcgttaatcattcgattggtctttgttattgaaaaatcgattctttgttctggtttggatctgagaaagtgtcgatatgagagttcgatctagagggtttaagagacaatgagtggaatgtcctttggacttgagagttatggcttactcaaaccttgagcttttgagtctgcattatcttcttcttgtttcttcacaatgctcacttctaattctaaagagaaggaaaggtctctctcctttttatgttgctggtacttaggtcggcgacgagttgctatgcttctacttctc

SEQ ID NO: 90092 - DNA, 499 bp, Arabidopsis thaliana columbia
  unsure (1)..(499): unsure at all n locations
nnnnnnnnnnnnnnnnnnnnnnnnnnnnnnnnnnnnnnnnnnnnnnnnnnnnnnnnnnnnnnnnnnnnnnnnnnccacgcgtccgattttctcgacgcgagctccggcaatgaaaagtttatcgatttctctaatccgtcggcttcatttccacaaaatcagaccaatcccactttcaatccaccttaatgctgcttcttcatcgtcttcgtcctcttctctgatctcgccagcacgcgaaatctccactagctgcagaagaaccaatgatctgatcaagcgtcagttctgggtcaatccatatcggaatttgaatacccatgtcgaggaacctccggagatttcgtcatctgataaagaaaaaatcgatctcgaagaagcgttcgagtcagcgaacaccactgatgaaatggtacgtttgttcaaggagatggagttatcattcgaagggaacgaattaggtttatctgctttgaaattagggctccatctcgatcgt

SEQ ID NO: 90093 - DNA, 1233 bp, Arabidopsis thaliana columbia
  unsure (1)..(1233): unsure at all n locations
nnnnnnnnnnnnnnnnnnnnnnnnnnnnnnnnnnnnnnnnnnnnnnnnnnnnnnnnnnnnnnnnnnnnnnnnnnnnnccacgcgtccgcaccaccaccacttctggtaacgcagtgtctctgattttcacttggttaaagacctctagcttcacggtcaaacatcataaaccttttgccgccgtcactaataggaattaactgatctcgtcaatggcggaggtggaggagattgcgcacgaggagcagaatatcgagaagagggagaagaagaaaggtaaacacgagaagccgaagccatgggatgatgacccaaacatcgaccgttggacaatcgagaagtttgatccggcatggaaccccactggtatgactgaaaccagcacgttctcaacactctttcctcaatacagagagaagtatcttcaggagtgttggcctagagttgaatctgctcttaaggagtacggtgtcgcctgcaagctcaacttggttgaaggttctatgactgtttcgacgacgaggaagacaagagatccatacatcattgtcaaagctagggatttgattaagcttctttccagaagtgtccctgctcctcaggcaattaagattctcgaagatgaggtgcaatgtgatatcatcaagatcggtaacttggttagaaataaggaaagatttgttaaaagaaggcagcggcttgtgggtcctaattcttctaccttgaaggcgctggaaatattaaccaactgttacattctagttcagggaagtactgtagccgctatgggtccatttaaaggtctcaaacagctcagaaggattgtggaagactgcgtacagaatataatgcatcctgtataccatataaagactctcatgatgaaaaaagaactggagaaggatccagctcttgcaaatgaaagctgggataggtttcttcccacattcaggaagaaaaatgttaagcaaaagaaacccaaaagcaaggagaagaagccatacacacctttcccacctcctcaaccacctagcaagattgatatgcagttggagtctggagaatacttcatgagtgataaaaagaagtcagagaaaaaatggcaggagaagcaagagaaacagtcagagaagagcacagagaacaaaaaaaaaaaaaaagnnnnnnnnnnnnnnnnnnnnnnnnnnnnnnnnnnnnnnnnnnnnnnnnnnnnnnnnnnnnnnnngtccacct

SEQ ID NO: 90094 - DNA, 661 bp, Arabidopsis thaliana columbia
  unsure (1)..(661): unsure at all n locations
nnnnnnnnnnnnnnnnnnnnnnnnnnnnnnnnnnnnnnnnnnnnnnnnnnnnnnnnnnnnnnnnnnnnnnccacgcgtccgcccacgcgtccgctctgtatctctctgtgtctctcttccccgttagtcttcgtcgtgacctttttgtagtattaagcaatgaagattaagacgttatcaagatcggttgatgaatacactcgagaaagaagtcaggatcttcagagggtctttcacaacttcgacccaagtcttcgacctatggagaaggccgtggaataccagagagctcttacagctgccaaattagaaaagatatttgcaaggccgtttgttggagcaatggatggtcatcgtgatggagtctcatgtatggcgaagaacccaaattacctcaaaggaatcttctctgcttctatggatggagatattcgcctttgggatatctcttcaaggcgtacagtttgccaattccctggtcatcaaggtgctgtgcgtggtcttactgcatcaaccgatggaaatgtattggttccatgcggaactgattgcactgttcgttaggggatgttcctcgtccttcacttgaagattctagcatttcatctgagaatttcattgaccctctgaacctatgcttgaagatgctttctggcctgtg

SEQ ID NO: 90095 - DNA, 618 bp, Arabidopsis thaliana columbia
  unsure (1)..(618): unsure at all n locations
nnnnnnnnnnnnnnnnnnnnnnnnnnnnnnnnnnnnnnnnnnnnnnnnnnnnnnnnnnnnnnnnnnnnnnnnnnnnnnnnnnccacgcgtccgaaaggagacagctttctctctctgtctctctctaaaagttctgggtttagaaagagatctttcttatatgttgaatttgtgatcagaggtgagagagatgggaggttgcgtgtcaacgcctaagagctgtgtaggaggtaaaataaggtcaagcaaaaggagaaagactcggacaagacgaaagattcagaagaagagagttgtttcttcttctcgcttatctgacggatctttcgataataatcccactttcagagcaagtgttgatgaagcatggtttgattccaatctcgcctttgaaaccgattgtgatgatgactttcatagtgttcaggaagatacgttgtcagtgaacggatgtgagcgtatctcagtatcgagtatgtcatctgttaaagactctaaccttggtggttccgctcggaattctctaagcgatgtcatctcacaatccaaatcagagagtgctttgattgacactaagcaggctgttttcttcgacgagatatcttcaaatgctgatgg

SEQ ID NO: 90096 - DNA, 1095 bp, Arabidopsis thaliana columbia
ggtaccggtccggaattcccgggtcgacccacgcgtccgggagcgaggacggccgccatggatccagcaggagcatcggtggccagcgcaatcggaggagaaggagagaaattcgcggtggggaatatttattcagtgaaggtgatcaccggagatgagttcagagggatcgtcatggcttacgaccccatccccaacttcgtcttttttgaagagggtacaaaacctagacctgggcatttgaagaacactcggatggtgaatgcgagttttattacagggctttcgtatttaggcaaaactgaagatccacttgattcagacaacttttctgttgatcttaatggtctccgagctaaagaggcacttgctatcaggcaagcggaagcagatgctgaaagaatgggagttggtgttaccgctgaggctcagagcatcttcgacgcgttgtctaagacgcttcctgtgcaatgggaaaactcagacattctggtgatgaaagaggtacgcgttcgtagcccgtatctttcagattgtgtctttggaggaactgatgctgccaacaaccgagtcaagaaagtgcttgagctggaaagacgaaggttgcaactctttggcacatgaggctagtgaaaagagtcggtcagtgaaatagcgagaaagggttcgttgctactaacccgaaaggcgtctatagatctgatcgaccagcgaaaagcggatatgtttgcttttcgcatgttgttgtctttacttagaatctgcttgtccttgtaaaagcagattagagatttcttgagttacagccttacagggattgaaatttggactaatttcaccctggttattgacaagaacagtgaggtcttgtcttgtccactttttaccagggcttggtttatttatcgcctggaactgtaaactattctgaaatgttgaactactttttagtgacttctccggtagatttttacatctcgtgtgctctagaactgagttccttgatcaatgcaaaagttataagaaataaaaaaaaaaaaaaagggcggccgctctagaggatccaagcttacgtacgcgtgcatgcgacgtcat

SEQ ID NO: 90097 - DNA, 518 bp, Arabidopsis thaliana columbia
cctaacatgcttcttcgtcagccgttgcagcctaagttacagcctaatagagagttgcgtgagagggtacacttgaagcctatgagtcctttggtggctgagcaggccaagaagaagagtcctcccgggagcccggttctccccgatcttgttcttggacgagcagaggattcggagaaagcaggagatgtgcaagtaagagactttctcggctgcatatcgtctgaatcagtgcagaacaataataacatcagtgttttgcaaaaggagaatcttgggaattcgttagacattgatttgtttaagaagctgttgaagggaatgaccgagaaagtttggtggcagaatgatgcagccgctgcggtggctgcaactgttagtcagtgcaagcccgggaatgggaaacgacgcggtgttttatcaaagggagatgtctggttacttttttcaggaccggatagagtggggaagagaaaaatggtgtcagctctgtcttctcttgtgtatgggacgaatcc

SEQ ID NO: 90098 - DNA, 582 bp, Arabidopsis thaliana columbia
tgttttcaccagagagactgctccggaaatttttgagagtgcaatcaagaaacagttgttgttgtttgtaaccaaaaatgaatctgaaaaggttcttacggaatttcaagaagcagcgaaatcattcaaaggaaagctcatctttgtatctgtggatctggataatgaggattatgggaagccagtcgctgaatactttggtgtgtctggaaatggtcctaaacttattggctacacagggaatgaagaccctaaaaaatactttttcgatggcgagatccagtcagataaaattaagatatttggggaggatttcctgaacgacaagttaaagcctttctataagtcagaccccattcctgaaaagaacgatgaagatgtgaaaatagtggttggagataactttgatgaaattgttctggacgattctaaagatgtgcttctcgaggtctacgcaccatggtgtggccattgccaagcccttgagccaatgtataacaaacttgccaagcatctacgaagtattgattctctcgtcataaccaagatggatggaacaaccaatgaacatcccaaggcaaa

SEQ ID NO: 90099 - DNA, 710 bp, Arabidopsis thaliana columbia
  unsure (1)..(710): unsure at all n locations
aaanggccnttttgcttccccccggcccttntggngggggtttntggggggnttgcccccccccccccaaggnggggccaggggtccngcttccccnccctttgtccctttgaaancnncccctggaggttggggtccacttccccaaggcnatcgggaaatccctcaaccgccagacntgntgcccatttcataaatcttacnccttancgtgtacacagaatttcttttccaggctgcagttcccaaagtttctacaacttccacctggatcccgctagccagcaattctcttccagctaacggaaacatcaaacaaactatgagagttacaaatagccaaaaggggaagaaacccattgtgatgcggatgagggtaggttacaagattaatggcaaagatgtgttggaggaaggacaaatcaacaatttcccacgtgggttatgagaacgtttcaggtattccaagattcatatacatattcctaatttatataatcacttcccatagactaaaacaaacttcttcatagaacctttgtatgtgtgattcgttggctttgtgtgaaatctgggtttaaagtgagataactttttgatggtctgagttacttatgagaatgtgtgacgtcaaatgtattcttcttgctgcttcaagttcttctctatcatttatatcattaataaaacgtttttgttttttccatagt

SEQ ID NO: 90100 - DNA, 897 bp, Arabidopsis thaliana columbia
agaccacgcgtccgttttttcctccaacttgcaaaatgttaaaccttaaaccttaaaccttagcttctctgttttgaaatctgtatcacggcccaagtatgaagcatcgtcttcgtcttcgtcttgttcgtccaaagccaaattacattctcacatggagcttccgtttccactccggcaagaccacaccatcgccgttggacccttacgacactctgcagcgtcgggtcgcgagatccggagatccctctgcttcgattatcaaagtgttggatggatggcttgatcaagggaatctggttaagacttcggagctccatagcatcatcaagatgcttcgaaagttcagccgtgtctctcacgctctccagatatcagattggatgagtgagcatagagttcatgagatctctgaaggagatgttgcgattcggcttgatttgattgctaaagttggtggtttgggagaagcagagaagtttttcgaaactattcctatggagaggaggaactaccatctctacggtgctctcttgaactgctatgcgagcaagaaggtgttgcacaaagctgagcaagtgtttcaggagatgaaagagctgggcttccttaaaggttgtcttccctacaatgtgatgctgaatctctatgtccggactgggaaatacacaatggttgagaagctgctgcgcgaaatggaggatgagactgtgaagccagacatcttcacagtgaacacgcggttgcatgcttattcggttgtatctgatgtagaggggatgagaaagctttctatgcgttgtgaggctgaccaggggcttcatttggactggcgcacttacgccgatacagcgaatggctacataaaggctggattaactgaaaaggctctagaga

SEQ ID NO: 90101 - DNA, 869 bp, Arabidopsis thaliana columbia
  unsure (1)..(869): unsure at all n locations
agaaaagaaattgagaagaaaaaagaaaaaaaggtgaccgtattctccgtcgattgtagccgcccgaagaaatatcttctcctctctcgtttaaccacgaatttgctctgatattagtgtttctctagccatggcgaacgcggcatctggaatggctgtgcatgatgattgcaagctgagatttctggaactgaaggctaaaaggacacaccgtttcatagtttacaagattgaggagaagcagaagcaagttgttgttgagaaagttggtcaaccgatccaaacttacgaggagtttgcagcatgtcttccagctgatgaatgccgttacgccatttacgattttgactttgtaactgctgagaattgccagaagagcaagatcttcttcatcgcgtggtgtccggatattgctaaggtgagaagcaagatgatctacgcgagctccaaggacaggttcaagagggaactagatgggattcaagtagagctacaggcaactgatccaacagagatggatctcgatgttttcagaagccgtgccaactaaagagtaaaaaccaaagtttattatcatcatccccttgaaagatctattctcttattctgttatttttgagtgatggtactggtacttgattatgtttttacattgtgttgtgaagttatgaacctataaacaacttcattctatcggtgtttcggtcttgtgttcgatgttgtctttggttttaaaatggtgtgtaaggaccccaaatcgtctattgaagatgaacccttttaggtaaaaaaaaaaaaaaaaaaaaanaaagggcggccgctctagaggatccaagcttacgtacgcgtgcatgcgacgtcatagctct

SEQ ID NO: 90102 - DNA, 518 bp, Arabidopsis thaliana columbia
  unsure (1)..(518): unsure at all n locations
actcctanatgggaagctggtacgcctgcaggtaccggtccgngattcccgggtcgacccacgcgtgcgtagagatatcgtttatctctcaagagactctcatcaactaaagctaattatttaatgtttgtttggtgatatggctgatcagcagcgaggccacaacacctcagattctcgccggaaatctctagccggaaaaagaacctcacagcaaactccgtcgtccccacttagttccggcggagtatccatggcagctgcaacgacggggacagggacggcttcgccttgtggggcttgcaagttcttgagaaggaagtgtgtgagtggatgcattttcgctccacattttgggtcagaccaaggagcggctaggttcgcggcggttcataaggttttcggagccagcaacgtgtcgaaactgttgcatcatattccggtgaaccgtcgtcatgatgcnnnnnnnnnnnnnnnnnnnnnnnnnnnnnnnnnnnnnnnnnnnnnnnnnnnnnnnn

SEQ ID NO: 90103 - DNA, 548 bp, Arabidopsis thaliana columbia
ggtctctacgactcactatagggaaagctgacacgcctgcaggtaccggtccggaattcccgggtctgacccacgcgtgcgcatagctctgtctcggttaaagcatttgatgatgatacatttgatttctataccggtgacatatttgctgctacttatgctatttcgtcgagtgaaggcgaagagagcgatggggattatgctttgaatgtggttaccgaaactactgctcagaagctaggagagtttccaagaggtcgcaaaaagcacagaatcagatatgggattaatttgggggcttcttgcttttttgtcactggctgcttctactgatggactcttttgcttggaagattgttagactacctttgcctccatatttcttaagcatgcccctcttcacatgcggcgattctaggtaccttagctgggtatatttttggtccggttctagacagactgaaagggcatgaaccaataaggactttggggccagttccacataaccgaaaccaaacaatcccgacattgggggggttggtctttcg

SEQ ID NO: 90104 - DNA, 754 bp, Arabidopsis thaliana columbia
  unsure (1)..(754): unsure at all n locations
aagcataagaaagtgtgccatgtagcagcagaagctttaaactccgatgtctgggcatggcgaaagtacggacagaaacccatcaaaggttcaccatatccaagaggatactacagatgtagtacatcaaaaggttgtttagcccgtaaacaagtggagcgaaatagatccgacccgaagatgtttatcgtcacttacacggcggagcataatcatccagctcctacacaccgtaattctctcgccggaagcactccgtcagaaacccatccggtccaccagacgagtaaatctccggcgacccacctattgctacttacttcatcgtctccggtgacttccacgccgacgaagttgtttttgcctgttgaggatcatctagcggtgggagatcttgtcggagaagaagatctgttatctttgtcggatacggtggttagcgatgatttcttcgatgggttagaggaattcncagccggagatagcttttccgggaactcggctccgccgagttttgatctctcttgggttgtgaacagtgcccccactaccaccggaggaatatgattagattacgncggcttagaatactcttattaggacagatttataggattaaggaattattctcggagcatatgtaagaataggataanagaagatgttctttgttactttttttcgggtttncttcctaatgtntctanacatcttagaaaaaatttaattgtatattccttaagctcgatacatt

SEQ ID NO: 90105 - DNA, 674 bp, Arabidopsis thaliana columbia
  unsure (1)..(674): unsure at all n locations
atgttcttcnnnnnnnnnnnnnnnnnnnnnnnnnnnnnnnnnnnnnnnnnnnnnnnnnnnnnnnnnnnnnnnnnnnnnnccacgcgtgcgctcattgcctcgccgagagagaaggagacgccatggaaaggcttcttcaaccatcttcttcttcttcctcaatttctccttccaaattcccttcacggacttctcctttccttccccgtctccgctcatcgggtctgagctttgtctcgactcaccggcccgagtcacgccgagtcagctcaatttcctgcaacagttcccagattccgtcactgtatacgcctataggatctaacacaactaacaattccttcaatgggtctcccaaatcggatgaatcgaaacctaatcccggatttctcacacggatcgcgacgtcggcttctgagcagcgaaagacgttatctactggaaccgttatactaatctctgcagtagctgtgcttttgcttaacccgcttcttgcaccacctgctttcgctagctttcaaactgcagctaaatcacggttggctaacatagtgcgtggactcggtttccttgctaggttgcttgcacacgctctcaggacctgatcacctcgctgctatagctccgctntcgatcggacgcagcanaatggaaagtgctgctgctggagctct

SEQ ID NO: 90106 - DNA, 741 bp, Arabidopsis thaliana columbia
atttaccggtccgcaattcccgggtcgacccacgcgtccgaatgggtctaccaaagcggatgaatcgaaacctaatcccggattttttactcggatcgcgacgtcggcttctgagcagcgaaagacgttatctactggaaccgttatactaatctttgcagtagctgtgcttttccttaacccgcttcttgcaccacctgctttcgctagctttcaaactgcagctaaatccggttggctaacaagtgcggggaccggtttccttgctgggttgcttgcacacgctctcaggacctgatcacactcgctgctttagctccgctttcgatcggacgcatcaaaatggaaagtgctgctgttggagctctctggggatgtgggcatgatgctggtcatgtcttgtttggtttactgattatggtacttaaagaccggctacacattgaagcattacaaacttgggggacaagaattgggggattgactcttggtattatcggtgcctatgggaattaaggaagcttctgtgattccacaaccttgtgtcgctttaaaaaccgacatcaggctggtgtcaacagagaaggaaaccctaccactggccaaaaaagaagaatatcgggtttgtttcatttgcaactggagtgggtcacgggtcgcaaccgggtgctccgatgaatgctttgcccggattagctcttccatacggttagcagggtctgcgcttctgataatgtttct

SEQ ID NO: 90107 - DNA, 731 bp, Arabidopsis thaliana columbia
gcaacaatggccaaaagctctttcttcaacaagcatttgcttctctctcttctcattcttctccaaagctggctactctcttcttcttcaagtaccgattcagaaactctcttgaacttcaaactcaccgcagattccaccggaaaactaaactcatggaacacaacaacaaacccatgccaatggaccggagtctcctgcaaccgcaacagagtcacacgactcgtactcgaagacatcaatctcaccgggtcaatctcatcactaacctcactcacatcactcagagttctcagtctgaaacataacaatctctctggtccaatcccaaacctctcgaacctctcagctttaaagcttctctttttatcaaacaaccaattctccggtaacttccccacttcaatcacttcactcactcgtctctaccgtcttgatctctctttcaacaacttctccggccagattccaccggatttaaccgatttaacccatcttctcactctccggttagaatcaaaccggttctccggtcaaataccgaacatcaacctctccgatttacaagacttcaacgtctccgtgaacaactttaacggtcagaaaccaaattcattgtctcaattccctgaatcaggtcttacactaaacccattcttttgtggcgcttcaatgctggaatgctctaaactttctattagtcccctcttaaccggtttgctcttttaagt

SEQ ID NO: 90108 - DNA, 498 bp, Arabidopsis thaliana columbia
  unsure (1)..(498): unsure at all n locations
cnnnnnnnnnnnnnnnnnnnnnnnnnnnnnnnnnnnnnnnnnnnnnnnnnnnnnnnnnnnnnnnnnnnnnccacgcgtccgagcattttctattttcttctgtgcctcaaaaaatcataattttctcggaaaattaaaaatcatgtttaagattttctcgagaaagtaaaaaaaggaagaagaagaagaagaaaccatgggaagagctttcgtgtatgtaattctcggaggaggtgttgctgctggttacgcagctctcgaattcacccgtcgaggtgtctccgatggcgaactctgtatcatttccgaagaacccgttgcaccgtatgagaggcctgccttaagcaaaggttttctgctgccagaagctcctgcacggcttccttctttccacacttgtgttggagctaatgatgagaagcttacaccgaaatggtacaaggatcatggaattgaattggtacttggaactcgtgttaagtccgttgatgtgaggag

SEQ ID NO: 90109 - DNA, 463 bp, Arabidopsis thaliana columbia
atcaattttcaataaactaaatttgtgggggaaaatccccaattcacttgcagcttttgtaatttctctaatttgggtcggagactcgtaagcggcggtggaattcaagtcgccaccggttccgatcaaagtcttccgttatacgcaaaccctaattcctcactacacgactctttttgatctgaatcgagagatggtacaggaggagaaagctatggaagcaataaatgacgctttgagagctttgcggaagcgtcatcttctggaagaaggagctcatgctcctgcgatttctgctctctctaagcctttaatctctcagggttcagaatggaaggagaaaacagaaaagctggaaacagagttacagcaatgttacaaagctcaatctcgactatctgaacaactggtgatagaagtagctgaatccagaactttaaaggctaatttacaagagaaggag

SEQ ID NO: 90110 - DNA, 424 bp, Arabidopsis thaliana columbia
cgtacaacacgggtatctaaccgctctcattcatggtgacatagattccttgttaggtgtgcatttgatgtttctctcgctcttcgccggtatttaaccaaaaatggcatctacagtcaagcatgtggactaaacaatgagcatgatgtcatggggccatgacgactacatgtacatggaatttacactcaaggatgtggattaaacaatatagttaagcaaagttcattttgacttgatcttcatcacgtcaacatgaactttgattttactgtataacttgtatttactgtaataacaacaatatataacaattagaggttgtagatattatgatcaattacttaatcatgtcttgatcctaataactacggtctctgaattgctgtatattattattattacagcaagtacaagttatacc

SEQ ID NO: 90111 - DNA, 724 bp, Arabidopsis thaliana columbia
actatagggcttagctggtgctcctgcaagcaccctgctccttccttgtccggtcttcccgggtcgtcccacgcgtgcgcaaggtgaaagattcgtttgctatgctcaagaacacaatcaagtggagaaaggagttcaagatcgatgaattggtcgaggaagatcttgtggatgatcttgacaaggttgtgtttatgcatggacatgaccgagaaggtcaccctgtttgttacaatgtctatggtgagtttcagaacaaggagctttataataagacgttttctgatgaggaaaagaggaaacatttcttgaggactaggattcagttcttggagaggagtataaggaagctagattttagctctggtggggtttctactatttttcaggttaatgatatgaagaattctccggggttagggaagaaagagcttagatcagctactaagcaagctgttgagttgcttcaggacaattacccctgagtttgtcttcaaacaggcttttatcaatgttccttggtggtcccttgtgttttatactgtgattggtccgttcatgacaccaagatcaaagagcaagcttgtgtctgctggtccttcgcgttcagctgaaacccttttccaatacatatcacccgagcatgttccagtacaatatggtggattgagtggtgatccttgcgactgccatccagactttttgtttggaagattcaagcctt

SEQ ID NO: 90112 - DNA, 751 bp, Arabidopsis thaliana columbia
  unsure (1)..(751): unsure at all n locations
cagctctctacgactcactattgnggaaagctggcacgcctgcaggtaccggtccggaattcccgggtctacccancgcgtgcgagagcgagagaaagagcatcgttttgagcaaatgagtaggaacatggaagttaacgcaggcagttccggcgaaattccgtctccaataaggaaccgatttcagaaaagtgggagtcaagcggtgtacgaggtgacagagacgaagaaatcttgcgtgacgagagtcgacatgcctggttgtcccgagtcagatctcacctactgggtcgacgccaacaacgtccacttcttcgccgacgaaccagcaatgcctgagtacgaaaacgccggacgcaaatacggaggctccatgattttcaaccctgaggcttacgacgtcaagaaaactaaagtgaagcttatcaacggagtgctctggatcaccgtccctaagatcccaggcaaaaacgcttccattaatgtcaaggagaggatcctccattactgatttaacaacaccttggtttgtgtctcgtaatggtacttgtgtctagcgtctctatctatctatgaactttgatgcagctactgctttatgtttatcattttgtggtttagttaagaacgatcttgcttctatatgtcgtgatctcaataaagaaaaagttgtcccccaaaaccacaaaaatgggcaggccgcttctagannggatnccaagctnntacgtacgggcgtgcgatgcgacgt

SEQ ID NO: 90113 - DNA, 545 bp, Arabidopsis thaliana columbia
gtaaggcttgaggaggtgtgcatcatccgtctatcaataccctgacaaggaaaaccctaattttttttggcccaaagggttttatactttaatctcatactccgattcattgtcgaaaaacgatgatgcataattcaaccgaagaatcggaatgggaggtgagacctggtggtatgctcgtccaacgaagagacgacgccgcttcctccgaccacaaacctctccaggatcccgactctgcttccgccgcttttgctcaaaccatcagaatcactgtttctcatggctcatcgcaccacgatcttcatatttctgctcacgccactttcggggatgtaaagaaagctctttgttcagaaaacctgggattggaagctaagtgaatttcgaagggtatcttgttcaagaggagttgagggggatgatgctgaacaattgcaagctgctggtgttaaggatgcgtctaagcttgttgttgttgttgaggatacgaataagagagtggaacaacagcctcctgtggtaactaaagagatggaaaaagc

SEQ ID NO: 90114 - DNA, 429 bp, Arabidopsis thaliana columbia
ccccaaagcataattatatataacaataaacaattagtaccaaaacacataaaaaatctataactgttatctcaaccaaaaattgtttattgttatgcgaggggttaaactcttggccgcgtgcctctacctggccgctgccgcaacggtggtagtccgagccgaagatccttacttccatcacgtatggaacgtgacctacggaaccgtgtctcctctcggtgttccacaacaagtcattctcatcaacggacaattccctggtcccaacgtcaactcaacctccaacaacaacgtcatcattaatgtcttcaacaacctcgacgaacctttcctcctcacatggaatgggatccaacacaggaagaactgttggcaagatgggactccaggaactatgtgtccgatcatgcccggcaccaactacac

SEQ ID NO: 90115 - DNA, 500 bp, Arabidopsis thaliana columbia
gccaaacctctctcagattcttcttcttcctcgcagatcgatttttttttgaagctaaatctcaaaaatggagaacgacgcaggtcaggtcacagagctctacattccaaggaaatgctcggcaacaaacagaatgatcacatcaaaggatcatgcttcagttcagcttaacattggtcatcttgatgctaatggtctctacactggccaattcaccacttttgctctctgcggatttgtccgtgctcagggagacgcagacagtggcgtggacaggctctggcagaagaagaaggtcgaagctaaacaacagtgagagacaatctgacaatgtcataagctcttgtttgttttttgaggtttcgatttattagctatgtggctttgtcattgaattgaaaatgttagtttctctttatgcgaattcatgttttcgatttttctgctttattaaagataattattaggctttgaggccaatggaatcagattctatctac

SEQ ID NO: 90116 - DNA, 1077 bp, Arabidopsis thaliana columbia
  unsure (1)..(1077): unsure at all n locations
gaggcagctgagaaagaagtaatagttgtagctgcggtggcagcggaagaggaggagaagaagaggaagaaaccggttttgggagaagaccacactataatggaagcagtgttgaccgttgacttttgggtgctttttgtgtccttcttgtgtggtgtaggaactggtttagctgtgatgaacaatatgggtcagataggtcttgcccttggatacacaaatgtctcaatctttgtctccatgactagtatttggggattcttcggtcgcattctctccggttctctctccgaatactttctcaagaaagctggaacaccaagaccactatggaatgcagcctctcaaatccttatggccgtaggatatatactaatggctttagccgtgcctaattcactctacatcggttcaatggtggttggagtatgttacggtgtccgtctagccataactgtaccaacagcttccgaactctttggtctcaaatactacggtctcatctacaacatcttagtacttaacttgccacttggctcgtttctcttctcgggtctcctcgctggcttcctctacgatgcagaggcaacaccaactcctggtgggggcaacacgtgcgtaggagctcattgctaccgtctcatcttcatagtcatggcattagcttctgttatcggagtcggtttggatcttgtgttggcttataggacttaaggagatttacgctaagattcgacgctagcaagaagtcaaagaaatctggtggtagccttagttaagacactgtatatctagttccggtgcacccacattgttttcagatgctgattttgtatacatgatacaatatcggattcaagatattgttgaacaaaatttcaagtaccagagatcattgttgtagtagcatcgcccaatgtatttttttgtctttccgagatttgttcaaaattatataaatgtatgacattttgatagtccaattccaaaaaaaaaaaaaagaaaaaannnnnnnnnnnnnnnnnnnnnnnnnnnnnnnnnnnnnnnnnnnnnnnnnnnnnnnnnnnncgtcctaaa

SEQ ID NO: 90117 - DNA, 795 bp, Arabidopsis thaliana columbia
  unsure (1)..(795): unsure at all n locations
gcgnnnnnnnnnnnnnnnnnnnnnnnnnnnnnnnnnnnnnnnnnnnnnnnnnnnnnnnnnnnnnnnnnnnnnnnccacgcgtccgtatcaccatcaacacatgcccatcaatgccatttcccagcaatctttaactttggtgactctaactccgataccggcggtctctccgctgcttttggccaagctggtcctcctcacggctcttccttcttcggctcacccgcgggacgatactgcgatggtcgcctcgtcattgacttcatagcggagagtcttggattaccatatctaagcgcgtttctagactccgttggttcaaacttcagccacggcgctaacttcgctaccgcgggatctccgataagagctcttaactctactctacgtcaaagtggattcagcccattttcactcgatgtacagttcgtacaattctataacttccacaacagatctcaaactgttcgtagtcgtggaggagtctacaagacaatggtgcctgaatccgacagcttctcaaaagctttgtacacttttgacattggtcagaacgatctcacagcaggttacttcgctaataaaccgtagaacaagtgaaaccgaagtcctgagatcataagcattcatgaatgcttcaagatatttatggacaagagggagaacttctggattcatacactggacctattggttgttagcttatggattgaacggttccgataaagcataaatttgatcacatggatgggttctccttgaacactagctcacattcatcacgcttgaacagct

SEQ ID NO: 90118 - DNA, 563 bp, Arabidopsis thaliana columbia
  unsure (1)..(563): unsure at all n locations
tgatacttcagctctcnnnnnnnnnnnnnnnnnnnnnnnnnnnnnnnnnnnnnnnnnnnnnnnnnnnnnnnnnnnnnnnccacgcgtgcgtctaaaactactggcattatgagacaggataattcgtttgaaaagagctctagtaaatggaaaatgaaagttggaaaaggaccattggacctcagtagcgaaagtccttcaagtaaacaaatgcatgaagatggaggctcgagtttcaaagctatgtctagccaccttcaagataacagagaacctgaggcgcctaacactcacttgaaaactttagatacaaatgaagcttctgttaaaatttctgaagagctaatgcacgtggaacatagttcaaagaggcatagaggaactaaagatgatgggacactagttagggatgatcggaatgtgctgaggcgttcagagggctcagctttctcaaggtactttcttagaatcaaacctctgttttttcttccgtacacaaccttttgaatgccttattgaagaactatgagatcgactgttggacttgtgcaggtataatccag

SEQ ID NO: 90119 - DNA, 763 bp, Arabidopsis thaliana columbia
aatcatgatgacaggaaaatggaatgagaaaatgagctaccaaccttgtgatgccgaaggggaaccccttccaggaacagagctgaaagaggtgtggcatttggctgatgtccccaaaaacgacaactttcagtacactcactttgctcacaagataaacagcttcgacacagcgcctgctaagctcttggcttcagactcacgtatccgtcctgatagatattcccttgagcagggtgacctttctaaagctggttccgagaaacacagccttgaggagagacaaagggccgaaaagaggaccagagagacaaagggacaaaagttcactccaagatggttcgatctaacggatgagatcacacctactccatggggagatattgaagtataccaatacaacgggaagtacaatgaacaccgagacacggcagagagctcaagtagtgcctccaacgaaacggacctcaaatcgatcgagtttaatccttggcaatatggtaatatctcaaccgaatgaagtaactcttatagtttaatttgttatctctatatacgaatgctgtgattcatgttcacttgaaagtgagtcccatgttgtttttaactttgtttcagactgaaaaatctgattatgtagtttgagtgataaaacataagttttgtgctaaaaaaaaaaaaaaaaaaagaaaaaaagggcggccgctctagaggatccaagcttacgtacgcgtgcatgcgacgtcatagactcttctatagg

SEQ ID NO: 90120 - DNA, 651 bp, Arabidopsis thaliana columbia
  unsure (1)..(651): unsure at all n locations
ttttctctctataaattaaaaacattacttactctttctctcttccacttaactcatatcaaccttcgccggaaataatggcggtcccgcgatttctttctctcctcgccgtcgtcactctctctcttttcctcaccaccactgatgcttcctctcgctctctatccactccacctaaaacgaacgtactcgacgtcgtttcatctctccagcaaacacaaactatcctctcactcgacccgactcgttcctcactcaccaccaccaaacccgaatccctatccgacccggttttcttcaattcatcttcaccactatctctagagcttcactctcgagacactttcgtcgcgtcacagcacaaagactacaaaagcttaacactcagtcgactcgagcgcgactcatcccgagtcgccggaatcgtcgcgaagatccgtttcgccgtcgaaggagtcgatagatcccgatcttnaaaccggtttanaacggaggnttacacggttaccaaaccgggggttctaacggnacctgttnggtttccggggcctttnaagggaaggggggggggttttttnaaggaaatcggttttggganctnccgcggaaaagnnatttnnctttggtttttggaaaacgggaaggggnggg

SEQ ID NO: 90121 - DNA, 1882 bp, Arabidopsis thaliana columbia
  unsure (1)..(1882): unsure at all n locations
taatacgacttacttagggaaagctggtacgcctgcaggtaccggtccggaattcccgggtcgaccccggcgcacgcttcgccggaaataatggctttcccgcgatttctttctctcctcgccgtcgtcactctctctcttttcctcaccaccactgatgcttcctctcgctctctatccactccacctaaaacgaacgtactcgacgtcgtttcatctctccagcaaacacaaactatcctctcactcgacccgactcgttcctcactcaccaccaccaaacccgaatccctatccgacccggttttcttcaattcatcttcaccactatctctagagcttcactctcgagacactttcgtcgcgtcacagcacaaagactacaaaagcttaacactcagtcgactcgagcgcgactcatcccgagtcgccggaatcgtcgcgaagatccgtttcgccgtcgaaggagtcgatagatccgatctcaaacccgtttacaacgaagatacacgataccaaaccgaggatctaacgacacctgtcgtcttcggagcctttcaaggaagcggcgagtatttctcaagaatcggtgtcggaactccggcgaaagagatgtacttggttctcgacaccggaagcgacgtaaattggatccagtgtgaaccttgcgccgactgttaccaacagtccgacccggtttttaacccgacttcgtcttccacatacaaatctctcacttgctctgctccacagtgctctcttctcgaaacctccgcttgtcggtcaaacaaatgtctctaccaagttagttacggagacggatctttcaccgtcggtgaactcgctaccgatacggtgacgtttggtaactctggtaaaataaacaacgtcgctttgggttgtggtcacgacaacgaaggtctctttaccggagcagccggtttactcggtttaggcggtggtgttttatcgataaccaatcaaatgaaagcgacgtcgttttcttactgcctcgttgaccgtgactcgggaaagtcctcaagtcttgatttcaactcggtccaactcggtggcggagacgcgacggcgccgcttctacgtaacaaaaagatcgacactttctactacgtcggactcaagtggattcagcgtcggtggtgaaaaagtcgtgctgcctgatgcgatcttcgatgtcgatgcttcgggaagcggaggagtgatcttggattgtggaaccgccgtgactcgtcttcagacgcaggcttataactcgctgcgtgacgcgtttcttaaactcaccgtgaatctcaaaaaaggatcttcgagcatctctctgttcgacacgtgttacgatttctcgtctctctccactgtgaaagtaccgacggttgcgtttcatttcacgggagggaagtcgcttgatttgccggcgaagaattatctgatccctgtggatgatagtggaacgttttgcttcgcttttgctccgacgtcgtcgtcgttgtcgatcatcgggaatgtgcagcagcaagggacacgtatcacttacgatctatccaaaaatgttatcggattgtcagggaataaatgctaaacatgtcaaagtagaaaaattaatagttttacgggtaatcagtaaaactttttatggtactagctagctacggtaacaagatgaaaacaaaatccttaagtgtgaatttttgctaccttttttttaattaatcataagttattgtcgtcttttatcgaataataataggattaattaattttattaaaaaaaaaaaaaaaaaaagcggccgctctagaggatccaagcttacgtacgcgtgcatgcggcgtcatagtctaagtatagtgtcnaacgaaagtacaccaa

SEQ ID NO: 90122 - DNA, 1221 bp, Arabidopsis thaliana columbia
  unsure (1)..(1221): unsure at all n locations
nagtttatggaactcttttcgaggcagagcatcggtctactttctacttcccttattggaactttcctccagctacctcgcgtcctccgaggcaacgaaagttccaaagcgatctgaagattataaacgattgccttgatggcctcattcaaaatgctaaagagacaagacaggaaacagatgttgagaagctccaggaaagggactacactaatctcaaggatgcaagtcttttgcggttcttagtcgatatgcgcggtgttgacattgatgaccggcagctgagggatgacttgatgactatgctaattgctggtcatgagacaacagcagcagtacttacttgggctgttttccttctgtcacaaaatcctgaaaaaattaggaaagctcaagctgagattgatgctgtgcttggtcaaggtccacccacttatgaatcaatgaaaaagctcgagtacatacgactgatcgttgtagaagtccttcgtctctttcctcagccacctttgctcatcagacgcactctcaaaccagaaacattaccccggaggacacaaaggggaaaaagaaggtcataaagttccaaaagggactgatatcttcatttctgtgtataatctccatagatctccatacttttgggataatccccacgattttgagcctgagaggtttttaagaacaaaggagagcaatggaattgaaggatgggctggctttgatccatctcgtagccccggggcactatatccgaatgagataatagcagactttgcattcttaccatttggtggaggaccaagaaaatgcattggagaccagtttgcactaatggaatcgaccgtcgcactagctatgttgtttcagaaattcgatgtggagctgcgtggaacgccagaatctgttgaactcgtgagcggcgcaacgattcatgccaaaaatgggatgtggtgcaaactaaagagaagatcaaagtgaaatttatggataggcaaaaagactcaattttaacttgaaggaagctgagtgtaaatgagagatgatatgcttatgattcactaaacgtacattcttgagattttgaaaatgcaaaaaagctaacacagagattggatctgttggtgaaaaaaaaaaaaaaaaagnnnnnnnnnnnnnnnnnnnnnnnnnnnnnnnnnnnnnnnnnnnnnnnnnnnnnnnnnnnnnnnnnnnnnnnnnnnn

SEQ ID NO: 90123 - DNA, 419 bp, Arabidopsis thaliana columbia
aaattttgaataaattatatataacagaaatagtattttaagagatcgtcgcctacgatggcttcaaaagcattgctttttttaagtctcattgttgttcttcttatagcttctgaggtggtagccagagacctcgctgagaaatcggcagagcagaaaaacaatgaaagagacgaagtaaagcaaacggagcagtttggcgggtttccaggaggagggtatggagggttcccgggaggagggtatggaggaaaccctggtggaggatatggaaaccgtggtggtggatatagaaaccgtgatggaggatatggtaaccgcggtggaggatatggaaaccgaggaggaggatattgtcgctatggttgctgctacagaggctactacggtggctgcttcaggtgttgtgcttatgctgg

SEQ ID NO: 90124 - DNA, 534 bp, Arabidopsis thaliana columbia
tcactattgggaaagctgacccgcctgcaggtaccggtccggaattcccgggtcgacccacgcgtgcggctgcaacaccatcctcatccacaactttgatcggcccactcagtagagaggtctatgctcttaatatcgccagcagagccatcttctttgactgcacctcccgtccagtcaaccatttccaccctaaacaactcaccagtcttgacctctgcaactgatgggggctcaggatgccatctattgtgcagtggctgagtctgctgccatggcctcttcttcaaatccaccttcaccaccactcgtggacttgctggagccatcaaaccgaacccaataaaagctaagaggaagaacttggattctttgtaattggaagctttccatcatatgtgctcttcagtacatctggtttcctcacaccccgagttgctaacaaattattgagagacgaggggaagaccagagaaactcaggagggttatccagaagctggttgacttatgcaaagaacagaaggggcaaaat

SEQ ID NO: 90125 - DNA, 655 bp, Arabidopsis thaliana columbia
  unsure (1)..(655): unsure at all n locations
ttgnnnnnnnnnnnnnnnnnnnnnnnnnnnnnnnnnnnnnnnnnnnnnnnnnnnnnnnnnnnnnnnnnnnnnnnnnnnnctttttttgtgttttttttaaaacaccaagttattgctttattattggaacatatgcttgattatacaatcttggtattagcttctaaattttaattttaatttttttgtagaagctaagaggaagaacttggattctttgtaattggaagctttccatcatatgtgctcttcagtacatctggtttcctcacaacccgaggtcctactggaaccttccgattctttggcctaatatcctgatcaaagatggctgtaggtattgctagtgtagcaacggcattcggagaatcaactatcccagatagtcttccttcacatggacaacatgagagtaagaggtacacctgttcttttgagtaaccaaatttgaaaagatagtctatggcgttgagaactgcccgtttgtaagcaactgttgcatctaggtaatgctgttttccgctctcatcgacactgataccttcgaagacaagccactctgagaacctcggttccactggtcctatctcaaagattgggtttacatggagaggggtaggtcccattggcgtaaggtactcttgcatcccatttc

SEQ ID NO: 90126 - DNA, 467 bp, Arabidopsis thaliana columbia
cccacgcgtccgatcatggagtatttacctgggggtgacatcatgacactactcatgagagaagacattctttctgaagatgttgcccgtttttatattgctgagagcattcttgccatccattcaattcatcaacacaactatgttcacagggacatcaaacctgataatttgatactagacaaaagtgggcatttgaagctttcagattttggtttatgtaagccacttgatgacaagtattcttcattgctattagaagacgatgaaatgttgtctcaggattcagagaaccagtcaggaaaatcagacgctgacaaagcaccctggcaaatgcctaaagagcagttactgcagtggaaacgcaatcgccgtgcattggcttattcaaccgttggaactcttgattacatggctccagaagtactcctaaagaaaggatatggaatggaatgtgattggtggtc

SEQ ID NO: 90127 - DNA, 467 bp, Arabidopsis thaliana columbia
attctccaaagattagatcactgaactggtatggttacgagagtttatgtttgccttcaacttttaatccggagtttctggtcgaacttgatatgcgttccagcaatcttcggaagctatgggaaggaactaaacaacttagaaatctcaagtggatggatttgagttattctagttatctgaaagagcttcccaatctttcaactgcaactaatctcgaagaattaaagcttagaaattgctcaagtttagtggagctcccctcctctattgaaaaactcacgagtctccaaatattagatcttgaaaattgttcgagtcttgagaagctccccgctatcgagaatgcgactaagctccgtgaattgaagctccaaaattgctcaagtctaatagagctccctctttctattggaactgccacaaatctgaagcaattgaatattagcggatgctcaagtctcgtg

SEQ ID NO: 90128 - DNA, 529 bp, Arabidopsis thaliana columbia
  unsure (1)..(529): unsure at all n locations
nnnnnnnnnnnnnnnnnnnnnnnnnnnnnnnnnnnnnnnnnnnnnnnnnnnnnnnnnnnnnnnnnnnnnnnnnnnnnnnnnnccacgcgtccggagaaaatagccactgatgtttcaaacatgttaaatagtttcacaccatcaagagattttgacgggttagtagggatgagagctcatatggatatgctggaacaattgttgcgcctagatttggatgaagtaaggatgatcgggatttggggaccgcctgggattggtaagacaactatcgccagatttctgtttaatcaagtctccgacagattccaacttagtgccatcattgtgaatatcagaggaatctatccaagaccttgtttcgatgagtacagtgcacaattgcaactacaaaaccaaatgttgtcccagatgatcaatcataaagatatcatgatttctcatttaggagtggctcaagaacggttgagagacaagaaagtgtttcttgttctcgatgaagtggatcaattaggacaactagatgcct

SEQ ID NO: 90129 - DNA, 467 bp, Arabidopsis thaliana columbia
cttgaaaatcaagttgaaggagtcgtctcttcctacaaccttgagatttaaggcttgtatcatgcttgttaaggttaatgaagaaatgagagatgatgagatgtggccgagtgtactcattgccatcagggtcaaacagaatgatctcaaagttctatgtacagcaagcatatatccagttttaacagagcatatatacacatttgaacttgaagtagaggaggtgacttccacggagcttgtctttgagttcacaccattccacaaaagcaattggaagataggaggattgcgggatactcccaagaggaacggggtccattttgccggagctcttcggccgggatcttccgccagaatcttctcgggggtttctagctgggccccctgtttgaggggtgaatgaaaatctttaataggagctgccattgtgtgttgattgggtatcaagtactgcttctaagtga

SEQ ID NO: 90130 - DNA, 732 bp, Arabidopsis thaliana columbia
atttgagcaaagacattctcttgacccatggaggaacttcttgtatatctttgggtcaagagaatgtctcgtttacgtgatcttagtctcaacaactgcaataatctggtatcactcccccaactttcagattcccttgattacatatatgcagataattcgcgggccctcgagagactggattgttgctttaacaatccagagatccgtctctatttccccaaatgcttcaaactgaatcaagaagccagagatctcatcatgcacacttgtatagatgcgatgtttccaggtacacaagtgcctgcctgcttcattcatcgagctacttctggggattccttgaaaatcaagttgaaggagtcgcctcttcctacaaccttgagatttaaggcttgtatcatgcttgttaaggttaatgaagaactgatgagttatgatcagacaccgatgatcgttgacattgtcatcagggacgaacataatgatctcaaagaaaagatatatccaagcatatatccaagcatatatccacttttaacagagcatatatacacatttgaacttgacgtagaggaggtgacttccacggagcttgtctttgagttcccacaactcaacaaaagaaattggaagataggagaatgcgggatactccaaagagaaacgagatcactttcgccggagctcttcgccggatctctcgccggaatcttctcgtgtttctagcta

SEQ ID NO: 90131 - DNA, 3842 bp, Arabidopsis thaliana columbia
atggattcttcttttttccttgtcttagtcgcagctgctacaggcttcttcatgctttttagaaaattcagattccatcaagataacaaagaaagtaattcttcttctttatctcgtccaactgctgcaacttctgtgtctcgaaactggaaacacgatgtcttcccgagcttccacggagcagatgtccgaagaacctttcttagtcacatcctcgaatcgttcagaagaaagggaattgacacattcattgataataatatagagaggagtaagtcgatcggtcctgagctcaaagaagctatcaaaggatcaaagatcgcaatcgttttgctctcaaggaaatatgcttcttcgtcatggtgtcttgatgagttggccgagatcatgaaatgcagggaagtgttgggtcagattgtcatgaccattttctatgaagtggagccaactgacataaagaaacagactggtgaattcggaaaagccttcacaaaaacatgtagaggtaaaacaaaagagcatattgagagatggagaaaagctttggaggatgtggcaacaatcgccggatatcattctcacaaatggagcaatgaagcggagatgattgaaaagatatccactgatgtttcaaacatgttggatttatccataccatcaaaagatttcgatgattttgttgggatggcagctcatatggaaaggacggaacaattgttacgcctagatttggatgaagcaaggatgatcgggatttggggaccgcctgggatcggtaagacaactatcgccagatttctgtttaatcaagtctccgacagattccaacttagtgcaatcatggtcaatatcaaaggatgctatccaagaccttgtttcgatgagtacagtgcacaattgcaactacaaaaccaaatgttgtcccagatgatcaatcataaagatatcatgatttctcatttaggagtggctcaagaacggttgagagacaagaaagtgtttctcgttcttgatgaagtggatcaattaggacaactagatgccttggcgaaagatactcgatggtttggtcctggaagtcggattattatcacaacagaagatcaaggaattttgaaggcacatggaatcaatcatgtttacaaagtggaatatccatcaaatgacgaggcttttcaaatcttctgtatgaatgcctttggtcagaaacaaccgtacgaaggtttctgtgaccttgcttgggaggttaaggctttagctggtgaactccctttgggattgaaggttctaggctccgctttgcgggggatgtccaagccagagtgggaaagaacactaccaaggttaagaactagcctcgacggaaaaatcgggggcattatacagttcagttacgatgccttatgtgacgaagataaatatctatttctttatatagcctgcctttttaacaacgaatcaacaaccaaagtggaagaggttcttgcaaacaagttcttggatgtggggcaaggtattcacgtgttagctcaaaaatctctcatatcctttgagggagaagaaatacagatgcatactctgctagaacagtttggaagagaaacttcccgtaagcaattcgttcatcaccgctatacgaaacatcagcttttggtgggtgaaagggatatatgtgaagtactcaatgacgatacaatagatagtagacgttttatagggatacatttggatttatctaagaatgaggaagaattgaatataagtgagaaagcacttgaaagaatccatgattttcaattcgttagaatcaatgataagaatcatgctctacatgagagactacaagatttgatttgtcattctccaaagattagatcactgaagtggtatagttaccagaatatatgtttgccttcaacttttaatccggagtttctcgtcgaactagatatgagtttcagcaagcttcagaagctatgggaaggaactaaacaacttagaaatctcaagtggatggatttgagttattctagttatctgaaagagcttcccaatctttcaactgcaactaatctcgaagaattaaatcttagaaattgctcaagtttagtggagctcccctcctctattgaaaaactcaccagtctccagatattagatctccaaggttgctcaagtcttgtggagcttccctcttttgggaatgcaactaaacttgagatactttatcttgattattgtcggagtcttgagaagctcccaccatctatcaatgccaataatctccagaaattgtctctaagaaattgttcacgtattgtggagctccccgctatcgagaatgcgactaatctctgggaattgaatctgcttaattgctcaagtctaatagagctccctctttctattggaactgccagaaatctatttttgaaggaattgaatattagcggatgctcaagtctcgtgaaactcccatcctctattggagatatgactaatctcaaagagtttgatctatctaactgctcaaatctggtggagcttccttcctctataggaaaccttcaaaacttgtgcaagttaattatgagaggatgctcaaagctagaggctcttccaatcaacatcaacttgaaatctctcgatacacttaatctcacagattgctctcagttgaaaagttttcctgagatctccacacacattaagtatctcaggctcacaggaactgcaataaaagaagttcccttgtcgatcatgtcgtggtctcctcttgctgaatttcagatttcatattttgaaagcctcaaggaattcccgcatgcttttgacatcatcacggagctgcagttgagcaaagatatacaagaagttactccatgggtcaagagaatgtctcgtttacgttattttagactcaacaactgcaataatctggtatcactcccccaacttccagattcccttgcttacttatatgcagataattgtaagtccctcgagaaactagattgttgctttaacaatccatggattagtctccatttccccaaatgcttcaaactgaatcaagaagccagagatctcatcatgcacacatcgacttctagaattgcgatgttacccggtacacaagtgcctgcctgcttcaatcatcgagctacttctggggattacttgaaaatcaagttgaaggagtcgcctcttcctacaaccttgagatttaaggcttgtatcatgcttgttatggttaatgaaggaattagttatgataggaaaatcaagttgagcgttgacatcagggatgaacagaatgatctcaaagttcagtgtacaccaagcggctgttatatatatccactaacagagcatatatacacatttgaacttgaagtagaggaggtgacttccacggagcttgtctttgagttcacactagacaaggaaagcaattggaagataggagaatgcgggatactccaaagagaaacgagatcactgcgccggagctcttcgccggatctcccgtcggaatcttctcgtgtttctagctacaaccactgttagagaggtaagaatcatgggtttgatttctccctcagtcattcgatggattcgattattggttttattttgtgtgaatgggaattagctgtgaaatatgggttttgtatggattttatgagttttgtatttgtcgtgtatttagaaagatgaaacattgatgttcaaagcttgctatttttttaaaaaaaaaaaaaaaaaagggcggccgctctagaggatccaagcttacgtacgcgtgcaggcgacgtcataaatcttctatagtgctccta

SEQ ID NO: 90132 - DNA, 828 bp, Arabidopsis thaliana columbia
  unsure (1)..(828): unsure at all n locations
aatacgactcactttagggaaagctcggtacgcctgcaggtaccggtccggaattcccgggtcgacccacgcgtccggtcgagatttgatgagacgacccatttccatcttctttttttctcaccactcaagcaagaggtgaagaaggactaatagagaagatggaaatgggtcgtcgagatttgatgagacgtggaacaaccaatcgattgtccaataatcaacattctggatctgggttttctacaaaatctaagaaaggaatgctgaagaaacttggttttgctgatgagaaactgaaacaggagatgagctacgatactcttccttctccagatttagaaaacgaggtttctaagaagaaatctaagcttccaaaaaagaatttgaaagacactaatggtgtggatcatgcctctgtaccacggaagcttcgttcagccatgaagaagcggaatcttgaatctgtttctaagctatcctctgtttcaaagagaccttaccggtttaaaaccggaactgaatcttcggttaagaaggagagtcaagaaatggaagcaatagctatcgttactgagtcgatgatgatgtcgaaagatgagatagaagctgcagagactttatatgggttagctggactgtttactgagactgactctcttggtgagaagaccagtgntgagacaggaaccagccaagttgtggacttaattttgggtgtggatgatgactatacaaaaccgaatcgttcaccggtggtttagttctctcttcagccaaccttagagattgtggatggccttagagcatctgttaacagtcacacac

SEQ ID NO: 90133 - DNA, 346 bp, Arabidopsis thaliana columbia
acccacgcgaccgcacgagtaaacacgaagtaaaaatgataaagagacgattttacaagcttgagcatggtgataaagacagtggatccgattcatcgtgcttctcttctgactctgatcctgagacggaagaatcagaacaatctgaagaagaagactctgttgcagaagtttccgaggacggtgatgattcaggagatgatgaatccccagctgctggcgaagacgctgatgttgatgatggtgatgataactctgatgctgatgactatggtgggacattggagaagatgtcaatgaatcgttttttagaagaaccacccgaagaagaggaagagaactatat

SEQ ID NO: 90134 - DNA, 1019 bp, Arabidopsis thaliana columbia
  unsure (1)..(1019): unsure at all n locations
cggacgcgtgggctcgaaaagaatgggtactttctgttgaatgaaaagggtgagaaaatgaaggagcagcttggtgttgtccgatcaaactgcatacattgcttagaccgtacaaatgttacccagagcatgataggtcgaaagatgttaaaagtttcaactcaaaaaggattggagtttttgggcgctaaagaacccattaggctcacatttgaatttttggcgaccactataaaatattatgggctaatcatggtaatgaaatcagcattcagtactgtggaactcctgcacttaaaggagatttcgttaggtatgggcatcggactgcccatggtgtccttaaagatggttggagctccctcagacgctattacctgaataactttgctgatggaactaagcaggatgcaattgatctcttgcaagggcactacatagttgctgtgagccgagacatggctcctgtacctcaaaagggaggccttgaggctgtagccaacttcccagtggcattgttcgtggttctgatgagtttctggtttgcaacaatgtctctaaaacaaactgggagtgattataagcataagcacttgttcttctcattgttgtggacgggaatttgcgtgggcatggctgcactggtgagggccaatggcaggatcttctgtaaccgacctcgtctgcacaagcccagaggctgattcatttcgtgagatcaattaattaaagacatggaactcaagtcggagacaaaagttttctcccttcgattgttttattttattgtatcaaaattggaccttgtgacaccatctagaggcaattgtctcaggtttggatcccgcggccgttaatactcccacagccatctaatgactcgatacagttacacatctttcttcatgttcattctatgattactcggtccgacaaaaaaaaaaaaaaaaaagggcggccgctctagaggatccaagcttacgtacgcgtgcaggcgacgtcataatcttnctatagtg

SEQ ID NO: 90135 - DNA, 400 bp, Arabidopsis thaliana columbia
  unsure (1)..(400): unsure at all n locations
ctgttggttgttgtacattgaaagtaggaaacgtggagtgtattcctccaaataagttaaagtttgacttccttggtaaagactctattcagtatgtaaacacagttgaggttgagcctctggtgtataaggcaattgggcagttccaagcaggaaaatcgaaaaccgatgatctctttgatgagctagatacttcaaaactcaatactcatcttaaggagcttatggctggtctcacagccaaagtattccgtacgtataatgcatccatcacattggatttaatgttgagtaaagaaaccagagacggtgncgttcctgaaaaagtggtggtttatcagcaagcgaaccaaggagggttgctatcatttgtaaccatcaacggtactntctcggaaat

SEQ ID NO: 90136 - DNA, 1122 bp, Arabidopsis thaliana columbia
  unsure (1)..(1122): unsure at all n locations
nnnnnnnnnnnncaattacatttaagggaaggttggtccccttgcaggacccggcccgaatttccggggtcgacccacgcgtccgattcagtatgtaaacacagttgaggttgagcctctggtgtataaggcaattgggcagttccaagcaggaaaatcgaaaaccgatgatctctttgatgagctagatacttcaaaactcaatactcatcttaaggagcttatggctggtctcacagccaaagtattccgtacgtataatgcatccatcacattggatttaatgttgagtaaagaaaccagagacggtgacgttcctgaaaaagtggtggtttatcagcaagcgaacaaggaggttgctatcatttgtaaccatcaacgtactgtctcgaaatctcacggagcacaagtggagaagctggctgtgaaaatagaagaactaagggagcaaataaaagagctgaatattgatctcgacagggctaagaaaggaagaacaccgttaatgggatctgatggaaagagaaagaggaacttaacacctgaagcattggagaagaagataatgcaaacgcaaggtaagatcgagaagatggaaagagatatgcaaacaaaagaagatatgaaaactgtcgcattgggcacatctaagatcaactacatggatcctaggatcactgttgcgtggtgcaaacgacatgatgtccccattgagaagatatttaacaagtctcttctggctaagttcgcttgggcaatggatgttgatcctgagttcagattctgttcaagtaccgatgaataaatacatgttcgttgaggccagtttcacctaactaccattcaccatacatttacagagatatagagagaaagagttaaaaagagaagaagaatgatagcgagaccctgtaaaagaggtttcgtctctcttattagtgaaccaaagactaatctatggatgttttatagaaaaacagttacaattttttactcccataaataaataattccggttaatgaggttaaaaaaacacaaaaaaagnnnnnnnnnnnnnnnnnnnnnnnnnnnnnnnnnnnnnnnnnnnnnnnnnnnnnnnnnnnnnnnnnnnnnnnnnntca

SEQ ID NO: 90137 - DNA, 589 bp, Arabidopsis thaliana columbia
ttctgtgtgaccttgcaaaccttttctgatgattctccagaattagggacattttcataattcttatactgttctaatctagtttgtctgtatttctctctagaaatattaagtctgtcccacggaatcccctggatatctttccctttccgagcttgctcagccgtggtatcagctactttattgttcgaatagtcaaattcttcaacgtcagaatctgaagcaccaagatcatcaccacgaaactcctcatccatatcatcttcaacatcttccatctcatcatctacgtcttccatgtactcagcatcatctcctcgataattagacattcttttggtagataaataaagacaccctaagattaggcaagaatcaaatgaaaacgaattattcgcttttttcgatctagaaatgagaatttcagcaaataatccccaattatatgcctaattacaatttcaggttcattagataaaaaaaatatcttaaaaggtagcgagcgacgggatcggccgccagagaacgaacaaaagtgaaaacgggaagagagagtgccccccgcctgggatcgagccggcgagattcc

SEQ ID NO: 90138 - DNA, 681 bp, Arabidopsis thaliana columbia
aagtggggcctattaaagtagtgccactgtattctactcttccacctgcgatgcagcagaagatatttgatcctgctccagagcctgtaacagaaggtggtcctcctgggagaaagattgttgtctccactaacattgctgagacttctctcaccatagatgggattgtctacgtcattgaccctggttttgctaagcaaaaagtctataaccctcgaatccgtgttgagtctttgttggtgtccccaatttcaaaggcaagtgctcaccagagatctggtcgtgccggtagaacacggcctggaaaaggcttcaggctttacacagagaggagttttaataatgacttgcagccgcagacgtatcctgaaatattgagatcaaaccttgcaaatacagttctgaccttgaaaaaactgggtattgatgacttggtgcactttgattttatggatccccctgctcccgaaacactgatgcgagccttagaagttttgaattacttgggagcactggatgatgatggtaacttgacaaagacaggtgagatcatgagtgagttccccttggatccacagatggcaaagatgctcatagtcagtcctgaattcaactgctcaaacgagattctctcagtttcagctatgctatcagtaccgaattgctttattcggcctagag

SEQ ID NO: 90139 - DNA, 519 bp, Arabidopsis thaliana columbia
gtccgcgaacgcatgggtcatgagtgagttccccttggatccgcagatggctaagatgctcataggcagtcctgaattcaactgctcaaacgagattctctcagtttcagctatgctatcagtttctcagttattctctctcatgaagcaaatggtatcagtctcatcgcctctatgcatctgctgacctcttccctggacctcttctgttataattaccaattctttctctagtaccgaattgctttattcggcctagagaggctcaaaaagcagcagatgaagctaaagctaggtttggacacattgagggagatcacctcacattgttgaatgtctaccacgctttcaagcaaaacaatgaggatccaaattggtgctatgaaaacttcatcaacaatagagcgatgaaatctgcagacaatgttagacagcagctagtccggataatgtcaagattcaacctgaagatgtgcagcactgattttaacagccgcgactactacatcaacataagga

SEQ ID NO: 90140 - DNA, 539 bp, Arabidopsis thaliana columbia
  unsure (1)..(539): unsure at all n locations
ctacgactcacttatgnggaaagctgagccgcctgcaggtaccggtccggaattcccgggtctacccacgcgtgcggatgacttggtgcactttgattttatggatccccctgctcccgaaacactgatgcgagccttagaagttttgaattacttgggagcactggatgatgatggtaacttgacaaagacaggtgagatcatgagtgagttccccttggatccacagatggcaaagatgctcatagtcagtcctgaattcaactgctcaaacgagattctctcagtttcagctatgctatcagtaccgaattgctttattcggcctagagaggctcaaaaagcagcagatgaagctaaagctaggtttggacacattgagggagatcacctcacattgttgaatgtctaccacgctttcaagcaaaacaatgaggatccaaattggtgctatgaaaacttcatcaacaatagagcgatgaaatctgcagaccatgttagaccagagctagtccggataatgtcaagattcaacctga

SEQ ID NO: 90141 - DNA, 866 bp, Arabidopsis thaliana columbia
  unsure (1)..(866): unsure at all n locations
aaccancnncgggttcggtaaatttaanccnattaaangcttaaaccccaaaatnccattaaatgntaactccntnccacttnaaanaattcctttntacaatcaccaccgtccaaaatttaatctttacatctctgccctanacgtgtctcttcttcnccatctctccggcgataacagtgcctctggatctccgnatnttaaccggctcgatgagtgcggtgctgttctgaagaacatcggactcgtcatcgatttcgttcgccgcgatgagcttcccgtcgctggaatccgttctgatatcgggtaaaaaactcccgccgatgatctccgtcggaanaacggtgatttcgtgcttctgtagtaacggaacgagaacactcttgatttcgatattccgcgcccgcgcggtgattgacgtttgttccatgtagatctccggtatctccatggagacaccgtcgctggctccatcgttactctctctgattcagattctctctcgcattcgaacgagtacgatctcttcagctcccggaaccgagaaatcgccggtgatgattgctcttccaccgacgctctgatctcctgatcgttcgtcgtatcggcagcgattgtgttccaattgctccgcgacggtgtgatttcgccgcggatgatgatcgcgttattctcttcatcatcgagactcggacgaattcgaggagccattaacggaacgaacggcgacataggcgttaaaactccggcggatgcgagaatcgccgtacggcataacggacagttagggtgagatcggagccattcatcgatgcattcaaggtgaaaagcatggaagcataacggaagtgttcgtacataatcac

SEQ ID NO: 90142 - DNA, 509 bp, Arabidopsis thaliana columbia
  unsure (1)..(509): unsure at all n locations
nnnnnnnnnnnnnnnnnnnnnnnnnnnnnnnnnnnnnnnnnnnnnnnnnnnnnnnnnnnnnnnnnnnnnnnnnnnnnnnnnnnccacgcgtccgcggacgcgtgggctgattctggcttgccatcccgcgtagagtcgctgatgcgaaagtctaacagtgaattcagtgtggttatatcgcagatgaatggacaagactatgcatctcgatcgcacgtttttaccgttggaaagacgaggataaagctgtctcgaggatggatcacaaaggcgagagaattatattcgacatccatgcagctctgtggagttagaggcaatattaaggctcctaccaaggcagtgttctggcaaccaagaaagagtctaactttcatactaacctttgagtcagaacacgaacgtaacgcagccatagcccttgctcgaaaatacgctttcgattgcagtgttacactgcttggtccagatgattaagtgaagaagacaatgtcattaacgaaccacct

SEQ ID NO: 90143 - DNA, 520 bp, Arabidopsis thaliana columbia
  unsure (1)..(520): unsure at all n locations
taaatgggaaaaaacatcaaagggcattggggatgtctatgcgggtggagagatcgtcacttgaacaagtccaagagcggttcgaggttttaaagaagcggaaagcgccaggaactttcacagaacaagatctggacgaacgcatccgaaaacagcaagaagaagaggaagaactaaaaaggcagcgtagagagaaaaagaaagagaagaagaaagggaaggtggtggaagaagagcctgagatggatcctgaggttgcagagatgatgggatttgggggctttggatcttcaaaaaaatcatgatgattatatgatcacttgtatctttgtcttgtagcgtttttgatccaaagtttgcaactttgtaatctgacacatcataacgatatttttctcattgtgcaagaagaggaatttgatggctnnnnnnnnnnnnnnnnnnnnnnnnnnnnnnnnnnnnnnnnnnnnnnnnnnnnnnnnnnnnnnnnnnnnnnnnnnnnnnnnnnnnnnnnnnnnnn

SEQ ID NO: 90144 - DNA, 779 bp, Arabidopsis thaliana columbia
  unsure (1)..(779): unsure at all n locations
nnnnnnnnnnnnnnnnnnnnnnnnnnnnnnnnnnnnnnnnnnnnnnnnnnnnnnnnnnnnnnnnnnnnnnnnnnnnnnnnnnnccacgcgtccgcccacgcgtccgtacggcttgcgagaagacgacagaaggggggagacggaagaaaattcgaatcatcagtgtttgtttcctcctctcttaaagcttagcccttctcaggtcattgttcttcaatggcttcgagcaacacgactactggggttgataatacgtttagaaagaagtttgatgtggaagagtttaaggagcgtgctcgtgaacgcgaaaagaaggaatcggatcggtctaaatctcggtccaaaggtcctcctgtgcaaagagcccctttgaagcatagagattatcatgtagacctagaatctcgtctgggcaagacacaggtcgttacaccggtagcgcctctaagtcagcaggctggttatttctgtcgcgtttgtgattgtgttgttaaagattcggcaaactacttggatcacataaatgggaaaaaacatcaaagggcattggggatgtctatgcgggtggagagatcgtcacttgaacaagtccaagagcggttcgaggttttaaagaagcggaaagcgccaggaactttcacagaacacggtaagacttctgagaggaaccatctcttagttatgtagtttgatgtatcttcagaaataagaaactattctctggaaaaaaagctagagcaaatctaagtaggttggaaaataacattgacgttgcgact

SEQ ID NO: 90145 - DNA, 417 bp, Arabidopsis thaliana columbia
acgcgtccaaaacctacaaaagttaaaagttacaccttactaaacacaaacaacttcataatggctttccacttccggcgactttgcttcttctcagctcttcttgccgtggttctccaactccttcatggcgtctctggccaactagttgtggttgaggaacctatttctgctcctccgcctccgctggtcgacctaaacaccggtgatggcattgtgccggcgctgtttgtcttcggtgactctctaatagacaatgggaataacaataacattccttcctttgccaaagccaattattttccttatggcattgatttcaatggcggtccgaccggtcgattctgcaatggcttaacgatggtcgatgggattgctcaactattgcggctgccactgattccggcctactcggat

SEQ ID NO: 90146 - DNA, 595 bp, Arabidopsis thaliana columbia
  unsure (1)..(595): unsure at all n locations
ctctttcttcacactcctttttttatttatttccattgatctctctcctctcctcgatttttccctcctttaatccatctctgcatattcttcaagcttgggttcatcttcatcttgatctgaatcgatccgatggctacatataagcctaagaacatcctcatcactggggctgctggattcatagcctctcatgttgctaacagactagttcgcagctaccctgactacaaaattgttgtgcttgacaagcttgattactgttctaatctgaagaaccttaatccttctaaatcctctcccaacttcaagtttgtgaaaggagatatcgccagtgcctgatctcgtcaactaccttctcatcactgaagaaatcgacaccattatgcactttgctgctcaaacccatgttgacaattctttcggtaatagctttgagtttaccaagaacaatatctatggtacccatgtccttttggaagcttgtaaagtcactggccagatcaggaggttcatccatgtgagtactgatgaggtctatgggagagactggatgnggatnncttcagtggggtnattcacggagggcttctca

SEQ ID NO: 90147 - DNA, 501 bp, Arabidopsis thaliana columbia
tatacgactcatatagggaaagctggtacgcctgcaggtaccggtccggaattcccgggtcgacccacgcgtccgcaatatttatggtacccatgtccttttggaagcttgtaaagtcactggccagatcaggaggttcatccatgtgagtactgatgaggtctatggagagactgatgaggatgcttcagtgggtaatcacgaggcttctcagttgctcccaactaatccatactccgccactaaagctggagctgagatgcttgtcatggcatatggtagatcatatgggttgccggttataacaactcgcgggaacaatgtttatggtcctaaccagtttcctgaaaagttgattcctaagttcatcctcttggccatgaatgggaagcctctcccaatccacggagatggatctaatgtgagaagttatctctactgcgaagatgttgctgaggcatctgaggttgctcttcacaaaggggaagttaaccatgtcta

SEQ ID NO: 90148 - DNA, 674 bp, Arabidopsis thaliana columbia
  unsure (1)..(674): unsure at all n locations
caacaatggattacgattacagaaacaagtctggtggtccttcttaccctcgacctgtgtatggacctccatcagcatcgtccggctccgtcatctaaccatcctatgtacggttaccctaagatcggtcaacaaaccggtcccggcccacagtttttctctccgccggagagaaactcttcgtttcaacataacacttctccttcatctggaataggaatcagagtgaatttgaagcctgagtatcggattactccgccgcctcagttgttgcctcgagtaggagatattcatcggagtagttttcagttcgatttcggattagagaggaaagttctcgcggaggcagagaaagataatccagattggagtaaatttgggagtgagaatccaccggctaagtttcatgaaccatcaccttcttcagtgggtcaaatgcagggtgtagatcatgtagtgatgaaatatactgctcctgggctcaacagagaagctgtcaacatagctgttgcaaactatggtgataatcccacaaaggttcaagaatttgcaaatgggttcacagcgatacgggagatgggttttccgacaaacgctngtgcagatgctctcttcatgtttgagaacgacactgataaggcattggcacatttgctccatgggtctttctaaat

SEQ ID NO: 90149 - DNA, 1000 bp, Arabidopsis thaliana columbia
  unsure (1)..(1000): unsure at all n locations
ctttgaatgngcaccgggaccccccctcgaggtcgacggtatcgataagcttgatatcgaattcggggccgcttctcctcctccgcctccgcctccaccgccaccgccaccgccgccgccgacgacttttctcacttactcaacaccagagatcttggtttagtgttataatggaaggtgttggactaagagctgtaggatcacactgttctttatctgagatggatgatcttgatttgactcgagctttggataaaccaagattgaagatcgaaaggaagagatcgtttgatgaaagatcgatgagtgagctatcgactggttacagtagacatgacggtatacacgattcgccgcgaggtagatcggtgcttgatacgcctctttcttctgctagaaactcctttgagcctcatcctatgatggctgaagcttgggaggctttaagaaggtcaatggtcttcttccgtggtcaacctgttggtactcttgccgcggttgataatactaccgatgaagtcttgaactatgatcaggtgtttgtgagggattttgtaccgagtgcgttggcgtttctgatgaatggagaaccggatatagtgaagcattttttgcttaagacacttcagctgcaaggttgggagaaacgtgtggatcggtttaagttaggagaaggtgtgatgcctgcaagtttcaaggtgcttcatgatcctatccgtgaaacggataacattgttgcggatttcggtgagagtgctattggacgtgtggctcctgtagattcagggttctggtggattatncttcttcgtgcttataccaaatctactggagatttgactctctctgagacaccagagtgtcaaaagggaatnaaactnatcttgtctttngtgcttagcttgaagggttttnacaacggttnccnacaactncttttttgcctgattggatgtnccntgntttaacccgaagaattgggngtttaatggggganccc

SEQ ID NO: 90150 - DNA, 653 bp, Arabidopsis thaliana columbia
  unsure (1)..(653): unsure at all n locations
tgttctccnnnnnnnnnnnnnnnnnnnnnnnnnnnnnnnnnnnnnnnnnnnnnnnnnnnnnnnnnnnnnnnnnnnnnnccacgcgtccgtattcctgatcttttgagtgtaagactcgggagcttttcttgaaaaatagagctgctgagctcgatagagaaatgggattgattcgaactcaggaagaaaccggaaggcatgtgagaatgctgactcatgagattagaagcactttagatagacatactattgtaaagactacacttgttgagcttggtaggacattagctttggaggagtgtgcattgtggatgcctactagaactgcgttagagctacagctttcttatacacttcgtcatcaacatcccgtggagtatacggttcctattcaattaccggtgattaaccaagtgtttgctactagtagggctgtaaaaatatctcctaattctcctgtggctaggttgagacctcgttctgggaaatatatgctaggggaggtgagcgctgcgagggttccgcttctgcacctttctaattctcagattaatgactaggctgagctctcaacagagagatatgctttgatggctttgatgcttccttcagatagtgcaaggcaatggcatgtccatgagttggaactcgtt

SEQ ID NO: 90151 - DNA, 409 bp, Arabidopsis thaliana columbia
gaaagaatggcttctgtaccatgttccttcaagctctctgctcatcgtagatcttcttccaaggtaatcatcttctctctatctccttcaatctgtgtctctgtatagttcacttatgctgagtcaactcgttctctcttggtctcgatcaaaacttagtcaaatcgttccttccatttcctttcagtttgattccactttaatggcgtcataatcatctcttaaatcaaacaatgactccactatctcgtttccgatctcttgttacataaagttttctgtagcattgagatttgtccttttcggaattgcttttatttgcgcagcttgactggaaacaacaaacaagtgtagtagtttagtagaaagactgagagataaaacgaagagtcaagttcctaagtccatt

SEQ ID NO: 90152 - DNA, 933 bp, Arabidopsis thaliana columbia
  unsure (1)..(933): unsure at all n locations
agctctatacgactcactatatggaaagctggtacgcctgcaggtaccggtccgggatttccgggtcgaccacgcgtncgtacggctgcgagaagacgacagaggggggaacagaacatagaacgaaagaaagaatggcttctgtaccatgttccttcaagctctctgctcatcgtagatcttcttccaagcttgatggaaacaacaaacagtgtagtagtttagtagaaagactgagagataaaacgaagagtcaagttcctaagtccattacttgcattaaccgcttagagatatcgcgtatagcaccattacacgcaacgatgaatagcccgaaaggatttggacctcctcctaagaaaaccaagaagtcgaaaaagccaaaacccggaaaccaaagtgatgaagacgacgacgatgaagacgaagatgatgatgatgaagaagatgaacgtgagagaggtgtaattccagagatagtgaccaacagaatgataagcagaatgggatttacagtggggttaccactcttcattggtcttttgttcttcccattcttttactatctcaaagtgggattgaaagttgatgtgcctacatgggttccgtttattgtttcgttcgtcttctttggtacggctttagctggtgtgagctatgggatcgtgtcttcgagctgggatccgttgagagaaggttccttgttaggctggaacgaagctaagaagaactggcctgtcttttggcagtccttttggaattcctcagacaagagatagactatgcaataaaagctctttggttttataaacagatgtaaattttgctgaggatttactttggagattttctataaaaaaaaaaaaaaaaaaaaaaaaaaaaaagcggccgctttagaggatcccagcttacggacgcgtgcatgcgacgtca

SEQ ID NO: 90153 - DNA, 585 bp, Arabidopsis thaliana columbia
atacggctgcgagaagacgacagaagggggagtgtgaggtgtcatataaagcaaaatacactcttccctctctatctatctacgcatcatcgatctcgaagtacgtttcggttttcaggccaatctctgaatctgcgtgacaaaagcaacaaattacatatctctctctctgcgcgacttcgaagatcaacatccatggcgtcacaggtaaggtcagtaaaagttggcaatctctcttcaggagcaactgagcatgatattaaagagtttttctctttctctggtgaagttgaaagcatcgatatccaaagtaacgagcatagtgcttatgtcacatttaaagcaactgccggaagggtattctccgattcattcgtccgaatactcgaagaactaatatcatcaagttaaacagtttcctttgtttctccttgttggtttctttgacatggaagttggaaatctggtttggtctttgggatgtaccatataagctatgcctggattttccctaccactattagactatagtttgggtttttttccaatatacatatttaataagttgacatttaaatctttctt

SEQ ID NO: 90154 - DNA, 1116 bp, Arabidopsis thaliana columbia
  unsure (1)..(1116): unsure at all n locations
tacgcccnnnnnnnnnnnnnnnnnnnnnnnnnnnnnnnnnnnnnnctgcggtaccggtccggaattcccgggtcgacccacgcgtccgtcgatctcgaagtacgtttcggttttcaggccaatctctgaatctgcgtgacaaaagcaacaaattacatatctctctctctgcgcgacttcgaagatcaacatccatggcgtcacaggtaaggtcagtaaaagttggcaatctctcttcaggagcaactgagcatgatattaaagagtttttctctttctctggtgaagttgaaagcatcgatatccaaagtaacgagcatagtgcttatgtcacatttaaagaaactcaaggagcagagactgctgtgctcttatctggagcgagtattgccgatcaatcagtcatcattgagttggctcccaactacagtccaccagcagcccctcatgctgaaacacagagcagcggtgcagaatctgttgtccagaaggcagaagatgttgtgagcagcatgttagcaaagggtttcattcttgggaaagatgctgtcggcaaagcaaaagcttttgatgagaaacatggtttcacctcaaccgccaccgcaggagttgcttcactagaccaaaaaatcggtcttagccagaaacttacagctggaacaagcttggtgaacgaaaaaatcaaggcggtggaccaaaactttcaggtaacagagaggaccaagtctgtgtatgcagctgcggagcagactgtgagcagtgcaggaagcgctgtgatgaaaaaccgttacgtgttaactggtgtgagctgggccgcaggagcattcaataaagtggctcaagcagctggagaggttggncagaaaccaaaaggggaggttgaagctgagcaaccatcgcaaccagcacagtcgcagcngcaactgccagaagggtattctccgattcattcgtccgaatactcgaagaactaatatcatcaagttaaacagtttcctttgtttccccttgttggtttctttgacatggaagttggaaatctggtttggtctttgggatgtaccatataagctatgcctggattttcccttcccctattagactatagtttgggtt

SEQ ID NO: 90155 - DNA, 522 bp, Arabidopsis thaliana columbia
gatttccacaatatctttcttcacactttctttcactttcccgggaaaacagccgagaaaataaaagaaacgaagaaaagtttgttcctttgtggggatcaaagaagaatgtactcggcgattcggtcttcgcttcctctagatggcagcttgggagactactctgacggaaccaatcttcccatcgacgcttgtctggtcctaaccactgaccccaagcctcgccttcgttggacctctgagctccatgaaagattcgttgacgccgtcactcagctcggcggacccgacaaagcaacgcctaaaactataatgagaacaatgggagtgaagggtctcactctttaccatctcaaatctcatcttcagaaattccgcttggggaggcaatcttgtaaagaatcaattgacaactctaaggatgtttcttgtgttgcggagagtcaggacactggttcatcttcaacatcatccttaagattggctgctcaagaacagaacgagagttaccaggtcactgaa

SEQ ID NO: 90156 - DNA, 904 bp, Arabidopsis thaliana columbia
  unsure (1)..(904): unsure at all n locations
nnnnnnnnnnnnnnnnnnnnnnnnnnnnnnnnnnnnnnnnnnnnnnnnnnnnnnnnnnnnnnnnnnnnnnnccacgcgtccgctgttttaaaacagaggagaagaagcttgagctaaagcttggaccacctggtgaagaagatgatgatgaatcgatgataagacacatgaagaaagaaccaaaagacaaatctatcctctctctcgctggcaaatacttctctccttcttccaccaaaaccacatcccataaaagaactgctcctggtccagtggtgggatggcctccggttcgatccttcaggaagaatttagctagtggaagttcttcaaagcttggaaatgactcaaccacctccaatggtgttaccctcaagaaccaaaagtgtgatgctgctgctaagacaacagaaccaaagagacaaggaggcatgtttgtgaagatcaacatgtatggtgttcccattggtcgtaaagttgatctcagtgctcataatagctatgagcagttatctttcacagttgacaagctcttcagaggtcttcttgcagctcaaagagactttccatcatccatagaagatgaaaaaccaatcactggattattagatgggaatggagaatatactcttacatatgaagacaatgaaggagacaagatgcttgtaggagatgttccatggcaaatgtttgtgtcttcggtgaagaggctgcgtgtgattaaaacttctgagatttcttcagcattaacatatggaaatggtaagcaagagaaaatgagaagatgaagaaaaagatcttttacagcttttagagaagtagagagatgttattaattgcattttgcctttaaactttgatgagtttttggtcttggaaaagtttctgatataagtctgatgta

SEQ ID NO: 90157 - DNA, 708 bp, Arabidopsis thaliana columbia
  unsure (1)..(708): unsure at all n locations
aggccnnttnggaaccccnntggtcccntgcnaaagttccccggcccaaacccttggccgtncttcccgttgnaacccttcggggcctcttcnncccaagggcttcccatcacccatagaggatggaaacccaatccctggattattagatgggaatggaggatatcctcttacctatgaggaccatgaaggggacaagatgcttgtaggagatgttccatggcaaatgtttgtgtcttcggtgaagaggctgcgtgtgattaaaacttctgagatttcttcagcattaacatatggaaatggtaagcaagagaaaatgagaagatgaagaaaaagatcttttacagcttttaaagaagtagagagatgttattaattgcattttgcctttaaactttgatgagtttttggtcttggaaaagtttctgatataagtctgatgtacattctggtttgttacatcttcttttggcttttgagatatcatagagttttgttggaactcaaagaccaaacagtgcaatgatgattttggggtcttgagtaaatttacaaacccttttaggcatattataatagtcttctgtttttaagttttggtaatgattattcacacttgatcaacacttttaagtaatgtaactctccctatgtcagcaaagcatccttttcgaaaaacggagaaaagaaacaatctttttctctgcc

SEQ ID NO: 90158 - DNA, 1388 bp, Arabidopsis thaliana columbia
  unsure (1)..(1388): unsure at all n locations
cacacgcgtccgcccacgcgtccgcccacgcgtccggaaaatcttcaaagtgtttgcagagaaatctaaattcatcaacagttttttacaaaagaaatggaaaacggagaagcaaaacagagtgtacctcttctcactccctataagatgggaagattcaatctttcccatagggttgttctagcaccattgacgagacagagatcgtacggaaacgttcctcagcctcacgctgccatatattactctcagagaacgactccaggaggttttctcatcactgaagccactggagtttcagatacagctcaaggatatcaagatactcctgggatatggactaaagagcatgtggaggcatggaagccaatcgttgatgctgtacatgccaaaggtggtatcttcttctgtcagatctggcatgttggccgcgtttctaatagcgggtttcagccaaatggaaaagctcctatctcttgttcggataagccattgatgcctcaaattcgctctaatggcatcgatgaagctctctttacccctccaagacggcttggtatcgaagaaatccccggcattgtcaatgattttaggcttgctgcaagaaatgctatggaagctggttttgatggagttgagattcatggagctaatggctatctgattgaccagttcatgaaggatacggtgaatgatagaactgatgaatacggtggatcattgcaaaaccgttgcaaatttcctctagaaatagtcgatgcagttgctaaggagatcggaccagaccgtgttggaatcaggctctctccatttgctgactacatggaatctggagacactaatccaggagcattagggctttatatggcggaatctttgaacaaatacggaatcctctactgtcatgtgattgaagcgagaatgaaaacaatgggagaagtacatgcttgtcctcacacactaatgccgatgaggaaagcctttaaggggacttttatctccgcaggaggtttcacgagggaagatgggaatgaggctgtgtcaaagggaagaactgatttggtggcttatggtcgatggtttctagccaacccggacctgccaaagaggttccaagtggatgcaccgctgaataagtacgatagaccaacgttttacacttctgatccagtcgtcggttacaccgattaccctttcctcgaatcaacagcttaaaattgttatcaataatgtaatgtagtgtgtttcccttatataagatgtaataagtttctggcttttcatttatactttttaagtttaagtcataaaaccttcnnnnnnnnnnnnnnnnnnnnnnnnnnnnnnnnnnnnnnnnnnnnnnnnnnnnnnnnnnnnaacggaattac

SEQ ID NO: 90159 - DNA, 838 bp, Arabidopsis thaliana columbia
  unsure (1)..(838): unsure at all n locations
nnnnnnnnnnnnnnnnnnnnnnnnnnnnnnnnnnnnnnnnnnnnnnnnnnnnnnnnnnnnnnnnnnnnnnnnatgaaaaaatgtattgctatcatcggatggaaagagaattaagatcttccttttcaccacaaaagtaacaaagagtggttggccatttttttatgtacactgacttctacaatctttgttgcattgtttattcaagaaccctaactcctacacaggtaaactgtaaggagagatgagcttatcggttttggtgtgagcagaggcagtctactcggcgaaagagtgttcattcaattgctcggttggaagcggctcaaccttctcggccttcccgtctttctttgggattatcagaccgtaacctccttcttttctcttgtacactatgtttatctcaccagtttcttcattttggaagccatagaagtcgtgactgactagttccagctgctcgactgcctcagcgacagtcaatggtggcatctcgaaagtcttggtacggacaatctccttgatcaaatcatcctcttcttcttcttctcctacgctcgagtcagtactgtcctcaacatcctccacaaccggctcaatcactggttcccttaccttcaatctgttgaaacctttcatgtgccttccatggtctgagtccttctccttgatcttcctcagcttcctctgtattatcgttgataccaagtcgatacaagcgtatactgtctcagcatcttcctcagcacgcacaacaccatgcttctttgtaaacaatgtcaccttacatcttcgaatcctagggnctttaccaaactctccaccacgnanagag

SEQ ID NO: 90160 - DNA, 772 bp, Arabidopsis thaliana columbia
caaaagataaacctctctctctctatctatcttatgtcaaaagacagatttattaacaaacgcaaatcataaatctttttcttcttccgagaaagaatgtctaaatcatcgtataatcacatcttcatcttgatcttgtgtttatgtttgagatcatcatcagccttcacgaatctcaacaccttaagctttgaagaatcactttctcctctctttggagatgccaatctcgtccgttcacctgatgatctctccgttcgtcttctcctcgatcgctataccggttctggtttcatatcatcgaatatgtatcaacatggattttacagctccatgattaagcttcccgctgattatactgccggcgtcgtcgtcgccttttatacatcaaacggagacgtgttcgagaaaacacacgacgagttagacatagagtttctagggaacataaaaggaaagccgtggaggtttcagacaaatctatacggaaatggaagtacacatagaggtcgtgaagagagatatcgtctctggtttgatccttctaaggagtttcatcgttatagcattctctggactcctcacaagatcatattttgggtagatgatgtgccaataagagaagtgatcagaaacgatgcaatgggagcagattatccggcaaagccaatggctctttacgccaccatttgggacgcttctgattgggctacttccggcggcaaatacaaagctaattacaaatttgccccattcgtagctgaattcaaat

SEQ ID NO: 90161 - DNA, 1284 bp, Arabidopsis thaliana columbia
  unsure (1)..(1284): unsure at all n locations
atgattctgagccaataatgataagaatcaccggctgttcacatgtggattgattacctcacattcatatttattacataaactcatctctctgtttttctttcttagaatcattcatatttcagacacaaaggcagagaaacaaattcttgtaacaatggcaggcagagagattctccataagatgaaggttggattatgcggatctgacacaggcagaggtaaaaccaaggtgtggaagaacatcgcacacggttatgactttgtgaaaggcaaagcgggccatccgatggaggactatgttgtgtctgagttcaagaaagtagacggccatgatttgggtttgtttgctatctttgatggtcacttagggcatgatgtagccaagtacttgcaaaccaatctctttgataacatactcaaagagaaggatttttggactgatacgaaaaacgctataaggaatgcatacatatcaaccgatgctgtgatattagagcagtcacttaaacttggcaaaggtggatcaacggctgtaacaggcattctgatagatgggaaaacgctagtgattgctaacgttggagactcacgtgcagtgatgtcaaagaacggtgttgcttctcaactctctgttgatcatgaaccaagcaaggaacaaaaggaaatagaaagccgtggtggctttgtatcaaatattccaggggatgttccaagagttgatggacaactagcggttgctagggcgtttggagataagagcttaaagatacatctgagctcagatccagacataagagacgagaatatcgatcatgagactgagtttatccttttcgcaagtgatggagtttggaaggtgatgtcgaaccaagaagcggtggatttgatcaaaagcataaaagatccacaagcggcagccaaggagttgatagaagaagcagtctctaagcaaagcacagacgacatttcttgtatagttgtaaggttccagtgatagataaacttttgttgtctataaactttaccattccggtgtgtgtgagagggagaaacaaaagacgtataaaacgcctaagctgtgtgatcaaagtcatgtcttgcttaaacaattccattgacaataaatgttctggccacaatgtaaaatccatggttgttgagccaatactctaaatggtttcttttaaacaaaaaaaaaaagnnnnnnnnnnnnnnnnnnnnnnnnnnnnnnnnnnnnnnnnnnnnnnnnnnnnnnnnnnnnnnnnnnnnnnnnnnnacaat

SEQ ID NO: 90162 - DNA, 548 bp, Arabidopsis thaliana columbia
cagctctactacgactcactatttggaaagctggcacgcctgcaggtaccggtccggaattcccgggtctacccacgcgtgcgggacttgctaaatcaatagcttgggatggtgaaggtgctacatgtctcatcgaggtaactgttaaaggaacagaaactgaagcagaagcagcgaaaattgcacgctctgtggcttcctcttccctggtcaaagcagctgtttatgggagagatccaaactggggacgcatagctgcagctgctggctatgccggggtttcttttcagatggataagctgaagatatccctcggcgagttctcactcatggagagtggtcaacctcttccgtttgacagggatggagcaagtaactacctcaagaaaaccggtgaggttcacggaacagttacaatcgatatatccgtaggtgatggtgcagccatcggaaaggcatggggatgcgatcttagctatgactatgtcaagatcaacgctgagtacacctcatagaactgagaccgagagacagagtttcatttactg

SEQ ID NO: 90163 - DNA, 639 bp, Arabidopsis thaliana columbia
  unsure (1)..(639): unsure at all n locations
cnngtcgtatcaggcttctaccatgctggntgtaaggcctcatgcncacgnggtactttnagggacngaactganncagaaccacgaaaattgcacgctctgtggcttcctctcccctggtcaaagccacctgtttatgggagagatcccaaactggggacgcatagctgcagctgctggctatgccggggtttctttttcagatggattaagctgaagatatcccctcggcgagttctcactcatggagagtggtcaacctcttccgtttgacagggatggagcaagtaactacctcaagaaaaccggtgaggttcacggaacagttacaatcgatatatccgtaggtgatggtgcagccatcggaaaggcatggggatgcgatcttagctatgactatgtcaagatcaacgctgagtacacctcatagaactgagaccgagagacagagtttcatttactgtttttgtgttatatctcaaattataaactgaatttggttcaaataagcggacaacgtttcaacaataaagttccattgacttattctcaaaaaaaaaccaaaaaagggaggccgctctagaggatccaagcttacgtacgcgtgcatgcgacgtcaagctcttctatagttcacct

SEQ ID NO: 90164 - DNA, 629 bp, Arabidopsis thaliana columbia
  unsure (1)..(629): unsure at all n locations
atccgatctaatcggcaaaattttctgctcctgagaaacaagtagagatactaaagatggaatctttgaactaaattcgaaaccttttaatgggtaccgagtcgggttcggatccagaatcgagctcaaacgggtggagccgtgctcgtggtctagttgtcaagactctggttttaattggcggtgctcttctcatcaagcgtctcactaaatccaccactcgtagagatcacgcccgtgtcgtctctcgttctctcaccggagagaagtttacgagggagcaagcgtcaagagatcctgataattacttcaacataagaatgctgagttgtccagctgctgaaatggtggatggttcaaagggttttttatctcgaacaggcattttggggggctcctcaagaaaccgttttcgccaaaantttatatatgggtgaaaccgtgtcccaaaaggggctaaaaatgtgatgttnagggtaagttcatatgcggtcagagattnttgagggnttcaaaaatttctnttngccggcctaaggnccacggccacttcctgaggaggtttttggtncatttgggggnatttacggctnacancnnatttttntacccnggaacgtnttttcggt

SEQ ID NO: 90165 - DNA, 418 bp, Arabidopsis thaliana columbia
gagagatcgaaatttcctcttctcaaaaaactcaaaatttgaagatgaaggacagagaggaatcatcatcgtcttcttcttcaatgacaacaaaaaaaactaatggaataatcaacaacggcgaacacgaacctcgagatatcaacatccgatcattctcttctgttccttcttctcctcgtaacgcttcttccaaatacgatttcgtcaaggtcaaagtatggcttggagacaacgcagatcactactatgttctgtctcgattcttagtctgtagaatgttaactgttactaagatcccaaatcatgaagctataaagatttctcttgaactcaagaagcttctaattgacaacagtcttcttgatgtctctcagtctgatttggaaaccaatttgtttaagctaatggagcgacg

SEQ ID NO: 90166 - DNA, 610 bp, Arabidopsis thaliana columbia
aattatgtcccaagagtcatcatttactcgctttaaacaccatgtatcagctcatcgattcacgggtttcaactatttcatactgccgtagaggtttcaaagtggcttggacttgattgtggacgacttggatgaagaagaagatgaaggtcccgtgatctatgaggacaaggacagtgatgaagacgaagaagaaggaatagaggaagcaatggagacagatgaagaggcagacgactcagcagatgaagctgctgatggtgtgaatgattttgaaggatttgacgacatgagtgattgataaagctcctgaaaatggcaaaagttttgatttgtgtgaggctgatgttagatgttaagaatatggctaaaaggttcaatctttcgtcaagaagtctgtaatacgtaatggttatatcgatatgaacgagactttgtgctaaggaagagttaatttttaagattaaaaaaaaatagacaagaataaggtgtatctaaaaatggaaagaatgaagttggaaaggtcaaaaaaaaaaaaaaaaaaaaagggcggccgctctagaggatccaagcttacgtacgcgtgcatgcgacgtcaaagctcttctat

SEQ ID NO: 90167 - DNA, 809 bp, Arabidopsis thaliana columbia
  unsure (1)..(809): unsure at all n locations
aaccagattcggacatctcgtcgaaaatggcgtgctcaattggtaacgctttcaggtgttcttctgatacgctgcgttttgctccccgacaacaatgcagcagccgcctaaaccctaatccttcctctttcctctcctttaattcctccccaattctcgcacagaatttgggtgcttcttcttcgtcactttcccgacggactatacgagctagaacaaaaatggctgcgtcggaggcttccattaacgggagcaacaggatgctggtctttgtgccaccacatcctttgatcaaacactggatctctgttctgagaaatgaacaaactccttgtcctgttttcaggaatgcaatagctgaactagggagattactcatgtatgaagcatcacgagagtggctgccaactgttgtgggtgaaataatgtctccaatgggtcctgcttctggtgaattcattgatcctagagagcctattgcggttgtnccgatattaagagctggtcttgctcttgcggaacacgcatcctcagttttaccngctaataaaatttatcatttaggagtaagtagagatgagaaaacacttttaccatcggtgtatcttaacaagttgcctgatgaatttcccaaggaattcaagagtatttttggtcgacccagttgcttgccacaggtggtaccntaatgggnggcggtggntnctntttaaggaccgtggnttttttttttcagcaaattcaaagggntttttcgggttgtngnaccccctnaanttttngaggttaacnggaatttccccgggntt

SEQ ID NO: 90168 - DNA, 723 bp, Arabidopsis thaliana columbia
tcagctctacacgactcatattgggaaagctggtacgcctgcaggtaccggtccggaattcccgggtcgacccacgcgtccgtcgtactcgagtaggtctcagttacgtaaaggatcgagcttaaaagatgagtggagttgaagagaaagtttctggaacgacaaagacacctgcagatttcctcaaatccatccgtgggagacccgttgttgtcaagctcaattctggtgttgattatcgaggcactcttacttgtcttgatggatatatgaacatagcaatggagcagacggaggagtatgtaaacgggcagctcaagaacaaatatggtgacgcctttatccgtggaaacaacgttctttacatcagtacagtaaacatgactgtagcagacggagcctaggcccatcatgatcatcaacaacaacaacagtggtcatgttatggctgccatttttgttgtcttcttctacctcatattaaaagagtagtagacatgtaccaagattgtcatcctatgttcttcagtagatttttgggaaacagacatcacttttttcttagtaatatgaaactcttccatgtggcccccgaaaaaaaaaaaaaaaaaaaaaaaaaaaaaaaaaaaaaaaaacaaaaaaagggcggccgctctagaggatccaagctacgtacggcgtgcatgcgacgtcatagctctactataagtcacctagatcaat

SEQ ID NO: 90169 - DNA, 532 bp, Arabidopsis thaliana columbia
gctctctacgactcactatagggaaagctggcacgcctgcaggtaccggtccggaattcccgggtctacccacgcgtggcgcgtcgtcacatggctcacattccgatgctcagattaataccacgtaaccgttccctatgacgttgtctccgttcttcgtctcttcaaccttcaattttgcaaaccctaaacgtttcgttcgttagtcgcgcgtactcagatttcaatgttgatcgtcgattatgtggttgattgctacgtcgttacccagatgttccattgatattctaggcatggcacaaccatgaagagctttctggcgtgagatacaatatcatctttgttggatcaacatgtcttttcatttggataagaccgagctgatgaagagtcattgactcattgttcctatagtgcatcaactaaatctttttgtatgaggacacactcaaaagcattctcccttcgagtggccaaaggttgctgtgctactttcttctcttctatggaggtggttcggatcttgggacca

SEQ ID NO: 90170 - DNA, 439 bp, Arabidopsis thaliana columbia
  unsure (1)..(439): unsure at all n locations
tnctcctttcctcctccaccgcacagatccaagacattttgattacactccatcgccggcgaaaatggtgacggaaaagaaaacgaagaagtctcatgagggtatcaacagtaggttggctcttgttatgaagagtggtaaatacactcttggttacaagtctgttctcaaatccctccgtggctccaaagggaaactgattctaatctccaccaattgcccaccgttgagaagatcagagattgagtactacgcaatgctcgctaaagttggtgtccaccattacaatggaaataacgttgatttgggaacagcttgcggaaagtacttccgtgtttcttgtctgagcattgttgatcctggtgattctgacattatcaagtcaattcctggtgaccagtgatacaattttcagattttatttttcccagacttttta

SEQ ID NO: 90171 - DNA, 497 bp, Arabidopsis thaliana columbia
aggtagcactatagaagagttatgacgtcgcatgcacgcgtacgtaagctcggaattcggctcgagtggtaaatacactcttggttacaagtctgttctcaaatccctccgtggctccaaagggaaactgattctaatctccaccaattgcccaccgttgagaagatcagagattgagtactacgcaatgctcgctaaagttggtgtccaccattacaatggaaataacgttgatttgggaacagcttgcggaaagtacttccgtgtttcttgtctgagcattgttgatcctggtgattctgacattatcaagtcaattcctggtgaccagtgatacaattttcagattttatttttcccagactttttacccgtctttgtattcgagtctctcaaaattttatgagcaatagacattgtgtttcttctttgtcaagttttcttatattgaggaccggaaaagaaatttctttaaaaaaaaaaaaaaaaaaagggcg

SEQ ID NO: 90172 - DNA, 505 bp, Arabidopsis thaliana columbia
  unsure (1)..(505): unsure at all n locations
atgatatgnccnnnnnnnnnnnnnnnnnnnnnnnnnnnnnnnnnnnnnnnnnnnnnnnnnnnnnnnnnnnnnnnnnnnnnnnccacgcgtccgcccacgcgtccgagacgaagaacggaagaaggacttcactttcacggcgaagttaggattcgtgttctttaatcgtataggaggtctcggagattgtgagacgctaatgagtcggaaggatgataatcagtcaggtaagttcctgattctaaattttaatgtcataaacatgataacatcagttagtagtttggcttcgaaattttgtaattttgggtgattcaggacaagttggtcgtactctggtggactttatggaagtagccatcacaatgattgtatacctcaaacgtttttacccatctggtgagtaaagagcgatttgtgagattgacatgcatctccaagtgattgatcaattttgtgtgttgtatgtaaagcggcatttgaaaggaggagatatatgaatgtg

SEQ ID NO: 90173 - DNA, 541 bp, Arabidopsis thaliana columbia
  unsure (1)..(541): unsure at all n locations
cgaagaacggaagaaggacttcactttcacggcgaagttaggattcgtgttctttaatcgtataggaggtctcggagattctgagacgctaatgagtcggaaggatgataatcagtcaggagaagttggtcgtactctggtggactttatggaagtagccatcacaatgattgtatacctcaaaggtttttacccatctgcggcatttgaaaggaggagatatatgaatgtggtggtgcaaagagcaaggcatcctgagctacgcgactatattcactctgctgcttctggacttcttccttttattgaaaagggtcttgttgagagagtagcagtccgtgtttttcagcgaggataatgttccctgtagagaggttcatcttcaagatcacgattaaacccgtcttgcgctgctttagtagaagagggtcaacttgaagtttcccttaggtcctnttaatcaagctttccggctcaaaatccctaggnaaccntttcccnaaaatntnggtngngggaccgctntntnggcactccntnc

SEQ ID NO: 90174 - DNA, 595 bp, Arabidopsis thaliana columbia
cagctctcctacgactcactatttggaaagctggtccgcctgcaggtaccggtccggaattcccgggtcgacccacgcgtgcgcccacgcgtccgcggacgcgtgggagcgaatcaaggttcctccaaagaaggaagatgactttaattcttatttaatttccctttctccttttgcttcaccaaaatccacacattcatcaattaaaaaacaaaccctagattcttgaaaactggaactcattcacgaatcctaaaaagagagctcctttggttttcttgaaacccagattcttcaagctcagctatggcggtcttcaaaaccctagctttcctattcgttttaagcatcgtgatttaccaatcagtggctgttacagatgtaaattcatcgttttcctttaatgggtttgtgaaagctccaagctttgacaataatgttgctctgtttggagattcgaagctcgttcatggcggtccatcgatacaattgactgactcagtgagtcgcagtgaaggggcgggttatttacaagaaacccatcagactgttcccaggtaaagggggaacttttcccggcactttatctcggtgc

SEQ ID NO: 90175 - DNA, 832 bp, Arabidopsis thaliana columbia
aatacgactcactttagggaaagctcgtacgcctgcaggtaccggtccggaattcccgggtcgacccacgcgtccgcccacgcgtccggaaaaatgtcggcaagacctgaaggaagtccgccggaggttacgctcgagacctccatgggtcctttcaccgtcgagatgtattacaaacactccccgagaacttgccggaacttccttgagctatcccggagaggttactatgacaacgttctgtttcacagaatcgtcaaggatttcattgtgcaaggtggggatcctacaggaactggaagaggtggtgaatccatttatggttcgaagtttgaggatgagataaacaaagagttgaagcacacaggagccggaattttatcaatggcgaacgctggtcctaatacaaatgggagtcaatttttcatcaccttagccccacaaccgtccttggatggaaaacacacaatatttggtagagtgtgccgaggcatggaggtgatcaagaggctcggtagtgtccaaaccgataacaccgacaggccgatccatgaagtgaagattctaaggaccaaagtgatcgattgattggggcagaggagtttttgtcaaggagaagaagaagcatttagtaaaccgtttatgacatgaagaactataactctgtgtactgatcccttgatactattgtagactggtttttgtctaagtcttgactctactttgatggaaaaaaatgattgaaatacgttaaaaaaaaaacccaaaaagggcggccgctctagaggatccaagcttacgtacgcgtgcatgcgacgtcaagctcttctat

SEQ ID NO: 90176 - DNA, 512 bp, Arabidopsis thaliana columbia
  unsure (1)..(512): unsure at all n locations
nnnnnnnnnnnnnnnnnnnnnnnnnnnnnnnnnnnnnnnnnnnnnnnnnnnnnnnnnnnnnnnnnnnnnnnnnnnnnnnnnnnccacgcgtccgctccgataaccaaaaaatccctattttccgagatgaataatacacgagaagaagtaggggaattcactcaaatcttcaacgctttaatgagtcttatgaggaaatttatattcaaagttctacgcgtcggtccaatccctactaacatttctttcatcatggatggaaaccgtaggttcgccaagaaacgcaatcttgaaggcctagacgcaggacacagagctggtttcatatccgtcaaatatattcttcaatactgcaaagagattggtgtaccgtatgtcacactctacgcatttggtatggacaatttcaagagaggacctgaagaagtcaagtgtgtgatggatctaatgcttgagaaagtcgagctcacgatcgatcaagctgtatcagggaatatgaacggcgtgagaat

SEQ ID NO: 90177 - DNA, 542 bp, Arabidopsis thaliana columbia
  unsure (1)..(542): unsure at all n locations
nnnnnnnnnnnnnnnnnnnnnnnnnnnnnnnnnnnnnnnnnnnnnnnnnnnnnnnnnnnnnnnnnnnnnnnnnnnnnnnnnnnccacgcgtccgaagaaaccctaagacctcttcgaaatctccccagaaacacttatttcatttcttccttggccttgactacgcgtctttccttttactccggaaggaagatccagaaaggttttctttcgatcgttgcttttgactatgcatagatctggtacaacaatggcgtggaacgtattcaagttctgtactgccttacgaggtcttggatcgatcatgatccttttggttcttggtgttgtcggtgttacttattacgctgtcgttttgactaattatggtcctgcactctctcaaggtggccttgattctcttgctgctctcactatcttaatcctcttccatttcctcctggcaatgcttttgtggagctatttctcagtggtttttactgatcctggtgttgtgcctcctaattggagaccatctactgatgaagaaagaggtgaatctg

SEQ ID NO: 90178 - DNA, 507 bp, Arabidopsis thaliana columbia
  unsure (1)..(507): unsure at all n locations
atgatatnnnnnnnnnnnnnnnnnnnnnnnnnnnnnnnnnnnnnnnnnnnnnnnnnnnnnnnnnnnnnnnnnnnnnnnnnnnccacgcgtccgtcaggacttacaatgctaggctgcttggattagccaatgaggcgaaatcgaaagagctagtaaatctctttggagaacttaaggctagtgggctcaaacctgatgttttcagtttcaatgctatgattagaggatctatcaacgaaggaaaaatggacgaagctgaagcgtggtacaaagaaattgtgaagcatggttatcgtcctgataaagctacctttgctttattgcttcctgctatgtgtaaagcaggtgactttgagtctgcgattgagctcttcaaggagacattcagtaagcggtatcttgtcggtcaaacaacgttgcagcagttagttgatgaattggtgaaagggtctaagagagaagaagctgaggagattgtgaagattgcaaagaccaatgatttcttaa

SEQ ID NO: 90179 - DNA, 535 bp, Arabidopsis thaliana columbia
  unsure (1)..(535): unsure at all n locations
nnnnnnnnnnnnnnnnnnnnnnnnnnnnnnnnnnnnnnnnnnnnnnnnnnnnnnnnnnnngtttatctcaccacgcgttaacgtgagcaaggttgttcccaatagtccaattttagttaagagtgttaatgcttcaagatctcgaagagttctgttggcgtatgttcatcatcctttagctgctaataagggttcatctattgaagagttaaagcaaggtctttgttgtacaaagactgtcacttttgttagttctcggagatgttctacattgtgctttgttggaaagtctcaagacactgaaactaattcccaagttgtacaaaaagaaggtgagaagcaagtgatgccgaggaggaaaagtagtaactcaagccaacttttggtggaatatgtgtctaatgatgctaagtttgtgaatgaaagagctcgtaatgactttgttcttctatctcgtgggattatgagacttgatgctcgtgcacgacaggatgttgccattcttggttccgggttccttaaactcgatgctcgg

SEQ ID NO: 90180 - DNA, 509 bp, Arabidopsis thaliana columbia
  unsure (1)..(509): unsure at all n locations
tacgactcactatanggaaagctgctacgcctgcaggtaccggtccggaattcccgggtctacccacgcctggcgggggtgtttattatgagctacttccacaagaagtcattgttagtaaagaaatgggaagccgtgcaatatgtatacaacgtgtggcaccaccgtgttttgaagcctcgcaagtgaagaagatcaaaacagttggttcctttttggtgaatactaggagtaagagaagaagaagcactggtgtgaaatgtagcagcatagctgactacatcggaggtgacttggtgaagccggacatcggacaatggcttcaagacgtggaagaacacaaggcaatcgccatttacgctcctcatgaggggtggtacgaaggtgcgttatcgttaaccgtctcaaaatgcagggctactactttcttgacatctctgctcgtgggcttgggtgaccttgagactaccctttctcaagacctaccctggttggccctgctaatcttg

SEQ ID NO: 90181 - DNA, 756 bp, Arabidopsis thaliana columbia
ggtacgcctgcaggtaccggtccggaattcccgggtcgacccacgcgtccgacacaaggcaatcgccatttacgctcctcatgagggtggttacgaaggtcgttatcttaaccgtctcaaaatgcagggctactactttcttgacatctctgctcgtggccttggtgaccctgagactacccttctcaagaactaccctgtttgccctgctcatcttgggaaacaacctatagcaagatggtattatccaccagaagttgattacaggctcgctgctcttccccctagtgccaagggtcttgttgtatgggtcctcgaagcaaaggtcctctcaaaatcggagcttcaatttctcgctttacttccctctcttcgtcctaacgtcagggttattgctgaatgtggcaactggagaaagttcgtgtggaagcctctagcagaaattgcaaatctagctgcacaagagtaacttaatggcacaagtggagctaccagtgtatagtttttcatgaatgcatctcccgcaagtgtagcaatactcatcccatagtaaaagttaaaatctgtatttgtaacttggtagtatattcccatggagtagttaaagataatttctgactctgctttgtcacaaataaaagtatgtataatcagtaagattgataggacaaaaccaacaccaaaaagggcggaccgctctagaggatccaagcttacgtacgcgtgcatgcgacgtcgtagctgttctatagggta

SEQ ID NO: 90182 - DNA, 595 bp, Arabidopsis thaliana columbia
  unsure (1)..(595): unsure at all n locations
ccggcatctaatacgactcagtanagggaaagccggtacgcctgcaggtaccggtccggaattcccgactcgaggcaaattcctagtggctcatggcgtcatcatctgatcacacggcgaagataatcgacggcaaggcgattgctcataccatcagatcagagatcgccgaggaagttcgcggtctatctgagaaacacggcaaggtcccaggactagctgtagttattgttgggagccgaaaggattcacagacctatgtgaatacgaagaggaaagcgtgcgctgaggttgggattaagtcatttgacgtgggcctaccagaggaagtttctgaagctgatcttattagcaaagttcatgaactaaattcaaatccggatgtccatggcatattagttcaactcccattgccgaaacatattaatgaggagcatatattgggtgcaatcagcattgataaagatgtcgatggcttccatcctttgaatattggtaagctagccatgaaaggcagagaacccctcttgcttgcttgcaccccaaagggatgtttggaactcctagctagaagcggcgtaaagataaaggggca

SEQ ID NO: 90183 - DNA, 476 bp, Arabidopsis thaliana columbia
tcattcatcattggatgttctctactgttcttgaccccaatgttcaaatttataccacagtgtgctttagcagcaatagttatctctgctgttagtggtttggtggactatgaaggggcaatctttctgtggcgtgtggacaagagagattttactctttggaccatcactagcaccaccactttgttctttggaatagagattggggtcctcattggtgttggtttttcacttgcatttgttatacacgagtctgcaaaccctcatatagctgtcttggggcgtcttccagggaccactgtgtacagaaacatgaaacagtatccagaggcatacacttacaacgggattgtgattgttcgaatcgatgctcccatttattttgccaacataagctacatcaaggacaggctacgagaatatgaagttgctatcgacaaacacacaagcaagggcccagatatggagaggatcta

SEQ ID NO: 90184 - DNA, 809 bp, Arabidopsis thaliana columbia
  unsure (1)..(809): unsure at all n locations
nnnnnnnnnnnnnnnnnctcttcctgattgactctatttaaaaacccgatcggaaaattcgaaatccgttcaattgccacgcgaatcgtcgaaaaatggatcaaacagtatcggaaaatctcattcaggtgaagaaagaatcaggcgggatcgccgtcatcacaatcaaccgtccgaaatctctcaattcactcacgagagcgatgatggttgatctcgccaaggcattcaaggatatggactccgacgaatcggtccaggtcgtgattttcaccggatcaggtcgatctttctgctctggcgttgatttgactgcggcggagtctgttttcaaaggagacgtgaaggatccggaaaccgacccggttgtgcagatggagcggttacgtaaaccgatcatcggagctattaacggttttgccatcaccgccgggtttgaactcgccttggcctgtgatattttggtcgcttctagaggagctaagttcatggatactcacgccaggtttgggatatttccttcatggggtttgtctcagaagctgtcgaggatcatcggagcaaacaaagctcgagaagtttctttaacatcgatgccactgacagcagacgtggctgggaagttagggtttgtaaaccatgtggttgaagaaaggagaagcgttaaagaaaagctagagaaatcgcagacgcctattaattcaagaatgaacaagggcatgggttctgaaggagttaaatcccgtatcaaatgatgggcccttaagcttgatcttggcatcctctcacactagaaaggagcgagctcc

SEQ ID NO: 90185 - DNA, 857 bp, Arabidopsis thaliana columbia
  unsure (1)..(857): unsure at all n locations
nnnnnnnnnnnnnnnnnnnnnnnnnnnnnnnnnnnnnnnnnnnnnnnnnnnnnnnnnnnnnnnnnnnnnnnnnnnncaccaccacgcgtccgataatttcctcttcatatttcaagaaaactttaatctttttttgtgtgtagaattctatatttctggtaactaaatggcgagcgagggagttgtagttgtcggaggggagagagaaggggctgagatcgtgtacggggcggaggaatgttacaagcaatcattggagcttctagaggagctagggtttccaaaaggagtcatgcctttgaagaatcttgttgagtgtggaagagttagagccactggttacgtttggatgaagcaagacactccttacgagcatttcttcgaagccaccaacactcgtgtctcctacggtctcgaagtcaccgcctatgtcgacaagtgttgtatgaagaagatgacaggagtgaagagtaagcagatgtttttgtgggtaccgatcgtggagatgagtatggaggagccaaaaagcaagaagatttacttcaagactcctatgggaatcggcaggtctttcccccgttaccggattcatggacgaggaagagaaacgcaacttttacttggagaatcccaaaaactaaaccaactaataattattcttatgattattacattttgtggtgctttttattttatttcttgtaaggttgctctatgctattaaattctatcaataatacattttctgggagtgttgattattaaaaaaaaaaaaaaaaaaagnnnnnnnnnnnnnnnnnnnnnnnnnnnnnnnnnnnnnnnnnnnnnnnnnnnnnnnnnnnnnnnnnnnnnnnnnn

SEQ ID NO: 90186 - DNA, 627 bp, Arabidopsis thaliana columbia
  unsure (1)..(627): unsure at all n locations
tgcaggtcccgtttccggtttcccgggtcgacccagcgtccgtgttcttgagtatcttaccgatgatttccctgacatggatgtgattggaatctctggtaacttctgttcggacaagaaacctgctgctgtgaactggattgagggacgtggtaaatcagttgtttgcgaggctgtaatcagaggagagatcgtgaacaaggtcttgaaaacgagcgtggctgctttagtcgagctcaacatgctcaagaacctagctggctctgctgttgcaggctctctaggtggattcaacgctcatgccagtaacatagtctctgctgtattcatagctactggccaagatccagctcaaaacgtggagagttctcaatgcatcaccatgatggaagctattaatgacggcaaaggatatccatatctcaagtcactatgccatctatcgagggtggggacagttgggaggaggaacacagcttgcatctcaatcagcgtgttaaacctgctcgggttaaagggcannncagagtnnccgggattancgaaggggctnnnacgttttagccgngcagttttcttggggtttcttaatcccattcactgccctttgngcntaatcatgcctgc

SEQ ID NO: 90187 - DNA, 2389 bp, Arabidopsis thaliana columbia
acttatcacgccacctcaccacctctctcctctctcctctctctcccccctggagagattattcattccctccaatggatctccgtcggaggcctcctaaaccaccggttaccaacaacaacaactccaacggatctttccgttcttatcagcctcgcacttccgatgacgatcatcgtcgccgggctacaacaattgctcctccaccgaaagcatccgacgcgcttcctcttccgttatatctcacaaacgccgttttcttcacgctcttcttctccgtcgcgtattacctcctccaccggtggcgtgacaagatccgttacaatacgcctcttcacgtcgtcactatcacagaactcggcgccattattgctctcatcgcttcgtttatctatctcctagggttttttggtattgactttgttcagtcatttatctcacgtgcctctggtgatgcttgggatctcgccgatacgatcgatgatgatgaccaccgccttgtcacgtgctctccaccgactccgatcgtttccgttgctaaattacctaatccggaacctattgttaccgaatcgcttcctgaggaagacgaggagattgtgaaatcggttatcgacggagttattccatcgtactcgcttgaatctcgtctcggtgattgcaaaagagcggcgtcgattcgtcgtgaggcgttgcagagagtcaccgggagatcgattgaagggttaccgttggatggatttgattatgaatcgattttggggcaatgctgtgagatgcctgttggatacattcagattcctgttgggattgctggtccattgttgcttgatggttatgagtactctgttcctatggctacaaccgaaggttgtttggttgctagcactaacagaggctgcaaggctatgtttatctctggtggcgccaccagtaccgttcttaaggacggtatgacccgagcacctgttgttcggttcgcttcggcgagacgagcttcggagcttaagtttttcttggagaatccagagaactttgatactttggcagtagtcttcaacaggtcgagtagatttgcaagactgcaaagtgttaaatgcacaatcgcggggaagaatgcttatgtaaggttctgttgtagtactggtgatgctatggggatgaatatggtttctaaaggtgtgcagaatgttcttgagtatcttaccgatgatttccctgacatggatgtgattggaatctctggtaacttctgttcggacaagaaacctgctgctgtgaactggattgagggacgtggtaaatcagttgtttgcgaggctgtaatcagaggagagatcgtgaacaaggtcttgaaaacgagcgtggctgctttagtcgagctcaacatgctcaagaacctagctggctctgctgttgcaggctctctaggtggattcaacgctcatgccagtaacatagtgtctgctgtattcatagctactggccaagatccagctcaaaacgtggagagttctcaatgcatcaccatgatggaagctattaatgacggcaaagatatccatatctcagtcactatgccatctatcgaggtggggacagtgggaggaggaacacagcttgcatctcaatcagcgtgtttaaacctgctcggagttaaaggagcaagcacagagtcgccgggaatgaacgcaaggaggctagcgacgatcgtagccggagcagttttagctggagagttatctttaatgtcagcaattgcagctggacagcttgtgagaagtcacatgaaatacaatagatccagccgagacatctctggagcaacgacaacgacaacaacaacaacatgatctgaatctgaatcatcatcctctcaaagaaggacaacaatccaaaacaagggcaggctttttacaacgcattcactcaaaactcgctggtggacagattttagccatgtgcgtatgcgtttgcccttttgttaaataaaaaaactatttgttttgtttgtttgacttgatatctttttttgggattgaggattgagagagatagagagattttacaaactttctctctttctctctttctctctttctcatggataattcgtgtctctttgatttgtctaaggtttgtctttgtttgttaggaagtggtctatatgaacgaaaaatttgtgtatggtgcagttgcgtttggggacatttttgagattttttctctgttttgtttcctctcttcgtttttattgtttgttacatataaaatatttctctgtatgttggaacatctctctctctttagttgttgttggtaaaagatacggatcttctttcctccagaagaatccatctatataatattaccatctatgtgttctact

SEQ ID NO: 90188 - DNA, 485 bp, Arabidopsis thaliana columbia
actcactttagggaaagctcgtacgcctgcaggtaccggtccggaattcccgggtcgacccacgcgtgcgcccacgcgtccgaaaaatcgtttttttttttttttgccaggcttctctcactctccttcgccgcggaatcgtctctcggagccgcgaaaggactcttagggttaaagattcttccccaaatctccttctctcttcctcagctgatttcgactccgatcaattttctaggtgtttgaaggcatttgaaaggatgggagacaatggcaaagatgaaattatggtcgaggcatctcaatgcgctggtgctatggttgagataaagataaagacgttggattctcaaacgtacaccttacgtgtagataaatgtgtccctgttcccgcattgaaggagcaagttgcttccgttactggtgtcgttacggaacaacaacgcttgatatgtcgtggaaaagttatgaaggatgatcaactc

SEQ ID NO: 90189 - DNA, 565 bp, Arabidopsis thaliana columbia
  unsure (1)..(565): unsure at all n locations
gaggtattcttgaacaagaacgtggaccgtgcgatcaggacactctcggtgtttatagcaatctagctgctacctatgacgctatgggaaggatagaggatgcgattgagatattagagcaggttctgaagctgagagaggaaaagctcgggactgcgaatccggattttgaagacgagaagaaacgtttggccgagcttttgaaggaagctgggcggtcgcggaactacaaagccaagtcgctccagaatctgattgatccaaatgcaagacctccgaagaaagagtcttctgctaagaaatggcccagcctcggtttcaagttctgaggaaaaaattatcatataaaataaatcatccacatatatattcaatattttattttattgttattgttatattttttatctgatctattttctgtatcataatctgaggttgatgaattaatttcatgtatagtgtttttatttgagtttggtgaaatactgccaagatggtgagctgtttgtttgagtttgaaatttctttaattcaatcactttttatcttcttctgatnnntt

SEQ ID NO: 90190 - DNA, 1150 bp, Arabidopsis thaliana columbia
  unsure (1)..(1150): unsure at all n locations
ggtcttaagatccagatccagactttgggtgatactgatccacgagttggtgaaacttgcaggtacttagcagaagcatatgttcaagcaatgcagttcaataaagcggaagagttatgcaagaagactctagagattcaccgagcgcatagtgaacctgcttcactggaggaagcagctgataggagattgatggcaattatctgcgaggctaaaggagattatgaaaacgctcttgagcatcttgttcttgctagtatggctatgattgcgagtggacaagaatctgaggttgcatcgattgatgttagtattgggaatatttacatgtcgctgtgccggtttgatgaagctgtgttttcatatcagaaggctcttactgtgtttaaggcttctaaaggagagactcatccgacggttgcgtcagtgtttgttagattggctgagctttaccatagaacagggaaacttcgtgagtctaagtcttactgtgagaatgcgttgaggatatacaataagccggtgcctgggacaactgtggaggagattgctggtggattaactgagatttctgctatttatgagtctgtagatgaacctgaggaagcattgaagctacttcagaagtctatgaaattccttgaggataagccaggacagcagagcgccattgcagggttagaggcacggatgggagttatgtattacacagtggggaggtacgaggacgcaagaaacgcgtttaagagccctgtgncaaagctacgggcagcaggtgagaaatctgccttcttcggtgttgtattaaaccagatgggactagcctgcgttcagcttttcaagattgatgaagcgggtgagctgtttgaagaagcaagaggtattcttgaacaagaacgtggaccgtgcgatcaggacactctcgggtgtttatagcaatctagctgctacctatgacgctatgggaaggatagaggatgcgattgagatattagagcaggttctgaagctgagagagggaaacctcgggccttcgatcccggtttttaagccggnagaacgtttgccaccttttaagaantngcggtccggacttcaagccagngtccaatntnttnccatcaagccccagaantttntctanattttc

SEQ ID NO: 90191 - DNA, 831 bp, Arabidopsis thaliana columbia
ggaaggaatcaaaacggtgcgttccggttacggagcacacacagataggataggaaaccctaaaagtgcttcttcttcttcggcggcttcagttttaggttacgatcgaagcaaaagcggcgcatctgaatcccaaacgagtgacgatgacgatcgattcgcagcaaaaaacgagcaaattcagatggggggaaatggacgaagacgaagatctggatttcttgctccctcccaagcaggtgattggtccagatgagaatggtttgaagacgacgatcgagtacaaattcaacgatgaagaaaataaggttaagataacgactaggacacgtgtccgcaagctagcttctgctcgactcaacaaacgagccatggagaggaggaactggcctaagttcggagacgcagccaatgaggaagctggtagccatctcactatggtttctaccgaagagatccttctcgaacgaccccgagctcctggtaccaaagcggatgaatcaaaggcaacaggagatggcttgtctcagctgggtaaaggtggtgcagttctcatggtgtgcaggatatgccacaagaaaggagatcactggacatcaaaatgtccatacaaggatctagctgcaccaaccgatgtctttattgacaagccacccacaggggaatcatctaccatgtctgctgcacctggaactggcaaggccgcgtatgtcccgcctagcatgagagcaggtgcagacagaagcgctgtgggttcagacatgaggaggaggaacgatgagaactctgtgcgtgtaaccaatctgtccgaggatacccgtgaacctgact

SEQ ID NO: 90192 - DNA, 463 bp, Arabidopsis thaliana columbia
caatttcgtcggaagaagaaatcgccatggtagccgcaacagtaaacctcgcgaacatgacatggacgtcgttaaattcaaatccagcaatctctttctccatgttaagcggaatcagaaacttgggcatgttacctttcaggagatgtctaaagccgacagttatcggaatcgcgtcgtggccaccactccgttgttcttctgttaaggctatgtcttcatcatcgtcttcgtctggatcgacattggaggagactgttaaaacgactgtggcagagaaccctgtcgttgtttactccaaaacctggtgctcatactcgtctcaagtgaagtccttgttcaagagtcttcaagttgagccactggtttgttgaattggttcaacttggttcagaaggggtcgcagctgcagaatgtgttggagaaaattactggacaatacactgttcccaatgttttcatc

SEQ ID NO: 90193 - DNA, 665 bp, Arabidopsis thaliana columbia
  unsure (1)..(665): unsure at all n locations
nnnnnnnnnnnnnnnnnnnnnnnnnnnnnnnnnnnnnnnnnnnnnnnnnnnnnnnnnnnnnnnnnnnnnnnccacgcgtccgcggacgcgtgggcggacgcgtggggtgaaagtttcctcgtcgacgacttcttcatcgtcatcgtcatctccagatgaagaaagcgatctccagaatctcctcgaggaatcagattctcaaatcgaccaatttcgtatcagcgacgaggcggcagagcaacgacctaccttcgatgtggagagtctccgatcacgtttacgacggagttttaagctcaatctcactaagaaacagtccatttttatcttcctccctatcgtcatcatcctcatctacttatctaccgatttcagcaattacttctccgtcaaagttcctaattctgcgttccggtcaaatacattaacgggtcgggttcatgaatcggatcttcaagcactgtatcttctcaggaagcaagagagcgatctcttctctatctggaaccacactgtatcaaatttatcaacgatcgacgacgtgaaatctgcagttttccggcagatttcgttgaatagacagatccaaaatgcattactatcgccgcataaaactggaaatgttgatatcggtggatcatcagatgggtacttcgccggcggaa

SEQ ID NO: 90194 - DNA, 1209 bp, Arabidopsis thaliana columbia
  unsure (1)..(1209): unsure at all n locations
nnnnnnnnnnnnnnnnnnnnnnnnnnnnnnnnnnnnnnnnnnnnnnnnnnnnnnnnnnnnnnnnnnnnnnnnnnnnnnnnnnnccacgcgtccgcggacgcgtgggcggacgcgtgggggaaactagaatctattctctacttttgccagcgcatgactaatgccgctgtgatagccatgtcagagaactgtccagagcttactgtgtttaggctgtgcataatgggtcgacataggcctgaccatgtaacaggaaagcctatggacgagggatttggtgccattgttaaaaactgcaagaagctaactcgccttgcagtgtcgggattgctgacagatcaagcttttaggtatatgggtgagtatgggaaattggtccgtacgctttcagtagcttttgcaggggacagtgacatggctctgagacatgtcctagaaggttgccctagactgcagaaacttgagataagggacagtccctttggagatgttgcattacggtctggtatgcatcgctattacaacatgaggtttgtttggatgtcagcatgtagcttgtctaaaggatgctgcaaggatattgcacgagcaatgccgaatctagttgtggaagtaattggatcggatgatgatgatgacaatagggattatgtcgagactttatacatgtatcggtctcttgatggtccaaggaatgatgcaccaaagttcgtcacgattttatagaacgaggagcatttccgtgtttccgttttttaagacgggaatgaaatgggtaagtgtaggaagctcagatgatgatggtggtggcatcagaggcacactacatgattgttgatgatgaatgatggtggttgggacttgggaggaatgcaagattgttgtatcattattttctttttttatttttgggttcaaaagatgttatttgggtggttaggtggaacagtggatgtatgttttgggagcatcggtgttagttagacagctgagttggttctaataagctgcacttttggctctctctagttgttgttgttgagaaactaatgagacatctctctcttttgtctttcccatttttaaataattttgagatgtttcatcttaaaaaaaaaaaaaaaaaaaacccaaaaggcgaccgctctagaggatccaagcttacgtacgcgtgcgtgcgacgtcatagctcttnctatagtgcaccta

SEQ ID NO: 90195 - DNA, 473 bp, Arabidopsis thaliana columbia
actattaggagctgctcctgcagtccgtcccgatcccggtcaccacgcgtgcgcagattcatgactgctgttgaattctcaaagcaacatccttatggtaaagctgtggggttactcgatttgaagttcggttctattgaggcaaatgagaaatggctggttttgcctggaatggtatcttctttcatactcagtgatcttcttaagaaggaaggctttagtgcagccgcaaaagacacggtgaaagctaatggaataacagaggaaagtacggagattgatgttttgagtcaagaaaagctagaagaagaaacaatgatggatgtggatacgactacaccagttgctgtagcggccgagaagatcaacggtggtgctaggtgcttttcgaaggagctaagtgggaacatgattgaagaagaaggtggtcactgtggtggttgtggaggttgtggtggatgtggagggtgaag

SEQ ID NO: 90196 - DNA, 522 bp, Arabidopsis thaliana columbia
  unsure (1)..(522): unsure at all n locations
agggagatatcaggatgaactgtcaaccggttttggagccactgtcacagtaaaagtnatttatnatcttctatctatatctnccattggagcttctttggttttnccatggtctgcgctaaacaaagacaagtcctttctagctgaagtaggtgattgcttgtatttaattggctctgcgtacatactttgctggtgtcttctacagcaacttctccaacaaccaatcaactcgggccccatacttttgctgctcctccaaatcttagcaattttatgtctttcttctagtgattttcaagttaatgaatgggtcgagattactgcactctattacatgggaatggcaggtcactttgctcttgggaacagcaacactttagcaacaatcgattgttgctggtgcttttatcggaatctctaggcattctacaatactctctgggatcttgatgttcatgatcacctatgcatctcccatgctgttccttctatccctcgtcatgtaaattggtgcaaatc

SEQ ID NO: 90197 - DNA, 587 bp, Arabidopsis thaliana columbia
ccacgcgtacatttgcactcagtctagagacaaagagagagagagatggggtcaaagacggagatgatggagagagacgcaatggctacggtggctccctatgcgccggtcacttaccatcgccgtgctcgtgttgacttggatgatagacttcctaaaccttatatgccaagagcattgcaagcaccagacagagaacacccgtacggaactccaggccataagaattacggacttagtgttcttcaacagcatgtctccttcttcgatatcgatgataatggcatcatttacccttgggagacctactctggactgcgaatgcttggtttcaatatcattgggtcgcttataatagccgctgttatcaacctgacccttagctatgccactcttccggggtggttaccttcacctttcttccctatatacatacacaacatacacaagtcaaagcatggaagtgattcaaaaacatatgacaatgaaggaaggtttatgccggtgaatcttgagttgatatttagcaaatatgcgaaaaccttgccagacaagttgagtcttggagaactatgggagatgacaga

SEQ ID NO: 90198 - DNA, 562 bp, Arabidopsis thaliana columbia
  unsure (1)..(562): unsure at all n locations
ggaggcacaattcttgaaagctgagaagcatgtncaggagttaaacatgtctgtagacttgatgaaaaaggagagcaggaaattncttgagaggacggctttagcaggggaggatatgaaccgtggtccctctggagctcatgaactctggaaccgatatccaccgtcttgctaaagtccgtccacaaagctgaatgtgaagctgctgatttgatggccggacttcggcaaattcctggaagggatgctatcaagcttagagctgaagtggcttccatgacttcgcttttgagacagaagagggttgcattgaacaaaaggatcatgggtatgtcggacctaggagtttccgtcctgatatatcccaaccacaaatccacaatttcttgggttttcgcaaccaaagtttgttaggtattttccaattgaatcgcagtgtactctcgtccatcgaacatccaactctgtctgaaaccaaaatctgagcttgagacagaacttgtatactgtgtttttgcctgcttcctaagatttctcgctcagagagaattaattgagtcac

SEQ ID NO: 90199 - DNA, 437 bp, Arabidopsis thaliana columbia
ggagaaaggcaaatcggagacgatgagcgaaaccgaagcaaccggcgttaccgatgattcggctccagcgattgagactgaaactgtttctgatgcgatggagcatacagcgatcggagtggttgaatcggtggaaggagccatagaaggagcagagaaatgggtgggtgatttgcaacggacggtgaaggaatcgaaggataccgcaatgcgttctgctcgttccctccgtgaaaattctacctctcagttccgctctatacaggatttcattccacatgctttgactcagtataagacctatgagaatgctttcttcagtaaagttacagacgaattgatatacgcaaaagagcatccggctgctgctattgggattggtgtcgctgctagtctcgttctgatgcgaggcccaagaagattcttgtttcgtaata

SEQ ID NO: 90200 - DNA, 791 bp, Arabidopsis thaliana columbia
  unsure (1)..(791): unsure at all n locations
cgactcactactgggagagctagctngcctgcaggtaccggtccggaattcccgggtctacccacgcgtgcgaaatcagcgaaaccgaagcaaccggcgttaccgatgattcggctccagcgattgagactgaaactgtttctgatgcgatggagcatacagcgatcggagtggttgaatcggtggaaggagccatagaaggagcagagaaatgggtgggtgatttgcaacggacggtgaaggaatcgaaggataccgcaatgcgttctgctcgttccctccgtgaaaattctacctctcagttccgctctatacaggatttcattccacatgctttgactcagtataagacctatgagaatgctttcttcagtaaagttacagacgaattgctatcaagcttagagctgaagtggcttccatgacttcgcttttgagacagaagaggattgcattgaacaaaaggatcatgggtatgtcggacctaggagtttccgtctgatatatccaacacaaatccacaatttcttgggttttcgcaaccaaagtttgttaggtattttccaattgaatcgcagtgtactctcgtccatcgaacatccaactctgtctgaaaccaaaatctgagcttgagacagaacttgtatactgtgtttttgcctgcttcctaagatttctcgctcagagagaattaattgagtcaaaaaaaaaaaaaaaagnnnnnnnnnnnnnnnnnnnnnnnnnnnnnnnnnnnnnnnnnnnnnnnnnnnnnnnnnnnnnnnnnnnnnnnn

SEQ ID NO: 90201 - DNA, 530 bp, Arabidopsis thaliana columbia
  unsure (1)..(530): unsure at all n locations
cagctctctacgactcactatanggaaagctggcacgcctgcaggtaccggtccggaattcccgggtctacccacgcgtccgctgctttcaagtctgaaacttgaactctgtttctaatttacttcaaaagctatggcgtcgacttcaacatcatctttaatggcttctaaaactgtaatctccaaaacagctctgttttcttccttaccgggaatagtcagccggagttttttaacattcgcaccggcttctccttccgttaaaccccttaggataagatcttcaaatgttactaagttcgatgaagtaaccaacagtcttgacgaagacatggaccagattcgacggttacaaaacggttctgacgtgagaggagtcgcattggaaggagagaaaggtcgaacagttgacctaacgcctgcagctgttgaagcaatcgcagagagctttggagaatgggttgcagcaacggagagtaacggaaacggcgtcattaagatttctctcggacgggatccacgtgtttccg

SEQ ID NO: 90202 - DNA, 692 bp, Arabidopsis thaliana columbia
ttgctctctggcaacaatttctctcaaagatggcgttttttgggctctcccgtgtttcaagacggttgttgaaatcttccgtctccgtaactccatcttcttcctctgctcttttgcaatcacaacataaatccttgtccaatcctgtgactactcattacatatatcctttcactaagtgttatccttcatggaatgataattaccaagtatggagtaaaggaagagaattgcatcaggagaagttttttggtgttggttggaattacagattaatttgtggaatgtcgtcgtcttcttcggttttggagggaaagccgaagaaagatgataaggaggagagtgatggtgttgttgttaaggaagcttcttggatagatttgtatttaccagaagaagttagaggttatgctaagcttgctcgattggataaacccattggaacttggttgcttgcgtggccttgtatgtggtcgattgcgttggctgctgatcctggaagccttccaagttttaaatatatggctttatttggttgcggagcattacttcttagaggtgctggttgtactataaatgatctgcttgatcaggacatagatacaaaggttgatcgtacaaaactaagacctatcgccagtggtcttctgacaccatttcaagggattggatttctcgggctgcagttgctt

SEQ ID NO: 90203 - DNA, 872 bp, Arabidopsis thaliana columbia
  unsure (1)..(872): unsure at all n locations
cagctctctacgactcactatttggaaagctgacacgcctgcaggtaccggtccggaattcccgggtctacccacgcgtgcgcggacgcgtgggcggacgcgtgggcggacgcgtgggtcttgtttggtctggtaggggactgcagatgaagtggttgattgttctcatggaaaacaactttgggaactttcaaaagaaaagtatgagcctttatgggtatctggaggaggacactgcaatctagaactctatccagagttcataaaacatctgaagaaatacgtaatttctatttccaagggaccaagaactggttcgaacaagactgcaacgacggatgcagccaaaaaacagagcaagcctgcagagaacgggcgtgctgatacgtttcaacttggctgttgccttccagaagtttctagaaacagtgtagacagtcagctggagaaatctaagaagactagtaaacccgagaagtctcgtatgagcattgataggtttagaaggaaaaaaggttcagtctggtgacatataaaggtccatcgacaaaacaggttatttgtaactcctgtttctgtaattcatatgtttctgcataaaattatgacgtgtggttttgttttttttctttctcaggtttgtgtatgtattttctaatagaaacagatcaaactcaaaagtcttgatttcatatttggttgtaactttgtcatggtacaaaacttgtaatcactgacaagtttgattttagtttggacttgcttttctcgaaaaaaaaaaaaaaaaaaaaaccccannaagnnnnnnnnnnnnnnnnnnnnnnnnnnnnnnnnnnnnnnnnnnnnnnnnnnnnnnnnnnnnnnnnnnnnnn

SEQ ID NO: 90204 - DNA, 516 bp, Arabidopsis thaliana columbia
  unsure (1)..(516): unsure at all n locations
nnnnnnnnnnnnnnnnnnnnnnnnnnnnnnnnnnnnnnnnnnnnnnnnnnnnnnnnnnnnnnnnnnnnnnnnnnnnnnnnnnnccacgcgtccgcctgaatccattacttttactccaaaatcattaacaatggactcaggaagtgcagtggacatcatttcgacgctttcagacttcctgctcgtcctgatcatttcgaacctttccttcaaggaggctttgagcaccagtcgcctttccacccgctggagacacatatgtcgcgaaacgagaaacatctctttcagagaggacgagatcgtgacattcgctgatgattccgttgctcgctattaccaaagggctgcattagttgcctatatggttggttgggttaacaattttaccggtggagttgttgaaagcttcgagcttcgtctctctaattcgtatgcttttgaagaaggggtcaccacactgatcgaattcgctgtctccaagaatgtcaagcatctttttcttgacctctcagaacc

SEQ ID NO: 90205 - DNA, 459 bp, Arabidopsis thaliana columbia
ctcgattgtttttggaaatcgtcaatcagatatttctcgttcgtctccgccttcgatttatccaaaggctcttgttattgaaaatggcagattccaccaaagcagggttgaagaagccagctttcactaaggttgatcagctgcgtcctgggactagcggacacaatgtcaatgtgaagattgtcagcacgaaaatggtgttacagaaaggtcgtgctgatggtcctcaagctcgccagttgcggatttctgaatgcattgttggtgacgagacaggagtgatcgtctttaccgcaagaaatgaccaagtgggacttaatgaaagagggatcaactgtaactctacgcaatgcgaaaatcgacatgtataaaggatcaatgaggctagctgtagacaagtggggtcgtgttgaagtcacagagcctgcgagcttcaaagtgaaagaagacaccaacatg

SEQ ID NO: 90206 - DNA, 581 bp, Arabidopsis thaliana columbia
  unsure (1)..(581): unsure at all n locations
acgactcactattgggaaagctggtccgcctgcaggtaccggtccggaattcccgggtcgacccacgcgtccgcccacgcgtccggtgttgaagtcacagagcctgcgagcttcaaagtgaaagaagacaccaacatgtcccttatcgagtatgagctcgtaaacgtcgttgaatgagtgacaaattcctcgaaataccactaggagaaacgccctcaagaataaacaagtcaaatccgtaaccgtttatgttagcgtcaagaaaagagttaaaccctgatcagctgatgtcttgcactaagctatgtaagagtgatgatggctctaaaagttgaatgcagagcttttggcttaggttatgacttcgtgataccttttcttttgtaatgtcatcatacacgctaaggcttttgtgctacattattactctctttgtctttgcctcgtttccaaaaatccatattcttagtgaagtaaacagtaactgcaagccaaannnnnnnnnnnnnnnnnnnnnnnnnnnnnnnnnnnnnnnnnnnnnnnnnnnnnnnnnnnnnnnnnnnnnnnnnnnnnnnnnnnnn

SEQ ID NO: 90207 - DNA, 915 bp, Arabidopsis thaliana columbia
  unsure (1)..(915): unsure at all n locations
ctatacgactctcttagggaaacctggtacgcctgcaggtaccggtccggaattcccgggtcgacccacgcgtccgccataaacttattcttgggctactttcaacctcaggaagggaaacctgcgctctgggagctggattctgattactatctccatgtttcagggattggagatgatattttcccagatatcggggtccattccattgctaaacctatgagtggtattggagtcaatcttgcaccagtgccagctttcagagacgacttctcgcggaagaagctgacatcgtttgacaaactgatagagcagacatgcagttcaataaagaacgtgaggctttgtagtgagacagaccaaaggccaggtggcaacacctggaagcactggtggagacttcctgatgcagctgagattcaactcaagagccccatttggctgtttggttcaagaaagcccgaagagagtagctctgccacaattctggtgcagacgatagggagaaaggagtaacctcgactgagagagcaacgatntctgcaacttggactggctntctaagtccgaccgtcatcaaggagatatcttccaaaggtatctatcgattacatcaaccaatgaacccatgggttgtattggtggcctctcctcggggaccagatgaaacagcgaatttacagacattcgcccaatttgtcagtgtccacgatggaccattgagacgatctgagtttgacaaacttgcggagttctcgctgaacacatcatgtatggcttgagaagagaacgggtggaagcattcatgatcctcaacggagcattcgatcttcatgatgcaccttgtaggtctggtgctacaatgttgcgatatagccaagtattatcaacatattcgccaacgaggaccttttg

SEQ ID NO: 90208 - DNA, 655 bp, Arabidopsis thaliana columbia
acggacgcgtgggctcattagggtctctctgtttctgggcaaattttcttcatctccgccgttttgcttcaatacagatttctgggattttttttaccgatcaaatttaggttttcgttttcactcagaaccttagaaaccctaattttgatacattagctttagagaaccttccatcggatccgtgtacaataaaaaagtttgcgttttttttttccttaaatcgattgaacgtgtttgaagatgcctccaaagcaacaaccaaaggctgatttggcgaagaagcagaaacaagtggaagacaaaactttcggattgaaaaacaagaacaagagcaagaatgttcagaagtatgttcagagtctcaagcaatctgttcagcctaaacccgatgcaactaaagctgcagctaagaaaaagaaagaggaagagaaagcgagagaacaggaattgaatgagttgttcaaggtagctattagtcagcccaaagttcctgtaggtgtggatccaaagtctatactctgtgagtttttcaaggccgggcagtgtcaaaagggtttcaagtgcaaattctctcatgatttgaacattcaaaggaagggtgagaagattgatatttacagtgatacgcgtgatgaagatggagatatggatg

SEQ ID NO: 90209 - DNA, 604 bp, Arabidopsis thaliana columbia
  unsure (1)..(604): unsure at all n locations
cnnnnnnnnnnnnnnnnnnnnnnnnnnnnnnnnnnnnnnnnnnnnnnnnnnnnnnnnnnnnnnnnnnnnnnnccacgctgccgcccacgcgtccgatgatgttgaagatgttgagaaacatttcccgggtacactaacagccattagagactggtttagagactacaagatcccagatggaaagcctgctaacagatttggtcttggagacaaaccagcaaacaaagactatgctttgaagatcatccaagaaacaaatgaatcatgggctaaacttgtgaagagatcagttgatgctggagacctttcactttactgaacatattttgcaatgtcgacttatgaggtcgaataatgaatagactcaagattcctatatcattcttgttgtttcctttcaattgagatgtaaacattgggatttggattttgtttttcaccattgatgactgagaagtaataaaatgactttctgctttgggaataaaaaaaaaaaaaaaagnnnnnnnnnnnnnnnnnnnnnnnnnnnnnnnnnnnnnnnnnnnnnnnnnnnnnnnnnnnnnnnnnnnnnnnnnnnnnnnnnnnnnnnnnnnnnnnnnnnnnn

SEQ ID NO: 90210 - DNA, 567 bp, Arabidopsis thaliana columbia
  unsure (1)..(567): unsure at all n locations
ccatggtacccggatcctcgaattcttttgctttttaccctggaagaaatactcataagccacctctgttatttacccccaatcttcacaagaaagacggggaagaggaacgtgtggaacaggaggatgaggatgagcaaggtgaaacacagtgtggagcatgtggtgagagctatgcagctgatgagttctggatttgctgtgacctctgtgagatgtggtttcatggaaagtgtgttaagataacaccagcaagagctgagcacatcaagcaatacaagtgcccttcttgcagcaacaaaagggctcgttcctaaatttgttgaccgctcgcttctgtgtatctacctttgcatatgatgatgaacagcttaactgtttggtttagatcagatttgtcatatggatttggtaatttaggaagacattttagttttttcattgttacattttggcgattgaagggataactctttgtttaaaaaaaaaaaaaaaaagnnnnnnnnnnnnnnnnnnnnnnnnnnnnnnnnnnnnnnnnnnnnnnnnnnnnnnnnnnnnnnnnnnnnn

SEQ ID NO: 90211 - DNA, 1146 bp, Arabidopsis thaliana columbia
  unsure (1)..(1146): unsure at all n locations
gaaanccgggccgaccgacgcgtccgcctttttctctttcacatcgttctttctctcgcaaacccaaattctctcagcgccggtcaaatacttgtctctctctctctctctctttcactcttgtcttgtctccttcgaagctgtttgttctgtaagaaagatggaagcaggtggcgcgtacaatccacgcactgttgaagaggtgtttagggattttaagggtcgtagagctggcatgattaaggctttaaccactgatgttcaggagtttttccgactttgtgatcccgaaaaggagaacctttgcctttacggacatccaaatgagcactgggaagtgaatttgccagctgaagaggttcctcctgagctcccagagcctgtcttgggtatcaattttgccagagacgggatggcggaaaaggattggttgtcccttgttgctgtccacagtgatgcttggcttcttgctgttgctttcttttttggagccaggtttggatttgacaaagctgataggaagaggcttttcaatatggtgaatgacctcccaacaatctttgaggttgtagctggcactgctaagaaacaaggaaaagataagtcctctgtttccaacaacagcagcaacagatccaaatcaagctccaagcgaggatctgaatcccgtgccaagttctcaaagccggagccgaaagatgatgaggaggaggaagaggaaggtgtggaagaggaggatgaggatgagcaaggtgaaacacagtgtggagcatgtggtgagagctatgcagctgatgagttctggatttgctgtgacctctgtgagatgtggtttcatggaaagtgtgttaagataacaccagcaagagctgagcacatcaagcaatacaagtgcccttcttgcagcaacaaaagggctcgttcctaaatttgttgaccgctcgcttctgtgtatctacctttgcatatgatgatgaacagcttaactgtttggtttagatcagatttgtcatatggatttggtaatttaggaagacattttagttttttccttgttacatttttgggcgaattgaaagggataactcctttgttttaagggggttaatggaaccttttggcccccgtttttaanagttttggttt

SEQ ID NO: 90212 - DNA, 541 bp, Arabidopsis thaliana columbia
  unsure (1)..(541): unsure at all n locations
gggagtgaagggaaaacaaaacagagaaaaagataagagatatatggatacacaaaggttgccgaagaaagaagaagaagaagaaggagatcatctactttcttcaaccttcgagtccatcaatggtcactctcgagaccaacacaatcattctatagatgatttcgagagcattttcgacatcaccattgacaatttaagctgctctaacgaactcacgtgggatttctgggaagaagacgaagatgaagatgtaggggaagaagaaaaaagatcgagtactgatcaagaaggctcaagttttgggttttgggagaataagccgacggattatgaagacaaagacttgggtctgaagctgaatctgaaccatcaagaagttatcgatgcttggtctgatcaccagaaacctctgtggacagatacttcaactctggacaattccgtttatgttagtttttatgaatctctttcctgttgtgcaagttatgagtagtgattaatcttgattagtcaatattaatgatttagcagttnnana

SEQ ID NO: 90213 - DNA, 559 bp, Arabidopsis thaliana columbia
  unsure (1)..(559): unsure at all n locations
atgannnnnnnnnnnnnnnnnnnnnnnnnnnnnnnnnnnnnnnnnnnnnnnnnnnnnnnnnnnnnnnnnnnnnnnnnnnnnccacgcgtgcgcgagaacgaatcagagatttttaccgatatccgtcgctctctcctcctccgtcgtcgtgcttcgcttctcttgcgtgtcatctttttcgacaaacccaaaatcaaggcagaatctgataatcgaaaggacccagtagaaaacttcgcgaggaatcaagggttagaagccctaacttgatcgctaattcgagaatgaagcatttggattgagggcaaaaatcgacgtttttaaaaagtctgaactgaggtggattcgttgagatcatctgatcaaatgctcttcgtggaagtaaacatttgaggcaaaccaggtcggtaacaaggtaagggggtatgtcgagcaaaacccggaatatgcttgaaggtttggttagagatacttcttttaaatggttgctcgggaaacaaagttctttcgatgaagaaatcgaggaaatgggaagatctccatcagctgggactaattg

SEQ ID NO: 90214 - DNA, 704 bp, Arabidopsis thaliana columbia
tatacgactttcttagggaaagctggtacgcctgcaggtaccggtccggaattcccgggtcgacccacgcgtccgagatagtttgcggtccattatgcacctcgaatccgttaacaacagttgaatggtatttggtgtttacatctctctgcatcgttctgtctcagctaccaaacctcaattctattgcgggactctccttaataggagcagtgactgcaataacttactccacaatggtttgggttctctctgtgagccaaccaagaccagccactatctcatacgagcctctttctatgccttcgacttctggttcactcttcgctgttttgaatgctcttggcattatagcttttgccttcagaggtcacaacttggttttggaaattcagtcgacgatgccatcaacgtttaagcatcctgctcacgtaccaatgtggagaggagccaaaatctcttacttcctcattgctctgtgtatctttccaatctccatcggaggcttttgggcttatgggaaccttatgccttcaggaggtatgcttgctgctttgatgcattccacattcacgatatcccgagaggctaattaccgacggcatttctccttatagtcttcagctgcttgagcagttttcagatatactccatgccctgctttagacagctttgaagctggctacacaagcagaaccaacaag

SEQ ID NO: 90215 - DNA, 551 bp, Arabidopsis thaliana columbia
caatttatcaactgtgacctgtagcaggtaaaaaataaattgtatggtgttcactttgtttttttctatgttgttgttggattcgtgtgaaagtcatgtggacagtctcaacgactcatacattgttccagcatcgatcatctttgaaatagatgcaggaaagaccaagaagcgagccaaattctcttatattgggagagatagaggctgcttcacaaaagtcatcagctgatcaacaggtttttccgaagaatagcttatgaagaatacagatcctcaagtattaatgattacgtttccagtcttggagctctcgctttcagtgaatcgttatgttgtgtagctcagaactatattatagaaacaatgcttatattgttgtttgtttttgatgtggatgcatggaatttgcttgagaactcttttacaaaatggagaaacgaaccttgtaaaaaaaaaaaaaaaaaaaaaaaaaaaaagcggccgctctagaggatccaagcttacgtacgcgtgcatgcgacgtcatagacttctatagtgtgtcctaa

SEQ ID NO: 90216 - DNA, 3016 bp, Arabidopsis thaliana columbia
  unsure (1)..(3016): unsure at all n locations
atggctgaagcatttgtgtcgtttggacttgagaagctttgggatctcctgagtcgagaatcagagcgattgcagggaattgatgggcaacttgatggactaaagcgtcagctgagaagtttacagtcgttgttgaaagatgcagatgccaagaaacatggaagtgatagggtgaggaatttcttggaagatgtcaaagaccttgtttttgatgctgaggatataattgaatcctatgttctgaacaaacttagtggaaaaggaaaaggggtcaagaagcatgtgagacgacttgcttgcttcttgacggatcgccacaaggttgcttcagatatcgagggtatcactaagaggatctctgaagtgattggggaaatgcagagttttgggatacaacaaatcattgatggtggtcgttcgctgtctcttcaggaaagacaaagggtgcagagggagatccgacaaacgtatcctgacagttctgaaagcgatcttgtcggggtggagcagagtgttaaagaattggttggtcatttggtggagaatgatgttcatcaagtggtttctatagctgggatgggcggtattggtaaaaccactctggctagacaagtctttcatcatgacttagtccggcgtcactttgatggattcgcatgggtctgtgtttcccaacaatttacacagaaacatgtttggcagaggatcttgcaagaacttcagccacatgatggggatattttacagatggacgaatatgcacttcagcgtaaactctttcaattgttagaggccggtagatatttagttgtcctcgatgatgtatggaaaaaagaagactgggatgtaataaaagcagtgtttccacggaaaagaggttggaagatgctgcttacttctcgaaatgaaggtgttgggatacatgctgatccaacatgtttaacttttagagcaagcatccttaaccctgaagaaagttggaagctctgtgagagaatagtattccctaggagagatgaaactgaagtaaggcttgatgaagaaatggaagccatgggaaaggaaatggtcacacattgtggaggactaccattagctgttaaagcgttgggaggcttgttagctaataaacatactgttcctgagtggaaaagagtttttgacaatattggatctcaaatagtaggaggatcgtggttagatgacaacagtctcaattcggtttaccgaatattgtctctgagttatgaagatttgccaacgcatttaaagcattgcttccttaacctagcccatttccccgaagattccgagatatctacgtatagtttgttctattactgggctgcagaagggatttacgatggatcaaccatcgaagatagtggagaatactacctagaagagctagtgaggagaaatttggttattgcagacgacaactatttgagttggcaatctaaatattgtcaaatgcatgacatgatgagagaagtatgtttatctaaagccaaagaagagaacttcctacaaattatcatagaccctacttgcacctctaccatcaatgctcaatctcctagtagatctcgcagactcagcatacatagtggtaaagcctttcatatattgggacacaaaaacaatccaaaggtgagatctcttatagtttcgagattcgaggaagacttttggatacgatcagcttcagtcttccacaacttaacattgctcagggtgttggatctttctagggtaaagtttggaggagggaagttaccttctagcattggagggctcatccacttgagatacttgagtttatacgaagctgtggtatctcatctaccttctactatgcggaacttaaagcttctgctctttttgaacttacgtgttgataacaaggaaccgattcacgtgccaaatgttttgaaagagatgctagagttgaggtacctttccctacctcatgaaatggatgataaaaccaagttggaattgggtgatctagtgaacctggagtacttgtatggtttctcaacgcaacacagtagtgtgacagacctcctccgtatgactaagctccggtatctcgctgtatctttgagcgaaaggtgcaattttgaaactctatcgtcatctctccgcgaattgcgaaacctcgagacgcttaatttccttttttcgctcgaaacatatatggttgattatatgggagagtttgttctggatcattttattcatctaaaacagttgggattggcagtacgtatgtcaaagattcctgatcaacatcaattccctccccaccttgtacacttatttctaatttattgcggcatggaagaggatccaatgccaattctagaaaagttgcttcatttgaagtcggttcgtttagcacgtaaggcattcctagggagcagaatggtgtgctcaaaaggcggatttcctcaattatgtgttatagaaatatctaaagaatcagagttggaagagtggatagtagaagaagggtcgatgccatgtcttcgtactttgactatagatgattgcaaaaagttgaaggaacttccagatggactcaagtacataacatccttaaaggaactgaagattgaaggaatgaagagggagtggaaggagaaactggtaccaggtggagaagattactacaaagtccaacacattcccgatgttcaatttatcaactgtgaccagtagcaggtaaaaaataaattgtatggtgttcactttgtttttttctatgttgttgttggattcgtgtgaaagtcatgtggacagtctcaacggctatacattgttccagcatcgntcatctttgaaatagatgcnggaagaccaagaagcggccaattctcttatattggggggntaggggttnttcacaaaagncatcagtgtcaccaggtttcccgangattgctttggggtncaggccccaggtttaatgtccgntccgcttgggtncgttcagtganngattgttgtc

SEQ ID NO: 90217 - DNA, 427 bp, Arabidopsis thaliana columbia
aaacaaaacaatgaaagaacaagacaaccaactcaaaatccctgaaccattacgagctgactggttcatggttctagtcaccatccaagctgatctaatctacaacgcactcgtggtattatcctcacctttctttctcctataccgctcttaccgccgcgcagtcgttaccgtctccgcagcagaaaaagcggttaaacgtgctccagcgcggatagctggtggtgcggggcgggttgttaggaggacatggtttggtatattgggtgcatgccacgtgtcaatggtaatggtgttggctttgattttggcggttgttattggtgttgggattgtgagtttgtatgtagaaaagcctggggttgtgagagacagattgttctttgattacactgaagaaaaccccagtgcggtttttagttttgat

SEQ ID NO: 90218 - DNA, 1607 bp, Arabidopsis thaliana columbia
  unsure (1)..(1607): unsure at all n locations
accacacgtccgatttaataacccatccaacccaaaagcatacaatacaatgtctactcttgttttattcctccaacttttttccatcctaccattagcacttgggttgaaccacccaaattgtgacctgaccaagactcaagaccaaggctctaccctaagaatcttccacatagacagcccttgctcccccttcaaatcatcatccccactctcatgggaagcgcgtgtgctccagacgctggctcaagaccaggcccgtctccagtacctgagcagcctcgtcgccgggagatctgtagtccccattgcctcagggcgtcaaatgttgcaaagcactacatacattgtcaaggctttgatcggtactccggctcagccgctgctcctagccatggacacgagcagtgacgtggcttggattccttgctccggctgcgttggctgtccttctaacacggccttttcccctgctaagtctacatccttcaagaacgttagctgcagcgctcctcagtgtaagcaggtaccaaaccccacgtgtggagcacgcgcgtgctctttcaacctcacctatggaagctcctccattgcggctaacctctctcaagacacgatacgtcttagccgccgttccgatcaaagcctttacattcggatgcgtcaacaaaggcgccggtggaggaaccatcccaccacctcaaggcttgttgggcttgggacgaggcccactttcactcatgtcacaggctcagtctatttacaagtccactttctcttactgtttgccaagtttcaggtctctgaaccttctctggttctctcagactcggccctacctcccagccccagcgcgtgaagtacactcaacttctcagaaaccctagaaggtcttctctgtactacgtcaacctcgttgcgatccgcgttggtcggaaagtcgtcgatttaccgccggcagctattgcttttaatccttcaaccggcgctggaaccatcttcgactccggaactgtgtacacgcggctggctaaaccggtttacgaggcagtgaggaacgagttcaggaagcgcgtgaagccaaccacagccgtggtgacgtcactcgggggtttcgacacgtgctactcagggcaagtcaaggtgccgacgataacattcatgttcaagggagtgaacatgacgatgccggctgataacctgatgttacacagtaccgccggaagcacgtcgtgcctcgccatggctgcagcgccggaaaacgtaaactctgtcgtcaatgtgatcgcaagcatgcagcagcagaaccaccgtgtcctcatcgacgtccccaatggacnactcggtttggcacgtgaacgatgctctnatacagatgaatgagcacnanaagagcctactcananttatgcaganacntgtttgtttgtgttatttgtgtgtntcatttttgtcttgtcttgtgtcgtttgcttcaccagtcttagagggcggaggtgtgtagnatttgtgctatctagtnatttatgnttttaattgttcctcaattatctagagatttggatctaagctaatcaaataatgnnactatattatatttccttaaa

SEQ ID NO: 90219 - DNA, 754 bp, Arabidopsis thaliana columbia
gccggccctatacgacttacttagggaacgctggtacgcctgcaggtaccggtccggaattcccgggtcgacccacgcgtccgattttaatttccaatggttttgcgtggcgaagagcttgagtttaatctaagagaatgggcacgacaaggccatttaactcgcgaagatcaaagttctagaaggttctctgcctcttgtatccgaagctttccgagaagaccacaagtcttgtacaacaaacgtcaccatctctagtactgcctcttctccgggttactccctcaaagatgagatcgatccatcaaattattccttcagtactgcactcaaggcattgcatgcaatatcagtgtacatgaagaattgggattggtcgataccagacggagttgagctaaactccaaatggaacgaagcagacaagtatatatgcaatcctttatctggtgaagttccttaggagtgcttgtcttctaaaaccctaacttcacgatcttgcataaactcatccaccaagcatgctccactcatgattttaccttctaataataatctcaacattccaagaacggttaatcctaaagcgagaatcatgcatgaggatcctagacctcccgatcctgttctaattcaagataagaaaggagtggggtctaaccgagatgtcgagactgcccagtgaattgctatggccctaaagaccacgccgatcatggagagattaacgaacgacaggtgggtgctgttgatt

SEQ ID NO: 90220 - DNA, 1918 bp, Arabidopsis thaliana columbia
  unsure (1)..(1918): unsure at all n locations
tgatctccagctctctactgactcacatctagggaaagctggcacgcctgcaggtaccggtccgcaattcccgggtcgacccacgcgtccgctaaatcgtgaggcctataatttcccttcatctccaaaatcatttctcctcaaatttcttctttagaagattaaaaatcttctctctaatctctccactctttcataaatattttcctaattcttctaccttggtgtctgattctagcaccaaaccattttctcctaccaaaatctgggtttcgatcaattttaggtcttttgattcctacttgtctaatcgtcttgcaatttcaaagatgacagttgttggagatgttgctccaattccaaggaggaacagttctacttgctctaatgatatcgctgctccgttattaccagagtgtcatggagatgaagttgctcatgatgaattcaatggagcttcttttagtggcgcggtttttaacctcgccacgactataattggtgctggtatcatggctttgcctgctacaatgaagattcttggacttggacttggaatcacgatgattgttgttatggctttcttgactgatgcgtcgattgagttcttgcttaggtttagtaaagctgggaagaatcgatcttacggtggtttaatgggtggttcttttggtaatcctggaaggattttgcttcaagccgcggttttagttaataacatcggtgttttgattgtttacatgatcattataggtgatgtgttggctggaaagacggaagatggtatccatcatttcggtgttctcgaaggatggtttggtcaccattggtggaatggaagagctgctattcttctgattactactcttggtgtgtttgctccattggcttgcttcaagcgaatcgattctttgaaatttacatctgccttatccgtggctctggcggttgtatttctcataattacagcgggaatttcgattatgaagttgatcagtggcggtgtggcgatgccaagattgttaccagatgttactgacttaacatctttctggaatctcttcacagtcgtacctgttcttgtcacagcattcatttgccattacaatgttcacagtatacagaacgagctcgaagacccctctcagataagacctgttgttcgatcagcacttatgctctgctcatctgtttacataatgacaagtattttcgggttcctcttgtttggtgatgatactcttgatgatgtccttgcaaactttgacactgatcttggaatcccttttggttctatccttaatgatgcggttcgagttagctacgcgcttcatttgatgctcgtgttcccgattgttttctaccctcttcggattaacattgacgggctcttgttcccttccgctcgatcattatctacctcaaatgtgaggttcggttgcctcactgccggtctcatctctgtaatcttcttgggtgcaaacttcatcccaagcatttgggatgctttccaattcactggagcaaccgccgctgtttgtctcggcttcatcttcccagcttctatcatactaaaggatcgtnatgacaaagcaacaaacagggacacaaccttagctattttaatgattgtccttgcggtattgtccaatgcaatcgccatttacaagcggntgcttatgcgctattcaaggaggacgntcctcgtgagaaatccccggtatgggnaaatgtgnaggtttggtgtttagntttnccttttcctccttggtgaatcaaatantgngggggcaagcttttntnccctaaaatggtttgacctttgtgggtgggggtcntaaggggcctttnnttnggggtatnaccccnctggngtgtttaaaaaacntggtnaatggatggggcctttggctaantt

SEQ ID NO: 90221 - DNA, 725 bp, Arabidopsis thaliana columbia
  unsure (1)..(725): unsure at all n locations
ttaggtgcactatagaagagctatgacgtcgcatgcacgcgtacgtaagctcggaattcggctcgagatctacctcaaatgtgaggttcggttgcctcactgccggtctcatctctgtaatcttcttgggtgcaaacttcatcccaagcatttgggatgctttccaattcactggagcaaccgccgctgtttgtctcggcttcatcttcccagcttctatcatactaaaggatcgtcatgacaaagcaacaaacagggacacaaccttagctattttcatgattgttcttgcggtattgtccaatgcaatcgccatttacagcgatgcttatgcgctattcaagaagaacgctcctcgtgagtaaatcccggtatgagaaaatgtgcagtttggtgtttagcttttgctttttcttctatgtgaaatcaaataatgaagaagacaagacttctcttctcttatatgtttgtacttttgtcgttgagtgttctaagcggacttttgcttcggtgttatataccaccatgagtgttgtttgtaaaaaaactctgtataaaaattgtaatgcagatacatattttgccttttcatgactcttagctattgcttcatatctatatacagcggccgnnnnnnnnnnnnnnnnnnnnnnnnnnnnnnnnnnnnnnnnnnnnnnnnnnnnnnnnnnnnnnnnnnnnnnnnnnnnnnnnnnnnnnnnnnnnnn

SEQ ID NO: 90222 - DNA, 807 bp, Arabidopsis thaliana columbia
  unsure (1)..(807): unsure at all n locations
ttgtaatgcccccccccccccttgaaatgcactgcccttggcagtaccggtccggaattcccgggtcgacccacgcgtccgtgatgcggttcgagttagctacgcgcttcatttgatgctcgtgttcccgattgttttctaccctcttcggattaacattgacgggctcttgttcccttccgctcgatcattatctacctcaaatgtgaggttcggttgcctcactgccggtctcatctctgtaatcttcttgggtgcaaacttcatcccaagcatttgggatgctttccaattcactggagcaaccgccgctgtttgtctcggcttcatcttcccagcttctatcatactaaaggatcgtcatgacaaagcaacaaacagggacacaaccttagctattttcatgattgttcttgcggtattgtccaatgcaatcgccatttacagcgatgcttatgcgctattcaagaagaacgctcctcgtgagtaaatcccggtatgagaaaatgtgcagtttggtgtttagcttttgctttttcttctatgtgaaatcaaataatgaagaagacaagacttctcttctcttatatgtttgtacttttgtcgttgagtgttctaagcggacttttgcttcggtgttatataccaccatgagtgttgtttgtaaaaaaactctgtataaaaattgtaatgcagatacatattttgccttaaaaaaaaaaaaaaagggcggccgctctagaggatccaagcttannnnnnnnnnnnnnnnnnnnnnnnnnnnnnnnnnnnnnnnngtacctannn

SEQ ID NO: 90223 - DNA, 718 bp, Arabidopsis thaliana columbia
  unsure (1)..(718): unsure at all n locations
gccagccctatacgactttcttagggaaagctggtacgcctgcaggtaccggtccggaattcccgggtcgacccacgcgtccgcttgaatccccagagtgcgacgaaaatgcagcagcaagggagtaagagtggatctgagatggaggtgacatgggaggaccagcagaacattaatatcttcagccgtctcaacaacagagtccatgacctcgatgacgatatcaaatccgccaaggaaaagtgtgaaaatctagaggatgcagggaacgagttgatccttgctgatgaggagatggtgcgttttcaaataggagaagtgtttgctcatgtgccgagggacgacgtagaaacaaagatagaagagatgaaagaagcgacctgcaaaagccttgagaaactcgagcaagagaaggaatcaattgtaacacaaatggcagcgctgaagaaggtattgtatgctaagttcaaagattctatcaatcttgaagaagactagttagtagttattcccaactttgtttttcttctattgcatcagtttatgattctactgtgagtgtagacccaaggattcttgaatttaacatactggttttgttcaaaaaaaaaaaaaaaaaaaggnnnnnnnnnnnnnnnnnnnnnnnnnnnnnnnnnnnnnnnnnnnnnnnnnnnnnnnnnnnnnnnnnnnnnnnnnnnnnnnnnnnnnnnnnnnnnac

SEQ ID NO: 90224 - DNA, 841 bp, Arabidopsis thaliana columbia
  unsure (1)..(841): unsure at all n locations
atgattcttcaggtctctacgactcactatttggaaagctggtccgcctgcaggtaccggtccggaattcccgggtcgacccacgcgtgcgcgaacaagtcgtggtgagattttaggaagacgaagaagatggagagtatctggcgaatcgcgacgggacaagatccgagccgtgaagattacgaagggatcgagttctggtcaaaccctgagcgttctggttggctcacaaagcaaggcgattacatcaaaacctggcgtcgtcgttggttcgttctcaaacgagggaagcttctctggttcaaagatcaagccgctgctggaattcgtggatctacgccgcgtggtgtgatctccgttggtgattgtctcaccgtgaaaggagctgaggatgttgtgaataagccttttgcttttgagctatctagtggtagctataccatgttcttcattgctgataatgagaaggagaaagaagagtggattaattcgattggaagatcgattgtgcaacactcgaggtctgtgacggattctgaggttctcgattatgatcacaggcggtgattactatcattatgtatgattttgttggccttagggttttcgtggaatgtaacactctcttgtcttttaagttatgatgttattgtaccgtgatcgtgatgtatctaatgcctcaagtttcaaaaattgattctctctttgttatgatttttgattccagtgagttcctgtttatgttttgaaaaaaccaaaaaaagnnnnnnnnnnnnnnnnnnnnnnnnnnnnnnnnnnnnnnnnnnnnnnnnnnnnnnnnnnnnnnnnnnnnnnnnngcat

SEQ ID NO: 90225 - DNA, 550 bp, Arabidopsis thaliana columbia
acgactcactatttggaaagctggtccgcctgcaggtaccggtccggaattcccgggtcgacccacgcgtgcgcaaaagtcaaaaggtttcgctttctagatcatgtccacatttctcctaacatggattattatgaccgtcgcgttaagcgtaacgctttttcttatgccgcaacaaacaaatgcggctagagcgttcttcgtgtttggcgactcactcgtggacagtggtaataacaattacttagtcaccactgctcgtgccgattctccaccgtatggaatcgattatccgactggtcgaccaaccggtcgtttctccaacggcttgaacctccctgacatcatcagtgaacaaattggatctgagcctacattaccaattcttagccctgaactcactggagagaagctattgatcggagctaactttgcctctgccggcattggaattctcaacgatactggcgttcaatttttgaacatactaaggatcggtaggcaattcgagctgttccaagagtatcaagagagagtgagtgagattata

SEQ ID NO: 90226 - DNA, 574 bp, Arabidopsis thaliana columbia
tgatacttcagctctctacgactcactattgggaaagctggcacgcctgcaggtaccggtccggaattcccgggtcgacccacgcgtggcggaaattccaattttctcggatttttatttcttatatacaaatccctaaaaccctatagccctctttcttcgtcacctactactactaactccaagctcaagctcctctgtttcttctgcttgtggttaaaaatcatttcagacacagtgcttttgatgactctctgcaacaaacaacagcagctgcagacaaagcttatacgaagctgtatctactgactttgatggtgaaatatcaaaaaccctaaattaattttaaaaaaaaacacattttttttcttcttttggtttttcctctgagggtattcatcatcaatgcttacaaagtacagtgggtaaacaaaacaaaaacaaaaacccatttttttctccttctttaaatcccaaaccaaccctaaagttttgatttttaattttgggggtaaccaaaaaaaaacaaaaccctaattttttttctttagtgatgagattattggtgatgatg

SEQ ID NO: 90227 - DNA, 1003 bp, Arabidopsis thaliana columbia
  unsure (1)..(1003): unsure at all n locations
atgattcttcagcgtctctacgactcactatatggaaagctggtcacgcctgcaggtaccggtccggaattcccgggtcgacccacgcgtgggcccacgcgtccgcacaaacaaaggagcttggactaaggaagaagacgataagctcatctcttacatcaaagctcacggtgaaggttgttggcgttctcttcctagatccgccggtcttcaacgttgcggaaaaagctgtcgtctccgatggattaactatctccgacctgatctcaagaggggtaacttcaccctcgaagaagatgatctcatcatcaaactacatagccttctcggtaacaagtggtctcttattgcgacgagattaccaggaagaacagataacgagattaagaattactggaacacacatgttaagaggaagctattaagaaaagggattgatccggcgactcatcgacctatcaacgagaccaaaacttctcaagattcgtctgattctagtaaaacagaggaccctcttgtcaagattctctcttttggtcctcagctggagaaaatagcaaatttcggggacgagagaattcaaaagagagttgagtactcagttgttgaagaaagatgtctggacttgaatcttgagcttaggatcagtccaccatggcaagacaagctccatgatgagaggaacctaaggtttgggagagtgaagtataggtgcagtgcgtgccgttttggattcgggaacggcaaggagtgtagctgtaataatgtgaaatgtcaaacagaggacagtagtagcagcagttattcttcaaccgacattagtagtagcattggttatgacttcttgggtctaaacaacactagggttttggattttagcactttggaaatgaaatgaaatgaaatactatattaatcaattaaaaaaacacaaaaaaagnnnnnnnnnnnnnnnnnnnnnnnnnnnnnnnnnnnnnnnnnnnnnnnnnnnnnnnnnnnnnnn

SEQ ID NO: 90228 - DNA, 603 bp, Arabidopsis thaliana columbia
  unsure (1)..(603): unsure at all n locations
agctcatcatagctactggcgaattcccaaactctctagcactattacttgcaaattgttcttatttgccgttcttggcgattctcattctttcactgggtatgggcagtgtcctcaacttcaccatgtgtctttgcaccattgtgaactctgcactaacaccaaccatcgttggtgttctcaaaggcgttggttccactacgctcggttttgtcctcttgggtggtgttgaagtacatgctttgaacgtgtccggtttagtggtcaacacagctggtggtgtgtggtactcatatgccaagtaccgacagaaaaaggctaaaccggctaagctaatgtctgatttggaagctcacaaaaaatgagaatttcggtccggtttggtttcgtttgggaaggcattaccccggtttatagactttgccactcaaatcaatgatcagaacgaaccgatgtatttgagagttgaaccaggaaaatcggtcctagagtgagatttaattttgatgtgaaacttcattgatcagttaatttctcgtttaggttaagaaaaaaaaaataatcaatcccnaaaaaaaaaaaaaaaaaaaaaagggcggccgc

SEQ ID NO: 90229 - DNA, 792 bp, Arabidopsis thaliana columbia
  unsure (1)..(792): unsure at all n locations
nnnnnnnnnnnnnnnnnnnnnnnnnnnnnnnnnnnnnnnnnnnnnnnnnnnnnnnnnnnnnnnnnnnnnnnnnnnnnccacgcgtccgcccacgcgtccgaagcaagcaaaatgaaagaacttgtgttgaagaaaaggtcagaactagaggagatatgtaggaaaacccacttgttgccagtgtcagacagtgctatagatcagactatcgtggcgatagaatctggtattgtggatgctacaatggtcctggagcatcttgagcaacatatatctaagatcaaagaggaagcactaagccgaaaagagatacttgaaagggttgagaaatggttatctgcctgcgatgaagaaagttggcttgaagaatacaacagggatgataaccgatacaatgctgggcgtggagctcatcttactctcaagcgcgctgaaaaagctcgtaatcttgttaccaagctcccaggtatggttgaagcactggcctcgaagacaatagtttgggaacaagaaaacgggattgaatttctctatgatggtatccgtctcctttctatgcttgaggagtataacatactcaggcaggaaagagatgaagaacaccgtcggcaacgggatcagaanaagcttcaaggacagctcatagcagaacaagaggcactttacgggtccaaacccagcccatctaaccccttggtggaaaaaggctccaagaatgcgaccgggtggtgatctaacagaagactttccttaggagcagcatgcatcagactcctaagcctaacaagaaag

SEQ ID NO: 90230 - DNA, 797 bp, Arabidopsis thaliana columbia
tatacgacttacttagggaacgctggtacgcctgcaggtaccggtccggaattcccgggtcgacccacgcgtccggccaattataaatagttgtccggtttgcggtgaggctcttcaacttgacaagctcaatgcaatgatccatatgactctctgttttgacgaaggaactggtaatcaaatgaccggagggttcttgactgataggcaggcttcatatggatggatgttcaaactaagtgaatggactcatctatcaacttatgatgttggtttgaatactggttcaagtgcttcacatattgtggtgattgataggaagactaagaggctcgtggaagagttgattgattcaaagattgttatgtctatgagagctatttaccagtcaaaaataggactccggcttatggaccaaggagcaaaagagattttccagaacctttctgagaaacaggggaaaaaaatgaactcagttgaatctgcccaaaatattccccagctttctcgagttttttcaagggtcaaaataaacatggccgaagtcaagtatcctctggaccattttaagacgttcaatgaattcttcgtacgggagttaaagcctggtgcaagaccaattgcgtgcttggatcaagatgatgttgctgtatctgctgctgattgtcgataatggcatttcaatcggttgatgatagcacacggttctggatcaaggcccgtaagttttcaatcaaaggccctccttgaaatgatgtgcagtcggatgctttccttgtggatctttggtgatattc

SEQ ID NO: 90231 - DNA, 1080 bp, Arabidopsis thaliana columbia
ctctaatacgattcactatagggcaaagctggtacgcctgcaggtaccggtccggaattcccgggtggacccacgcgtccgataaacatggccgaagtcaagtatcctctggaccattttaagacgttcaatgaattcttcgtacgggagttaaagcctggtgcaagaccaattgcgtgcatggatcaggatgatgttgctgtatctgctgctgattgtcgattaatggcatttcaatcggttgatgatagcacacggttctggatcaagggccgtaagttttcaatcaaaggcctccttggaaatgatgtgcagtcggatgctttccttgatggatctttggtgatattccgattggcgccacaggactatcatcgttttcattctcctgtctctggtgtcattgaaaagtttgtcaatgtttctggaagcttatatacggttaatccgattgctgtcaatagcaagtactgtaatgtgttcactgagaataaacggaccatcgtaattatatcaacagcagagtttggaaaggtcgcatttgttgcgattggagcaacaatggttggtagtatcagctttgttaggcaagagggagaccatgtgaagaaaggggacgagcttggttacttttcatttggtggaagcacagttatatgcgtctttgaaaaggactcgattaagattgatgaggatctcttagctaacagtgctaggtccttggagacattagttactgttggaatgcaacttggtgtctcctttccaaagctggaaaactgtgtacttgagccctgaactgcttcaaactatgtgagttagtacgaaacgacagatgattttctatggtttggtttgatttgatttagttttcacttttcatcaagaaagaactcaattcctctctgtttaatacacaatgactttgctctgtatatataaacaccagtatgtcccgggcagtgatacttgttaatgtttacggtatttcgcttaaaaaaaaaaaaaaaagggcggccgctctagaggatccaagcttacgtacgcgtgcatgcggcgtcatagctcatctatagtacg

SEQ ID NO: 90232 - DNA, 399 bp, Arabidopsis thaliana columbia
acccacgcgaccaggacaatggtctcttggtccggtgttgtgttggagtggtgaagtcacgcacagaaggaccgaggtgttacaatatcccggtgccggtttctggcttgggtcagcagtttggaaagcttttggaaagtgggaaaggagctgacgttactttcgaagttgatggagaaacatttcctgctcacaaattggttcttgcagcacgttctgcagttttcagggcacagctttttggcccgttgagaagtgaaaataccaattgtataatcatagaagacgtacaagcccctattttcaagatgttgcttcattttatctactgggatgaaatgcctgatatgcaagacttaatcggcacagacttgaaatgggcatcaactcttgtggctc

SEQ ID NO: 90233 - DNA, 536 bp, Arabidopsis thaliana columbia
  unsure (1)..(536): unsure at all n locations
cnnnnnnnnnnnnnnnnnnnnnnnnnnnnnnnnnnnnnnnnnnnnnnnnnnnnnnnnnnnnnnnnnnnnnnnccacgcgtgcggttactctgatgatattggatcaggacattgcatcgatgctgttaaaaaagttacttggttcatttcccctcgatccagaaaacaatctttatggaaagggtgatgataagtactttaaactcaacagtgtattgacagaaatctttttggaagtaagtgaatggagccaccttcctactgatctttccaatagatatctggaatttattgagaatacactactaggcaagatcaccaggagcattaggcttcgtaaagatattcacgaaaagactttacttgcactcttgccctttcttccaaaacttattctgagggtagaccgtgattggagagataatcttctggaggcatttactattaccttcagcgattgcaaaccagagtctaaactcaaattagcctgcatttcaactgttagagacatgattatccctaatggagatatcctt

SEQ ID NO: 90234 - DNA, 540 bp, Arabidopsis thaliana columbia
ttcagctctctacgactcactatttggaaagctggtccgcctgcaggtaccggtccggaattcccgggtcgacccacgcgtgcgcggacgcgtgggaaaagaaaaaaattctataagtaatctttattttgctaaagaaaacatagaaatctgtttgcaaagaagaagatatgggaaacagtttacggtgttgtttggcttgtgtacttccatgtggagctttagatttgatccgtatcgtacatctcaacggccacgtcgacgagatcactagtccaatgaccgccggcgagattcttcaggcgaatcctaaccatgtcttaagcaaaccttgttctcaaggagttgtgcgtaagatcttgatcttgtctcctgaatctgagcttaagcgtggaagcatctattttcttatcccggatacttctatgccggagaagaagaaaacaaagaagagaaaagagctccgatgccggaaaaagcctcttgaaagcggcaacgatattaatagtgatcatgtgagtactaataaggatcttgatg

SEQ ID NO: 90235 - DNA, 826 bp, Arabidopsis thaliana columbia
tctctacgactcactattgggaaagctggtcacgcctgcaggtaccggtccggaattcccgggtcgacccacgcgtgcgattaaccatagagatccctcagaagtggaggatataccacagacatcattaaatgagaagcagcaggaaaatcaagacctacttatccgctccattgttcaacacttgggattccaggggaaccgacctatcacagcatgtatcatttacaaatgtttactgcaatggaggtcatttgaagttgaacgaaccagtgtctttgatcgcattattcagacaataggccatgctattgagactcaagataacaacaatacattggcctattggttatccaatacctcgacactcctattactcctccagcgcacactcaaagctagtggtgcagctgggatggctccgcagcgccgccgttcatcttctgccactctatttggaaggatgagtcagagcttccgcggggcacccccaggtgtaaatcttgccatgataaacggtgctgcgggaggtggagcagatacctttagacaagttgaagcaaaatatccggctctactgtttaagcagcagctcacagcttatgttgaaaagatatacggaatgattcgcgataacttgaagaaggagatttctccactccttggattgtgcattcaggcaccaagaacatcggggggctagtttagtgaaaggaggcatctcggttcccgttggcaacaactgcagctcagcaggcactgatcgcccattggcaaggaattgtcaagagtcttacaaatttcctcaatactctaaaatcaaaca

SEQ ID NO: 90236 - DNA, 513 bp, Arabidopsis thaliana columbia
gttctctaaaatcaaagtaacttttttccgaagagaagattagaaaatgtctaacaacagtcagagcatgagcttcaacgctggccaagctaaaggccaaactcacgagaaggcaagcaacttgatggacatggcctccaatgctgcccaatctgctaaggaatctatccaagagggtggacagcagctgaagcagaaggcacaaggtgcgagtgagaccattaagcaaaagaccggcatcagcaaaatgagaaagcacgttctaataataatttatgttttcagttttcgcttttattctaccagaaaaatacttagatacatatgtctatctaaatccaagaatatggatttgcatcgaagccatttaggcaattacttttgcttttctatgttttttttttatatatctatatatctaagagtttttgactcttgtctattgataatttgtagccatgcagttatttctataatatttaaataaatgacatgattacatgaaaaaaaaaa

SEQ ID NO: 90237 - DNA, 446 bp, Arabidopsis thaliana columbia
acctgaacaacaacaacaacccctaaaatctcggaagccataatgagcagagcattgttcaggaacgtagccgtcgacaccgctcggctcatacggcggaacgcggcggcgtcaacagaccaatatggtaagaccggagttgctcaatcgagaccttatttccggtcacgtcagcttctcgaaagagcaaaagaaacaggagtctcaccttctccttctttgggtttctcttcttcttcatctccgtcgaggattgggttcgttggatggtatcttggtatggttaaatcacacccagttgtgaccaaaagtgtcacttcctctcttatttacattgccgccgacttgtcttctcagacgattgcgaaaacttcttctgagtcttatgacttggtgagaacagcaaggatgggaggatatgggttatttgtcttgggtccaacact

SEQ ID NO: 90238 - DNA, 764 bp, Arabidopsis thaliana columbia
tatgtgttaacacgcttaaaagtgattgtttccgtagtcttgcgttaagacatgttctctctgttgtaaggtgcttattaatcgagccatttccagaatctgcattaaatgaacaagctggcaagatgctacttgaaaactatgacgagtatgcgaggcatgctaggctttacacaggtatccatgctaaaccaaaacccaagttcaagacaggagcaatctcagagtcaacaaccgctctaaatgttggccagacgaacaacgagacgcctggtgctgctactgcaataccctcttcaatgacagacataaagagagtaacaacgagtgcccaagaccaacaacacgtagctaatgtcgttgtagcagcctctgcaagtgtggtcactacgacgcaaaaaagggaagcaggtttggccaaggttcaggcagataagaagaaggtagacgctagaaagaaaagcttgaagagactatgatgatgctatcactcagtgtcttacgctctttgaacctaaactgttgtttcctttttacttgtaagagatctgttgtttgaggatttttcatttctgggaaataataatgtttgccaatgaagccgaatgttaaccattttggtgttctaatctacacatggttttgctgagtaaaaaaaaaaaaacccaaagggcggccgctctagaggatccaagcttacgtacgcgtgcatgcgacgtcatagtcttctataggcgaccaaataattagccggcgggggccgg

SEQ ID NO: 90239 - DNA, 424 bp, Arabidopsis thaliana columbia
gtagcacctgactccggtgtgattccgattcagacggtttatagtagtagtggttgggatttatatgcttgggcgtttcaagctgagagtgatgttgctgaagttgtgattcataatcctggtgttgaggaagatccagcttgtggtccacttattgatggtgttgctatgagatctctttaccctcctagaccaactaataagaacattttgaaaaacggaggatttgaagaaggtccattagtattacccggctcgacaactggagttttgatcccaccgtttatagaagacgaccactctcctttacctgcgatggatggtggagtctctcaaagctgtcaagtacgtagacgttgaacatttctcagtcccacagggtcgcagagctattgagcttgtagcgggtaaaggaggagtgcca

SEQ ID NO: 90240 - DNA, 571 bp, Arabidopsis thaliana columbia
  unsure (1)..(571): unsure at all n locations
nnnnnnnnnnnnnnnnnnnnnnnnnnnnnnnnnnnnnnnnnnnnnnnnnnnnnnnnnnnnnnnnnnnnnnnnnnnnnnccacgcgtccgcggacgcgtgggttcgatttgtggcggtttcgacccgatcaagaattatgttcttcagccctttctatcccatgaggagcgatgatttctcgtcattgtgtgggcctgtgatcgatgatgtcaagcttataagcgttcgtaaaccatagatgaatcgccaatcctattacaagaaaatgcatcgtgtgggcctccttttattttccttaaactgtctttggtgtgtgttggattttattgaaacgagaaggtgaaaaaaacagagttttatttacgagagttagggttttatataggcagatgggcctttgcttatattgtattttcttgtatgagaaggcaaaagaaacgttgcctatatcttatgtatctaggccttttaatttttatggaagagttacaaaacttacaataaaaaaaaaaaaaaaaaagggcggccgctctagaggatccaagcttacgtacgcgtgcgtgcgacgtca

SEQ ID NO: 90241 - DNA, 540 bp, Arabidopsis thaliana columbia
  unsure (1)..(540): unsure at all n locations
aggtcccttacgagtcgaaaggcacaggagggtttaaacgagcttctattcgatttgtggcggtttcgacccgatcaagaattatgttctacagcactttctatgccatgaggagcgatgatttctcgtcattgtgtgggcctgtgatcgatgatgtcaagcttataagcgttcgtaaaccatagatgaatcaccaatcctattacaagaaaatgcatcgtgtggtcttcttttattttccttaaactgtctttggtgtgtgttggattttattgaaacgagaaggtgaaaaaaacagagttttatttacgagagttagggttttatataggcagatgggcctttgcttatattgtattttcttgtatgagaaggcaaaagaaacgttgcctatatcttatgtatctaggccttttaatttttatggaagagttacaaaacttacaataaagttgtatgcatattttacttctcacgagcatataagactgannnnnnnnnnnnnnnnnnnnnnnnnnnnnnnnnnnnnnnnnnnnnnnn

SEQ ID NO: 90242 - DNA, 1002 bp, Arabidopsis thaliana columbia
  unsure (1)..(1002): unsure at all n locations
tgattctccagctctcctacgactcactattgggaaagctggcacgcctgcaggtaccggtccggaattcccgggtcgacccacgcgtgcgggaagatccagcttgtggtccacttagtgatggtgttgctatgagatctctttaccctcctagaccaactaataagaacattttgaaaaacggaggatttgaacaaggtccattagtagtacccggctcgacaactggagttttgatcccaccgtttatagaagacgaccactctcctttacctggatggatggtggagtctctcaaagctgtcaagtacgtagacgttgaacatttctcagtcccacagggtcgcagagctattgagcttgtagcgggtaaagagagtgccatcgctcaagtggttcggactgtcattgggaagacttacgtgctgtcttttgcggttggagacgccaacaatgcttgcaaaggatcaatggtggttgaggcttttgcaggaaaagatacacttaaggtcccttacgagtcgaaaggcacaggagggtttaaacgagcttctattcgatttgtggcggtttcgacccgatcaagaattatgttctacagcactttctatgccatgaggagcgatgatttctcgtcattgtgtgggcctgtgatcgatgatgtcaagcttataagcgttcgtaaaccatagatgaatcaccaatcctattacaagaaaatgcatcgtgtggtcttcttttattttccttaaactgtctttggtgtgtgttggattttattgaaacgagaaggtgaaaaaaacagagttttatttacgagagttagggttttatataggcagatgggcctttgcttatattgtattttcttgtatgagaaggcaaaagaaacgttcccaatcccatgaaccagggccttaaatttcggccgggaancntgancccggggggccncaagcccnaanggcccnnccgggggngcccncntttgccccttagggt

SEQ ID NO: 90243 - DNA, 397 bp, Arabidopsis thaliana columbia
tcaagatcccccaaagcgagttcatcatcttcttcgcctggattcgatcaagactagcactttcatcagatttgattacaatctctcttatcttccaagttataatcataatatccgagcaatttgggatctgggtctttcctctacattcaatttcttaataaagctggcctctttcttccgagatggttcttgagcgatgatgagtgactctcagcgatcactttctgtgcgattgagccgccggggtgagagaagcaatcattactcacaatctaaagatgctgtggctggcttcttctctcccaccagattgcatgctgattacactttgaaaaaaatttggaaggcaggcttccttcgcttgcttcttgttggcggcattgtctggatgcta

SEQ ID NO: 90244 - DNA, 1886 bp, Arabidopsis thaliana columbia
ggatggagaactttgcctcctgacaacatttcagaaaataatcgaatcaaaaaaaacactcaatatggagtcttctatatcacaaacactaagcaaactatcagatcccacgacgtctcttgtcatcgttgtctctcttttcatcttcatcagcttcatcacacggcggcgaaggcctccatatcctcccggtccacgaggttggcccatcataggcaacatgttaatgatggaccaactcacccaccgtggtttagccaatttagctaaaaagtatggcggattgtgccatctccgcatgggattcctccatatgtacgctgtctcatcacccgaggtggctcgacaagtccttcaagtccaagacagcgtcttctcgaaccggcctgcaactatagctataagctatctgacttacgaccgagcggacatggctttcgctcactacggaccgttttggagacagatgagaaaagtgtgtgtcatgaaggtgtttagccgtaaaagagctgagtcatgggcttcagttcgtgatgaagtggacaaaatggtccggtcggtctcttgtaacgttggtaagcctataaacgtcggggagcaaatttttgcactgacccgcaacataacttaccgggcagcgtttgggtcagcctgcgagaagggacaagacgagttcataagaatcttacaagagttctctaagctttttggagccttcaacgtagcggatttcataccatatttcgggtggatcgatccgcaagggataaacaagcggctcgtgaaggcccgtaatgatctagacggatttattgacgatattatcgatgaacatatgaagaagaaggagaatcaaaacgctgtggatgatggggatgttgtcgataccgatatggttgatgatcttcttgctttttacagtgaagaggccaaattagtcagtgagacagcggatcttcaaaattccatcaaacttacccgtgacaatatcaaagcaatcatcatggacgttatgtttggaggaacggaaacggtagcgtcggcgatagagtgggccttaacggagttattacggagccccgaggatctaaaacgggtccaacaagaactcgccgaagtcgttggacttgacagacgagttgaagaatccgacatcgagaagttgacttatctcaaatgcacactcaaagaaaccctaaggatgcacccaccgatccctctcctcctccacgaaaccgcggaggacactagtatcgacggtttcttcattcccaagaaatctcgtgtgatgatcaacgcgtttgccataggacgcgacccaacctcttggactgacccggacacgtttagaccatcgaggtttttggaaccgggcgtaccggatttcaaagggagcaatttcgagtttataccgttcgggtcgggtcgtagatcgtgcccgggtatgcaactagggttatacgcgcttgacttagccgtggctcatatattacattgcttcacgtggaaattacctgatgggatgaaaccaagtgagctcgacatgaatgatgtgtttggtctcacggctcctaaagccacgcggcttttcgccgtgccaaccacgcgcctcatctgtgctctttaagtttatggttcgagtcacgtggcagggggtttggtatggtgaaaactgaaaagtttgaagttgccctcatcgaggatttgtggatgtcatatgtatgtatgtgtatacacgtgtgttctgatgaaaacagatttggctctttgtttgccctttttttttttttctttaatggggattttccttgaatgaaatgtaacagtaaaaataagatttttttcaataagtaatttagcatgttgcaaaaaaaaaaaaaaaaaaa

SEQ ID NO: 90245 - DNA, 856 bp, Arabidopsis thaliana columbia
  unsure (1)..(856): unsure at all n locations
nnnnnnnnnnnnnnnnnnnnnnnnnnnnnnnnnnnnnnnnnnnnnnnnnnnnnncttctcctaatttcaaaagagccacgcgtccggagagacagatcgagaaagaaccagagagagaaacctgagaaaatcgaagatggctacgaacattgggatgatggattctgcatatttcgtcgggagatcggagattctggcttggattaactctactctccaactcaatctctccaaagtcgaagaggcttgttcaggcgctgttcattgtcagctgatggattcggtgcatcctgggactgttccgatgcacaagggttaactttgatccgaagagtgaatatgagatgattcagaactataaggttcttcaggatgtgtttaataaactcaggatcactaagcccatcgaagggagcaaactcgttaagggaaggccattggataacttggagtttatgcagtggatgaaaaagtcctgtgattctggtaatggaggccagcatatttaccatgcacttgagagaagggaagccagcaaagggaggaaagaagcaacgaagagagctgcagctacacaacaatcaggcaagagttcgtcttcttcagctccacctcgaccttcatcttcaaatggaacccgtaggcatgagccacaatcaacaacaccggtactaccattcttaactgggatnaccaccctcttcaaaacatcagctaacatctaaaccatgcctgctatgatgaaagatcacaaactgnactttacattgcagcttaaaaaagagagagantctatttctctaactcaagatgagagatctctgtcaaaccagaacagagactttcctctgttggt

SEQ ID NO: 90246 - DNA, 813 bp, Arabidopsis thaliana columbia
  unsure (1)..(813): unsure at all n locations
gatcaaacccttccttctgatagtgtggagaaagtggttggctttgctttcaatcaccatcttatgaactgcactgaacctatagttaaagacaacaagcttgtcatctctgcagagagcatttcatatggcctgcagacgttgcatgatattcagaacgaaaacaagagtttaaagaagtctctcaaggatgttgttactgagaacgaatttgagaaaaaactgttgtcggatgtcattccacctagcgatataggtgtttcctttgatgatattggagctctggaaaatgtgaaagaaacgttgaaggagttggtgatgcttcctcttcagagaccggaattgtttgacaaaggccagctcacaaagcctacgaaaggtatactgttgtttggacctcctggtactggaaagacgatgctggcaaaagcagtagcaactgaggctggcgcaaatttcatcaatatctcaatgtccagcattacttcgaagtggtttggtgagggagagaagtacgttaaagctgtcttctccttagcgagcaagattgcgccaagcgtcatttttgttgatgaggttgatagcatgctgggaagacgtgagaatccaggggaacatgaagctatgcgtaagatgaagaacgaattcatgataaactgggacggcttacgcacaaaggataaagaaagggttttagtatttggctgctacccaacaggccatttgacctttacggagcagtaaattnagacgggtttnccccngaaggtttgatgggttaaaccttncccggttttnnncaaaacanntccg

SEQ ID NO: 90247 - DNA, 1072 bp, Arabidopsis thaliana columbia
caggtcactacgactcactattgggaaagctggcacgcctgcaggtaccggtccggaattcccgggtcgacccacgcgtccgcgttaaagctgtcttctccttagcgagcaagattgcgccaagtgtcatttttgttgatgaggttgatagcatgttgggtagacgtgaaaatccaggggaacatgaagctatgcgtaagatgaagaacgagttcatggtaaactgggatggtttaagaacaaaggatagagaacgggttctggtactcgctgccaccaacagaccatttgacctagacgaagctgttattagacggcttccccggagattgatggttaatcttccagatgcaacgaacagatcaaagatcttgagcgttattctagcaaaagaagaaatagcaccagacgtcgatttagaagctatagcaaatatgacagatgggtactcaggaagtgacttaaagaatctgtgtgtgaccgcagcacattttccaatccgagaaatactggagaaagaaaagaaggagaaaactgcagctcaggctgagaaccgtcccacaccgccattgtatagctgcacagatgttcgttccctgacaatgaacgatttcaaggctgcccatgatcaggtatgcgcaagtgtgtcttcagactcgtcgaacatgaacgaacttcagcaatggaacgagctgtatggtgaaggaggatcgaggaagaagacgtcgttgagctacttcatgtagaagagagacaaaagagagagggagggagatttgttcgtttttgatctctctcgtgttcggtttttttttttgaatctcattttggtcgtttaatttataaatttgtgtacagagagaaagggtgttgttcgttttgctgtctaattcattttctttctcaacataagatgaaaaaaacattcgctgtataatctaatacatgcgtatgtatatagaggctcggatcttttaaggataaggacataaattctaaatcaaaaaaaaaaaaaaaagggcggcccctctagaggatcccagcttacgtacgcgtgcatgcgaagtcatag

SEQ ID NO: 90248 - DNA, 633 bp, Arabidopsis thaliana columbia
  unsure (1)..(633): unsure at all n locations
cagctctcnnnnnnnnnnnnnnnnnnnnnnnnnnnnnnnnnnnnnnnnnnnnnngaaacttagagagacagccacgcgtgacgctcaaattcaatcatcaatgttaacggacgagagagaagtagtctgtgtcaccggcgccagtggctgcatcggctcgtggctggtccatcagctcctcctccgcggctactccgtccacgccaccgtgaaaaacctccaggatgagaaagagacgaaacatctagaaggtctcgaaggtgcagccacacgcctccatctattcgagatggatctcctacaatacgacaccgtttccgccgccatcaatggttgctccggcgtattccacctcgcatcaccttgtatcgtcgatgaagtccaagatccccagaagcaactacttgacccggcggttaaaggaaccataaatgttctgacggcggcaaaagaagccagtgttaagagagttgttgtgacgtcttcgatatcggcgattactccaagtcccaactggcctgctgataagatcaagaatgaggaatgttgggctgctgaagactactgcacgcaaaatggattgcggtatccactgtcgaagacgcttgctgagaaggcagcttgggaatttgc

SEQ ID NO: 90249 - DNA, 514 bp, Arabidopsis thaliana columbia
  unsure (1)..(514): unsure at all n locations
nnnnnnnnnnnnnnnnnnnnnnnnnnnnnnnnnnnnnnnnnnnnnnnnnnnnnnnnnnnnnnnnnnnnnnnnnnnnnnnnnnccacgcgtccgcagaaccctacagatcatcccctacctcgctgcttcgggtcgaatcagcgagtcgggtcaaaattcacctgagaaaaatgttcgcgaggcggttcacttcgttcttcaaaggatcttcaacctcaagcccggacaaaacagctgggacattgggctcttttggtcgcaaggcagtgtctttcgtcttgattacagtcactggtggtgttgctttgagtgctctcgatgatctttctatctatcgtggatgtagcagcaaggcgatggagaaggtgatgaatagtaaggtgatgattgaagccatcggagagccaattgagaaagggccatggtacaatgcttcactagctgtttctcaccaaaggcactcagtgtcttgttcattccctgtgattggaccacaaggcacaggaatcttgca

SEQ ID NO: 90250 - DNA, 659 bp, Arabidopsis thaliana columbia
agaggatggaaaaacaatttgggccatgaggctgaaagcatctcttgatcgagcacgcagattaacagcagaatattctgatttgcttcttcaaatatttcctcctaatgtggagattttaggaaaagctctaggaattccagagaatagtgtcaagacctatacagaagcagagattcgtgctggaattattttccagatctcaaagctctgcactgttcttctaaaagctgtaagaaattcacttggttctgagggctgggatgtcgttgtacctggatcgacgtctgggacattagttcaggttgagagcattgttccgggatcattgccagcaacttctggtggtcctattattctcttggtcaataaagctgatggcgatgaagaggtaagtgctgctaatgggaacatagctggagtcatgcttctgcaggagctgcctcacttgtctcaccttggcgttagagcgcggcaggagaaaattgtctttgtgacatgtgatgatgatgacaaggttgctgatatacgacgacttgtggaaaatttgtgaggttggaagcatctccaagtcatgtgaatctgatactttcaactgagggtaggagtcgcacttccaaatccagtgcgaccaaaaaaacggataagaacagcttatc

SEQ ID NO: 90251 - DNA, 795 bp, Arabidopsis thaliana columbia
cagctctcctacgactcactatatggaaagctggcacgcctgcaggtaccggtccggattcccgggtcgacccacgcgggcgggagcaccaaccgacacaagttttggatctcaaattgtgtctgcgaccgcgttgtttccaacactttgagcaagttaaagagagagagcttttattctttggaggatctaaataggtccaagctcgtcatgcagctaggaaaaagaagaggattaatatacagttattagaaacattaaagtttcttctgtgttttgtagaacaaggagatgatgcggtacaaagaggagaaagaggtgaagaaggaagctttcaggaagtatttggagtcaagtggagttcttgattctcttactaaagttctggtttctctgtatgagcagaatgacaagccttcctctgctctagaattcattcaacaaaagctaggtggtccatcagtctctgactatgagaagcttcaagctgagaagtctgatcttcaaataaagtacaatgagcttttggctaaacatcaggaaaccctgagagagttaaatggagtgaagagcttgcattcacgaaactcttcaaaagatgatgcagacagagagacccttgaagctgaacacacgaccttagtcactcctcaccactaactctgcacttactgtatatgtaattcctgttactatcttcgtttacatatttacggcagtaaaaaaaacaaaaaagggcggccgctctagaggatccaagcttacgtacgcgtgcatgcgacgtcatagctcttc

SEQ ID NO: 90252 - DNA, 818 bp, Arabidopsis thaliana columbia
  unsure (1)..(818): unsure at all n locations
nnnnnnnnnnnnnnnnnnnnnnnnnnnnnnnnnnnnnnnnnnnnnnnnnnnnnnnnnnnnnnnnnnnnnnnnnccacgcgtccggcaaaaactactgcagaacttgagcaagaggaactggagaaggcaccaaagttcaaagcaaaacctttgaacaaaaagatatttgaaagtaaaggagaaatgggtatcttttgcaacaccaagaagcacataacgatacctcaagagtttcactttgcgacagatgagaggatatcacgaccagaatctgtcttagatatattcgacaagctctcactgaactccgaatcttgccatgaaaaacctctaccaaggaacactgctccaaaccccttcaatcttaagacagaagaaagaggcgctgagaaagagaagaaattttatatggaactcatgtataagaaattaggagatgtaaaggcaagagttccaaaggcaaatccatatccttacacgacggactatccagtggtaccaccaaaaccagaacctaagcaatgcacacaaccagaaccgttccagttagagagtctagtaaggcacgaagaggaaatgcgaagagaaagggaagagaggaggagaatggagacagaagaagcccagaagaggctcttcaaagcacaaccagttataaaagagggcccaatccctgttccagagaaagtacgaatgcccctcacagaatctcaggcgttcatgtaagatgactgtgagacagatttgtccaaaaaccaaaggcgccgttaaggatccagcttacgacgcggcaggacgtcaagtttctataggtcact

SEQ ID NO: 90253 - DNA, 941 bp, Arabidopsis thaliana columbia
  unsure (1)..(941): unsure at all n locations
nnnnnnnnnnnnnnnnnnnnnnnnnnnnnnnnnnnnnnnnnnnnnnnnaagaaaatcctatttgcgccgcatctctctcgtcttcctttactccgtcaaaaccatgtttctaagtcagttccggagctgtaaacctttgctcgagtctcgtctacctttgctccgcctctctctctctaaatgtctcgatcagtccttcaaaaccacggctagtagcgaatacggtagtaagatcaacaaagtcacaaagcatgtcaatgaggaggatggtgcaactttctatgttactcgaaggggggcaatcgatagttctgcccctgctgaatcaaaagcatatccaaaagcagctaatatcagttcaatccatagtatgagggaatctcttctggaggaaacagaggaagactactacagacgcttggcactttttgccctgaggaatcatggtggagaggatgccataaatgttattatagaatctctaggtgttgagagttctatgattcgcattgaggctgcatttgtgttgggacaattggaatccaaaacagctatagcttctctaagcaagatcttgagagatgtgaaggagcaccccatggttcgagtagaggctgcaaaagcccttggtttcattgcagatgagaagagcagagaagtactccaagaactttcaggcgacctcgatcccattatcgctaaaggttgtgattcttcattgagtatcttggaatttaagaattcaaaaaaatatgaccctctcatataaaatggtgtgtgtgggtctgttgtgtaatgaaaacatctacgtttcatcttccttttgttaaactttgttttgtattcaaatgatttgcagacggtttaagctctgttttaagctattagcgcggccgctctagaggatccaagcttacgtacgcgtgcatgcggcgtcatag

SEQ ID NO: 90254 - DNA, 815 bp, Arabidopsis thaliana columbia
  unsure (1)..(815): unsure at all n locations
gtgtaaacgtttttttctctgcactccacggtcatggcttcgtctacggctcagagcacgaagcagtttaagaggtctatgactaagaaatcacattcatggtggtgggatagtcacaattgtcccaagaactcaaaatggcttgcagagaatctagaaaagatggatgatcgagtgaaccacatgttaaaactgattgaagaagacgcagactcttttgcaaagaaagctcagatgtattttcagaaacgtccccgagttaatccagcctggtcgaggaattctaccgcatgtatcgcgcatcggctggagcgttatgatcaagctagtggtgaacttcagaagaaccatacatctgagatccagtcacagagctctcttgagatatcatctcctaccaaagagaagttgagtcggccgtcaatctagccataaagaagaggaagatacatcgtctttgacagattctggttctgattctgatcattcctctgccaatgatgaacacggtgaccaggcattgatccgtagaatggctgcactcgagcttgagcttcaagagacgaaacagaagctccttctccagcaggaaagtgttgatggtgacaacaatgttgatctccttcacaaagttactacatatgagggagagcttaaagaagctcatgagaagatgcgaatgcaccaagacgagattgctaatctgaaggatcagcttcagagcttcatgtcttttacacaggggtcattttggngctgacaaaagngtnttgttttggtnaannggcnctnnangaggttcagtgctcnaaagg

SEQ ID NO: 90255 - DNA, 936 bp, Arabidopsis thaliana columbia
  unsure (1)..(936): unsure at all n locations
ctacgcgnnnnnnnnnnnnnnnnnnnnnnnnnnnnnnnnnnnnnnnnnnnnnnnnnnnnnnnnnnnnnnnnnnnnnnnccacgcgtccgcaaggatgaatttattgcggacaagactcgaagacaaacctttgggaggagctagcaaatcccaccgtaaattgtcgccgagagacttatccgaaccaaaaacaaacctttcgggaaagggaggaccaccacaaccgagacccagaacctcttctccccaacaagcaagaagagagacatcaaaactaacctttaattccaccgatgaacctttgaaccactccaagagcaaccacaccttcagatccgacaaagaggaagccaaatacggcggaataaaatggatgttggctcaaacaaaccatctactctcgagatctggccaaagatcacccgcaattagccatttaggatccggccaaagatccactgctaacccctttgcaaagtagcgaacccaccaatccatggttcaacttccgccgctcgccggagctacaattcacaaaccaccgaaccgtgagaaacaaaatctaatccactggagtccatanaccagcagagcacatgaaccgtttctctggctgtcgtgaaggagagctgccgtctagcatcgagccatggacctaaccacgcctcacaccaccggagaagagagatgctcaccaccacttaactctacagcccatcaactatctttgaagatcttcaaatcggaaagaaanagcanannaagtagatntaacatctagttttcaagagagagaagagagggtntttttcggaacgattgggcctttcaagtggatacgatttnatagctatgtcagtgtgggtgaaatttctcttagacggtgccaagcagtgccgcgctgctcgtttagacagatcctcaccgtgtctcgtt

SEQ ID NO: 90256 - DNA, 803 bp, Arabidopsis thaliana columbia
  unsure (1)..(803): unsure at all n locations
tatacgacttactatagggaacgctggtacgcctgcaggtaccggtccggaattcccgggtcgacccacgcgtccgcgatgatagacagactgctgtaagaaatagcttttggaaccagtttgttgtcttcttcaatcaagtcttatcgcttggacctacgtttattgatgatgtcgaagacgagacttgcttctcaaacatgagcttgtatgatgaaagagaaactgaaaaccggcttgcactatgggaggactatgaactaagaggattcttgccactgcttccagctcagacgattctcaacttctcaaggaaacattcgtttggaactgaaggtcccaaggaaaagaaagctcgtataaagaggatctttgcagcagggaaagctttgaccagtgtgatcaaagttgatcagaatcatgtatattttgattcaaagaagaagaagtttcttgttggtgtaaaaccggcagatgactttctggattctcattcaagcccacctaaagcttgtaatgctttgcaagataaccaggtaatgatagatcataactcgccaataatgcagcttgatcaacagatttatatgggtgagggaagatgatgatgatgaagtattgttttcaagccgcttgttactgaaaagaggaaagaggcttctgaccaaatatatgttcctagtggaggcttcaggaaatctgatcaagntactactatggggggactnntaagctntaagtggatctgatgtagctnttcatgaaaatcaaattctgccagctagaggcaatgcgagatttca

SEQ ID NO: 90257 - DNA, 364 bp, Arabidopsis thaliana columbia
gataaaaaaacaaaccttccttaaccagaaccaaatttcagatttttaaacaacataagctctaatggcgtcaccaaagtcacccacaagaccaacccaacaaaacccacaacccaatttccacgattttcttcctaccatggccggaaacctaggcggtgaaggtctgatcggagagctatgcaacggcttcgagcttttgatggacagagagaaaggtgtcatcacgttcgagagtctccgacgtaacgctgcggcggttctgggtttaggagatttgactgatgaagatgtccggtgtatgattaaagaaggtgattttgactgcgacggtgcgttgaatcagatggagttttgtgtgttg

SEQ ID NO: 90258 - DNA, 598 bp, Arabidopsis thaliana columbia
  unsure (1)..(598): unsure at all n locations
ccaaatggggaatgatcttctctgatatcataaagaaagtcagcgggaactgcgaggtctctcagagatccccaatggcaatcaagggtcgtaatgtatttatcaaagatctctccttggacggtgctcttattgtagattccattgatgacgcagaggtaaaacttggaggtttgataaagaacaatggttggaccatggagagtgtagattacaaggacacatcggttccagaagaaataagaatcagaggttttagattcaacaaagtggagcaactcgaaaagaagttaactcaacctggcaaattttctgttgaagattgaagttatctttgcccatttatgtgacacttttttaaaaagtgttatttggcaatatgatcaattagcaaattagctttttttttaagagaatgccaaatgatccattaatttgtccttttaatggagaggttaattcttttttnnnnnnnnnnnnnnnnnnnnnnnnnnnnnnnnnnnnnnnnnnnnnnnnnnnnnnnnnnnnnnnnnnnnnnnnnnnnnnnnnnnnnnnnnnnnnnnnnnnnnnnnnnnnnnnnnnnnnnnnnnnnnnnnnn

SEQ ID NO: 90259 - DNA, 642 bp, Arabidopsis thaliana columbia
  unsure (1)..(642): unsure at all n locations
nnnnnnnnnnnnnnnnnnnnnnnnnnnnnnnnnnnnnnnnnnnnnnnnnnnnnnnnnnnnnnnnnnnnnnnnnnccacgcgtccgcggacgcgtccgcccacgcgtccgcggacgcgtgggaaagatctctccttggacggtgctcttattgtagattccattgatgatgcagaggtaaaacttggaggtttgataaagaacaatggttggaccatggagagtgtagattacaaggacacatcggttccagaagaaataagaatcagaggttttagattcaacaagtggagcaactcgaaaagaagttaactcaacctggcaaattttctgttgaagattgaagttatctttgcacatttatgtgacacttttttaaaaagtgttatttggcaatatgatcaattagcaaattagctatttttttaagagaatgccaaatgatccattaatttgtccttctaatggagagcttaattctttctttcgttttgtttccaacgaaacacttccttttctttgtttttcaacaaaacccgaatatattgttctttatgttaaaaaaaaaaaaaaagnnnnnnnnnnnnnnnnnnnnnnnnnnnnnnnnnnnnnnnnnnnnnnnnnnnnnnnnnnnnnnnnnnnnn

SEQ ID NO: 90260 - DNA, 1024 bp, Arabidopsis thaliana columbia
  unsure (1)..(1024): unsure at all n locations
nnnnnnnnnnnnnnnnnnnnnnnnnnnnnnnnnnnnnnnnnnnnnnnnnnnnnnnnnnnnnnnnnnnnnnnccacgcgtccgaaaaaaaaagaaagacaaagaggattgaacggtaggcgtagacgccattggagtttgaaagggaattagtcgacgttttatggatcattgtcgtttcggtgtcattttcttcttcttctttcgctagcacgatttaaagcctgactagatccatcatcggccatggaggattctacagccacggctacgtcttcgtcttccactcattatttctccattttcacgaattatcctctcatttccgccgtcacctctttcactatcgctcaattcatcaaactcttcacctcctggtatagggaacggagatgggatctcaaacagcttattgggtctggaggaatgccttcttcgcattcagcgaccgttacagctctcgctgtagctattggtttacaagaaggctttggtggatcacattttgccattgcttttgattttggcatctgtttgtgatgtatgatgctaccggtgttagattacatgctggtcgtcaagctgaggttctcaatcagattgtatatgaacttcctgcagaacatccgctggctgagagcagacctttgcgggaacttcttggtcatacccctccccaggtcgttgctggtggaatgcttggaagtgctacagcagtcaccggatacttatttttcaggatagctacaagctaacgtcaagaacatgcatagacacaactcttctgcttcattgcctattgaagccactggagagtaccaaaacagatttacaaccgaatccgagttaaaaatatatttattcttgtttaacattaccattaccatatgtaaagaaatcgtgaaaccccattacaaaaataacgtgattttatttgaaaaaaaaacaaaaaaagnnnnnnnnnnnnnnnnnnnnnnnnnnnnnnnnnnnnnnnnnnnnnnnnnnnnnnnnnnnnnnnnnnnnnnn

SEQ ID NO: 90261 - DNA, 653 bp, Arabidopsis thaliana columbia
  unsure (1)..(653): unsure at all n locations
gcanaaacgntaccngtnaaaagtaggganccattttgcccanaccagncctagccananatcccttcaaaaggtgtacaaancaaccanccataacattancaatcagcacgcaaaggacacncgaaaaaaagttcaagaggggaagagcttctgcaaactctgtgttcagagattgatcgattacaagataactcaaagtgtatcttggatgaggacgatgaagacctcatttgggaggatctgcaaagccatggcatgaactggaaggagattgaaggagagacaccagggttagtgttagacattgagaggctaatcttcaaagacttgattggtgaagttgtgacaagcgagtttgcagcttttccaaggatgctcagtgggcaaccaaggcagctttttcattgctaatattcctaattaatcttcccttagaattgttaatccaggaatcttaatcatcccttttacaaaatttaaaaccattggtgtttttgggtcttttaacccccttcctaaggtccttttctaagtggttaaggtaaccttattaaaaatgtttggaaccgcccgcaaattcttacagcccggggaatccactagttttaaaccgccccccaccccggtgaagctccagcttttgttccctt

SEQ ID NO: 90262 - DNA, 1181 bp, Arabidopsis thaliana columbia
ctatacgacttacttagggaaagctggtacgcctgcaggtaccggtccggaattcccgggtcgacccacgcgtccgggacgacaatctaagttctgaagagtcccattggatgaacaagaacaacaacttatgtagatcgattgtgtggcctgagagtaacacgagtctaaagcaacctgatgctgaacttacggagggtttcatggaagacgatgccgaattcaaaaatggtgaccacaagtacatctcagagataatgttggcatcagggcttctacgagatatcgactacagcatgataagcatccagctgcaccaagcacacctaccgatcaacccgagccttttccttgtactggaacagaacaagacaagcaatgtgagtctacaggacaacaagcacaaaggcagaggatttggacaacaacaaacggtgaacctggttgagagaagtaagaggaagctcatatttgacaccatcaacgagatcttagctcacagattcgctgcaagaagggtgtacaaagcaaccatccataacattatcaatcagcacgcaaaggacacacgaaaaaagttcaagaggggaagagcttctgcaaactctgtgttcagagattgatcgattacaagataactcaaagtgtatcttggatgaggacgatgaagacctcatttgggaggatctgcaaagccatggcatgaactggaaggagattgaaggagagacaccagggttagtgttagacattgagaggctaatcttcaaagacttgattggtgaagttgtgacaagcgagtttgcagcttttccaaggatgctcagtgggcaaccaaggcagctttttcattgctaatattcctaattaatcttcacttagaattgtaaatcaaggaatctaaatcatccattttacagagttgagaacatttggtttcctgtgttctctgaacccctttcttatgttcttttcttagttgtttatgtaaacttcataaaaatgttttgtaaaagactccactcaagataaagctcaaccaatgttatatccatcaagaagaatatttcagcaaacctccaaaaaaaaaaaaaaaaaaaaaaaaaaaaaaaagggcggccgctatagaggatccaagcttacgtacgcgtgcatgcgacgtcatagtaattctatagtgt

SEQ ID NO: 90263 - DNA, 556 bp, Arabidopsis thaliana columbia
cggcacctaatccgactcactatgggaaagctggtacgcctgcaggtaccggtccggaattcccgggtcgacccacgcgtccgcccacgcgtccgtttcccctgaaaccgttcttgtctctctctctctctctctctctcttcttctctgctcaagacaagaacttgatgttcatgtcttgaaacttaacaaagtattgatctttccttttaagtaaagaatttgggggttacacaacttcgtctagatggagcaagagaaaagcttggatccacaactatggcatgcttgtgcaggatcaatggttcaaatcccttcactgaattcaacggttttttacttcgctcaaggccacacagagcacgctcacgcgcctcctgattttcacgcgccgcgcgttccacctcttatcctctgtcgtgtcgtctccgtgaagttcctcgccgacgctgaaacagacgaagtttttgctaaaattacgcttttgccacttccgggaaacgacttggatctagaaaacgacgccgttttgggtctaactcctccttcttctgac

SEQ ID NO: 90264 - DNA, 646 bp, Arabidopsis thaliana columbia
cagctctcatacgactcactataggggaagctggtacgcctgcaagtaccggtcccgaattcccgggtccgaccacgccgtccgacgggtggcaaaagaacacagaaggggattccgccggaaaaaaataacgtctttttttttttcttccaatctctctgtctctctccccaattcccagattctcatttttgcagagattttaggaggaacatgattgtttgaattgggagagacattggttcgtgtaaaatgcgggtgcttggtttgagctcaagcttatgctctggtgaggataaggaagaagaagagattaatggagaaggctctctcacgcctgtttatctcaacgtctatgatctaactcctgtcaacaattatctctattggttcggccttggcatatttcactctggcattgaggctcatggtttcgaatatggatatggagctcatgagtattcgagcagtggggtatttgaggttgaacctaggagctgtccaggtttcatctttaggcgctcagttttgttgggaaccaccagcatgtcccgctctgatttccgctccttcatggagacgctttcgagaaagtatcatggggacacataccatttgattgccaaaaactgtaaccatttcactg

SEQ ID NO: 90265 - DNA, 548 bp, Arabidopsis thaliana columbia
  unsure (1)..(548): unsure at all n locations
cagctannnnnnnnnnnnnnnnnnnnnnnnnnnnnnnnnnnnnnnnnnnnnnnnnnnnnnnnnnnnnnnnnnnccacgcgtccggttttctgaatcactgaacatgatgaggaaaaagtgaaatctgttgtccgaacaatcttcaccctgctaatgtctgctgacgccgatacaacaaagaaaattgtatccaaattaaaacgccgactgcatatggagagtcaggaacgccaattgacagacaaggaacggctggttttgaagctagagaagcaatatccaaatgatattggagtgatatctgcattcttcttcaactatgtgaagctcaatcctggcgaagccttgtatcttggtgcaaacgagccccacgcatacttattcggtgagtgccttgaggtcatggcgacttcagacaatgtagtacgagctggcctcacttccaagcctctggatattcaaacactttgttcaatgctctcttataaactgggatatccggaaatcctgaagggaacaaggattcgaccatacataacaagatacct

SEQ ID NO: 90266 - DNA, 419 bp, Arabidopsis thaliana columbia
aaatatacaaaaatgacttctcacgactcacgccattaaactccacatacacctttccctttcactttcatcttcttcttccctcgattcaatgggttatctctcctgcaaagctggatccgccgtcgcaatcgccgtttcatctgccgcatcaacctccggatccacctccagcaaagcttctgctcctcccgaatctcccattgaagaccgtcctagacttcgtcgtttcctccatcgcgatctcgaatcagccacaggaggtttcgacatcaacaatctcctcggacgtggaagccatggaagcgtttacaaagctgtcatcggttcacgtcacatcgtggtcaagagaccttcgaaatctcgagaaatcagccgtgagttccacaaccaattctagattctcttcaaaatccgta

SEQ ID NO: 90267 - DNA, 667 bp, Arabidopsis thaliana columbia
  unsure (1)..(667): unsure at all n locations
nnnnnnnnnnnnnnnnnnnnnnnnnnnnnnnnnnnnnnnnnnnnnnnnnnnnnnnnnnnnnnnnnnnnnnnnnnnnnnnnnnnnccacgcgtccgctctcttctccacgccatttccagaattttcaggtgttcgtgaaaagatgaattttaagaatgtcaaagttcccaaaggtcctggtggtggtgttatagctgcggtggttattggggggctcagtctttacggtgctacgcacactctctacaatgtcgatggaggtcatcgagccattgtctttaaccggcttgttggtatcaaagacaaggtctaccctgagggtactcaccttatgattccatggttcgaaaggccaatcatctatgacgttcgtgcaaagccttatctagttgagagcacatctgggagccgtgatctccagatggttaagattgggcttcgggttctcacccgtcctatggctgaccaattaccagaggtataccggtcccttggtgagaattaccgcgagagagtcttgccttctatcatccacgagaccttgaaagctgtggttgctcagtacaacgcaagccaacttattactcagagagagtcggtgagtagagaaatcaggaaaatgctaactctaagagccgcanacttccacattgcactggatgatgtg

SEQ ID NO: 90268 - DNA, 1003 bp, Arabidopsis thaliana columbia
  unsure (1)..(1003): unsure at all n locations
cccacgcgtccgctttttcttccaaatcctccaacattcgttgatcaatggctgaagttatgctaccgaggaagatggagattctcaaccattcttcaaagtttggatcaccggatcctcttcatgttcttgccgtcgacgacagtcacgttgatcgtaaattcatcgagcgtttgctcagagtatcttcttgcaaagttactgttgttgatagtgcaacaagagctctccaataccttggtttggatgttgaggaaaaatcagtcggttttgaggatttgaaggttaatttaattatgactgattactcaatgcccggtatgactggatatgaactcttgaagaagatcaaagaatcctcagcttttagagaagtaccggtggtaattatgtcctccgagaacattttgcctcgtattgatagatgtcttgaagaaggggctgaagatttcttactgaagccggtaaaactctcggatgtaaaaagattaagagattctctaatgaaggttgaagatttgtctttcacaaagagtattcagaagagagagctagaaacagagaatgtctaccctgttcactcgcagctcaaacgcgcaaagatctgagctctccgatgcaaattccgtgactggatcttagaaaaagccttttcatatacaggaagcttcaagactcaatgcacttgagctacactgatgattctcgccagcttaatgacctatacaattttccaacccctatggcctttttcgctgattgaattcagtgggtttattcatatagtagtaatgtaaatggtatagagatgagcaaaagctatattatatattatattcattagaggggtcatagcttttttccttacaagagatttgtaagctggcttaatagaagttgttaagaagcctcactttatgtgaataaatgattttgttagctaatcataaacaatcagaagtttcctnnnnnnnnnnnnnnnnnnnnnnnnnnnnnnnnnnnn

SEQ ID NO: 90269 - DNA, 377 bp, Arabidopsis thaliana columbia
acgcggacacgtgggcggacgcgtgggcggacgcgtggggcaaaacaacactaaacctgaaacaaacgtaaatccgccgcaacaacccagttttttccgacggcgtacaagcttcctccgccgtaacgccgtcgtttaataccaagaagcttgattaggtttccgtagtgtgtgatttttttaaggttctgaacactgatgtcaaacccattgaaagagtcaagagaggatattgcaaattctactcctcacatgagggataatgagtatgttcggctagttgtggctcatgaagcctccccagctgaaaccgtgttgtctctatcgcaatcagaggtgcagagtaagaaatttatgtggtggttaaaagctttggg

SEQ ID NO: 90270 - DNA, 561 bp, Arabidopsis thaliana columbia
  unsure (1)..(561): unsure at all n locations
atgatactccagctctctacgactcactatatggaaagctggcacgcctgcaggtaccggtccggaattcccgggtcgacccacgcgtggggaaatgcatagaagaaggtcgagccagtggcatcatgtgtgcttataaccgagtcaacggcattccttcttgcgctgacccgaatcttttgactcgaaccgctcgtggtcaatgggctttccgcggatacattacttcagattgtgacgcagtctcaatcatctacgatgctcaaggctacgctaaaagccctgaagacgctgttgctgatgtcctcaaagctggcatggacgtaaactgtggatcatacttacaaaaacacaccaaatcagctcttcaacagaagaaagtgtctgaaacagacattgacagagctctactcaatcttttctctgttaggattcgtctcggtctctttaacggcgatccaaccaaattaccttacggaaacattagtcctaacgaagtttgttcaccggctcatcaagctntagcacttgatgctgctcgtaatggtatagttctcttga

SEQ ID NO: 90271 - DNA, 434 bp, Arabidopsis thaliana columbia
cccacgcgaccgattcaactcaaccttccaaattccaatggcgacatcacgagctttcactctcttcgctttcacattatctctcctcaccgtagcttctaccgtctccggccataacattactcaaatcctctctgatacgccggaatattcctcattcaacaactacctttctcaaacaaaactcgccgacgaaatcaacagccgcactacaatcaccgtccttgttctcaacaatggcgcaatgtctttcctcgccggaaaacacccactctccgtcgtcaaaaatgctctcagcctcctcgtcctcctcgactactacgatcctttaaaactccatcagctctctaaaggcacaactctcaccaccacgctttaccaaaccaccggacacgctctcgggaacctaggattcgttaacgtcaccgatctca

SEQ ID NO: 90272 - DNA, 433 bp, Arabidopsis thaliana columbia
ggcccaaaaaaaaacagaagaataagaagacacaactcttgttttaaatttgagtcccatttacttttgatgctaaataggagagaaaacgtttttgactcacacataacgtagagagacagagagagacaaaaaaaaagagacgggaatattccggcgaagattgagactctcaatatccaatggagaagtattcccggcggtctattctcctttccacggtggtcgccgccgtgttattctctttaattccggtttcaatctctattcccttcatactctttcacgttaatattaattatccaaaaaaaaaagaaaacaggaattggagataaatgttctggtggagttagtaacttcacgcaactcctaacaaacctctctggctctcctggctattgcttagaaataggaaatggagaaaaggactcat

SEQ ID NO: 90273 - DNA, 539 bp, Arabidopsis thaliana columbia
  unsure (1)..(539): unsure at all n locations
tacgactcactatanggagagctgctacgcctgcaggtaccggtccggaattcccgggtcgacccacgcggccgctagactcttaggtctagttaccaaaatttgactagcaatcatatagctacaagttcctctatatcatatagctacacatatctctagctttttgtatgcaaccccaaatagcagcttaaagaaagcagagaggatcttcttttatttcccctctgagcaacagaagccattattcaaagaaaggcttctttaatttactcgcagggagagggaaaagagaaaaaattgaaaaactccattttcaagtcattaaaatggcatcttcttcaacaaactcaccatgcgccgcttgcaaattcctccggcgaaaatgtcaaccggaatgtgtattcgcgccctatttcccaccggaccagccacaaaaattcgcaaacgttcacaaagtgttttggagcaagtaacgtgacaaagctcctcaacgaggcttcacccttcacaacgtgaagacgcagtgaactctttgg

SEQ ID NO: 90274 - DNA, 508 bp, Arabidopsis thaliana columbia
  unsure (1)..(508): unsure at all n locations
nnnnnnnnnnnnnnnnnnnnnnnnnnnnnnnnnnnnnnnnnnnnnnnnnnnnnnnnnnnnnnnnnnnnnnnnnnnnnnnnnnnccacgcgtccgcccacgcgtccgtgaagctctggagagccaagtgaagaccaaggtgtccatcaaggtgattttcagttcttttaatctcttagtcagcgtaattgggtagaagaaaatatccagttcgtgaattgggtggaagacgattaagagtttctaaactatcttgctctattcggttatcgttaagagtttctgtgagtaatgggttgaagctggatatcaaataatttagtgttaaaaagttcaacttgatagtaagatgtggattcagttatctgcctgataaggttattagatttgctagcacaggaaatactaacactgtcatggattcaatcaagttcatagtttctttggatgtcatatatgaataataggttgcagattcccattcctagagttaagtgtcaaccttagatt

SEQ ID NO: 90275 - DNA, 546 bp, Arabidopsis thaliana columbia
  unsure (1)..(546): unsure at all n locations
cagctctctacgactcactatanggaaagctggcacgcctgcaggtaccggtccggaattcccgggtcgacccacgcgtgcgccataagtgatgaacagagaaagactgtcctccatcattcatgtcctggagctggagcctgtggtggcatgtacacagcgaatacaatggcttctgctatcgaagcaatgggaatgtcccttccttacagttcttcaatacctgctgaagacccattgaagttggacgagtgtcgcttagcaggaaaatatcttctagaattgctaaagatggacttaaaaccccgtgacattatcactccaaaatcacttcgtaatgcaatggtttccgtcatggcccttgggggatcgacaaatgcagtattgcatctaattgctattgcaaggtctgttggtttggagttgactcttgacgattttcagaaagttagcgatgcggttccatttctagcagatcttaaacccagtgggaagtatgttatggaggatatacataagataggtggtacgccagctgttctccgc

SEQ ID NO: 90276 - DNA, 503 bp, Arabidopsis thaliana columbia
  unsure (1)..(503): unsure at all n locations
catannnnnnnnnnnnnnnnnnnnnnnnnnnnnnnnnnnnnnnnnnnnnnnnnnnnnnnnnnnnnnnnnnnccacgcgtccgggaagactagattcgatgtgttggtgaagaagatctcgactttgttcaaaattccaatttcgttcgcctcaaagatcattctctcatcttctcgactttgatgcgattgattaaatatggtggatacggttattcccggagatatggcttgtttggatgcagatttgttgcagcttcaggaaatgtcttcctttgttctcaattctaaacctggattcactcagaagctcttcgaccagtggctttctcttcccgaagctcagcgacaggttggatcattgcttaaggatgctgtagctggagctcctatcaatgttactggaagtgcatcgggttctaattctgccactataccatctatgtttcctgcgggaagcgctcctcctctttcaccaagaagttgtggttcaccccgtacacc

SEQ ID NO: 90277 - DNA, 475 bp, Arabidopsis thaliana columbia
ctgggacgcctgcaggtaccggtccggcctccccggggggctccacccgccgcccacgcgtccgctttgcctttgtctttgatttttctctgtatcgtcggtctctcttttgcgtttctcgatcccaccgtctaatccttctccggccaatgactatgatgactccgcctcccgttgatcagccagaagatgaggagatgcttgtgccgaattcagatttggtcgacggtcctgctcagcccatggaagttacccaacccgagactgctgcgagtactgtggagaaccagccagctgaggatcctcctactctgaaattcacgtggactatccctaatttctctaggcaaaacaccaggaagcattactccgatgtatttgtcgttggaggttacaaatggcgcatattaattttcccgaaagggaacaatgttgatcatttgtccatgtacttggatgtttctgatgctgcgag

SEQ ID NO: 90278 - DNA, 546 bp, Arabidopsis thaliana columbia
cccacgcgtccgcccacgcgtccggttgaaagagagaagatgctaagatctcaaaacagagtataacaacaccttgacctcgttgaagaagcctttgagattgtctcggggatctgaaaaatgtcaatccttcaagtctctacttcgtctctttcttcttctactcttctctccatatctcccagaaaatctctctcatctaccaagtcatgccggatagttcgatgttccgtcgagggaactactgtaaccgagagaaaagtctcggcaaccagcgagccacttcttctgagagctgttaaaggtgaagttgttgatagacctccggtttggcttatgaggcaagctgggaggtacatgaagagttatcaaactctctgtgagaagtatccttctttcagagataggtcagagaatgcagatcttgttggtggaaatttctttgcagccatggaaggtgtttaagccagatggggtgattctgttctcagacattctcactccattgtctggaatgaacatacctttcgacattgttaaaggaaa

SEQ ID NO: 90279 - DNA, 649 bp, Arabidopsis thaliana columbia
  unsure (1)..(649): unsure at all n locations
aggataggttggtagttccatcacaggggcagaattcagttttgttaaaaaggcctccctcatctcatttttcttcgtggcatgaaggattactcgagcgtatgtctgacacagctagcagggcagcagcaagttcctatagtggaattgaaggaggtgtgagacgggaatcaggagcagcaggcccacaaagggtcaacgtcagaggcggcatcgtttagtgagatgttgaagaagagtaatagcatgaagaaggtggcggcagagtcaactgatgcaaccgaaggaagcaaaggtggcggtggtaagaagaaagggaagaaagggaggcaaatcgatccagctcttctcggtttcaaagtcactagcaatcgaattcttatgggcgagatccaccgcgctgatgatttttagcttttgttcgtttgtacaaaatctttacatgtaaagattagattctcatacttaggcgtataggtccttttcggacagatttcttacatcacataagagcacacgaaatgaaataataatgttttttaggtgatnnnnnnnnnnnnnnnnnnnnnnnnnnnnnnnnnnnnnnnnnnnnnnnnnnnnnnnnnnnnnnnnnnnnnnnnnnnnnnnnnnnnnnnnnnnnnnnnnnnnn

SEQ ID NO: 90280 - DNA, 552 bp, Arabidopsis thaliana columbia
acgactcactatttggaaagctggcacgcctgcaggtaccggtccggaattcccgggtcgacccacgcgtgcggaaaatgttagtgttgcagagccaccaatgtctcttctctcttcctttaccaggatccgtcccggtataatccgattatccgccgtaaaagaaatcgccgatgtggcggaggtggaagaagatggtccaattgagcttcctacgtcgtccacgtctccgttttcgtctactaactccattttcgccacttccgatgatcctactcctctccaattggccaccagtgtgcttcttaccggtgccatcactgtcttcctcatccgctccgttcgacggcgcgctaaacgcgccaaagagctgacatttagatctactggagctaagaaatcgttgaaagaagaagcaatggataatctaaaagcgttaagttcaactccgatagaaggtggtaattcaactccatcggcggctcaggcgtttcttggtgcgatagccgcaggagtcattgctctcattctttacaaaatcactggtacagt

SEQ ID NO: 90281 - DNA, 565 bp, Arabidopsis thaliana columbia
  unsure (1)..(565): unsure at all n locations
tgatacttcagcgtctcnnnnnnnnnnnnnnnnnnnnnnnnnnnnnnnnnnnnnnnnnnnnnnnnnnnnnnnnnnnnnnnccacgcgtgcgcccacgcgtccgcccacgcgtccgcccacgcgtccggaaaaaatcactaaacatgaagaatctggtcatatttgccttcttgttcttaagcatcactactgtaatcaatggtggaataacaagtaaatttgtccgccaagctttaccatcgatcgaaatgtctctcgacactttcccttctcctggtggctacaacactcctgaacaggttcatctgactcaaggagaccatgatggacgtggcatgattgtctcgtgggtcacaccgttgaatctcgctggttctaacgttgttacctactggatcgctactaatggtagtgacgtaaagccagcgaaaaagagagctcatgcctccactaaatcttacagattctatgaccatagttcaggatttctccatcacgccacanttaagggactcgagtacgataccaagtacatctatgaggttgggaccgataaaatccgtag

SEQ ID NO: 90282 - DNA, 239 bp, Arabidopsis thaliana columbia
acttcttcgtacgttaattaaaatctgaagaaacaaaatcgtgaaatcgatctctttaagcatcatctagggttcatcactgaaatcaaaaatgcaattaaatctctacaaaatctctcagatctaatcccagatcgttgttggcttcttctccgtacaccaatcccacatatgaattaaagattcgatctcgaaatcgttggcttttgttgttgttgcattcttcggtgatggctccg

SEQ ID NO: 90283 - DNA, 871 bp, Arabidopsis thaliana columbia
  unsure (1)..(871): unsure at all n locations
nnnnnnnnnnnnnnnnnnnnnnnnnnnnnnnnnnnnnnnnnnnnnnnnnnnnnnnnnnnnnnnnnnnnnnnnnnnnnnnnnnnccacgcgtccgacatgtcaaaatggccccaagctcttagcattcaggcgcatcctctgaatgtcccaacgagttttaagcaacgggcaatgttagttgatgagatatggcatgctgttggagatggagcctcggatttagattggtatgtcaagcgtactattcttggaggcgtttactcaactaccgagatttacatgctcaccgatgactccttagaacatcgcgatacatgggcattcttggatgacagagtcaaagatgcttttgatcttaagaagagcatacaagaggccaagtattttgcagaagacataggagctggagttgggaagtcggttcaaggactgatgaatggagttatgcagacaatgtccagaagaagtggtggctctgcgttttgaaaagatcacacctttacacatgattctgcttcacactccttacggattctccaatattttgagttgggatttactataataatgagattagacttatatgagttgaagtgaaggcatatgaactaatatattatcttctacgtttgaataaaccattgagtttgaaatctttaatttgtaaataaggatgaaacctgttctgtgtttggttgttctgtgcgtaaacagagttggaaacttgtaattttggtctacttcaatttggtagggtgtttattgttcgaaaacaaaaacccaaaaaagnnnnnnnnnnnnnnnnnnnnnnnnnnnnnnnnnnnnnnnnnnnnnnnnnnnnnnnnnnnnnnnnnnnnnnnnnnnnnnnttc

SEQ ID NO: 90284 - DNA, 743 bp, Arabidopsis thaliana columbia
atttcaatagagaaaatcaactagtattaaataacgcaatgggccaatatgcgacggtaataattaagagctccttaattattcaccttgcttgtctctcctatttaagacgtatttcttctcttctaccatccaacaagtcacacacttaaagcaaaacaaaacaaaacaaaaacagagcacacaaaaagagaaaccaagttttcttaaaaatggagctagaatcttctcctcctctacctcctcatgtgatgctcgtatcttttccagggcaaggccacgttaatccacttcttcgtcttggtaagctcttagcttcaaagggtttgctcataaccttcgtcaccactgagtcatggggcaaaaagatgcgaatctccaacaaaatccaagaccgtgtcctcaaaccggttggtaaaggctatctccggtatgatttcttcgacgacgggcttcctgaagacgacgaagctagcagaaccaacttaaccatcctccgaccacatctagagctggtcggcaaaagagagatcaagaaccttgtgaaacgttacaaggaagtaacgaaacagcccgtgacatgtcttatcaacaaccctttcgtctcttgggtctgtgacgtggcagaagatcttcaaatcccttgtgctgttctttgggttcaatcttgtgcctgcttagctgcttattactattaccaccacaacctagttgacttcccgaccaaaacagaacccgagatc

SEQ ID NO: 90285 - DNA, 511 bp, Arabidopsis thaliana columbia
  unsure (1)..(511): unsure at all n locations
atgatatnnnnnnnnnnnnnnnnnnnnnnnnnnnnnnnnnnnnnnnnnnnnnnnnnnnnnnnnnnnnnnnnnnnnnnnnnnnccacgcgtccgcgcttttttattttgtaatttaatttcggttgctttttaaatatctaactccgagatttttaagggattgctatctatttttttttttttggggattggttagtttctcggttagttatgttaagtaacgaactttaaaattagggttttgatttggttttttttttatttcagtggttaagttcaatgtctgtgtatctttaataacgcaccagattcatgttgtaggtatcagtagtaaaggtgggacatttgtgtcgcattgaggaagaaactttggatttcagactcacttgggacctaccctttaatggcttcttcaacttctgggattttctttcaaggagatgatgaatctcaaagcttcattaactctcacttgacttcctcttatgggaattcatctaactctgctcct

SEQ ID NO: 90286 - DNA, 548 bp, Arabidopsis thaliana columbia
cagctctcctacgactcactattgggaaagctggcacgcctgcaggtaccggtccggaattcccgggtcgacccacgcgtgcggtttttgattgcttagttttttcccgggagactgaaacatgttcacggcggcagcttcgtcaagcgtgggaaggtggcggacggcgtttctctctctcagggacgaaatctcaaccactccaccgccgccggttcctctgttgctcgaggatctactcttctctcaatcccattcccttatctctgccgtctctcacctcccactgcacgagctcacttccgattgcttgttcctgctcgatttggtttccaaagctgatggtcctgactggatccctgtctctcgtcatacttgtcaactgattcacgatgtttgtgctcgtctacttttccaactaaattcttcgtcatggccgctccttcttcactcttttgcttctgtcttggagtttcttcttcgccaacccatgccttcttcaccttattccgctgcctatttctccagaatcgaacctgtgatccaag

SEQ ID NO: 90287 - DNA, 939 bp, Arabidopsis thaliana columbia
  unsure (1)..(939): unsure at all n locations
gccgagcctctnnnnnnnnnnnnnnnnnnnnnnnnnnnnnnnnnnnnnnnnnnnnnnnnnnnnnnnnnnnnnnnnccacgcgtccggaaggtggagaagcatcggataagcctattgatagtgctgttctctcaaggatgaagcaatttagagcgatgaataaactaaagaaacttgctttaaaggtcattgcggagaacattgacacggaagaaatacaaggcttaaaggcgatgtttgctaatatagatacagacaatagtggtactatcacatacgaagaattgaaagaaggattagccaaactgggatcaagactcactgaagctgaagtgaaacagctcatggatgctgctgacgttgatggaaatgggtcaatagattacattgagtttattactgcaacaatgcatagacataggcttgaaagtaatgagaacgtttacaaagccttccaacattttgacaaagatgggaggggatacattacgacagacgagctagaggctgctttgaaggaatatggaatgggagatgatgctactatcaaagagattttgtctgatgtcgaccctgataatgacggtagaatcaactatgacgagttttgtgctatgatgagaagtgggaatccacaaccaccaagattgttctaacatattttatttgtcttctgtctgaatctaatcaaaaaagacaagagtggtattattattgttgtttaggcaaaaatttaaggttgaaaagagagagagagagatgattgctttcattttttttggtactgctaaactggtcatctcatttggtttgaaggaccaataaaagtatataacagaggaagataaaaaaaaaaaaaaaagggcggccgctctagaggatccaagcttacgtacgcgtgcatgcgacgtcatagtaattctatagtgcgcctaaata

SEQ ID NO: 90288 - DNA, 642 bp, Arabidopsis thaliana columbia
  unsure (1)..(642): unsure at all n locations
gannnnnnnnnnnnnnnnnnnnnnnnnnnnnnnnnnnnnnnnnnnnnnnnnnnnnnnnnnnnnnnnnnnnnnnnnnnnnnccacgcgtccgggttgtttttctcaacaatggtgtctctggccaagtttcactactgtgatcaaacactccacctccgactcgacactcaccgtaaaccgcagcctaaacctgtttcaataccgaatcttacataaacctcctccttctcgcgtcatcagagcttcttcgttttcatcaaaccctaaaccctctttcctcaaaaccacctgcgtgaccttaacaacagccgccgctttactctccgcttccctccacctctccaccaaacccgtcaccgcagcaactctcgtctcacctccccctccaccatccacggcggcggatctcacttccgatcaaatctcgtcgcgtccaaaggaagaagaagatgaagcagcgctggaaaagcactcactaagaatcaaacgangtcgaagctcttaatcactgatgaaaatcaaattccaaaccaaaaacatcgacaccgctttagagattctaaacccgttagatcgaaattcaaccccgaagaaacaagaatggcggatccctaaaagcttagggaccaacctacggggggg

SEQ ID NO: 90289 - DNA, 587 bp, Arabidopsis thaliana columbia
  unsure (1)..(587): unsure at all n locations
tgannnnnnnnnnnnnnnnnnnnnnnnnnnnnnnnnnnnnnnnnnnnnnnnnnnnnnnnnnnnnnnnnnnnnnnnnnnnnnccacgcgtccgctttttcctcatatcccttttttctcaatataaatactctgcaaaaaaacacccacaaatcctcacacaaaaacgttttcgaaatccctaatctactctctcttctctatatctctactcttgagaaatggctcttagaactgtgctcgtctccgacgtccctagcctcccggattctgtctacggtttatccgaaggtttagagttgagcaaaccgacgtcgtttaggttaccggggttttcggtgattggacatagaggaatcggtatgaatgtgttgcaatcgtctgatcggagagcgagaggtgttaaagaaaactcgattctttcattcaattccgccgctaagtatccgattgatttcattgagttcgatgttcaggtgacaaaagatgattgccctgtcattttccatgatgatttcatctactctgaagaaaatggtattgttaatgagagtagagtgacggatctgagtctgtctgagtttctcct

SEQ ID NO: 90290 - DNA, 807 bp, Arabidopsis thaliana columbia
  unsure (1)..(807): unsure at all n locations
nnnnnnnnnnnnnnnnnnnnnnnnnnnnnnnnnnnnnnnnnnnnnnnnnnnnnnnnnnnnnnnnnnnnnnnnnnnnnnnnntcccacgcgtcggcccacgcgtccgccgaatcctagttcgatcttgatcttcccggcggagtaaccaaaattccgtaaatggcgtcaaggagaagtgtacggtatgcacagcttccaggagatgaagatgatgaaggctatggaaatggtgttggtgaaaggagagatttcgatcctcggttcgattattcaccgaaagcatttgatagagttccatggaaatctatagcattagctgtgtttcttttgtttcttggttgcttgcttcttcttttgtcgttttttatcttcattggtcacatggaaggagatagctctcaaggttatgcgttacttgttcttgggatccttacttttctccctggtttctacgagacccgaattgcttactactcatggagaggagctgaagggtaccgttttgcagccattccctcttactgaactcaagtaactggagaagtaagaatattgtgcataggaaaagttttagaggttgtaatccaaaaagtactactatacttaagctgtttgatgaatctactgtgtggaacctcctctagttgggtttaggcagataaaagcttgggtttttggggnnnnnnnnnnnnnnnnnnnnnnnnnnnnnnnnnnnnnnnnnnnnnnnnnnnnnnnnnnnnnnnnnnnnnnnnnnnnnnnnnnnnnnnnnnnnnnnnnnnnnnnnnnnnnnnnnnnnnnnnnnnnnnn

SEQ ID NO: 90291 - DNA, 547 bp, Arabidopsis thaliana columbia
ttcagctctctacgactcactattgggaaagctggcacgcctgcaggtaccggtccggaattcccgggtcgacccacgcgtccgcccacgcgtccgaaaacatggccgagtcaccctccgagtcaacctccgactcgcttagcaccaccacatccactaagcccgctcaatccgggactgtttctatttcaagccctcaaagtcaccatgtcgtcttccccgagatcccaatcgagatcgtcagtgaagaagaaatggctattctcgatgcagctcttgcagcctcccgctccatcctcccttccgtgatccgttctgtttctccgtcacggataaccgccggcggaagtcccaaaacaatccgctcaattactctcttctccaagaggaaattatcggcttgttcagatatcgaagagtcttatctacatcgatttaggagaaatcaagctttaggtgtcacagatctcaccggaactgaatggtgtgagaaacaaatggagaatgttctttgttttggcaggagaaaagtcaataaagctatgaa

SEQ ID NO: 90292 - DNA, 795 bp, Arabidopsis thaliana columbia
  unsure (1)..(795): unsure at all n locations
aatcgctaaactcatcgtcgtcgtctcttctctcaacatcaaaaagtacgtgctgatcacagcagatgttgttgtttatggccaacttatgcacggttgttacaaaaatggctgaggcaacgtcggctttgacagaagcctgtgttcacaaaggttaatgacttgataccaggaagcaatggccactctctgaatgtgaaagttgtcaacacgaagatggtgatgcagatatgacgaggtcgtcccatgggtcctcagtcacgtcagatgcggattgccgaatgcttagttggtgatgagactggaatcataatctttactgcaagaaatgaccaagtggatatgatgaaagaaggcagtgtagtgactctgcgtaatgcgaagatcgacatgtacaagggttctatgaggcttgcagttgatagatggggacgtgttgaagttgcagaggagcccacagacatcaccgtgaaggatgataacaatctttcgctgatcgagtatgagcttgtgagcgtcgaaacttgatatggttcctccacaaacgaaaacagagcgactcaaaaaaagacttacgttctagttggagaaagcctcctttggtttggggttgagncctttttaatggacctatcccggcttgcctcctgancnactgtcctggttttnaaatcaggttccggcctttttgaanttgntnccccattaaannncctgggnngaccttcccntaaaaaaaaaaaaaaggggggccnncccaangngccaagnttccgaccnggnnatggggggcaa

SEQ ID NO: 90293 - DNA, 778 bp, Arabidopsis thaliana columbia
tggggcctccacagatctaatcgctaaagtcatcgtcgtcgtctcttctctcaaaatcaaaaaggttgttataaaaatggctgaggcaacgtctgctttgaggaagcctgtgttcacaaaggttaatgagttgagaccaggaaccaatggccactctctgaatgtgaaagttgtcaacacgaagatggtgatgcagagaggaggaggtcgtcccatgggtcctcagtcacgtcagatgcggattgccgaatgcttagttggtgatgagactggaatcataatctttactgcaagaaatgaccaagtggatatgatgaaagaaggcagtgtagtgactctgcgtaatgcgaagatcgacatgtacaagggttctatgaggcttgcagttgatagatggggacgtgttgaagttgcagaggagcccacagacatcaccgtgaaggatgataacaatctttcgctgatcgagtatgagcttgtggagcgtcgaaacttgatatggttcctccacaaacgaaaacagagcgactcaaaaaaagacttacgttctagttggagaaagcctctttggttgggggttgagtcttttttattggacctatccggcttgcctctgatctactgtcctggttttgaaaatcaggtgcccgcctttttgtagattgattccctatttaaatatcatgggatgatctttctcaagatttaaaaaaaaaaaaaaaaagggcggccgctctagaggatccaagcttacgtacgcgtgcatgcgacgtaatag

SEQ ID NO: 90294 - DNA, 533 bp, Arabidopsis thaliana columbia
taccggtctgggattcccggctcgacccacgcgtccgaagctgctgaagagagagcagcttctgtgaaggcatctacaaagaagaaagaatccggaaagtcatcagttttgatggatatcaagccgtgggatgatgagacggacatgaagaagctagaggaagctgtaagatccattcagatggaaggattgttttggggagcatcaaagcttgtacccgttggttacggtatcaagaagttgcacatcatgtgcaccattgttgatgaccttgtatctatcgacaccatgatcgaagagcaactcactgttgaaccgatcaatgaatatgtccagagttgtgacattgttgccttcaacaagatatgaggatggagaatagcttgaaggaagaactgtttatgttggtggtttcttctctatatccagttttgttacctggttttattgtactctgtgggagggcttttaccaactctgattcattttgatatatgtgaagacaattcagttttgtcttaaagtttcccccc

SEQ ID NO: 90295 - DNA, 594 bp, Arabidopsis thaliana columbia
  unsure (1)..(594): unsure at all n locations
cggggcggaccaacccgtccgttttaattttaaaggactgcgcctttttgcttcagggaaaaaggttcgggcttcggaaactatggcagcattccctaaccttaactctgatgctggattgaagaagctcgacgaggcatcttctcactcgcagttacattactggataccaggcttcaaaggatggatatcaccgtctttgcagctcttgcaaagcccccaacttcacagtatgtgaacgcttctcgttggtacaatcacattgatgccctcttgaggatctctggtgtctctgctgaaggaagcggtgtcattgttgagggatcagctcctatcactgaggaggctgttgctactcccccctgcaagctgattctaagggtgcttcccggctgatgaagaaggatgatgatgatgttgacccttttcggagaggagccccagggggaaagaaaanttctttaagagaggcaagcttntttaagggattttcaaagaagaaggattttgnaagccccagttttnnttantnaaacccnggttntnncntcatnanagtttggactttagcctcantgnaggttttttgggngt

SEQ ID NO: 90296 - DNA, 742 bp, Arabidopsis thaliana columbia
  unsure (1)..(742): unsure at all n locations
gatctgccagctacaatacgactcacattagggaaagctcgtacgcctgcaggtaccggtccggaattcccgggtcgacccacagatgcgggctgatgaagaagatgatgatgatgttgaccttttcggagaggagaccgaagaggaaaagaaagctgctgaagagagagcagcttctgtcaaggcatctacaaagaagaaggaatctggaaagtcctcagttttgattgatatcaaaccgtgggatgatgagactgacatgaagaagcttgaggaagctgtgaagtccattcagatggaaggtttgttttggggagcatcaaagcttgtcccagttggttatggtatcaagaagttgcagattttgtgcaccattgttgacgaccttgtctctattgacaccatgatcgaagagcaactcactgttgaaccgatcaatgaatatgtccagagctgtgacattgttgccttcaacaagatatgaggatggagaaagcttcaaggaatgtctgtgttcatgtggtctggttcttcttcttcttctatattcagtttcccaagtttttgtagactgttgttttgactctgttatggcctgccatctctgatccattttgatatttaatgaaaagtgacaattcagtaaaaaaaaaaaaaaagaaagnnnnnnnnnnnnnnnnnnnnnnnnnnnnnnnnnnnnnnnnnnnnnnnnnnnnnnnnnnnnnnnnnnnnnnnnnnnncg

SEQ ID NO: 90297 - DNA, 1013 bp, Arabidopsis thaliana columbia
  unsure (1)..(1013): unsure at all n locations
tnnnnnnnnnnnnnnnnnnnnnnnnnnnnnnnnnnnnnnnnnnnnnnnnnnnnnnnnnnnnnnnnnnnnnnnnacccacgcgtcccgggcgccttcactcttcatcttcaaagactgcgccttttagctcagtgaaaaaggttcgagcttcggaaactatggcagcattccctaaccttaactctgatgctggattgaagaagctcgacgagcatcttctcactcgcagttacattactggataccaggcttcaaaggatgatatcaccgtctttgcagctcttgcaaagcccccaacttcacagtatgtgaacgcttctcgttggtacaatcacattgatgccctcttgaggatctctggtgtctctgctgaaggaagcggtgtcattgttgagggatcagctcctatcactgaggaggctgttgctactccccctgcagctgattctaaggatgctgcggctgatgaagaagatgatgatgatgttgaccttttcggagaggagaccgaagaggaaaagaaagctgctgaagagagagcagcttctgtcaaggcatctacaaagaagaaggaatctggaaagtcctcagttttgattgatatcaaaccgtgggatgatgagactgacatgaagaagcttgaggaagctgtgaagtccattcagatggaaggtttgttttggggagcatcaaagcttgtcccagttggttatggtatcaagaagttgcagattttgtgcaccattgttgacgaccttgtctctattgacaccatgatcgaagagcaactcactgttgaaccgatcaatgaatatgtccagagctgtgacattgttgccttcaacaagatatgaggatggagaaagcttgaaggaatgtctgtgttcatgtggtctggttcttcttcttcttctatattcagtttccgaagtttttgtagatgttgttttgactctgttatcatggtctttgcttaccagaaacactcgaagtgcttacttcgaatggattca

SEQ ID NO: 90298 - DNA, 490 bp, Arabidopsis thaliana columbia
  unsure (1)..(490): unsure at all n locations
cannnnnnnnnnnnnnnnnnnnnnnnnnnnnnnnnnnnnnnnnnnnnnnnnnnnnnnnnnnnnnnnnnnccacgcgtccgggaaaagatagctccggagctcttcctcgtcgccggtaacccggactctttcgtcgtcgacgacctcctcgacttctctaacgacgacggcgaagttgacgacggcttaaacactcttcccgattcttcaacactctccaccggcactctcaccgacagttccaactcctcctcgcttttcaccgacggcactggcttctccgacctatatattccggtaattttccgttattattttctcaaatccacgccaatatttatgaaatagtaacacttttttcttcttcttcttcttcttatttaatcagaatgacgatatagcagaattagaatggttatcaaattttgtggaagaatcattcgcaggagaagaccaagacaagcttcacttattttccggtttaaaaaac

SEQ ID NO: 90299 - DNA, 560 bp, Arabidopsis thaliana columbia
  unsure (1)..(560): unsure at all n locations
gctctctacgactcactatttggaaagctggcacgcctgcaggtaccggtccggaattcccgggtctacccacgcgtgcgcaaaggagggatcaagctgcttcatcggtaatgtgaacgcaactgcggatgctttagtcaacttcaaaggaaaagactaccacgtaccggcttggtctgtaagtgttcttccggactgcgataaagaggcttacaacactgcaaaagtgaacactcaaacatcaatcatgaccgaggactctagtaagccagagaggctggaatggacctggagaccggagtccgctcagaagatgattcttaaaggcagtggagatctcattgccaagggtcttgtagaccaaaaagatgttacaaacgatgctagtgactatctttggtacatgactaggcttcatctcgacaagaaagatccactttggagccgaaacatgacggtacggggttcacagcaatgcccatgtttctacacgcttacgtcaaattggaaaatacggtcgggtaacccaatttcggtaaaggaccgggaaantttngatt

SEQ ID NO: 90300 - DNA, 539 bp, Arabidopsis thaliana columbia
  unsure (1)..(539): unsure at all n locations
cagctctctacgactcactatanggaaagctggcacgcctgcaggtaccggtcccgaattcccgggtctacccacgcgggcggatctggaggttagtacacttacaaatgctggttcttgctctagtgtaacaaggtatgagtctggtggtggtggtactcaaggctatgttagagaaggttacaatcagcctgtgactggttatgttgacaatgatgcggtgattgctcagttttatcaagacgaattgtctagagttgctcgagccgaagcatcggggatcaatagtcttagtcctacttctgttgttgcacaagactggcctcatcctcatcaaggacaggaaaatcaaggggaagccattgatattactcaggaaagtgatattcttcataatcataacggtaacatggaagataagaatgttgcaaggataagatttgaaggagggcaaagttccccatctcgtgatgatgactcagtttgttctggagaaatagaagaccaatcttggtcagaggttgggaagcgactggacc

SEQ ID NO: 90301 - DNA, 516 bp, Arabidopsis thaliana columbia
  unsure (1)..(516): unsure at all n locations
nnnnnnnnnnnnnnnnnnnnnnnnnnnnnnnnnnnnnnnnnnnnnnnnnnnnnnnnnnnnnnnnnnnnnnccacgcgtccgatcgagaaaaccattacacgagaaaggaaaaaaatggtgaatccttcttcacctggaattgccatactcggagctgggatcttcgtcaaaactcaatacattccgagattagctgagatctccgatctcgtcgacctgaaagcgatttggagccgtactgaggaatctgcaaaaggagctgtggagatagcaagaaagcattttcctgaagtgaagtgcaaatggggagatgagggtctcaatgagatcattcaagacagttcaatagttggtgttgctgtagttgtagctgcagaaaccatggttgaattgtcactgaagatgctcaaggcaggaaagcacgtccttcaagagaagccagctgctgcttcaatcagtgagatagaaactgcaatgtcaagctatagaaatatttctgctgattccccatgccgt

SEQ ID NO: 90302 - DNA, 550 bp, Arabidopsis thaliana columbia
  unsure (1)..(550): unsure at all n locations
cagctctctacgactcactatanggaaagctggcacgcctgcaggtaccggtccggaattcccgggtcgacccacgcgtgcggttatgggtcgatgtgttgaagaaaacgttggagcatggcttagcaccaaaatcatggacggattacttgtatctaaccgttggaggtacactctccaatgcaggaatcagtggtcaagcttttcaccatggtcctcaaattagtaacgtccttgagctcgacgttgtaactgggaaaggagaggtgatgagatgctcagaagaagagaacacaaggctattccatggagttcttggtggattaggtcaatttgggatcatcactcgagcacgaatctctctcgaaccagctccccaaagggtgagatggatacgggtattgtattcgagcttcaaagtgtttacggaggaccaagagtacttaatctcaatgcatggtcaattaaagtttgattacgtggaaggctttgtgattgtggacgaaggactcgtcaacaattggagatcttctttcttctctccacgtaa

SEQ ID NO: 90303 - DNA, 556 bp, Arabidopsis thaliana columbia
  unsure (1)..(556): unsure at all n locations
tctctacgactcactatatggaaagctggtcacgcctgcaggtaccggtccggaattcccgggtcgacccacgcgtgcggtttcgagaatggcctaatgtcctctcactcttgggtggtctgattgtgatcaaaacactgattataaccgcaatcggtccccgagttggcctcacaatacaagaaagcgtaagagttggctttcttctttcccagggaggagaatttgcatttgttgtgttctctctagccaacaggctaggagtgcttccaaatgagctgaacaaactgctcattatcgtagttgttttgtctatggcattaacaccttatcttaaccaacttggaagaaaagccgccgattttcttgatgagagacttgatcccggagagaaaataggtgaagatgtgaacttcgatgttagtgaatcaattgtcatcattggatttggacaaatgggtcaggttctggccaattttttgtcaacgccattggtctcagatagtgatcttgtgggatggccttatattggttntgatctgaatcctgctgtagt

SEQ ID NO: 90304 - DNA, 708 bp, Arabidopsis thaliana columbia
ctaatacgacttctatagggaacgctggtacgcctgcaggtaccggtccggaattcccgggtcgacccacgcgtccgcttcgttgcttagtaagaaagtagaaagtttctgagaatctcgggcacgaattgaatcagataattcgctagaatcggtttaacgctttaaaggcaatcgctttgcattctcatgaattctcttatactcggtgctgctagaaggttcgtggggttgcatttgagagtttcagtgaaccttttgcaaaatgaatctttctcttcgtattcgttctcttctgctagtgctgctgatgtgagccctaaaggggagacctttaaatcctcgtccttccttgattcactgcgtttagctacaaaactcactgacaagggaaattctgattccgttctggatcttctcagaagttatgggttcactgattctcagatctccagcatcatcaggagtgattcaagagtgcttatagacaatgatgcgacatcccttggttcaaagcttcagtttttgcagtccagaggagcttcaagctctgagctcactgaggtttgtttcacagtttctaaaatcttggggaagagagagggcaaatctctcagcagattttatgatttcatcaaagtcattatagaagctgataagagttccaagtatgaaaagatatctcattctttggcacaggggaacaag

SEQ ID NO: 90305 - DNA, 786 bp, Arabidopsis thaliana columbia
  unsure (1)..(786): unsure at all n locations
atgatacttcagctctcnnnnnnnnnnnnnnnnnnnnnnnnnnnnnnnnnnnnnnnnnnnnnnnnnnnnnnnnnnnnnnnccacgcgtgcgcttccaaaagatcaaaagcatttagttttctttcccatcctgtacccgaatgttcttgcattacgcgaacccatccggtttcaaatgccacaaatcttggggtgacacaccgttgtccgcaatgggtggatggtgctgtaagcgaaagattaaaggagtataagaacgcagagaaagaagaggatcttgatgaagaggacttgtcttcttcaggattgttctttggtcacaaggaaagtggagggaataataatggtaacaatgagactgtaaattccgaagctaacaataaggaagaaggtcagcttgaagatcaagaagaacttgaaggcagcgaaagataaggcttgtggttgaagatgcaacaatgagcaagtcgcagatagatctaaccttttctcaaaaatagtttatagcctgggtattacttattaggttgtgtattagaatatgtctttttttttttgatgatcaattttacaacagtttagtgatttttaagaacataattctatgggactatatatttttgtaacatgatctcagtggccaattggatgactcaactttttttttttccnnnnnnnnnnnnnnnnnnnnnnnnnnnnnnnnnnnnnnnnnnnnnnnnnnnnnnnnnnnnnnnnnnnnnnnnnnnnnnnnnnnnnnnnnnnnnnnnnnnnnnnnnnnnnnnnnnn

SEQ ID NO: 90306 - DNA, 703 bp, Arabidopsis thaliana columbia
  unsure (1)..(703): unsure at all n locations
nnnnnnnnnnnnnnnnnnnnnnnnnnnnnnnnnnnnnnnnnnnnnnnnnnnnnnnnnnnnnnnnnnnnnnnnnnnnccacgcgtccgattctttggtaactttcgcttactctctccccattctctctcgaagagagcctcgccggagtttgtttttcttcttgtttcgcggccaaaaccgcctttgtgtaaagctaccttgttattttcctccgttaaccatctggtataggttgctgctggactctttagatggcagactctcggaatggtaatgcccgagcccctcctagtggagtgcctccaaaagctgggaatacttattccatagatgttaaaaactttatctcacgtgcaagagcattgtatgaacactggaagaagcacagtgcagacttatggggatctgccgacgctcttgccattgctacccctcctgcttctgatgatctgcgttacctgaaatcttcagcgttgaatatttggcttcttgggtatgagtttccagatacaattatggtttttaccaagaagcagatccatttnctgtgtagtaggaacaaggcttctctacttgaagttgtgaaaanacctgcacatgatgagttgaagcttgatgttatcatgcatgttaagcctaagggggatgatggaacagggctggtggatgccatatttcgtgccatccgtgatctatcccggg

SEQ ID NO: 90307 - DNA, 996 bp, Arabidopsis thaliana columbia
  unsure (1)..(996): unsure at all n locations
cgcgnnnnnnnnnnnnnnnnnnnnnnnnnnnnnnnnnnnnnnnnnnnnnnnnnnnnnnnnnnnnnnnnnnnnnnnccacgcgtccggtacaatactgcaactgtcggagtggtaggagatggattcatggctcgtgatctaacgttccagaacacggcgggaccagacgctcaccaagcggtggcgtttagatccgacagcgatttttctctgatcgagaattgcgagttccttgggaaccaagacactctctatgcccatggtcttcgtcagttctacaaaaactgtcgtatccaaggaaatgttgactttatctttgggaattcagctgctgtcttccaagactgtgaaatcctaatcgcaccgcgtcaaattaaccctgaaaagggcgagaaaaacgcagtcactgcccaaggaaggattgacccgtcccagtccacgggtttcgtgttcttgaactgtttgattaacggaacagaggagtacatgaagctgtttaaagctaaccctaaggtgcataagaacttcttggggaggccatggaaagattactcaaggactgtgtttataggttgtaatttagaggctttgattactcctggtggatggttaccttggagcggggatttcgcgctcaagacactttattacggtgaatctaagaaccacgggtccgggatcagatagggcacaaagggtttcatggagcagtcagatcccggacgagcatgttcatgtgtattcggtggctaactttattcaggctgatgagtgggcttcgatgtctgcttaaatcaatctttaagactataaggggtttaggaatgttttaaaagaagaaaaccatctcattgtaatttagttgataaactgttttaaacataaaagcaaacattgcattcatgttaaaaaaaaaaaaaaaaaaaagnnnnnnnnnnnnnnnnnnnnnnnnnnnnnnnnnnnnnnnnnnnnnnnnnnnnnnnnnnnnnnnnnnnn

SEQ ID NO: 90308 - DNA, 447 bp, Arabidopsis thaliana columbia
ttgtcgcgtgggggaacctaaaaaagcttcctttttgggacgaagtttcttagagaatttgtgattccgattcttagggttttcaccaagcgttccttcgcgacgagctctcaatttttgaggttattgatttcttcttctgatcgaattttccgtatctgctagtgaattcttctttctcagctcagggtttctcaattctccgttctcgatctcttgatacgatcgatctttcgaattgaatccatttgtcaatttttcgttgcagtctcgttggcggcgcaatcatcatagactttgggggatcgcttgtaatgagacgaatttcaaagtttggtatcttttacttgcctgaattgaccaattcgacttttatatagagacgtctattagggttttgtgttgctaaggaggtgggattattgtgtactagagggttcttttagc

SEQ ID NO: 90309 - DNA, 473 bp, Arabidopsis thaliana columbia
ctatacgactcacttttagggaagctcgtacgcctgcaggtaccggtccggaattcccgggtcgacccacgcgtccgggattattgtgtactagagggttcttttagcttctaggaacatgtctggtggaactccagttggtggtggtgggtacattaggcaaagacatagccaaggttatgcttctggtggtgatgatcttgaggatgatgcttgctctaggccacagcctttttctttagagaatcctagaagtaaaacctgggttgagattttggagaatgtgctttggattgcatctgctgtcttcattgtctattttggagacaggcactctaatatgatacatattctcttacgtgatgctcggatcaaaaggatgcctttgtatttcgggatgttgggaatagctgtgaacattataatcataatctacgaaagcatgttatcttggagcatgagaaggtttgatg

SEQ ID NO: 90310 - DNA, 538 bp, Arabidopsis thaliana columbia
ctctcctacgactcacttattgggaaagctggcacgcctgcaggtaccggtccggaattcccgggtcgacccacgcgtgcggattttgggcctgaatttgcggttcttgatgttgatggagaggaaccccatacaggcatcattgcgtctatctctaatgagaaccaggcatttatttcctgtgtcgacgatgagaggcttgagtttgaagatggtgacctagttgttttctcagaagttgagggtatgacagaattgaatgatgggaaaccaaggaagataaaaagtacacggccatattcattcacccttgatgaggacactactaactatggaacatatgtgaagggtggtattgtcactcaagtgaaacagccaaagttactgaatttcaagccattgagggaagcgcttaaggatccaggggattttctatttagtgatttctctaagtttgatcggcctccactccttcacttagcattccaggcacttgatcattttaaagctgaagctggcagatttcctgttgctggct

SEQ ID NO: 90311 - DNA, 628 bp, Arabidopsis thaliana columbia
  unsure (1)..(628): unsure at all n locations
tacgactcactttagggaaagctgctacgcctgcaggtaccggtccggaattcccgggtcgacccacgcgtccgttcattatcgcgaatctgagatttcggaagattcgatcgatttgggggttttagggtttaatctcaactgctaatcaatggcgccacctccaggactttactccggtaccagcactcttgctctggttgctcgtgcttcggctttcgggttgggtctcatctacggcaacatcaagctcaaggctttaaagataaagaagaattcgcagattaaggccgaagcaaaggctcatcactaaaccaactcttcttctccttctcaataagattatgaagccaagtgattgttatctctaaatgtagttcttttcctccttaagctatatctccctcggtgacattttttccatctttctgtttttttaatcaaaatcttctgtctgacaaagcaatcgtatacccgttttggtttaaacctgagttcttctttggtactttcctgctattcaataaacaccatatttttatcaaaaaaaaccaaaaagnnnnnnnnnnnnnnnnnnnnnnnnnnnnnnnnnnnnnnnnnnnnnnnnnnnnnnnnnnnnnnnnnncac

SEQ ID NO: 90312 - DNA, 477 bp, Arabidopsis thaliana columbia
gatttatgctagattgtccctcctcgatcggtttcttcttcttatcgtgcatggagtggataagatggttccatggcataagcttccagtattcttggggttaacctatcttgaagtacgaagacatcttcaccaacaatacaatcttctcaacgtcggtcaaactccgactgggatccggtttgatcctgctaattatccgtaccggactgctgacggaaaattcaatgatccctttaatgaaggcgtcggcagtcaaaatagttttttcgggagaaattgtccccccgtcgatcagaaatcaaagttacggaggccagaccccatggtggtggcgacaaaactattaggaaggaaaaagtttatcgacacgggaaaacaattcaacatgattgcagcttcttggattcagttcatgatccatgattggattgatcatcttgaagacactcaccaaatcgaacttgtcgctccaaa

SEQ ID NO: 90313 - DNA, 558 bp, Arabidopsis thaliana columbia
  unsure (1)..(558): unsure at all n locations
caaccctcgcaactctatttaaacatttatcttgtgacgtttcacataacaagatatatctacaataaccccaagaaatttaacagaatgaaagtaattacttccctaatctcttctattttgcttaaattcatccacaaagacttccatgagatttatgcaagaatgtccctcctcgatcggtttcttcttcttatcgtgcatggagtggataagatggttccatggcataagcttccagtattcttggggttaacctatcttgaagtacgaagacatcttcaccaacaatacaatcttctcaacgtcggtcaaactccgactgggatccggtttgatcctgctaattatccgtaccggactgctgacggaaaattcaatgatccctttaatgaaggcgtcggcagtcaaaataggttttttccggggggaaatttncccccggtggtnagaattaaagtttcgggggccagncccnttgggggnggggaaaactttttggggggaaagttttngcncgggaacatttantggtgaggtntggtcgtcgcccgtggc

SEQ ID NO: 90314 - DNA, 697 bp, Arabidopsis thaliana columbia
ctatacgacttacttagggaacgctggtacgcctgcaggtaccggtccggaattcccgggtcgacccacgcgtccgcgatcgccggcgattcaaagaagcagatagaaaaatggcggagatgaagagtgtcggagtagttggtgctggacaaatgggttcaggaatcgcgcaactcgccgccacgagtggcctcgacgtttggctcatggacgctgatcgagatgccctctctcgagccaccgcagctatctcctcctccgtcaaacgattcgtctccaaaggtctaatctccaaggaagttggtgatgatgctatgcatcgtctacgattaacatcgaatcttgaagatttgtgttctgctgatatcatcgttgaagccattgtggaatcagaagacattaagaagaagctgtttaaggatctagatggtatagctaagagttctgcgattttagcttctaacacaagttctatatccattactcgtcttgcatctgctacgggaaggcccagccagggtcatttgggatgcactttactggacccctcctccaataatgaaactggttgaaatcattcgcggtgcagatacctcagaagagacgtttcttgctacaaaagttctggctgaaagggttggcaagacaacagtctgctcacaagactatgccgggattcgtagtgaaccgaatcctc

SEQ ID NO: 90315 - DNA, 423 bp, Arabidopsis thaliana columbia
atatccttcatcgtcctcatggctctgctagttggtcacaaggggatacaaaagttctagctgcggtttatggacctaaagcaggaacgaaaaagaacgaaaatgctgagaaggcttgttttgaagtcatatggaagcctaaatccgggcagattggaaaagttgaaaaggagtatgagatgatattgaaaaggacgatacagagtatttgtgttttgactgttaatccaaataccaccacctcagtgataattcaggttgtgcatgatgatggttctcttctaccatgtgcgataaatgcagcatgtgcagcgcttgtcgatgcaggaatccctatgaagcatctggctgttgctatatgctgttgcctggctgagaatggatatctcgtactcgattcaaacaagcttgaagaaaagaaaa

SEQ ID NO: 90316 - DNA, 377 bp, Arabidopsis thaliana columbia
gtcaaaaatggcgaaccgtcgaattctctgtatctcttgaatttcccagagattaatttgaatcttcatcatcttcttctctctggattcgccgagaaaccttcttcctctgcttctctcgtcgatattctcttccttcccgcttaagccttcggctagatatcaatggaaaggtcgtatagcaatgcaagaatggccaacagtttcacgttctggaatgattgtgttgagccagaggatttagaagaaatgtggatggatcctgcggtcagtgctgaatggattgatgttggagagactaaacgccagaaggttcacctctcaagggatcctgatggtcagccttatcttacacagaccgagatgagggctgtttc

SEQ ID NO: 90317 - DNA, 328 bp, Arabidopsis thaliana columbia
atttcattgaacctcaagatccaagcaaattcgtctggagaggacagttttatggagagcaagatgatttcagacgcttctcgtagtttagccgagctggactacagttgcttcttcagtccggcaagaaaacccgacatcatacattgtcatgactggcaaacagcttttgttgcgccgctgtattgggatctgtatgctccaaagggattagattctgcaagaacatgctttacatgtcataattttgagtatcagagtaccgcgtctgcttcagaattgggatcctgcgggcttgatgttaaccagttaaatagaccagacagaa

SEQ ID NO: 90318 - DNA, 525 bp, Arabidopsis thaliana columbia
  unsure (1)..(525): unsure at all n locations
atgatatnnnnnnnnnnnnnnnnnnnnnnnnnnnnnnnnnnnnnnnnnnnnnnnnnnnnnnnnnnnnnnnnnnnnnnnnnnnccacgcgtccgcccacgcgtccgctcaaaccctaaaataaattaaacgagttctacgtaagaaggagagagagaagaatgggtcgccaaaacattgtcgtcgtggttgccctcgtcttcatggccatcattggccttgccgcagctgcctcctctccatctccttcagcgtctccctccaaagctccagctgcctccaaaaccgatcatgtcgaggctccagtcaccgatgaccaaatcggaaccaccgatgacgatgcagctcctactcctggtgacggtgacgttgcagtggctggtcctctaggaagtgactcctcgtacgacaatgcgcctacaggctctgctgattctgccaaaagcggtgcggcagctcttggcgtctctgcggtcgtcgttggtgttacatccattgctggtcctttcttgttactctaagttggg

SEQ ID NO: 90319 - DNA, 439 bp, Arabidopsis thaliana columbia
  unsure (1)..(439): unsure at all n locations
cgcgtccggttggtctgagatcatttgctgctggtgggaagttactgcagatcaatagaagaatggagtttgtgtttgctagccatagttttgacgtgtgggagagttggagtctagaaggttctctggacgaatgtcggcttgttaactgcaggaattcctctgcggtgttggacgctcgtgtggagatattggcaatggtaggagacgatggtatcacacgttggatcgattaaaaangaaaacagagtctctccatttgtgagcttctctcttttaattacttttgttactttaacatccttaggattcacagaccgaaaacagagacacccaatttttgtgtttcgagactgtgtcgtgtgttgtgtagttggtatcaaccaacttatatctgtaatcattgtttctttttatttattctcggtttgcagaaaca

SEQ ID NO: 90320 - DNA, 2430 bp, Arabidopsis thaliana columbia
  unsure (1)..(2430): unsure at all n locations
nnnnnnnnnnnnnnnnnnnnnnnnnnnnnnnnnnnnnnnnnnnnnnnnnnnnnnnnnnnnnnnnnnnnnccacgcgtccgcttcttcttcgtcttcttctctgaatagtcacaatgcgagtcttcttcttccccaactcgtccatggcgattctctctgttttcctctccctccttctcctctctctccctcttccatcaactcaagatctcaacgccgacagaaccgctcttctctctctccgctccgccgtcggaggccgtacatttcgctggaacatcaaacaaacctcgccgtgtaactgggccggtgtcaaatgcgagagtaacagagtcaccgctctccgcttacccggcgttgctctctccggtgacattccagagggtattttcggtaacttaactcagctccgtacacttagccttcgtctcaatgctctctctggctcactccctaaagatctcagtacctcttccaatctccgacacctttacttacaaggaaacagattctccggcgagatacctgaagttttgttcagtctcagtcacctcgtgaggcttaatctcgcttccaacagcttcaccggagaaatctcttcaggtttcacgaacctcacgaagctaaagactctgtttctagagaataatcaactctctggttcaatccctgacttagatttacctttggttcaattcaacgtttcgaataactcgttgaacggttctatacctaagaatcttcagaggtttgagtctgattcgtttctacagacttcactttgtggcaaaccgcttaaactttgtcctgatgaagaaactgtacctagtcagcctacttctggtggaaacagaacaccaccgagtgttgaaggaagtgaagagaagaagaaaaagaacaaactttccggtggagctattgccggaattgtgatcggatgtgtggttggtttcgctttgattgttttgatactaatggtgctctgtcggaaaaagagtaataagagatcaagagctgttgatatctcaacaatcaaacagcaagaacctgaaattcctggagataaagaagcggtggataatggtaatgtctactcggtgtctgctgctgcagctgcggcgatgactggaaacggaaaagccagtgaagggaacggtccagcgacgaagaagcttgtgttctttggtaacgcgactaaggtttttgatcttgaagacttgttgagagcttctgcggaggttcttgggaaaggaacgtttgggacggcgtataaggcagtgcttgacgcggtgacggttgtggcggtgaagaggttgaaggatgtgatgatggctgataaagagtttaaggagaagattgagttggttggtgcgatggatcatgagaacttggtgccattgagagcttactatttcagcagagatgagaaacttcttgtctatgacttcatgcctatgggaagcttatcagctctcttacatggaaacagaggagcgggaaggagtccactaaactgggatgttagatcaagaattgcaattggtgcagctcgtggtctaaactaccttcactcacaaggcacttcaacatctcacggcaacatcaaatcctcaaacatcctcttaacgaaatcccacgacgctaaagtctcagactttggcttagcccagctcgtgggatcatcagcaacaaatccaaaccgcgctacgggttaccgtgctccagaagtaaccgatccgaaacgcgtgtcgcagaagggtgacgtgtacagtttcggagtggtgttgcttgagctgatcacgggtaaagctccttcgaactcggtgatgaacgaggaaggagttgatttgccgagatgggttaaatcggtggcgagagatgagtggaggagagaagttttcgactcggagttgcttagtttggcgacggatgaagaagagatgatggcggagatggtgcagctagggcttgagtgtacgtcacagcatccggaccagaggccggagatgtcggaagtggttaggaagatggagaatttgcgaccttattctggttcagaccaagtgaacgaagctgattaagtcaaagattcttaattgttaatttatttaatttgaatgaaatggttggggagaaatcaggtttataattttaatttttaatttttgacccaacttgtcaaaaagcacaaggggttttattattagtgggtgactctgctggcatttgcagttgtttgtgttgggcgtgaagggatttggtggtgatttgtaattattgttgttgcttccctttcttaaatctattttctaaattgttacgtatctttttgtcaaaaaaaaaaaaaaaaaaaagggcggccgctctagaggatccaagcttacgtacgcgtgcatgcgacgtcataaattttctagtagtggcacctaa

SEQ ID NO: 90321 - DNA, 589 bp, Arabidopsis thaliana columbia
  unsure (1)..(589): unsure at all n locations
nnnnnnnnnnnnnnnnnnnnnnnnnnnnnnnnnnnnnnnnnnnnnnnnnnnnnnnnnnnnnggtccggaatcccgggtcgacccacgcgtccgcggacgcgtggggtcctattcagtttctaactagtggtgctggatccaaggcttggagaggagatattaacccagtgaccatcaatcccgagctactgaaattctattatgatggtcaaggattcatgtctgctcggttcactcactcggacgcagagatcgtcttactacgatgtctttggtgagattttgcacaaatgggtcacttctaaacaacttcttcattcctctgtttgaagataaaaagccttaataaatttggcttcctttgtaattttgtaacatacatttaagattcttaagtcctattgcaggctaggtaggcttcctgcttagtttagcatccctatcatttttagcaatagcttattccatcacaataacatatataatgtacgatcttttcctcaaaaaaaaaaccaaaaagnnnnnnnnnnnnnnnnnnnnnnnnnnnnnnnnnnnnnnnnnnnnnnnnnnnnnnnnnnnnnnnnnnnnn

SEQ ID NO: 90322 - DNA, 902 bp, Arabidopsis thaliana columbia
cgaagagcttttccgattcttaaaagaacggtgttgatttctacatgaagtgacatgatcattgtcttcacaatatgagtgatgaagacagtcctatcaggtttctacctagtggtgctggatccaaggcttggagaggagatattaacccagtgaccatcaatcccaagctactggaattctattatgatggtcaaggattcatgtctgctcggttcactcactcggacgcagagatcgtctttctacgaatgtctttggtgagattttgcacaaatgggtcacttctaaacaacttcttcattcctctgtttgaagataaaaagccttaataaatttggcttcctttgtaattttgtaacatacatttaagattcttaagtcctattgcaggctaggtaggcttcctgcttagtttagcatccctatcatttttagcaatagcttattccatcccaataacatatataatgtacgatcttttcctcaaatttttgatacaagtgtaatgatacccttaatgggtatcttcttaatgctacataagttagtcaactgcattacagaccatgtttttagttcaatacaaagtgggacctcgcatctacatggctctcaacatcccaaaggaacgacccgaaagtaactgcctccaagacgagcctcttcattccaccgaagctgatctttatctgttcgtccttcgatgaatcgactgtgccctccggtgttattacaatctcaggcttaccaaacaatgcctctgtgtgcttctcgatgattccaactgcttctcttgatcttatagtggcgtatctctgcagcgtctccgcatcaaatgacatcacatatgaccttaatcgggatggtttaatctcgctgccgaagcccttagcactaac

SEQ ID NO: 90323 - DNA, 536 bp, Arabidopsis thaliana columbia
  unsure (1)..(536): unsure at all n locations
agctctcctacgactcactattnggaaagctggcacgcctgcaggtaccggtccggaattccggtcacccagcgtgcgatcaatggcttcacttcttattttcccccaccttcaccattttgattcttcactggaccgtagagaggtactagtagttcgccattcacaagcatcaaggcgatttctcactccgaaagcttcaattaatggcagcggaatcacaaacggagctgcagcggaaaccacctctaaacctagtcgcaaagggaggaagaagaagcaaacatcgacggtaattgagaaagataacaccgagactgatcctgaattgaatccggagttagctgattacgacgacgggatcgagtttccgtacgacgatccgcctcttgtgtgttgcttcggagctgtacagaaggagtttgttccggtggtgcgagtccatgataatccgatgcatcctgatatgtactcgcagtggaagatgctacagtgggatccaccggagtttggagagctccgggaggtccgccgtc

SEQ ID NO: 90324 - DNA, 675 bp, Arabidopsis thaliana columbia
  unsure (1)..(675): unsure at all n locations
ctattgcggnncngggnttncccaaatcttncncaagccnnaagggggtaanctgggnccacccnngtctggggccaggttcttgccctgctaggagattncctgccatggatccngggngtttccaggataattcttgatggngtncaccggccaaattnctaataacttncctagcgatgattacaaattgttcccagcaacatgaacggagatggtcgacaaattcaacaccgcatatgacagaaacactcgaagaggtggaagaactgcattcatgtaaaagatcctttccagcgattctagttctaaagatcttctcttggttcctgaaaccatttttaacattgcctctgtgagaatctataactcagacggcaagactttatcctcttcattgtttctatatctataagaacatctgcttatctatcaaagctcttgtttgatcttgaacaagtttctattgttagtaaaaagattttaaggtttgattctatcagtctctctagttacatccacatcagtctccagttagcaattgcagttttgccacacaacactcgcttttttcttctttgttgatttcaatataagatatagaacccgacaacaagaagactccacccaggcatgancaataaaacagccttaaccttccccaaagtttgaaac

SEQ ID NO: 90325 - DNA, 953 bp, Arabidopsis thaliana columbia
  unsure (1)..(953): unsure at all n locations
nnnnnnnnnnnnnnnnnnnnnnnnnnnnnnnnnnnnnnnnnnnnnnnnnnnnnnnnnnnnnnnnnnnnnnnnnnnnnnnnnnccacgcgtccgtgtttatgtgcttttaaaccctgctatcaatcacacacagaaggatcttccagtgactatttatgaaagtgaattgcatgtcattgatggaatcccgcagctaattttcgctcatacaagctacacaatcgagacagttgaagctgaacggatatcagttgatcatgttgcacatcttaaaccatctgacggaggctcagcagcaacccagttggctgctcatcttactggtatacatagtgccatcaagatgcttaatagcagaatcagagtgctttaccaaaatcttgctgcaatgcagaaaggtgataaatcttgtgacaactcagttctgagacaagtatctagcctgctaagaagattgcctgccatggaatcagagagatttcaagataatttcttgatggagtacaacgacaaattactaataacttacctagcgatgattacaaattgttccagcaacatgaacgagatggtcgacaaattcaacaccgcatatgacagaaacactcgaagaggtggaagaactgcattcatgtaaaagatcctttccagcgattctagttctaaagatcttctcttggttcctgaaaccatttttaacattgcctctgtgagaatctataactcagacggcaagactttatcctcttcattgtttctatatctataagaacatctgcttatctatcaaagctcttgtttgatcttgaacaagtttctattgttagtaaaaagattttaaggtttgattctaaaaaaaaaaaaaacccaaaccaannaagnnnnnnnnnnnnnnnnnnnnnnnnnnnnnnnnnnnnnnnnnnnnnnnnnnnnnnnnnnnnnnnnnnnnnnnn

SEQ ID NO: 90326 - DNA, 558 bp, Arabidopsis thaliana columbia
tgattacttccagctctcctacgactcactatttggaaagctggcacgcctgcaggtaccggtccggaattcccgggtctacccacgcgtgcgcactttgatcccaagcaccttgtgggcacaagtcaacactctcttcgtcaaacaagggaccacgctggaccgaaaaattggatccaacttccagatccccgcggcttcattgggaagctttgttacgctctccatgcttctctctgtgcccatgtacgaccaatcctttgttcccttcatgcgcaagaaaaccggaaaccctagagggattactttactccaaagactaggggtagggtttgcgatacaaattgttgcaatcgcgattgcttcggctgtggaggtcaagaggatgcgcgtgataaaggaatttcacataactagtccgacacaagttgtgcctatgagcattttctggttgctccctcagtactctcttctaggcattggggatgtgtttaacgcaattggtttgcttgagtttttctatgatcagtcacctgaggagatgcagagccttggaac

SEQ ID NO: 90327 - DNA, 511 bp, Arabidopsis thaliana columbia
  unsure (1)..(511): unsure at all n locations
nnnnnnnnnnnnnnnnnnnnnnnnnnnnnnnnnnnnnnnnnnnnnnnnnnnnnnnnnnnnnnnnnnccacgcgtccggagtgatagtaaagttgagaaaaaattggaagaatctgaaactcaagaggagatagtgaagaaccataagtgtaactcgggttctaaagataacagtctcatttctgagcaaaagcaggaggagaacgataaagagtgtcctgcaagcatggcaaagacttttgtggttcaagagatgtatgatgcaaaaatggttaatgttgtcgaaggattgaagctatacgacaaaatgcttgacgcaaacgaagtttctcaactcgtttctcttgtaaccaatctgagacttgctggaagaagaggtcaacttcaaagtgaggcatatgtgggttataaacggccaaatagaggacatggacgtgagatgatccaactcggtcttcctatagctgatacgccgcctgatgatgatagtatcaaagatcgaagaatagagc

SEQ ID NO: 90328 - DNA, 504 bp, Arabidopsis thaliana columbia
  unsure (1)..(504): unsure at all n locations
nnnnnnnnnnnnnnnnnnnnnnnnnnnnnnnnnnnnnnnnnnnnnnnnnnnnnnnnnnnnnnnnnnnccacgcgtccggagaagaagaaagtggggaatgtgagaaaggttagtgttgaaggaagtaatagttatggtaatgggagagtttctcaaagagtaaagaaacctgaggggtttggtaggcgaaaggagattaaggaagatgtgaagttaaatgaaagatatgattgtgaacattgtgggaggagaaagaaaagttctgagttggagagtgaatctcggcgtggttctaaattggttactggtgagtatattggaaaaagttataggggggatgaagaaagagaagttcggccaagaaggagaaagagttcgagttgttcatcgtattattcccttgcttcttcaggggagtttgagagtgatactgaagatcaggacgaggatgtagagatttatcgcgaaaacgtgagaagttcagagaagaaggttgttgatcag

SEQ ID NO: 90329 - DNA, 552 bp, Arabidopsis thaliana columbia
acgactcactatttggaaagctggtccgcctgcaggtaccggtccggaattcccgggtcgacccacgcgtgcgtatcttcttccccttgactttggaagctgctattcctctgtaaaacaatagcatgaagaagaagctccagacacgttttccagcgacaaggattaagaagattatgcaaactgatgaggaagttggcaaaatagcaatggcagtccctcttcttgtttctaaagctttggagctgtttttacaagacttgtgtaatcacacgtatgatgtaactctaagccgaggtgctaaaactgtcaacgcctttcatttgaagcagtgtgtgcaagcgactaatgtctttgattttctaagagacactgtcgctaaagttcctgatttgggtggctcagacactgaagaccaatcagctaccaaaagaaggaaagttgttgatggaagtagttgcaacgatgaagatatgataaagaccactcaaatgcatgaggtcaaacatactagctgtggcagaggaaggcgaggtagaggccgcggacgaa

SEQ ID NO: 90330 - DNA, 745 bp, Arabidopsis thaliana columbia
caatcgagtcgccattaacatatttcatcaagctcagtccactcttctcatgaaacttcatcatcatcgaccttgaccctgataggtttcagacgacacccattattgtaaatctgctgctggagtcttttttgtctgaatcttcttcttgttgagacactgtttcttcttggtctgtgatttttgttttgttctcattaggacgttctttattccggttcagatttactggatcgtcattttctctttgaaattgtatttttttgttccttttctggtatgttgtgaaagctatgagattgctgtaagaatccaagactgaccaacatgtttcccctgtgctcggccacaagctgccgttaccattctcagattttatttcctggcaattggcgaggctgttcttccttcaggagagagttgattcacagatacagttcaggtgacaatgccttctttggtatctctaatggaacacgcctgcagaagagtttcgtacctcaagccactgggagtttcttgaccggtactatcgaaaaaacagaacaaccagtatcaacattcggaagtttgtgccagaatgagttggacagaataaactacatggtttataacatgagtgaagcttttgtagcgagtgatgagggactgacatatgtagaaaatggagaagatgtgttccctgttgaagcttgtgcagcagatgtttctcctgttgaagctgttgtaccagatgttttcccca

SEQ ID NO: 90331 - DNA, 540 bp, Arabidopsis thaliana columbia
acgactcacttttggaaagctggtccgcctgcaggtaccggtccggaattcccgggtcgacccacgcgtccgctcttcgttactaatgtcatcgtattcttcagattccacggcggcgcgtgatcaacatgcgcctctactccgtccacgacacgacggctctttttcttcttcttcttcatcagccagacctacagctctcgccgttctattaggacggatcaccggccaccgagcaccgtcgatgctggttagagaaacagcggcgcgtgctctcgaggagagacgaatcgattggggttactcgaagcctgtagttgctgctgatatactatggaacgctgctttagttcttgcgtcagcggttatgcttgtcggtaccgttgaagaaagacctaatgaaccgattacggtttggatctgtgtgtatgggttacagtgtttgttccatgtggttttggtttggtctgagtattggagaagaactcaactcgtagagctagggatttggagtcttatgatcatgaagattacaccatt

SEQ ID NO: 90332 - DNA, 675 bp, Arabidopsis thaliana columbia
  unsure (1)..(675): unsure at all n locations
ggaagatcagacagagctcaagagaagtaaagaaactgcgacaagagaaagaagattgactttggagaagagagagagtaacgatggaagatattcataatctcgatatagagaaaagtgatagatcgatttggttgatgaagtgtcctgtagttgtagacaaggcatggcacaagatagcagcttcgtcgtcttcttcttttgcttcctcggattctcctcccgacatggcaaagattgttcgcgaagttgatcctctacgggacgattctccccccgagttcaaaatgtatatggttggtgctgagtatgggaacatgccaaagtgctacgctttgaacatgttcacagactttgttccgatggggggcttttccgatgttaatcaaggttgtgcagctgctgaaggaaaggttgatcacaaattcgatatgaagccatatggtgaaaccattgaagaatatgctaggctttgtcgtgagagaacgaacaaanccatggttaaaaatcnacagattccgggttattgataatgancgcngaatttcatatgaaggccatgccntgggaaatgcttggttttagtttccctcccaattcccaacgggaaaaagaaggaaacctccccccantccaatccnaacccgaaggtgaaaaaaggancaaagaaaaaat

SEQ ID NO: 90333 - DNA, 660 bp, Arabidopsis thaliana columbia
  unsure (1)..(660): unsure at all n locations
cnnnnnnnnnnnnnnnnnnnnnnnnnnnnnnnnnnnnnnnnnnnnnnnnnnnnnnnnnnnnnnnnnnnnnnnccacgcgtgcgcggacgcgtgggcggacgcgtggggtccacgatgaagatgaaagcggatgaggctatttggggatcactgcttaatgcttgtaagatacatggccatctggatttggctgaagttgctgtaaaaaacctggttgctttaaatcctaataatggaggttatgtcgctatgatggcaaatttatatggagagatgggtaattgggaagaggcacgtagagctagaaagatgatcaagcaccaaaatgcttataaaccaccaggctggagtcggattgagatcgataacgaggtccatcagttctactctcttgacaaatcacatccggagactgaggagatatacatgatacttgacagtctgatctctttctgacactctttggaaggtcctagtttctctatatgacttgacacagctgcactctgctttataacagcgagcttcgtgcgaaatttttggtttgcaatatgtatggcttcanaggaaagcaggcatttcnttcattgnnctncacaggttacanactttgtttctngttccncaaatnctgggacgggaatttttttggnccntnag

SEQ ID NO: 90334 - DNA, 672 bp, Arabidopsis thaliana columbia
  unsure (1)..(672): unsure at all n locations
tggcagcggaccttcngccttgggagccnagtccctaangcttgcccagntgcactctgcttnatacngcgngctcgtgcgaaattggtgggttgcaatatgtatggcttcagagaaaagcnggcatttcttcatggatctacacaggttacatactttgtttctgatacacaaatgctggtacngtaattttgttgtactgtaagaagaggaactagtacgtgataagccagcaaacaacatgttgcttgattagaaagtaagtcttgccattcctttctaacatgctatcacgtggtttctttctgtgattccngcaaaaaacttttagtttacaggtccatggacaatcaaacattcgagaagaggaagtctcttacgccaagcattagtnctatttaattatgatcttttagttttctaacactttcctcatgtatctttattgagaatgatcaataaacaaggcacgcaatatagagactttgttacagaatatattcgcgtgtagaacgagattacatagattctacagacattaaacacgggtcttgattcaaccatagttcttttgtgactaagcagaactgactttgccagtttgatcctcttcgaacgcaatatcaacaacccttggacctttgactttgtcttgggaaagcttactgatgg

SEQ ID NO: 90335 - DNA, 798 bp, Arabidopsis thaliana columbia
  unsure (1)..(798): unsure at all n locations
tgggggtaattttggggaaataagggccacggtagaaagcttagaaaaaggattgattcccaagccccccaaaaattgctttataaaacccaacagggctgggagtcgggatttgagatccgataaccgaggttccatcagtttgtactctttttggcaattcccatccggagactgaggagatatacatgatacttgacagtctgatctctttctgacacttttggaaggtcctagtttctttatatgacttgacacagctgcactctgctttataacagcgagctttgtgagaaattgttggtttgcaatatgtatggcttcagagaaaagcaggcattttcttcattgatccacacaggtcacatactttgtttctgatacacaaatgctggtccggtaattttgttgttctgtaagaagagccactagtacgtgataagccagcccacaacatgttgcttgattagaaagtaagtcttgccattcctttgtaacatgctatcacgtggtttctttctgtgattccagcaaaaaacttttagtttacaggtccatggacaatcaaacattcgagaagaggaagtctcttacgccaagcattagtactatttaattatgatcttttagttttctaacactttcctcatgtatctttattgagaatgatcaataaacaaggcacgcaatatagagactttgttacagaaaaaaaaaaaaaaaaaaaaggccgagggcggccgctttagaggatcccagcttgcgtgcgcgtgcattcaagctgtgttattgnnnnnn

SEQ ID NO: 90336 - DNA, 563 bp, Arabidopsis thaliana columbia
ctctcgctgagctctatggctcccctgaagtcttgcccttagtagccgatgtttccaaactccaagactgcgagcgttttatccgagccacggttcttcattttggacgattggatcatctagtgacaaatgcaggagttgctccactctatttttttgcagacatcgaagatgtctctaaggcttcgccggctatggacatcaacttttggggatctgtgtattgcacattttttgcttctccatacctaaagaagtttagaggaaggattgtggtgattgcttctggatgtggatacattgcttcacctagactaagcttttactgtgcgagtaaagctgctgtgatcgccttttatgaaacactaagaactgagtttggatcagatattggggttaccattgtagcaccggggatcgtcgattcggaaatgagccgaggcaagttcatgacaaaggacggtaaacttgtcgtcgataaagagctcagagatgtgcaaatgagcgtattgccagtagaatcagccgagaggtgtgcgaaagcaataatgcggagcgtatgt

SEQ ID NO: 90337 - DNA, 623 bp, Arabidopsis thaliana columbia
  unsure (1)..(623): unsure at all n locations
acggacgcgtgggcgacgacaactttctcttgtctcttctcacttctctttcctctctcctctcttctcaaatctctctctctttcgtatttcttggagacatctttctctggaactgttcttcatcgaattctatcttttgagagaaactaaattaagttgataatcgaagaacttcctcgaaattaggacttcttctgctttttgttgtttcctagagattttcctagaacgtggtccaagaaaatcacacaaaaaggttcattccttttttcttaccagaaaccacaaatcaaaatcatctcccctgtctttgtttgaaatctctcaaatttaagaaggatcatccattcactaacctgagattttggataggtttcatctatttcaggtgggaattccagtgcatcgaccatgatcaacacctaaacttgcaaattgaccgttttgcccttgggnatcactataaatgtcgggnagnccagacctctangtggcagcgtggtcgcancgtggttccaggttnttcctcttaatntnccggccgattnttnatcgnccgtttggaanaagctttgttnggttaaaaaccgctngngggttttanaanattttnaatttgg

SEQ ID NO: 90338 - DNA, 416 bp, Arabidopsis thaliana columbia
  unsure (1)..(416): unsure at all n locations
caggagtgaggccatgcctgtgtccgtacattccgttatcgccacgaacctagccactacactatcatcgaattaccggaatgtttctcgccgtagaactatctccacctctgtgaattgttcggtggagattacggaggctgatcggtcggtgaaactgaagaacgggaacgattcactggagatatgcagagttctcaacgggatgtggcaaacgagcggaggatgggggaagattgatcgaaacgacgccgttgattcaatgcttcgttacgccgatgctggtctctctactttcgatatggctgatcactatggtcctgctgaagatctttacggtatttttatcaatagagttcgtcgagagcgttcaccccggtactttgggaagtttaaaggtttcnaaaaggggnccc

SEQ ID NO: 90339 - DNA, 1105 bp, Arabidopsis thaliana columbia
  unsure (1)..(1105): unsure at all n locations
nnnnnnnnnnnnnnnnnnnnnnnnnnnnnnnnnnnnnnnnnnnnnnnnnnnnnnnnnnnnnnnnnnnccacgcgtccggtttgaatcttggagggatgggttgcagtgccggagttatagctgttgatgtcgctaagggattactacaagttcataggaacacttatgctattgtagtaagcacagagaacatcactcagaacttatacttggggaaaaacaaatcaatgctagtcacaaactgtttgttccgcgttggtggtgctgcggttctgctttcaaacagatctagagaccgtaaccgcgccaaatacgagcttgttcacaccgtacggatccataccggatcagatgataggtcgttcgaatgtgcgacacaagaagaggatgaagatggtataattggagttaccttgacaaagaatctacctatggtggctgcaaggactcttaagataaatatcgcaactttgggtcctcttgtacttccattaaaagagaagctagccttctttattacttgtgtcaagaagaagtatttcaagccagagttaaggaattatacaccagatttcaagcttgcctttgagcatttctgtatccacgctggtggaagagctctaatagatgagctggagaagaaccttaagctttctccgttacacgtagaggcgtcaagaatgacactacacaggtttggtaacacttcttctagctcaatctggtacgagttagcttatacagaagctaaaggaaggatgaaggaaggagataggatttggcagattgctttggggtcaggttttaagtgtaacagttcagtatgggtggctctgcgagacgttaagccttcagctaacagtccatgggaagactgtatggatagatatccggttgagattgatatttaattttatggttaaagagtccaatctatcttatcttatttattttcgttgacattttatcctatgtttgttttaaagagtttgcattgaataccatttgtggtctatttggtaaaaaaaaaaaaaaaagggcggccgctctagaggatccaagcttacgtacgcgtgcatgcggcgtcatagtcaatctataggtc

SEQ ID NO: 90340 - DNA, 446 bp, Arabidopsis thaliana columbia
gagagtaaagaagataaaaaacacaatttgaagcttttataatattttctcagaaactttcaaggagcttagaaaaatgagtacagctactttcgttgatattattatcgccatcttcttgtctctctctcatttcttgttattatccacgaacgaagaaaaacctagaaaacagttgaagaaagaaaatcacaagagaagccatggccggaattggaccgattactcaggattggggaccagttgtgatccgcaagagagctcctaacgctgcagctaagcgcgacgagaagactgtcaacgccgctcgtcgaagcggcgccgatattgagaccgttcgaaaattcaatgctggatcgaacaaggctgcatcaagcggcacctccctgaacacaaagaagctagatgatgatactgagaacttatctcatgatcgtgtgcccact

SEQ ID NO: 90341 - DNA, 928 bp, Arabidopsis thaliana columbia
tcactatagggatagctggtacgcctgcaggtaccggtccggaattcccgggtcgacccacgcgtccgctcatttcttgttattatccacgaacgaagaaaaacctagaaaacagttgaagaaagaaaatcacaagagaagccatggccggaattggaccgattactcaggattgggaaccagttgtgatccgcaagagagctcctaacgctgcagctaagcgcgacgagaagactgtcaacgccgctcgtcgaagcggcgccgatattgagaccgttcgaaaattcaatgctggatcgaacaaggctgcatcaagcggcacctccttgaacacaaagaagctagatgatgatactgagaacttatctcatgatcgtgtgcccactgaattgaagaaagccatcatgcaagctagaggggagaagaagctgactcagtcccaacttgcccatctgatcaatgagaagccacaagtgatccaagaatacgagtctgggaaagcaattccgaatcaacagatcctttcaaagctggagagggcacttggtgctaaactccgtggaaagaagtagaagtgtagaacaaagctcttaaaggtaacaacaaaagctgatcgcagtttctctccagtccacatgctttaccatatcctaaaaactatatctatgtatggtttggtttaatggcgtagtagtttgttgcgaggaatctttcatgatgtaagaaaaacaaagctgtttggaaccttttgtcattataaataatctcttctctttctttttcgtcatgtctcgtaaactttatctgccacggatgtatgttcttaaagaaattgaagattgaaattgatcaattgccaataatgatctcttttgtctctgtatatgtattgattcaaacaaaaatcatagtagaaaactgtcaagag

SEQ ID NO: 90342 - DNA, 566 bp, Arabidopsis thaliana columbia
  unsure (1)..(566): unsure at all n locations
gcgggtcgacccacgcgtacggaaaacgacagaaggggagagtaaagaagataaaaaacacaatttgaagcttttataatattttctcagaaactttcaaagagcttagaaaaatgagtacagctactttcgttgatattattatcgccatcctcttgcctccactcggtgtctttctcagatttggttgcggggttgagttttggatatgtttggttttgacgctacttgggtatattcctgggatcatatacgccatttatgtcctcaccaaatgatttaccatctatcatcatctccttgaacagctgttccgtcgtgttctcctatctttgtgactgattcagcgtttctttttctttcatcagagtttttatgtttcaagtaatttaattaatcatcactgttgtgtttgcattgttatataaatgttgtgttgatataaaagaagagagcgttggtttgtactttgtgtgaagattttttaaaaatatagttggtttattacaataaattggaaattgtgttgccttggtggatcacaggaccaccattaaccattatnn

SEQ ID NO: 90343 - DNA, 657 bp, Arabidopsis thaliana columbia
  unsure (1)..(657): unsure at all n locations
catacgactcactataaggaaagctggtacgcctgcaggtaccggtccggaattcccgggtctacccacgcgtgcgtgcacgcgtntcgtccacgcgttcagccacgcgtccagccacgcgtacgtacggctgatactgagtcgtgatgacgacagaaggggagagtaaagaagataaaaaacacaatttgaagcttttataatattttctcagaaactttcaaagagcttagaaaaatgagtacagctactttcgttgatattattatcgccatcctcttgcctccactcggtgtctttctcagatttggttgcggggttgagttttggatatgtttggttttgacgctacttgggtatattcctgggatcatatacgccatttatgtcctcaccaaatgatttaccatctatcatcatctccttgaacagctgttccgtcgtgttctcctatctttgtgactgattcagcgtttctttttctttcatcagagtttttatgtttcaagtaatttaattaatcatcactgttgtgtttgcattgttatataaatgttgtgttgatataaaagaagagagcgttggtttaaaaaaaaatacccatttgagtaaaaggccggcgttttaaagaatcaacttacgtaccttgctgcaact

SEQ ID NO: 90344 - DNA, 547 bp, Arabidopsis thaliana columbia
aggtgcactctagaagagcttgacgtcgcatgcacgcgtacgtaagctcggaattcggctcgagccttacaacaacggcaacagaaaaaaaaaacagagagttaaaaaaaaaaagaaccagacataatgttgtgtttcagatctcaaagagtgtttatacttgtgtctctgtgtttactctcttcgtttcttgtggtcgtcactggaacaacatcgattactggggttggtaacgaagaagaaagaggtgtagaagaagaatggagaacaagtgtaatagaaagagtaattgcagaggaaagtggagagaactcatctctgattttagctgcaaagagaacaagaagaaaagatcctgctgataatttcaaactctacactggtggatggaatataagcaattcccattatttgacttctgttggttatacagcggcgccttttccttataataagcaattagctctggtttggagttctttgggccttccattggcccctgatccgccctttattatttggtctggggcccgccaatcttttaggt

SEQ ID NO: 90345 - DNA, 853 bp, Arabidopsis thaliana columbia
  unsure (1)..(853): unsure at all n locations
nnnnnnnnnnnnnnnnnnnnnnnnnnnnnnnnnnnnnnnnnnnnnnnnnnnnnnnnnnnnnnnnnnnnnnnnnnnnnnccacgcgtccgtgggtttgcaagagaaagataggctaccaagtgatgtttgcaaacctgtcagatcaaatgtgccgatgaatgcagatagttctgattcttcaaggaggcttgttccagtttcccgtgagctggagaagcctgtttgcaaagatactcacatggggagacatggtgtaaaatctgcattagatggtgaaagtcttcgtttatcaaagcaagaaaaaccaaagcgtatgaatgaaataagcgcacccaaagaagagaatgcggaacaatctttgggcgttgtatctgcgtctaattgcggaaagtcaaagatcaaaggcgtctcactgattgagctgttcactccagagcaagtagaggagcatatccgcggtcttcgtcagtgggtaggccagagtaaaaccaaggcagaaaaaaataaagcaatgggactctccatgtctgagaactcttgccagttatgtgctgttgagaggcttgcatttgagccaacacctatttactgcacaccttgtggggcacgtgtcaagagaaacgctatgcactatacggtagtggctggggagtcacggcattatgtctgcattccttgttacaacgaagcgcgtgcaacactggtttctgttgatggaactcctgtaccgaagtcaagggttgagaaaaagaaaatgatgaagaggttgaagaatcgggggtgcatggtgataaatgtcaagcatgggcagatcaaatttgtgctttggtcaccgggccgaggaatcatgggc

SEQ ID NO: 90346 - DNA, 389 bp, Arabidopsis thaliana columbia
cccacgcgtccgatcagaatccttacaagaccatttgtgtctgtctccaccaaacccttcttttctccatttttcttttttgctttgtttctgtgctacgatttgtcaaaaaaaagaaacccaaatcaaaagcttcgaaatttcataagatttctttgtttttctgaagatccaaggcacacaaaaaaacagctttttttgtttcttcaatcaaggattttccagggttttgataaccccatgggttcagggttctctctgtttcaaaagaatttatcgtcttgttatggagatcgagatctgttgcagcctggtttaggagatttgcctgaaagttgtgtggctttgattctccagaatttggatcccgttgagatctgtagattctc

SEQ ID NO: 90347 - DNA, 683 bp, Arabidopsis thaliana columbia
  unsure (1)..(683): unsure at all n locations
nnnnnnnnnnnnnnnnnnnnnnnnnnnnnnnnnnnnnnnnnnnnnnnnnnnnnnnnnnnnnnnnnnnnnnnnnnnnnccacgcgtccgtcggatagccttagctgtgtagctctaagaaatcggctcgggatctctcatggaagatgcattaattgtttgtgggagcttgatctgatccgtctagatgctggggattgtgacatacttgagatcattttaaactattgtcgacctaatgtgaacgtacatagaggatccattatcatagccgcaccaccgttcaaggatcatcgagtttatgctttcataaaacgtgcccagagctgagtttagcgatcaggttcctagatgataaccgcgtgaccaattcatcaaactcggttcacatctcatgtcatgtcctacgccacatatgtaagagaatcgatgcatctatgtaatggacttgagcaataaagatactctaactgtggcatatcatggttaagaaccagaattacttggtagctagtgaaagtccttttattaattcatagcttagaaacttgtgagttctatgcgatcaacggagacattcgagtatgtctctagtgatattcaatagttgaagtgggtgctaaagaactaacggatctatgagaatgtactgactctgggtatgttcctcagcaaataatagata

SEQ ID NO: 90348 - DNA, 463 bp, Arabidopsis thaliana columbia
  unsure (1)..(463): unsure at all n locations
cttatcaaatgatttttttcctatgatatgcaataccactgggttagatatcgcaccttaataatgaagaatatatgtatcaaaaacggtatatataaataaatcttccccaactattcattcaaaccctagattgctcgctaaacaactttctgttgtaaccagttttgggattatacaaataagaaactaagagaaccacaaaagagatcaaatatgaattgattagaagccccaaacaaagagtagaaaggtttgaatatgcgatgatggggatgtgaccaaataacacattttctccgggtagggggatccaatgtctgtataggtacagacatgttggatgatgatgtgggcattggtgtggggttccncattccaaatacccnggatcgncttatacacanccttttccttggtttccccagntttccatgggcccatngntccaaaanngggcctg

SEQ ID NO: 90349 - DNA, 1037 bp, Arabidopsis thaliana columbia
  unsure (1)..(1037): unsure at all n locations
aantaanttnaggggcccaaanggaaggccaanaccgncnaangaanccggncctaaacctgggncccccnanncgggcccnccctttttttttattntttntttttaaccaaaaaccggtatatataaataaatcctccccaactattcattcaaaccctagattgctcgctaaaccaacctttctgttgtaaccagttttgggattatacaaataagaaactaagagaaccacaaaagagatcaaatatgaattgattagaagccccaaacaaagagtagaaaggtttgaatatgcgatgatgggatgtgaccaaataacacattttctccggttaggggattcaatgtctgtatagtacagacatgttgaatgatgatgatggcatttgttgttggattccacattccaaatactctgattcgcattatacacatacctttttctttgttttctcaagttttttcattggtctccattgattccaaatatgcggaccttgtgcatgtgcgggaatttcgcgaccaccatgacaaatacagccagtgtgttgagaaagagcatcgggtgctgatagcctgttgtgtgagaggctatcaagtacaagacaacaggaacaaccggtcagaaattgccgattaccgtgtaagctgctttgccattatcaatctgttcccaccaagtcaatctattatagactccttgatcatctccaaatggtgttcccttcttccaatggaaggaatgatacgtgacggtgaaatgagcgagatgaacaatggtccaagcgatgccaggagaacaatggaagacgcagagaacgaggagccaagagaagaagaggatgagaatataagtagtccatacaccaggatacgtgaaccactctgtgttccgattcacatccgtcgtcggaagtgctcttacgtacatcgtctttgtcaccggacagatttggaagaagatcggagatgatgattgatgaatcgtcgttgagcaagttttctttcggacgcgtggtcgcccgggattcgga

SEQ ID NO: 90350 - DNA, 619 bp, Arabidopsis thaliana columbia
  unsure (1)..(619): unsure at all n locations
gacacatctggaggcaaagtcaaagggcaaggcactggaactgaattcgttgtcactctcattgctgttgatgatgagatctctgtaaatgctgcaatgcttcaggaaggaatagcgagaatggagaaacgtcagaaatgggggcacaaaggcaaccaagctgctcttgatgctttagagaagttccaagaggaagctcgcaagtcgagaattggaatctggcagtacggtgacattgagtccgatgatgaggacactggtccggccagaaagcctgctggtggtcgccggtaaaattataaaaaccgataagtcgtgatatggttcaaagggcccatgaggtagggagagaagcttcggtgtgtttctctaaagagtttaaagacatgtcgaactttttgtaaggttttagatttgtttcttctctccttcttttaatttatcatacggtttaggctttttaaaggaattttccatgtaggacttgaaataaggggaagtttgaaccatgcttacagttaaaaaaaaaaaaaaaaaagnnnnnnnnnnnnnnnnnnnnnnnnnnnnnnnnnnnnnnnnnnnnnnnnnnnnnnnnnnnnnnnnnnnnnnnnnnnnnntt

SEQ ID NO: 90351 - DNA, 708 bp, Arabidopsis thaliana columbia
  unsure (1)..(708): unsure at all n locations
agctctccacgactcactatttggaaagctggtccgcctgcaggtaccggtccggaattcccgggtcgtcccacgcgtgcgcaaactggaaagagtaaaggaaggaaaaaacggaattttgacgatggatgcagagatattccaagtgacgccgacgtttcacctggtggaagtgaagaaatgtaatggagatacaatggagtatcagaagttagtggaggaggatcttaggcctgctttggcagatattgtttgggtttggcaaggcgagaaggagaaagaggagcagttactgcaggatgaacaaggagagcaagaaccatcatagcaagttcagctacaagcctacaactgcaagcacatgaattgttgcaggaacatgaaaatggtaaccctcttgcgacttcagctgaaacagaagcaagcatcaagaaactctaacgaaaacagaggaaggaaaacaataacaattgcacaaaatggattctttttgcatatagactacaaaaattgtagatagttgattgatttgtaacaactacgagctttttttttaccttgcctcttgtgaagttttgaacgtatattgtttcatgagtacagtaattgaatttctttaagaaaaaaacaaaaaaaggannnnnnnnnnnnnnnnnnnnnnnnnnnnnnnnnnnnnnnnnnnnnnnnnnnnnnnnnnnnnnnnnnnnn

SEQ ID NO: 90352 - DNA, 549 bp, Arabidopsis thaliana columbia
aggtctctacgactcactattgggaaagctggtcacgcctgcaggtaccggtccggaattcccgggtcgacccacgcgtccgcggacgcgtgggcggacgcgtgggctcgaggtggtatcgaaagggtggtgaacgatcggaaatggaaagaagtgattggtgcattcagttttccgacaacgataacaagtgcatcgtttgtcttgaggaagtattatctcaagtttctttttcagctggaacatgtgtattaccttgaaaaaccggtgtcttcactccaatcaacagatgaagcattgaagagccttgccaatgaatctccaaaccctgaggaaggtattgatgaaccacaagttgggtatgaggttcaaggattcattgatgggaagtttgatagcggctatctggtgacgatgaaattgggttctcaagagctgaaaggtgtcctttaccacattcctcaaacgccaagtcagtctcaacaaaccatggaaacaccttcagccattgtacaatcatcacaacgccggcataggaagaaacaaaga

SEQ ID NO: 90353 - DNA, 725 bp, Arabidopsis thaliana columbia
  unsure (1)..(725): unsure at all n locations
atgcttnnnnnnnnnnnnnnnnnnnnnnnnnnnnnnnnnnnnnnnnnnnnnnnnnnnnnnnnnnnnnnnnnnnnnnnnnnnnccacgcgtccgggagagtgaaggaacatcatgggaagcagcacgggcgatcttgtgacacgtatccaatcagctcaccgtttcgatcacgatgccttgtttcgttttgccgccgacaacgtctctggctttccgaccaacccttcccaattcaaagtctcacagttcggacatgggcagtcgaatccaacgtttctgatagaggttggctcagggagttccttgaaacgatacgttttgaggaagaagcctcctggcaagcttcttcaatctgctcatgctgttgatcgagagtttcaggtgcttcgggctttaggtgaacatacacaggttcctgttcctaaagtcttctgcttatgcactgaccctgctgtcattgggactgctttttacatatggagtttatggaaggacgtattttcattgatccaaagttgccgaatgtagcacctgaaaggagaaatgcgatctatcgtgcaaccgccaaagccttggcatctcttcactctgctgatggggatgccattggtcttggaaatatgggcggcgagggcattactgcaaaaacagatagataggtggttcaaccatatttggcttcacagggaaggtaacctgaagggatcaaaatgttgagcttgtga

SEQ ID NO: 90354 - DNA, 548 bp, Arabidopsis thaliana columbia
  unsure (1)..(548): unsure at all n locations
nnnnnnnnnnnnnnnnnnnnnnnnnnnnnnnnnnnnnnnnnnnnnnnnnnnnnnnnnnnnnnnnnnnnnnnccacgcgtgcgatcttctccgatacctctctatctatatctcttcgacgctgcaaattagccttaagcttctttctcctttaaacttttcgattattattccatttcctatctttttgtttcccccaaatcttttcacggaagcaaagaatacaattccaaaccctaatcccgatcatccgtctttcctctccggtttcaaaatatgagtaatcagaagaagaggaattttcagatagaggcgtttaagcatcgagtcgttgtggatcccaaatacgctgataaaacttggcagattcttgagcgtgcgatccatcagatttacaatcaagatgctagcggtctcagtttcgaagaactttacagaaatgcgtacaacatggtcctgcacaagtttggtgagaagctatatactgggtttattgctactatgacttctcatctcaaagaaaaatccaagcttatcgaggcagctcag

SEQ ID NO: 90355 - DNA, 398 bp, Arabidopsis thaliana columbia
gaccagagacttaaactggtttctgtatcttttactgggttctttcagatatataaatggatcaaatcgttaacgtggatgagtttcaagagctggccaaacaggccctccctaagatgtactatgatttctacaatggaggagcagaggatcaacacgctctcaatgaaaatgtccaagctttccgtagaatcatgtttaggcctagggttcttgttgatgtgagcaacatagacatgtctacaagtatgttgggttacccaatctcagctcccatcatgattgctccaacggcaatgcataagttggctcatcctaaaggagaaatcgccacagcgaaagctgcagctgcgtgtaacactatcatgatagtatcattcatgtctacttgcactatt

SEQ ID NO: 90356 - DNA, 456 bp, Arabidopsis thaliana columbia
agagacttgaaaaaggtcgccggccattcttggttctgcttctggttttcttctgcgggctccttcagatagatgagatggatcaaatcgttaatgtggatgagtttcaagagctggctaaacaagccctccctaagatgtactatgatttctacaatggaggagcagaggatcaacacactctcaatgaaaatgtccaagctttccgtagaatcatgtttaggccgagggttctcgttgatgtgagcaaaatagatatgcctaccaaaatattgggttaccctatctctgctccaatcatgagggctccaacaggaaatcataagttggcccatcctgaaggagaaaccgctactgcgaaagctgcagctgcgtgtaatactatcatgatagtatcatacatgtcttcatgcacttttgaggagattgcttccagttgtaacgctgttcggtttc

SEQ ID NO: 90357 - DNA, 641 bp, Arabidopsis thaliana columbia
  unsure (1)..(641): unsure at all n locations
nnnnnnnnnnnnnnnnnnnnnnnnnnnnnnnnnnnnnnnnnnnnnnnnnnnnnnnnnnnnnnnnnnnnnnnnnnnnnnnnnnccacgcgtccggtagtcatatgcttgtctcaaagattaagccatgcatgtgtaagtatgaacgaattcagactgtgaaactgcgaatggctcattaaatcagttcatggagatggtagatcagaacaacggcatcgtcggatctactactggctccaattactatgtcagaattctcagcacaatcaatagagaactcttaaagccttctgcttccgtcgctcttcaccgtcactccaacgcccttgttgatgttttgcctccggaggctgattctagcatctcccttctcagccaatctgagaagcctgacgtctcctacaatgatattggaggatgcgatattcagaaacaggaaattcgtgaggctgttgaattgcctcttacccaccacgagctttacaaacagattggtattgacccacctcgtggagtctttctctatggacctcctggtacttggaagactatnttggctaaagggctgtttgcaantnananaaacnngctngccttcaattaaggggttttttggnttccnagttttntgcaaaanntnt

SEQ ID NO: 90358 - DNA, 1646 bp, Arabidopsis thaliana columbia
atacgactcaccttagggaaagcacgtacgcctgcaggtaccggtccggaattcccgggtcgacccacgcgtccgctcggttcgcaaaagtctatttaatttcatagcaatctcacttttctcttcccccaccctcaaagatctctcaaagaatggcttccgcggctgttgcatcgatggttcttgaccctaaagcatcaccggccttgatggatctatccaccgcagacgaagaagatctctatggccgcctcaaatcgcttgaacgacaactagagttcaccgatatccaagaagaatatgtgaaagacgagcaaaagaatctcaaacgagagctgttacgagcacaagaagaggtcaaacgaattcaatccgtgcctttggtgataggtcagttcatggagatggtagatcagaacaacggcatcgtcggatctactactggctccaattactatgtcagaattctcagcacaatcaatagagaactcttaaagccttctgcttccgtcgctcttcaccgtcactccaacgcccttgttgatgttttgcctccggaggctgattctagcatctcccttctcagccaatctgagaagcctgacgtctcctacaatgatattggaggatgcgatattcagaaacaggaaattcgtgaggctgttgaattgcctcttacccaccacgagctttacaaacagattggtattgacccacctcgtggagtcttgctctatggacctcctggtactggaaagactatgttggctaaggctgttgccaatcacacaactgctgccttcattagggttggtggatccgagtttgtgcaaaggtatctcggcgagggacctcgtatggttcgtgatgtcttccgtcttgccaaggaaaatgctccagctatcatcttcattgatgaggtagatgccatcgctactgctaggtgtgatgctcaaacaggagccgatagggaagttcagcgtactctcatggagcttcttaatcagatggatggatttgaccagaccgtgaatgtcaaggtcataatggcaacaaacagggcagacactctagatcctgctctcttacgtcctggaagacttgatcgtaagattgagttcccccttcctgatagacgtcaaaagaggcttgttttccaggtatgcacctccaaaatgaaccttagcgatgaggttgacttggaagactatgtttcacggcctgataaaattagcgctgctgagatagcagcaatttgccaggaagctggtatgcatgcggtgcgaaagaacagatatgtgatactacctaaggatttcgagaagggctaccgcgccaatgttaaaaagccagacccggactttgagttttacaagttaagagaaagcaaaagtggaacccagattaaggaaggtgtttaaaatcccagtgtggttttagaaataataaggacaaggaatccaatttgcaggttaaataagaaattaggtggatttcctaaatttcggaacctgaaggtccccaattggttttaggtcaacagccttttaccggttaaaaaaaaaaaaaaaaggcgcgccgctctagagggacccagctttacgtacgcgtgcatgcgacgtcataatctttctatagtgtcacct

SEQ ID NO: 90359 - DNA, 972 bp, Arabidopsis thaliana columbia
  unsure (1)..(972): unsure at all n locations
agataaatagaacagcatgagtaagggactacggaagcgcgataagaaagggaggagtgaggggagaaaagcgaccaggagggcaaggggaagcgcttctgaaaaaggggggggtttaatcccctctatcgaaacaatatnnnnnnnagtacgcctgcaggtaccggtccggaattcccgggtggaccaacgcgtccgggcgagggacctcgtatggttcgggatgtcttccgtcttgccaaggaaaatgctccagctatcatcttcattgatgaggtagatgccatcgctactgctaggtttgatgctcaaacaggagccgatagggaagttcagcgtattctcatggagcttcttaatcagatggatggatttgaccagaccgtgaatgtcaaggtcataatggcaacaaacagggcagacactctagatcctgctctcttacgtcctggaagacttgatcgtaagattgagttcccccttcctgatagacgtcaaaagaggcttgttttccaggtatgcacctccaaaatgaaccttagcgatgaggttgacttggaagactatgtttcacggcctgataaaattagcgctgctgagatagcagcaatttgccaggaagctggtatgcatgcggtgcgaaagaacagatatgtgatactacctaaggatttcgagaagggctaccgcgcaaatgttaagaagccagacacggactttgagttttacaagtgaagagaaagcagaagtggaaccagattatggctgttgttaaaattccagtgtgttttgagaattattaaggacatggaatcaaatttgcagttaaattaagaactaagttgcatctcctaatttctgtaactcgagttcacatttgtttttagtctatcagctttttacagtttaatgtataagagggcggccgctctagaggatccaagcttacgtacgcgtgcatgcgacgtcagg

SEQ ID NO: 90360 - DNA, 614 bp, Arabidopsis thaliana columbia
gctgtgactttcaatggaaaatcatataacttgcctgcatggtccgtaagcatcttgccggattgcaaaaatgtagctttcaataccgcaaagataaattctgcaactgagtctaccgcatttgctcgtcaatcattaaagcccgatggtggttcgtctgcggagttaggttcacaatggagttacattaaagaacctattggaatttccaaagctgatgcattcttgaaacctggtttgctagagcagattaacacaacagctgagaaaagcgattacttgggggactcactaaggacggatataaaaggcgatgagactttccttgacgagggatctaaagccgtccttcacattgaatctcttggtcaagggggctatgcttttataaatggaaaacttgcaggaagcggacatggcaaacagaagatttctttggatataccgattaatcttgtaaccgggacgaacacaaccgatctccttagtgttaccgaagggctggcgaattatggagctttctttgacttagtgggagcaggaataaccggacctgcgacacttaaaagcgctaaaggtggtagctcaattgattgggcttaacagcaatggac

SEQ ID NO: 90361 - DNA, 1306 bp, Arabidopsis thaliana columbia
  unsure (1)..(1306): unsure at all n locations
tacgccggctctatacgacttacttagggaaagctggtacgcctgcaggtaccggtccggaattcccgggtcgacccacgcgtccgaaagaaaggaactccatggacagaggaagaacacaggatgttcttattaggtttacagaagctgggtaaaggtgattaggagaggtatctcaagaaactatgtgaccactaggacacctacacaagttgctagccatgctcagaagtatttcatcagacaatccaatgtctctcgtcgcaaaagacgttctagtctctttgatatggttcctgatgaggttggagatattcccatggatttgcaagaaccagaggaagataatattcctgtggaaactgaaatgcaaggtgctgactctattcatcagacacttgctcctagctcacttcacgcaccgtcaatcttggaaatcgaagaatgtgaatcaatggactccacaaactctaccaccggggaaccaaccgcaactgccgctgctgcttcttcttcttccagactagaagaaaccacacaactgcaatcacaactgcaaccgcagccgcaactacctggctcattccccatactatatccgacctacttttcaccatattacccgtttccattcccaatatggcctgctggttatgttcctgaaccacccaagaaagaggaaactcatgacattctcagaccaactgctgtgcactcgaaagctcctatcaatgttgacgagcttcttggtatgtctaagctcagccttgcagagtccaacaaacatggagaatccgatcagtctctttcattgaagctaggtggcgggtcatcttcaagacaatcagcatttcacccgaatcctagctctgatagttcagacatcaaaagcgtgatacacgctttataaaagacctgaggaagtgatggtctaaaatgggatctggtttggggtttacaggttagttgttggtcacagtaacttaaataagtttttctttgttaggttgtttaacttgggtaggatgttttagttcagctttgatcattagggaaaagaaaaaagaaaaaaaaaagggagaaaaacaaattattattttttgcttacatttctttatatttgtatgcttttattttgactctaggatgcgttaattttcgtttaatctgtactaacaattagaatttattagttttgaataaataaaatcacagtttgtttaaaaaaaaaaaaaaaagnnnnnnnnnnnnnnnnnnnnnnnnnnnnnnnnnnnnnnnnnnnnnnnnnnnnnnnnnnnnnnnngtc

SEQ ID NO: 90362 - DNA, 665 bp, Arabidopsis thaliana columbia
  unsure (1)..(665): unsure at all n locations
cttctccaccggatctcgaaatcggagaattagccaaacgatggccgccgacggaatattccgcagcatcttcgagggttgtatctccggccttgattccgccatcgaacggcgtccttaccacaaaaactgcggatgtgctcttcacgataaatcaagtggcgctgggaaaaatcaaaatcagcgacggccgccgtcttgtcgccgccacggaagctcagagagcatctcgttcccgatccgaaggtcttggagcgaaggcaacatcatggctatgaatctcttctcctcatcgtcgtcttcttctaatctccaatcgctttcttcgtcttcttcgctctcaaatctggcatcagatttaccggtggataatgctgcgacggaggaaccgagcagatctaataaacagctacgatggacgattgatgaaggtgaagatgattgatgatgatgatgatcaattccaggttgttaacttttgctaatctctgtttaattaaacttctcaatcattgtatttgagaaccaaataatgtcagtcattgtatttttatttttttgtaaaagaaacgaaaatgtttgtttacgattgcaactttgaatgattagcatatacaccaatgaaaatttatttagccnnnnnnnnnnnnnnnnnnnnnnnnnnn

SEQ ID NO: 90363 - DNA, 564 bp, Arabidopsis thaliana columbia
  unsure (1)..(564): unsure at all n locations
tgatcttcaggtctcnnnnnnnnnnnnnnnnnnnnnnnnnnnnnnnnnnnnnnnnnnnnnnnnnnnnnnnnnnnnnnnccacgcgtccgtgaaaatggtgcgcagcttcagaagagtacattgggtgggcaatggcaaggtaaagatgcgtcctttatgcgttctaatgatcatggtaacagagaagttggtagaagttgggatactagtggtcttgaaggcacagctcttaagatggttgagggtgatcgcaactctaagaactggtggagaaagcttgaaatggtacgcgaggttatagttgggagtgttgagagggaggaacgattgaaggcgctcatatactctgcaatttatttgaagtggataaacacaggtcagattccttgttttgaagatggagggcatcaccgtccaaacaggcatgccgagatttccagacttatattccgtgagttggagcacatttgcagtaagaaagatgctactccagaggaagtgcttgttgctcggaaaatccatccgtgtttaccttctttcaaagcagagtttactgcagctgtc

SEQ ID NO: 90364 - DNA, 422 bp, Arabidopsis thaliana columbia
  unsure (1)..(422): unsure at all n locations
gaaagatcccatataatggagtatattatgaccctcctgaggaggataaatatgcgttcaaacatcctcgtccaaagaaacccacatcgctgcgtatatatgaatcacatgttggaatgagtagtacggaaccaaagataaatacatatgccaactttagagatgatgtacttccccgtataaaaaagctaggctataatgctgtgcagataatggccattcaagagcatgcctactatgccagctttgggtatcatgtgacaaattttttcgcacctagcagccgctttggaacacctgatgaccttaaatctttgatagacaaagctcatgagctaggtctggttgttctgatggatattgtgcacagccatgcatcaaaaaacacactggatggcctggacatgtntgatggtactgat

SEQ ID NO: 90365 - DNA, 816 bp, Arabidopsis thaliana columbia
  unsure (1)..(816): unsure at all n locations
cagctctctacgactcactatatggaaagctggtcacgcctgcaggtaccggtccggaattcccgggtcgacccacgcgtgcgcccacgcgtccgaagaaactgagaagataaccataatctttgttgataaggacggagaggaaattcctgttaaagtaccaattggaatgtcagtgctcgaagctgctcatgaaaatgatatagaccttgaaggggcttgtgaggcttctctagcgtgttcaacgtgtcatgtgattgtgatggatactgaatactataacaaacttgaagaaccaacagatgaagagaatgatatgcttgatcttgcttttgggctcacagaaacgtcacgactcggatgccaagtcattgcaagaccagagctagatggtgtgcgcttggctattccttcagcaacaaggaatttcgcggttgacgggtttgttccaaaacctcattagtttccgcagagattcttcgacttgaggcattaatgatcaaagagctgattcatgtttctattggagttttgatgattgcttaccgagaggaaacagttcttagacctgaggcatgaaatgatcaaagagatgattatgtttctattggaggacttgatgattttttttattacttatcttagttttgatattggcatttctcgttgttgtctgagtttctaacagaacaacaagcgttaagcaaattttttggagaataaaaaaaaaaaaaacacaaaaaaagnnnnnnnnnnnnnnnnnnnnnnnnnnnnnnnnnnnnnnnnnnnnnnnnnnnnnnnnnnnnnnnnnnnnnn

SEQ ID NO: 90366 - DNA, 400 bp, Arabidopsis thaliana columbia
agaagaatgactaatatggccggaaccgcctctcaccgagttccggtggaaatcaccaccacagcctccgtcacaagagcagcccatttcagattcagattcagactccggatctgattcagagaatcatcagcaccgtcacaatgatctatcaaactccatcttcgaagcttacctcgattgccactcatcttcgtccccttcctcaatcgatctcgctaagatccaatcttttctcgcctcgtcttcttccggtgctgtctcgtgccttatctgtctcgaacgcattaaacgaaccgatcctacatggtcctgcacttcctcatgcttcgccgtctttcaccttttctgcattcaatcatgggctcgtcagtgcttagatctacaagccgcgcgtgca

SEQ ID NO: 90367 - DNA, 774 bp, Arabidopsis thaliana columbia
  unsure (1)..(774): unsure at all n locations
ccacagcatccgattgntacgttttctggacatgcttccgaaatctccaaggtcatggtggtggtgtgaattatgctcaaggattcccagttgttgttcctgattatacagtggttgaggtgagacaagtgatagagcaagaacttcactgttgtggattgagcatgggctggtttctgtntatcatgggcttcctgttcggtgggatcccttggtacctcggtgcttttaatgttctagtcacatctgttgatcaccgcgagaaagctggatacgttgcctgttcaatcgcagtgagatcctctctctcattacattgtcgtagatcaccggcattggtcactcatctatattcatcattgtctctcataatttctttttctttttatgaattcttccagtccgttgtctatttgattgccgtcatgctcgggatgactggggatattaacatctggtgtaactactccccagcctaaacccaaactccatcttgtatatatatctacatatatactcgaaaacgtagatatatatcaatatcatttacaccagttattgctgattttagtgagttacagaagggaaatatttgtaactttgtgttgaattttatatcataactaaatattgtatatatgtggttgattcccttggtggcacatctatccatatgtaaaatattctgtgaaaaaaaaaaaaaaaaaagnnnnnnnnnnnnnnnnnnnnnnnnnnnnnnnnnnnnnnnnnnnnnnnnnnnnnnnnnnnnnnnnn

SEQ ID NO: 90368 - DNA, 858 bp, Arabidopsis thaliana columbia
  unsure (1)..(858): unsure at all n locations
atgatcctccnnnnnnnnnnnnnnnnnnnnnnnnnnnnnnnnnnnnnnnnnnnnnnnnnnnnnnnnnnnnnnnnnnnnnnnnccatgcgtccgcggacgcgtgggcttacctcatcgtcgtctctttcttcgccaagtcatagattctccttcgtctcttgcctagccagataatattcgccgttctccatcggtaaacgcagctgaggagctagataattctctgatatctgcgttacgccggtgtggaagcaaaatttaggttaatcggatctcaattatggacgaagaggcagcaaaacctagagactccaccgtgaatcagcaacatcaatactattacggaacgtttcaaggcgttgcgaattttcctactcctactccaccaccgcaatttatgcaaccacagcatccgattactacgtttcctagacatgcttacactatctccaaggacatggtggtggtgaaatgatgctaaggattccagttgttgtcctgttatacagaggtgagggagaccatgtagagcataacttccttgctgggactggcataggcggtttctgctatcatggcttattgtcggcaggatcactagtacctaggtgcttattgtctagcacatgtgatgtcagcagagatgctggtacgttgctgtcaatcgcaggagtcctattctattcattgtcgagacaacggatggtcactcatcatatcagcattgcgctataatgcttttcttcatgattcttcagacgtggcatttattgccgatgctcgatgatggggattacattgggaactctgccagcaaccaactatctggtatttctcaattactcaacgagttattaa

SEQ ID NO: 90369 - DNA, 506 bp, Arabidopsis thaliana columbia
  unsure (1)..(506): unsure at all n locations
gattttnnnnnnnnnnnnnnnnnnnnnnnnnnnnnnnnnnnnnnnnnnnnnnnnnnnnnnnnnnnnnnnnnnnnnnnnnnnccacgcgtccgcaaatttctgaatttcgtctctaacatccacaaaatcgaatgcgttgtgtgaatcgcgttgattgttcttggtcacggccaagcgaagcttaccgtatcttaccctccggtggtcacctttcatctggattccatcaatgtcctttatcgtctctatctttccgttcctctttcgtgtgttgctcctcctccacatctggaccgtccgattcaaatcccgaatcatcttcaaatcgctcttacagccgtagatggcagaatcctcttccccggcgtcaacatcccgatcaaataccgtcttctcagattgctcgtgattggatcgattcagatacaactccagtttctcaagctttagagagattcactgtagtgtcgtacaacatattgggagatggaaattcatcatatcac

SEQ ID NO: 90370 - DNA, 640 bp, Arabidopsis thaliana columbia
cgagaaaaggcgatacaaacgatttcgaatgcttcatcttctcctttgaaaatccggctggtgcttaatgctgctagatatggatctcggtgttcttcttccatcattgcaatctgtttatgtgctggtgttttacttcgtttacttggccgttgccggagaaattctccccgggaaagttattcgcggcgtccttttatcagatggctctcaacttcgttaccgatgcaatggtctattggcactaatattgttggtagctattttgggaatctgtgcaaaacttggcattgtatcacctcttgtggttgcggatagaggacttgagttactctcagctacttttattttctgtgttttggtgacattagcattgtatgttactgggcgaagttcctcgaataagggttcttccctaaagcctcatgtctcaggaaatcttgtacatgactggtggtttggaatacagctgaatcctcagtttatgagcattgatctcaagtttttctttgtcagagccgggatgatgggatggctgcttatcaatctctctattctggcaaaaagtgtgcaggatggttccttgagtcagtcgatgattctttaccagatcttctgtgcgttatatatattggactac

SEQ ID NO: 90371 - DNA, 754 bp, Arabidopsis thaliana columbia
atgatactccagcgtctctacgactcactatatggaaagctggtcacgcctgcaggtaccggtccggaattcccgggtcgacccacgcgtgcgcctatttttctttttgtcattttttgttccagccgtctgttgatatcaagacggttctttcgggtctaatggaaaggctttcgaactatgctgcatccagtgtggaagcattgcctaatttcctgcaagtagaagccttttcaaagttaaattatgccattgggaaggttgtagaagcacaggcggacttgccggccgcagcatctgtaacattgtatttgtttcttctaaaattcactctccatgtctattccgatcgtctggactatgtggaccaagttttggtataacgctttctgaggatggatcatgtgttactcaactatctgccacaggaaagctttgtgatgacaaggcagcaaaacagatcgtcgcatttcttagcgctccattggaaaagtataataatgtagtaactatcttgaagcttaccaactatcctctagtaatggaataccttgaccgtgagacaaacaaagcaatggcaatcattctagttcagagcgtttttaaaaataatactcacattgctactgctgatgaggtgtccgtttccttcctcgatttagtttcttcttttagcattctctattgatgtggagtttccttttattgtttgttacaggtcgatgcattgtttgaactggcaaagggtctcatg

SEQ ID NO: 90372 - DNA, 734 bp, Arabidopsis thaliana columbia
  unsure (1)..(734): unsure at all n locations
atgcnnnnnnnnnnnnnnnnnnnnnnnnnnnnnnnnnnnnnnnnnnnnnnnnnnnnnnnnnnnnnnnnnnnnnnnnnnnnccacgcgtccgcccaaatgtccgataggatactgtgcaagttctttgtccatggctcgtgcttgaaaggcgaaaattgcgaattttcccatgactctaaggatccgcccaataatgtttgcacattctatcagaaacgaatatgtttgtacggaagtagatgtagatacgatcatgtcagagctgcttccaatcttcctcttagctcagattctgagtctttagatcgctctatatccaccaccccctctaggcatttgcaacaacaaggcgataataatgacggtgacaaatcctctaacgtttactgtatccaccctagagagtacccgatctgctcttttgctgcagctggtgattgccctcgaggtaaccagtgtccacatatgcatggtgacctctgcaatacttgtggcaagaagtgtttgcatccttttagacccgaggaacgagaagagcatacgaaagaatgtgagaagaagcagaagcacattgaggctttgaaacaaagtcaagatattgagtgtagtgtgtgtttggatcgtttcttgtcaaaggctactcccaggggaaaggaagttggggctgttgactgagtgtgatcatcccgtttggatacaatgaattcgaattgggggtacagtgctcctgtttc

SEQ ID NO: 90373 - DNA, 692 bp, Arabidopsis thaliana columbia
  unsure (1)..(692): unsure at all n locations
gccnnnnnnnnnnnnnnnnnnnnnnnnnnnnnnnnnnnnnnnnnnnnnnnnnnnnnnnnnnnnnnnnnnnccacgcgtccgcccacgcgtccgatttattgaatgttctttgaagaagaagaaggcgacgacacaaaaaccttgcatttgcatccatggcgtcgatgccgagcaaacttcttccagtcctagtctgctacgtttttcttttcccctttgcatcatcatctgattattctggggtatctcttccatcttcgtcgcctaaagtctcggtgggcctgtactacgagtctctctgtccctactgctcttccttcattgttaaccacctcgcgaagctcttcgaagacgatctcatatcaatcgtcgatctccatctctctccgtggggcaataccaagctccgttccgataacgtcactgccgtttgccagcatggggcatttgaatgcttcttggataccgtagaagcttgtgcaattgatgcttggcctaaagtaagcgatcatttcccgttcatatactgtgtcgagaagttggtgactgaacataagtatgacaagtgggagacgtgttatgagaagctcaatctcaactcgaaacctgttgcagattgtctcagcagtggacatgggaatgagcttgctttgcactatgctgcagaaacgaatgcgcttcagccttctcac

SEQ ID NO: 90374 - DNA, 901 bp, Arabidopsis thaliana columbia
  unsure (1)..(901): unsure at all n locations
nnnnnnnnnnnnnnnnnnnnnnnnnnnnnnnnnnnnnnnnnnnnnnnnnnnnnnnnnnnnnnnnnnnnnnnnnnnnnnnnnnnccacgcgtccgatctttgccgagtggaaaatttccggtgaagccgtcccgagtgactcgggctcttgcccggtatctttcagcttcaatagtggagataaccggtttatgtcgagcaaatccagcttccataagtggtgttgactggtttttatcttttttccagtcaatcggattattatcgattgctttacttcttttccatgttttctttcaataatttctaaaaatctgagttggtaattagttttaagtgctagctatttaaaattaatgtctctggcttttggttttagaaacctcgatttgcaagaaatcgttcaaacgattacatctgggtttgaaagattgaaggataatccgatgcttattaggattctcttaagccgtctatttctttgggagctccatccatatctattctggtggtaaacaaagattattcgtacgttttattcggcgatgttttcctccaccggatttggtgctcgtcgacggtggaggctgatgtccgtacacttccgatgactcatttacatgtgctgtagttataatctcatgtcaacacgtgtctttggatagagtcaaatgttgaagatcttttggctgttgatattaatctggtggatctgttgttggacctttcttttatttcagcataatcgttgtaggcttttacgccttatacccctttggtggttaatgaaatttacttcgattaaaaaaaaaaaaaaaacacaaaaaaagnnnnnnnnnnnnnnnnnnnnnnnnnnnnnnnnnnnnnnnnnnnnnnnnnnnnnnnnnnnnnnnnnnnnnnnn

SEQ ID NO: 90375 - DNA, 522 bp, Arabidopsis thaliana columbia
  unsure (1)..(522): unsure at all n locations
atgatatnnnnnnnnnnnnnnnnnnnnnnnnnnnnnnnnnnnnnnnnnnnnnnnnnnnnnnnnnnnnnnnnnnnnnnnnnnnccacgcgtccggcgagcttgtccgatttgtaagcacgagacggaaccatgttgtgcggaggctcacgtgtcttgcagcatttgtccgaccacaatcatcataattcgattggtttaggattagggttttgtggtgctaagattgtgcagctctcttcattctttctcaggccttctcaggctatggcgaagagtcatcatttcagccgtaaattgcgtcagcggatgatttcttcatttgggtctcattgcagaacatccggagaagtcccaattcttcacaattgtttcagccaacgagaagatgatcctgagcttccagttgaagggttatctccagtgtcaggaggcattgttgctctagggaagtttgatgccttacatatcggccatcgagagcttacaattcaagcttcaagaattggagctccatgtattatc

SEQ ID NO: 90376 - DNA, 363 bp, Arabidopsis thaliana columbia
ttaatatgagaagaaaggttctaggtcttgtttgctttcccctcctgctaatcgaccaagcgaataatctccagctaaccaccgatgaagcgaacaatcaacgaagtcgtcggatctacctccgtcaatactctcgattcctccattgctaagaagcctgtcttcctcaccaaaaaacagcgggaagagttagccctaaaacgccgccaggatcaaatctccgagcaacgtgtccgtcgtgagcaacttggtcgccccgagcccgagacggaagatgtctccaatggagataccaatcgggataaggatcgagatagagatcgggaccgagaccgagaacgtgaccgagattaggagagagat

SEQ ID NO: 90377 - DNA, 1309 bp, Arabidopsis thaliana columbia
  unsure (1)..(1309): unsure at all n locations
atgatttgccggcactaatacgactcatttagggaaagccggtacgcctgcaggtaccggtccggaattcccgggtcgacccacccgcccgcccagtcttctgctaaaatcgcgaaagagatatcttacgaatctccacaagtgcgaatttcgaacggagctacgattccatggcgaccaacggagagaaggtcacggctacggtggtgaatggcggagggctatctactggtgaaaaccctaagaaaattgtagacctcaacactacggagttagatcgtactgacgacattctcgacggagaagtcaagggattttcagattctggtgaaaagaaggaagaaaccgactctaatggtattggatcgacggctggtgttgattctggggatatctctccggtcgatgatatccagaagaagattcgacgtgctgagaggtttggtgtttcggtgaaattgaccgaagaggagaagcgcaattctcgtgctgagaggtttggtactgtagctgcagcagtggtgaatggctcagagggaacgaagaaagcagaggaattgaagcgaaaagcaagagctgatagatttggggttccttctgcgacctctactactgataagactgaggaagaggcaaagaagaaagctaggctcgctcgttttgggaaagagactaaagttgattctgctgaagaaaataagcgcaaagctagagcattgaggttttcaaaagaggcttcagcagatgcatcttcagatttacctgagaagcaaattattggcaaggaggcagctgtatcaggaagcgctgcctaaggttcctcaataaagtttttccgtctttgtagttaggtagtgtgctagcgttttatgagtccctctctggctgcttcattctctctttatttctgaattagaagtccatgtgtgtagtatctttactaagttcggtcgtggagcaatcaccagatgagatcttgagaaaccaataagtaacctatagttctgattgtctgaaatgacaattatcaatgtgtttaggacctaggaattctgaagtggctggtattgatgttttccatgttgcaggttctttggagtggtaagtatagttttgagtaataacctttatttccgttttaatactattgggaattgttgggatgggccccctttcaggaatttgcattgttccgtatcaaagcacaaagcacccagcaatttgaaaaatttcgtacctgcaatgcagccaaattattttatgtgaaggggggccattttttttaacctggtttgaacctnggtagaaa

SEQ ID NO: 90378 - DNA, 532 bp, Arabidopsis thaliana columbia
atcattcctgtgatgcgatataatattccgattgtgattagaaatattttcaatctctctgcaccgggaacaataatctgtcaacctcctgaagatgattatgaccttaaactgacaactcctgtcaaagggtttgcaactattgacaatttggccctcataaatgttgaaggtactggaatggctggtgtacccggtactgcaagtgacatttttggctgtgtaaaagatgttggagctaatgtgattatgatatcacaggctagcagtgagcattctgtgtgctttgctgtgcctgagaaggaagtaaacgcagtctctgaggcattgcggtcgagatttagtgaagctttacaagcgggacgtctttctcagattgaggtgataccaaactgtagcatcttagctgcagtcggccagaaaatggctagtacacctggagttagttgtacacttttcagtgctttggcgaacgctaatattaatgtccgagctatatctcaaggttgttctgagtacaatgttactgtcg

SEQ ID NO: 90379 - DNA, 721 bp, Arabidopsis thaliana columbia
  unsure (1)..(721): unsure at all n locations
tgatactccagctctcnnnnnnnnnnnnnnnnnnnnnnnnnnnnnnnnnnnnnnnnnnnnnnnnnnnnnnnnnnnnnnnccacgcgtgcgggttactgtgctcctgaatacgcaatgagcgggaaattaactgttaaatcggatatctactgcttcggtgtagtgttgcttgagctgattactgggagaaaagctattgatttaggtcaaaagcaaggcgagcagaatcttgttacttggtcacgtccatacctcaaggatcagaagaagtttggacatttagtggatccgtctctacgaggaaaatacccaagacggtgtttaaactatgcgattgcgattattgcaatgtgtcttaatgaagaagctcattatcgaccgttcataggtgacatagttgtggcactagagtacttagccgcacagagcagatctcatgaagctcgaaacgtctcatcaccgtcaccagagatttcaagaacgccgcgacgagacttgtaaaaactcaaaaacagcttttaagaatttcagtttggtgttgtgtaaaaatggttttttttgtttctttctcagaaaacaatatatgtttggtaaatgtttcgttattagtctcttttacttgatgtatatggcaattatggaaaaaacacaaaaaaagnnnnnnnnnnnnnnnnnnnnnnnnnnnnnnnnnnnnnnnnnnnnnnnnnnnnnnnnnnnnnnn

SEQ ID NO: 90380 - DNA, 715 bp, Arabidopsis thaliana columbia
  unsure (1)..(715): unsure at all n locations
gcaattgaatatgctaggaaatccctacctgaacccaaaaagatcataaaagaatgggagccgaacaaaacttggcttccaaaagaaaaaaatcggcggggtctcaaaggaaccagagaaagtaaaaagctggttagataagaatgtggctgagcaagaaaagacttctctgtggagcaaaccggtgttcacgtcccctgaagtgtacgctaaagtatttactctacaagacaaggtcacaaaggtgaataagatcccaaagccaaagccaaagatagagaaagtaaccaagacggagaacacaacaaaggaggaggaacaatcaaaatcctctgatgaagctgccaaagaagaagaaagtcccgacgagctttgattaaggatatataataaatagagttttcgttaatttttgtgtttttaagagggaaaataggattaaaagtaggcagctgagatgagcaaaaggattttattcctttctcctcaacttcttcacatcaccattagaaacggaatcttctgtgtttttgtttttcattatatcaagttttggtctctctatttctataactgaatcttcaatatatttagtagaagtttataaccccaagaaatatttcaaaaaaggncagccgctctagaggatccaagcttacgtacgcgtgcatgcgacgtcaaagtcttnctataggtcacctagatcaatcgnnnn

SEQ ID NO: 90381 - DNA, 944 bp, Arabidopsis thaliana columbia
  unsure (1)..(944): unsure at all n locations
atgatatnnnnnnnnnnnnnnnnnnnnnnnnnnnnnnnnnnnnnnnnnccacgcgtccgcacacgcgtccgcggacgggagaacaatggcttcgacggctacgaacactgatttcttcaagactttgctttctcctttctcaaatgggaatgcggcgcaacgaagtagtagacagaacattgtttggttaaatcggaagcaatctggaaataataacagatctcttcgtgttaatggattattcggaggcggaaaaaaggacaataaagaggatggacaatcaaaggcaggaattctaggtaacatgcagaatttgtatgagacagtgaagaaagctcaaatggttgttcaagtagaggctgttagagtgcagaaggagcttgctgttgctgaatttgatggttattgtcaaggcgagcttgtcaaggttacattatcaggtaaccagcaaccaattcgcactgatatcactgatgcagcaatggagttaggttctgaaaaactttcactgctggtcacagaagcatacaaagacgcacattcaaagagtgtactggctatgaaagaaagaatgagtgatcttgcgcagagcttagggatgccaccaggccttgatggattaaagtaacaaaacttaatcttttttgtgatttctttcaacttataggtatgagaagtccagttctttttgttgtatatcgatcaggcagagagaaatagagctctgttctactgaatcagagagaggatatttgaacctttgtcttcttttgattatcaacaattactcaaatgctctcccaaatacgttttgtagtttccaaattgtggaaatgaatcgagcttttaacagaaaaaaaaaaacaaaaaagnnnnnnnnnnnnnnnnnnnnnnnnnnnnnnnnnnnnnnnnnnnnnnnnnnnnnnnnnnnnnnnnnnnnnnnn

SEQ ID NO: 90382 - DNA, 642 bp, Arabidopsis thaliana columbia
  unsure (1)..(642): unsure at all n locations
cnnnnnnnnnnnnnnnnnnnnnnnnnnnnnnnnnnnnnnnnnnnnnnnnnnnnnnnnnnnnnnnnnnnntgacccacgcgtgcggagcttccaaacatcaaagccgaggcaaagctccctgctcttcttgttgtcaacattcagttaccaacctatcctgctgcaatgttccttggggacagtgatggagaaggcatgagcattgtactttattttaaattacgagacaatcacgaaaaagaaacctctcagcaatatcaggagagcatcaagaaacttgtcaatgatgagatggagaaggtaaaagggtttgctaaagacagcaacgttgctttccgtgaaaggcttaagatagtagctggacttgttaaccccgaagatctagctctaagctcgactgaaaagaagcttgtacaggcttacaatgaaaaacctgtcctctctcgtcctcaacacaacttctttaagggtccaaactacttcgagattgatctggatgtacatcgattcagctacatatctcgaaaaggacttgaagcattcagagatcgnctaaaaaacggaactcttgatctcggnttaaccatccagggtcaaaaaccgnaagagctgccggnacaagtcctatgctgtcttaggctt

SEQ ID NO: 90383 - DNA, 685 bp, Arabidopsis thaliana columbia
  unsure (1)..(685): unsure at all n locations
aattggcgttgttgttggttgcgttacagattttggactaattattattttcgtgcctgcaaagtcagcacgacgatcgcgtttcgatctgcggagtagaagaagacccgccacaatcacaaatcgcggtgcatatagtctaaagggtcaatggcctcttcttcggatccatggatgagagagtacaatgaggctttgaaactctctgaggatattaatggcatgatgtctgaaaggaatgcctccgggttaaccgggcctgatgctcaacgtcgtgcctctgcaattcgaagaaagatcaccattttggggactcgattagacagtctgcaatcccttcttgtcaaggttcctggcaagcagcatgtttcggagaaagagatgaatcgtcgcaaggatatggttgggaatttgagatcaaaaacaaatcaggtggcctctgctttgaatatgtcaaactttgcaaacagagacagcttgtttggaacagatttaaagccggatgatgcgataaatagagtctctggcatggacaaccaaggaattgttgtatttcaacggcaagttatgagagaacaagacgagggacttgagaagttggaggaaacagtcatgagtaccaaacacattgctctcgctgttaacgagngctcacccctgcagncaaaggcttattgatgcttag

SEQ ID NO: 90384 - DNA, 724 bp, Arabidopsis thaliana columbia
aatttcttcacaaattcagcggcgatgaagttcaatccgcgtgtgagctcttctcgccggaagaacaggaaggctcacttcacagctccttcaagcgtgaggcgcgtcctcatgagctcgccgttatccaaggatctccgtaacaaacacaacgtcagatccatgccgattcgtaaagacgacgaagtgcaagttgttcgtgggacgttcaagggaagagaagggaaggtgatgcaggtgtatcgccgcaagtgggtgattcacatcgagagaatcacaagggagaaagtcaacggatccacggtcaacgtcggagtcaatgcttcgaatgtgatgatcactaagctccgtctcgataaggataggaagtcgcttttggagcgtaaggctaatggacgcgccgccgccgataaggagaagggaaccaagttttcagccgaagatgtcatggagaacgtagattgatcttaacgtatggttttttcttcttcttttctagttttctattttgatttcattgatgatgatatgattcagaattcgaagttgaattttgtggttttcttatcaatgtacctcatttatgcttatatttctagctattgaaattggactgagatttaaatccttaaaaaaaaaaaaaagggcggccgttctagaggatcacagcttacgtacgcgtgcatgcgacgtcataagtcttttattagggcacctaaattca

SEQ ID NO: 90385 - DNA, 751 bp, Arabidopsis thaliana columbia
  unsure (1)..(751): unsure at all n locations
atgannnnnnnnnnnnnnnnnnnnnnnnnnnnnnnnnnnnnnnnnnnnnnnnnnnnnnnnnnnnnnnnnnnnnnnnnnnnnccacgcgtccggttgagctggtcattcttcctcgttcatcactagatgagactccacctgaacaacaaaaccaaccaccacctcctccacctcctccacaaaatagcgaatctggagaagaagaaaatgaagaagaacaagaagaagaagaagaggatgaaagcaatgaagaaaatgaaaatgagcagcaacaggaccaaatacctgaagagtttatatttgacgctgagggcggtctggtggatgagaaactcctcttctttgctcaacaagcccagaaacgtcgggggaaagctggcagggcgaagaatgtcatattctcagaagatagaggacgctacataaagccaatgcttccaaagggtccagtaaaaagattagctgtggatgcaacccttagagcagctgcaccataccagaaattgcgcagagagaagggtatctcaggaactaggaaagtctttgttgagaagacagatatgagggccaaaagaatggcaagganagctggagccctgggtatcttttgtggttgatgcaagtggcagtatggcattgaatcgtatgcaaaacgcccaaggtgctgcactcaaacttctggcagagagcatactagcagggatcaggtntcgattattccttccgaggggatgctgcggaagtgctcttg

SEQ ID NO: 90386 - DNA, 574 bp, Arabidopsis thaliana columbia
ctatttctctctaaaaaaatgtcaaagaacgtttcgagaaactgcttaagatcaatggaagacatcaagaaagtattccaacgattcgacaaaaacaacgatgggaaaatctctatcgatgagcttaaagacgtgataggagctctctctccaaacgcttcacaagaagaaaccaaagcaatgatgaaagagtttgatcttgacggtaatggtttcattgatttggatgagtttgttgctttgtttcaaatcagtgatcaaagtagcaacaatagtgcgattagagatttgaaagaagctttcgatttgtatgatttggatcgtaacggaaggatctcggctaatgagttacactcggttatgaagaatcttggtgagaagtgttcgattcaagattgtcaaaggatgattagtaaagttgattctgatggtgatggttgcgttgattttgaagagtttaagaagatgatgatgataaatggtagtgcttgatagaatcgatttagaatttggaaaagtgatatccttttttttgtttgtaaatattttgttttatgatttcgttaatctaatc

SEQ ID NO: 90387 - DNA, 879 bp, Arabidopsis thaliana columbia
cagctccctacgactcactatagggaaagctggcacgcctgcaggtaccggtccggaattcccgggtcgacccacgcgtgcggctcgagcaagaggctttcatcagtaattcgtcgtcggagctccagaacgagttggtatccgacgccggcgatggtattgaagcaatcgctaatcgtctgagcaaatggattgtagcagctctgtttggatccgttctgcttctacgacatgatggtgcagctttgtgggctgtgattggatcggtttcaaattccgtgctctcagtagctttgaaacgtatacttaaccaagagagacctgttgctactctccgttctgatcctgggatgccttcttctcatgcccaatccatttctttcatctctgtgttttctgtcttctccgttatggagtggcttggaaccaatgtactctctctgttccttagcggcttcatcctcgcattgggttcttatttcacgtggttaagggtttctcagaagcttcacacgacaagtcaagtggtcgtaggtgcaatcgtgggttctgtttactccaccttatggtatgtaacttggaactctcttgttcttgaagcctttacctcaacattctcagtacaaatagctgtctttctggttgctgctgcgtctgctttaggttttgcagtttatgtgctacttaactggtttaaagatgacagatgacagatgacagaatgataattttcagtacttaggatgtataaggaatgcatttgattctccttataattcatattgattgagatattttaaagaaaaaaaaaaaaaagggcggccgctctagaggatccaagcttacgtacgcgtgcatacgacgtcatagctgttttat

SEQ ID NO: 90388 - DNA, 557 bp, Arabidopsis thaliana columbia
acgtcagttcaagatcccagactggttcttgaacaggcagaaggattacaaagatggcaagtattctcaagttgtctccaatgctcttgacatgaagctgagagatgatcgtgcaacgtctcaagaagatcagaaaccaccgtggtttgaggcattactggggtctccgtgtcagaggacaacacaccaagactactggtcgcagaggaaagactgttggtgtctcaaagaagcgttaagaaagatccaatgttgctacttacttctgtattggatacttcataaggacctgtttttatttcgtactaggacctttttgtgtgacgcttttcgagctttttgtgatcacattcctctgtttttcattcttgatccctccagtgccttgaatagtcttatttattttaatttccagcttactctgcttattgtctactgtgacagcaacagatgtctaaggcaattcaacaaaaaaaaaacaaaagggcgaccgctctagaggatccaagcttacgtacgcgtgcgtgcgacgtcataactcttctatagtgtaccta

SEQ ID NO: 90389 - DNA, 810 bp, Arabidopsis thaliana columbia
  unsure (1)..(810): unsure at all n locations
tacgactcactatttggaaagctggcacgcctgcaggtaccggtccggaattcccgggtcgaccactgaagagagaaagcttgaagacggcgagagctccatcttttctcaggcatctcttatcttcaaatcacaatgtctctggttgcaaatgaggagtttcagcacattttgcgtgtgctcaacactaacgttgatggtaagcaaaagattatgtttgcccttacctctatcaaaggtattggaaggagattggccaacattgtctgcaagaaagccgatgtcgacatgaacaagagggctggtgagttatctgcagctgagattgacaacctcatgactattgttgcaaacccaagacagttcaagattccagactggtttttgaacagacagaaagattacaaggatgggaagtactctcaagttgtctccaatgcccttgacatgaagctcagggatgatcttgagcgtctcaagaaaatcagaaaccatcgtggtctgagacattactggggtctccgtgttcgtggacaacacaccaagacaactggtcgcagaggaaagactgttggtgtgtctaagaagcgttaagccaatgttgctagttgcagctggattggatctttgataaggactgaattttaaattttgttgttcgtacaattttgcacgactcgattttgggtcttttgtgagagatcttctctactgtcatattgcttttaagataatgttgcttactggatcttatgtcacctctctagttacatccatctttcggttggcctattnaattggtttccttcc

SEQ ID NO: 90390 - DNA, 870 bp, Arabidopsis thaliana columbia
tacgactcacgttagggaaagctcgtacgcctgcaggtaccggtccggaattcccgggtcggcccgcgcgtgtgggtcactctccagcgatcgtttattgcttgaagacggcttcttcttctcacaaacctcatctctgctaatcaaaatgtctctggttgcaaatgaggagtttcaacacattcttcgtgtgttgaatactaatgttgatggtaagcagaagattatgtttgcccttacctctatcaaaggtattggtaggcgattggctaacattgtctgcaagaaggctgatgtcgacatgaacaaaagggctggtgagttatctgctgctgagattgataacctcatgacaatcgttgcaaacccacgtcagttcaagatcccagactggttcttgaacaggcagaaggattacaaagatggcaagtattctcaagttgtctccaatgctcttgacatgaagctgagagatgatcttgaacgtctcaagaagatcagaaaccaccgtggtttgaggcattactggggtctccgtgtcagaggacaacacaccaagactactggtcgcagaggaaagactgttggtgtctcaaagaagcgttaagaaagatccaatgttgctacttacttctgtattggatacttcataaggacctgtttttatttcgtactaggacctttttgtgtgacgcttttcgagctttttgtgatcacattcctctgtttttcattcttgatccctccagtgccctgaatagtcttatttattttaatttccagcttaaaaaaaaaaaaaaaagggcgagcgctgtacagtatacaagcttacgtacgcgtgcatggggcgtcatagctcatagatagtgt

SEQ ID NO: 90391 - DNA, 705 bp, Arabidopsis thaliana columbia
cccaagcgtccgcttaagctgtggtggcgcctccagagtctggtaaaagagcttaatcctcctctcgcgatctttctcggcatccaaaaatgtctctagttgcgaacgaggagtttcagcatattctgcgtgtgctcaatactaatgtcgatgggaagcaaaaaattatgtttgctttgacctcaatcaagggtattggaaggcgattggctaacattgtgtgcaagaaggctgatgttgacatgaacaagagggctggagaactaagtgctgctgagattgataacctcatgacaatcgttgctaaccctcgccagttcaagatcccagactggtttcttaacagacaaaaggattacaaggatgggaaatactcccaagttgtttccaatgctcttgacatgaagttgagagatgatcttgagcgtctcaagaagatcagaaaccatcgtggtctgaggcactactggggtctccgtgtacgtggacagcacaccaaaaccaccggacgccgtggaaagactgttggtgtttccaagaagcgttaaaaagagtttgagcttggttcaatggctttgttttgttttttttgtattgttgttttttgcagaagagatagtttaagagatgttgtttcatcaaaagacggtcttagcttttacaatatataattgaatccaaaaactagtctctatttattttacc

SEQ ID NO: 90392 - DNA, 537 bp, Arabidopsis thaliana columbia
  unsure (1)..(537): unsure at all n locations
cctgcaggtaccggtccggaattcccgggttgacccacgcgtgcgagacaagacagaatcttttatttaattcattttttatttgaaagtacataattaaaaaaaataattaattaatcgtgatgagggcgttgaattcgcggctagttctgatcgacatcaacagctcctggcaagcttcgcgccggttaatctcagccaccgcaaccgctttttcatctgattcctcttcctcattccgtcggacacgtggtgcgcgtcagagaatcgcttcatcgaaatccccggcgtcgtcaccgtctcctgttcggagaccatctgatggattcagtttcgatgttcggtcaccgtcatctgattcatcgatctcatcacggaagtcaccgacgacggctccgcctacggtggagctcgacgctttcctagagattcttcctccggcgacgaggaaggagcttggtaagcacgagggcgattgaggaatttatcgaagtagtnatgggtttagggngaaancacttnnaanttccctccgtg

SEQ ID NO: 90393 - DNA, 569 bp, Arabidopsis thaliana columbia
atgatactccagcgtctctacgactcactatatggaaagctggcacgcctgcaggtaccggtccggaattcccgggtcgacccacgcgtgcgccccaaatcacatcttcaagaaccctaataaattcccagagattcctctcatttaatcacttcagattcgaaaaaagttctctctttttcccaaaaaaaactttctcatacaatggactctactaccacacctccttctctccgttcgaatactagatccgctttgcgtctagctcgaaacaacaaaactctcgtaaaatctcacattccatctctcgatttggttttattgtctccgaagaacaacaacggtactccttacccatcacctgtttctctcagttcaccatcttctcctgttactcttcgtgagattctccttttatctccttcccctcttcgtaaatcgagaacccgtttaagcaatcggttcgatatggaagctgcggaggctgctgtgacggcacgacggagtaagacgaagggagggcaaaatggtcttttggcctcgccgtcgccgaggaatttccggaggtc

SEQ ID NO: 90394 - DNA, 557 bp, Arabidopsis thaliana columbia
  unsure (1)..(557): unsure at all n locations
cagctctcctacgactcactattnggaaagctggcacgcctgcaggtaccggtccggaattcccgggtctacccacgccgggcgaaggacactgcccgataccagtattaccaaggcttactatgcctggtcatcgcattgatccaccttgtggaagggttagtttgatctctggaccacaacatcttgttgctgatttggaaacttgctccctacatctgaaacatttagctgctgctgcaaaagatgcagttgccgaaggtggttctgttcctggttgtagggctagattatggcgcagaataagggagttcaatgcttgtatcccgtatacaggtgtgcccgctaatagtgaagtccctgaggtgactttgatggcattaattacaatgctaccatcaactccaaatctccctgtagacgcccctcctttgccacctccttcacccaaagcagcagcaactgtcattggctttgttacatgtttgcgtangttattgtcatccaggagtgcagcatcccatataatgtcattccctgctgctgttaacaggata

SEQ ID NO: 90395 - DNA, 544 bp, Arabidopsis thaliana columbia
atgatctccaggtccctacgactcactattgggaaagctggcacgcctgcaggtaccggtccggaattcccgggtcgacccacgcgtccgaattgatctgatccgagtctttcaagcggggagagaaagagagagattcgttagtacattgatctaatggcgtcgaattcggaagcgggaggatcggcggattacgaaacattgatgtcgacatcggacgttgagctattgaagagggcgtggcgtaacgagaaggcggcgccggagattcttcagtacgaaggagctcttgtcgatagagccaaagaacagatcgaattagtggaagaaacaattgaagattatgtggaaaatggcatagatcctctggtggtgtctctatatcagatggatttggacagagcccagtttctactcagatcatatctcagagttaggcttctcaagatagagaagtttatgttccacaacctcaactcagaagaagctgaaaggcgactttctgagcaagagaaagtgtttgctaccaggtgtgctgatgatt

SEQ ID NO: 90396 - DNA, 920 bp, Arabidopsis thaliana columbia
  unsure (1)..(920): unsure at all n locations
cagctctatacgactcatatagggaaagctggtacgcctgcaggtaccggtccgggaattcccggggtcgacccacgcgtccggggaaaacgtctatcgggagactcctcttcgagctcatcttcttctctctctttttatctttggttgtgcgatctcctttctctttcaatctccaaggattttactgtgagatatttggcgggaaaatgtcggggaaaggtgctaaaggtttgattatggggaaacccagcggtagcgacaaggataaggacaagaagaagcctatcactcgttcttctcgagctggtctccagttcccagttggtagggtgcatcgtctgttaaagacaaggtccactgctcatggaagggttggagcaactgcagctgtttacacagcagcaatattggagtatctgactgcagaagttttggagttggctggtaacgccagcaaggacttgaaggtgaaacgtatctcgccgaggcatttgcagcttgcgattcgtggagatgaggagctcgatactctcatcaaaggaactatagctggtggtggagtcatccctcatatccacaagagtctcatcaacaaatccgccaaggaataggacttttttagttacccgctttgttctgtgttgcttttctgttttctaaatgtttttaagagttgttgtttgataagatgctagagaagctctttttaggatcgtttgctattgttcgttcgatcagcgtactttgtgttagagacgccagtcgatttatctatctttaaaaatgtattcgaatgattatccaaaaaccatttctgactaaaaaaaaaaaaaaaaaaaagggcggccgctctagaggatccaagcttacgtacgcgtgcatgcggcgtcatagctcnnnnnnnnnnnnnnnnnnng

SEQ ID NO: 90397 - DNA, 628 bp, Arabidopsis thaliana columbia
  unsure (1)..(628): unsure at all n locations
nnnnnnnnnnnnnnnnnnnnnnnnnnnnnnnnnnnnnnnnnnnnnnnnnnnnnnnnnnnnnnnnnnnnnnnnnnnnnnnnnnnccacgcgtccgcccacgcgtccgggacaatcctcaagttgatctagagaaagtgaaacgtggcttgagaaaagtacataatcccgtagttgagaactctatccaacctcaactggttccacagattgcagttgaaaagccaaatggtagtttagaagaatctgtgaatgcctttgatgaagagaaagaagatgaagtggctgagacagtggtgcaacaacctgaagagttgatacaaactcatacaccattggggaccaatgaatctcttgattccacattggtcaaccaaatcgaagagagtgaagaaaatgtaatggccgaggaaaaggaggatgtaaaagaagagaggactcccaaacaaaaccataaggagaattcagctgggaaggagaatcagaaatccgggaaaaaggcttcttcggttactgctactcaaaccgccgagtttcaagagagtggtaatggtaatcagactagtagcccgggaataccgagctatatgcaggcgactaaatccgctaaagcaaagctgaggctacaagg

SEQ ID NO: 90398 - DNA, 703 bp, Arabidopsis thaliana columbia
  unsure (1)..(703): unsure at all n locations
cnnnnnnnnnnnnnnnnnnnnnnnnnnnnnnnnnnnnnnnnnnnnnnnnnnnnnnnnnnnnnnnnnnnnnnnccacgcgtgcgcggacgcgtggggtcagaagctaatggacccaggaagcctaacagctttccacatcctttaatccaagaaattgattcagaacttccagttgtgcagcctgcgcttcaactgacacacagaatatttggttcttgccctccaatgcaaagttttgacccagcaaagttgctcacggactctgggaagctgcagacacttgatatattattgaagcggcttcgagctggaaatcacagggtgctcctgtttgcacaaatgacaaagatgctgaacattctcgaggattatatgaactatagaaagtacaagtacctcaggcttgatggatcctccaccatcatggatcgccgagatatggttagggattttcagcataggagcgatatttttgtattcttgctgagcaccagagctggaggacttggtatcaacttgacggctgcagacactgtcaatttctatgaaaagtgattggaatcccaccttggatttacaagctatggacagggctcatcgtcttggacagacaaaagntgtttacttgtcttatcgtcgtcatctgtaaggagacggtggaagagaaaattttgcacagggcaagtcaggaaaatacagttca

SEQ ID NO: 90399 - DNA, 540 bp, Arabidopsis thaliana columbia
cagctctcctacgactcactatatggaaagctggcacgcctgcaggtaccggtccggaattcccgggtcgacccacgcgtgcgcaaatctctgtttccctctctttatctcctttgttgcgtactgattctctaagccgtgacggtgtgccagtgtctgtccttgtcttattatcactgccgcagttcctattcgtgcccgccaactgttcgtcaaattgcctgaaccaattcttccgacaatcctaaaagtttggattttggtgattctaaaaactagggttttattcaaattactcaagaatggctactactgcgaatggaaactctaagaaaagagatggtggtctatcgtcgcttgcccctcgcaaaatcaacgtgcagaaattctcagaggctcgagcaccagagctcgaatctcttcactccattgtgtctgagcgtttgaacaaggactttcgatcaaagaggaataagaggagaaggaccaattcttacaataatcaacctgcgaagaagcgtaatataaagaggcaaaaat

SEQ ID NO: 90400 - DNA, 570 bp, Arabidopsis thaliana columbia
atgatactccagcgtctctacgactcactattgggaaagctggcacgcctgcaggtaccggtccggaattcccgggtcgacccacgcgtgcgggagaagatcaccgtcgtttattctcgacgagcgacgaagctcgaattcacctccaatggcggatacaacacgaggtccttttcaaaaccctgattccatctccgcttattaccaaactcgcgcggcgcatcacggtgtcattacaagcgactggctagcccaagctcaagccgccgttggcggcgtctcaggcgatgcccagcatgacttatccgtaactgatctcgggaacgagaagtcgtttaatgtaattgaagagttcaataactggagaaaacaaccggatctggctgaagccgtcgcggctatacgagctttggctgctgttattcgtgcgagcgaagcgagcaccatgatggagcttgaaattgagctcataaaggcttctgatacactcaagtcgtgggacaaaacgtcgatctctttgacagctggatgcgatttgtttatcagatacgttacgagaacgtctgcttt

SEQ ID NO: 90401 - DNA, 555 bp, Arabidopsis thaliana columbia
cagctctctacgactcactatatggaaagctggcacgcctgcaggtaccggtccggaattcccgggtcgacccacgcgtgcgcggacgcgtgggttcacatttttatacaagatcacattttcactgaatcttcctctgcgtctctcaggaggaagaagatcattcagttgaagcacacatttacagggttttgttgagaggcaatggaacggggagaagagtttcaagaagaagatgtgtggtcagttttgagagaaagtgaaactcaaggtcctgaaatgaaaatgtccaaaagtaacaatctcttcgcagcctcttcctcatcttctgcgaggtacattcctaaaggcaacgaggtctctggaggggcaaaacaggcatctgctccaatgaatatttcctgactgggccaaggtttatgggtattccaagaagaacacatgcagccccttggctttcatgggccattgacgatgatgatgaaggcctcatggttcctgcactgaagtaggagcgggaagactggcgagaacgcagatgcgatggttgcctat

SEQ ID NO: 90402 - DNA, 681 bp, Arabidopsis thaliana columbia
  unsure (1)..(681): unsure at all n locations
cnnnnnnnnnnnnnnnnnnnnnnnnnnnnnnnnnnnnnnnnnnnnnnnnnnnnnnnnnnnnnnnnnnnntacccacgcgtgcgctgatgattactagtgacaagacaatcgatgctcgtggcgctaacgtgcacatcgcatatggtgctggtatcacgatgcagtacgtgcacaatatcatcatccatgggcttcacgtccaccacatcgtgaaaagcagtggtggtttgataagagattcgattaaccactttgggcatagaggagaggctgatggagatggtatctctatctttggggcaacaaacatttggcttgaccacatttctatgtctaaatgccaagatggacttatcgacgctataatgggttccaccgcaatcaccatctctaactctcatttcacccaccacaacgatgtgatgttgcttggtgcacaaaacaacaacatggatgacaagaagatgcaagtcacagtggcttacaaccatttcggaaaaggacttgtgcagaggatgcctagggtccgatggggtttcgtccacgttgtcaacaatgactacactcattgggagctttacgcgatcggtggtagccaaggtcctaccattctcagccatggaaaccgtttcatcgctcctcctcacaaacaacactacagagaggtgacaaagagggatt

SEQ ID NO: 90403 - DNA, 513 bp, Arabidopsis thaliana columbia
  unsure (1)..(513): unsure at all n locations
atgatctcgccggctannnnnnnnnnnnnnnnnnnnnnnnnnnnnnnnnnnnnnnnnnnnnnnnnnnnnnnnnnnnnnnnnnnccacgcgtccgggcgaaaaagaacccgtcgccgtcgaatcagccggcttgcccaacggcctagtaagtcatggtaactccaagacacggcgcgtatacgaaacagctcgatctctgcataccggtgctgtgaaagatcttctctctctcggggtctgtgagagatgtattttccgattggtatccgtcgaggcttttgattccgatatttcatcagtctcgacttcaactctgcgcagctggctcaaatccggtgatgatgaaactagtgcatcggaatctagctgttccacaatctgcattgtttgtttaggtatattgcagttcgttttttccgatgtcaaaaaagagctggtgaaatcggattctagtagtgattacgttgcaaggataacggacttggtgaagcaggatcgtcatgagttcgatag

SEQ ID NO: 90404 - DNA, 649 bp, Arabidopsis thaliana columbia
  unsure (1)..(649): unsure at all n locations
nnnnnnnnnnnnnnnnnnnnnnnnnnnnnnnnnnnnnnnnnnnnnnnnnnnnnnnnnnnnnnnnnnnnnnnnnnnnnnnnnnnccacgcgtccgatcgagcatcgtcgtctccaacagccaagagaagcagaagcttgaagaatctctgtaatctaaaaaatgggaaaggtccacggttcattggctcgtgccggtaaggtgagaggtcagacacctaaagtggctaagcaggacaagaagaagaagcctcgtggtcgtgctcataagcgtctgcaacacaaccgccgtttcgtcaccgccgttgttggttttggcaagaagagaggaccaaactcatcagagaagtagatagaagaaggttttacccttttcagattttatgggatgtttttgatattgtgtcattagttggtccaaactcatcgatatcaaagtggtttaaccttggttatctacaaatcagtggatgttgtgtcaattttcttgtcaatttgatttttgtttctcctcagattagacttaagttcttgaattattgaacctctcttttgcagttatgtattcgtgtgtaccctttaaaaaaaaaaaaaaaaagggcgcccgctctagaggatccaagcttacgtacgcgtgcatgcgaggtcatag

SEQ ID NO: 90405 - DNA, 503 bp, Arabidopsis thaliana columbia
  unsure (1)..(503): unsure at all n locations
ccnnnnnnnnnnnnnnnnnnnnnnnnnnnnnnnnnnnnnnnnnnnnnnnnnnnnnnnnnnnnnnnnnnnnnnnccacgcgtccgggaaaaagcttgaagcgtcgtgactcgtgaagcttcttcatctttagtccaccgaacataaatggctcagcaagtactcggctgcacgagccgccccatccgcgtttctcttcaccggtgttctgttattaccaccagtgacactatcagaaggaagaatctccgattcgttagaaacccgagattgtcgttttctcttcaatcttcaactagaaattatcgtctgccttcgattaattgctcgacggtgaatggagcagtagcggaaactgcggaatattacgaaggagaaggagataacgtttcacttgctgagaaaatccggcaatgtattgatttcctccggacgattttaccaggtggaagctggtggagtttctccgatgaagttgatggtaggttcattgctaagcctgtga

SEQ ID NO: 90406 - DNA, 531 bp, Arabidopsis thaliana columbia
cagctctctacgactcacttagggaaagctgctacgcctgcaggtaccggtccggaattcccgggtcgacccacgcggccgcccacgcgttccgggagtagaataccttattaccggtttaatcaaaccggttcagtttccaaatggataatctactctgcgaagaatcttggcccgcgagtcctttaaccccggagcctttaccaaacttccgtcaccgttctcacgacaatgacgtcgtgaagatgtatccagagatagacgcagcgacgatggaggaagccattgctatggacttagagaaagaattatgttttaacaatcatggagacaagtttgttgagtttttcgtctcaaagaagttaaccgattataggttccatgcgtttcaatggctaatccagactcggagtcggctaaatctttcatatgaaacggtattttccgccgctaattgttttgatcggttcgtctacatgacttgctgtgacgaatggacgaattggatggtggaactagttgcggtaactt

SEQ ID NO: 90407 - DNA, 504 bp, Arabidopsis thaliana columbia
  unsure (1)..(504): unsure at all n locations
nnnnnnnnnnnnnnnnnnnnnnnnnnnnnnnnnnnnnnnnnnnnnnnnnnnnnnnnnnnnnnnnnnnnnnnnnnnnnnnnnnnccacgcgtccggtttttagccgaggtctcgtcaaaagcatgctgcggaaaaacccagaagttcggccatctgcctcagatttacttagacatccacatcttcagccttatgttctggatgtcaagcttaggctcaataatcttagacgcaaaacattaccgcctgagttgccgagttccaagaggattatgaagaaagctcatttttctgaaccagctgtcacttgtccagcctttggagaacgacaacataggtctctctggaatgacagagctctgaatccagaagctgaagaagacactgcatcttctattaaatgtattagtcgcagaatttcagatttatcgattgagagcagcagtaaaggaacattgatatgtaagcaagtttcttcaagtgcatgtaaggtctcaaagtatcc

SEQ ID NO: 90408 - DNA, 539 bp, Arabidopsis thaliana columbia
  unsure (1)..(539): unsure at all n locations
agctctcctacgactcactatanggaaagctggcacgcctgcaggtaccggtccggaattcccgggtctacccacgcgtgcgatacaattcgtcgatatgtgtgatcccactagagacgatggctccagccgaagcagagtggtgagtactatgcaaaagagggcgtattttcagagacaatggccgttggtcgatgtcgtaagagcgtcagtcgttgtgattgtgcactttttgtgtctcttggcgccgtttaacttcaaatgggaagctttacggttcggtttggtgctcttcgcgttgactacactcagcatcacattctcattccataggaacttgtctcaccgtagcttcaagataccaaaatggctcgaatatccttgggcttattctgctgttttcgctcttcagggtgatccaatggattgggtgagcatacataggttccatcaccagttcacagattcggaccgcgacccacatagccctaaagaaggattattgttcagccatatcttgtggatatttgacacccaat

SEQ ID NO: 90409 - DNA, 570 bp, Arabidopsis thaliana columbia
tgatactccagctctctacgactcactattgggaaagctggtcacgcctgcaggtaccggtccggaattcccgggtcgacccacgcgtgcgcccacgcgtccgcaagagttgaatattgaggttcctactgagattcagtgtatcggaatacctgcggttatggaacgtaagagcgttgtattgggttcgcataccggttctggcaagactcttgcttacttgttgcctattgttcagctgatgagagaagatgaagcaaaccttggtaaaaaaacaaagcctagacgtcccaggactgttgttctttgtcctacaagagaactatctgagcaggtttaccgtgtggcgaagtccataagtcatcacgcgaggtttagatctatattggttagtgggtggttctcggataagaccccaggaggattctttgaacaatgcaatagatatgggttggttggaacccctggtaggattcttcagcatatccaagaaggaaacatggtggatggagatatccgatatttgggattggatgaggcagatactatgtttgatcggggctttggtcc

SEQ ID NO: 90410 - DNA, 809 bp, Arabidopsis thaliana columbia
  unsure (1)..(809): unsure at all n locations
tgataccgccnnnnnnnnnnnnnnnnnnnnnnnnnnnnnnnnnnnnnnnnnnnnnnnnnnnnnnnnnnnnnnnnnnnnnnccacgcgtccggaaagagagaagaagaagcacctctcatggcgaaccagcttcttcaccatcttccgattccttttcctctccaccgtcacttctacctcctaaacgccgccgttttatagcttctcctcccgaaaatgctaaacccacattcctcaaatctctcaccgacgcttttttagattcttgtagaggaagagaatatttttaaggaggttgttttcgatggagcattacgaggttcttgagcaaattgggaaaggttcttttgggtcagctcttcttgtgaggcataaacatgagaagaaactttatgttttgaagaaaattcggttagctaggcagactggtagaacaagaaggtctgctcatcaagagatggaattgatctcaaagataaggaatccatttattggtggaatataaagattctttgggttgagaaagggtgctatgtgtgcattgtcataggctattgcaaaggcggggacatggccgaagcaataaagaaagccaacggcgtagagttctctgaagagaaactctgcaagtggctggtacaactcttaatggctcttgaatacttgcacgccagtcacattctccatcgcgatgtcaaggtgtacaacatattcttgacaaaggatcaagatatacgcctaggtgatttcggacttgcgaagatcttgacatctgatgaccctgcttcttaagtgggtggaacgcgagc

SEQ ID NO: 90411 - DNA, 534 bp, Arabidopsis thaliana columbia
  unsure (1)..(534): unsure at all n locations
cnnnnnnnnnnnnnnnnnnnnnnnnnnnnnnnnnnnnnnnnnnnnnnnnnnnnnnnnnnnnnnnnnnnnnnnccacgcgtccggaagaaactccccaagccgctgttctgctatcggattagacttcctacagaaaaggagctcgagatgaagatctcaaaggaagtgaagaaaacccggttctatgagtcgactttattaaaagcttacaagtcatatctgcagaagttgattatatttgaaaagcagtcagtatataaccaaattgccaatcggtgcctttgtacattgctggaagcagttcctcacttcaactaccgtgataacctgttaattgctgttgtcagaaatatcagctccccagatgaagtcgtaaggagactctgttgctctactatcaggtatcttttctcaaatgaagggaaacatggtggtgagctgaccgtgcaagctgtacgcctgattgctgatcatgtcaaagctcacaactgccaacttcatcctaatgctatcgaggtgttcatgtccattcgc

SEQ ID NO: 90412 - DNA, 736 bp, Arabidopsis thaliana columbia
  unsure (1)..(736): unsure at all n locations
nnnnnnnnnnnnnnnnnnnnnnnnnnnnnnnnnnnnnnnnnnnnnnnnnnnnnnnnnnnnnnnnnccacgcgtccgcccacgcgtccgctgttcttctccatcttcgattttacctattattgatacgagaagtgggaatttgcgatgcacatttcagtctcaggtttcttgtgggattcagagagatgataatggacgccgtgtttggcggaggagaacattgacgaagaaggacgatatgttgcgttacaaaatgcaaagagttccatttgtggaagaacaagtaaggaagataagagaagttgggaaggtaatgacaatggacatagagcagcttcttttgagggaagacaatcggtttgaatttgtcaatagcgtagcagctgaagcaacagagtacgtggacaagaacagagacgaatatggaggttccaaaaaaagccatctttcatgttctaagcaaccgtgtgaacgatctcggctttgatcgccctgaggcttatgtagaagctgatccttacaaacccggtcctggctatttgttggagtactacacttgatatattataacaaaaagtgtcaatgtactttacagcttttgttcttgtattaccaaaaccaaatcaatgccattcacagcttntgttgttttaaaaaaaaaaaaaaagggcggccgctctagaggatccaagcttacgtacgcgtgcatgcgacgtcatagtaattctatagtgt

SEQ ID NO: 90413 - DNA, 453 bp, Arabidopsis thaliana columbia
gtttatcagtgcaacagatacaatcaaaaggatgaagagtaatattttcgggatggaaggcaatatggaccagcttcttcagaagataatgtcagtacaatcaaagagtgatggggtcaacacttctcttttcgaaaagagagaacatatagagaaactgcaccggactcgtaatcttcttcgtaaagttcagttcatctatgatttacctgcaagactgcaaaaatgtatcaagtcagaagcctatggcgatgctgtcaggttctatactggagcaatgccaattctcaaggtatatggcgatacatcattccaagactgcaggcgagcttccgaagaagctatagaaattatcataaagaacttgcagacgaagctattttcagattcagaatccatacaggcgagagctgaagctgcagtgcttcttaagcagttagatgtccctgttga

SEQ ID NO: 90414 - DNA, 624 bp, Arabidopsis thaliana columbia
  unsure (1)..(624): unsure at all n locations
ggtgggggggggtaggatttcgcggaggaactnagtacgactcactttatagggaaagccggtacgcctgcaggtaccggtccggaattcccgggtcgacccacgcgtccgaatttctcgtagaagaagatcaaatcgctctgaatatgacatcaattgaggcaacagaaacgcttaacgctcctccaaagcttcagatctggaacaacgctgccttcgacgatggagattctcaaatcacttccgccatcgaagcttcttcttggtctcacctcaacgaatcattcgattccgattgtagcaaggagaatcagtttccgatttcggtttcctcttcgctccaatcctcagtctcgatcaccgaagctccgtcagcaaaatccaagaccgtgaagaccaaatccgccgcagatcggagtaaaaagcggagatatcgatgcagagatcgaagaagtagagaaggagatcggacgattatcgacgaaattggagtcgctccgattagagaaggcggagcaaaccgcaagaagcattgctatacgtggaagaatcgttccggcgaagttcatggaatcatctcagagacaagtgaaattcgacgattcgtgtttacaggatcgaaat

SEQ ID NO: 90415 - DNA, 359 bp, Arabidopsis thaliana columbia
gcctgcaactgcaacagttgagattttgagcgtgtcaaggattctgattgataacgatattcaagttcagcaatctcattgcagtagaaaatggaatcgaatcatcctcacttcaagctaattttgggatcttcttcgattgctcgacgtaagatactaacagatatgggataccaattcactctcatgagtgctgatattgatgagaaaagcatccgcaaggagaaacctgaagagttggttttggctttagctgaggcaaaggctgatgctattgtgtcaaaactacaaattagtgaatgtgaagatgaggaacaaccgagagtcttgattgcatcggatacagctgaagcaatcat

SEQ ID NO: 90416 - DNA, 894 bp, Arabidopsis thaliana columbia
  unsure (1)..(894): unsure at all n locations
agatatgccagcactatacgactcacttagggaaagctggtacgcctgcaggtaccggtccggaattcccgggtcgacccacgcgtccgcccacgcgtccggctgaagtctctgacattgcaattgcagtacgtgaaggcgcagatgctatcatgctttctggtgaaaccgcacatggaaagtttccgctgaaagctgttaacgtaatgcatactgtggcgttgagaaccgaggcaagtctacctgtcagaacctcggcatcccgtaccactgcttacaagggtcacatgggccaaatgtttgcttttcatgcttctataatggcaaatacactgagctcaccgctaattgtatttacgagaaccggatccatggcagtgcttctaagccactaccgcccatctgcaacaattttcgccttcacaaaccagagaagaataatgcaaaggcttgctctttatcaaggtgtcatgcctatatatatggagttctcggatgatgcagaagatacatatgcccggtctctcaaactcttacaggacgagaatatgctcaaggaaggacaacatgtaactcttgtccaaagtggctcgcaacccatttggcgtgaagaatcaacacatctcatacaagtccgtaagataaagataggtggatgatgtttttacttcttgagctacacaacatcttgcttttactcagctttctttctcttacacagttcgatccatatttttttgaatcactcacagtgaatcaaacaaccatataaaattttaagttattgaagctttttttctggttnnnnnnnnnnnnnnnnnnnnnnnnnnnnnnnnnnnnnnnnnnnnnnnnnnnnnnnnnnnnnnnnnnnnnnnnnnnnnnnnnnnnnnnnnn

SEQ ID NO: 90417 - DNA, 2301 bp, Arabidopsis thaliana columbia
atgttaagatctttaggtcttggattgcttctgtttgctcttcttgctctggtttctggtgataacgattacgtgagctgtaattgtgacgacgaaggtttcttaagtgtccacaccatcttagaatgtcaaagagtgagtgatctcttaatagccattgcctatttctcaatacctctcgagcttctctacttcattagcttctccaatgttcctttcaaatgggttcttgttcaattcattgcctttattgtcctatgtggaatgactcatttgcttaacgcttggacgtattacggaccacactctttccagcttatgctttggcttaccatctttaaattcctcacggcgcttgtctcgtgtgccacggctatcacgctcttgactttgattccgttgctgttgaaatggaaagttagagagctttacttgaagcagaatgtgttggagcttaatgaagaggttggattgatgaagaggcagaaggaaatgagtgtgcaggtgagaatgcttactcgggagatcaggaaatcgctcgataagcatatgattctgcggactactctcgttgagctatccaagattcttgatttacagaactctgctgtttggatgcctaacgagaacagaaccgagatgcatttgactcatgagcttagagcgaatccgatgaggagtttcagggtaatcccgattaatgatcccgatgttgttcaggttagggagaccaaagtagtgacaattttgaggaaaaactctgttcttgcggttgagagcagtggttgtggcggttcggaagagtttggaccggttgctgcaattcggatgccgatgcttcacggattgaatttcaaaggaggcactcccgagtttgtggatactccttatgctataatggttttggtacttccgagtgcgaattcacgggtttggaccgataaagagatcgagatagcggaagttgttgctgatcaagtagcggttgctatctctcatgcctcagttcttgaagaatcacagttaatgagagaaaaactcggtattcaaaaccgagctttacttcgagcaaaacagaacgcgatgatggcaagtcaagcgaggaacacttgccagaaagtgatgagtcatggaatgaggagaccaatgcacacaattcttggtctactctccatgtttcagtccgaaagtatgagtcttgaccagaaaatcatcgttgatgcgctcatgaaaacaagcacagttctctcagctttaatcaacgacgtgattgacatttcgcctaaagataacgggaaatctgcattagaggttaaacggttccagctacattccttgataagagaagccgcttgtgttgctaaatgcttaagcgtttacaaaggttacggttttgagatggatgttcaaacgcggttgcctaatttagtagtaggagatgaaaagagaacgtttcagcttgtgatgtatatgcttgggtatatcttggatatgactgatggaggcaaaaccgttacgttccgagttatctgtgaaggtactggaacaagtcaggacaagagcaaaagagaaactggaatgtggaagtcccatatgtccgatgattccctcggtgtgaaatttgaagttgagattaatgagattcagaatcctccattggatggttcggctatggctatgagacatattccgaacagaagatatcatagcaatgggattaaggaaggcttgagcttaggcatgtgtagaaaacttgcacagatgatgcaaggaaacatatggatatcacctaaatcgcatggacaaacacagagtatgcaattagttctgaggtttcagacaagaccatcgattaggagatcaatcttagcaggaaatgctccagagcttcaacatccgaattcaaattccattcttcgtggtctaagaatcactctagcagacgatgatgatgtcaacagaaccgtgactaagagacttcttgagaaactcggctgcgaagtaactgctgtctcgtctggatttgagtgtttgaatgcgttgtcaaatgtggaaatgtcgtatagagttgtgattttggatctgcagatgccggagatggatggtttcgaagtagcaatgaagataaggaagttttgtggacatcattggccattgattatagctttgactgctagtactgaagatcatgttagggaaagatgtttgcaaatggggatgaatggtatgatccagaaaccggttcttttgcatgttatggcttctgagcttagacgggctttgcagaccgcgagcgagtga

SEQ ID NO: 90418 - DNA, 491 bp, Arabidopsis thaliana columbia
atacgactcatatagggaaagccggtacgcctgcaggtaccggtccggaattcccgggtcgacccaggggtgcggtgtaagctgccgccattaacgaagcatgcggcgaaaaaagaagatgaatagcgttggattgagcaaacgtttcttctccgatcgccgctctcttcacgggatcaacaatgctctcttgaaaacagtgttcaccggtcggaaaccgattctcggattctccggccgatcgattcacgagctacgcaaaactgggaatttcgtaatccctcgtgttttctccgtgtcgcgaaatctaacgacgaaggcttcgtcttcttcttcgaaacaacctgcgtttctacgatggtatttgagaaagctcgaatcacatccttttatgactaagagtatcactactttctgcctctatatggctgcagatctcacttctgcagaggatcccaatgtgagccaaccgggctttttgacttgagtag

SEQ ID NO: 90419 - DNA, 564 bp, Arabidopsis thaliana columbia
ataccactcaccttagggaaagctcgtacgcctgcaggtaccggtccggaattcccgggtcgacccacgcgtccggtcggtgatcggagatggagttccgggagaagcttttgaagttcaagttgcaaatcgtgtttgcctttgttttatctctcctcaccgtagctctcgtcgcttattctcccggtttcctcaccgttctatcttacttctggccactttttctctccacggctctctttctcgctgccgttttcttcttcgcacgcacctccgatctcccggtttcgtctaccatcatcccaggcgaaggcgcaggcttaaaagtggcggcggaagggattcttgactatgtcgtcggcggacaacacgaagacattctctttgatagcttcaccaaacttgactaagtatgagacctctctgttcttaattccttaagtatttccgttaattagttgttccttttttaatactagagaacatacaattacaaaatgtaatatcttcccgaggaataaaatcttgcttaagttaaagcaaataaaaaaaaaagaaaagggc

SEQ ID NO: 90420 - DNA, 571 bp, Arabidopsis thaliana columbia
  unsure (1)..(571): unsure at all n locations
nnnnnnnnnnnnnnnnnnnnnnnnnnnnnnnnnnnnnnnnnnnnnnnnnnnnnnnnnnnnnnnnnnnnnnnnnnnnnnnnnnccacgcgtccgtatggctcaaaggttgcatgagcgtctccaagagtgcaacggggatgagattctaaaagcagaggctggtgccaaagttcagaagttcactgaatgggctctcaaatgtataggtttccactcccgatgccagggggcaaaggatagagttagccaaaattcggctgctgaaattgaactacaactttctgctttcaagatgttcttagatctagcaggaaaccatctctcaggaagagacttcactgaggcctttgatgcagcttgtttcccgctcactctgttctccaactcgtttgatcctggctgggcatctgggatgtcagctactgttatacagggactgctcggtatgcttgttgaaggtggcgcagataatgtgaaccaatgtttccttgaagcttcacgttttggtagtacagaacttgtccgcgtcttattgcagattgcccaaaggaacagcttagatgttgatgtg

SEQ ID NO: 90421 - DNA, 1154 bp, Arabidopsis thaliana columbia
  unsure (1)..(1154): unsure at all n locations
attctctctgaatctcagtgaattctcataaaatgagagggatggtgagttttgccgtttgggctctctttgctgctttactctcacagcagctctttgcttctgttgcttccgtaaggtttgaggatgccaaaacatactacttatctcctccctctggctcacatggaactcctccatcacacactccaactccacacactccatcacacacgccaactccacacacccctccttgtaactgtggaagtccaccttcccacccttccacgccttcacacccttccactcctttccaaccaacgccatcacaccctccttctggtggatattacccatctcctccaccaacgaactccggttgttgtgactccaccatcacccattgttgatccaggcacacccatcattggaggaagcccaccaactcctatcattgacccaggcactcctggaactcctttcattcatgttccagtgattcctcgcgtccgcgctggaacatgcgatttctggagaaaaccaccctacattgatatggggcttgcttggatggtggggaactgttggaggagcttttggtacagtcagtattcccagtagcattccagggtttgatcctcacatgaaccttcttcaggcactttccaacacccgctctgatcccattggtgctctctaccgtgaaggcacagcttcttggttaaactccatggtcaaccataagttccctttcacaacccctcaagttagagaccactttgttgcaggactttcctcaaacaaggcagccacaaagcaggcccataccttcaagcttgctaatgaaggtcgtctaaagcctagagtctgaagttaagagagtttcatttctcagtttgtttgttggtttatatcaaaaacaatcttaattaattatcttgtcatttgtgttgctcagtagaatttgaagtgtcctatagtctctagtaatatttatgatggatacttccttttatttaatgttgttgtttcaaaaaatttcttgatcttaaataagatttagtagttcctctgtttctcaaaaaaaagnnnnnnnnnnnnnnnnnnnnnnnnnnnnnnnnnnnnnnnnnnnnnnnnnnnnnnnnnnnnnnnnnnnnnnnnnnntagaattc

SEQ ID NO: 90422 - DNA, 1134 bp, Arabidopsis thaliana columbia
acctgtcccggatttccgggggcggccccacgcgtccgccatttgcaaaaaacttctctctgaatctcagtgagttctcataaaatgagagggatggtgagttttgccgtttgggctctctttgctgctttactctcacagcagctctttgcttctgttgcttccgtaaggtttgaggatgccaaaacatactacttatctcctccctctggctcacatggaactcctccatcacacacgcctccttcttctaactgtggaagtccaccttacgacccttctccttcaactccttctcacccttcacctccatcacatactccaactccttccactccatcacacactccaactccacacactccatcacacacgccaactccacacacccctccttgtaactgtggaagtccaccttcccacccttccacgccttcacacccttccactccttcgcacccaacgccatcacaccctccttctggtggatattactcatctcctccaccaagaactccggttgttgtgactccaccatcacccattgttgatccaggcacacccatcattggaggaagcccaccaactcctatcattgacccaggcactcctggaactcctttcattcctgctcctttcccaccaatcactggaacatgcgattactggagaaaccaccctacattgatatggggcttgcttggatggtggggaactgttggaggagcttttggtacagtcagtattcccagtagcattccagggtttgatcctcacatgaaccttcttcaggcactttccaacacccgctctgatcccattggtgctctctaccgtgaaggcacagcttcttggttaaactccatggtcaaccataagttccctttcacaacccctcaagttagagaccactttgttgcaggactttcctcaaacaaggcagccacaaagcaggcccataccttcaagcttgcttaatgaaggtcgtctaaagcctagagtctgaagttaagagagtttcatttctcagtttgtttggtggtttatatcaaaaacaatcttaattaaaaaaaaaaaaaaagggcggccgctctagaggatccaagcttacgtacgcgtgcatgcgacgtcatg

SEQ ID NO: 90423 - DNA, 670 bp, Arabidopsis thaliana columbia
  unsure (1)..(670): unsure at all n locations
nnnnnnnnnnnnnnnnnnnnnnnnnnnnnnnnnnnnnnnnnnnnnnnnnnnnnnnnnnnnnngacccacgcgtccgcccacgcgtccgccaccagaggtttttcccctgcttcgagcgccgtcttggagaagctttttctcgataggctttgcagtgacagggacacagggtttggattgaagcgaaaaaccctagcgtttacgcgtcttctcaagcgaaaaaatccttaatttccacagagaagaatggctatggagatcacacagttccttctggctgcccagtcagccgatgcaagagtccgtactgaagcagaggctagtctcagacagttccaagaacaaaacttgccgctgttcttgttatccttgtcttttgagcttgaaaacaatgataaacctgctgaatcccgtcgactagccggtattctgctaaagaattctctggacgccaaagattctgccacaaaagatcatctggtgaaacaatggtttgcaattgatgttgctcttaaatcccagatcaaggatcgcttactaagaactcttggttcatctgccctagaggcaaggcatacttcagctcaggttattgctaaggtagcctccattgaaattcctcagaagcagtggcctgaacttgttggatcgctgcttaacaatatgactc

SEQ ID NO: 90424 - DNA, 533 bp, Arabidopsis thaliana columbia
  unsure (1)..(533): unsure at all n locations
nnnnnnnnnnnnnnnnnnnnnnnnnnnnnnnnnnnnnnnnnnnnnnnnnnnnnnnnnnnnnnnnnnnnnnnnnnnnnnnnnnnccacgcgtccgcgaatcaatcactctctcttctttagcgtttttattttgtcttcctcgttttcttctacctttttatattttctctcttttcagttttctctagaaaaaaacactagtaatcagtttgcgtttgataaatatttgatgtggcaaaactcttgtggatcttgatgttcaaacattcatgtctccggtgattagtgaaatccttagatctggtttaactatagactcgtcttaatcatagtacttaattttctctgtgtgttttaatatgaataataaaactgaaatgggatcttccacaagtggaaattgctcgtcggtttcaaccactggtttagctaactccggttcagaatctgatctccggcaacgtgatctaatcgacgagcggaagagaaagaggaaacagtcgaacagagaatctgcgaggaggtcgaggatg

SEQ ID NO: 90425 - DNA, 1275 bp, Arabidopsis thaliana columbia
  unsure (1)..(1275): unsure at all n locations
ctcgaatcaatcactctctcttctttagcgtttttattttgtcttcctcgttttcttctacctttttatattttctctcttttcagttttctctagaaaaaaacactagtaatcagtttgcgtttgataaatatttgatgtggcaaaactcttgtggatcttgatgttcaaacattcatgtctccggtgattagtgaaatccttagatctggtttaactatagactcgtctcttagacgcaggacccatcttgttcaatctttctccgtcgtctttctctactggttctatgttttctcataaatcagctctcctttagccctttattattatatattctataaccataataatatatcaaaactatatactataatctttttacataataaactttgggtcctgcgtcttaatcatagtacttaattttctctgtgtgttttaatatgaataataaaactgaaatgggatcttccacaagtggaaattgctcgtcggtttcaaccactggtttagctaactccggttcagaatctgatctccggcaacgtgatctaatcgacgagcggaagagaaagaggaaacagtcgaacagagaatctgcgaggaggtcgaggatgaggaagcagaagcatttggatgatctcactgctcaggtgactcatctacgtaaagaaaacgctcagatcgtcgccggaatcgccgtcacgacgcagcactacgtcactatcgaggcggagaacgacattctcagagctcaggttcttgaacttaaccaccgtctccaatctcttaacgagatcgttgatttcgtcgaatcttcttcttcaggattcggtatggagaccggtcagggattattcgacggtggattattcgacggcgtgatgaatcctatgaatctagggttttataatcaaccaatcatggcttctgcttctactgctggtgatgttttcaactgttagaaaacttcacatcattatcatcgtgagtgagactaatcatcgcagcaggggtaaaactgtaatttttcttataaattatgtgatgatgctttgtttctttattttataagatggttaattagtgtttaaaactgattgtaatgatagacagtgtaagaaatgtgtgatatcatggagatggtgatgtgagtttggtacaaatattttaagatcttttctttctaaaaaaaaaaaaaaagnnnnnnnnnnnnnnnnnnnnnnnnnnnnnnnnnnnnnnnnnnnnnnnnnnnnnnnnnnnnnnnnnnnn

SEQ ID NO: 90426 - DNA, 914 bp, Arabidopsis thaliana columbia
  unsure (1)..(914): unsure at all n locations
gncttgtgccgatgtaatcgccattgccgccagagatgtggtctccctgtccggtggtccttattggagcgtactgaaagggcgaaaagacgggacaatttcacgagccaacgagactagaaatctcccaccaccaacgttcaatgtttctcaactgatacaaagctttgcagcaagaggcttgtcggtgaaagacatggttacgctctcaggtggccacaccatagggttctctcactgttcttctttcgagtcccgtcttcaaaacttcagcaaattccatgacatagatccttcgatgaactatgcgttcgcgcaaaccttgaaaaagaaatgcccgagaacatctaaccgaggcaagaacgcagggacagtcttggactctacttcctcggttttcgacaatgtttactacaagcaaattttgtccgggaaaggagtgtttgggtctgatcaggcacttctaggcgattcccggactaagtggatcgttgagacgtttgctcaagaccaaaaagctttcttcagagagtttgcagcttccatggtaaaacttggaaactttggagtcaaagagactggacaagttagagttaaccctcgcttcgtcaactaaaagccatatccctaacaagcaaaccaaatgagaggtttctttttcttcaaaatttgatttccatttatacttgatactataataatgtagaccgcccaatatatggatcggttttaaaacctcctaattctccatgagttgcagagtatgctttaaaagtaaatttgttctgcttcattgaactgatctataaattcatcagcattttcaaaaaaaaaaaaaaaaaaagcgcggccgctatagaggatccaagcttacgtacgcgtgcatgggacgtcatagtattctatagtgcgcc

SEQ ID NO: 90427 - DNA, 675 bp, Arabidopsis thaliana columbia
  unsure (1)..(675): unsure at all n locations
tgctggagctccaccgcggtggcggccgctctagaactagtggatcccccgggctgcattatatttttggccgccaggcagcaagagctgcagactatagcattggaagattcaggtttctaaaaagactgattcttgttcatgggaggtattcatataaccggacagcatttttgtcccagtattccttctacaaatcgttgttgatatgcttcatccagattttcttctcgtttatttcaggcgtttctggaaccagtcttttcaattcagttagcctgatggcttataacgttttctacaccagtgttcctgttcttgttagtgtaattgataaagatcttagtgaagcatcagtgatgcaacaccctcaaattttgttctactgccaagcgggaaggcttctgaatccaagcacatttgcgggttggtttggccgatccctttttccacgccattattgtatttgtaataaccatacacgcctatgcttacgagaaaagtgaaatggaggagcttggaatggtagctctgtctggatgtatatggcttcaagcttttgttgtggctcaagaaaccaatttcctttacggtgttgcaaccaccttttccattttgggggaaatctaagtcgggttctttgccaataaactttttttttaggggatncccgaa

SEQ ID NO: 90428 - DNA, 689 bp, Arabidopsis thaliana columbia
ttgtgtatgattcatccatttgtggtgatccagtgaaccttgttttagcccatggaccggttctataataacgtgtcgagcctctcataataatcccctgtgatggcacttgcggtgtaatcagagccacaaattcgccaggcgatggatcggtgtaacttttccaagcagtcaatcctcgcttctcaccagcgacgagattatacatcataattgacgtagggagcagagtattaccaagatgctcaaagctttgccatagagtccttcccgaaactttgtctatgaaaacaagatttccatggtctgtaagctctgcacgagacccattagatgcaaaaatatctccggtagaccacacaacgccatgtttgccattagataacagaagactaccattgctgctgataccgagatttgccgcagagtctgtaacaggcttttctctattagccacccacacaaccacctggggaatgatactcttgaaccaaattccgagatactgattttgggagttattaagactgaagaatcccaattcataaacaccattagaggagctgagagtttgtccaattgaaaagggactctctttggttatccctgcaaagctaaaactcataaagatggtaaaaaagggcaaataagcaaagaacactatcctcttcttccccaactgggttttt

SEQ ID NO: 90429 - DNA, 447 bp, Arabidopsis thaliana columbia
gctcaaggttcgtgtttgcatcttatgaagactgcgtattcagacggatttgaagagtctgctatatgttgtgtattaaaagaaactcttaaagctcttgattatcttcatagacaaggccatatccatcgggatgttaaggctggaaacatacttcttgatgacaatggtgagattaagcttggcgattttggtgtctctgcttgcttgtttgataacggtgataggcaacgtgctagaaacacatttgttggtactccttgctggatggcaccggaagttttgcagccgggaaatggatacaattccaacgctgatatctggtcatttggtataacagcacttgaattggcccatggtcatgcacctttctcaaaatatcctcgcatgaatgtgctcctaatgactattcataacgcacctcctggccttgattatgaccgtgat

SEQ ID NO: 90430 - DNA, 858 bp, Arabidopsis thaliana columbia
  unsure (1)..(858): unsure at all n locations
aatacgactcactttagggaaagcacgtacgcctgcaggtaccggtccggaattcccgggtcgacccacgcgtccggttgatggtaggttcattgctaagcctgtgactgtttggcgtgcgttaagtcggatgtgggaacttgtggctgaggatcgttgggttatcttcgctgcgttttccactcttatagtagccgcgctttcagagataactattcctcattttttaacagcttcgatcttctcggcacaaagtggtgatatcgctgtgtttcatcgaaatgtcaagctcttggttacgttatgtgttacttcaggcatttgcagtggcatacgaggatgcttctttgggattgctaacatgatacttgtgaaacgaatgagggaaacactatactccactcttctcttccaggatatatcatttttcgactctcaaactgttggcgacttaacaagcagacttggctcagactgtcagcaagtctcgagggtcatcggaaatgatctgaacatgatatttcgcaatgttcttcagggtacaggggcattgatttatttgctaattttgtcttggccccttgggctgtgcacattggtgatatgctgtattttggctgcggttatgttcgtttatgggatgtaccaacagaagacagcgaagctaattcaggagatcacagcttctgcaaatgaagtcgctcaagagacatactctgtgatgagaaccgttcgtgtatatgggacagagaagcangatgttaaaggtccatcactggcttagagattggcgatataagtttgaacagagtgctgatatggtatttgaactggagcttcacactcttaccatgcact

SEQ ID NO: 90431 - DNA, 1119 bp, Arabidopsis thaliana columbia
  unsure (1)..(1119): unsure at all n locations
agccactattaaagaaggaaagaaatctgtttgtattaaaggagaagcagaccantcatggggcgaacattttgagagcttgtagccacgcgtccggaaggattgggatcacaaagagaagcaaagcaatcagatacttgaaagtctctttagtgacttaagtgtcagaagttttctctctcttaactctctcaaatcttttagagagaaaaaactttgaatcttgttcatatcttttgctaatccgattaacatcggatctctttagatttcgttttatgttttagctttctgactatttttcagatctatctcaaacttcttgtcggtttttcttctatactttgtttcgatttgtagtttttttgtaaagccttttgcctgttcttcaaatcaacacttctatgttgttgaagtgttaaatcattgtggtttgatgggtctttgttagctgtgtacttgattcttcgtccaattgttggtaaatcctcgcttgcccatatgggattaaattaagcgattgttcactttggtcgtttgatttcaagtggttgtagttgattgaattggagtatgtagatttggagtccctgtcgtgtttgatagtttctctgaagactgcttcgatttttagcggttaaagaagaaatcccatgagccaagtaaatccagtccattacttccaatgttcattgcaaaaggcgattggtaaaaagaaaggcttaatttggtagaagctgtttgaagattattaagaactggaaggtaaaaaaatatgccggtgactggaagtaattcccccccgccaatggagttaatgaagaaacaacttttttccagacctgccacgtgcccgtgtttatcttttgttaagacatgtgtctatgagctgtattgatataagccttaatctgtgtctttggtttatattaaaaatttaaatgggtcttgtactttatgtgtaatgccctttgggctctttaatgaaatgaagtttggcgcnnnnnnnnnnnnnnnnnnnnnnnnnnnnnnnnnnnnnnnnnnnnnnnnnnnnnnnnnnnnnnnnnnnnnnnnnnnnnnnnnnnnnnnnnnnnnnnnnnnnnnnnnnnnnnnnnnnnn

SEQ ID NO: 90432 - DNA, 705 bp, Arabidopsis thaliana columbia
tccgtaggctgggattcagcatgggggggatttgtgcgcttgggagtccctgattattaaataaaccaaggattttaccatgactgcaattttagagagacgcgaaagcgaaagcctatggggtcgcttctgtaactggataactagcactgaaaaccgtctttacattggatggtttggtgttttgatgatccctaccttattgaccgcaacttctgtttttattatcgcattcattgctgctcctccagtagatattgatggtattcgtgaacctgtttctggatctcttctttacggaaacaatattatttccggtgccattattcctacttctgcagctattggattgcatttttacccaatctgggaagctgcatccgttgatgaatggctatacaacggcggtccttatgaactaattgttctacactttttacttggtgtagcttgttatatgggtcgtgagtgggatacttagtttccgtctgggtatgcgtccttggattgctgttgcatattcagctcctgttgcagctgcgactgctgttttcctgatctatccaattggtcagggaagtttttctgatggtatgcctctaggaatctctggtgctttcaccgtcatgattgtattccaggctgagcacaacaatcttatgcacccatttcacatgttaggtgtagctggtgtattcggcggcc

SEQ ID NO: 90433 - DNA, 557 bp, Arabidopsis thaliana columbia
tgatcttcagctctctacgactcactattgggaaagctggtcacgcctgcaggtaccggtccggaattcccgggctgtgatatggatggtacactgcttaacagtaaaagtcagatttcggaggcaaatgcaaaagctttaaaagaagcccttctgaggggacttaaagtagtcatagctacggggaagtcccgcccaggtgcgatcagaatcttgaagacggctgatctaactggatccgatggcattatctcagagtcctctccaggcgttttcgttcagggattacttgtctatggtagacaagggaaagaagtgtatcgaggaaacttagaccgagatgtctgcagagagacctgtctttattctttggagcatcgaattcctctcattgcattcagccaggatcgctgcttgacattgtttgaccaccctcttgtcgactctcttcacacaatctacaatgagccaaaggccgaaattatatcatcggttgatcaactgatagctgaagctgacattcagacagtgatatttatggacacaaccgagggagt

SEQ ID NO: 90434 - DNA, 565 bp, Arabidopsis thaliana columbia
  unsure (1)..(565): unsure at all n locations
atgatacttcagctctcnnnnnnnnnnnnnnnnnnnnnnnnnnnnnnnnnnnnnnnnnnnnnnnnnnnnnnnnnnnnnnnccacgcgtgcgcccacgcgtccgattcgatttttcgcctgaacctgcggatttttcgattcttcaaattcatttatctccacaggagatgactgtgtctctgttggagatgggatgaagaaccttcttgtcgaaagagttacatgcggtccgggacatggaatcagtattggaagtcttggaaggtacagccacgaggaaaacgttagtggcatcaagatcatcaactgcactctccaagagactgacaatggtctaaggatcaagacatggccttctgctgcttgtaccacaaccgcctccgatatccatttcgagaacatcctcctcaagaacgtcagcaaccccatcctcatcgaccaagagtactgcccatggaaccaatgcaacaagcagaaaccatcaacgatcaagttggccaacattagcttcaagaagatcagaggaacatcaggaaacanagacgcagtgaagcttttgtgtagc

SEQ ID NO: 90435 - DNA, 638 bp, Arabidopsis thaliana columbia
gtaaaactaaaaataaaaggagttccacttttcaatttttctccactccaaaaccagaaagaaagaaaaaaacatcaatcatgacaacaacaacaacgaagaagccgcacgttctggtgataccgtttccacaatccggtcacatggttccacatcttgacctcacgcatcagattcttctccgtggagccaccgtcactgtcctcgtcacacccaaaaactcttcctatctcgatgctctccgttctcttcactccccggaacacttcaaaaccctaatccttccttttccttctcacccttgtataccttccggtgtcgaatctctccagcaacttcctctcgaagctatagttcacatgtttgatgctctctctcgtctccacgaccctctgcgttgactttctcagccgtcaaccaccgtcggatctccccgacgccatcctaggaagctcatttctcagcccttggattaacaaagtagctgatgctttctctattaagtccattagtttcttacccatcaatgctcattcgatctccgtcatgtgggctcaagaagatagaagcttcttcaacgatctcgagactgccacaacggaaagctacgggttcgtcattcaacagtttctacgacc

SEQ ID NO: 90436 - DNA, 591 bp, Arabidopsis thaliana columbia
  unsure (1)..(591): unsure at all n locations
aagcacgtacgcctgcaggtaccggtccggaattcccgggtcgacccacgcgtccgaactcccggcggtactggaggtgttaaaaccatcggtaattatgctgcagtcttgaaggctcagtcgattgcgaaagctaaagggtattctgatgttttataccttgattgccttcacataagatatcttgaggaggcttcatcgtgctatattctcattgtgaaggataatgtgatatctaactccggaaattaaaggaaccatcttgcctggaattacccggaagagtatcatcgaagtagctcgtagccaaggtttcaaggtaggaggaccgaactgtgacagtcgatgaatagcgagaagcagacgatgttttctgcacaggacccggcgttgttttatctgcgtgtggaagcataacttacaaaagccaaaggttttcttatggagaaatgggcttggaacagtctcaaaacacctctacaccttcttgacgagcctgcaaatgggtctgaccaaagataacatgagcttgacttgttaatgnagttaaaccagccccaacctttcatattatactatggtgtgtccgag

SEQ ID NO: 90437 - DNA, 804 bp, Arabidopsis thaliana columbia
cggggcgtagtatcgccggctactatacgactcatatagggaaagctggtacgcctgcaggtaccggtccggaattcccgggtcgacccacgcgtccgggtacagatagagtcagcacagcctgtcttctcgtgattctctcccagatatacaggcctagcttggttttcctgtcattgctggctttagatatcgctagtcactggctgcaaatgtacagtaccttcctatcagggaagaccagccatagggatgtgaaagatagcacgagctggctctttagactctattatggaaaccggatgttcatgggttattgctgtgtttcctgcgaggttctttatataatccttcttctcatagcaacgaaccaaaccgaaaacttgatgaacgtggtagtgaaatcattgatgcagatttcaccgctctctttactcttggctttgagcatatttggttggtccatcaagcagctcatctatgtgattcacatgaaaacggctgcagatgtttgtgtcctgtatgacatagagccccagcataagaagccttgacgttatgtgcccgtgaatcgtgtttaactcttttgtttcatgttgtgtacgacactgtacatacggatccatcttgtttagtatgtagataaactcttgtctttaaatccattcactattttcagaaaaaaaaaaaaacccaagggcggccgctctagaggatccaagcttacgtacgcgtgcatgcgacgtcataaaactctataggcgtcccccttatttgcctctctgctatccgcgcatgcctggt

SEQ ID NO: 90438 - DNA, 467 bp, Arabidopsis thaliana columbia
  unsure (1)..(467): unsure at all n locations
tcccgcncgacccacgcgaacgaaacatcttaattagaaaacaaaaaggagagacataaagatgaatgctattaagtttgttgtgcttctcttgattggagttgtatgtgtcaatgttggtgcaattaggcaactcgagaaaagatccaaagagaccgaattaagcgtctctcttcccaaagctaccaaaggcgttggagctgaatttacagttactgtttatactcagtctataggtgatggcaatggctttggtgatgctaaaataaagggtcgcaaaggttccagcagcaatgcaattggaagcggctccggaattactagtggatatgtcattgcaaagggtcccaacgcaacagctttttctaggagtattgctttcggtctaggccaagctaatgctgtagcgggtcgcaaagggtgcaaccgccaaaggaaatggtttgggacgtggcattactactgca

SEQ ID NO: 90439 - DNA, 521 bp, Arabidopsis thaliana columbia
  unsure (1)..(521): unsure at all n locations
cannnnnnnnnnnnnnnnnnnnnnnnnnnnnnnnnnnnnnnnnnnnnnnnnnnnnnnnnnnnnnnnnnnccacgcgtccgatgataatcctcaagccaggattatctttagaagtcaaccatgcctaccttccgagactccggatgggattaaagaactacgggaaaaggacttggtcagtgtccgtggtgacggaaaaggcgagagaaaacctcatgagagaatttatgactacgatgtttacaacgatttgggagatccacgtaaaacagaacgagttaggccagttctaggtgttccagagacgccttacccaagacgctgcaggaccggccggcctctcgtttcaaaagatccaccgtgtgagagcagaggaaaggagaaggaagaattttatgttccaagagatgaagttttcgaggaaatcaagagagataccttcagagcagggagatttaacgctctcttccacaatcttgtaccatctattgcagcagcattgtcaaacttagacattccct

SEQ ID NO: 90440 - DNA, 520 bp, Arabidopsis thaliana columbia
  unsure (1)..(520): unsure at all n locations
nnnnnnnnnnnnnnnnnnnnnnnnnnnnnnnnnnnnnnnnnnnnnnnnnnnnnnnnnnnnnnnnnnnnnccacgcgtccggcatgctgcaacaggatttttcagtgttataaaaaggcgaagtgaagctaatttagatgcttctgatcatcttgccagcagcacaaagaagttaccagactctaattccgatctgtatagtattccttattcagagatatatcgacctttcctcaagaaagcttctgaattcttgcagaaagctggggacttggtcagttcgccaagtttgaagaagctactgcacagcaaagctgaagccttcctttcaaatgagtattatgagtcagacatcgcatggatggacttggattcaaagttagatattaccattggtccatatgagacgtacgaggatgaaatctttgggtataaggctacatttgaaaccttcatcggtattcgagatgataaagccacagctgatctgaaactctntggtgacaatctaaagctattgg

SEQ ID NO: 90441 - DNA, 598 bp, Arabidopsis thaliana columbia
  unsure (1)..(598): unsure at all n locations
gatggagacgacagactacgagtatgccattcagcatgtcagtcctacaatatggcgtgtggggcttctttagactgctcagatcaaacccttttcagcacggcagaagaaggtgatgctgaatgtacggggtctggcgaaatcagatcgccatggtttagcagtttgtggagtagattagtagcaagttaactaggaacaattcttctgggcgaaagaaagatttgtgtgtccaaggtagatagtgaggcagagtattattttcccatctgtgattcctctcacggtttataagaagaaacagttagttaggggtcttgccttagcccccctgttagatgaattagagtatctttgtctgtctttcgagtgaaaatgcaatatgtatttgaatataatattataggaaaaatgggatttttgggccgaaggccttccaagacgaataaaaaagccaggctttaccgctctagaggatccaagcttacgtacgcnnnnnnnnnnnnnnnnnnnnnnnnnnnnnnnnnnnnnnnnnnnnnnnnnnnnnnnnnnnnnnnnnnnnnnnnnnnnnnnnnnnnnnnnnnnnnnnnnnnnnnnn

SEQ ID NO: 90442 - DNA, 891 bp, Arabidopsis thaliana columbia
  unsure (1)..(891): unsure at all n locations
atgatctnnnnnnnnnnnnnnnnnnnnnnnnnnnnnnnnnnnnnnnnnnnnnnnnnnnnnnnnnnnnnnnnnnnnnnnnnnnccacgcgtccggcacaactcagggtgtatgcatatgtgaaaatggatttactggaatcgactgttccactgctatttgcgatgaacaatgcagcctacatggaggagtgtgtgataatggggtttgcgagttccgttgctctgattatgcaggctacacatgtcagaacagctctaaactagttacaagtttattggtgtgcaaagatgtattggagaaagacatgtcagggcaacattgtgctccaagagagcctagcattcttcagcagcttgaggaggttgtggtaatgcccaactacaataggctgtttccgggcggggctcggaagttatttaacattntcggtaacagttattgtgatgaagcagctaaaagactagcctgttggatatcgatccagaagtgtgatatcgatggagacgacagactacgagtatgccattcagcatgtcagtcctaccatatggcgtgtggggcttctttagactgctcagatcaaacccttttcagcacggcagaaaagggtgatgctgaatgtacggngtctggcgaaatcagatcggcatggtttagcagtttgtggagtagattagtagcangttaactaggaacaattcatctgggcgaaagatagatttgtgtgtccaaggtagatagtgaggcagagtattatttccaaatctgtaattttctagggttatgaggagacgtagttaggggtcttgcttacccactgtagataatagagatcttgtctgccttgagtaaatgcatatgtttgaaatatatataggaaatggatttag

SEQ ID NO: 90443 - DNA, 509 bp, Arabidopsis thaliana columbia
  unsure (1)..(509): unsure at all n locations
nnnnnnnnnnnnnnnnnnnnnnnnnnnnnnnnnnnnnnnnnnnnnnnnnnnnnnnnnnnnnnnnnnnnnnnnnnnnnnnnnnnccacgcgtccgaaaaaaaatggatactctctttagactagtcagtctccaacaacaacaacaatccgatagtatcattacaaatcaatcttcgttaagcagaacttccaccaccactactggctctccacaaactgcttatcactacaactttccacaaaacgacgtcgtcgaagaatgcttcaactttttcatggatgaagaagacctttcctcttcttcttctcaccacaaccatcacaaccacaacaatcctaatacttactactctcctttcactactcccacccaataccatcccgccacatcatcaaccccttcctccaccgccgcagccgcagctttagcctcgccttactcctcctccggccaccataatgacccttccgcgttctccatacctcaaactcctccgtccttcgacttc

SEQ ID NO: 90444 - DNA, 555 bp, Arabidopsis thaliana columbia
  unsure (1)..(555): unsure at all n locations
cagacgccaccgcggcccgcggccgccggggggggggtagaatcgncggnacctatacgactcatatagggaaagctggtacgcctgcaggtaccggtccggaattcccgggtcgacccacgcgtccgcccacgcgtccgcacaaactgcttatcactacaactttccacaaaacgacgtcgtcgaagaatgcttcaactttttcatggatgaagaagacctttcctcttcttcttctcaccacaaccatcacaaccacaacaatcctaatacttactactctcctttcactactcccacccaataccatcccgccacatcatcaaccccttcctccaccgccgcagccgcagctttagcctcgccttactcctcctccggccaccataatgacccttccgcgttctccatacctcaaactcctccgtccttcgacttctcagccaatgccaagtgggcagactcggtccttcttgaagcggcacgtgccttctccgacaaagacactgcacgtgcgcaacagatcccatggacgcttaacgagctcttttctcc

SEQ ID NO: 90445 - DNA, 909 bp, Arabidopsis thaliana columbia
  unsure (1)..(909): unsure at all n locations
nnnnnnnnnnnnnnnnnnnnnnnnnnnnnnnnnnnnnnnnnnnnnnnnnnnnnnnnnnnnnnnnnnnnnnnccacgcgtccgcccacgcgtccgcgaagcaacctccatggattagttgcttgtggtggtgaggatggtgctgtggaattttttgatatgagaatgaaatcatctgctgctagaattaacgcggtcacacatggtggtgatgctgctgcggaggttactgctatagagtttgatgacagtgaaggtcttcaagtagctgtcgggagtagcgcgggaaaggtattcatatacgacttgcgtacttcaactcccataagagtgaaggatcacatgtacgagagcccaattttgaatattaagtggcaacggactcttaatactcaacaacctaagttgattactaccgacaaacacattgttagaatatgggatccaaacccgggagaaggtatgaccagcattgaaccgactcaaggaggaataaacgacatttgtgtgttccgtggaagcggacttatgcttcttgctttagactctagcctaatcccatcttacttcatacctgaactcggtcctgcccccaaatggtgttctcctcttgaaaatctaacggaagagttggaggaaagtgcacagacaactatttatgataattacaaatttttggcaatggaagatctggagaagttgcagctaactcatttgattggacagatcttttgaaagcatctatgcatggataattttattaattaccatttgtacaaaaaggctttagcagtgattgaaccttttgcatttgatgnttancttagancgnaggnagcaagannagttagaagncancgtcnagaggannccaaaaagnngcnggtncaangggtnccgggccttgacaa

SEQ ID NO: 90446 - DNA, 881 bp, Arabidopsis thaliana columbia
  unsure (1)..(881): unsure at all n locations
aatacgactcctatagggaaagccggtacgcctgcaggtaccggtccggaattcccgggtcgacccacgcgtccgcggacgcgtgggcggacgcgtggggtgaaacatggggaaggaagttatggtgagcgattacggtgacgacgacggagaagacgccggcggcggcgatgaatataggattccggaatgggaaattggtttacccaacggagatgatttgactccgttatctcaatatctagtcccgtcgattctcgcgttagctttcagcatgatcccagaacgaagccgtacaattcacgacgtcaatcgcgcgtcgcatatcacgctctcttcgttgagaagcagtaccaatgcttcgtctgtgatggaggaggtcgtggatcgagttgaatcgagtgttccaggatcagatccgaagaaacagatgatatcggatggtggtgaagcagcggccggtggaggattccacggcggaggaaggagactccgggcctgaagacgcgtctgggaagacatcgaaacgaccgcgtttagtgtggacaccgcagctacacaagagatttgtggacgttgtggctcatctagggattaaaaacgcagtgccgaagacgattatgcagctgatgaacgtggaaggacttactcgtgagaacgttgcgtctatttgcagaatataggctttaccttaacggattcaagattgccacggaagaaatccttattcggggcggatcagtttcttttacggcggtccttcacaagtttaagacggcgagaagtacggaaagttggggttcggttccgttcgcnatggtgctatccagtttggataaatggatgccagttttcacagttgaacctggatgatcaccatt

SEQ ID NO: 90447 - DNA, 812 bp, Arabidopsis thaliana columbia
  unsure (1)..(812): unsure at all n locations
gccgtaacctccgccagtgaaaccctaaactcctctttccgttatttcactgttcatcaatcgctctgcgtcactcttcctagcaagctcctttaattttcctctcaatccaatcgtgattttgcatacccatcaggtttcagaaaaactgaaataatggtgtataagcgcaagtcaatggagaagaaaaaggaaggcatgggttctactattgatcaaaacctgagctttaagaatattatgaaagatgttgcactctttggttcttcgcatatgacatggaaggataagaaagcactggaggataagaaagtgactgcacttggtggaaaggcacaaaagatgcataggctaccgctgagtgtagctcgagtgcagatgaagaaacagaaagatagagaagagaagatgttagaacagaatgtgattcttggcagatttggtggaggggggaagtagcagtnngtaacccgnagagagaaagcgtacgccagaagagagagtattgaagtcacctggagggattttcaaaggcggtgttcttgatgttaagcatttgctacgttctggtccttcaagtaggagtgacaggaatttcaagacgaataaacccatagggtccagaagaacttgggaggaggaggtgacgaaggaggatnaagtgtacgggataaaaaaggggggccangtgaaacccggggngcacaagggaggggcttgagaaaacccccctttttgtnttgtgnactaggttgaacccnncagtttccttttccttnntgggttaccgttggcggtcggtgccccgtggg

SEQ ID NO: 90448 - DNA, 979 bp, Arabidopsis thaliana columbia
  unsure (1)..(979): unsure at all n locations
nnnnnnnnnnnnnnnnnnnnnnnnnnnnnnnnnnnnnnnnnnnnnnnnnnnnnnnnnnnnnnnnnnnnnnnnnnnnnccacgcgtccgcttatattcacgattgtgttcccgtgaaacggaatgctttatcgtcgttgggaggatactcggatggagatggaatatcgatattcgagtctcgagatatttggattgatcattgtacgttagagaaatgttacgatgggcttattgatgcggtgaatggatccacggatataacgatttcgaatagttacatgttgaatcataatgaagtcatgcttttgggccatagtgatgagtattccggtgatcgggatatgcgagttacgatcgcgtttaactattttggtgaaggacttgtccaaagaatgccaaggtgtaggcatggatattttcacatagtgaataacatttatagagactggaagatgtatgctattggtggaagtgctaatccaacgatctttagccaaggaaatgttttcatagcttccaataatcagttcaccaaggaggttacaaagcgagagagtgcagatggagacgaagaatggaaggaatggaactggaaatcagaaggagacgaaatgggtaacgggactttctttacaccgcagggaaagaggattctccgagctacccgaaattttcgagtatgggagctcgaccagcttcacttctcaagaccacacatcccatcagtaggggtcttaagtgcgaaattgacccagcttggtaaaaacacacacataagctggtgaccaatctaagggttgggcctctttttctttttggcttttctactggtgggggtattggttcgtaaataggattgaccgaatgggtgatgtccattccccccactcaaaaaaaaaaaaaaaaaaaagnnnnnnnnnnnnnnnnnnnnnnnnnnnnnnnnnnnnnnnnnnnnnnnnnnnnnnnnnnnnnnnngtc

SEQ ID NO: 90449 - DNA, 568 bp, Arabidopsis thaliana columbia
  unsure (1)..(568): unsure at all n locations
atgattcctcagcgtctctacgactcactatatggaaagctggcacgcctgcaggtaccggtccggaattcccgggtcgacccacgcgtccgcaagaagaacaaaagggtgcaagagcagaagcatctcctggtctacggtcgctaagtttggatgacttcattcagtctaaagctaaggtgagcccatctgtggcgtacgatgcgactacgatgaatgagctgagaaaatggaacgagcaatatggtgaaggaggcagcaggacaaagtctccttttggcttctgatgaatttttttttgttttggtagatcaaagtgttttcatctgtcttttactttgtgatcatagtgtaactctcagtgctatagcctttttagtatcattttatttgatgtaaactatatataatggaacacgaaacactgtacgaccacatacaaaattcttcactataacataatgatttcttgtattaaaaaaaaaaaacaaaaaaagnnnnnnnnnnnnnnnnnnnnnnnnnnnnnnnnnnnnnnnnnnnnnnnnnnnnnnnnnnnnnnnnntccccn

SEQ ID NO: 90450 - DNA, 547 bp, Arabidopsis thaliana columbia
  unsure (1)..(547): unsure at all n locations
nnnnaggtctcnnnnnnnnnnnnnnnnnnnnnnnnnnnnnnnnnnnnnnnnnnnnnnnnnnnnnnnnnnnnnnnccacgcgtccgatctcagcggccgagcttggagatgctctcaagaaccttggctcggtcacacacgaggacattaagcgtatgatggcagagattgataccgatggcgatggatacatctcgtaccaagaattcattgatttcgcaagtgccaatcgtggtcttatgaaagacgttgccaagattttctaaagtaaaatgaacagatctaatctatatttatatgaaagggtttgagaattaatcgtgttcaatttgttttgtaatgacaatcatttgatgaagtatgtttttttttctttatgtctttattttcatgtaatggaagatcttggattattcttgaagtggattgtaacgatgtattgaagaattctccattctttagagaaaaaagaatgatgggatgggnaaggccggggggatacattgtcttcagagaatctttgcttccgtaaatctggggacagcaag

SEQ ID NO: 90451 - DNA, 533 bp, Arabidopsis thaliana columbia
  unsure (1)..(533): unsure at all n locations
agtccacacattccacgccgcgcctagtatcgccgnnnnnnnnnnnnnnnnnnnnnnnnnnnnnnnnnnnnnnnnnnnnnnnnnnnnnnnnnnnnnnnnnnnnnccacgcgtccgcaaagttgccgctagggtcaccggaaaacttcagagttgtgtcttctattgaattctccgggaagtattagtgatggggctttctcttggggaacaacatttcattaaaggtgggattgctcaagatcttcgaactgatggtcggaaaagattgacttaccgtcctatctacgtcgaaaccggtgttattccgcaggctaatggttcagcgagagttagaattggtggaaccgatgtgattgctagtgtaaaggctgaaattgggaggccaagttcacttcaacccgataaaggaaaggttgcagttttcattgattgcagtccaacagctgaaccgacatttgggcgggagaggaggtaaggcaattgtctatctgagctcgctttggctctctcagagatgccctcatgcgcggca

SEQ ID NO: 90452 - DNA, 467 bp, Arabidopsis thaliana columbia
atacgactcatttatagggaaagccggtacgcctgcaggtaccggtccggaattcccgggtcgacccacgcgtccgtagaagagaagagagagcaaaaaacaaagagagagatgggtgagacaaaggcagatttcagggacatgtcaagaattcctaaagttcgagaggggttctacgcgacgaacaatcagtttcagaaagcgggtccaaagggtttcgttcaagtgaaggttctggagaacgacaatctctacgtgcgtgtcgacttgcctggtgttccagacgacgccgttcgctacagagttgacgccgtgagacaaaaggttgtctttttctccggtgaaactctgaacaacggcaaggaaggtgtgcgtcagtactctggaaccgctgggcttggctgtgactgctgcgagatcacaggcgtggatgccaaaatgaaagatggagttttgaggatgattct

SEQ ID NO: 90453 - DNA, 909 bp, Arabidopsis thaliana columbia
ctcactatagggaaagctggtacgcctgcaggtaccggtccggaattcccgggtcgacccacgcgtccgcccacgcgtccgaaaaaccattgaaacaattatgaattccattaagtttcccatacttgatcgaacaacaaaaaattccgttatttcaactacgttaaatgatctttcaaattggtcaagactttccagcctatggccgcttctttatggtaccagttgttgtttcattgaatttgcctcattaataggctcccgatttgactttgatcgttatgggttagtaccaagatcgagtcctagacaggcggaccttattttaacagcaggtacagtaacaatgaaaatggctccttctttagtgcgattatatgaacaaatgcctgaaccgaagtatgttattgctatgggagcctgtacaattacaggggggatgttcagtaccgattcttatagtactgttcgaggagttgataagctaattcctgtagatgtctatttgccgggttgccacctaaaccagaggcttgtatagacgctataacaaagcttcgtaaaaaatagctagagaaatctataaggatcgaattagacctcaacagggtaactcggtgttttactaccaatcacaaggtttttgttgtacgcagtccgcatattggaaattatgatcaagaactactctatccaccatcatctacttcagagatctctactgaaacattttttaaatacaaaagtccagtatcgtcccacgaattagtgaattagggaggcttttagagaatcagaaaaaaatcttcataaattagaattaacggtaaatgtgaaatacttaattttatataaaaaaggtgtgggggaaataaaaaagatgcagggcactttgtccgtttggctagc

SEQ ID NO: 90454 - DNA, 852 bp, Arabidopsis thaliana columbia
aatacgactcctttagggaaagccggtacgcctgcaggtaccggtccggaattcccgggtcgacccacgcgtccgcccacgcgtccgcccacgcgtccgcggacgcgtgggaaagtttataactttctgagattttgagagaagcatcatcatcaaccaattgggtttaaatcagaagagaagcaatgatctccggcgacacattatcagctaaaaaacctaaatcagttccacaagaagaagaccaagacccaccaagccaatcaatcgcacttctcgacaatcacacagattcctccggttctgattcttccactagaagcatctcaagctgcttcatcttcacatctctacttctcgtcacctgcatcgctctatccgccgcttcagctttcgccttcctcttcttctcttctcaaaaacctgtcctttccttaaaccaaatctcagagtcaccagctttcgacagatccgtagctcgtccgctcaagaaactcgacaagcctgttgttcttttgatttcatcagatgggtttcgtttcgggtaccagttcaagaccaaactaccgagcatccacagattaatagccaacggaaccgaagctgagactggtctaatccctgtttttccgacactaactttccctaaccattactctatcgtcacaggtctatacccagcttatcatggaatcatcaataacccactgtgttgatccagatacagggaacgttttcacaatggctagtcatgaaccagagtggtggttaggtgagcctttgtgggagacaggtgtgaaccaggacttaaggctgctactacttctggcctgctctgaggacacaaagctc

SEQ ID NO: 90455 - DNA, 646 bp, Arabidopsis thaliana columbia
  unsure (1)..(646): unsure at all n locations
tgccaatcctaccctgaggtttnttcccaacccgtgaggntnttanccaagcccagatcgcccgtatatggcttagcccgactttgaccctccctacccaccgtggggttcctgatgggctcttcaagggtcaaaatggcccaaagggtcagagtgggctaggcacgtttctaggcgaaccccaagagccaagaggctaaaaagagtcaaggacatgggaagctcttggggcaacatgaccagaagaaaactcatgagacaaacagtggtcttaatggccttggaatgttcattaacaatggtgagaagaaacataggaggaaaagtgagcacaagaagaagaacaaggatgggcatggcagtggtaatgagagtggaagcagcagcggtagcgacagcgactgaatatcatatgcttgctctgaagaaagtaacgcttctaagagtgactaaattaagtacttggatgtaatacttaaaataaaatcacttaggtggttgtctttgtgtgtcctatataacctcgctactacatgaatctacttttatagttttgttgcaaaaaaaaaaaaaaaaaaaaggcgggccgctctagaggatccaagcttacgtacgcgtgcatgcgacgtcatagtcatcntatagt

SEQ ID NO: 90456 - DNA, 779 bp, Arabidopsis thaliana columbia
  unsure (1)..(779): unsure at all n locations
cgccccctagtatcgccnnnnnnnnnnnnnnnnnnnnnnnnnnnnnnnnnnnnnnnnnnnnnnnnnnnnnnnnnnnnnnnnnnnnnccaggcgtccgccaaaccataaaatcacatcttctttacaacaatgcagtactacgaaaaccgtgagaaagactactacgaggtggctcaaggccaacgcaatggttatggccagagccagagccacaaccacgagggatatggccagagccagagccgtgggggatatggccagatccataaccgtgagggttataaccaaaaccgtgagggatatagccaaagccagagtcgcccagtatatgggcttagcccgactttgaaccaccgtagccacggtgggtttcttgatgggctcttcaagggtcaaaatggccaaaagggtcagagtgggctaggcacgtttttagggcaacacaagagccaagaggctaaaaagagtcaaggccatgggaagctttttggggcaacatgccccgaagaaaactcatgagacaaacagtggttttaatggccttgggattttcattaacaatggtgggaaggaacattggnggaaaggtgngcacaagggggaggacaagggtgggaattgaaggggtattaaattgnaannagaagggtaggnaaagnattaattttattttttgntcttaggaagtaccntcntngggngattaataagtctgggtttttantaaataaaccatgggggggggttngggntcctttncccnnntcaanaanttttnc

SEQ ID NO: 90457 - DNA, 772 bp, Arabidopsis thaliana columbia
ttttccacgcgtccggcaaatcttccttagccattgaacatctgaacaagtatcttgaagtattcatggctgatcatgatgcctggagagaacttgcagaaatttatgtttccttgcaaatgtacaagcaagcagctttctgctacgaggagctcatactaactcagcctactcttccattgtaccacttagcatatgccgatgttctctacacaataggtggactagaaaacctcatcgcagcaagaaagtactatgcagcaactatagacttgacaggtggtaaaagcacaagagcacttctcggaatatgcttgtgtggatcagcaatcgcacagatctcaaaaggcaggaacaaagaggacaaggacatggctgcaccagagcttcagtctttggctgcaactgcattggagcgagagtacaagcaaaaagctcccgctaagctcaacctcctcacttctgccttgagaaacttgaaaatcgcttagttcaaagcactagagcccaaacaattttttggtattttggtattgtttaaacttttttacagtcagacttttgttcattccttttcttttacccttataatttttttcttattcacttggctatattgttgaatcactgatacggtttactaaggtgtgtttaatcaaataataaattaaactaattcaaaaaaaaaaaaaaaggccggccgctctagaggatccaagcttacgtacgcgtgcatgcgacgtcaagctcatactatagtgctgcctcaatt

SEQ ID NO: 90458 - DNA, 498 bp, Arabidopsis thaliana columbia
gactcatatagggaaagccggtacgcctgcaggtaccggtccggaattcccgtttcgacccacgcgagcgcagaaaagagaacagaggaagaagacgaagcgacgaaccgtataacggagaaatctacgaatacgtatcagaatacgtctacgctcgtatatttctactcattcctctcaccgtaacgttagagaaggtgattcccctccgaaataaaatataaaaacccttcgatttttggaagcaaacatttctctccgtcgcgaacctaatcgacgactattgttgatcaagaagaaggttttaaagttgaaagatcatggatatcccagagaagatggagatggatcaactgaatcaagggtcgagctcatctcttaccaataagcgaaaaagaggtcgtcctcgcagagacgaaagccagactcagcaaccagtgaacccacctggtgatgagaatctgataggtcgagttggttttggtgtggttgaaggtt

SEQ ID NO: 90459 - DNA, 534 bp, Arabidopsis thaliana columbia
  unsure (1)..(534): unsure at all n locations
ccccgngggcgggggggggaggatcgccggaactatacgactcatatagggaaagccggtacgcctgcaggtaccggtccggaattcccgtgtcgacccacgcgtccgcccacgcgtccgcggacgcgtgggaaaaagtatcattatcatcttcatcgaattagatggcaccggtgaagaggagggtgttcaagacaaataatgaaatggcagtggagctggccaaatacacggctgatctttcctcctaattttgcaaagaaagaggagttttcaccgttgttctctccggcggcgacctcatagcctggctctggaaattgttagaagctccttatattgattcagttgagtggtctaagtggcccatcttttgggtcgacgagagggtttgtgcttgggatcatgcggatagcatctataaactcgcttacgatggttttctctccaaggttccagttccaggtgaaaacatctacgctatcgataacggactcggggcagaaggcaacgccgagctagcagctgacaggt

SEQ ID NO: 90460 - DNA, 911 bp, Arabidopsis thaliana columbia
  unsure (1)..(911): unsure at all n locations
atgatattgccagcannnnnnnnnnnnnnnnnnnnnnnnnnnnnnnnnnnnnnnnnnnnnnnnnnnnnnnnnnnnnnnnnnnnnccacgcgtccgcccacgcgtccgataaaccaatcagattgcaggttcaatatcgtatgcatccagctttgtccgagtttccatccaacagcttctatgaaggaactctacagaatggagtcacaattattgaaaggcaaacaacagggattgatttcccgtggcctgttcctaaccggcccatgtttttctatgttcagctgggacaagaggagatcagtgctagtggaacatcatatcttaatagaactgaggctgctaatgtggagaaacttgtgactgctttcttaaagagtggagttgtccccagtcagattggagttataactccatatgagggacagagggcatacattgttaattacatggcaagaaatggttctctccgacagcaactgtacaaggaaattgaggttgccagtgttgattcttttcaaggaagggaaaaagattacatcatattgtcctgtgtgagaagtaatgagcatcanggcattggattccttaatgatccacggaggcttaatgttgcacttacgcgaagctcgtatggaattgttattcttggaaacncanaagttcttagtaaacagnctctgtggaatggattgttgacacattacaaggaacatgagtgcttggtcgaggacctcttataatctaaagagagcatggtcagtttcagaaccagaaagattacatgatcgagactatttatggtggggagctgcatgattgaaaatgatatttgttcggtacctatgctacagagaagcagcaggaggctggtggtctatcttctctgccaccaatgtgctgactgactca

SEQ ID NO: 90461 - DNA, 942 bp, Arabidopsis thaliana columbia
  unsure (1)..(942): unsure at all n locations
gcgtccgatagtatgggagagagaagagaagaagaagacaccctttaagcaaaacagaggattttcattctctgttctgtttgaattattactaatctatcatcttgttgttctcttcgtcgacaatgtcgggaaacaaagaagaagaggatcctcgtatccatggaatcaaaactaagatccgtgtcgttccagattttcccaagaaaggaataatgtttcaagacataacaacagtgttgttggatccgaaagccttcaaagacacaattgatctgtttgtggagaggtacagagacaagaacatctcagtggttgcaggaatagaggctcgtggtttcctattcggtccaccgatcgcgctagccattggagcaaaatttgttcctctgcgcaaacccaagaaactacctggtgaaacaatatttgaggaatacgagttggaatatggaaatgaccgcctagagatgcacataggagccgtcgaggctggcgatcgagctttggtcgttgatgatcttatcgcgactggtggtactctctgcgctgccattaacttgctcgagagggttggagcagaagttgtggaatgtgcatgtgtgatcgagttacccgaattaaagggaaggcagagacttaaggggaagccactatgtatgcttgtggagtacccgatgatgattttagctttacttatttggataaaattattcggttaattaatttatgctccgaaaattcggattatgcagacttcttattattggattctacaatattttgatttaaattctagcggattagctggaacaaataatccaaagttctctgctgtnnnnnnnnnnnnnnnnnnnnnnnnnnnnnnnnnnnnnnnnnnnnnnnnnnnnnnnnnnnnnnnnnnnnnnnnnnnnnnnnnnnnnnnnnnnnnnnnnnnnnnnnnnn

SEQ ID NO: 90462 - DNA, 495 bp, Arabidopsis thaliana columbia
cggtttgggagagagaagagaagaagaagacaccctttaagcaaaacagaggattttcattctctgttctgtttgaattattactaatctatcatcttgttgttctcttcgtcgacaatgtcgggaaacaaagaagaagaggatcctcgtatccatggaatcaaaactaagatccgtgtcgttccagattttcccaagaaaggaataatgtttcaagacataacaacagtgttgttggatccgaaagccttcaaagacacaattgatctgtttgtggagaggtacagagacaagaacatctcagtggttgcaggaatattatctctcattgcaattcataatgttaattaattttctatacatagtgttatttcgatgggattactattcaaaagattcgacttatttcaaggaactcgattttttaattggtttgatgattttccggggaaataagggggtaggtcatgtttttagtgacgtttagtttttttt

SEQ ID NO: 90463 - DNA, 866 bp, Arabidopsis thaliana columbia
tttcccacgcgtccgccacgcctaaaaaaaagaaaaaagagacagaagaagaaaaagataaagaagaatcaaactttgtaaccctttagcagcaatggcgatggctttcaagatggcgacgacggggatgcgtgtgacggatgagtgtacgagttcattcatggacatgaaatggaagaaagttcatagatacatcgttttcaagatcgaagagaagtcacgtaaagtcaccgtcgataaagtcggcggcgccggtgaaagctaccacgatctcgaagattctttaccggtggatgattgtcgctacgctgtctttgatttcgactttgtcaccgtcgataactgccgcaagagcaagatcttcttcattgcatggtcaccggaggcatcaaagataagggcaaagatattgtacgcaacgtcgaaagatgggctgaggagagtgttggaagggattcactatgaactccaagctactgatccgacggagatgggtttcgatattatccaagaccgtgccaaatagattgatcacttaagagaatatgatttgactcactttgtcaataattaacattaattaggtcatcggttaatgtttaattattgctggttagtgcttactcttttttgagtttattatccttgatcagtcttaccggcactatcctttaattatgacgtttgtgttttgattgtgttgttaaaatatttttttgtcggttaagcaaacataaaaagctacgaatttgtcctacgagtaacggatattatacatttatgagagattttattttataaaaaaaaaaaaaaaaaagcggccgctctagaggatccaagcttacggacgcgtgcatgcgacgtca

SEQ ID NO: 90464 - DNA, 494 bp, Arabidopsis thaliana columbia
tggaacttacgtctactttcactggatctcttggcaaagaccataagagatgaaatagctggatgcagcgagaaagcttatgattatgtctctatcagcgatgcccggcagatgttgttgttctcttctgatcaagaactcttaacctatgtcacagatgagcatcctgagtgggaagtgaaggaagggtttgttgtcttccagaaagccaaagaaactgcaccgtgcaaagagattccgtctctgcaactcatcaaccagactctaagctacgccagagagctggagcgtatcgtgtaagattcgacttttctcactgcttgtctcttctcttctgttatgttcctggaaatctctggggcagaaaactttgttatcatgtaatgaccgatattgagcggctcagtattttccccgggtcaatgagactttggtgtgatatcaatctggtttccaaaccctttacggtaaatcctattgtaaggggccccggt

SEQ ID NO: 90465 - DNA, 1004 bp, Arabidopsis thaliana columbia
  unsure (1)..(1004): unsure at all n locations
nnnnnnnnnnnnnnnnnnnnnnnnnnnnnnnnnnnnnnnnnnnnnnnnnnnnnnnnnnnnnnnnnccacgcgtccggagcaatcaaatctataagaaaagaatcgtcgccggtgaagagaaaaaaccatagaagcgatggatccgcagctaactgaagtttcacagcagttcgagagattcaaggcggcgtttgcgaggaaggattacaatacctgtagcgatctgttgtctcagcttaaggttcttcttaccaaattcacaagtcttcctccattgttcgagaattcacctaatgcagccaaggaattgactattgcaagggacatttatgagcatgctgttgttctaagcgtcaaaaccgaggatcaagatgcttttgagagagatttcttccagctgaaaccttactatgtggatgccaggaaccgtattcctcagtctccacaggagaatcttatcctgggtcttaaccttctgaggctgctggtacaaaatagaattgctgaattccacaccgagcttgaattactttcatcagctacactagaggatccttgcatcaagcatgcagtagagcttgagcaatccttcatggagggtgcctataaccgtgtgttgagtgctagacagaccgcgcctgatgcaacttacgtctatttcatggatctcttggcaaagaccataagagatgaaatagctggatgcagcgagaaagcttatgattatgtctctatcagcgatgcccggcagatgttgttgttctcttctgatcaagaactcttaacctatgtcacagatgagcatcctgagtgggaagtgaagggaagggtttgttgtcttccagaaagccaaagaaactgcaccgtgcaaagacgattccgccttttgcaactcatcaacccgnctctaagattcgccagaangcttggnggatcgtgtaagtnggctttctactgntgntctcnctctgnatgtccnggatncttggcanaacttnttnngt

SEQ ID NO: 90466 - DNA, 789 bp, Arabidopsis thaliana columbia
  unsure (1)..(789): unsure at all n locations
atgatactgccnnnnnnnnnnnnnnnnnnnnnnnnnnnnnnnnnnnacgcctgcaggtaccggnccggttttccgggtcgttccacccgtccgggaaataaatctcggtattggtaatgaatttgaagctgatgaatttgtacttttgaatgcatcaagctaagcgccttcttgttttactgtttcaatctatcaattgttctatatagaagtgtttttagttctttgatgctgaaagtgatgtacttttctgttactgtcaatctctttgcaggtaaaggttttgccacaggaagaattagcctaggagaaatagaagtggtgaaaatcaccaagttccatcgagtttggagctctgattcatcacacgacaaatcaaaacgtgctacattttacagagccgatgacattccagaaggattccattgccttggtcactattgccagccaaccgatcagcccttgagaggttatgtacttgcagctcggactagcaaagccgtcaatgctgatgatttcccgcccttgaaaaagcctgtgagttattctttagtttggagtgcagattcagagaaaaatggtggtggttatttctggctacctaatcctccggttggttacagagcaatgggagttattgtaacccatgaaccaggtgaacctgaaacagaggaggtcagatgtgtaagagaggatcttacagagagttgtgaaacctctgagatgatacttgaggtgggttcttcgaagaagtcgaacggctctagttctccttttagtgtatggagc

SEQ ID NO: 90467 - DNA, 509 bp, Arabidopsis thaliana columbia
atcgactcacttagggaaagccggtacgcctgcaggtaccggtccggaattcccgggtcgacccacgcgtccgcccacgcgtccgctcttctccggcgacgattcgtgaaacaatcagttaattgcataacattccttcaaatcctcgccgagcgatccttctccaccgtgaagattcctccaggtcgtcgcaaaaccaccgaattcgacaaacttatcaacgaagctggcagctccggcgatttcgagaccgtacgccgtctcctaaacaaccgtatagttctcggatctttcaacacgagcgacacattcaaattcctcaccaacaccgcttcatactcctcctatttagaagatctccgccgcgttttgcctcagatcgacggcggtttctcgcggaaaaacgcttacgacattttaatctctcgtctctgtaagctcggacgcatcgacgacgctttaatcgttatcggagacatgtctaacgggagattaggcttaacgccgtc

SEQ ID NO: 90468 - DNA, 557 bp, Arabidopsis thaliana columbia
tttaaaaagatggaaaagtaaatttccctcccaatgatgatgaagagtcatgggaaattgccaaactattgttttattgcacctctcaagaagggctttttatattcagacatgaaaactgaggacatgccagtagatgagcctgatgatactcggaaccaagtgtatgaggaaaaaaaatcccggctagaaaagattataacgcgtcctagtaagtccttatcaaagggatcagattctttcaaaggacccaaagaatctatacttttgcttggttggcgtggagatgttgtgaatatgatcaaggagtttgatagttatcttggtccaggcagttcattggaaatattacccccctcccgttagaggacagaagaggagtggaccagagtatagctacaggaaaaatcaagaacatccaagtttcacatagcgttgggaatcatatggattatgatacattaaaggaaagtataatgcacatgcaaaaaaaaaaaaaaaaagggcgcccgctctagaggatccaagcttacgtacgcgtgcatgcggcgtcatag

SEQ ID NO: 90469 - DNA, 1000 bp, Arabidopsis thaliana columbia
  unsure (1)..(1000): unsure at all n locations
ggcccagatcaaaaacaacaatgcaactctcactggttcaagtctcttcagtgtccaacttcagatcccaatcaacgattcctactctctccaactcaaacccatcttgtttacttcttcaaaagtccatctttcctgggtccaagttaaccctccatcgaatttttcgttatccgaagaaaatctcaaatggctctactcgtgcttcactgcttgagacccctatcttatgggctggtcggatttgtgtcttctacgctctcgtgaaagctggctttgctggatccaagtctaaccctatcgtttctggtttggatactggtggtgttgatgttgaatatgatgatggtgctgatcttggtttctcaaagtggcttcagaacattaagggcaacaaacccagttaagggatgcagctgataagaggaagctagtgagcaaatgggacccaacggcaaaggggaacacgtaaggaaggaactacaggatacccttcgaaagccggagggaaacccgtttgcttaaaaccattgcgtctcttctctcagatgatgatcattttagagatgcaacatctcacaagggttgtcaaatacggagggagagtgcgcacggtcaaagcgtatgttgcaacaatgtgagagctctgtttgatgagttaccgacgccacatttggtggtggagatcacaccttttccagccggaccgctcacagagaatgattaccttaaggctgagaagctggagaggattcttaggtctggcgccaacatttgaaccctcttggcagtgttttactatgtgtcataatctagaacctgtacatactctacgatgtcttatgatgcagaatgttcaaatgtttagactctatgaaactgttagttttttgtgaagttaaattatctnnnnnnnnnnnnnnnnnnnnnnnnnnnnnnnnnnnnnnnnnnnnnnnnnnnnnnnnnnnnnnnnnnnnnnnnnnnnnnnnnnnnnnnnnnn

SEQ ID NO: 90470 - DNA, 729 bp, Arabidopsis thaliana columbia
gaccggaatttccgggtcgacccacgcgtcccgaaaacaacaatgcaactctcactggttcaagtgctcttctgtgtccaacttcagatcccaatcaaacccatcttggttacttcttcaaaagtccatctttcccgggtccaagttaaccctccatcgaatttttcgttatccgaagaaaatctcaaatggctctactcgtgcttcactgcttgagacccctatcttatgggctggtcggatttgtgtcttctacgctctcgcgaaagctggctttgctggatccaagtctaaccctatcgtttctggtttggaaactggtggtgctgatgttgaatatgatgatcattttagagatgcaaccaatctcacaagggttgtcaaatccggcggggagactgcgcaacgggcaaagcgtatgttgcaacaatgtgagagctctgtttgatgagttaccgacgccacatttggtggtggagatcacaccttttccagccggaccgcttacggagaatgattaccttaaggctgagaagctggagaggattcttaggtctggccccaacatttgaaccctctggcatatagagaaagtgttttactatgtgtcaaaatctagaacctgtacatacttctacgatgtctttatgatgcagaacgttcaaatgtttagactctatgaaactgttagtttttttgaagttaaattatcaaaatcgttgcgaggct

SEQ ID NO: 90471 - DNA, 630 bp, Arabidopsis thaliana columbia
cgactcactttagggaaagctcgtacgcctgcaggtaccggtccggaattcccgggtcgacccacgcgtccgctcatttcttctagtccttttctctttctttcttcctttttccgctaattacagagcttttctttgagtgaagaaagaatggagttgaaagaacaaggtatgagtatgaggttgtctctggttctcggtaacgctttagtgctaaactgcgccgctttggctttaacggctactatgctctcttctttgctagagctcttctctcaggttactgtcttgaagggtgatgttatagagaatggatatgaggtggttgatgcagtggaaggcaatggaaacaatgatgatagtggtgatgatggagggagaagacgaagaaggcagtgcagatgatgcagaaggaaacgagaccaagaaaggaccggtaagtgatcctgatttgaacggtgaagctggagataatgatgatgaacctgaaggggatgatggtaacgatgacgaggatgatgataaccatgagaacgatgatgaagatgaggaggaggatgaagacgagaatgatgatggtggggaagaagacgacgatgaggatgcggaggtagaggaggaggaaagaga

SEQ ID NO: 90472 - DNA, 528 bp, Arabidopsis thaliana columbia
  unsure (1)..(528): unsure at all n locations
gcttcatggacttcaaggtgtgaatgagaaaggcttctgggttatgggaaatgcaaaagggttgaagaaactnaagtccctctcagtaatgtcgtgcagaggtatgaccgatgttgggctcgaagctgttggaaatggttgccctgatctgaagcatgtctctctgaacaaatgcttgcttgtttctggtaaaggacttgtcgctttggccaaatctgcattgtcacttgaaagtttgaaacttgaagaatgccacaggatcaaccagtttggtcttatgggtttcctcatgaactgtggctcaaagttgaaagctttctctttggcaaactgtctggggcatcagtgaccttcaacctcagaatccctctcttgccatcacccagttgcaagctcttttacggtcttctggtcaatccgattgctgccctgggttttggggggatgcaagtctcccgctttccttggggaaaggtccttgtcaccagcttcaggatgttgaactctgtggactaaacggagtgacag

SEQ ID NO: 90473 - DNA, 603 bp, Arabidopsis thaliana columbia
  unsure (1)..(603): unsure at all n locations
tacggctgcgagaagacgacagaagggtacggctgcgacgacagaaggatacggctgcgagaagacgacagaaggggggattaaacatccaacgttgtggcagaatcagcagcagcactgtggatactcttctcgaaaatctatggaggtgcgatatactctactaaattcccactttttctacaaaaccttagtatcatcatcatcagtccaagtctttttcctaggttttggtcgctaaaacccatagattccacctagaacttagtttctttctcaggacactgcagttgttttttaaaatttttggcaggttccttctaaacaaaggagcctgtttctacaactgttagtgtttttgtgaagcctgtcactgagttctggtaatctagtttagggtttagtcttgaccgtctttttggagttgttgtctctctatgttaagtaaagttcttgtagaagtcctttgttctttggtttaggttcgtgatagtgcctttnatcttcttcctctgttttttcccacttttttgtttaaggcactatcttgtacttatgaatcattgtaactttgtactctctattataaagctttcactgaac

SEQ ID NO: 90474 - DNA, 1454 bp, Arabidopsis thaliana columbia
  unsure (1)..(1454): unsure at all n locations
actcactatagggaaagctggtacgcctgcaggtaccggtccggaattcccgggtcgacccacgcgtccggaaagtttgaaacttgaagaatgccacaggatcaaccagtttggtcttatgggttttctcatgaactgtggctcaaagttgaaagctttctctttggcaactgtctgggcatcagtgacttcacctcagaatcctctctgccatcacccagttgcagctctttacgttctctgtcaatccgatgctgccctgggtttggggatgcaagtctcgctttcttgggaaagttctgtcatcagcttcaggatgttgaactctgtggactaaacggagtgacagatgcaggtgtgcgcgagttgctacagagcaacaatgttggtctagtgaaggtgaacctgagcgaatgtatcaatgtttcagacaacacagtctctgcaatttctgtttgccacggacgcacattggagtctcttaaccttgacggctgcaagatcatcacaaacgcaagccttgtcgcagtagccaagaactgctactcagtcaatgaccttgacatctcaaatactttggtctcagatcacggaatcaaggccttggcatcttctcctaaccatctgaatcttcaggttctttccattggcggctgctcctcaattacagacaaaagcaaggcatgcatacaaaaactcggccgcacgcttttgggatatacatccaacgttgtggcagaatcagcagcagcactgtggatactcttctcgaaatctatggaagtgcgatatactctactaaattcccactttttctacaaaaccttagtatcatcatcatcagtccaagtctttttcctaggttttggtcgctaaaacccatagattccacctagaacttagtttctttctcaggacactgcagttgttttttaaaatttttggcaggttccttctaaacaaaggagcctgtttctacaactgttagtgtttttgtgaagcctgtcactgagttctggtaatctagtttagggtttagtcttgaccgtctttttggagttgttgtctctctatgttcagtaaagttcttgtagaagtcatttgttctttggtttaggttcgtgatagtgccttttatcttcttccactgtagagcttttggcaatggcggtgtaacttcttaatccgccattacaactcttcggagttgtttttttgtgtgttatgtatctgccaaaagctctgttttttcccacttttttgtttaaggcactatcttgtacttatgaatcattgtaactttgtactctctattataaagctttcactgaacataattactaccctttgtaatagaacttgatccttacataattggatcactttgttgtgtgatnnnnnnnnncagcnnnnnnnnnnnnnnnnnnnnnnnnnnnnnnnnnnnnnnnnnnnnn

SEQ ID NO: 90475 - DNA, 513 bp, Arabidopsis thaliana columbia
  unsure (1)..(513): unsure at all n locations
nnnnnnnnnnnnnnnnnnnnnnnnnnnnnnnnnnnnnnnnnnnnnnnnnnnnnnnnnnnnnnnnnnnnnnnnnnnccacgcgtccgaaaagccctagcttcttcttttttcgacgatcaaaagtttcgatttttcagcagcaagatggtgaacaacgttgtctctatcgaaaagatgaaagcactctggcactccgaggttcatgatgaacaaaaatgggcggtgaacatgaaacttctgcgagcacttggtatgtttgcaggaggagtcgtcctcatgcgtagctatggggatctcatgggagtttgagaagaagaatggaggatcatgggagtttgagaagaatggaggagcctctctttagttttcactctctcaaactcttgtattttcttctctagaattggtgtgaactcgtttctgatttgtgtcttgggatgctataaaagagttaattttccattcaccgagggaaggggaaaaggatggtataaaaaaaaaaagggcggccgt

SEQ ID NO: 90476 - DNA, 532 bp, Arabidopsis thaliana columbia
  unsure (1)..(532): unsure at all n locations
nnnnnnnnnnnnnnnnnnnnnnnnnnnnnnnnnnnnnnnnnnnnnnnnnnnnnnnnnnnnnnnnnnnnnnnnnnnnnnnnnnnccacgcgtccgaaaatttctctctcttttgcttacttcactcacagtttcgccgccgggataaatccgttcaatcggcgtttgccacctgccattgttacaagcaatgcattatatcgttaatggcgtagcgcattgagaagagagagagagagcagggaaacaatgatttcccaggtggagagagatctgtcgattcaaaatcggcttccgggaagcgatcacactactccttctccgccaacatctcctcatctctgccggagccggtcgaaatcctcctctgtctccgggcaacagcaaagtcggaacgtcgctcaccgtctctcatggatcattttatctgttcttctccggcgtcagggaattctccttttcgctcctatcatctacatctcctgtatgctttttcacctacacgcggcgtcgtttgatgcctcttccattatc

SEQ ID NO: 90477 - DNA, 525 bp, Arabidopsis thaliana columbia
  unsure (1)..(525): unsure at all n locations
nnnnnnnnnnnnnnnnnnnnnnnnnnnnnnnnnnnnnnnnnnnnnnnnnnnnnnnnnnnnnnnnnncgaccacgcgtccgcaggaccttatccacagtccacacacagcgagactctatttactcgccggcggaagaacaaaatggcgggaagagcgattttctctgtatcttgttcatctactccttccttgtgtatcccttattcaactgcttcgttttcatcgatgaatcgactggcgctccccgccgtccggatttctccccgaaccaacagatttcccaggattcactgctctatgtctgctaacgacatcaaagcgggaaccaatatcgaagtcgatggtgctccttggcgtgttcttgagtttcttcatgttaaaccaggaaaaggtgcggcatttgtgagaactaagatcaggaactatgtgaatggtagcacagtcgagagaacatttcgtgctggaatttctgttgaggaagctaatatatataaagaaaccaaacaattcacatacaaagatgg

SEQ ID NO: 90478 - DNA, 545 bp, Arabidopsis thaliana columbia
  unsure (1)..(545): unsure at all n locations
ataggcgattgngtaccgagcccccctcgaggtcgacggtatcgataagcttgatatcgaattcgcggccgccgaaccacgccatgtctctagtccccggcggaatcgctgttccccttttttgttaagactaggaaagctcagagtcagaggcatgtccagagtttgatcgtcgtatccttgggcttatcaatatcagctgactctcagagtttgctctcatgctttgcccaccacaagggcttagtggcggatgccttgatcgtcctctcggagttgtccctgaacagaatccaaaggctagaagctcttttcagaagatttgaaacctgcttcttgctcataccaacatcatttgaggagcatgacaatcttcttttccttggcatatgacaactgctcatctgatcctgccccaccctcatcctcgctacacgaagcccattcacttcctgattccgatggttcccggagattatccttttcacacgtttttgcccgttccacaaaccctttttgcaaacatttaaagggaccctgtgaaa

SEQ ID NO: 90479 - DNA, 494 bp, Arabidopsis thaliana columbia
agggaaagctggtacgcctgcaggtaccggtgccggaattcccgggtcgacccacgcgtgcgattttctgcaacttctccaaatctcatactttccagaaaatcattttcccaagaaaaataaaactttcccctttgttcttctccccccaacagcaatcacggcgtaccaatcggagctaggaggagattcctctcccttgaggaaatctgggagaggaaagatcgaaatcaaacggatcgagaacacaacgaatcaagtcactttttgcaaacgtagaaatggtttgctcaagaaagcttacgagctctctgttctttgtgatgctgaagtcgcactcatcgtcttctctagccgtggtcgtctctatgagtactctaacaacagtgtaaaagggactattgagaggtacaagaaggcaatatcggacaattctaacacccgatcggtggccgaattaatgcacagttttatcaaccagaagtcaccaaatt

SEQ ID NO: 90480 - DNA, 550 bp, Arabidopsis thaliana columbia
ccacaaacctctatcggcccccccggcccccccccgtagtatcgccggctcatatacgactcatatagggaaagctggtacgcctgcaggtaccggtccggaattcccgggtcgacccacgcgtccggcttactttgaaggcagttttgatgcttgcagatcaactgattagcagagttgaatatatgcattcaagggggtttcttcaccgtgacatcaaacctgacaatttcttgatgggacttggtcgcaaagcaaaccaggtgtatatcattgattttgggcttgcaaagaagtatagggatctccaaacacataggcatatcccctatagagaaaacaagaaccttacgggcacagctcggtatgctagtgtcaacactcacctaggagttgagcaaagtaggagggatgatctggagtctcttggttacgtactcatgtatttcctgagaggaagcttaccgtggcagggactaaaagctggcacaaagacgccgaagtttgactgaattagcgagaagaaagtttaactcctatacaggccttg

SEQ ID NO: 90481 - DNA, 518 bp, Arabidopsis thaliana columbia
cggacgcgagcattacaaaaaacatacacacaaatagcaaatggcgaacaagctcttcctcgtctcggcaactctcgccttcttcttccttctcaccaatgcctccatctaccgcacggtcgtggaagtcgacgaagatgatgccacaaacccagccggcccatttaggattccaaaatgtaggaaggagtttcagcaagcacaacacctgagagcttgccaacaatggctccacaagcaggcaatgcagtccggtagtggtccaagctggaccctcgacggtgagtttgattttgaagacgacatggagaacccccagggcccacaacagaggccgccactactccagcagtgctgcaacgagctccaccaggaagagccactttgcgtttgcccaaccttgaaaggagcatccaaagccgttaaacaacaggttcgacaacagcaaggacaaatgcagggacagcagctgcagcaagtaattagccgtatctaccagactgctacgcacttaccta

SEQ ID NO: 90482 - DNA, 621 bp, Arabidopsis thaliana columbia
  unsure (1)..(621): unsure at all n locations
nnnnnnnnnnnnnnnnnnnnnnnnnnnnnnnnnnnnnnnnnnnnnnnnnnnnnnnnnnnnnnnnnccacgcgtccgaatctcaaaaactggacccctcttaattagatctctaatttgttttctttcttctccaaaatttgacaaagaaaagaattgatcttttgagagggttccagttttttttctctttcgtcttctccattcttgtttgtagaaaaaaacccattttttatttggatttttcatttgattttcccgggaaagttgtaatttttatttttttgagggagattgaaaaagttcgataaaaatgtggggagccgccgcagaaccagcagattcttattacctgattcgtcctgagtgcactgatgtccccaataccaaattcaagatcaaacctggtaaaactctaagtgtaagaaaatggcaagctgcatttacaacagaaggattccttgatattggcaagactctaagtcgaatccaacgaggggggatccatccatcaattagaggagaagtctgggaattcttacttggttgttatgatccaaaaagcacatttgaagaaagagagcaaatccgacaacgtagaagattgcagtatgcttcttgga

SEQ ID NO: 90483 - DNA, 733 bp, Arabidopsis thaliana columbia
  unsure (1)..(733): unsure at all n locations
tggaaaactaaaacaacgagtggtgttgctctctccatcttcctcttcatcttcttctgttctctctctataaatacaagtttactcttcctcttcctcaaatctctgactcttctctgcattatctcttcgatctctccaactctccaaaaccttcctcagaatgggaactaccaatggaacagactatggagcatacacatacaaggagctagaaagagagcaatattggccatctgagaatctcaagatatcaataacaggagctggaggtttcattgcatctcacattgctcgtcgtttgaagcacgaaggtcattacgtgattgcttctgactggaaaaagaatgaacacatgactgaagacatgttctgtgatgagttccatcttgttgatcttagggttatggagaattgtctcaaagttactgaaggagttgatcatgtttttaacttagctgctgatatgggtggtatgggttttatccagagtaatcactctgtgattatgtataataatactatgattagtttcaatatgattgaggctgctagggtcaatgggggtaagaggtccttttatgcttcgggggcttgtatccttcccgaggttaagcagttggaggctcctaatgtgggcttgaaggggccagatgcttggcctgcaggccccaagtgctttggttnggnnnttctccgggggnttnaaccttcaccaagttgggtttgnccg

SEQ ID NO: 90484 - DNA, 681 bp, Arabidopsis thaliana columbia
  unsure (1)..(681): unsure at all n locations
aatacgactcatttagggaaagcacgtacgcctgcaggtaccggtccggaattcccgggtcgacccacgcgtccgtgcaacttttatcatcggctatagagttccattggaagactatctctttgaagcatctgatggcagacgttacttgaactttacctttgggtgcccgctcgtcgaaactattgttaacaagttgactatcaaagtcgtgcttcctgaaggatcaaaggacccttctgctgttttgccctttacagtcaatcaagagttgcaggtcaaatactcataccttgacattgtgggaagaaccgtggttgtgttgcaaaaagataacgtagttcccactcacaacgtacccttccaggtgtactatacattcaaaccaatatacatgctagcggaaccattcatgcttgtatcggctttcttcttagtatttgtggcttcgcttgcgtatgtacacatcgatctcaatatcgtcaggaagtagaagtcttatcaacagtccttcgctttcacttatagactcgtaaaagaaaatacttttgatcatcccttgaagaactaaactttgtaggtgttgctgcttttagtagagttatatctttgacactactttgctctccaatcgggggccgctctagaggatccaagcttacgtacgcgtgcgtgcgncgt

SEQ ID NO: 90485 - DNA, 509 bp, Arabidopsis thaliana columbia
aatacgactcacttagggaaagctcgtacgcctgcaggtaccggtccggaattcccgggtcgacccacgcgtccggactcatcttctttctctttcggaacaaaaatgacgtctcctctctcagatctcctaaaccttgatctatcagacaccaagaaaatcatcgctgaatacatatggatcgggggctctggaatggatattagaagcaaagccaggacattaccaggaccagtaagtaatccaacaaagcttccaaaatggaactacgatggatctagcaccgatcaagctgccggagatgatagtgaagtcattctttatcctcaggcaatatttaaggacccattcaggaaggggaacaacattctggtgatgtgtgatgcttacagaccggccggagatccaattccgaccaacaataggcacaaggccgttaaaatcttcgatcatcccaatgtgaatgctgaagagccttgggtttgggatagagcaagaatacacattac

SEQ ID NO: 90486 - DNA, 434 bp, Arabidopsis thaliana columbia
  unsure (1)..(434): unsure at all n locations
agagagggaggtaacataacagaggcatatgtttcaacaaagcacaaacttcctgaagtaaatgtggaggcatcaccactggtaatgagtttggactctcctccatatgccattcttggagaacccttcacttacgctgttagaatctgcaaccagacacagttgctgcaagaagcaaagtttggtctggctgatgcacagagttttgtcctgtctgggtctcacagcaatacgggtttcagtccttcccaagtccagaacacggtcttaagttttaagctagggcccctntaaactttcgggtgaccagcaactcccaaaggtaaccttttacaaattttggggggatttgntcctggggttttaaacccttttgggggtttnttaaaaggnnnttttgggnttcccncnagncccaaaaggcgggaaagccc

SEQ ID NO: 90487 - DNA, 1168 bp, Arabidopsis thaliana columbia
  unsure (1)..(1168): unsure at all n locations
nnnnnnnnnnnnnnnnnnnnnnnnnnnnnnnnnnnnnnnnnnnnnnnnnnnnnnnnnnnnnnnnnnccacgcgtccgcccacgcgtccgcccacgcgtccgcccacgcgtccgacctattgctcaataggataaagccagcccctgattctgaagacgtgtcttctctgccgctgaacgaaaaaagtgtgttagttgtcagtgccaaaaattgctcagaaatagcgctgaaactggtgtccatgtccattgaatttgatgatgaacaaggggaaacttcatgtttgattcagcagggtggtgggtgtggagactccccaagctctgcaaatcttgcgccaggggaagagttcaaaaaggttttcacagtcataccaacgacgagaactccaaagcttggtttgggatcaatacatttaaaatggaggagagagggaggtaacataacagaggcatatgtttcaacaaagcacaaacttcctgaagtaaatgtggaggcatcaccactggtaatgagtttggactctcctccatatgccattcttggagaacccttcacttacgctgttagaatctgcaaccagacacagttgctgcaagaagcaaagtttggtctggctgatgcacagagttttgtcctgtctgggtctcacagcaatacggtttcagtccttcccaagtcagaacacgtcttaagttataagctagtgcctctgacttgcggtgaacagcaactcccaaagataactttgacatcagcgcgatatgctgctgagtttcagccatctgcggttgcttcaagtgtctttgtgtttccctcagccccacaagccgagaaagccatctctaccagcaagtagtgtaacttcgcatgacttgggttttcagatgtctatgcagtttcagccatatgtggttaagacagacatattgaatcagtttggtaaattttgatcctgaagtgtcgcctatgttgtattttcatttttccttctgttgttgataataatggatattttttggagaacccaaactagacacataggattaggacacaatctgttttgagatgtgttttgtggcaactgtttttctttcaatgaggccggccgctctagaggatccaagcttacgtacgcgtgcatgcgacgtcatagtcattctatagt

SEQ ID NO: 90488 - DNA, 286 bp, Arabidopsis thaliana columbia
ctaatggcttcttcgaaactccatcatcatcctcaccgcagaaaatccccaatacgttgcttctgtctcttaatcataaccatgtcctccattctcatccttctcttctctctcttcctcttctcctctccctcctcctcctcccgtcaccaccaccaccacaattccggcgacacgtctccggtcaatccttcgtcgtcgctcgccgctcacatccgtctcgcttgtaacgcaactcgttacccagaccaatgcgtcgcttccctatccgaacagggtcgggttc

SEQ ID NO: 90489 - DNA, 1525 bp, Arabidopsis thaliana columbia
  unsure (1)..(1525): unsure at all n locations
tggccgttcgcagtaccgcaccggaattcccgggtcgacccacgcgtccgccttcctgagtactagccagctccctccatagcttttcaattacaaaaatctccttttctcaaagctctggttccccaaatcctctcgtcttttgtttgccctcacaacaacaacaacaacgcagagatggccatgtctgctattggcttcgaaggttacgagaagcggcttgaagttactttctttgagcctggtctctttcttgacactcaaggaaaagggctacgtgctttagctaagtctcagatcgatgagattcttcagccagctgagtgcactatcgtctcatctctctcgaacggtcagcttgactcttatgttcctctctgagtccagtctctttaatcttcccgtacaagatcgtcatcaagacttgcggtactactaagctcctcctctctattgagcctctcttgaggttagccggtgagctttctcttgacgttaaggctgtgaggtacactcgtggaagtttcctctgtcctggaggacaaccattccctcaccgcaacttctctgaagaagtctctgttcttgatggtcactttgctaagcttggtttaagcagtgttgcctacttgatgggcaatgacgatgaaaccaagaaatggcatgtttactctgcttcttctgccaacagcaacaacaagaacaatgtctacacgcttgagatgtgtatgactggtctagacaaagacaaggcatctgtcttctacaagaacgagtcaagctctgctggttctatgactgataactctggcatcagaaagatactgcctcaatcccaaatctgtgactttgagtttgagccctgtggctactcaatgaacagcatcgaaggcgacgcaatctctaccatccatgtaactccagaggatggtttcagctacgctagctttgaagcagtgggatatgatttcacaaccatggacttgagccatcttgtctcaaaggtactaacttgcttcaaaccaaaacaattctctgtagctgtccactcgaccgtggcacagaagagctacgactctggtctctctgtggacctagacgattacggatgcaaagagtcaacaatggagtctctaggagaagagagaggaacagtgatgtatcagaggtttgagaagctaggaaggtattgtggttctccgagatctaccttgaaatgtgagtggagcagcaacagtagctgcaacagcgaggacgagaaggaatagggaatctaaaagctcaagtttttaattttcgttttcttgaataatgtcttatggatatttttcttcttcttcttatttcccttaaaccagtgtttgtgtctggtctatgtgaattcggatgatccaaatgttgaatataatggatcaagtatctattattatgatcaaaaaaaaaaaaaaagggcggccgctctagaggatccaagcttacgtacgcgtgcatgcgacgtcatagctctactgagtgttcnaacnnn

SEQ ID NO: 90490 - DNA, 469 bp, Arabidopsis thaliana columbia
  unsure (1)..(469): unsure at all n locations
tatggtgttaatgatccanttgatatgaagttgcttggcaaagctggtgagatgggcactttggaatcgccagacgatgaaggcatcaaaaccctttacgtcggtggacttaactcgagaattctcgagcaggacatacgagaccaattctacgctcatggagaaattgaatctatcagaatcttggccgataaagcctgtgcatttgtcacatacacaagccgtgaaggtgcagagaaggctgcgcaagagctctccaacaggctagtcatcaacggttcagaggcttaaaactcacatggggaaggcccaaacctgttcaagattggtgcaaacccacccaagggcggtgttggctcatagtgggttactacctcgagccgttatatctcagcagcacaatcaacccccaccaatgcagcagtactatatgcacccaccaccagctaaccaagacaaaccttattac

SEQ ID NO: 90491 - DNA, 1012 bp, Arabidopsis thaliana columbia
  unsure (1)..(1012): unsure at all n locations
atacgactcctttagggaaagccggtacgcctgcaggtaccggtccggaattcccgggtcgacccacgcgtccgcacatacacaagccgtgaaggtgcagagaaggctgcgcaagagctctccaacaggctagtcatcaacggtcagaggctaaaactcacatggggaagacccaaacctgatcaagatggtgcaaaccaacagggcggtgtggctcatagtgggttactacctcgagccgttatatctcagcagcacaatcaacccccaccaatgcagcagtactatatgcacccaccaccagctaaccaagacaaaccttattacccatcaatggacccacagagaatgggtgcagtcatttcaacccaagaggctggtggttcaagcactgagaacaacggagcttcatcttcttcttacatgatgcctccacaccagtcatacccaccaccaccatatggatatatgccatcgccttaccagcagcagtatcctcctaaccatcatcatcaacctagtcctatgcagcactatgccccgcctccagcagcttacccgtacccacagcaacctggtcctggatcaagacctgcaccgtctccaaccgcggtctctgctatatcacccgactctgcacctgctgggtctggagcaccttcgggatcctctcaacaagctcctgatgtttctacagctactggttcgtctcagtagagaagatatatcgcttaaaaaatgtactgcaagtttcccgctattcaggacgaaggttttttgtattctgaatgaatcattttcttctgctttttaaagaacttcggaatgtattgtttcttcaaaacggttgttaacgaaatctatcagttatagaggcaattggttccnnnnnnnnnnnnnnnnnnnnnnnnnnnnnnnnnnnnnnnnnnnnnnnnnnnnnnnnnnnnnnnnnnnnnnnnnnnnnnnnnnnnnnnnnnnnnnnnnnnnnnnnnnnnnnnnnnnnnnnnnnnnn

SEQ ID NO: 90492 - DNA, 491 bp, Arabidopsis thaliana columbia
  unsure (1)..(491): unsure at all n locations
atgatatgccnnnnnnnnnnnnnnnnnnnnnnnnnnnnnnnnnnnnnnnnnnnnnnnnnnnnnnnnnnnnnnnnnnnnnnccacgcgtccgcggacgcgtgggcggacgcgtgggcggtggtggacatccgttagatggaaaaatgggcggcggaggtggcggtcccaacggtaataaaggaggtggcggagtccagatgaacggaggtcccaacggtgggaaaaagggtggtggtggaggcggcggcggaggaggaggacccatgagtggaggcctcccgccaggtttccggccaatgggaggcggtggtggtggagggggaggacctcagagcatgagtatgccaatgggcggtgcaatgggtggtccaatgggaagtctaccacaaatggggtggtggtcccggtcccatgagtaataatatgcaggcgggttcaaggattacccccaatgggtccaggaggtggtggtggcggtggcccatccgcag

SEQ ID NO: 90493 - DNA, 858 bp, Arabidopsis thaliana columbia
tatacgactcattatgggaaagccggtacgcctgcaggtaccggtccggaattcccgggtcgacccacgcgtccgcttcaatcgtcaatcgttgaatccgattcgatttgcctctcttccggcgtagcttcgacggtggcaatggcggctccgggatcggttcagaaaggagatgaagagtggcgtgcgattctttcacctgaacagtttcggattcttcgtcaaaagggcactgaatatccaggaacaggggaatatgtcaacttcgacaaggaaggagtttacggttgtgtaggatgcaatgctcctctttataaatccaccacaaagttcaacgctggttgtggctggccagctttctttgaaggaatccccggtgccattacccgaacgacagacccagatgggagaagaatagagatcaactgtgcaacatgtggtggacatcttggtcatgttttcaaaggagaaggtttcgctactccaaccgatgaacgccattgcgtgaacagcgtttcgcttaagttcacacccgcagcgtcttccttgtaaatcttggccgaacaagattatttgttctttctctggattttttcactcaagtgagtgggagaaaaacagaacaagaatcttgtatgagtgtgtgtgtctatactgtgtactgtattttttctttcatgactatttaaattcatcacctcgagcattttgacaacaactgtagtctgtagtatgtatgatttgtaccttgaataaaacacactcttgtcttgtaaaaaaaaaaaaaaagggcggccgctctagaggatccaagcttacgtacgcgtgcatgcggcgtcatagctcaactatagtgtc

SEQ ID NO: 90494 - DNA, 731 bp, Arabidopsis thaliana columbia
acttaagctgaacctccaccgcggtggcggccgctctagaactagtggatcccccgggctgctttaattcgcggccgccaaaattgtagccaatcttccgtccgtcttggctccgccgttcggtttccgttaatattttacaaaatcatttcattttcttttttaacttccaaaaaatcgaattttgttgaatcttctaagctcaagctaataccgatttcgaaatggaggaaggtcgtgacgacgagtattgtagtttttctaattccggcgatcgcgacggtggattgagcggttgttttttcttggatcatgttggccaagttttgctttctcgaaatcatgatggtttgtcctggaaatgtttggattcttcagattgtgagggaacaacttgtttgggaattataatttgcgagaattccgaaactgagatcaaattctctgatatttatgctgtggagtttgttagctatggcttggtgcatagtccaaagttaggacttagacatgccaaagaatgtttccgggaacgcttgttaaatactcaagagatgtatcggttcactgtccacggatttcaaagttcaccaaaagagccttgtctttggaaccttgctgcattcacttttggacatatggatttgcagacgtgcccaaagttggatggatcaattggaattacttctttgatccaggaggtagaaagaccaagaaatctttttgggttt

SEQ ID NO: 90495 - DNA, 505 bp, Arabidopsis thaliana columbia
atacgactcatatagggaaagccggtacgcctgcaggtaccggtccggaattcccgggtcgacccacgcgtccgcggacgcgtgggcggacgcgtggggtcgtctaaggacaagaaactatcgaagccaacaagtggtcgtactggtggtatccgtacactttccgatctgaaccgaagatcagaacctgattccgatagtgactccgatggacctcaagaatacttcaccggtggcgaaaaaagtggtatgcttgttcaagatcctacaaaagaaccaaaacacgatgatgttgatgagatatttaatcaagcaagacagctaggagctgtggaaggacctcttgagcatccttcgagttctagaagctttacaggaacaggaagattgctttctggagaaagtgtgccaacggctcttcaacagcctgagcctgtgattcacaatattattttctggtctaatggattcactgtagatgatggacctttgaggaagttggatg

SEQ ID NO: 90496 - DNA, 514 bp, Arabidopsis thaliana columbia
  unsure (1)..(514): unsure at all n locations
nnnnnnnnnnnnnnnnnnnnnnnnnnnnnnnnnnnnnnnnnnnnnnnnnnnnnnnnnnnnnnnnnccacgcgtccgatctgagcactgtcaatgtcatcaccaccgaagtagagttgactccactcaacagaaactgaaactggaaagtttgagacttttaagatgtcagaaacagaatttaaagtgttgcttgagacattcacatttcctgctgattctgctcccttcaagagttgtcatgcctctaccatagttgaggttgttaaagatcatttcttggctgcgtatttcggaggcaccagggaaggagcacctgatgtcaaaatctggttgcagcatttcaaggatggtcaatgggattcaccggttattgttgatgaagagccaggagttccaatgtataaccctgtcttgttcaaacttccatctcatgagctcttattgttctacanaatcggccaggaggttcaaaaatggagtggttgcatgaaacgatcatatgataaaggtata

SEQ ID NO: 90497 - DNA, 564 bp, Arabidopsis thaliana columbia
  unsure (1)..(564): unsure at all n locations
nnatgatttgccnnnnnnnnnnnnnnnnnnnnnnnnnnnnnnnnnnnnnnnnnnnnnnnnnnnnnnnnnnnnnnnnnnnnnnnccacgcgtccgcgcctattgttgccgttgcttgctatctttcgccgtcgtctctttagcttcttgcgaagatggttcttcaaaacgatatcgatctgcttaacccacctgctgagcttgagaagaggaagcacaagctcaagcgtcttgtccagtctcccaattccttcttcatggatgtgaagtgccaaggctgcttcaacatcactactgttttcagtcactcgcagactgttgtggtgtgcggaaactgccagacaattctgtgccagcctacaggaggaaaggcaaagctcaccgaaggatgctctttcaggagaaagggtgattgattgaagcaatcatcaaaataatgaaggctgttttctttttcttttttttttgttgttgttggctatgatgttatctctggaattttaaaatgtttggatttttaatataagtaagcagagtttgctctttttaaaaaaaaaaaaaaaaaa

SEQ ID NO: 90498 - DNA, 463 bp, Arabidopsis thaliana columbia
acggacgcgtgggccggttgttaccaccacacaacgccatggaagctgctcttgctgcatgcgctcttccatcgctccgaattctcaatacgaaacctcgtttcagatgttccttctccaatccaagcctacccatttctcctaattcccttatcacccgcaaatcaagtcgattcacaaccgcagtatcatcaccaccatcatcatcagccgctacgtcaacgaattctccaccggaacctgaagccctattcgaacccgggtcggataagttcgattggtacgctaattggtacccagtggatgccaatttgcgatcttgacaagaaggttcctcatgggaagaaagttatggggattgatttggttgtttggggggataggaacgagaagcaattggaagtgatggatgacacgtgtcctcatcggcttgctcctttggctgatggaaggattgatcaat

SEQ ID NO: 90499 - DNA, 432 bp, Arabidopsis thaliana columbia
tcttggacgcgtccgcccacgcgtccgaagaaattgcaaaaagaagaagaagatatgagttctcgaattttatcctccgattcggacgacgttgatgaagaaaacccgaaaactcacgagaatggtccaattggaggaaagactcaaaatttagggcaaagcaagggaggtgatagtgataatgttgtaaagactaatacttgtttcgtgtgtgatgggaaagacaattgggttttggtatgttacggagaggaatgtactatagctattcatcagagttgtgcatctgatgaacctgatttcgatgaatttggaaatttctattgtccttattgttggtataagcgtgtagttgtcaagtgtttggagttagggaagaagcttatgctgactgacaagtctaggaagggatgtatagagagtttaggagga

SEQ ID NO: 90500 - DNA, 899 bp, Arabidopsis thaliana columbia
aatcgactcctttagggaaagccggtacgcctgcaggtaccggtccggaattcccgggtcgacccacgcgtccgcttctcctatctctcattttcgtgggttttgtttttgttatcttcttcgttcaggatattattacatttgggactcaagaagaaatcgaatctatcgtgtgtgtagattgcttctctctatctcttctctcgctacacaacaatggctgcttacacgtgtacttcccgtccgccgatttctatccggtcagagatgagaatcgcttcctcgccgacgggttccttctctactcgacagatgttctctgtgttgccggaatcgagcggattgaggactcgcgtttctctatcttcactctcgaagaattctagggtttcccgattacgacgaggcgttatctgtgaagctcaggacactgctacaggaattccagtggtcaacgattcaacatgggactctctagttctcaaggctgatgagcctgtgtttgtcgacttttgggcaccatggtgtggacccctgcaaaattgattgatcccattgtcaacgaactcgcgcaaaagtacgccggccagttcaagttctacaaacttaacactgatgagtctcctgcaacccctggccagtatggtgttagaagcatcccaactatcatgatctttgtcaatggtgagaagaaggatacaatcatcggtgctgtctctaaagacactttagcaaccagcatcaacaaattcttgtaatgaactactagtcactgttctcttttctctgtatctctcgactctctaccttttacctatctactcatcactgttcatctagacttgtatgataatatgatgtctcaggttttcagaatttgaagtctacgaaaacatttt

SEQ ID NO: 90501 - DNA, 368 bp, Arabidopsis thaliana columbia
gtcctctctccagtcactgtttccgaagccctaacgttttcaaggtcgccgattaaatcaccaaaggaggcgtttttatactattcccggctcaacacatggcggaggaagatgttatcgctatccccgtgcagccatctgaccacaagcgcaagcttgagaatctcgaatcggagatcctcgagcagcaacacgcctgctcgattgataatgacgtttctgtagatgatgacaaaaacgcatctgattattgtcagccgaagcgaccgaagcttgacgatgaagctgctgatggtttagggattgggggaacggtagaaaacagtggtgatgttgaattcatggaggagggaactgagaaacccatt

SEQ ID NO: 90502 - DNA, 487 bp, Arabidopsis thaliana columbia
gggaaagctggtacgcctgcaggtaccggtccggaattcccgggtcgacccacgcgtccgagatcttttaaatcaacctgataaccgagtctgcgctgattgtggcgcttctgatcctaaatgggcatcagcaaatatcggagtattcatttgcttaaaatgttgcggtgtgcacaggagcctcggcactcatatttcaaaggttttgtctgtgacactagatgaatggtcagatgaggaagtcgattccatgattgaaattggaggaaatgcgtctgctaattcaatttatgaagcttttttacctgacacgtgctctaagcctggacctgatgttaatcatgaccaggcgtatgagattcattagggcagaatatgaactgcaagagtttctgaaaccaagcttgcggattacatccgggaaaggctcaacaaagagttcagcttttcttacatcaagtctttctagaaagatcatggatagttt

SEQ ID NO: 90503 - DNA, 519 bp, Arabidopsis thaliana columbia
  unsure (1)..(519): unsure at all n locations
nnnnnnnnnnnnnnnnnnnnnnnnnnnnnnnnnnnnnnnnnnnnnnnnnnnnnnnnnnnnnnnnttttggttcgcttaaacggcgtgcttcgcgacgaaccgccacagataaggttcttctttttttttccaatatctctggattttttttcccctcgttgaagaaaatctagtggtgattaagccataggggaaacaaaacccagagagacgagtttgctagatttttttttttttttggaggctgcatgagtttggagaagaaggcgagtagtacaaattacaactccagaaaggagaagaggagaatcaatttatagaatggttgtttcaatggctttggtcagacattctccgtctttcgattttctgtttcattttccggtcgacagaagccgttttctatcgccggttgctttttctagcgttcgctatcatcgcttccattcttgtagatggttaagtctccgctcttcaccttcatgttctcgcaggttaaacagttttagttcgaggtgt

SEQ ID NO: 90504 - DNA, 710 bp, Arabidopsis thaliana columbia
  unsure (1)..(710): unsure at all n locations
tgatttgccggcactatacgactcattatgggaaagctggtacgcctgcaggtaccggtccggaattcccgggtcgacccacgcgtccgcggacgcgtccgcccacgcgtccgtacaaaaacctgacaatcgaaacacagtttttctgataataatatagacatttaccattatgcccttctaactgaaaacggcaattacgttccttgttatttgttttcttccttctccttctgtttcttttttgtggctttaatttttttcatattaattcggaaagagaaagactcttcactcccataacagtcgccggtaacagaatcactccgatgatcgagactggtaaataccttctcggcgccgccggtgctagcggtttcggctctaaatccaccgccgaggaagttaccgagaactgcgaccttcgttccatcacagcggttatcaccggtgcgacgtcggggatcggagcggagacggcgagagttctggcgaaacgaggagcgaggttgatttttccggcgaggaatgtgaaagcagcggaggaagcaaaagagagaatcgtttctnagtttccggagacagagatcgtcgttatgaagcttgatcttagttctatcgnctccgtacgaaactttgtcgccgattttcgagtctctttgatcttccnctttaaccnttnttcataaacaaacgnaggcangttnnga

SEQ ID NO: 90505 - DNA, 717 bp, Arabidopsis thaliana columbia
  unsure (1)..(717): unsure at all n locations
actcactttagggaaagcacgtacgcctgcaggtaccggtccggaatcccgggtcgcccacgcgttcggtgtggaacaagttccagaacctatggaaatcgatgtagatggaagatctatttctggaaaagaagatcttgaaagtatacgggaagatggagaacttccctctttggtcacggcggctgcttcgttaaccagttccaatcataccccatcgaaagtatctaatcaagcacggtcaaggcagttggccttgatgacaaagaatctagattctccgattagcatacgaaagtccccaagtttcaagatatacgaagatgatttggatcctgttctggacgatgatagtgaaatagatgagccaaaccggaagaactgaggcgcatgtggaagagtatgccctgagaaagctgataattcatgggtggattatggttcgagagagcttgcgctngtgttctccaggaaaacagatggccgaaagttgtagaagttagaagcaatgggacanattagcatggagtatgctcttcgacctcctttgtnttctctgtctctccacgcatcttcttcatcaggaaatgaaantgcgacaaatgaaagtgaccattacaatgaacttcgagcaatggaagcagaagtgaaccttcatatgttgaagaatatctctttagatcaagaagactatctnctatctcataaatcagatgc

SEQ ID NO: 90506 - DNA, 555 bp, Arabidopsis thaliana columbia
  unsure (1)..(555): unsure at all n locations
nnnnnnnnnnnnnnnnnnnnnnnnnnnnnnnnnnnnnnnnnnnnnnnnnnnnnnnnnnnnnnnnnccacgcgtccgcgaagattgtttcttcttactccaatcctctttctcacttctcgcagttgggattttcttctggaaagaatcaagtcctgtaacttatatgcatctggctgatcaaataaagtaatggtggacgatacatcaccttttctggaggttttttgtgaagtttctggtaaagactaccgattcacaacagggacaaaggcggagtttgctgtctctgtgatcaacaggaaacttggttcgttgaaacctcgagtgatttacatcgaagcagcaaaggaaggtgaagagcctattagttttggtgataatgctagtcttctgaattatggacttggttggaagttgaagacagttgttgatgctgatctacctggaacggagaaaaacaatcgacaacagcggttttcttctgtattttcgacgggttttgcaaatgattcaacaccagacatcggagagcaaagtctgaaatacattgggag

SEQ ID NO: 90507 - DNA, 503 bp, Arabidopsis thaliana columbia
  unsure (1)..(503): unsure at all n locations
nnnnnnnnnnnnnnnnnnnnnnnnnnnnnnnnnnnnnnnnnnnnnnnnnnnnnnnnnnnnnnnnnnnnnnnnnnnccacgcgtccgcgtttgtttcttcttcagccatatcggaaaaaacgatatccgacgagccattcggtgtttgttccgagaagctccgatcgatctgtgttagggtttttctttttccgccttatgaatctctctatcgcggtttcattagattcagtttaactcgagtgatgaaaccaatctccgtgctagagctctttgatcccgtggctggtaggatattacggcgtttgtagctctgtcgtcgtggatagagttagaacgacgaaatcagccttggtttcctaactgtatctgaatttttgcaacaatgtctgagctaaaagagcgcctgcttcctccaagacctgcttcagctatgaaccttagagatgcttctgccactccgccttctgcttctggaagaccaccccttcttgggagttgaag

SEQ ID NO: 90508 - DNA, 542 bp, Arabidopsis thaliana columbia
  unsure (1)..(542): unsure at all n locations
gagactggcttgcttagccgcggagaactcagaactcattcgctgcaaacatggcaagaggtttgaagaagcatctgaagaggctcaatgctcctaagcattggatgcttgacaaacttggtggtgccttcgcccccaaagccgtcttctgggcctcacaagtcgagggagtgtcttcccctggtcctgatcatcaggaacaggttgaagtatgctctgacttaccgtggaagtgatctcggatcttgatgcaaaaggcatatccaaggttgattggcaaagtcaggacctgacaaggctttacccctgctgggttcaatgggatgttggagcctttcccccaagaccaaaattggggaccttcccggccttttttttttcgccacccaaggggccggtttcccggcttccactccccatcaaagggttgggggaggctaagggtccaagggcttttaaaaggttaggtctnttnccagntttggtaanaagggggttttccttacctgnnnnntttttnttgggtggnccatncggttncc

SEQ ID NO: 90509 - DNA, 648 bp, Arabidopsis thaliana columbia
  unsure (1)..(648): unsure at all n locations
cctgaacacttatgatggtcgcaccaccgnttaccctgacccgctcatcaagccaaatgacaccatcaagctggaccttgaggagaacaagattgttgagttcatcaagtttgacgtgggtaacgttgtgatggtgactggaggcagaaacagagggcgtgtgggtgtgattaagaaccgtgaaaagcataagggaagctttgagacaatccacattcaagactcaacagggcatgagtttgccacaaggttggggaatgtgtacacaatcggcaaaggaacaaagccatgggtgtctcttccaaagggcaaaggtattaagctgaccatcattgaggaagccaggaagagacttgcttcccagcaagctgcttgaaagtccaactgctttgaatcatcaagacccgtttcttttacagactcgctgcttgtctcagtttgtgagtctatttcttttcttatgttgttggatttcaaaacccatcaaaaaatagctgagtagtgctttttgtaatgtttgtatggtggattttttggtgatttaccgtttaaatcagatgacagttaacccaaagaaaaaannnnnnnnnnnnnnnnnnnnnnnnnnnnnnnnnnnnnnnnnnnnnnnnnnnnnnnnnnntgtaccta

SEQ ID NO: 90510 - DNA, 821 bp, Arabidopsis thaliana columbia
  unsure (1)..(821): unsure at all n locations
atgatcctgccagctactaatacgactcacattagggaaagctgcgtacgcctgcaggtaccggtccggaattcccgggtcgacccacgcgtgcggggacgtttccgtctccactccatcaaggatgaggaggctaagttcaagctttgcaaagtgagatcgatccaatttggtcagaagggtattccctacttgaacacatatgatggtcgcaccatccgttatcctgacccgctcatcaagcctaacgacaccatcaagctcgaccttgaggagaacaagattgtggagttcattaagtttgatgtgggcaacgtagttatggtcactggaggaagaaacagagggcgtgttggtgtgattaagaaccgtgagaaacacaagggtagctttgaaaccatccacattcaagactcaacaggacatgagtttgcaacaaggttgggaaatgtgtacacaatcggtaagggaacaaagccatgggtgtcccttccaaagggtaaaggtattaagttgaccatcattgaggaagccaggaagagactttctgctcaacaagcttgatagttaatactatgctctgttttccagtttcagaacaaaccatgctttagtttgcagcttttcaatgagtcacttttgttttaaaacttatcttttcggattgttatgagctatattttggaccttttgcgctattaatattaagtttgaactcaaaaaaaaaaaaaaagnnnnnnnnnnnnnnnnnnnnnnnnnnnnnnnnnnnnnnnnnnnnnnnnnnnnnnnnnnnnnnnnnnnnnnnnnnncaannnnnnnnn

SEQ ID NO: 90511 - DNA, 682 bp, Arabidopsis thaliana columbia
  unsure (1)..(682): unsure at all n locations
agctannnnnnnnnnnnnnnnnnnnnnnnnnnnnnnnnnnnnnnnnnnnnnnnnnnnnnnnnnnnnnnnnnnccacgcgtccgcggaatgggcggacgcgtgggttgagactggcttgcttagccgcggagaactcagaactcattcgctgcaaacatggcaagaggtttgaagaagcatttgaagaggctcaatgctcctaagcattggatgcttgataaacttggtggtgcctttgcccccaagccgtcttctgggccacacaagtctagggagtgtttacccttggtccttatcatcaggaacaggttgaagtatgctctgacatacagagaagtgatttcgatcttgatgcaaaggcatattcaggttgatgggaaagtgaggactgacaagacttaccctgctggtttcatggatgttgtgtctatccccaaaacaaatgagaacttccgtcttttgtatgacaccaagggacgtttccgtctccactccatcaaggatgaggaggctaagttcaagctttgcaaaagtgagatccgttcccatttnggcaagaagggtttcccnaccttgaacanatattntggcggancaacccgtnatccnnacccngntnttaagcttacggaacctnaagttggcctttgggggcaaatttggggnattagtttttgggatc

SEQ ID NO: 90512 - DNA, 1117 bp, Arabidopsis thaliana columbia
  unsure (1)..(1117): unsure at all n locations
nnnnnnnnnnnnnnnnnnnnnnnnnnnnnnnnnnnnnnnnnnnnnnnnnnnnnnnnnncccacgcgtccgccgacgcgtcagagcagctgcaaacatggcaagaggattgaagaagcatctaaagaggctcaatgctcctaagcattggatgcttgacaaacttggtggtgccttcgctcccaaaccatcttctggacctcacaagtcgagggagtgtcttcctcttgtcctgatcatcaggaacaggttgaagtatgctttgacttaccgtgaagttatctctatcttgatgcaaaggcatatccaagttgatggcaaagtcaggactgacaagacttaccctgctggtttcatggatgttgtatccatccccaagaccaatgagaacttccgtcttctctacgacaccaagggacgtttccgtctccactccatcaaggatgaggaagcaaagttcaagctttgcaaggttcgatctatccagtttggacaaaaaggcattccttacctgaacacttacgagggtcgccccatccgttcccctgacccgctcatcaagcctaatgaccccatcaagctcgaccctgaaggccaacaaaattgtcgagttcatcaagtttgatgttggcaatgttgtgatggttacaggaggtagaaacaaagggcgtgttggtgtgattaaaaaccgtgagaagcataagggaagctttgagacaatccacatccaagattcaacaggacatgagtttgcaacaaggttgggtaatgtgtacaccattggcaaaggaacaaagccatgggtgtctcttcccaagggcaaaggtatcaagctgactatcatcgaggaggccaggaagaggcttgctagtcaacaggctgcttaattttgtgattttcagttctttgttatgcttctttagacgtttcatatttcctagactcacttcgtttcttttggtactctgctcagttttgaaacttctcttatattatttatttcaagagttaaaaacatcaaaaaaaaaaaaaaaaaaaagccaaaaaaaaaaagggcggccgctctagaggatccaagcttacgtacgcgtgcatgcgacgtcatagctcgtatatagg

SEQ ID NO: 90513 - DNA, 1163 bp, Arabidopsis thaliana columbia
  unsure (1)..(1163): unsure at all n locations
gggtagaatcgccggcactatacgactcatatagggaaagctggtacgcctgcaggtaccggtccggaattcccgggtcgacccacgcgtccgctcaagtggttcggagctgtttctaagaaaacaacaggtagttcggatcggagctacgcttgcaaaactcaaaacatggcgaggggtttgaagaagcatctgaagaggcttaatgcgcctaagcattggatgcttgacaaacttggtggtgcctttgccccaaagccgtcttctggaccacacaagtcaagggagtgtcttcccctcgtccttatcatcaggaacaggttgaagtatgctctgacctaccgtgaagtgatttctatcttgatgcaaaggcatatccaagttgatgggaaagtcaggactgacaagacttaccctgctggtttcatggatgttgtatccatccccaagaccaatgagaacttccgtcttctctacgacaccaagggacgtttccgtctccactccatcaaggatgaggaagcaaagttcaagctttgcaaggttagatctatccagtttggtcagaagggaattccatacctgaacacttatgatggtcgcaccatccgttatcctgacccgctcatcaagcctaacgacaccatcaagctcgaccttgaggagaacaagattgtggagttcatcaagtttgatgtgggcaacgttgtgatggtcactggaggcagaaacagagggcgtgttggtgtgattaaaaaccgtgagaagcataagggaagctttgagacaatccacattcaagactcaacagggcatgagtttgccacaagggttggggaatgtgacacaaatcgggaaagggacnaanccatngggnggcccttccaaaaggggaaaggnttaacctngccaccatttnngnancccnggaaaaaanctttgntcccaagcaaccttggtttgaaagcccaactgctttgacccctcaagacccgtttcttttacagactcgctgcttgtctcagtttgtgagtctatttcttttcttatgttgttggatttcaaaacccatcaaaaaatagctgagtagtgctttttgtaatgtttgtatggtggattttttggtgatttaccgtttaaatcagatgacagttggtccaaaa

SEQ ID NO: 90514 - DNA, 490 bp, Arabidopsis thaliana columbia
  unsure (1)..(490): unsure at all n locations
cnnnnnnnnnnnnnnnnnnnnnnnnnnnnnnnnnnnnnnnnnnnnnnnnnnnnnnnnnnnnnnnnnnnnnnnccacgcgtgcgtgtttctctcgtcgctccattagctacttctccggtggatactttagccagcttttctcgagcgtttatccttacgtgccatttcaaaggatcatctgaagcttaaggagaaagtttctcgttgttgcttgatatatgaatcttgtggggtattgagaagatgggacatttctcatcgatgttcaatggattagctcgatcattttctattaagagagtgaagaacaacaaatggaaactgcgacgcaacacgaagctggctgatgagaatgggcaagcgagggctaataaaatcagaaattgatttctggaaatccctctgggttatgttaaagggacaagggatctaataattttagccctctctttttctccaaaccgcggcgaaaaaagggcgttaatcagga

SEQ ID NO: 90515 - DNA, 532 bp, Arabidopsis thaliana columbia
  unsure (1)..(532): unsure at all n locations
nnnnnnnnnnnnnnnnnnnnnnnnnnnnnnnnnnnnnnnnnnnnnnnnnnnnnnnnnnnnnnnnnnccacgcgtccgcttgttttacatttccttattaagaaatatctctagatgtgttttctttaaacagaaactctctttcccttcaagtcaaaatcatgtacatcaaagataaatcttagaagcttgtttcaatggaattccatgtcagacttatgaatattccacttgaagttcaatttttgttgttgtttttcaaagtgtctagattctcaacactatgactcatcttcttacttttaagatttaacctctgttttatgatctccttgtagcactatcaaagtttctaaagaagttttggtttcttgttttttaaggatcatctgaagcttaaggagaaagtttctcgttgttgcttgatatattaatcttttggggtatttaaaagatgggacatttctcatcgatgttcaatggattagcttgatcattttctataaagaaagtgaagaacaacaatggaaact

SEQ ID NO: 90516 - DNA, 546 bp, Arabidopsis thaliana columbia
  unsure (1)..(546): unsure at all n locations
tagctttgattccggtcgcgcctgcacgcccggtgtatcgccgnnnnnnnnnnnnnnnnnnnnnnnnnnnnnnnnnnnnnnnnnnnnnnnnnnnnnnnnnnnnnnnnnnnnccaggggtccgcggacgcgtgggcggacgcgtgggatgggagtgtcctcaatgtgatttctataattacgggaggaatgtagcttgcttaagatgtgactgcaagcgacccagggactcttcactcaattcagccaactctgattattcaagtgaccctgagcttgagagaagactggtcgaaaacgaaaagaaagcacagaggtggcttagtaaagtagcacagggtggctctgatgcgaacagtgttgatacagatgaagatttcccagagattatgcctttgaggaaaggagtgaatagatatgttgctagcacgaggaagccacctcttgagagaaggttggcttatactgagaacagagttgctacagatggtaactcgccaaggggccagtgattttgctttgggaagataaacgaatggggagcttga

SEQ ID NO: 90517 - DNA, 501 bp, Arabidopsis thaliana columbia
  unsure (1)..(501): unsure at all n locations
nnnnnnnnnnnnnnnnnnnnnnnnnnnnnnnnnnnnnnnnnnnnnnnnnnnnnnnnnnnnnnnnnccacgcgtgcgcccacgcgtccgcccacgcgtccgcccacgcgtccgcccacgcgtccggtcaccgtctctgagtaacaatggtctttcctccgtcgtcacgcctcccaaaactctccgtggtctcaataagcctaagtgtattcaatgcggcaatgtagctcgctccaggtgcccttttcaatcttgtaagggttgttgttcaagagcagagaatccctgcccgattcacgttcttaaagtagcttcaacgtctggtgagaagacgcaggcgccaagtactccatcttcagagcagaaagcaaccgagggcactcccgggagtaccactagagtttcgtcaatcccggcaactttctagcaactttgtcaggttaataaccgtgagtggcttcttcccggcagagaaaacctttgacgataaaggatgctccagc

SEQ ID NO: 90518 - DNA, 409 bp, Arabidopsis thaliana columbia
ggtgtatataattgttcatttccttgaaaacggttacagaattagggttttgtttcttctctctcgccgattgatcttgaaatgtcttccccaattataattagggcaccgaagaagcaaccgccggagccgccatgtctgatttcgttactccccgaagaaatcgtcgtcgatatcgtagcccgtgtccctagatgctattaccctactctctcccaagtttcaaggcgtttccgatcactcgtcgcttctccggagatttacaagagacgatccttcttcgggatgcacagaaacaatgtctctacatcgcaatctccaaagatcaaacctctgatatccattggtttactctgtgccggaaacctaacggacaacaattctccggcaccaccgcctctgatcatcg

SEQ ID NO: 90519 - DNA, 586 bp, Arabidopsis thaliana columbia
  unsure (1)..(586): unsure at all n locations
aacagagattcactttgcgaaaaagtcgcacgcacacatataaaagacaggactagaggaacagaggaagaagaagagtcactgtgatcaccaccaccgtacgatcaaattcaaactatgtcaacggctctgattaactctattacctacttcctctccgaacatccatacatcgtcggattccgttggagtaacagccaatcatggggctccacgtggtctttcctcttcacatcaatctccctctatatcgccgtctcatcctccctccacatcctcctctccgccgtacgccgaagtaaccgttccgttcctttaggtcacatccccgaaatccacagccttctcatgtcgatcctctccgncaccattttcgccggaatcctcctctccgctgccgcagagatccgtgacanacggtggttatggcggcggagaaaaccggcaattcttttcaaatgggttctttgtttcccttttcgggactcgtcctctggtggggtttcttttggtaaancgggttttacctcanggggttttttccaaatttccgnangtttttggccgntttagnagccggggntgc

SEQ ID NO: 90520 - DNA, 513 bp, Arabidopsis thaliana columbia
  unsure (1)..(513): unsure at all n locations
tcctcaagcacaaggcttttactatagaggttatgaaaaccccacaggcgaatgggacgagtattcctcgtatgtcaatgttgaaggattggacatcacatctcctgttggcttcaatgagaatgcttctntggtctaccaaacgggatatggatacaaccctcaaatgccatatggggcatattcccctgcagcaagtcccttgccttctgagggacagttgtattctccacaacagtttccgttttcaggggcatcaccgtattaccagcaggtagttcctccttagcatgcaatatattaccttctccaactcagcccgagctcaccagccttgtcggtgttgaccaacaaggtgataacatcggacccacgccattcctaccatcctcatcccattgggccgttttatgggaaccagccaaaccttggttttcctgaatggcagcatcgttttgacggggggaatttggtcggattggtccaggcctttaattttacaaggattttttt

SEQ ID NO: 90521 - DNA, 595 bp, Arabidopsis thaliana columbia
  unsure (1)..(595): unsure at all n locations
ccggcannnnnnnnnnnnnnnnnnnnnnnnnnnnnnnnnnnnnnnnnnnnnnnnnnnnnnnnnnnnnnnnnnnccacgcgtccgcccacgcgtccgaccagttcgtcacaagcttcgagcccagctcggaaaacaaaattggaacttgctgcataaagtttagtttttttattgaatttggaaggatgattgggaatccagtaattcaagttccatcatcactaatgccatcatcctccatgattgcttgtcctcgagtttcacccaatggggttccttatcttccaccaaaacctagaactaggcatttagtggtcagagctgcatccaattccgatgctgctcatggtcaaccatcgtctgatggggggaagaatcctctcaccgttgttttggatgtgcccaggaatatatggagacagactttaaaacctttgagtgattttgggtttggtaagagaagtatttgggaaggtgggtgtttggtttngttaattgnctctggngctacccnttcttgncntaggttgggtttggttncgnggtttnaaatnnggccggngtttgggaaancaaacctnttttnngctngcaa

SEQ ID NO: 90522 - DNA, 905 bp, Arabidopsis thaliana columbia
  unsure (1)..(905): unsure at all n locations
agggaaagctcgtacgcctgcaggtaccggtccggaattcccgggtcgacccacngtcgtccggagagcactggaaatagtcgtgtatctagcagttgaaaaaccgagcttagctgcgatcattcgtgatagatgccaatgatgtgtttcacacgaagggctccactaaacacggttcaggatcacaatgcaactagtggagagcttgaagatcacatcatagacaagttttttgaccaagacattagtgctacggtcatacttcaaagcggtgttcatagtatgcctcagaaaggagggccatcgtctttgatacagcgatggagaacaggtggatcttgcgattgtggaggttgggacatgggctgtaatctcagaattcttacaaatcagcacaacctctcctacaagaagtcggcaacatcaaactcaccaccctcttcaacagattcgaactcttctttctgggagaacaagcggaggagcatccgttcttgagctttaaaccgatcaaagaagggatatattcagttgcatataattcatccctttcacatctacaagcgttctttatatgcatggcacttgcagagagtaggaaaatgtcagagaacatccttgagcagaaaagctcttgtgatgatcataaagttaggggaaaaaccgtgttactcccggaccaagattcataccctaatggaacaccgtcgggtatcaaccgcgggtctcgcctgttgggcgggtctgaagtttgtattttacttcaaaccccaaattttacttgcaggatgtgatcatttattagtgtaagcctaagataaaaaaaaaaaaaaagggcggccgnnnnnnnnnnnnnnnnnnnnnnnnnnnnnnnnnnnnnnnnnnnnnnnnnnnnnnnnnnnnnn

SEQ ID NO: 90523 - DNA, 843 bp, Arabidopsis thaliana columbia
  unsure (1)..(843): unsure at all n locations
atcgactcacttagggaaagctcgtacgcctgcaggtaccggtccggaattcccgggtcgacccactgcgtccgcccacgcagtccgaaaaaacaaaggaaatcgccatggaagacgttaaccagttgttcgatgctgctttcgagttcgcacactactcccggcgctcaaaacgaaacttccgttaaggaattcctcgatcgcttccctcttcctgttatcttcaatgctttgcaaaccgatccggatataccaggatttgaaaacacgttggtgacttgcttggagaggttgtttaagactaagtatggcgcttcacttattcctcagtatatgcctgttctgcaagttggtctcaaggcagattctgcagttgtgaaatctctggcttgcaaaactgttctgtgtctcttggaggattgcgatacaaacgacgtttcttctgttcagctagttgttaacaatggcatataccctcttctacttgactatatcattaacagcgatgatgaagttgcaaatgctgcaagtgagacaattaagagcctagctcgctttccagatgcaatgtccagtaatttcccttctgaaccaacgatcctacacatcttcgtaaccttgctgcaaggtgttcatcactggcacgagtccgggttttggcgtnatagtgaagctnttctcatntctcgacttgtagcttcagaagatagatatcggggcttctgattactggaggcgaaatgagggacaaagacctctgtgatctaatgtctggactctcttgagtaaggaagggacacagtcaaggtcggcacaacatactattagctgtgtgtctatata

SEQ ID NO: 90524 - DNA, 530 bp, Arabidopsis thaliana columbia
acacctctcgctttatttctattttctagtgtctacatatataaaaagatcatgacgaccaccgttattatcattatcttcgttgccatcttcgctacgactcttcacgacgccagaggagcaaccatggaaccgtgtctcgaatcaatgaagactgcttcgcttcctgatcttccgtatgcttatgatgcgctagagccagcaatcagtgaggagatcatgcggctacaccatcagaaacaccaccagacttatgtcactcagtacaacaaagccctcaacagccttcgttctgccatggctgacggtgatcactcctccgtcgtcaaactccaaagcctcatcaagttcaacggcggagggcacgttaaccatgcaatcttctggaaaaacctagccccggttcatgaaggaggtggcaaaccaccgcatgatcctttggcttcggcgatcgatgctcatttcggatcactagaaagattgatccaaaaaatgaacgcggaaggcgctgctgtacagggatctgggat

SEQ ID NO: 90525 - DNA, 502 bp, Arabidopsis thaliana columbia
atacgactcatatagggaaagctggtacgcctgcaggtaccggtccggaattcccgggtcgacccacgcgtccggcgaaacaagtgaagagaattgagatcaatgatcaacacagtcaaagagctgtcactactgcactatggtgcaacttcctcgtgttttcactcaagtttggggtttggtggacaagttctagccatgtcataatggctgaagtagttcactccgtagctgattttgctaaccaggcacttcttgcttatgggctcagtagctcaaggcgtgccccagatgctcttcatccctatggctactcaaaagagagatttgtatggtctttgatatctgctgttggcatcttttgccttgggtctggtgctaccatagttaatggagtacagaacttgtggacttcttcgccacctccgaatatggaattagctgctgtgggtaatgggtggttcttttctaattgaaggcccttccttactcgttgcaattc

SEQ ID NO: 90526 - DNA, 507 bp, Arabidopsis thaliana columbia
  unsure (1)..(507): unsure at all n locations
nnnnnnnnnnnnnnnnnnnnnnnnnnnnnnnnnnnnnnnnnnnnnnnnnnnnnnnnnnnnnnnnnccacgcgtccgatttatgataaagattacatttttaggctaaaggaagtttcttttttcatgaatgtctgaatgagaagttttttttataatgaaaatctcagtttagggtttaggggaaggaaaaaaaggtctttgagaatcggttttactagattgaagacgagagttttgaatgattggtgaatttgttgatcatcaatggagaagaagagatcaccaagaagtagtaagagtcctggacctgcaattttccctaaaagccctcttgtctacgagagttataagtctggttgtggttggaaattgataaagttcttcgattccggtcatgtcaaatctggtaataagagacttgggtcacagaagacgaaattccgcagagattctgcctggaattgtttatactaaaagtcagcttgatttgcttaagaggcttcatg

SEQ ID NO: 90527 - DNA, 477 bp, Arabidopsis thaliana columbia
gcttcacctgaaacctctcctctgccacatctctctttctctctcacacatacattatttcaattattgttttttttataactccaatcttgaatcttgacgatctctggtttcttcattcaaagggggagactttttggggtttttagactttgcttgtctagttttgtcttgtgtgtggtgatgtcttatagtaattcaaacccggaaaattattcagctgcaacgagctcgccggagcttaaactttatcaagcatttatcttttctgttccaatttgtttcacatttattattctcttcttgttttacttgatctacctccgtcgtagtagctctgatttggcttctcttggaatgcgaactactttcatccccgggaactctctctccacgattgaattaggattgagcaaagagctgagagagatgcttcccattgttgtctttaaagagagcttcaccataatggattca

SEQ ID NO: 90528 - DNA, 503 bp, Arabidopsis thaliana columbia
atacgactcatatagggaaagctggtacgcctgcaggtaccggtccggaattcccgggtcgacccaggcgtccggactttttggggtttttagactttgcttgtctagttttgtcttgtgtgtggtgatgtcttatagtaattcaaacccggaaaattattcagctgcaacgagctcgccggagcttaaactatatcaagcatttatcttttctgttccaatttgtttcacatttattattctcttcttgttttacttgatctacctccgtcgtagtagctctgatttgtcttctcttggaatgcgaactactttcatccccgggaactctctctccacgattgaattaggattgagcaaagagctgagagagatgcttcccattgctgtctttaaagagagcttcaccgtaatggattcacaatgttcagggtgccttggggactatcaaccaaatgacaagctttgacagatcccggtatgtaaacacacttttcacatgg

SEQ ID NO: 90529 - DNA, 915 bp, Arabidopsis thaliana columbia
  unsure (1)..(915): unsure at all n locations
gactcatatagggaaagctggtacgcctgcaggtaccggtccggaattcccgggtcgacccacgcgtccgctctgttgaaattaggattctattcgggcgaagaggatatggagttctcgagcttttcaagtgggactgcaagtgctgttaagacttggcaagcatcgcttggggtccgtgaggatggggtaatgacagcagagcttcttcagaggttgttcatggatgaagacgtagagacagataaggatgaagcaagtacaatgaagaaagaggaagctggtaatggggcgggatttacttcagtgacacaggtccctgagaagaagcaatcaatcgtgaaagatcaaagtgacagagaagttgacgttactcaaaatcgggtttttcttcttggagaaaacagatgggaagatccctccaggctcattggcaggaacaaaccggtagacagaagtgaatcaaccaaccccaaaacgaggtgcatcacttgtcgaggggagggtcgattgatgtgcctagagtgcgatggaaccggtgagccaaacattgagccgcagttcatggagtgggttggtgaagatacgaagtgtccgtactgtgaaggtcttggctatacagtttgcgatgtctgcgacggcaaaaaaaacttataataatgattcatatttaatttaatgaaaaaacaaattagtttgttttccaaatcgcataatatggttgtttaagagagatatatatataaatttagtgaacaagtacgtagttagtttgtttttcaaatcacacgaatggaaatcgtctttgttggataaaaaaaaaaaaaaaaaaaaaaaaaacnaagcnnnnnnnnnnnnnnnnnnnnnnnnnnnnnnnnnnnnnnnnnnnnnnnnnnnnnnnnnnnnnnnnncgcc

SEQ ID NO: 90530 - DNA, 419 bp, Arabidopsis thaliana columbia
aagatattctctacctcaagattcagaagaaaatagaggatcagtcggccaaagtgctggtcagagtagcactagtgtcgttgatcaggtccggtcgccagctgatgatgctggtgtcacttcttcatccaccatatgtccagctcctgtttgtaggcaattttggaaagctggaagctataatgatgaattgagttcaaagtctcagcagccaaatggaaaaaattatcttcatgtgcaccctatgttccttcactccaatgctacctcacataaatgggcttttggagctgttgcagaattgcttgacaatgctgttgatgagatccaaaatggggccacttttgtcattgtagataaaaccacaaatccaagggatggtgcaacagctttgctaattcaagatgatggtggtggga

SEQ ID NO: 90531 - DNA, 524 bp, Arabidopsis thaliana columbia
  unsure (1)..(524): unsure at all n locations
agatcttgccnnnnnnnnnnnnnnnnnnnnnnnnnnnnnnnnnnnnnnnnnnnnnnnnnnnnnnnnnnnnnnnnnnnnnnnccacgcgtccggcactgtcactaggtggcttgttctccgatacaagccagatgctagattttacaactatcagatggctgcagagaaaatcacgctcaaaagctaaacccagttctacctcaagtttcacaccttgtgaacatcttgaagtaaaagcagatggaaaattaagggataatttggattctcagaccggaaaaaaggaagaaaagatcatccagtactcgagaaagaaaaagttgaatccaaagccttcagcagaacaagttcaggagctagctaccctagctaaatcaaaagattttgataagacatgtaaaaattttagcagtaggtcacatctggatagtgcaattcgttctgagatgaacagtgagattggagactctggaagggtcattggggtatcattttgcataaatccttgtagctcatctttcact

SEQ ID NO: 90532 - DNA, 517 bp, Arabidopsis thaliana columbia
actatacgactcatttagggaaagccggtacgcctgcaggtaccggtccggaattcccgggtcgacccacgcgtccgcccacgcgtccgatttaggaaacgagagaaatgagtttcttcgctgttgcttgctccgcgccaagatcttctatgcttctcaccggcttgaattcgagcttctctgatatgcatcgcagcccactatttgttttcccggtgactatatcatcccggagcgtgaaacgcttcgccgctgtttcgtctgattccgtactagaccctgaatccaaaaatcaaactcggtcccgtcgcaaaaataaggaagcagttacgccaattgctgaaaccgagaacaatgaaaagtttccgacaaaggtcccgcgtaaatcgaaccgtgggcggcggagtgaagcagacgctgtggaagattacgtgagaagctccctcgagcgtactttctccaccataaaggagcagaatccggaggtttttgagaacaaggagaaggcgaatttcat

SEQ ID NO: 90533 - DNA, 2077 bp, Arabidopsis thaliana columbia
  unsure (1)..(2077): unsure at all n locations
atgatgaatccgagtcacggaagaggactcggatcggctggtgggtccagctccggtagaaatcaaggaggtggtggtgagaccgtcgtcgagatgtttccttctggtcttcgagttcttgtcgttgacgatgacccaacttgtctcatgatcttagagaggatgcttaggacttgtctttacgaagtaacgaaatgcaacagagcagagatggcattgtctctgctccggaagaacaaacatggattcgatatagtaatcagtgatgttcatatgcctgacatggacggtttcaagcttcttgagcatgttggtctagagatggacttacctgttatcatgatgtctgcggatgattcaaagagtgtggttctaaagggagtaacgcacggtgcggttgattaccttatcaagcctgtacgtatggaggcacttaagaacatatggcagcatgtagttaggaagaggagaagtgaatggagtgtaccggaacattctgggagcattgaggagactggcgagagacagcagcagcaacatagaggaggtggtggtggtgcagctgtttctggtggagaggatgcggtggatgataactcatcctcggttaacgaaggtaacaattggaggagcagttcacggaagaggaaagacgaggaaggagaagagcaaggagatgataaggacgaagatgcgtcgaatttgaagaaaccgcgtgtcgtctggtctgttgaattgcatcagcagtttgttgctgctgttaatcagctcggcgttgagaaggcggttcctaaaaagatcttagagctgatgaatgttcctggtctaacccgagaaaacgtagcaagtcacctccagaaataccggatatatctaagacggcttggaggggtatcgcagcaccaaggcaatcttaacaactcgtttatgacgggtcaggatgcgagcttcggacctctttcgacattgaatgggtttgatcttcaagcactagccgtcacaggtcagttacctgcacagagtcttgcacagcttcaagccgctggtttaggccggcctgcgatggtctctaagtcaggtttgccggtttcctccattgtggatgagagaagcatcttcagctttgacaacacgaaaacaagatttggagaagggcttgggcatcacgggcaacaaccccaacagcaaccacagatgaacttacttcacggtgtccccacgggtttacaacagcagcttcctatgggtaatcgaatgagtattcaacaacagattgctgctgttcgagctggaaatagtgttcaaaacaacggaatgctgatgcctctagcgggtcagcagtctttgcctcggggaccaccgcctatgctaacctcttcgcaatcatccatcaggcagccgatgttatcaaaccgcatttccgagagaagtggtttctctggaaggaacaatatccccgagagcagcagagtgttaccgacaagttacactaatctcacaacacaacactcatcaagctcgatgccttataacaacttccaaccagaacttcccgtgaacagtttcccgctggcaagtgcaccagggatatcagtaccggttcggaaagccacttcttaccaggaagaggttaacagctccgaagcgggtttcactacgccgagctacgacatgttcaccaccagacagaatgattgggatctgaggaatattggaatagcctttgactcacatcaggactcagaatccgctgcgttttccgcttcaagaagcctactcttcttcgtccatgtcaagacacaacacggcagttgcagccaccgagcatggccgaaaccaccagcagccaccatcgggaatggtacagcaccatcaggtttatgcagacggaaacggtggttcagtgagggtgaaatcagagagagtggctacggatacagcaacaatggcgtttcacgagcagtatagtaatcaagaagatcttatgagcgcacttcttaagcaggtttgattgtttttttttttttgnactttttggggatatttttcgaacgnntttttntnaaacaattttttt

SEQ ID NO: 90534 - DNA, 447 bp, Arabidopsis thaliana columbia
ctctggtttgaattggtttggctctctgctcgaacgattctctctgataacccgattgtcaactccacagcccacagacagagacagagttcgttgccttgcctccgtgttgttttgttcataccgcgtgaaaagctttcatcatcaattcatcatcataaagaggtgtcgtgtgagcacacgcaatctcccaatctctcttctctctctctctctccaatctccatatctttgtcctctataatccggagaagtagctctaccatcgaaatctcccaacttgcttccttgaagctttttgctttttgttttcgtctttgcgcgtgtcccattctcttctccaaagttccctataatagtgaaagctcatcaagttatttagctctcagtttctgaaagatggaggtcaagttatggaatgataagcgtgagagagatatgtatgag

SEQ ID NO: 90535 - DNA, 898 bp, Arabidopsis thaliana columbia
  unsure (1)..(898): unsure at all n locations
atacgactcctatagggaaagctggtacgcctgcaggtaccggtccggaattcccgggtcgacccacgcgtccggagctcgttgcacactgtggtggctggaggagctccgttgagtagagaggtgacggagaagttcgttgagaattatcccaaggttaagatcctacaagggtatggtttgactgagtcaacggctatagctgcttctatgtttaataaagaggagactaagaggtatggagcttctggcttactggctccgaatgtggaaggtaagattgtggatccggatacgggtcgggttttgggtgtgaatcaaacgggtgagctgtggattcgaagtcctactgtgatgaaaggttatttcaagaataaagaagctactgcttctaccattgattcagaaggatggttgaaaactggagatttgtgttactttgacggtgatgggtttgtctttgttgttgatagattaaaggagctcatcanatgcaatgggtatcaggttgctccagctgaactagaggcattgttgcttgctcatccagagattgctgatgcagcagtaatacccatccctgacatgaaagctgggcaatatccaatggcatatatcgtaagaaaagttggaagtaacttatccgagagcganatcatgggatttgtcgcaaaacaggtatcaccgtacatgaagattcgcaaagtcacatttttggcttcaatccccaaaatcctttcggcagattttaaaagagaacttacaagctacaacttcaaactctacaggagctctgcacatcctatctcgactcacaaaagattttgtgttaaaaggctctcacacataactgtaaaaactgagactgagcttgtctgatctggctggttgaccaaga

SEQ ID NO: 90536 - DNA, 788 bp, Arabidopsis thaliana columbia
  unsure (1)..(788): unsure at all n locations
atacgactcaccttagggagagcacgtacgcctgcaggtaccggtccggaattcccgggtcgacccacgcgtccggtgacgggaagagtgacgaccaaggtagacattttcagccttggggtcatacttatggagctaatcactggtcgtaaagccctagacgagacgcaacccgaagacagcgtccatctagtcacatggttccgtcgggtagcagcctgcaaagacgaaaatgccttcaaaaacgcaatagacccaaacatcagcctcgacgacgataccgtagccagtattgaaaaagtctgggagcttgctggtcattgctgtgcccgtgagccttaccaaagacctgacatggctcacatcgttaacgtcctttcttcactcaccgtccaatggaaaccaactgagaccgaccctgatgacgtctatgggatagactacgatatgccgcttccgcaggtgcttaagaaatggcaagctctcgagggacttagccagaccgcggatgactcgggatcttcgtcttcggcttatggaagcaaagacaatacgcagacaagtattccaactcgcccatctggatttgctgactcgttcacttctgtggatggacgttgaaaaaatcaagattgcgtaaaacgttntagtagaagaagaagatgaagcattgggtgataaatctctctctcgctctccctttnttttgcttttctctgaagcatatttacttatgactnncgttttatctactgggcagctttggntagnggatttatctatctact

SEQ ID NO: 90537 - DNA, 668 bp, Arabidopsis thaliana columbia
  unsure (1)..(668): unsure at all n locations
gggaaagcacgtcngcctgcaggtaccggtccggaatcccgggtcgcccacgcgtncgggcggcaccggatttcacacgctctctgccgtcggattattcaacggagagaagcacaagcacccccttggagtaaccctacccccggcacgccgattctccgcttctgtcaccgtttttagctcgaggcttgtggactacgagcagccattcgttaagagcttctggaactacctcgaggcggctaaggatttcatcagaccggaagacaacggcccatctcgctggttctctcccctcgaaagaagcaaggatccatgtgacggtgccccgctccttctcttcctacctggtatcgacggaaatgggactcgggctaataaggcagcaccagaaacttggacagatgtttgatatctggtgcttgacatacagcgagaatcgctctttttcacagatctagtcgccatgggtgaaacaactgtcaaatatgaaaatcaacgatcacctgggaaacccatatantcttgttggagaatctctcggcgcctgcattgcactcgctgttgcagcctgtaaccctgatattgatcttgtcttgattctttctaacncaagctacatcatttgggcattccttcgctgcaacattcttgctcccctgggtaaa

SEQ ID NO: 90538 - DNA, 275 bp, Arabidopsis thaliana columbia
  unsure (1)..(275): unsure at all n locations
agccgattaaattttagaggagnactttgagtaattttcttctatgccattctctagagaaggtgggtgtgtctacggggtgtgccaaaggaggactaatgattccaaatcataagtctgctaattcttataacctctcccttgagttgtctcttgttgactctgtttgggattgtaatgttcggaccatgaggtattcctatatacctgagtgggtgtagtctttgaaatcctcttagacaacgagtttagtgcattttactttagttggaatc

SEQ ID NO: 90539 - DNA, 503 bp, Arabidopsis thaliana columbia
  unsure (1)..(503): unsure at all n locations
tcgactcatttagggaaagctcgtacgcctgcaggtaccggtccggaattcccgggtcgacccacgcgtccgcagaaactttccttgattcgcaagcttttcttccttttatattcttcattttgatgcgaatatagagagagtccataaaagaaacagtaatggacgaatatattgatttccgaccattgaagtacacagagcacaagacttcaatgactaaatacaccaaaaagtcatcggaaaaactttccggtggtaagtcattgaaaaaggttagtatttgttatactgatcctgacgcaacagattcatcaagtgacgaagacgaagaagatttcttgtttcctcgccggagagtcaaaagattcgttaacgagatcactgttgagcctagctgtaacaacgtcgtcaccggagtttcgatgaaagatagaaagagactctcttcttgctccgatgaaactcaatctncggcgtcgagtcgtcaacgtcctaataac

SEQ ID NO: 90540 - DNA, 710 bp, Arabidopsis thaliana columbia
ctaactctcactcttagtacaaatattttcaagaatggtttctccttctttttcaaccaagcttgtcttctttgcttgctttgttctgttcacattctcacacaaactcgtgacaggagaatccgacaaagttgagctcaatctttactacgaatcactttgtcccggttgtcagagtttcatcgtcgatgaactagtcaaagtctttgactccgatctcgatacaatcaccgatgtcaagctcgttccattcggttacgccaaagtctccaataatctgaccgtcatttgccagcatggtgaagaggaatgcaaactcaacgctcttgaagcttgcgtcattaacactttgcctaacccgaaatcgcagtacaagttcatacgatgcgttgaaaacaatacggataactgggaatcatcatgtttaaagggctatggaaatgagaaagccatcaatgatggttacaatagtgatctctctaagaagctcatacttggatatgcaaaacaaacctcgagtcttaagccgaaacatgaattcgtaccatgggtcacaatcaacagcaaaccactctatacgaaactagatgatttggtgggtcaagtctgcaaagcttacaaaggaaagactccactcccaatagactgtagttccgctgccttgtccgagaggaaaatgtcgaatgttgaattctcctatgtagatgaaa

SEQ ID NO: 90541 - DNA, 507 bp, Arabidopsis thaliana columbia
tatacgactcatttagggaaagccggtacgcctgcaggtaccggtccggaattcccgggtcgacccacgcgtccgcggacgcgtgggattttttcgaaagaaattgatgagaagaatgattccaacatcgttttcaagtaagtttcaaggagtactaagtatgaatgcgttgagatgttatgtatcagagtttatctcaaccttcttcttcgtcctcgcagccgttggttctgtcatgtcttcaaggaaattgatggctggtgatgtgtctggtccgtttggtgttttaataccggcgattgctaatgcgttggcgttatcatcgtcagtttacatctcttggaacgtctctggtggtcatgtgaatccagcggttacgtttgcgatggctgttgctggtcggattagcgttccaaccgctatgttttattggacttctcagatgattgcctctgttatggcttgccttgttcttagagtaaccgttatggaacagcacgtaccgat

SEQ ID NO: 90542 - DNA, 558 bp, Arabidopsis thaliana columbia
atcgactcacttagggaaagctggtacgcctgcaggtaccggtccggaattcccgggtcgacccacgcgtccgcccacgcgtccgcccacgcgtccgcccacgcgtccgcccacgcgtccgcccacgcgtccgcccacgcgtccgcagttctctgcacctttttctttcccctgttttttgatcctcaatcaccaaaccctagcttgttcttctgttgattatttcgaaaagggggtttgtttgttttctgggaatcagcaaaaatcacgaaatggttggtttaatatttcaatcgggataaaatcgatcgaaaatgagtcagccttctgtgattcttgctacggctagctatgatcacaccatccgattctgggaagccgaaactggtcgctgttaccgtaccattcagtatcctgattcgcatgtaaataggcttgagataaccccagataagcattatctagctgcagcttgcattcctcatattcgactctctgatgtcaattccaatagtcctcaacctgtgatgacttacgattcacacaccaacaatgtta

SEQ ID NO: 90543 - DNA, 680 bp, Arabidopsis thaliana columbia
ggctttgcttgagagtataatattagggctaatcacaggatggttagcttttgttattgggttggttattggatgggcatggaaaccaagatgggtttcttcttctaataatcgacaagtcaaattacaatgttctgctccaagatcttttgatttgtctttaccatcttcttctcctagttctgttgttacttctcctttgaagggttttggatcagctccttgcttaaaggctcttgtttgtgatacatggactatggctttaagacaacagagacaaacagtttctcctgattcttcttcttcttcatatgattcttctgaacaacatttggatttggtttcaagagtgaagaaaacaaaggagagattgcctaatactgtaacagagttagatttgagacatcttgtgcaattggttgagaggaaagatggtggtcaagcttggattcagatgatggatcgttttactcctggtatgagataccaagcttggttgagagaacctaagaatggtcctactgagtatagaagtagaactgtgtttgaagatgcaactcctgtgatgttaagagactttctctgggatgatgagtttagaccaatttgtgatacaacgctttctaattccactactgttgaagagcgtcccactactggaaccatgattgttagatgga

SEQ ID NO: 90544 - DNA, 689 bp, Arabidopsis thaliana columbia
cgagcgccacgacgcacgcttgcagggatcagcaagaagtgagagtcagacttcttcttcatagaatcttgagacgaagaagacatgggaatacctagagagatcgcaaagcttggagtgaaacgaggaatgtggggagcagtgaagaagatggaacccggtttacgtgcttaccaaacgcatagactctcagatggaggaaccaagctttctcggtctgctttcatggctcaaatcaacaccaagatcacacaagaccatctcatctccctcagcaacggtgcatcgcctgtcactgaaactcccgttacattaaaccaaggaaaccgagctgcgaatctgaagaaactgttgattatcggtggagctgttgcggttgtctgcagtttaagcggaggtgcttttgttcctcctgcgtttcttttaggttttgggaaaaggtttgttaatggtggaagaaaacgtcagctcgaaggaacaacaagaagtgagagtcagactacttcttcatagaatcttgagaccaagaatatagatcaacatataaatttagattcgttttaagtagattaagaataatccattccaaaattagtttatagaattggaataagctgtatgattattaatctttatacaaaggaaggaacattttttttacaagtaatgaataaaatctctttatcatg

SEQ ID NO: 90545 - DNA, 610 bp, Arabidopsis thaliana columbia
ctatagggaacgctggtacgcctgcaggtaccggtccggaattcccgggtcgacccacgcgtccgcccacgcgtccgctgtgtttgaagatgcaactcctgtgatgttaagagactttttctgggatgatgagtttagaccaacttgggatacaatgctttctaattccactactgttgaagagtgtcccagtactggaaccatgattgttagatggatacgcaagttcccgttcttctgcagtgatagagagtatgtaatcggtcgcaggatatggaattgtggaaactcttattactgtgttacaaagggagtatcggttccttctataccgcctaacaacaaacaaaaacgcgtggatttgttctactcaagctggtgcattcgaccagtggaatcaagaagagacgatggggtaacaagtgcctgcgaagtacttctattccaccacgaagacatgggaatacctagagaaatcgcaaagcttggagtgaaacgaggaatgtggggagcagtgaaaaaatggaacccggtttacgtgcttaccaaacgcatagactcttaagatggaggacccaagctttcttcggtctgttttcttggcttaaat

SEQ ID NO: 90546 - DNA, 1204 bp, Arabidopsis thaliana columbia
  unsure (1)..(1204): unsure at all n locations
aatacgactcactttagggaaagctcgtacgcctgcaggtaccggtccggaattcccgggtcgacccacgcgtccgcggacgcgtgggaaaagattgctgtatttctagattatgatggtactctttctccaatagttgatgatcctgatcgtgccatcatgtctgatgcaatgcgttctgcggttaaagatgtcgcgagttacttcccaaccgcaatatttagcggtagaagccgtgacaaggtttatcagttggtaggactaacagaactttattacgcgggtagtcatggaatggacataatgacttcttctgatggtccgaattgtttcaaatccactgaccaacagggtaaggaagtgaatctgtttcagcccgcgagagaattcataccggttatcgacgaggtttttagaacccttgttgagaaaatgaaagatatcaaaggtgcaaaagtagagaaccacaagttctgtgcatctgtacattaccgtaacgttgacgaaaaggattggcctattattgctcagcgtgttcatgaccacttgaaacaataccctcgtttgcgtctaactcatgggaggaagaggttcgtcctgtgatagactggaacaaaggaagagcggtcgagtttctattagaatctctcggattaagcaataaagacgatttgcttgctatctacattggtgatgacacaaccgatgaagatgcgttcaaggtactgagagatgggaaccgaggtttcggcatcctagtatcgtctataccgaaagaaagcaatgcgttttactcccttagagatccatccgaggtgaagaagtttttaaaaactttggttaaatgggcaaagttggagaagaaatctactggtttttgaataaaatagtggaattttatgattaaatgcttatttacccctttttttggttccttaatcttttttcatctctacccagttttagtcccagcttaatttatgattttccctttatctggtgggagttaagttattaaagttacatgtaaaaggaatgttaacgtattgcatagttttgccaaaaaactttttccttgggnnnnnnnnnnnnnnnnnnnnnnnnnnnnnnnnnnnnnnnnnnnnnnnnnnnnnnnnnnnnnnnnnnnnnnnnnnnnnnnnnnnnnnnnnnnnnnnnnnnnnnnnnnnnnnnnnnnnnnnnnnnn

SEQ ID NO: 90547 - DNA, 582 bp, Arabidopsis thaliana columbia
atacgactcacttagggaaagctcgtacgcctgcaggtaccggtccggaattcccgggtcgacccacgcgtccgatctctccaatatcgccgattatatataaatgactcttcgattctgtttcttcttcgtcgtcatcgccggcttagggttttctctataagcaaatcttatcttctccttttcctccgttttttctggtcagcttttgcttttagattacccttgttgcctgcgatcgatctgaaaaaagaggaactttatcttgctgacggctgttataaaaagacgtggcatttcttctctgattgtgtttatttttatgacggagaagatgaacacacttgtaatctatcagactctaactgttactgttggtgttttctaatgctgtcggcaagacactatctttaggactgctagggagtttagaggttacacagttgactttctctatcaaggttataggttcagtattgttaatatatagaaatggaagccaagatcgtcaaggtgttggatagtagtaggtgtgaagatggattcggaaaaaagaggaagcgcgcagcaagctatgctgca

SEQ ID NO: 90548 - DNA, 501 bp, Arabidopsis thaliana columbia
tatacgactcatatagggaaagacggtacgcctgcaggtaccggtccggaattcccggttcgacccacgcgtccgaaagttgagactttgttgttggaacatcatgatcctgcaaaggctcttttgaagtatatgtcagatactgatgttgagtgtttagtgattggctcttgctcttctaatttcctcacaaggaaaaaaggacaagaaatgccattatacggtgctaggagaagctccagagacatgtgagatatatgttgtttgtaaagatagaatcttaaccaaatcgacgaatcagtttaccgcagattcatcatctagtttccgtataccagaaggagctgaagcttatacagaatctttcagtcgcacacgctctgataagacagggttgtctgcttcatctataacatcttcaggcaggatgagaattggaaggcctggctctttaccgcatagtcatccgacctgtcgagtgtattctgatgcacagtcttc

SEQ ID NO: 90549 - DNA, 520 bp, Arabidopsis thaliana columbia
atacgactcactttagggaaagctcgtacgcctgcaggtaccggtccggaattcccgggtcgacccacgcgtccgcccacgcgtccggtcatatcagttgatggaatgatttggacaggaagttcaaatggtatacttatgcgatgggacggaaatggtaattgcttgcaagagttcgcatacgagtcctctggtattctctgcatgttcactttttgttctcgactgtgggttggttattccaacggcactgttcaagtatgggaccttgagggaaagctgcttggtggattggtagctcatagtggacctgtaataaaaatggctatcggggctggttatttatttacccttgcaaatcatggaggtattcgtggatggaatgttacttctcctgggccccttgacaatgtactgcggggccgagttggctgggaaagaatttttatattcaaggatagagaatctgaaaatattagctggtacgtggaatgttggagaggggagagcatcacccgac

SEQ ID NO: 90550 - DNA, 849 bp, Arabidopsis thaliana columbia
  unsure (1)..(849): unsure at all n locations
atacgactcactttagggaaagctacgtacgcctgcaggtaccggtccggaattcccgggtcgacccacgcgtccgggtggttcttagtccgattctcgtaccggcggtaatcacatcgagtttcttggcaacggggttcctagcttctggtagcctcggagcattggggatcgccctcctcatatggctctacaagaaagaagagtattccagagctactttgcatgcacgaggaggtaggcctgatgggcctaacaagctggcagaaagtggcaagcaatcaggaggagataatccgttgaaggaagaccagccgccagaaagagatatgctgcccgagaaaagacaagccctccaaggaagacaatctgctgaaaggagattaagccggtcgaggaggataaattggccggctggaggaagaaaacccgccacaaaaagataaacccggcggatggacacaaaccggcacataaggataaacccggcggagggagataaaccggggggagagagacaacccgccacaaaagatataccggcggaaggagataagcatgtggaagagatatgcctttaggagagagtgaccatttgtcatccctgagaaccaagggtattgggggggagcanaacccaattgccccaagtgtgcgggccaggtctggactaaaagggccaccatnttcatcgccatgatggtatgctacaaagcacgactttttttaaggataccaaaagcccccgttaggagctttgatataaattttaattcgtgaccaaataccaaaccatttatattgaccttggactgggtggttttttnnnnnnnnnnnnnnnnnnnnnnn

SEQ ID NO: 90551 - DNA, 2026 bp, Arabidopsis thaliana columbia
  unsure (1)..(2026): unsure at all n locations
cgnnnnnnnnnnnnnnnnnnnnnnnnnnnnnnnnnnnnnnnnnnnnnnnnnnnnnnnnnnnnnnnnnnnnnnnccacgcgtccggctaaacattgttagagagaaagagagagcgataatggcgatgaggggcttcacgttgttttcgatccttgtgttgtctttgtgcgcttcgtctatcagaagcgaagagacggagacgaaggagttcgtgttgaccttggatcacactaacttcaccgataccatcaacaaacacgatttcatcgtcgtcgagttctacgccccatggtgtggacactgcaagcagcttgctcctgagtatgagaaggctgcgtcagctttgagcagtaacgtcccaccagtggttcttgctaagattgatgccagtgaggaaacaaacagagaatttgcaactcaatacgaggttcagggtttcccaacaatcaagattttcagaaacggaggaaaggctgttcaagaatacaacggacctcgtgaagctgagggtattgttacttacttgaagaaacaaagtggacctgcttctgctgaaattaagtcagctgatgatgcttctgaggttgttagtgacaagaaggttgttgtggttgggattttccctaaactatctggctccgagtttgattctttcatggccattgctgagaaattgcgctctgagttagatttcgcacatacctcggatgccaagcttcttccccgtggagagtcatctgtaacaggacctgtggtcaggctattcaaaccctttgatgaacaatttgttgattccaaggatttcgatggtgaagctctggagaaatttgtcaaagaatccagcattccacttatcaccgtctttgacaaagatccaaacaaccacccatatgttatcaagttctttgaaagcactaataccaaggcgatgttgttcattaacttcactggagaaggagctgagtctcttaaatcaaagtaccgtgaagttgctacatccaacaagggacagggtcttagcttccttctaggtgatgctgagaacagccaaggtgcattccagtactttggactcgaagagagccaagttcctctcatcatcatccagactgctgacgacaagaaatacctgaaaacaaatgttgaggttgaccagattgaatcatgggtcaaggacttcaaggatggaaaaattgctccccacaaaaaatctcaacctatcccagccgaaaacaacgagccagtgaaggttgttgtttcagacagccttgacgacattgtcttaaactctggaaagaacgttttgcttgaattctatgctccatggtggggccattgcccaaaaggcttgctcccaattcttgggccgaggttcctgtgtcgtacccaagggacccaagtgtagtcatagctaagctagatgcaaccgcaaacgacttcccaaaagatacctttgatgtgaagggattcccgaccatttacttcaaatcagcgagcggaaacgttgtggtttacgaaggagacaggacaaaggaagatttcataagcttcgtcgacaagaacaaggacacagttggagagcctaagaaggaggaagagacaactgaggaagtcaaggatgagctctgaaaagagaagtgtgttgtgtctcttagctgctagcttagtttggtagttttgaggaaaatacacagaagaagccagagcattgagtagactgagagacagagagagagagacgacagacagacagagagaatctctttatctattcattaggtttttatatgtgcactcttcagaacaataatggctgcctccttttcttttttttggttgatgttacctttttttgtttgaattcagttctcctttaatatagtttttgaggcatttcttgggacgagttctaacactaaaaatatattaattctgaagcaaaaaaaaaaaaaaaagnnnnnnnnnnnnnnnnnnnnnnnnnnnnnnnnnnnnnnnnnnnnnnnnnnnnnnnnnnnnnnnnnnngac

SEQ ID NO: 90552 - DNA, 962 bp, Arabidopsis thaliana columbia
  unsure (1)..(962): unsure at all n locations
gcagtaccggtccggaattcccgggtcgacccacgcgtccgtgaagtagctacatccaacaaagatcaaagtcttgccttccttgttggtgatgcagagagcagccaaggcgctttccagtactttggactcgaagagagccaagttcccctcatcatcatccagaccccagataacaagaagtatttgaaagtcaacgttgaggttgaccagattgaatcatggttcaaggacttccaggacggaaaagttgctgtccacaaaaaatcccaacctattccagctgagaacaacgaacctgtgaaggttgttgttgccgagagccttgacgacatagttttcaagtctggaaagaatgtcttgattgagttctatgcaccatggtgtggacattgtcaaaaacttgctccaatcttggacgaagtggctttgtcattccagaacgacccaagtgtgatcatagcaaaattggacgcaaccgcaaatgatatcccaagtgataccttcgatgtgaaaggattcccgaccatttacttcaggtcagcgagcggaaatgttgtagtgtacgaaggagacaggacaaaggaagacttcataaacttcgttgagaagaacagtgagaagaagccaacttctcatggagaagagtctaccaagagtgaggaacctaagaagaccgaggaaacggccgcaaaggacgagctgtagaaatctcatgagttttgtttcggaatttgagtaggagcgtttctcttcttcaccatatccaacagaatcttcttttttttttagcagttttacagttttatcttttttgctctcttgttcgaacccaaaattatccccattaataaaaagttaaacctaaaaaaaaaaaaaaaaccaaaaagaannnnnnnnnnnnnnnnnnnnnnnnnnnnnnnnnnnnnnnnnnnnnnnnnnnnnnnnnnnnnnnnnnnnnn

SEQ ID NO: 90553 - DNA, 537 bp, Arabidopsis thaliana columbia
aatacgactcactttagggaaagctcggtacgcctgcaggtaccggtccggaattcccgggtcgacccacgcgtccgttcttcttctacatctcttcccatctgtctctcatagatccatccatggcttccttcgtggaatctggttggcagtaccttgtgacacattttagcgactttcaactggcatgtattgggagttttctcctccatgaaagcgtgtttttcttatctggactccctttcatttttcttgaaaggcaaggctttctcagcaagtacaaaattcaggtttattctcttcttattatttatcttttacaagtgtcttctatgtatgcaatcatagctttgtgtgatggtttgaatatgatagtctagaggttgatccccaagaattcagtctcacgtgaaaagtgttttcttatgacaggctgatgtccatttcagcgattactaataattgtgaatatgacccttttctatgcttctcttaccctttatgggcaacacatacttttcttttgtccctatgcag

SEQ ID NO: 90554 - DNA, 445 bp, Arabidopsis thaliana columbia
cgtccgaagaagagcttcttcttcttcttcttctacatggcaggagaatattccggtagccggagttctaacgcacagcttctcgcggaacttgaagctctaagtgaaaacctttaccagaaacctcaggtttcagttggaaacaggagaacaaactctctcgctctccctcggagttctgttccgtcgcttgttacctctgctgatgaagtgagtacagcacgagctgaggatttgacagtatcgaagccgcgggctcggcgtttatcgctgtctccgtggcggtcgagaccgaaacttgaggtagaggaggaagagaatgttactcagagcaacaggattgtcaagaaaccagaggagtcgtcatcgggttcgggtgtgaaggaagagaagaaagggatttggaattggaagccgattcgagggctggttcggattggtatgc

SEQ ID NO: 90555 - DNA, 536 bp, Arabidopsis thaliana columbia
  unsure (1)..(536): unsure at all n locations
atacgactcatatagggaaagctggtacgcctgcaggtaccggtccggaattcccgggtcgacccacgcgtccctttttgttttgcattttctcttcgacgcttgataagcatttcgtttccaaaaaaaaaaaaaaatggtttctgtctccgaacttgttctctacgtacatgagaatgtctacgaaacatgcattggagtcaacatcgctaacaatgatcaagtatttgagtatgctcaaactgcatttgtcgaaaacggtgacaacgatgatgacgttatctatgattacgctccacaagcatgaatgaattttatctctattaggctaaagcgtagtgaaccaaccatgattttgtacttcgtatattaattatttaacggccctagggcttcctttatgttttgtctacttaacactttcactataaatcgtcgagccatttattctctcaaaaaaaaaaaaaaagggcggccgttctagaggatccaggctnnnnnnnnnnnnnnnnnnnnnnnnnnnnnnnnnnnnnngt

SEQ ID NO: 90556 - DNA, 690 bp, Arabidopsis thaliana columbia
  unsure (1)..(690): unsure at all n locations
nnnnnnnnnnnnnnnnnnnnnnnnnnnnnnnnnnnnnnnnnnnnnnnnnnnnnncggaattcccccacgcgtccggggagattcgttctcgtactgtggattgttgttgttgggattatctgggaagagaaaaagaaaatggggaagcagccggtgaaattgaaggcggtggtttacgcactttctccgtttcagcagaagatcatgaccggtctctggaaggatctgccggagaagatccaccacaaggtctctgagaattggatcagcgccactcttctcgttacccctgtcgttggaacctactggtatgctcagtatttcaaggaacaggagaagcttgagcacagattctgaagcatgaagtcactccttttctacaagaacctgacagtttgaagtaatttcttttgtttcaagcctataaatttcacaaaaactcttgtgggaatcttctgagtcagtttttctgaaactcttttgctaaataaatgtttgggtttcatgacaatgactcttgttgttcatcttttcttgatatatggtatgaaaattggattgaaaaaaaaaaaaaaaaaaaaaaaaaaaaaaaaaaaaaaaaaaaaaaaaaaaaaaaaaaaaaaaagggggcggccgttctagaggatccaagcttacgtacgcgtgcatgcgacgtcatagcttttttat

SEQ ID NO: 90557 - DNA, 730 bp, Arabidopsis thaliana columbia
  unsure (1)..(730): unsure at all n locations
nnnnnnnnnnnnnnnnnnnnnnnnnnnnnnnnnnnnnnnnnnnnnnnnnnnnnnnnnnnnnnnnnccacgcgtccgggagatatatctctgcttccgacttctgaaaagattagcagcaaggagccagcttttcctacaagtctatgagatattgtctccctttattcaggcctcgatcagtgaacactatggaggaagcttgagtataccatgaaaggtcttcactgaggttggactgaagtctggctggatgctataaaagaatgtatacttgcaggacaatgtggattctgaagggcatcatggtgaacgcacacggacaatacacgaagcagcttaagcaaaccaaactcgggaagatttttgggcaatagaaggctagctgctgcaaatccgcgtgtgaaatggagtctcgaaagcacttattgttgcatttgcacaatgagatatggaagtgattcaaatctcaaagtgcagagccattaggagccactgcttttctctgttcatagaaatgtaactgagcttgatgatcatttcttcccatgacacgagctaatatatcacctagttccttgttcatgaattgtctttattttgaaaaacgataatttattctctggatgaatgaacaattgtagaaggataaaaaaaaaaaaaaaaagggcggccgctctagaggatccaagcttacgtacgcgtgcatgcgacgtcaagactcttctatag

SEQ ID NO: 90558 - DNA, 597 bp, Arabidopsis thaliana columbia
  unsure (1)..(597): unsure at all n locations
cannnnnnnnnnnnnnnnnnnnnnnnnnnnnnnnnnnnnnnnnnnnnnnnnnnnnnnnnnnnnnnnnnnccacgcgtccgttgcttctcctctcgagtttgggattcgagtttaaggaattagggtttctaatctctctctctttctctcgagatttttcttcacttagttcttgattctgattaaaagttgatcttatagttccggtaacttcgttttctgggtttaattttcgattcaatcttcatctccttgatccacagccatgactgagtattgggtaagtcaagggaacaaatggtgtgaattctgtaagatatggatacagaacaatccaacaagtattagaaaccatgaccttggtaagcgtcaccgagaatgtgttgataagaagctcactgatatgcgtgagaggagtgcagccaaagacaaagagctcaagaaaaacgaaaaactgcttcaacagatcgaagctaaagcaactcgtagctatcagaaagatattgcaactgctcagcaagtagctaaagcaaacggtgcaccanaggatggtacatccgngantcatcacgaaagagcgaaacggttgcttctttt

SEQ ID NO: 90559 - DNA, 517 bp, Arabidopsis thaliana columbia
  unsure (1)..(517): unsure at all n locations
ccgnnnnnnnnnnnnnnnnnnnnnnnnnnnnnnnnnnnnnnnnnnnnnnnnnnnnnnnnnnnnnnnnnnnnnnnccacgcgtccgccacactgttctaaagcctctggttttagggtttaagccgacggaggagacggaaaaatcgccatctctggagtccaggttagaattgattcctcaaatttcaattcttcgcattacatgacccaataattccgtctacatcttcgatgatccgtggaagaaccgcgaaagtaattcccagaaatgtcatttttacgcttagtaggagttccatttctgagtctccattgatttctccgagtcgaataaaccctaaattagccggtagtttctcgttcaacatccgattattgagctatttcactgttagaaatggcttttgtcccgattgttctgtaccgagagaccctaattttgttggattgactacacaatgtcggagtattgtcaggaggttttgtagtgaaaagattggaagtagtgaatctagtg

SEQ ID NO: 90560 - DNA, 429 bp, Arabidopsis thaliana columbia
gttcgattctcgacggagaatactcgacggagaaaatccagatcgggaatcaacttagagaagaagaaaattaaaaaagagaacttctaaagatgaatttggggttcttagttggagttttcggcgttcttattctttctcatgccgcttattcaacaatccaatatagaggattgttgaagattatggaggaagagttttctcgaccaccgattaatgttattctggagttgatcattggactagctctgtgtatgtgggttgctttgactttccctggtaaatttctctcgatccatccggattctgatgaaaacagggcggtgtttttaccacataattcggatttcatgatattcaatcaccgtggcagactgttctcaccgcagatcgacatgaagttttgaatttttatcacactgcttagtc

SEQ ID NO: 90561 - DNA, 483 bp, Arabidopsis thaliana columbia
ccagttcttcaacttcagctcaagaggtttgaatacgattttatgagggacacaatggtgaagattaatgatcggtatgagtttcctctccaactggatctcgacagagaagatggaagatatttatcccctgatgcagacaagagtgtccgcaatctctacaccctccacagtgtcttggttcacagtggaggagtgcatggagggcattattatgcttttattaggccaacactttcagatcagtggtataaatttgccgatgaacgggtcacgaaagaagatgtcaaaagagcactggaagagcaatatggtggtgaagaagagttaccgcagaataatcctggtttcaataatccacctttcaaattcacaaaatactcgaatgcatacatgcttgtttatattcgggaaagtgacaaggataagataatctgcaacgttgatgagaaagacattgcggaacatttgcgggtgaggctg

SEQ ID NO: 90562 - DNA, 525 bp, Arabidopsis thaliana columbia
  unsure (1)..(525): unsure at all n locations
nnnnnnnnnnnnnnnnnnnnnnnnnnnnnnnnnnnnnnnnnnnnnnnnnnnnnnnnnnnnnnnnnnnnnnnnnnnnnnnnnnnccacgcgtccgcccacgcgtccgctcgaaacttacaatagaatgattagagtcttgtgtgaatcaggttcaacgagttcatcatactccattgttgcagagatggagaggaaatggataaagccaacagctgctagctttggtttaatgattgatggtttttacaaggaggagaagtttgatgaagtgaggaaagtgatgagaatgatggatgaatttggtgttcatgttggtgtagccacatacaacattatgattcaatgtttgtgtaaaaggaagaaatctgcagaagcaaaggcgttgattgatggggttatgtcttgtaggatgagaccaaactctgtgacgtattcgcttttgattcatgggttttgcagtgaggagaatttggatgaagctatgaatttgtttgaggttatggtgtgtaatggatacaagcctga

SEQ ID NO: 90563 - DNA, 710 bp, Arabidopsis thaliana columbia
  unsure (1)..(710): unsure at all n locations
nnnnnnnnnnnnnnnnnnnnnnnnnnnnnnnnnnnnnnnnnnnnnnnnnnnnnnnnnnnnnnnnnnnnnnnnnnnnnnnnnnnccacgcgtccgcggacgcgtgggcgcttctccgcttccttcataaatatctcactcatcgtctctagattgttctttcacacgcaattttcatttctctcttaaccgtaaacgaatctctcttctcaaagttttattttctctctgcgatggctcaagaagatgttactgctgttgctactaacggtgctggtccggtggagacgcatcttgtcttcactgagttcaagcagatgttgctcgttgaagctcaaaaggtcggtgacgctgttactttctacaaatctgcttttggtgcgatcgagtctggtcattctctttaccctaagcgtaagcttgaccaagagcttcctcatgttctctcttctgagcttaatctcgctggctcttccttcgttgtttgcgacgtttcctctctccctggtttttctactgcgaaatcggaaggttcgggagtaacttttcttctcggaactaagggatgcttgaagcccgccgttgcgaaaactgttttaacgccggagcttttgaaagtgggaggttaccggagccaagaagttcaacctggggttcaaaggaaaaagttacgggtcccttttggggccaacttggttctccgggaaaaana

SEQ ID NO: 90564 - DNA, 535 bp, Arabidopsis thaliana columbia
tatcgactcatatagggaaagccggtacgcctgcaggtaccggtccggaattcccgggtcgacccacgcgtccgcggacgcgtgggcaaataaaaaagaaaaaacaaagagaaatattttttcaatgacaagaaagaaagtgaaacttgcttacatttccaacgattcttcaagaaaagcgactttcaaaaaaagaaagaagggtttgatgaagaaggtacacgaactctcgactctttgtggcatcactgcatgtgcgatcatctacagcccgtatgataccaaccctgaagtgtggccatcaaattccggtgtgcaaagggtggtttcagaatttaggacactcccagagatggatcaacacaaaaagatggtagatcaagagggttttctcaaacaaagaatcgcgaaagcgacagaaactttgaggagacaaagaaaggatagtagggagctagagatgactgaagtcatgttccaatgtttgattggaaacatggagatgtttcattcgaatattgtggatcttaatgat

SEQ ID NO: 90565 - DNA, 1212 bp, Arabidopsis thaliana columbia
gagtgagagaagaagatcgatcaatcaatcatcaaaccagtgtgagtaatttagcattactactgttgacttgttcaataaaggtaaagtaagatcaatccggcgcaatcttctttcgttttccggcaccgatctcggtggatctccgattcacatggcggcggataatgcttatctgatgcagtttgttgacgaaacctctttttacaaccgaatcgttctgagtcatcttttgccggcgaatctatgggaacccttacctcattttctccagacatggctccgaaattacctcgccggaaccctactatacttcatctccggtttcctctggtgcttctacatctattaccttaaaatcaacgtttaccttcccaaagatgcaattcctacaataaaggctatgcgtttgcaaatgtttgtggcaatgaaggctatgccatggtacactcttcttccaactgtctccgagagtatgattgaacgtggttggaccaaatgttttgctagcataggcgaattcggctggattctgtattttgtttacatcgccatctatcttgttttcgttgagtttggtatttattggatgcacagagagcttcatgacattaagcctctctataagtatctccatgccacccatcatatctacaacaagcagaatacactctctccatttgccgggcttgcatttcacccagtagacgggatacttcaggctgtaccgcatgtgatagcgctgtttatagtgccaattcatttcacaactcatataggtcttttgttcatggaagcgatatggacggcgaacatccatgactgcatccatggcaacatctggccagtaatgggtgcaggataccatacgatacaccacacgacatacaagcataactatggtcattataccatatggatggattggatgtttggctctcttagggatcctctcttagaagaagatgacaacaaagacagcttcaagaaagcagagtgaggatgcccacttgggggttgttcttctgtgttgtcttgtgttgttgttgtccaaagtttcagcctttcttgttctttttcttcttcttcttattcatgtgtctctctcaacctttccaattatattgttacaaacatttgctgtctagtttaaaacatgtaaatgtttgatgatctttccccaaaaaaaaaaaaactaaattactcacactg

SEQ ID NO: 90566 - DNA, 541 bp, Arabidopsis thaliana columbia
  unsure (1)..(541): unsure at all n locations
nnnnnnnnnnnnnnnnnnnnnnnnnnnnnnnnnnnnnnnnnnnnnnnnnnnnnnnnnnnnnnnnnnnnnnnnnnnccacgcgtccgcgaaatcgcctcctcttcttctcctcctcgacctggaaatcaatctttcgccgccgagttcttctctctgcggcggagaatcaattagcaatctccagaattaggtgagggaaaagaggatggctttgatcggaaaatccgagagattctctgctgattttgtgatgggtggtgctgcagccattgttgccaaatctgcagctgctccaatcgaaagggtgaagcttttactgcagaatcaaggggagatgataaagactggacatctcataagaccttacactggtttgggtaattgctttaccagaatctatagagaagaaggtgttttgtccttttggagaggaaaccaagccaatgtcatacgatatttcccttcacaggcctccaactttgcatttaaaggttacttcaagaaccttcttggatgttcgaaagagaaagatggttacttg

SEQ ID NO: 90567 - DNA, 516 bp, Arabidopsis thaliana columbia
aatacgactcactttagggaaagctcgtacgcctgcaggtaccggtccggaattcccgggtcgacccacgcgtccgcccacgcgtccgtgaactttgcacttagctcccaaagtccaacacccgattaaaaactcccataaagagctaaacacgaaacctaatttctccctacacacatctcaaatctctccaattttgttcaaagctcgaattctgttcaaagctcggatttttaattgcttcaatgggtgagaaagattcagaaacagctccgatttgggggaaaactcgagagagagagaggagcaacaacaacaatatacagccaatggatttagagtcgtcctcttctgtatctgggcaacaacgatcgttgactcagagtcgaagttcttatgaagaacgaggtagaggagttaaagagtttcggagttggtttccttggctcattccttgtttcgttgatgctaacgttgccgtcttcgtgatcaccatgtatgtcaacaattgtccta

SEQ ID NO: 90568 - DNA, 518 bp, Arabidopsis thaliana columbia
atacgactcactttagggaaagctcgtacgcctgcaggtaccggtccggaattcccgggtcgacccacgcgtccgcggacgcgtgggctgttatgcagttggctcagactacaatgcgtagtgagctcggtaaaattactcttgacaagacttttgaggaacgggacactctcaatgagaagattgtggaagccatcaatgttgctgcaaaagattggggtcttcagtgccttcgttatgagatcagggatatcatgcctcctaatggagtgagagttgctatggaaatgcaagctgaagctgaacgtaaaaagagagcccagattcttgagtctgaaggagaacgtcaagcccatatcaatagagctgatggtaagaaaagttctgtaatcttggaatcagaagctgccatgatggaccaagtcaatcgtgcacaagggtgaggctgaagcattattagctagagcacaggcaacaggccaagggactggccatggtatctcaatccctcaaggaag

SEQ ID NO: 90569 - DNA, 876 bp, Arabidopsis thaliana columbia
  unsure (1)..(876): unsure at all n locations
atacgactcctttagggaaagccggtacgcctgcaggtaccggtccggaattcccgggtcgacccacgcgtccgtttcgtttgaaacttgttatagatctgtgcgttttcgaatgtttttgttttacgagataaaggctccatttttatcgagtcaacagcaggcgccacttttaatggtgacctgactgccgcttggagcctagatcaaatgccatatgaagacccatgaaacttatttctctatagtttcatgattcaatactcttggcgacataatattatttggattctttggttttgattggtttttcttgtggtgataaggatgcgataatgatggttctagagtagatgttgggttcttgagatggcattaagtcagacacgggtgcttgttgggttattaagaacagcagagcaaccttttgcatggtgcctacattgattattagcttcttatcacgataggaggcagtcttgatctgatgtcttctcatgtcttcctctaattaaaagcagctacagttttgtcttttaaacatacacatgtttatntgaacttgagtttgaatgacacttctttagccatggatgattttagtccctgaaaaaggcggcttcttgtcttgttatgcctggaatatgggaaacattgactactcatttgtacatctgaacaaactgtacaatgagcttatacatattagattcttggggctgatctttgtttggtcgttgtctggaggaaagtgcaaaagaggggtcaggttcgcaatttcaggtttcgaaccaagaccccttttgcggacaaatatcccgggtaaaaaggttgtcacgagtgaaaaaagttgggggtaaaacaacgggggttgtt

SEQ ID NO: 90570 - DNA, 609 bp, Arabidopsis thaliana columbia
caatttgaaaaaccaagtccaacaatggcggtctctccgcatatttcgcctactctttcccgctacaaattcttctctacttccgttgttgaaaaccccacgcgcccgccgtatcgtatctatagtcggcggagagttaccaaatcacatctccaggcgcacaacagtaccactagctatggccggacggaactctcctcctcgaagaagctatggattaggcaacgaagcttcagcgaaatggaggttgagcaagcacaattagaagatgatgaagaacaagtggagatcgatatcgtcgacgaagccagtcttctctccctgagcatgaaaccggacagaaacatggcgttgctcgacgattatgagatggaggagcttggacacacgcctaatactcatcatcggagcggatatgtggcggtggtggggatgcccaacgtcgggaaaagcacgctttcgaatcaaatgattggtcagaaaatatcgattgttacagataaacctcaaacgacgaggcatcggattcttggtatttgatctagccctgaatatcagatgatactttatgatacgcctggtgtaattgagaagaagatgcacaggtta

SEQ ID NO: 90571 - DNA, 519 bp, Arabidopsis thaliana columbia
  unsure (1)..(519): unsure at all n locations
nnnnnnnnnnnnnnnnnnnnnnnnnnnnnnnnnnnnnnnnnnnnnnnnnnnnnnnnnnnnnnnnccacgcgtccggtaagagacagagctcaagcaacagtctcactcgagataaaataaagtcgtgattttgattggacccatgattctcattcgtataaattatcatctttcggcttaatcggaaaatggacgttctcgccttatcctcttccgcttccgccgccgcaccctccgcttctctcgccggaaaattcctgtcgtttccttctagggttagagtgagaagaaaccgagagaatttgttagctaaacagaagaagtttttagtttctgcttcgaaaagagaagagcctaagctcaacgaatgggatcaaatggagctcaactttggccgtttactcggcgaagacccgaaattgactttggctaagatagtagctagaaaagtggatccagaagcttcttttattgacattgagaaatctttctacaagaacaaaggtaaaattcctgaag

SEQ ID NO: 90572 - DNA, 556 bp, Arabidopsis thaliana columbia
tcgactcactataggggaagctggtacgcctgcagtaccgggccgggattcccgggtcgacccacgcgtgcggcacgagtctcgttcagctggtgactccatcatcgaagttgaggaggtgtcaaagaactctaggacagagctgaaatccatagcagattgcatgatcgctgcgggttgtgcgaaagagtgtgcgactacttataaatccattcgaaaatcgatagttgatgaatcgatttaccgtctcggagtagagaatataagctcatccaaggcgaaaaagatgccatgtgaggttgttgagttgaagatgaataggtggatagaggcggttaaggtctcgatgaagactctcttcaatggcgaaaagactctatgcgatgaaatcttcgaatcctctgtttctcttagagagttttgtttccgagacatctccaagggaggagctcttctttctgtttggattcccggaaactatcaccttaagagacaagaaaaatccacatccggagaagattttcccgttgctagatatgtattgcacgatcacaga

SEQ ID NO: 90573 - DNA, 429 bp, Arabidopsis thaliana columbia
cggatgtgcaattggaataggtggcccccttccattaatttgtcttctattctttcccgctacaactcattccccatcagcagttctatatgttggtgtagtggattcaaatatagtactcgtaaaccagggtctaactttgtcagtcaaaatttggttgacaactcaactacattctggcggaaattttacattttctagcgctcaggatccattctttggagttggttcggatgttctttctccccgtaacattggaagtcccctagcagacaacgttgaacttggatcacagtgctttgctgcaatgcaaatgccactggaaaactttctggtttcatgtgggaactgggagaacagttttcatgtcatatccttgactgatggtcgggtagtccaaagcatccgacatcataaagatgttgtaag

SEQ ID NO: 90574 - DNA, 746 bp, Arabidopsis thaliana columbia
atacgactcacttagggaaagctcgtacgcctgcaggtaccggtccggaattcccgggtcgacccacgcgtccgggggcaggtccttctggtgaaggaggagaagaagacgacgggtttagagaccttgtgaggcatactatgtttgaaaagggacagagcaagcgtatttggggggaactttacaaagtcatagactcctctgatgtaattgtccaggttattgatgctagggatccacaaggtactaggtgtcatcatttagagaaaactttgaaagagcatcacaagcataaacacatgattctattattgaacaagtgtgatctggttccggcttgggccactaaaggatggttgagagtattatcaaaggaatatccaactctagcattccatgcaagtgttaacaagtctttcggaaaggggtcacttctctcagttttgaggcagtttgctcgtctaaagagtgacaagcaagccatatctgtgggatttgttgggtatccgaatggtgggaaatcatcagttatcaacacgctgcgtactaaaaatgtttgcaaggctgctccaattccaggagagactaaggtctggcaatacatcacactcactaagaggattttcttgattgattgtcctggagttggttaccagagccgtgataccgagacagatattgtcctcaagggagtggtaagaggtacaaacctggaagatgcatctgagcacattggtgaagtactg

SEQ ID NO: 90575 - DNA, 505 bp, Arabidopsis thaliana columbia
tatacgactcatatagggaaagctggtacgcctgcaggtaccggtccggaattcccgggtcgacccacgcgtccgggtctcttggattctgaatttgggatcttggggtttcgggttttgaaccatctctttagactttagttacacttttttcattcttttttaagacaaaagagatacgatgaagtctggtctcatcataaccattgctctgttactatacacaagcagctttgttcttgtttctgtagcgaaagagtgtaccaacactcctacgcagctctcatcccatactttccgcagcgagcttctgcaatcaaagaacgaaactttgaagacagagttgttctctcattaccatttaactccagctgatgactctgcttggtctagtttattgccaaggaagatgttgaaagaagaggcagatgaatttgcttggactatgttgtataggaagttcaaggactctaattcctctgggaacttttttaaagatgtctct

SEQ ID NO: 90576 - DNA, 681 bp, Arabidopsis thaliana columbia
atacgactcatatagggaaagctggtacgcctgcaggtaccggtccggaattcccgggtcgacccacgcgtccggttcaatgcagaggaaaaacagaagagcatagacatagagactatatgtcaactcctagagatcgtcatgggatctacatttcgagcccaagttgactactttgttgagtatttaaagatccaaaacgactacaaagtgataaacatggaccaatggatgggactttaccggttctgtaacgagataagtttcccggacatgggggactataatccagagcttgcatggccattgattcttgacaattttgttgagtggattcaagaaaaacaagcctgaaatcatttctgagtcccctcaagtcgaagcttcaaatctctgcaggatgatcagtgggctctctcatcaaacagattcagcacatttttacttcagttttcatctttcaaacattaaaaaaagacacattttatgattcttgttacatgtgattaacttcaatagagggaacacataatgtttgatttattacatcaagttctgttagtagtaaccaatgatttcgaattagcttgtaaacacgttgttaccaaatttataaaaaaaaaaaaaaaagggcggccgctctagaggatccaagcttacgtacgcgtgcatgctacgtca

SEQ ID NO: 90577 - DNA, 605 bp, Arabidopsis thaliana columbia
  unsure (1)..(605): unsure at all n locations
agcttatctggaaagagagtcatgaatctgagtgtgaaccgatgcatcaccggtggtttcgtcggtggattctctagctgcagactcaatcatgagaaaacgtgggttcgtgctggcaagcactgctgagcttgagagggagagaagtttagtgtctgatgctgtttctttagagaggttagagagcagaagcattaaacttgcgatgcttgctagtggtttaggagtggcgaacttggtaactcttagctcagcaaaagccgcagacttgaagatgattgtnttggatcaagccacttccatttacatcttggctgaaggaagccttggagattcggtcgggaacttcttgtattcagctaaccaacaggctaacgaagctgttcaagatcaactatcagcactcagtgtaacaagtttggcagtaatatttggggcaggcctgtgacaagcctgcctccatgtcactnagtgntttcccgtgncctttggtaaattnggcattgggctggaaaacagnggcaggttttgggntcagtcntccnctggttgacncctnccncttggnnannctttccgaaccttgcattggaggtnccannntc

SEQ ID NO: 90578 - DNA, 509 bp, Arabidopsis thaliana columbia
  unsure (1)..(509): unsure at all n locations
nnnnnnnnnnnnnnnnnnnnnnnnnnnnnnnnnnnnnnnnnnnnnnnnnnnnnnnnnnnnnnnnnnccacgcgtccggtactttgaaatgtcaagaatgtagaagagcgtttcaagctgtgacgataccaaaacctccggtggataagaaagacgacgaagacgtttacttttgctcatgggctttgtttccattggggttttccggtgaatttcaagctccaagttggtcacctatttcacctctctttgcctgtcctctgcaaaagttggatggtgaaccaaagaagagaaaggaaccgggtcctcctaggatttactatgacgatgatgacatttatgttgcgatttcggatggagatgacgctggtgatgatggtgattggcaagatgtggtacaagtgaataagaagacgaatgttgggaaagggaaagaaacatatgtgagaagtaacaggaaacatggagttgaagaagtccaaaatgtagaaagtatcagtagggctagca

SEQ ID NO: 90579 - DNA, 1593 bp, Arabidopsis thaliana columbia
  unsure (1)..(1593): unsure at all n locations
ctcatcttcagtgtttactttttctctttctcttttttttttctctttattatttcgctttaatgagttttatctgatagaatctgctccacccaaaaacagcataagaagaaattcattgtcagagaaaagtgcaaaaaaaaaaaacgatcttcttcatcattctactaaatgggttcttgtctcagttctcgtgtccttaataagagcagtagtggtctcgatgatcttcatctctcgagctgtaaatcttcatcatcagctacagctcataagacagaaggagaaatccttagctcaacgaccgtcaaaagctttagctttaatgaacttaaactcgctactagaaacttcagatcggactctgttgttggagaaggtggctttggttgtgtctttagaggttggcttgatgagactactcttactcctaccaaatctagctctggtcttgttattgctgttaaacgacttaaccctgatggttttcaaggtcaccgagaatggctgacagagattaactatttggggcagttaagtcacccgaatttggncaaattgattggttattgcttggaagatgaacaacggcttcttgtgtatgagttcctcccctccggtagtcttgagaatcatctgtttgcaaatggaaataaggattttaagccgctatcttggattctacggattaaggttgcacttgatgcagctaaaggtcttgcatttcttcatagtgatcccgtcaaagtcatttacagagacatcaaggcgtcaaacatcttactggactcggacttcaacgcaaagctttcagactttggtttagcgagagacggtccaatgggagaacaaagttatgttagtacaagggtcatgggtacttttgggtacgcagctcctgagtatgtctcaacaggccacttaaatgctagaagcgacgtatacagtttcggggttgttctgctagaactactatgtggaaggcaagcactagaccataaccgcccggccaaggagcaaaaccttgtggattgggctcgaccatccctcacaagcaggcgaaaggttctactaattgtggaccctcggcttaactcccagtaccaacccgaaggagcagtgagactggcaagcattgctgtgcaatgcctatccattcgaaccccaatcccgtccggccatggacccagtggttcgagccttggtacagctgcaagacagcgtgggttaacccgccaattgttgacccgcttaaggttaaggataccaagaaacttgtgggattgaaaacagaagacaagtaccagagaaacggtttaaacaaaaaaaccgttggattgtagtaggtagagggaaatataaggttacttggttaggtactcttcatgtcttcttcttgtgtattgtaatattgtgcgaagtgattttgacattttgtaacactgcttatagttttgctcctgaaatattcgatttggagatacttgttttctctcaaaaaaaaaaaaaaaaaaaaaagnnnnnnnnnnnnnnnnnnnnnnnnnnnnnnnnnnnnnnnnnnnnnnnnnnnnnnnnnnnnnnnnnncgcctaat

SEQ ID NO: 90580 - DNA, 520 bp, Arabidopsis thaliana columbia
acaaggaggacagaatggtgacgggggccaaggaggacagaagggtggcgggggccaaggaggacagaagggcggcggtggccaaggaggacagaagggcggcggtggccgcggccaaggaggaatgaagggcggcggtggcggcggccaaggaggacataagggcggcggaggtggtggtggccaaggaggacacaaaggcggtggaggtggtggcggccaaggaggacacaaaggcggtggaggtggtggacaaggaggcggtggacacaaaggcggcggtggtggccaaggaggacacaaaggcggtggaggaggtggtcatgttggtggaggcggcagaggaggtggaggtggaggtcgtgggggtggtggaagcggaggaggaggtggtggtggaagtggccgtggaggacgtggacgcggtgggatgtacgatatctctgcctatactagcaagtttttctttaaatgccaagtgtttacgtatattaaactataataaagttacataagcacg

SEQ ID NO: 90581 - DNA, 1028 bp, Arabidopsis thaliana columbia
  unsure (1)..(1028): unsure at all n locations
nnnnnnnnnnnnnnnnnnnnnnnnnnnnnnnnnnnnnnnnnnnnnnnnnnnnnnnnnnnnnnnnnnnnnnnnnnnnnnnnngaaccacgccgtagatctatttccgcatctgcttaaacacctacatcgtcgtagatcgcaaaccatggccgtcgctgtagctaagcttctgatctccgccatggcggttttcatgcttgtttctgcttcgttcgcgacctcggaagtgccgttcatggtggttcacaagaaagccactctcaacaggctcaaatctggcgccgaacgcgtctccgtttcctacgacatctataaccaaggatcctcgtcggcgtatgatgtgactctgacagataatagctgggataaaaagacttttgaagttgttaatggaaacacttcaaaatcatgggaaagacttgatgcaggaggtattctgtctcattctatcgaattggaggccaaggttaaaggagtcttctacggtgctcctgctgtcgttactttccgcatccccactaagccagctcttcaggaagcatactcaactccactactacctctagatatcctcgcagacaaacctccaacgaaacctttggacgtggccaagaggttgctggcgaaatatggatcactcgtctccgtgatctccatggtggtttgtttcatatacttggtggcaacacctaagtccaacgtatcaaaggcaagcagcaagaagaagcgttaagttagtgaaatgaaaggtgagaaaggttggtacggtgctgttttctgtttaacagttaaacacagtttcaaaacttgtaagaattagagaacacactttaattttggtgttgcagaggacatacttcaagttcaaagagttattttggttttacttaatctctttgtgagagcatagtcatggagttctcttttaaaaagataaacaaaaaaaaaaaaaaaaaagnnnnnnnnnnnnnnnnnnnnnnnnnnnnnnnnnnnnnnnnnnnnnnnnnnnnnnnnnnnnnnnnnnnaac

SEQ ID NO: 90582 - DNA, 414 bp, Arabidopsis thaliana columbia
ttttgcgtttctgcttttcattttctctcaagaagcgtaaatggcgaacaatggacctaactgggacggatgactcaaatggagcctctcacattccgatggagcttcctcttctagccgtataagtgaggaagatcgacaatggtttgtggaagctatgcaagcacatacaatcgattcaatctctcgtatgaaagtaatatctcaaatcatgaagatgcctgaacaagtcttggaggctcaaggagttacacctgatgatcttgaaggaatgttggctgagctgcaggaacacgtcgagtcgatagatttggccaatgatcttcaactccattggaggtttggttcctctccttagctatctcaagaactctaatgcgaaaattcgagcaaagtctgccgatgttttgacta

SEQ ID NO: 90583 - DNA, 1219 bp, Arabidopsis thaliana columbia
  unsure (1)..(1219): unsure at all n locations
tacgactcctatagggaaagctggtacgcctgcaggtaccggtccggaattcccgggtcgacccacgcgtccgggatgacaatgattcacagggtagtagttcattgccttgttcacctactatccagggttctatagacgatgcccatggtcgtgcttttgaccgtcagctgtcaaaactgagttcctttaacttcagatcctgcaataacaataggagatcttcgcagatgtctgttccgccagaagaattgaggtgtccgatatctttgcagcttatgtatgaccctgtcattatcgcgtctgggcaaacatatgagagaatctgtattgagaaatggtttagtgatggacacaacacatgtcccaaaactcaccagcagctctctcatctttgcttgactcctaactactgtgtcaaggctctaatttctagctggtgtgaacagaacggcgttcaggtccctgatggaccccctgagtctctagaccttaactattggaggttggcgttgtctgtgtccgagtccaccgatacgagatcagcanaacgtgttggttcttgtaagttgaaggatgtgaaggtggctcctttggaagaaagtggaaccattaaagaggaagcctgtgaatcagaataccaggaagatcaagttactcttgtcgaaagatgtacggaattgttgaccactttaactgacgtggataccttaagaaagaaatgcagagttgttgagcagataagagtattgctaaaagatgatgaggaggccaggattctcatgggggaataatgggtgtgttgaagcgttgcttcagtttctgggatcagctctgaatgaaaataacgcttcagcccaaaaagttggagccatggctctctttaacttggctgtggacaacaacaggaacaaagagttgatgctagcatcaggaattattcctttgctggaggaaatgctctgtaatccacattcccatggttcagtgacggcaatttatctgaacctctcgtgtcttgaagaagcaaagcccgtaataggttcgagtctggcagttcctttcatggtaaatcttctttggaccgagactgaagtccagtgcaaagtcgatgcccttcactccctttttcacctgtccacctaccctcccaatatccnctgccttttatctgctgaccttgtcaacgcccttcaatcactcactatcagtgatgagc

SEQ ID NO: 90584 - DNA, 358 bp, Arabidopsis thaliana columbia
  unsure (1)..(358): unsure at all n locations
aaacgtaatcgattgaaatcttcctccgatcaccacttcttctccaagatggagcatgagcaagatgaccctggtacatcaacaaatgtaggggttgactcgtcagttgatgattcaatggcaagtctctctatatgtgattcagagcatcctaatatttatcgacaagatattgtcaaaagcaaaaagaccggtagtgttggtgttgtcagcgaagtagctggtgattctgactctgatagtgatattagtgatgaggaagaagatgatgatgatgacgaagataatgatgatgatgatgaggatgtagaggaagggnaaaaggctagtgnaggaaatgttgttaatggagttggcg

SEQ ID NO: 90585 - DNA, 556 bp, Arabidopsis thaliana columbia
  unsure (1)..(556): unsure at all n locations
acaagactctcagtgtcgctgtcatcgcttgttttctgggatcgtttgtnatactacttactgctgcaattccgtcgttgcaccccgttgcttgcggaaacaaaatctcgtgcgaaccgcccggccggggacagatactgtttctgctcatgggtttaggctttcttgtggtaggcgctggtggtatcagaccgtgtaatttagcgtttggtgctgatcagttcaaccccaaatccgaatcaggaaagaaagggatcaacagtttcttcaactggtatttcttcactttcacgttcgcgcagatcatctcgctcacagcagttgtgtatatccagtcaaatgtgagttggacaatcggtttgatcattccggtggctcttatgttcttggcgtgtgtgattttctttgctggcgatagattgtatgtaaaagtgaaagcctcggggtagtccattggctcggtattcctcgtgttatagcagccgcgatcaagcaaaccggggtttgaagcccggttaagcaggccttgggtcaatctttacaaccataatcccgt

SEQ ID NO: 90586 - DNA, 760 bp, Arabidopsis thaliana columbia
  unsure (1)..(760): unsure at all n locations
gcaaccggaccttcccggttctacccacccgtccggaacttaaagatattcgtctgattgttctctctcaaattggctcatcctctccattcaattcatcccaagtaccaaagcaagctacttcgatcttcctcttactactctcgtttctaattattgttgttatcttaaatgggttcatctgagaagagatcaaaggatatcatgagtgacataccaactttcagtgcagagaatttgcagaacaatttgaaagtcattcaaaacagccggacgtttctgtctatcatagctggtgtcttagcaggaataattggattcaatggcttgattggttttgtattttactttgtggtgatgttgatcacatctgttgggctcatggctaaggcaggattctcagctgacttgtactttgattcgtggaatcgggttctttttgacggttttcttggtggccttatgtcgtttgtgctgttctggacatttgcgtatgacttggtgcacatattctgagggaacttctgctccaaatgaggatggtgaaacggcacacaagattgagttcgggttttgcagcctcttcatctaaactgaattagattggcaatgtttctcttgttccctttttgaacaacagtttatgagttcgtattaccttttttttgttatttgagaccacatcaaactgtgaaaacattttagattgaaaagtttcaagctacattaaaaaaaaaacacatcngggggcggccggctt

SEQ ID NO: 90587 - DNA, 435 bp, Arabidopsis thaliana columbia
ttgtcattctgttttactttcaatgaaaacttacttttggttatacttatgtatgattcatttattcatttaattcaaaaacgtcacaatcccttttttttattacacatgaaatgagctcaacgtacaaggacaaccatccgtaccaccaccaccctcaccatcaccatcaccatccaaagagagaacccaatgaaaacaactccggaatcttatacactccctcaccttcaccgtcaccgccaactttaaaagtcaacaaagactctcacgttattaaaaaaccaccgtctccgtcttctttctcctccgcggctaagcctcgtcacccggtgatcatttacacacacactccaagaatcatacacactaatcctaaagatttcatggctcttgttcaaaaactcaccggaatgacccactcccgacgaagat

SEQ ID NO: 90588 - DNA, 1140 bp, Arabidopsis thaliana columbia
tatacgactcatatagggaaagccggtacgcctgcaggtaccggtccggaattcccgggtcgacccacgcgtccgcggacgcgtgggcggacgcgtggggccggatttttcaattttcaaattctcgattcgattgaagatggaaggaggtggaggaagtagcggcggaggagctggaggagtggttccggaatcagcgattgaagcggtgaatcatacacttgcgtacctcaaggaactgaagccacagcttgagcagatgctgactttagctgagccagaggttctcgctgcaatgcaaccattacagcgagctaagactatgcacttgctagctgaagccaccactactctttacgaactgaggttgagatgtactggtgttgatcctgatgatcatcgtgtaaaatctgaaattgagcggataaacgtgtacagagagaagtttcagaagtgtgttgatcaaagtaaaggacctttgcgcccgaccactgttttaaccgtccaggcagcaacccgtttcatcgaacattctctacctgatcttacatcgacccaaaagcaaagcattagagacctcagtaaaggagagaaatcgaggatcaggtattctgaaacatctgcgagaaagaggaaataccaatcaaatgagaaacagtctgttcagtcagctgcgaaggactttcttgaaaaggcagctcgtgagattatcggtcacaatgaaaatggtttgaagggccctttagtagcggcagctgatggttcagatgatgtcgaagttggtacagcctgatttattaccaatatatcatgctgctgctacattttctggaacgtagttgtggcattcgtcatcgtcgacattgcagagaagttggttttgtcaagttttaaaatttttggacctagttagtgttgtggtgtatgctgtttgtacattgcattgtgttagttactgttttcggaaagctcttgaagttggtgcattttgtattcggaaataacattaatatttaaaaggcaaaagaattccccaaaaaaaaaaaaaaaaaaaaaaaaaaaaagggcggccgctctagaggatccaagcttacgtacgcgtgcatgcggcgtcatagctctactatagttcagctcaat

SEQ ID NO: 90589 - DNA, 505 bp, Arabidopsis thaliana columbia
aatccgactcatatagggaaagctggtacgcctgcaggtaccggtccggaattcccgggtcgacccacgcgtccgcttgaaaccacccaaggggaaaaggttagagctttgctgaatgaaaagactgcaacatcacagattcagaacctattaagtgaaaagacagaacttgcgacagagttggaaaactgtaagaaggaagaagagaaaatcaagaatagctatggagagtttaactttggatttgcaagaagtatctgttgaagcaaaggaagcaaaggagaagctcttaacatgtcaagcggagctcgaactttgtggagtccagattgaaagtttgaagttggctgagaaagatacaaatgaaaagcatgggaaaatgcttgaagatgcaagaaacgagattgatggcctgaaaagtagtttggaaaacactgagaatgagttttttaattctaagactgagtgggaacagcgagaacttcatttgatgctatgtgtgaag

SEQ ID NO: 90590 - DNA, 1452 bp, Arabidopsis thaliana columbia
atgtttgtaaatttcaaatacttctctttctttatccgtacgaaaatggacggtgttaccggcggaggaacgaatatcggcgaggctgtgacggcgccaccaccgcggaatccgcatccagcgactttacttaatgcgaactctttaccgccccctttccttagcaagacgtatgacatggtggaagatccggcgacggacgcgattgtctcatggagtccgacgaacaatagcttcattgtttgggatccaccggagttttctcgtgatcttctacctaaatacttcaaacacaacaatttctccagctttgttcgccagttaaacacctatggttttaggaaagtggatccagatcgatgggaatttgctaatgaaggtttcttaagaggtcaaaaacatctattgaagaagataagccggagaaaatctgttcagggacatggtagtagtagtagtaatccacaatctcagcaattatctcagggtcaaggttcaatggctgcattatcttcatgtgttgaggttgggaaatttgggttagaggaagaagttgaacagcttaaaagagacaaaaacgtgttgatgcaggaactcgttaagttacgccagcagcaacaaacaacagataataaacttcaggttatggttaaacatcttcaggttatggagcagaggcaacaacagattatgtctttccttgctaaagctgtacagaatcctactttcctctctcagtttatacagaagcagactgatagtaatatgcatgtaaccgaggccaataagaagcggagactcagagaggatagtactgctgctactgagagtaatagtcatagccatagcttggatgcatcagatggacagatagttaagtatcagccacttagaaacgattcaatgatgtggaacatgatgaaaacagatgataagtatccgtttcttgacgggttctcatctccaaaccaggtatcaggagtcactcttcaagaggtactacccacaacttcaggacagtcacaggcatatgcatctgtaccatcaggacagcctttatcatacttaccctctacttcaacttctctcccggataccataatgccagagacttcccagataccacaattgacacgagagagtatcaacgacttccctacagaaaactacatggatacagagaagaatgttccagaggcattcatctctccaagcccattccttgatggtggttcagtcccgattcagcttgagggaatacccgaagaccccgagattgatgaactaatgagtaactttgaattccttgaagaatatatgccagaaagcccagtttttggagatgcaactacactagagaacaacaacaacaacaacaacaacacaaatggtagacatatggataagcttatagaagaattgggtcttctcacatcagaaacagaacactag

SEQ ID NO: 90591 - DNA, 426 bp, Arabidopsis thaliana columbia
accactttctttggacacggatggctcaagccttggctcaaccaccactggtggtcaccaccgtcgtcccagacccgccgccgccgccaccaccaccgcacccaaagccgtatgctctacgatacatggcggatcttcttggccggattggtataatggatacagacaaagatggtaacatcagcccacagagtccgaggagtcctaggagcccaagaaacaacattctcatggggaagtacgagcttgggaagcttctcggccacggaacctttgcacaggtttatttagctcaaaacatcaaatctggagataaagtcgccattaaagtcatcgacaaggagaagattatgaagagtggtttggttgctcacatcaaacgggaaatctctatcctccgccgtgtccgtcacccttacatcgttc

SEQ ID NO: 90592 - DNA, 791 bp, Arabidopsis thaliana columbia
  unsure (1)..(791): unsure at all n locations
ggtcgacccacgcaaccgattcaaactggccggcacatgatttgcatcagggcattggaatggattgggattcgatcaacgatttgagggttgacatgggtagaatacagcaaaggatggataacctgcagaggatgctagaggcttgcatggaaatgcaactcgagttacaacggtccataagacaagaggtctctgctgcgatgcaccgctctactgaccaaccaggtccatccaaggacactgcgagttacgagtcaaaatgggaatatgtaaggaaagggatctgctgcgtatgctgcgagagcaatattgactctttattgtatagatgtggacatatgaacacctgcgagaagtgtgcaaagaagctagtggaagcgggaggaaaatgtcccatgtgtcaagcccctgtgattgaggtagttcgtgcttactctattctttgaaactcttgtgctctcctacggctccaagctctgcttatttgattctgggttttacagatatcaaatgtctttgattgtgatgtttttagcatagatatttactctgattcactcggctcttaattttatccgtggtgtaagaaagacaaacacacccttcttaactatttttatacacatgaaacatcaaaagattcaatagaaattggtggcagtgaaaaaaggaggnnnnnnnnnnnnnnnnnnnnnnnnnnnnnnnnnnnnnnnnnnnnnnnnnnnnnnnnnnnnnnnnnnnnnnnnnnnnnnnnnnnnnnnnnnnnnnnnnnnnnnnnnnnnnnnnnn

SEQ ID NO: 90593 - DNA, 424 bp, Arabidopsis thaliana columbia
cccacgcgaccgctgggttttagcttagggaagcttctagatctctccgatgatcccttgtggacaactggatggatttatgttagggtgcagaaccaacttgcatttgtatataacggtcaggttgtcgttgacacttcattgtctctaaaaagtcgtgattatagtcacatcattagcgttaaaccgcttgctatagctgcaacggagaaggctcaatttacagttaaaggcatgaatctccgtcagcgtggcacaaggttactttgttctgttgaaggaaaatacttgattcaggaaacaacacacgattcgacgaccagggaggatgacgatttcaaggacaacagtgagattgttgagtgtgtaaacttctcttgtgatatgcctatattgagtggtcgatgattcatggagattgaag

SEQ ID NO: 90594 - DNA, 484 bp, Arabidopsis thaliana columbia
agccgttcaagaagcgatgttcttggatctggtactggaacttatggacatggaagtataatgcgaggaggtggtatatctccggccaaacctaccaacaccggaggaggatccaactcgccggtaaatgtcggtagctctagtataagtagtagtactgttgctacgggagagactcctatatggaaaaaagcgattttaggttcggattcagaggaagtgaagagagtacggaatgaaatgtataggaaaggtttgtttaatgaggctttgaagttgtatgatagagcaatagctttatctccgactaacgctgcttaccggagtaatcgagctgccgcattgattggtttgtctcgaattggtgaagctgttaaggaatgtgaagatgctgttagatcggatcctaactatggaagagctcatcaccgtttggccttattgcttattagattaggtcaggttaatagtgcaaggaagcatc

SEQ ID NO: 90595 - DNA, 369 bp, Arabidopsis thaliana columbia
aaccgagctaaccatggcatttctagtagagaaacaactcttcaaagccctcttctcattcttcttattagttttactcttctccgataccgtcttatctttccgaaaaacaatcgaccagaaaaaaccctgcaaacacttctcgttctatttccatgacatcctctacgatggcgacaatgtagcaaacgcaacctccgccgccatcgtgagccctccaggactaggaaacttcaagttcggtaagtttgtgatctttgatgggcccataacaatgggcaagaactatctctcaaaacccgtggctcgcgcacaaggcttctatttctatgacatgaagatggacttcaattcgtggttttcctacac

SEQ ID NO: 90596 - DNA, 545 bp, Arabidopsis thaliana columbia
  unsure (1)..(545): unsure at all n locations
nnnnnnnnnnnnnnnnnnnnacgactcactattgggaaagctggcacgcctgcaggtaccggtccggaattcccgggtcgacccacgcgtccgcggacgcgtccgcccacgcgtccggagaaaattagcgaggaggtagctcacccggaaactctcctccagttctgtgtcgaggtctccaaagagatcgacgaacatctcttggccgaggaagaggaggtgaagacaccagagacgcctagtttggtgggaaagcgagagacagacgtggagatcaaagcttccgctgagaagttccatcacatgttcgccgggaaaccacaccatgtctctaaagcatctccaggaaacattcaaggttgtgatcttcacgaaggcgactggggtcaagtcggctctatcgtcttctggaactacgttcattgatagagaggcaaaggtggcttaggagaggattgaggcagtggagcccaataagaactttgatcacgtttaggggtttccgacggtgatctgatgaaagagtacaagagcttcttgctcac

SEQ ID NO: 90597 - DNA, 912 bp, Arabidopsis thaliana columbia
  unsure (1)..(912): unsure at all n locations
ttttacgacagaaggggactcatctcctaaattccttacataatattttcttaagataagcaaaaaaatcatggcagaagcgtctagtttggtggggaaacttgagacagaagtggagatcaaagcttcggccaaaaagttccatcacatgtttaccgagagaccacaccatgtctccaaagcaactccagataaaattcatggatgtgagctgcacgaaggcgactggggcaaagtcggctctatcgtcatctggaaatacgttcatgatggaaagttaacagtggggaagaataagatcgaggcggtggatccggagaagaacctgatcacgttcaaggttttagaaggtgatctgatgaatgagtacaagagcttcgcatttacactccaagtgacccctaagcaaggggagtcagggagtatttcggacttggcacctggagtatgaggaaatttagcgagggggtagctcattcccgaaatctttctccccatttttgtgttcgaggtttcgaaaagagattcccgaacattcttttgtcccgaggaaatagaggaggtcccccccctccttcggtgtttgaatttaaaacgccaataaataaggagctaagaccccatgtcctttgtgaggatatatgaatgttgagtgtgcctccccacatgtatgtatccccaccatcgttttacgttggctcctgtaactttgagaaccaatgtgtagtagctgtgatgaagctagtataaatatataataagtatgttatatatgtttgctaataataaatgtttggcctaaaaaaaaaaaaattaattaaaaaccccacgtcggcnnnnnnnnnnnnnnnnnnnnnnnnnnnnnnnnnnnnnnnnnnnnnnnnnnnnnnnnnnnnnnnnnnnnnnnagacc

SEQ ID NO: 90598 - DNA, 1274 bp, Arabidopsis thaliana columbia
  unsure (1)..(1274): unsure at all n locations
ctctattacgactcattatagggaaggctggtccgcctgcaggtcccggtccggatttcccgggtcgacccacgcgtccaagaaaatcaaagcagcagttatggccgacgtagcaacaaagcaccccatggaagatgaggtgaagaagacggaggcgtctagtttggtggggaagctagagacagacgtggagatcaaggcttcggctgataagtttcaccacatgttcgctgggaaaccacaccatgtctccaaagcaagtccaggcaacattcagggatgtgatctgcacgaaggcgactggggcacagtcggctctatcgtcttctggaattacgtacatgatggggaggcaaaggtggcgaaggagaggatcgaggcggtggagccagataagaacttgatcacgtttagggttatagaaggtgatctgatgaaagagtacaagagcttcttgctcaccatccaggtgacccctaagcctggaggccctggaagtattgtgcactggcaccttgagtatgagaaaattagcgaggaggtagctcacccggaaactctcctccagttctgtgtcgaggtctccaaagagatcgacgaacatctcttggccgaggaagaggaggtgaagacaccagagacgcctagtttggtgggaaagctagagacagacgtggagatcaaagcttccgctgagaagttccatcacatgttcgccgggaaaccacaccatgtctctaaagcatctccaggaaacattcaaggttgtgatcttcacgaaggcgactggggtcaagtcggctctatcgtcttctggaactacgttcatgatagagaggcaaaggtggctaaggagaggattgaggcagtggagccgaataagaacttgatcacgtttagggttatcgacggtgatctgatgaaagagtacaagagcttcttgctcacgttccaggtgcccccgaagcttggaggccctggaagtattgtgcactggcaccttgagtatgagaaaataagccgagggaggtagctcatcccggaaactctcctcccaaattcttgtngccaangnctccgaaagaagatccgaccggacaatcttttggcccganggaattagangggagtactaactnactccttccggtgntttgaanttaaaaatgcgaattaaattaaggggccntaagganccaatggcccttttggtnggnannntattgaaatgtnnaagtgtccgacccatgggantgnannggnanaccccaaag

SEQ ID NO: 90599 - DNA, 613 bp, Arabidopsis thaliana columbia
  unsure (1)..(613): unsure at all n locations
ttctgtggggagcaagtgcaagggannntgagcgtgatccaaaacttgatctcgttcagggttatagaaggtgatctgatgaaagagtacaagagcttcgtaatcacaatccaagtgactcctaagcatggaggttcagggagtgtggtgcattggcacttcgagtatgagaaaataaacgaggaggtggctcatcctgagactctcctccagtttgccgtcgaagtctccaaagaaatcgacgaacatctcttggccgaggaatagaggagaatattcctcgtgtgactatctattatcctgtccgtacatgtatgtgtgattgaagcatgccgatttttatcactctttgaatgtggaaaaataaagagttgtgttggatatatgagagtcatgttgtatgtttttaaagtgctatactctaaatttgtatacgtataatgtgttttgtttgtttaataaagtgtaaaatgtttttttaataaaatcttaagcctcgtcttttcttaaaaaaaaaaaaaaaagggcggccgctctagaggatccaagcttacgtacgcgtgcagtcgacgtcataatcttctatagnnnnnnnnnnnnnnnnncgnnnnnn

SEQ ID NO: 90600 - DNA, 687 bp, Arabidopsis thaliana columbia
  unsure (1)..(687): unsure at all n locations
tcccattntacccccggctcaggattcccncccgttcgccaaaanttccacncatnttnccnngggccnccccattntccaagccaccccccgggtaaattccntggatgtgacctccaccaaagccgcctgggccaaagtcggctctatcggccatctggaaattccgttccatgattggaaagtttaaccagtggggaagaattaagatccgaggccgttggatcccggaaaaggaccctgatcacgttcaaggttttagaaggtgatctgatgaatgagtacaagagcttcgcatttacactccaagtgacccctaagcaaggggagtcagggagtattgcgcactggcacctggagtatgagaaaattagcgaggaggtagctcatcccgaaacccttctccaattctgtgtcgagatctccaaagagatcgacgagcatctcttggccgaggaatagaaaaatactcctcgtctgtgtgtgggtctttgaaacttaagcaagtctttgaaactgcaataaataatgaacgggtccgtctttatgtaagagaaaagagatatatatatatgtgttggtgtgtgtaatgcgtgtatgccctactactacggttgagttatgttggaatagtaaaagcatataatctattttggttcaagtgtttgactcgtagtgaacttgagt

SEQ ID NO: 90601 - DNA, 876 bp, Arabidopsis thaliana columbia
  unsure (1)..(876): unsure at all n locations
agcagcagttatggccgacgtagcaacaaagtattttatggaagatgaggtgaagaagacggtggcgtctagtttggtggggaagctaganacanacgtggagatcaaggcttcggctgataagttccatcacatgttcgccgggaaaccacaccatgtctctaaagcatctccaggaaacattcaaggttgtgatcttcacgaaggcgactggggtcaagtcggctctatcgtcttctggaactacgttcatgatagagaggcaaaggtggctaaggagaggattgaggcagtggagccgaataagaacttgatcacgtttagggttatcgacggtgatctgatgaaagagtacaagagcttcttgctcacgatccaggtgaccccgaagcttggaggccctggaagtattgtgcactggcaccttgagtatgagaaaataagcgaggaggtagctcatccggaaactctcctccaattctgtgtcgaggtctcgaaagagatcgacgaacatcttttggccgaggaatagaggagtactactactcttcgtgtttgaatttaaatgcaataaataaggactaagagccatgtctttgtgagatatatgaatgtgagtgtgcatcatgaatgtatgtatactaagatcgttttacgttggctactgtaactttgagaagcaatgtgtagtagctgtgatgaagctagtataaatatataataagtatgttatatatgtttgctaataataaatgtttggactagcgaaaaaaaaaaaaaaaaaaaaaaagggcggccgctctagaggatccaagcttacgtacgcgtgcatgcgacgtnnnnnnnnnnnnnnnnnnnnnnnnnnnnnnnnnnnnn

SEQ ID NO: 90602 - DNA, 1332 bp, Arabidopsis thaliana columbia
  unsure (1)..(1332): unsure at all n locations
nnnnnnnnnnnnnnnnnnnnnnnnnnnnnnnntaatacgactcctatagggaaagctggtacgcctgcaggtaccggtccggacctcccgtctcgccccccgcaaaaccctaactgtttccaagataatggcaaaaactgaagctcctagtttggtggggaagctagagacagaagtggagatcaaagcttcggctggacagtttcatcacatgtttgccgggaagccacaccatgtctccaaagcaagtccaggcaacattcagagctgtgatctgcacgaaggcgactggggcactgtcggctctatcgtcttctggaattacgttcacgatggggaggcaaaggtggcgaaggagagaatcgaggcggtggagccggagaagaacttgatcacgtttagggttatagaaggtgatctgatgaaagagtacaagagctttttgatcacgatccaggtgacccctaagcatggagggcctggaagtattgtgcattggcaccttgagtatgagaaaatcagcgacgaggtagctcatcccgaaactctcctccaattctgtgttgaggtctcccaagagatcgacgaacatctcttatccgaggaagaagaggtgaagacaacagagacacttgagacagaggtggagatcaaagcttccgctgagaagttccatcacatgttcgccgggaaaccacaccatgtctctaaagcaactccaggaaacattcagagctgtgatctgcacgaaggtgactgggggcacagtcggctctatcgtcttctggaactacgttcatgatggggaggcaaaggtggcaaaggagaggattgaggcggtggatccagagaaaaacttgatcacgttcagggttatagaaggtgatctgatgaaagagtacaagagcttcgtaatcacaatccaagtgactcctaagcatggaggttcagggagtgtggtgcattggcacttcgagtatgagaaaataaacgaggaggtggctcatcctgagactctcctccagtttgccgtcgaagtctccaaagaaatcgacgaacatctcttggccgaggaatagaggagaatattcctcgtgtgactatctattatcctgtccgtacatgtatgtgtgattgaagcatgccgatttttatcactctttgaatgtggaaaaataaagagttgtgttggatatatgagagtcatgttgtatgtttttaaagggctatactctaaatttgtataaaaaagaaaaaaaaagggcggcaactctagaggatccaagcttacgtacgcgtgcatgtgacgtcatagaacttctatagtgtgtc

SEQ ID NO: 90603 - DNA, 420 bp, Arabidopsis thaliana columbia
tctgactcctctgctgctgcttctcatcctggtttctctgagaaccatccagacgtacagaaccccaaacaaatagataaggatcatgttcttgagaaactgaaggatctcgtctttagtcatgatgagcatggagacaacagtctaactgaaactgttgaacaagccaacattcccacctgcaagaacttggaagacagagatacacttgaagaggaaacatgttcagaggggaaaatagatggcagttgtcttgtatcctctcctcttccacatacaataagccagttgatgcatgaggtgaaggaactcagggcatgcgggctggaaaattcaaccaagatatgttacttggaagagaagctggacaaagcacacaaggaaatttatcaattgacagagcgttgcaacatgctggag

SEQ ID NO: 90604 - DNA, 522 bp, Arabidopsis thaliana columbia
  unsure (1)..(522): unsure at all n locations
nnnnnnnnnnnnnnnnnnnnnnnnnnnnnnnnnnnnnnnnnnnnnnnnnnnnnnnnnnnnnnnnnnnnnnnnnnnnnnnnnnnnccacgcgtccgatggaaccgccggccaccgcatctaatcgctcttccagacggctactctttgaccgccgttacggctgggtgtaaattctctatctttatcagttaaattcattttccaatttaatggagacaaaatgattctgtgttggcttaacagggtcgacgaatggaaggacccatcggaggaagctctcgccggcggcagaggaatgttttgtgtagttcccttgacgaaaactctgtttcagacagcttcacaatcaatgaactcagctgtcaaatttctggatatgaagtttcagaaattggcaaatcctatgcacaatccaagtggagatttagggtcaaaatcaaatgtgttggattaacaagtacatgtgtttagtgttggattatacgtctagatctcatctatgtactttgttcaaagtttttg

SEQ ID NO: 90605 - DNA, 420 bp, Arabidopsis thaliana columbia
ctgtgtttcatttcaaatcatcatcaaaccggcaaagcgaagcaatatctccattcgtcaacactttatgcttacggtatccattagtacattttttcaaggtggacgtagaggagagcttggcattggcgaaagcagagagcatcaagaaaattccaacgtttaagatttataagaagggagagaaagtgaaggaaatggtatgtcctagtcatcagttactagaggactctgttacgcatttcctcttaaaacaaatctctcttctcattctttcaaatctttagtcttcacgaacgtaaattgattcaaagagccattttgttaattgaaattttcattcttttgttttgctttccgggattatcaaattgaaacccgctccgattgtattaatcccaggaaaatgcatgtttctcc

SEQ ID NO: 90606 - DNA, 472 bp, Arabidopsis thaliana columbia
tcacgaaaatacatcccaattctaaaaaaattgttttttcaatttttctcctttgatttcttaaaagaagatccacaacaacaagaatgaatacattcaagatatcatatttcattatggtgctcataatggtcttagccattgctataacatttagcgagccgctaacggttgaagcaaaacatcaacacaaatatggttgggggatagccgcttctgcaaggaacaaaggtaggaaacatttaggtgcaacattgacatgtgacaaaagctccaaggtatgtcgtctcaaaggcagtccaggtcgtaattgttgtcgtaagaagtgtgtcgatttgaggaccaacaaattgaactgcggaagatgtggaaaaagctgccaatactcggagatttgacgcaccggatattgtgtaaacccgatgtaatgaaaggagacatatggaggttgccgaacgcgtggaaccccccg

SEQ ID NO: 90607 - DNA, 859 bp, Arabidopsis thaliana columbia
  unsure (1)..(859): unsure at all n locations
cgccnnnnnnnnnnnnnnnnnnnnnnnnnnnnnnnnnnnnnnnnnnnnnnnnnnnnnnnnnnnnnnnnnnnnnnccacgcgtgcgcccacgcgtccgtacggctgggagaacagaacggggagagaaaaagagagatggctgaagcagcgagaagacaaggtggtgggagaccattaccgccacctccgagaggcgttaaccaacaacctcctcgccctaaacctgaacctgtcgatcgtgaaaagacatgtccccttcttcttcgtgttttcaccaagagtggtggtcatcatactagtgaagattatgctgtgagaggcaaagaaccaaaggatgaagttcaaatctacacttggaaagatgccagtcttcgcgagctaacagatttggttaaagaagtttctgtagcagctaggagaaggaatgctagattgtcttttgcgtttgtttatcctaacaataaaggtggctataatgtgagagaggttggggagacgatggcttatccaaaccgaaaacaaccagatgacagtaaaacgctttccgaacttccgtttgagattggagattatctggatgtggcaatttactaggaggtttctgtttcttgttaagtgggatttgggtgcgtgcccaatggaagaagtacacattcatatggttgtatcatcttaaacttcgtttagacatgtttgtattttttggatctagtctatgtactaatgtctaatggtttagcatgttatcctgctttttttgtttaacgtgttttcttttctaaagaaccaaaaaaaagatggaagaactcaagccattttatatacaaaaaggtataaatttagactatcaaaaaaaaaa

SEQ ID NO: 90608 - DNA, 709 bp, Arabidopsis thaliana columbia
acggacgcgtgggcaactccaatgttacggcgagatggtctacagcttcgtcggtcaggatctgcttggggaatgcagccgccgtgatcttcccattgaacggctcaaatcagtggtgacgtggaacatctccacactccgtccggtggtctttggcatgtctccgtacaactccgttctcggcgagactcaccacgtatcgaacggtcacatcaacgtcatcgccgaacaagtagtgcatcatcctccggtttccgctctccacgcgtctcgcggacgcgtgggaaatatcgacgtgacatggtgtcaatatttcactcctaaatttcgtggtactcacgtggacgttgaggtaaagggtaaaagggtaatgaagcttctgaatcatatagagacttatgagatggaccaaccgagactaataatgagattcttaccggcgccgggagcttactgggccggaaaagtgaaaataaagtgtccggagactgatctcgaagctgagttacatttgatctccgattcattcattgaaagattcagaggcaacaacaacagatcaataaaaggaaagatctttgaatcttcctctggtaatcagctctacaacatttttggccattgggacagaacggtaatggcgaaaaatataaagactggtgagctcgaggtcatttacaatgccaaggagaatatcacaggactcaaa

SEQ ID NO: 90609 - DNA, 373 bp, Arabidopsis thaliana columbia
caaatctctctctatttctatcgcttcttctcttctcaatctttcacttctaaacagggttatgttctttgtgggggattggaacctagcagcttcttcgtttgtgtccttggagttatttaatccatcatctgttgttttagcggtgattagcagggatatagagttcctgatttgagatctcgattagcagcagctcaagacatctccttagctcatgtttaaggatgatggcgctccaatttattgatcccctttgggtcgatctgagtttatctcacttgattcgggttcccagatctagcctcttaaggacagagatcggttttctctgttgttgatgttcgattcgtcctgcggagttgcaatctta

SEQ ID NO: 90610 - DNA, 508 bp, Arabidopsis thaliana columbia
  unsure (1)..(508): unsure at all n locations
catggaagctcttattgcttccacttccttcttcgtccccatctccaactcttcctcctcacacattatcaataacagattcttcccttcattttattctcccaacttaaatttcgggacttttcggaaaacttccttgtcatcatcacacctcgtcttctcatcttctgcaatttccgcaccgccttcttctactgttcttactcgaaacagctattggatggtgttattggataaacctccgcattgggtttcttccaaatcagccatggtagattattaatgtttcgagattcttgcgaaagtactgggaaacggaaaagatgcgcaagtgagtatatatgatgcttcctttgatacccatttcggggtttgttgtcataatcgacggagatgcttcacggcagctcgctagtttacctggggagggtctattaggcngaccagggttcaggtcagagagnngattttgnattggngcaaaaggggtnatgttntctgggaggaa

SEQ ID NO: 90611 - DNA, 522 bp, Arabidopsis thaliana columbia
  unsure (1)..(522): unsure at all n locations
nnnnnnnnnnnnnnnnnnnnnnnnnnnnnnnnnnnnnnnnnnnnnnnnnnnnnnnnnnnnnnnnnnnnnnnnnnnnnnnnnnnccacgcgtccggaagatttttcggtggttgtgttggcttctgatctaggaattgacgctagacccttcttgacgagaagcgatgacgttgatgaacaagaaaactggcatgattgtccccaatacttaggagatgaagatttctctgatctcgatcttctccagttctttactctccagggcttggataggtccggtaaccggattttccgcatcgtcggaaagtatttccctgctcgtgtagtgagtgcggagcggctgaagaagtatatatcccagaagataagcaaccaatgtcctgagggacctttgtgcttggtttacatgcatagcacagtccagaaggacgacaattcaccgggaattaccatcttacggtggatttacgaggaccttccttcagatatcaaagacaggcttcaacttgtttatttcatcca

SEQ ID NO: 90612 - DNA, 446 bp, Arabidopsis thaliana columbia
gagaacgtcatcggagacttgagagcggcggcgagcttcaccggcgctggttaacggcggccctctcaatctccagtattctcggttcaataaaagcttcaaaaaaagaagaaaaaatcgaaaattcacgaaaatatatattaatttcaattttccatatttgaattcttccagatcttatggttccttgttcttcgttctcgtggcggtttttgaattgttgatgcgacgatctcatgcccgttctagggtgaagaatagtagtagtagtaaatccgatatggatccgattaagttccagatccgttctgggaaccgagcaccgtcttcttcatcgacctatacgctaacaaaaccgaattcgaaacacgcgaaatcgaatctcttgttaacaggtggttctatatctgtagtgctgggggttctctttctttgctattcaattt

SEQ ID NO: 90613 - DNA, 353 bp, Arabidopsis thaliana columbia
aatggctggagtcacgcttctctctcttgtgcaacggtgcgcctgatttgttctcgagtgttgtctccttcacaggagcgaataatggcgattttgggctcaactctagtttaggcggtgcgttcttcgtctctagcttcgttgttgggacgatttgtgtgttgattggatctagagatgtcgctatcgacagaaatagctttatccgcgacgtggtttttcttcttgtcgctctttgctgtctcggtttgatcatcttcataggcaaagtaaccatttgggtcgctctctgttatctctccatttatctcctctatgtagggtttttatcggttttacatttctttgaccgt

SEQ ID NO: 90614 - DNA, 608 bp, Arabidopsis thaliana columbia
cccacgcgtccgtctcactctctcgctacatggagagtctctcgattcccgccgcttcttggttttccggcggaaccattcctccgacgaaggtgagagtttctccgccgcatcatctccggcgacctcccaacaggaattcccatcgcttggccgccattaatgccgcttctcgctctgtgagtgagctagtggaggaggatgtgttgcaaatgttcatgaaagacagagaagaaaatggagatttcatatctaaagtttctgataggctctggttaaaggagattctcgaatctattgatgttaattccaatggagcttcttcttcagctgttgaactagatgatactcgggaaagcttgatagatggcgctgatgatgatgaaagtggtttcttgaaacttaaaccgacacaagaatggattggttgggagagtgattctgcccccatgaataagaaagctctagctaaggcactacgagatgacagcgagagaaggaagaagtttaactttctgaaatatgaagctctgaagcgtgaactcatgtacctgtcgattgtaattggcactggatgcaccggatactgtttactagctttatcagtt

SEQ ID NO: 90615 - DNA, 650 bp, Arabidopsis thaliana columbia
atgatacgcgagacctatacgacttacttagggaaagctggtacgcctgcaggtaccggtccggaattctcgggtcgacccacgcgtccgcctcagtcaaattttattacaaagagggagaccagaatattcctccttttgtcttcaagattttaaagccatggccggtggagctcttaccgatgaaggaggcctaaagagagctcatctctatgaacatcggatcacttcttacttcatcttcgcttgcatcgtcggatccatgggaggctctcttttcggctatgatcttggagtctctggtggtgttacatcaatggacgatttcttgaaagagttcttcccagggatctacacaaaggaaaaaacagcaaatgcatctaaacgaaacagattactgcaaatacgacaatcaaatcctcacactcttcacttcttctctctacttcgccggtttaatctcaactttcggagcttcttacgtcaccagaatctaacggaggagaggaagcatcctcgttggctctgtcagcttcttcctcggaggagtgattaacgctgcagccaaaaacatcctcatgttaatccttgggtcgaatcttcctcggcataagcattggattcggaaaccaggcggttccgctatacct

SEQ ID NO: 90616 - DNA, 734 bp, Arabidopsis thaliana columbia
  unsure (1)..(734): unsure at all n locations
cgggggggtccaacccttccgggttgccttccttaaccgtcatttatcggctaagctcttccatgacaagtggagtttgcttcctttgcggaagttccttcgncttcacagccaccagggcaagaacctgatgttgagcgagaagattcaaaacctcaacactctgcaacacactttgaggaaagcagaagagtatctagcagagcttaagcccgaaacactgtatgaagagtttgaggccaagtttgaggagattggtcttgagaggggatggggagacaatgcagagcgtgtccttgacatgatccgtcttcttttggaccttcttgaggcgcctgatccttgcactcttgagacttttcttggaagagtaccaatggtgttcaacgttgtgatcctctctccacatggttactttgctcaggacaatgttcttggttaccctgacactggtggacaggttgtttacattcttgatcaagttcgtgctctggagatagagatgcttcaacgtattaagcagcaaggactcaacattaaaccaaggattctcattctaactcgacttctacctgatgcggtaggaactacaatgcggtgaacgnctcgagagagtttatnattctanagtactgtgatattctttcgtgtgnccttcagaancanagaaaggggtattgttngcaaatgggtctcaaaggtccnaagtttngccaaatcnnggngnnttcacc

SEQ ID NO: 90617 - DNA, 385 bp, Arabidopsis thaliana columbia
ttccacgcgtccgcggacgcgtgggcgggcgcgtgggcgcacgattgatatgcaattgcaactttcatctgcagcaaaccaatcgtccggaggggcttccgagcctagtcagccaacgagaggtctacatgttaatccaaaatatctccgcaggcgggagccctcagccgccgtaaataatttgagaggaattaattcgagtgcaagagtttatggccaaaattcactcggtgggtataatgatttcgaagatcagttagagagcccatcttcactgtctagttaacccccaccgagatggttttaccaggaggtctaatgatggatctaatccttctaatcaagcttttaactatggaatgggtcgagctactagcagagatga

SEQ ID NO: 90618 - DNA, 554 bp, Arabidopsis thaliana columbia
  unsure (1)..(554): unsure at all n locations
nnnnnnnnnnnnnnnnnnnnnnnnnnnnnnnnnnnnnnnnnnnnnnnnnnnnnnnnnnnnnnnnnnnnnnnnnnnnnnnnnnnccacgcgtccgcacaaagcaaaaaaatctctgtaaaagcagaacgataatggagtcacaattatggaattggatcttacctcttttgatctcttctctcctcatctccttcgtcgctttctatggattcttcgtcaaaccgaagcggaacggtctccgtcacgatcggaaaactgtttctaccgtcacctccgacgtcggatctgttaatattaccggagatactgtcgctgatgtcattgttgttggagctggtgttgctggttctgctcttgcttatactcttggaaaggataaacgccgagttcatgtgattgaaagagatttatcggagcctgatcgtattgttggggagttgttacagcctgggggttacctcaagttactggagttgggaattgaagattgtgtggaagaaatagatgctcagcgtgtgtatggttatgcactttttaaaaatgggaaacgcatt

SEQ ID NO: 90619 - DNA, 804 bp, Arabidopsis thaliana columbia
  unsure (1)..(804): unsure at all n locations
cacactcctgtagaggcgattgagccagtaatacctcatcatgagcttggtggcaaaacaccttctgctgattactctgttgataggcaaatggatgctgttggagaaagaaatttggacgtgtcatccgtagaagaaatctcaagaagcaaggactcaaatgttacgcctgatgatgatgtgtctgggatgcgaagcccatcagcttttttcaaacaccccactcatcttgtaactccttcagagatattgatgggcgtttcttccgctgaagcctccatgtttaaacctactgaagacacgagagatagggatgcaaatattcaggacgtgaataatgatccaagagacaccgaagtagaggtgaaagaaataagtgaagcaaggtcaacacagaatggtgaaatcaatgatcatgacgaaactgagaattgcacttcagaaaatagagaaaaagtcttctgctcacaggtttcaaatctcagcactgagatggcaagagactgttatcctagtactgagggaactttcattccaggggaatctaaggcatatggacaacctataaaggctggagatgaaagtggtgttgactccgaagaggtgggccctgcaaaagcttcctttaaagggnaagaagcagaaaggccaaaaaattccccangggtccccggtttgaccatccaaantacccccaatggttgcaacctggnggnncccttccaattggccaagnccggggttaagcncccccnngcanggtttccncccccagtngntnngatcgaaaaccggtaacccggg

SEQ ID NO: 90620 - DNA, 556 bp, Arabidopsis thaliana columbia
  unsure (1)..(556): unsure at all n locations
cttatacgatctcttcccaaatnattgatttttttaacccatttctctcatcgcacggtgatattgagaatcgccgacctgaatcgatcggaaaactttctctgattaccggcggtcaacaccgctgaacacatatgtttgtttgacgacctcttctctccgcgatctttacctcaacaacgagatctgtttccacgaaagaaaggaggatgtcgacgccagcaaggaagaggttaatgagggatttcaagaggttgcagcaagacccacctgcgggtattagtggtgctccacaggacaacaacattatgctctgggaatgctgtcatattttgggcctcattgacacaccattggggattggagggtctttctaaaactcctcactgcagttttctgaaggcgttcttcccccattaaaccccccccagttcgggtttttttcccggggggtcttccccctatttttttagntgggggttttctttggcattttcaaancagtggggccantntanggtgtgnntattccncancggctttcntggccaatgta

SEQ ID NO: 90621 - DNA, 782 bp, Arabidopsis thaliana columbia
attcgactcatatagggaaagctggtacgcctgcaggtaccggtccggaattcccgggtcgacccacgcgttcgcccacgcgtccggacgccagcaaggaagaggttaatgagggatttcaagaggttgcagcaagacccacctgcgggtattagtggtgctccacaggacaacaacattatgctctggaatgctgtcatatttgggcctgatgactcaccatggggtggaggtactttcaaactctcactgcagttctctgaagattatcccaataaaccaccaacagttcggtttgtgtcacggatgtttcatcctaatatttaggcagatgggagtatctgcttggacattctacaaaaccaggggagtccaatctatgatggtgctgctatacttacctccatccagtccttgctctgtgaccctaagtccgaattctcctgcaaactccggaagctgctccgaatgtacagcgaaagcaagcgcgagtacaacaggaaagtgcgtgatgttgttgagcaaagctggactgctgactagtagtagtttgttgtaagcgttgtagctctctctactttctttcaatcacgattcagcaacagcttttttctcttttcattcatgtcttgtgtttccaaaactatttaagtgattccatgctttgatgtaacccaacatccttaaaaaaacaactttgtaccaaaaaaaaaaaaaaaaaaaaaaaaagggcggccgctctagaggatccaagcttacgtacgcgtgcatgcgacgtgaag

SEQ ID NO: 90622 - DNA, 1051 bp, Arabidopsis thaliana columbia
  unsure (1)..(1051): unsure at all n locations
tgattatctccnnnnnnnnnnnnnnnnnnnnnnnnnnnnnnnnnnnnnnnnnnnnnnnnnnnnccaagcttctccacgcgtccccattcatcacttatacgatctcttcccaaattattgattttttttacccatttctctcatcgcacggtgatattgagaatcgccgacctgaatcgatcggaaaactttctctgattaccggcggtcaacaccgctgaacacatatgtttgtttgacgacctcttctctccgcgatctttacctcaacaacgagatctgtttccacgaaagaaaggaggatgtcgacgccagcaaggaagaggttaatgagggatttcaagaggttgcagcaagacccacctgcgggtattagtggtgctccacaggacaacaacattatgctctggaatgctgtcatatttgggcctgatgacacaccatgggatggaggtactttcaaactctcactgcagttctctgaagattatcccaataaaccaccaacagttcggtttgtgtcacggatgtttcatcctaatatttatgcagatgggagtatctgcttggacattctacaaaaccagtggagtccaatctatgatgttgctgctatacttacctccatccagtccttgctctgtgaccctaatccgaattctcctgcaaactcggaagctgctcggatgtacagcgaaagcaagcgcgagtacaacaggagagtgcgtgatgttgttgagcaaagctggactgctgactagtagtagtttgttgtaagcgttgtagctctctctactttctctcaatcacgattcagcaacagctttcttctcttttcattcatgtcttgtgtttccaaaactatttaagtgattccatgctttgatgtaacccaacatccttaaaaaaacaactttgtaccaaaccatctgaattattcacttttgtgtatatatgtattacgatttacttgaaaaaaaaaaaaaagggcggccgctctagaggatccaagcttacgtacgcgtgcatgagacgtcaaggtggtttataa

SEQ ID NO: 90623 - DNA, 564 bp, Arabidopsis thaliana columbia
  unsure (1)..(564): unsure at all n locations
gcgctctcaatctcaaaaatatccatggcggcgattacagaatttctaccaaaagagtacggctatgtcgttctcgtcctcgtcttctactgtttcctcaacctctggatgggtgctcaagtcggcagagctcgcaaaaggtacaacgtcccgtatccaactctatatgcaatagaatcagaaaacaaagatgctaagctcttcaactgtgttcagagaggacatcaaaactctttagagatgatgccaatgtatttcatactgatgatcctcggtgggatgaagcacccttgtatctgtactggccttggtttgctttacaacgttagccgattctcctactttaaaggttatgctactggagatcccatgaagcgtcttacgatcgggaaatacggtttcttggggttgctaggtctgatgatatgtaccatctcgtttggtgtcactctgatccttgcttgancnactcgtttctgggggtaatnaatncttggtttnctccgaggaatataganccnatgcttgtaagntgtccccaaaaanttgggnanacttttggng

SEQ ID NO: 90624 - DNA, 490 bp, Arabidopsis thaliana columbia
atccgaagacgcgtgggttttcgtaatccgatctccgtcgtcgtcgtcgaatcagataaaaatggcgaagcgtttgatcccgactctcaaccgtgtattggtggagaagattctcccaccgtcaaagaccgtctccggcattctcctaccggagaaatcatctcagttgaattccgggagagttatagcagttggtcctggagctagagacagagcagggaatctaattccggtttcggttaaggaaggagacaatgttcttttgcctgaatttggcggtactcaagttaagcttggagagaaagagttcctattgtatagggatgaagatatcatggctacacttcacgagtgatgtgttaaagagatagaatttatgattcctctttgttttgttgtctgcaattgtctgacatttggatcaattgttatgattgttcttcactgttggcaacaagttcttataattcaataatctcttttgtttggg

SEQ ID NO: 90625 - DNA, 565 bp, Arabidopsis thaliana columbia
  unsure (1)..(565): unsure at all n locations
ccggcgcgagcccacgcgtccggtcgctagtctctctcgtcctctctctctgttttcgtagccttctgcagcacgatctctgcttggggccttcttctctccctcagatcatctatggcactagcaggaagctagtccttcccctggtgctgaggttgttggtcgtgcctttgtggagcaatactatcatattcttcaccaatctcccggtttagttcatcggttttatcaagattcgagctttttaacccgacctgatgttaccggtgctgtgactactgtcacaactatgcaagcgatcaacgacaagattctgtcgttgaaatatgaagactacacggctgagatagaaactgctgatgctcaggagtctcatgagagaggtgttattgtgctggttacaggacgcttaaccgggaacgataatgttaggaagaagtttagtcaatcttttttcttggctccacaagacaaaggatactttgtcttaaacgacgtgtttcgattccttgaggagaaagaggtgactgcacaagcccgctctgtcnccatcaatggaaccact

SEQ ID NO: 90626 - DNA, 417 bp, Arabidopsis thaliana columbia
tcgcaggaacgccacacggtgctaatattatatctcagatccatgggtatactagcctgctagctcttaataaagagatcaacaaaaagtctgagaggaaacatgatcttgtcatcgcttcctatgtgttaggggagataccatctctgaaagacaggattactgtggttcgccagctctgggaccttacagatgatctcttgggtttggttgaaccaggaacgccacacggtgctaatattatatctcagatgcggtcccatatactgtggatggagaagaggaaactgcgtaaactggaaaagaaaatgaagaaagatggaaaggaggtgctcgatctcaaatctggtgcgcatattgttgctccatgccctcatgatggaaagtgtccgctggaaaacactggaaagtactgtc

SEQ ID NO: 90627 - DNA, 514 bp, Arabidopsis thaliana columbia
attcgagcaaggtgttatagggactcctcagctaacggattcgattgaaataccggaatccgtggaggttcttggtcagaaaatcgatctcaatcccattaaaggtttacttacatcagtccaagacactgcttcttcagtggctagaaccctttctaacccaaccacccttgaagttttctctccctagtgccaacccccagtcgtggctgctcacaacttttctcgccaaggaccctcggatctcgagaggcgatggtggaagcgtctatgtgctcatcatagaaggaagctctctcttaaccccttcccccatcataactctcatcacatccatagtaacatatatacaagtatagacccatctgtctatgtttactagtgttgtaactgttatatagcttctttacctgttggagagttataaacttataatggatgttaaaaaaaaaaaaaaaaagggcggccgctctagaggatccaagcttacgtacgcgtgcatgcgtcgtcatag

SEQ ID NO: 90628 - DNA, 912 bp, Arabidopsis thaliana columbia
gacttctaacttctacttctacttagatctcctcaaatttcttatcggaaaaaagtttgagaaaaatctcgatgaagaagaagatgattccgacgacgatcttactctcagctctcattttctctctatcaccgatctgtgaagctgtgtggcttactgtacctcacaccggatcaaagtgcgtctccgaagaaatccaaagcaacgtcatcgttttagctgattaccttgttatctccgaggaacattctatcttccctactgtctccgttaaggttacagcaccttatggcaccgtgttacaccacagggaaaatacaacaaacggtcagtttgcattcacaacccaagaatcaggaacttacttggcgtgttttgaggccgatgctaaaagtcatggtaacaaagattttagcatcaacatcgactggaaaactggaatcgcagctaaagattgggactccattgctagaaaagaaaagatcgagggtgtagagctggagtttaagaaacttgaaggtgcagttgaagcaatccatgaaaatctgatttacctcagaaacagagaagcagagatgaggattgtgagtgaaaaaacaaactcgagagtcgcatggtacagtataatgtcgctggggatttgcattgtggtctctggtttacagattttgtacttgaagcaatactttgaaaagaagaagcttatttagatcatggatagtttcttgttgaagattactagaaccaacagtttgctctgctttctttctcttgatcttctctttggaactgttagtgtaaaattttgttcactcatttaacttgtaatttgtctcctattattacaaaaaaaaaaaaaaagggcggccgctctagaggatccaagcttacgtacgcgtgcatgcgacgtca

SEQ ID NO: 90629 - DNA, 511 bp, Arabidopsis thaliana columbia
  unsure (1)..(511): unsure at all n locations
nnnnnnnnnnnnnnnnnnnnnnnnnnnnnnnnnnnnnnnnnnnnnnnnnnnnnnnnnnnnnnnnnnnnnnnnnnnnnnnnnnnccacgcgtccgcggacgcgtggggcggaggtgtacaaaggggttttaccggacggagagactgtggcgatcaagaagctgacgagacatgcaaaggaagtagaagaacgagtcagtgatttcttatcggagcttgggataatcgcacatgttaaccatccaaacgcgggtaggctttcgtggtttcagttgtgatcccggtttgcattttgggcttgagtactcttctcatggcagtcttgcttctctactctttggatcagaggagtgtttggattggaagaaacggtataaagtggctatgggtatagctgatggtttgagttatcttcataacgattgccctcgacggattattcaccgagacatcaaagcttccaacattttgctctctcaagactacgaagctcagatttcggattttggact

SEQ ID NO: 90630 - DNA, 565 bp, Arabidopsis thaliana columbia
cccacgcaaccgaccacgcgtccgagagaacatcccagttcctctaaaactggagactataaagaacataggacacgaacgattcctgcagcaaatcaggacaaacccaccatctcctcaatgcttctctgagaaccggacagctacattgaaacccttgaggaccaaacctacggaagtgttgaagagaaaggaagatgaagctgaagaagaaaagaacagaaagagtggagaaagcaaagaagcaacaaggggattggacgttctctggttcttaaagccttgcactttagccaactagaaaaccttcaccaaattctttctatattgattcattcttttgttaatttcattttattcaactgtaactaacgagatgattatcttgctcagatatataattctgggcaaatttgattcaatctcttacttttacacatacaacgatttgtttaaaataaagataagattagaattcagacccaaacccaaaggggaaccgctctagaggatccaagcttacgtacgcgtgcgatgcgacgtcaaagctcttctatagtgtcac

SEQ ID NO: 90631 - DNA, 542 bp, Arabidopsis thaliana columbia
  unsure (1)..(542): unsure at all n locations
gggntgaaggaagaagtaagttcctttatatgtttgacccttagatatgtatacaattgatgggtttggggagtaaagtcctaaactttggattctgtggggatttttttttggcggaatggatgattgcagaggacatcccaggtcctctaaaactggagacttttaaaggaacaaaggacacgaacgattcctgcagcaaatcaggacaaacccaccatctcctcaatgcttctctgagaaccggacagctacattgaaaccccttgaggaccaaaacctacggtatgtaatcaacactttccttttccataatttttaagaagagagagggccgtgaagaggagaagaagccatcgagaagccttgaccaagcaattctggctcggggaaaaagtccccggctataaaccctaccttccattcccatctcctccatcgtctccacaaacaccgtcaaacatcttatcggcggtatgtacaacgttaacggcgccgccgagaacgctatcgtgaaaaacagctgcaacatttttttttcc

SEQ ID NO: 90632 - DNA, 632 bp, Arabidopsis thaliana columbia
  unsure (1)..(632): unsure at all n locations
nnnnnnnnnnnnnnnnnnnnnnnnnnnnnnnnnnnnnnnnnnnnnnnnnnnnnnnnnnnnnnnnnnnnnnnnnnnnnnnnnnccacgcgtccgccttattcaacttaaatactacacggccaaaaacatttaacaaacgccactcagatcctgagtctttggatcaatggctatttcaaatgttatttctgtcttattattattgcttgtactaatcaatttaagcaatcaaaatatcaaaggaattgatgcatttcatcagatttacgaagaattgcaatctgaatcagtcgagtcagtgaatcatcttcacagacctagttttcactttcaacctccaaagcattggattaacgatccaaatggtccagtatactacaaaggtctctaccatctcttctaccaatataacaccaaaggtgcggtttggggtaatattatatgggcccattcggtttctaaagacttggttaactgggaggctcttgaaccggctcttagtccttcanaatggttcgacatcggaggtacatggtccggttcaataacaatcgtaccgggaaaaggaccgattatcctctataccggtgttaaccagaacgaaactcagttgcaaaactatgcaatcccag

SEQ ID NO: 90633 - DNA, 1064 bp, Arabidopsis thaliana columbia
  unsure (1)..(1064): unsure at all n locations
nnnnnnnnnnnnnnnnnnnnnnnnnnnnnnnnnnnnnnnnnnnnnnnnnnnnnnnnnnnnnnnnnnnnnnnccacgcgtgcgagagaaatgaaattcacagattctccggtgatcgatctgacggtgaacggcacaaaactctcaatccaacaagacaatggctctatgcacgtcggaacttccgtctggccttgctcactaatcctatccaaattcgctgaacgctggtcaacactagactcatcatcatcaacaacatctccaaatccatacgccgaactcttcgatttccgtcgccgtcgaggaatcgagctaggaacaggatgcggagtcgccggtatggctttttacttactaggtctaacggagatcgtactcacagacatagcaccagtcatgcctgcgctaaaacacaatctgaaacggaacaaaacggcgttaggtaaatctctaaaaacctcgattgtttattggaacaatcgagatcagatctcggcgttgaaaccgccgtttgatttggttattgcggcggatgttgtgtatattgaggaatctgtagggcaattagtgacggcgatggagttgcttgtggcggatgatggtgcggtgttgttaggttatcagattaggtcgccggaagctgataagttgttttgggagttatgcgacatcgtttttaagattgagaaagttcctcatgagcatctgcattctgattatgcttatgaagaaactgatgcttatatctttaggaagaaggtgaagaagaatgaagctgaatcagtgtcatgaagctagttttggttctgtaatgttgttgttacattgatatgcaatttgtttcttgttatagaattcgaattatctcaactatttatattttcttagatattggctactaaaagatgacaaaggctgaaatcaaatttttgtaacgatttttttaagaagtatacaagttttgttgtgtgttaaaaaaaaacaaaaaaagnnnnnnnnnnnnnnnnnnnnnnnnnnnnnnnnnnnnnnnnnnnnnnnnnnnnnnnnnnnnnnnnnnnnnnnn

SEQ ID NO: 90634 - DNA, 581 bp, Arabidopsis thaliana columbia
  unsure (1)..(581): unsure at all n locations
nnnnnnnnnnnnnnnnnnnnnnnnnnnnnnnnnnnnnnnnnnnnnnnnnnnnnnnnnnnnnnnnnnnnnnnnnnnnnnnnnnnccacgcgtccggctgagtacagagagaactaagttcagatccatggaacctgcaacttcttcaccattgccacgagacacgtcggagcaggatcccgcgctggcgcagagtgaagatcagtctcaaggaagacttagggtttctgcttatgaccttatggtagtagacagtgatttagagggattagatcaaagaaaggaagagatgcgtaacatttttgatgatattcaggataaagcttcattaattcttcagttctcacttaagtgggaagaaatcgacgacaggtttggttttctaaagcaacgagccatggagaaggaggtctctgtccggaatcagattctggagctggagaagaaggaagagcgactgaggcttgttgaagaaagagagaggaagattgaggcatccttcagtacattgcaggagaaaggaaatgaatctgatctgatactgttaatggaagcgaatgtgatgagattggttcttcaaatg

SEQ ID NO: 90635 - DNA, 417 bp, Arabidopsis thaliana columbia
acgcctcttttctcgactctctctctttctaacaatttctctctttctgcaactgatagttaaaaagatattttgagacaacccgattgatatggaaaaagtgagagagattgtgagagaagggagaagagtggcaaaagaagacccgaggagagtagttcactcgttcaaagtgggtctggttcttgccttagtctcttccttctactattaccaacctctctacgacagcttcggtgttaatgcaatgtgggctgttatgacggttgttgtcgtcttcgagttctctgttggggccacgcttggtaaaggacttaacagagtggcggcaacactatttgcggggggacttggaatcggagctcatcacctggccagcatgtctggtccgacaggagaacccattcttctcgcagt

SEQ ID NO: 90636 - DNA, 608 bp, Arabidopsis thaliana columbia
  unsure (1)..(608): unsure at all n locations
gacaactccttcctcaccattcttctccaggaccaaatcggtggtcttcaaatctttcatcaagactgttgggtcgatgtctctcctattccaggggctctagtcatcaacatgggagatttcttgcagctaataacgaatgacaaagtcataagtntggagcacagggtgctagcgaacagggcagctacaccccgggtttccgtagctagctttttcagcacaagtatgcgtccgaattcaactgtttatggaccaatcaaagagcttctctctgaagaaaacccttcaaaatacagagtcatcgacttgaaagaatacacagagggatacttcaagaaaggcctcgatggaacatcgtatctgtcgcattacaagatatgaaagaaaaaaacaattgaaagagtaaatcatctcaagtttattgtaagatattggttcgtttcatgcatctattgggttcaggtactagtccaattgtcagatcttggcaaataagtaaaccatttcctttgtaccaaaaacaaaaacaacaaagaaaggtgtgtgtgtgtgtgtgtgtataattttagtgaatgccttaaattgggaataaaggttcaaacttg

SEQ ID NO: 90637 - DNA, 1128 bp, Arabidopsis thaliana columbia
  unsure (1)..(1128): unsure at all n locations
gattaannnnnnnnnnnatagaagactttgacgtcgcatgcacgcgtacgtaagcttggatcctctagagcggccgcccttttttttttttttttgtatatgtatgaagcagctttttgtgaatgaatcttcgaaataggttaaagaaacaaaaatggagaccaaagaattcgactcttacagtgagcgcaaagctttcgacgagacgaaaacaggtgtgaaaggtctcattgatgctcacatcactgagattcctcgaattttctgtctccctcaaggttccttatccgacaagaaaccttttgtttctaccactgattttgcgatccctatcatcgacttcgaaggcctccacgtctcccgtgaagatatcgttgggaagatcaaagacgctgcatcgaattggggattcttccaggtgatcaatcatggtgttcctttaaacgttcttcaagagaatcaagatggagttcgtaggtttcatgaggaagctcctgaggttaagaaaacctacttcactcgtgacgccactaaaagatttgtctacaaaagtaatttcgatctctatagttcttcttcaagtgttaactggagagactctttcgcttgttacatggctcctgatcctccaaaccctgaggatctccctgtggcttgcaggtaagtaacttacggtttttcattgagaaatcttatgaaccgttgagcgatcttatgaaatattggctcagggttgctatgttcgaatactcaaagcatatgatgagattaggtgatttgctctttgagcttctctcagaagctcttggtttgagatctgataagcttaaaagcatggattgcatgaagggtttgcttttgctctgccattattatcctccatgtccacaacctgatctaaccatcggcacaaataatcattcagacaactccttcctcaccattcttctccaggaccaaatcggtggtcttcaaatctttcatcaagactgttgggtcgatgtctctcctattccaggggctctagtcatcaacatcggacgcgtgggtcgacccgggaattccggaccggtacctgcaggcggaccagctttcccaatagtgagtcgtagagacctgaagaatcat

SEQ ID NO: 90638 - DNA, 628 bp, Arabidopsis thaliana columbia
  unsure (1)..(628): unsure at all n locations
cgnnnnnnnnnnnnnnnnnnnnnnnnnnnnnnnnnnnnnnnnnnnnnnnnnnnnnnnnnnnnnnnnnnnnnnnccacgcgtccgataggtagtctcttcaatgtcacaaataatcgaatcacacaatattaaacactaaattattcacagttttcttggagaaaagattcaagtacaagtacaagcagagaaagtgagagagagagaaatgatgggtagcttgaaaataatatctccaccacctccggcgacaagattccggcaacgagtaacggcgaacggagatgggtttccgacatttcttccgaaggagatacaaaacataaaagatccattcgcaagagctttagctcaaaggattgtacgaattcctgttcctcttcagatgggaaactttagaggcagtgtaatgagtagctgtatcaaaccacttgttcaattacacgacaaaagtcccgttgttcttctccattgtttcgacagttcttgtcttgaatggagacgtacttatcctctgcttgaacaagcttgtcttgagacttgggctattgatgttcttggttggggattctcagatcttgagaaacttccaccatgtgatgcagcatctaagcgacatcatttattc

SEQ ID NO: 90639 - DNA, 1156 bp, Arabidopsis thaliana columbia
  unsure (1)..(1156): unsure at all n locations
gggncggaattaccggggcggaccaacccgtccggagagacgaaaggaaaagcatgtttaaactctgtctcgttctcgtcttggttattgcagtagatgcaaatccggttaagtccggttcttgtagttgctccgggaatatatcagcgagcgatgtcgatcgagttcatttcgcgatgaacttggagttcaccgaggcggagttcttcttgaaaggggctaccggaaaaggacttgatgcctataacgcgacacttgctaaaggcggaccaccgccggtaggggccaagaaagccaaccttgatcctataactaaccgaatcatcgaggagtttggttatcaagaaatcggtcatcttagggcgattacggatatgacgggaggaattccacgtccgctaataaatctgacgagagagaatttcgcagtgtttatggacagagcggttggacgcaaatctaatccgcggtttgatccttacgccaactcactcaactatctcttagcttcgtactatatcccttatgttggccttaccggttatgtcggaaccatcccttaccttgtctacttcaatatcaaaaagctagtggcgggtctattgggggtggaatcgggtcaagacgcagtgataagaacgcttctgtacgagagacagaatgagaaggtggaggaatacggtggagtcacggtggctgagctgaccaatgagatatctaacctccgtaatgaactcggtatgtgcgggatcgaaggacgaaggcttgtgcgtgccgttgtggctaggagcggagaatcgcaccaccagcaacatcctctccgctgacccttactctctctcttatgaccggacagcacaagagatcctcagggttatgtacggcaccggtgatgagcaccgacctggtgggttttggccgtgtggtgccaatggaaggatcgctaggatgtttcttgatgaagggtgttatggtgaatattgcgttgtatgttcacatgacaattaaaagtttccattgatacaattcactagaaaataaaatcgtgattaagattgtaatagtgatctcattaatttaatactggtgttattagtccatgtatttattgctatcgaagtttaataaataaataaaaccgtgttgccatttttgt

SEQ ID NO: 90640 - DNA, 522 bp, Arabidopsis thaliana columbia
  unsure (1)..(522): unsure at all n locations
aatgannnnnnnnnnnnnnnnnnnnnnnnnnnnnnnnnnnnnnnnnnnnnnnnnnnnnnnnnnnnnnnnnnnnnnnnnnnnnccacgcctccgggcgacaacaaattcgatatatccgatgagttagctgtgtcttttgcggctgcaaagactaagaagtcaggacacagtagtggtgctgttcatgctgctgcggttcaaatccagaaaaaataccgtggttggaagaagagaaaggagttccttctgatccgacaaagaatcggcaagattcaggctcatgtgagaggacatcaagtccgaaaacaataccgagccattatttggtccgtaggattgcttgagaaaatcatcttgcgatggaggcgtaaaggtagtggcttacgcggtttcaaacgtgatacaatcagcaagccaacagaacctgtatggcctgccccacaagaagatgattatgattttctcaagggaaggaagggaaacaaacagagggaagggcttcaaaaggctctaaccccgagt

SEQ ID NO: 90641 - DNA, 606 bp, Arabidopsis thaliana columbia
  unsure (1)..(606): unsure at all n locations
tacgcgcgagannnnnnnnnnnnnnnnnnnnnnnnnnnnnnnnnnnnnnnnnnnnnnnnnnnnnnnnnnnnnnnnnnnnnccacgcgtccgggaaagagtcaatgtgagtttgatgaggaaagtgatcattgtgttagctatgatgagattctagtgaattctgatgaagttattgagcttgatgaagaagaaggcggtggtgaccacgggagggttgctgatcttgttgagtgtgagaatcttggacctcctgagatgccacaagagattgtgattcaagattctgctttagttgaagaggcgggatcgaaactcgatgaacatgcttcaaaaaagccatctaattctatggaaacaccctcctcctctgtaaacgtgaaacctattattcctaatgatgtgcgtgtgactaaagcttctacaaagggacatgatgtaacgccaaaagctgcttcaaggaggacaaagggttcttctttaagttctaattctaaaaccaatgtagatgccaagagccaaaaggaactaagaccgaagaaaaccattgagtctcaacctaaatcatcgaacaaaaccgagactcgacctcctattgctacgaacag

SEQ ID NO: 90642 - DNA, 885 bp, Arabidopsis thaliana columbia
  unsure (1)..(885): unsure at all n locations
atgatcctnnnnnnnnnnnnnnnnnnnnnnnnnnnnnnnnnnnnnnnnnnnnnnnnnnnnnnnnnnnnnnnnnnnnnnnnnnnnccacgcgtccgcccacgacgtccggcggcggagaaaattgaaatggagctcagcttgagcacttcctccgcttctcctgcggttttgaggagacaagcttctcctctgcttcacaagcagcaagtgctcggcgtcagctttgcttccgcgctcaaacctggaggaggagctcttcgatttccttcccgccgtccgcttcctcgtcccatcacttgctccgcctctccatcaactgccgaaccagcctccgtagaggtgaagaagaagcagttggataggagggataacgtgaggaatatcgcaatcgttgcacatgttgatcatggcaaaactactttggttgattctatgcttaggcaagctaaggttttccgagataaccaagtcatgcaagagaggatcatggactcaaatgaccttgagcgtgaaagaggaatcactattcttagcaaaaatacctccatcatttacaaaaacactaaagtaagtattatagatactcctgggcattctgactttgggggtgaagtggagcgtgtcttgaacatggttgatggagtgcttcttgtggtggactctgttgagggaccaatgccccagacaaggtttgttttaaagaaggctcttgagtttggacatgcagtggtcgtggccgtacacaagattgacaggccttctgctcgtcctgaatttgttgtcaattccacttttgaactattgattgaactaaatgcaacagatgaacagtgtgatttccaagcgatatatgctagtgggatcaaaggaaaagcggggctttct

SEQ ID NO: 90643 - DNA, 1048 bp, Arabidopsis thaliana columbia
  unsure (1)..(1048): unsure at all n locations
acgcgnnnnnnnnnnnnnnnnnnnnnnnnnnnnnnnnnnnnnnnnnnnnnnnnnnnnnnnnnnnnnnnnnnnnnnccacgcgtccgtggagttctgtaggagatatgaaaagatgcgaagagatctatacagatatgttggaaggaggaatagatcctgatattcatgcatttagtatccttgccaaagggtatgctcgagctggggagcccgaaaaagcggagcaaatcttgaatcagatgagaaaatttggtgttcgcccaaatgtagtgatctacacacagatcataagcggttggtgcagtgctggtgaaatgaagaaagcgatgcaggtatataagaaaatgtgtggaatcgttggtttatcgcctaacttgactacttacgagactcttatatggggatttggggaagcgaagcagccatggaaagcagaagagcttctgaaagacatggaagggaagaatgttgttcccacaaggaaaactatgcaactcatagctgatggatggaaatctattggtgtctctaatagtaatgatgccaatacattgggctcttccttctcaacttcctctaaactcaatatcccaaataatatcgcctcgtcgagaagtccattgttcttaaaaggaatgcctgaaaaaccaaagctatgtatcaagtctcagtttggtttgaggcagactcttttggtggtgttgtgcagagaccagattggggaagccgggagattttgtaagttcatgtagaatttgttttgctgtagagatggagctaaattaaagggtaagaaaagctgatcaaagattggtgtcgatcgatttttaagatttatttttctgtacagatatactttttcagttaaatgaaaaatatggtgtttaacaagcaagacaatgagatggataatgttagattgtatttttttgtttcttaatcgaaaagttggtgctaaaaaaaaaaaaaaaagnnnnnnnnnnnnnnnnnnnnnnnnnnnnnnnnnnnnnnnnnnnnnnnnnnnnnnnnnnnnnnnnnncagctcaat

SEQ ID NO: 90644 - DNA, 796 bp, Arabidopsis thaliana columbia
actatagggttagctgttacgcctccaggtcccggtccggaattcccgggtcgacccacgcgtccgaatgaatgcttggagttctgtaggagatatgaaaagatgcgaagagatctatacagatatgttggaaggaggaatagatcctgatattcatgcatttagtatccttgccaaagggtatgctcgagctggggagcccgaaaaagcggagcaaatcttgaatcagatgagaaaatttggtgttcgcccaaatgtagtgatctacacacagatcataagcggttggtgcagtgctggtgaaatgaagaaagcgatgcaggtatataagaaaatgtgtggaatcgttggtttatcgcctaacttgactacttacgagactcttatatggggatttggggaagcgaagcagccatggaaagcagaagagcttctgaaagacatggaagggaagaatgttgttcccacaaggaaaactatgcaactcatagctgatggatggaaatctattgggggctctaaatagtaatgatgccaatacaatggggctttttccttttttaaaatttcctctaaaacttaaatattccccaaattaatatttgccctttggtcgaggaaaagacccattgggttctttaaaaaagggaaatgccctttggaaaaaaccccaaagacttattttttttcaaaaggttctttaaaattttggggtttttgaaagggccaaaaaccttcttttttttgggggggggggttttgttttccaaaagagaccccccactttttggggggg

SEQ ID NO: 90645 - DNA, 557 bp, Arabidopsis thaliana columbia
  unsure (1)..(557): unsure at all n locations
cnnnnnnnnnnnnnnnnnnnnnnnnnnnnnnnnnnnnnnnnnnnnnnnnnnnnnnnnnnnnnnnnnnnnnnnccacgcgtgcggtccctgagaaggttgttgttcacaaggatggtccaagaggagtccatttcaggcgtgctggtccacgtcaaaaggtttactttgagtctgacgaagtgcatgcttgtatagttacatgtggaggtctctgtcccggtctcaataccgtgattagagaagttgtgagcagcttatcatacatgtatggagtaaagagaattcttggaatcgatggtggatacagaggattttacgccaagaatacgatccccttaaactctaaagtcgtgaatgatatccataaacgcggaggaacaatcattgggacctcaagaggtggacatgataccaacaagatagttgatagcattcaagatcgaggaatcaatcaggtttacattattggaggagatggaacccagcgaggtgcttcagtaatatttgaggaaattagaagacgtcgactaaaagttgctgtggttggaattccaaaa

SEQ ID NO: 90646 - DNA, 275 bp, Arabidopsis thaliana columbia
attgacgaacttggatgacagctggagctttcaacagaggccaaggaaatattgaagcagaggctggatattactttggacgaggtttgctccctgaaagaggagaaaaccacatgcattgccaaatggaatgctgtagctttgcagaatcaaagcttagaggcaaatttgcagaatattactcacgaaaacctcatccttctgcaaaagattgatgaactggaatctgtagtgttggagtctaagagttggaagaccaattatgagacatgcat

SEQ ID NO: 90647 - DNA, 417 bp, Arabidopsis thaliana columbia
attttcacattcactgttacttcttcatagaacttctcactctctctcacacacaactgtactctctctggagatttgaagaaaaccctaattcccaattttcttttgtcgttttccttctccgacgattgagagttttcctagatctaaagaaaaaagtttcaatcttcactatgcaatactgagaagaaattccacaaggaaaaaaaatgtcaagctccgacccgaaacccggacctaaaccgggtccatggccaccaactccagaatccgccgcaatgccaccgtcttcctgggctaaaaaaaccggatttcgtcccaaattctccggtgaaactaccgccactgattcttcttccggtcagctctcattaccggttagagctaaacaacaagaaacccaaccggatcttgaag

SEQ ID NO: 90648 - DNA, 891 bp, Arabidopsis thaliana columbia
gcatttctaagtctttttgcacaagaaacaaagctcaggaaaacctcaaaaccctaagctatgagaacaagcaaccatctcataggtttagtcaacttcctcactttcctcctctcaataccaatcctcggcggtggaatatggttaagcagccgagctaactccaccgactgtttaagattccttcaatggcctctcatcgtcatcggaatctcaatcatggtcgtatctttagctggattcgctggagcttgttaccgtaacaagttccttatgtggctatacctagtagtcatgcttctcatcatcgctgctcttatcggtttcatcatcttcgcttacgcggttacagataaaggatccggtcgaaccgtacttaaccggggttatcttgactattatcttgaagattactctggttggttgaaagatcgagtttctgatgatagctattggggtaaaattagttcttgtcttagagattctggtgcttggggaaagattggaagaaattttaatggtgtacctgaaactgctgatatgttcttccttagaagacttagccctgttgagtccggttgttgcaagccaccaacagattgcggtttttcatatgtgaatgagaccggatgggacacgagaggagggatgataggaccgaaccaggactgtatggtgtggagcaacgaccagagcatgctctgttatcagtgtagttcttgtaaagctggtgttcttgggagtttgaagaagagttggagaaaagtatcggtgatcaacattgtggtacttatcattctagttatcttttacgttatcgcttatgcagcttataggaatgtcaagaggatcgataacgatgaaccggctggtgaagctaggatgacaaaa

SEQ ID NO: 90649 - DNA, 642 bp, Arabidopsis thaliana columbia
  unsure (1)..(642): unsure at all n locations
gttgtgtagaagccaatgaaacaattttaagcatgtaaaaaagtccggttgttgcaagccaccaacagattgcggtttttcatatgtgaatgagaccggatgggacacgagaggagggatgataggaccgaaccaggactgtatggtgtggagcaacgaccagagcatgctctgttatcagtgtagttcttgtaaagctggtgttcttgggagtttgaagaagagttggagaaaagtatcggtgatcaacattgtggtacttatcattctagttatcttttacgttatcgcttatgcagcttataggaatgtcaagaggatcgataacgatgaaccggctggtgaagctaggatgacaaaatcacatcctagtcatttccatctttgatcaaaatttggaacagttcaaaaaaatgtatcgaggctttgatttatgtttaaaggttttagtacttttgtgtatgtttttggtatgtaacacatttttttgtgtgtatattatttatgttggaatcggaacctagttcattttatattcttctagaaatcagcattacaacaaaaaaaaaaaaaaaagnnnnnnnnnnnnnnnnnnnnnnnnnnnnnnnnnnnnnnnnnnnnnnnnnnnnnnnnnnnnnnnnn

SEQ ID NO: 90650 - DNA, 536 bp, Arabidopsis thaliana columbia
gatcttatcaaaaactcgctctccatccaacaaaacccgaagaaagagagattcagactcaaatctctcagtaggaatggcaagtgaaacagagaacatcaagtttgaagagtgtttcatcaagaacactcgaggaatgaaactgttcacgtgcaaatgggtgccagcaaagcaagagccaaaggctttagtctttatttgccatggatatgcaatggaatgtagcatcaccatgaacagtactgcgaggaggctggtgaaagcaggatttgcggtatatggaattgattacgaagggcatggaaaatctgatgggcttagtgcttatgtcccaaactttgaccatctcgttgatgatgtctctactcactacacaagcatttgcgagaaagaagagaataaagggaagatgaggttcttgttaggagaatcaatgggaggagcagtgcttttgttgttacacagaaagaagccttagttttgggatggggctgtcttggttgctccaatgtgtaagattgcttgagaaatgaaac

SEQ ID NO: 90651 - DNA, 975 bp, Arabidopsis thaliana columbia
  unsure (1)..(975): unsure at all n locations
gnnnnnnnnnnnnnnnnnnnnnnnnnnnnnnnnnnnnnnnnnnnnnnnnnnnnnnnnnnnnnnnnnnnnnnnnccacgcgtccgcccacgcgtccggggaagatgaggttcttgttaggagaatcaatgggaggagcagtgcttttgttgttacacagaaagaagcctcagttttgggatggggctgtcttggttgctccaatgtgtaagattgctgaagaaatgaaaccaagccctttggtaatttcgatattggccaaacttagtggagtgataccttcgtggaaaatcatccctggccaagatatcattgagactgcttttaagcagccagaaatcaggaaacaggttagggaaaatccctactgctacaagggacgtccacgtttgaagactgcttatgagcttttgagggttagcaccgatctcgagaagaggcttaatgaggtttcattaccgttcatagttttgcacggtgaagacgataaagtcacagataaagcggtgagtcgacaactgtatgaagttgcatctagttcggacaagactttcaagttgtaccctgggatgtggcatggtttactctatggagagacaccagagaatatcgagactgtttttgctgacatcattggctggttggataagaaagttgctgatgaaagtggaggctttgaatccgagcttaaacgtaaaaatgatggtattcctttgaaagggtagttatccctttaacataaacaaataaaggatagttaaaatctgtttgtctgtttgtttttctctcttttcctgaattctgtttatgttaattagttgttaccatgtttgtcactctctgacttagtgtaatcctatttnnnnnnnnnnnnnnnnnnnnnnnnnnnnnnnnnnnnnnnnnnnnnnnnnnnnnnnnnnnnnnnnnnnnnnnnnnnnnnnnnnnnnnnnnnnnnnnnnnnnnnnnnnnnnnnnnnn

SEQ ID NO: 90652 - DNA, 618 bp, Arabidopsis thaliana columbia
ctatacgacttacttagggaacgctggtacgcctgcaggtaccggtccggaattcccgggtcgacccacgcgtccgttgtccagggtttgttgttgatttcctatgcccatggtcaagagatagtgcgtttaagagaaggcatcgaggatttacgctgattagaatgaactgtgttggtggattttgatagggatcagttccgggttttgagttttggcctttggttttgtagatttcgatgatgcaaggattggatttgctatatactttgtttagtgtgtggtctgttgtgcggatagcttttggatgaataagctttgtgtgcttctttttttagtttgatttggaaagtcacagacttgacaaggatggagaaagaaggtgtgtgtgataccattaatttaagtgatcagatgtaccctgatgagcctttctgttccgagatgaaaactgaaaccattgctttatctcagaaatttggaggaggcgaggggagtaaagtgggtttttcgagagaggcacctttaataggaaaggattcagctggaactaattcgggagaatgctgtggttgtagtgctaagaaactaaattttaaaggggatgatgatctcgtt

SEQ ID NO: 90653 - DNA, 983 bp, Arabidopsis thaliana columbia
  unsure (1)..(983): unsure at all n locations
cacgcgtccgcagaagcgtgggacgaacttctacatcatttctcttttctctcatcgctcggtgaattcgaggatcctcgagctttttgatcggagactttttctctcatcgtcgttgtttgaattctccggctgagagatgcttgcttgacgacgaatctccaccgatcttttaccttttcgcacaacaagtaagagaaggatgtcgactccagcgaggaagagattgatgagggatttcaagaggttgcagcaagacccacctgcaggaattagtggtgctccacaagacaacaatatcatgttgtggaatgctgttatattcgggcctgatgataccccttgggatggaggtactttcaaattgtcactgcagttttcggaagattatccaaataaaccaccaacagtgcggtttgtttcacggatgttccatccaaacatttatgctgatgggagtatatgcttggacattctccaaaaccaatggagtccaatatacgatgtcgctgctatactaacctccattcagtcattgctatgtgatcctaatccgaattctcctgcaaattcggaagctgcacgaatgttcagtgaaagcaagcgcgagtacaacagaagagtccgcgaggttgtcgaacaaagctggactgccgactagtaattatatcattgtagcatttgtcttcaaataacattaaacctcctctcttgtatctgatttcgaccatcacatctctgagagaagtttactctccctaccactctcttttatgtctttctgtgtttttcaaactctgtgatttgttgctcttcatgttttttttctttgtattttcgtaaccacattcatcttcataattatcatatgtatttcagtcgcaaaaaaaaaaaaaaaaaattatatttggtaaatcagtttacaaatttagttaatannnnnnnnnnnnnnnnnnnnnnnnnnnnnnnnnnnnnnnnnnnnn

SEQ ID NO: 90654 - DNA, 486 bp, Arabidopsis thaliana columbia
ggaaatgttggaggaaagacttgtgcagtataaaaacagggacgacatgcttcttcgtgaagtggtgagagatcttcaacactgggatcatttttttagtactacagtttctcctttgtgtgatcatatgaaagttccttttatctgttcaacttggtttgtttcttaattatctccccagtatgtagattaggacctactaccggtatttagcattctagactaggacttggtcttagctaacgtgaaagaatgtcatgttgtcaggacatttcagatcgctatagatgttacattacatttcattatgcctgaagatgctgtgtagttctgacatttatagaaatttgacagtctagcacagaagcccagatgagacaattgctagatgaaagatctaccttcactcagaaagaggcgagtctagaaaagaaagttcaacaacttcaacacgatgaagaatccttggtggctgaggagaagtca

SEQ ID NO: 90655 - DNA, 399 bp, Arabidopsis thaliana columbia
  unsure (1)..(399): unsure at all n locations
gaggaagagagagtggccgtgaccggggtaggcacgactcgatacgcgcttaaaccggggcgtataaaaagcgaggacatactcatctgtatcgatgtagatgcagaatcgatggtggagatgaagaccactggaactaatggtaggcctttgatcaggatggagtgcgtcaagcaagccattattctcttcattcacaataagctgtccattaatcctgatcatcgctttgctttcgctacgctcgccaaatcagccgcttggcttaaaaaggagttcacaagtgatgctgaatctgctgttgcttcccttagaggattgtcaggtaataaatcctctagtcgagcggatctcacaactttcttccgngcagcagctcaggaaagccaaaagtttcca

SEQ ID NO: 90656 - DNA, 451 bp, Arabidopsis thaliana columbia
agagatacaaaaccaaaactttcaagcaaagcaattcaatttcaatcaaaaaccaaatcgaagatctttgaaagtttcctttttttccgaaatctgagcttgggtattgttggataagcttctcggagattgagattgaggattttgataggtgaggagattgaaagatttggatttttgggcggcaaaaatggtgatgcagacggaagctagggttggtgtgagctcaggacatggcgtagcttcgtcttctcatcgtttaacgcaggaccagagatcacatatcgaatcggcgtcgcagctcttagccggaggactcgctggtgcttttagcaagacttgtactgctcctctatctcgtctcaccattctcttccaggtgcaaggtatgcacacaaatgctgcagctttaacaaagccaagcatattacacgaggcttcacggatattg

SEQ ID NO: 90657 - DNA, 1062 bp, Arabidopsis thaliana columbia
  unsure (1)..(1062): unsure at all n locations
atgatacgccagctctatacgactcacttagggaacagctggtacgcctgcaggtaccggtccggaattcccgggtcgacccacgcgtccggggttatctcaggaatggagaagatcagagtcaaagatacaccagaaggagttgtgtttgggaatttagactctgttttctcaaagatgcttcatcaaatgggtcttgctttgcctcgtgccactgctgttttcatcaattcttttgaagatttggatcctacattgacgaataacctcagatcgagatttaaacgatatctgaacatcggtcctctcgggttattatcttctacattgcaacaactagtgcaagatcctcacggttgtttggcttggatggagaagagatcttctggttctgtggcgtacattagctttggtacggtcatgacaccgcctcctggagagcttgcggcgatagcagaagggttggaatcgagtaaagtgccgtttgtttggtcgcttaaggagaagagctgggttcagtttaccaaaaggggttttggatagggcaagagagcaagggatagtggttccatgggcaccgcaagtggaactgctgaaacacgaagcaaccgggtgtgtttgggaccctttggggatggccctcggtgttggagagtgtttcgggtggtgtccccatgatttccaggccatcttttgggggatcagagattgaacggaagaccggtggaggttgtgtgggagattggaatgccgattatcaatggagtcttcacgaaagatgggtttgagaagtgtttggataaagctttagttccccccgatggtaagaagatgaaatgtaatgctaagaaacttaaagacctagcttccgaagctgtctcttctaaaggaaggtcctctgagaatttcagaggattgttggatgcagttgtacccattatttgaatgtgaaatgattttggacaaataaaaaaaaaaaaaaagnnnnnnnnnnnnnnnnnnnnnnnnnnnnnnnnnnnnnnnnnnnnnnnnnnnnnnnnnnnnnnnnnnnnnnnnnnnnnn

SEQ ID NO: 90658 - DNA, 399 bp, Arabidopsis thaliana columbia
cccacacacctcattaacattataattgtttttttagttattcttcaatttcaagaaaatgctgcgaaggctttctcttcctcctctcagtcgtactcctcttctcctcatctgcagccgcctgcgaccgatgtcttcacagttctaaggcagcttatttctcctctgcatctgctctctcctctggagcttgtgcatatggctctatggctaccggtttcttcgccggacacattgctgcggctctgccttccatctacaaagacggctccggctgcggagcttgcttccaggtcagatgcaagaacccgacgctttgcagcagcaaaggaaccaccgtgattgtcacagactttgaacaagacctaccataaccgatcttggtcttagcactcttac

SEQ ID NO: 90659 - DNA, 601 bp, Arabidopsis thaliana columbia
  unsure (1)..(601): unsure at all n locations
nnnnnnnnnnnnnnnnnnnnnnnnnnnnnnnnnnnnnnnnnnnnnnnnnnnnnnnnnnnnnnnnnnnnnnnnnnnnnnccacgcgtccgtgggtttttaaatttagctggagcttgtgcatatggctctatggctaccggtttcttcgccggacacattgctgcggctctgccttccatctacaaagacggctccggctgcggagcttgcttccaggtcagatgcaagaacccgacgctttgcagcagcaaaggaaccacggtgattgtcacagacttgaacaagaccaaccaaaccgatcttgtccttagcagcagagcctttagggccatggctaagcctgttgttggcgccgacagagatcttctcaaacaaggcattgtcgatattgaatacaggagagttccttgcgattacggtaacaagaagatgaacgtgagagttgaagaatcaagcaaaaatccaaactacttggcgataaagctcttgtaccaaggaggccaaactgaagtggtagccatttacattgctcaggttggttcgtcacattggagttacatgaccagaagccacggagccgtgtgggttactgacaaagtac

SEQ ID NO: 90660 - DNA, 561 bp, Arabidopsis thaliana columbia
  unsure (1)..(561): unsure at all n locations
atgattcttcagctctcnnnnnnnnnnnnnnnnnnnnnnnnnnnnnnnnnnnnnnnnnnnnnnnnnnnnnnnnnnnnnnnccacgcgtccgattatctctatggattgcattccgccggaaatcccggagatcatctcacaagctgttacccttcagtcaaataccacgcgtggcgaaagatatcagggttgatgatagagttgggtttcaaaatcataatgaaaatttatctatcacaaatgctgataaatctagtgacagaaactctgggaagatgatgtcttacttgggaagaacgaagtctagtgataatgatagtataagtcaatgtagctctgtgcatcatcatgagagagcttgtagttctcactctggtgaagatggaagctttggagctgcttggagacaaaattccctatcacagggcgggctagtaacagcatctcctttggttggtttgccagaaatatctcatcttggttggggacactggtttactcttagggatcttcagctagccaccaaccgttttgctgctgaaaatgtaatcggtgagggtg

SEQ ID NO: 90661 - DNA, 599 bp, Arabidopsis thaliana columbia
ggatacgccgagctctcattctgactctctatagggaaagctggtacgcctgcaggtaccggtccggaatttccgggtcgagccacgcgtccgcccacgcgtccgaactttttgtcgaaaataattgaattccgattttgtttttgtatggcttttgatgtttcagatggtggacagaacttggtttagaaaaagatgtggagaaggcaagaagccagccgttaaaatggcatacgtggtccatgaaaattcttcaagatccgaccttaaccgaacaaaggcttgatcttaccaaaccaatatcgcttgtttatgctatagatgacattttcgatgtctatggggagctagaagagctaaccatcttcacacgagttgttgagagatgggatcataaggggcttaagacgctacccaaatacatgacggtttgttttgaagctctagatatgatcacaacggagattagcatgaagatctccaaatctcatggttggaacccgacatacgctcttcgacaatcgtgggcaagtttgtgtaaagcattcttggtagaagcaaagcggtttaattcgggttacttacccaccactgaagag

SEQ ID NO: 90662 - DNA, 529 bp, Arabidopsis thaliana columbia
cgcgtccggcttacatgaccggtgtgcctacatcaagaagcatcctcaaacatctcggcaggtttgatttggtcccagagcggtgggtcaattccattctcagagctgcaactctcgagccagagctctcttcctctaacaggtagcagaatcacaagacaagggcgtgaaattcgtcgatccttttgaatagatcacctcagaaaagggtacgcatacgcaggtcctctggatcaccttttagcaattcttaatctatatgactattattatatagaagcatgtgatgtgaatttatatatataatcttcgtaccttgagaagaagaaaaagcctatttgagtagaagacctgagtgagaatcacatatatctgagaggaaatctatatgtgcatataccagaaaagataacaagaaaaggcttcttctttttttttttggaatttgtgtataatgtttgtatagagacagacaaggtttctttgtcttgtccgtacttctacttcagacccattccggatgagacac

SEQ ID NO: 90663 - DNA, 622 bp, Arabidopsis thaliana columbia
atgctacgcgagctctaatacgacttatatagggaacgctggtacgcctgcaggtaccggtccggaatttccgggtcgacccacgcctccgcttggtaatttcatccattacatggcgacttttgtttctggattcatcgtgggtttccctgcggtgtggcaactagctttagtgactctcgcggtggttccgttgattgctgtgatcggaggaattcacaccactactctctctaaactatctaataagagtcaagagtctctttcacaagctggtaatatcgtcgaacagacagtggtacaaatcagggtagtgatggctttcgttggagaatcaagagcttcacaagcttattcatcagctttgaagattgctcagaagcttggttacaaaacaggtttagctaaaggaatgggacttggtgctacatacttcgttgtcttttgttgttacgctctcttgctttggtacggtggttatctagttcgccaccatttgaccaacggtggtctcgctattgccacaatgttcgccgttatgattggtggattggcattgggacaatcagcaccgagcatggctgcatttgccaaagcaaaggttgctgctgcaaagatcttt

SEQ ID NO: 90664 - DNA, 541 bp, Arabidopsis thaliana columbia
  unsure (1)..(541): unsure at all n locations
atgatttgccggcannnnnnnnnnnnnnnnnnnnnnnnnnnnnnnnnnnnnnnnnnnnnnnnnnnnnnnnnnnnnnnnnnnnccacgcgtccgaatttttaactccatatacatgattataaacgttcatatgttatttgatatgaattaaataaactaatttttgtttatgatttactatttttatttttaatagatttttgtatattgtgtatctaaaatatcatatttataatattgtatgttggaaatgcttaaaccacctaaaattgcatatgttttgattagacgttatatgttttaagtattgtgtcagtgcttgcttcgtgcctaacgctttcttaaacacaaacaagtcaatattttatactacacaaactcattaatagatattagtgctaaacttaataaagcatatataactattcaagtccacaaaatcttttaccaaaataaacttttaaaatataaacttttttacatgtctagcacgtatccgaacatttccaaaaagatactccatcttttgaaataagttgtc

SEQ ID NO: 90665 - DNA, 438 bp, Arabidopsis thaliana columbia
agatcttcttcctctctctctttctctcaccatatatctaaattgctcatcgattctcaattcagcttcatgctttcggatttgattcgtcgataaccccaatttctttacaaagttgaagtttttatgtcatttctggttcgaaattcgttgcaattggaatgagataaagtctctgaatttgctatcgctttgttttattcgttttctgttttttttgagatgccatcgatgcttgttctcgtcggcacaatgccgtccttggcttctctggttagtctaggtggtgcttgtgcaagcgtttctggaacgagttcttcggatgcatcgtatgctttagttaagagggtttctttgtcaaggagaagtgttaaggggactaagaaatggctgtgtagatattctgtttcgtcttcaactactactactactgctgac

SEQ ID NO: 90666 - DNA, 619 bp, Arabidopsis thaliana columbia
  unsure (1)..(619): unsure at all n locations
attgaagtctcaattttttctcttctttatttctccgtatgaacttctccgattttatggtttttatatccttgaaagctagctagcaccatggttcctccggctaaaaaattcatcaacaaccccaacgatgttgtaaccgagttcatcgaaggtctcgtcgaaacttatcctggacttcagtatttggatggtcttcccgagatcaaagttgtactaagagctgatgtctcagctgcaaattatgacaaggttgccgttatatcaggaggaggaagtgggcatgaaccagcacaagctgggtatgttggagaaggaatgctcacagctgctatttgtggagatgtttttgcttccgccaactgttgattccaacctagctaggattcgtgctggtaactggtccaaaagggatgcctcttgggttgtcacgaactatactnggtgaccgcntgaaacttttggccctggcaantgagcaancaaaaaactgaggggtccggaatagnnnctggaattgntgnaaatgattggggccaaccccgccggggngggacttgggcccaaaggtntcgggaaagtcttgccaaagggtctgacacaactccnngnatttttc

SEQ ID NO: 90667 - DNA, 690 bp, Arabidopsis thaliana columbia
  unsure (1)..(690): unsure at all n locations
ccacgcgtccgcacacgcgtccgaccacgcgtccgaaaaaatctgacttttttgtttaaactcttttataaaaaagaataaaaaagtttcgttgaatccctcaaaactttttggttccttacaatcgtcatttgtaactttcccagatcctctcccttttattgcatctctgttcttttagctcagggtttgtctgtcgtgcaaaaagcaaaccctaaatcaaatctgggtttcgtctatctgattcgtcagatctaaagtctcaaggcccaccatcgtcttctttttttgaactctctgctctgctttgctctgcctttggttttctttttttccatttcgagctgcttggttggctttgaggtttcacttcaaagagtttgcatctgctaatgtagacaagttttcgtggagatatgagatttccaacaaatagtcccctactggttcaggatatcattgtcctgaaaacaaacatccaaagttttagaaggtgatgtgagtnctccatatgttacggcgtcttggatggttaattggactgagccaaagaagtaggcaaacaaagtcgattgatgctgagccttacggtgccagggtaaggccagtcctaatnaccgncactgtcaggggattctatccaatatccntagggttcataacntgtcttttncagcaaggntggatcaa

SEQ ID NO: 90668 - DNA, 631 bp, Arabidopsis thaliana columbia
  unsure (1)..(631): unsure at all n locations
atgatacgcgnnnnnnnnnnnnnnnnnnnnnnnnnnnnnnnnnnnnnnnnnnnnnnnnnnnnnnnnnnnnnnnnnnnnnnccacgcgtccgccaaaatgggtctatggggaaactactctataccaaaagacaacccttttcgtgaagacaaagagcttgaacctgaaatatgggctgttggattgagaaacccttggagatgcagctttgattcttctaggccttcttacttcatgtgtgctgatgttggacaggacacatatgaagaggtggatctcataagcaaaggaggaaactatggttggcgtgtttacgaaggcccggatcttttccatcctgagtcatcccctggaggaaacacatctgttaaatcactaaacccgatatttcctgtgatgggttacaaccactcagaagttgactcaagcggaaaatcagcttcaatcactggaggttacttttatagatctgaaactgatccttgcatagctggaaggtacgtatatgctgatctatatggaaatggcgtgtgggcggngattgaaacgcctgctaatagcgggagctttgtgaccaaaagaacaaccttcagctgtgccagtgactcacccatgaaatgtagtgattccc

SEQ ID NO: 90669 - DNA, 778 bp, Arabidopsis thaliana columbia
cacacgcgtccgcccacgtgtccgctctaatacttttaaggttttagattctaatcaatggcttcttcttctcttttggtcaccatcttcctctgcatctctgtcttcttcttttcgtccgtgaatgcaaatgaggttaccgtcggtggaaaatccggtgactggaagatccctccttcctcttctttctcctttaacgaatgggctcaaaaggctcgcttcaaagtcggcgactttatcgtattcaagtacgaagccggtaaagactcggttttgcaagtgacacgagaagcatacgagaaatgcaacaccactagccctaaagccagctacaccgacgggaacacaaaggtgaagcttgaccaagctggtccggtctacttcgtcagtggaacagagggtcattgtcaaaagggtcagaagctacgcctagtcgtcatcactcctcgtaactctgctttctctccaggtccttcgccatctgagttcgacggtccagccgtagctcctactagtggtgccgctaagctcgccggcggatttagtgtcgtatttgggcttgttcttggattatgggccttcttcttttaaaagacaattagtcttaattctatttattaattttggaatataaagtagaaatcttttgttatttactacattaaatttattttaatctaaattgttcttcctctttttcaattctggataaattagttggatctatcaacaatcaacaaagaaaacaaaagtgaatgagaattttgaatttagtacc

SEQ ID NO: 90670 - DNA, 532 bp, Arabidopsis thaliana columbia
  unsure (1)..(532): unsure at all n locations
cnnnnnnnnnnnnnnnnnnnnnnnnnnnnnnnnnnnnnnnnnnnnnnnnnnnnnnnnnnnnnnncccaagcgccacgcgtccgcattaataaaaaagaagagaaaaataaaaaagtttgtgtaaattttttttgcacactccacagcctaaacccaacccaaaatcacaaaaaccaaaaaaatatataataatgggtggctgtgcgagtagacccaaggaatcagacatgcaaaacgaagaaggctctgttcctaacaagcctgtctctgaaaacgtagtagccaaggagaacaacacagaaagcggtgagaaacagaaccagacagtggctgagaccactgaaacaacttctgtcgaagctaaggagacatttccggtcgagccgaccaaggaaacaactcctgctgttcaaccagaggttgcagccgtcgaagagtcttcttctgctgatgctggtgaggctgcagtagttgcacctgagaaagtggagaacgctgcaacagaaaacgctgaagcaaaggtggaggcggt

SEQ ID NO: 90671 - DNA, 935 bp, Arabidopsis thaliana columbia
  unsure (1)..(935): unsure at all n locations
acgcgtccgaaaggacaaagagtttttgttgtcagtaacttcaagctctaagctatggctgtcaccaagatttatattgtgtgagtctttaaagtttaaactaatcagtgccaagttaaacaactggcgatcaatttcccgatcaagagtaatctgcgattttgtactactgactcacacaggacgagattgaatcctcgtaccagtttggttttgacgaaaaattgggttcttggacttttctgttaggtactattcccggccccgccacgtcgagacaatggcacgagaggtacttcggggagtaaactctgttccagacgtggaagcaacactttggcaagtgccagagacattaccggagaaaatattggagaaagtgaaggccgttccaagaccggacgatgtgccggatattcgaccagaacaactggcggaagccgacagattcatgtttggctttccttctaagtttggagtgatggcatcacaggtcatgactttctttgacaatacanatgatctctggactacacaggctctcgctgggaaacctgcaaggaatcttctggagtacgggtttccacggtggaggccaagaactaactgcgttgacggcagtgacaaaactggctcatcacgggatgatatttgtaccggtaggatacacattcggtaaaagtatgtacgagatgggagaggtgaaaggtggttcgcaatatggctcagggacttatgcagctgatggatcacgcgagccaacagagctggagattcagcaggcaaattaccatggcaagtactttgcaggaatagccaagaaactcaagaaacggtctcctgtctaaattctaaaccatatcaactctgtgtttcttaactaaacgcggccgcgaattcgatacaagctttgtatacctcagcagctagggggg

SEQ ID NO: 90672 - DNA, 750 bp, Arabidopsis thaliana columbia
  unsure (1)..(750): unsure at all n locations
taccccttcaaggaccgggtccgaaattccggggtcgaccccacgggtcgaagtgaaggccgttccaagaccggacgatgtcccggatattcgaccagaacaactggcggaagccgacggattcatgtttggctttccttctaggtttggagtgatggcatcacaggtcatgactttctttgacaatacaaatgatctctggactacacaggctctcgctgggaaacctgcaggaatcttctggagtacgggtttccacggtggaggccaagaactaactgcgttgacggcagtgacaaaactggctcatcacgggatgatatttgtaccggtaggatacacattcggtaaaagtatgtacgagatgggagaggtgaaaggtggttcgccttatggctcagggacttatgcagctgatggatcacgcgagccaacagagctggagattcagcaggcaaattaccatggcaagtactttgcaggaatagccaagaaactcaagaaacggtctcctgtctaaattctaaaccatatcaactctgtgtttcctatactaaacaatctgtaaatgtaaaggtgaacactgaaaataagatcgacatatacagagcaaaacaccggtgtgtaagctaatggtcaataaatcacattttccattaaaaaaaaaaaaaaaaaagnnnnnnnnnnnnnnnnnnnnnnnnnnnnnnnnnnnnnnnnnnnnnnnnnnnnnnnnnnnnnnnnnnnnnngga

SEQ ID NO: 90673 - DNA, 523 bp, Arabidopsis thaliana columbia
  unsure (1)..(523): unsure at all n locations
cagacgcgtgggctcttacacgcagagttcgcgagatcagaatcaatggtggcatgaaaaacgacgcttgagctcaaattcgtcgaccatggaacctgcaactcttactcgttcttcctctcttactagattcccttatcgtcgtggtttatccactctccgactcgctcgagtcaactcgttctcaattcttccacctaaaactcttctccgtcaaaaaccgcttcgtatctctgcttcccttaatcttccaccacggtcgattcgtctacgtgctgtcgaagatcaccatcacgatcatcatcacgatgacgagcaagatcatcacaaccaccatcatcatcaccatcaacacggatgctgttctgtggaattgaaagcggagagtaagcctcagaagatgttgttcggattcgctaaagctatcggatgggttagattggccaattacctcagagagcatcttcatctttgctgntccgccgctgcaatgttcctcgctgccgccgtctgtccttanctt

SEQ ID NO: 90674 - DNA, 467 bp, Arabidopsis thaliana columbia
  unsure (1)..(467): unsure at all n locations
cgcgtgggcgacgacggcgatggcgatggctatggagatttctcttcctttcgttggatcatccatggccttaagcgcgggaaaatcaaggaacagcgtttctaggattagtcgtgttggattctcttcggtctcggctgtacatgtacccagaaggatgtttatgcagctgtctggatttggttcggtcttgacgcttctggattttcctagtttagcggcgccggttcctcagatgaaggaacctgaagtgatcagaatgcaggacattgaaactcccgagtggcgtgaggtatcaagagataattgaaggtgaaggacgggaagctcatgaaggggacctggtcgaactaaactatgtgtttccggcgtgcaaatgggttttttcggtcaaaggtttcttnnattnaaccacgggnggntccaatttaagnnggtnaaaccncccctgaaaaacttntttttcg

SEQ ID NO: 90675 - DNA, 637 bp, Arabidopsis thaliana columbia
ctttatcaggggggtgtatggaagataaaagtggaacttcccgaagcttatccatacaaatctccatctgttggatttgtcaacaagatttatcaccctaatgtcgatgaatcttctggtgctgtttgcttagatgttataaaccagacttggagcccaatgtttgatcttataaatgtgttcgaatccttccttccgcaactgcttctatatccaaacccatcagatccatttaatggagaagccgcttctctgttgatgcgagaccgtgcagcctatgagctcaaagtgaaagaatattgtgagaaatatgcaaaaccagaggagattttaagtgatgatgatgatgatgatagcatgagcgaagatggttcggactctgatgatgatgacgacgacgaaatcgttgggaaagccgatccatgactgtttacaaatcaatctttctttgcactttcattactccatcttcaactttaaaccagtaatgctcattgcaaagaggagagaagctttcctctgtaaatttgtaaagacttatcattctttaggactattgaaatctcttttttttaaacagtagataaaatgtaacaatttgccatctcacaccaatgaaacattaatccatatctcc

SEQ ID NO: 90676 - DNA, 569 bp, Arabidopsis thaliana columbia
  unsure (1)..(569): unsure at all n locations
gaaatcgtttctcgtctctctctctctaaaaccagattcttaatagaagaagaagaagaagaagaggaaaggagaaatctgccatggcgtcgccgagcaaacgtcgagagatggatatgatgaaactgatgatgagtgattacaaggtggatactgtcaacgacgatttgcaaatgttctatgtcacattccatggacccactgacagtctttatcaggggggtgtatggaagataaaagtggaacttcccgaagcttatccatacaaatctccatctgttggatttgtcaacaagatttatcaccctaatgtcgatgaatcttctggtgctgtttgcttagatgttataaaccagacttggagcccaatgtttgatcttataaaattgtgttcgaatccttccttccggaactgcttctatatccaaaccccatcaggtccctttaatgggggagccggttctctgttgatccgggacccgtccaagcctttgggcntaaggggaaaggattttttgggggaatttcaaaacccagggggggtttaaggtattggtgntntgtttnnc

SEQ ID NO: 90677 - DNA, 786 bp, Arabidopsis thaliana columbia
  unsure (1)..(786): unsure at all n locations
tgatacgccggactctatacgacttacttagggaaagctggtacgcctgcaggtaccggtccggaattcccgggtcgagccacgcgtccggcgacagctcaaacgttgatatttttctccggcttttctagggtttaaattttctttccgatcagagattaatggcgactctagactccgacgttaccatgattcctgccggagaagcctccagcagcgtagccgcgtcgtcttccaacaagaaagctaagcgattcgaaattaagaagtggagcgccgttgctctctgggcttgggatatcgttgttgacaactgtgcgatctgcagaaaccacatcatggatctttgtatcgagtgtcaggctaatcaggccagtgccacaagtgaagagtgcactgtagcttggggggtttgcaatcacgccttccactttccactgcatcagcagatggctaaagactcgtcaagtttgtccattggataacagtgagtgggagtttcagaaatatggtcactaaatcaacaaatggttccagcaagcatgtgtctaatcgtgaagacatcaggttcatttggttaccaccgcatatgataactaaagattgttcaagtttttgccctttttttggtactgtattttacaatttgtggaaacagagatttactgttcagtgttcactaaacctattatggttgtgctttgggtgacgtctttgatttcaaaattaaaaagtaaaaatcctgcaaagagttttttactcgtaaaaaaaaaannnnnnnnnnnn

SEQ ID NO: 90678 - DNA, 936 bp, Arabidopsis thaliana columbia
  unsure (1)..(936): unsure at all n locations
cagctactatacgactcacgctagggagaagctacgcacgcctgcaggtaccggtccggaattcccgggtcgacccacgcgttcccttaactctatctctaggtgacttaagagtaaaaaatggtagaggcagaggttgaagtagatgtggaaatcaaatctacggctgataagtttttcatgttctctagaagatcacaacatgcctccaaagccactcgctatgtacagggatgtgatctgctcgaaggcgagtggggcgaagttggaagcatactcttgtggaaattaactgttgatggagagccaaaagtgtcaaaggatatgattgaggcgattgatatgaagatgaatatgatccagtggagggtgttagagggacctctgaaggaagagtacaatattttctcgaaaacgatgaaagtaagccctaagcaaggagggtctggaagtgtggtgaagtggaacttgaagtatgagagaattgatgagaaggtggctcacctagagaggctccttcagttcttcgtcgaatgtgttaacgagattgaccaatacctattgtctgagggttagggacttttctccctggcttatgtgtgggagagttattgtatgcgtacgtgtaaggactcttcttgtgttttatatgtctttctcaataatgtgatctcttgcgatttagaagagaggtatgcaagtgtgctatacatgatgtataatacatcatgccttaagttggaagttgtataacattttaagttgcttatgagtttctcatatatgtatggtgtgtttgttggttgaaaaaccatattataatgcaacgataccatgtttttttacaaaaaaaaaaaaaaaaggcgaccgctctagaggatccaagcttacgtacgcgtgcgtgcgacgtcatagtcttctatagtntgtacctaa

SEQ ID NO: 90679 - DNA, 629 bp, Arabidopsis thaliana columbia
  unsure (1)..(629): unsure at all n locations
nnnnnnnnnnnnnnnnnnnnnnnnnnnnnnnnnnnnnnnnnnnnnnnnnnnnnnnnnnnnnnnnnnnnnnnnnnnnnnnnnnnccacgcgtccggtcatggccaattgcgatgcaaaacagagacatagtagccattgctaaaacaggctcgggaaaaactttgggttacttgattcctggtttcatgcatctccaacggatccacaatgattcacgaatgggcccaacgatcttggtcttgtcccctactagggagttggccacacaaatccaagttgaagctctgaaatttggcaagtcatctaaaatttcgtgtgcgtgtttgtatggtggagcacccaagggtcctcagctgaaggaaatagaaagaggtgtagatattgttgttgcaactcccgggcgactgaatgatatccttgaaatgaagagaatcagtctgcatcaagtatcttaccttgtgctggacgaggcagatagaatgctggacatggggttcgaacctcagatcagaaaaattgtgaatgaggttcccactaagcgtcaaaccctcatgtacactgcaacatggccaaaggaggtgaggaaaatcgcagctgatcttcttgttaaccctgcccaggtcaatatt

SEQ ID NO: 90680 - DNA, 550 bp, Arabidopsis thaliana columbia
gactcactatatggaaagctggcacgcctgcaggtaccggtccggaattcccgggtcgacccacgcgtccgctcttcttgttttctcattcttcttctaaaaaatcttgacaactttttgtttttgttttctttctctgaattttttaaagagagagagctatgtagctatgaaacagtgagagatatagatatagagagacagagaaagatgatgatcagtgaagttaggctaaacccactttctatttatgtataattaggtcaatcacatcaccaatctcctcctccaattctcctcctctccttccaaattctagggttttgcttgtatctcaccccctttctcaattccctagggaaactgtgaatttcatcaaattccattattttttggtcacacccttaaagagatctgagagttctaaagatgatgacagatttatctctcacgagagatgaagatgaagaagaagcaaagcccttagcagaagaagaaggagcgcgtgaagtagcagacagagagcacatgttcgacaaagttgtgactc

SEQ ID NO: 90681 - DNA, 203 bp, Arabidopsis thaliana columbia
  unsure (1)..(203): unsure at all n locations
gggttaaacacgtcctgggtctgtgttcagtgttcttggtaaaccatttgcaggacatgaggttcctatatcatgtcctgagaatggaatctggaggtacagtttttgtctctcttaatgtaagaattctgtttaaatacggttcccctctcnnnnnnnnnnnnnnnnnnnnnnnnnnnnnnnnnnnnnnnnnnnnnnnnnnn

SEQ ID NO: 90682 - DNA, 972 bp, Arabidopsis thaliana columbia
agcgtctctacgactcactattgggaaagctggtcacgcctgcaggtaccggtccggaattcccgggtcgacccacgcgtgcgcccacgcgtccggtcttccatcctaaagattgtaaagggaaaccgttttcgattttcagagaagatcacacatctttcgtcccttcactgccatacgtgtcgataaagatggcggctatggcggcgaagcttcagttatcggcgaaatctgatcaaagcagtgtgcgattaccgagagtgatcaacctctcccgcgatccaacgactagagtctcgtttccgcgaaatggatcagtttgttccctccacaccaatttctcttctccacatctcgcgaaaccttgcgccggaggtggtggtggtggaagcaccggtaataacggcggcggaagcggaagcggaggaggaggtggtggttttggaggttcagggggtgaagcaagtgaagaatcatctccatggggaccaatagggttattcatccaaggatggagatcaagagttgcagctgattctcaattccctttcaaggtactaatggaaatgcttgttggtgttagcgccaatgtacttggcgacatggcttcacgccctaatttcggattgaacgagctagatttcgtcttctccactctcgttgtaggttcgattctcaatttcacactcatgtacctcttagctccttctgcaatatctcatggatcctccaatttgttgcctggaatctttagaagctgtccttcgagccatatgtttgaacagggtaacttcacccttatgaaccgttttgggactcttgtgtacaaaggaatggtttttgctaccgtgggattagctgcaggtcttgttggaaccgctatctctaacgggttgatcatgctgaggaaaaagattgatccgagcttcgaaacgcccaacaaaccaccacctacgctgctgaattctttaa

SEQ ID NO: 90683 - DNA, 1033 bp, Arabidopsis thaliana columbia
  unsure (1)..(1033): unsure at all n locations
cgccnnnnnnnnnnnnnnnnnnnnnnnnnnnnnnnnnnnnnnnnnnnnnnnnnnnnnnnnnnnnnnnnnnnnnnccacgcgtccgcggacgcgtgggcttggcttgtgaattcattaattcctgcgaaatggaacctcgaatcaatgaccttcaggtggaatctcgggttcatgagttgctcgattttccggttcatacaaaccagatatcctctgcaatctacgagtgtcccaacgaccacatcgaacaccctaagaagaaaccgtacaattgtccacactcaggagccaagtgtgatgtcacaggagatattcaaaggctactactgcatctaaggaatgatcacaatgttgaaatgagtgatgggcgtagtttcagtcacagatatgttcatcatgatcctaaacatcttcatcatgctacttggatgttaacacttctcgattgttgtggtcgaaaattctgcttgtacttcgaagcgtttcacctgaggaaaacaccaatgtacatggccttcatgcagtttatgggagatgaagaagaggcaatgagcttcagctatagtttgcaggtcggagggaatggcagaaagctgacatggcaaggcgtgccgaggagcattcgtgacagtcacaagacggttcgtgatagtcaagatggcttaatcatcactcgcaaattggctttgttcttctctaccgacaacaacaccaccgacaaggagctgaagttgaaggtttcaggtcgtgtatggagagaacagcctgtttcgatatgaattcgataattaggttacagaattggacaactatagaatatttggtgacaaaaatatcttttcttgatttaaaaattaaatatagcaatttcgagggaaatgtgtaggtaaactggtgattatggctcaatcccctccacaaggggggaataaacaacacaatcaccacaaaaaaaaaaaaaaaaaagnnnnnnnnnnnnnnnnnnnnnnnnnnnnnnnnnnnnnnnnnnnnnnnnnnnnnnnnnnnnnnnnnn

SEQ ID NO: 90684 - DNA, 902 bp, Arabidopsis thaliana columbia
gtattaaagagttgggggataaccgcgccaggggtgttttttccccaagtccacaggatcggtttggtaaaaaaccgaccgggcccaagtggaaatttaaatttttaggggtggccacctaaaaaaaggaagcctattgacgttcggcatggcacggcgtaacgtaaagcttgggatccctctaaaacggcccgccccttttttttttttttttttttggtgacaaaaaaatctttttcttgatttaaaaattaaatatagcaatttcgagggaaatgtgtaggtaaactggtgattatggctcaatccccttcacaaggggggaataaacaacacaatcaccacatttttgcttcacaattcaactgaaaaaaaagaagaagcacaacagagcctgagaggccatagggttggataaggaataggagccgagacttagaaacatatttctctcgtccttcaacagtttttactaataagtctcaagatacagttcggccatagcttaacgatgcaaggtagagattctttccccatttttccttgacgtgtgtgctggggaattgagaggtacgtaacgtctcttgtgtctcatcaacaagtctacgacgtgggatgcttaggatgagagcagcttgatcggttgtggctgctgttgatgtgattctgaatccaccatcccaacgcctgtggatgccttcacttggatacagaaaatcaagttccacaacctgttcactgtagccagaattgcgggacataacaacaccccatcgatttccagctgttgccattgaggttacatggaagccttctctccatttcttgttcggacgcgtgggtcgacccgggaagtccggtgcgcggttaccttgcaaggccgtacccaaactttttcccct

SEQ ID NO: 90685 - DNA, 660 bp, Arabidopsis thaliana columbia
  unsure (1)..(660): unsure at all n locations
cgccnnnnnnnnnnnnnnnnnnnnnnnnnnnnnnnnnnnnnnnnnnnnnnnnnnnnnnnnnnnnnnnnnnnnnnccacgcgtccgcacagtcgctagatatgtctctctcgcttccatcttcttccgccgccgctgctgcggcgtcaacatcgggatcatcatcttctccggcggctgcttcgtcttcctcaacaaccacgtcatggttctccgggatcgttcgtggtcgtggtgataaatccggcaccgcgaagctatctaaaagctcttccatggctggaggaggaagcggaagcggagattacggtggaccaatcaaagggaagaatcaatttcgcggtgttttgttcaaatacggtcctaaatcaattcaggttgcttttaagaccggagagtataaacaacaagtgatatttatcggtggattaactgatggacttttagctactgattacttggaacctcttgcgattgctttggataaagagaaatggtcactcgttcaactactgatgcctccttcatatcctggatttggcacttccagcttgaaacaagatgcccaagaaatcgaccagctaataaccccccaccacaaaggaatctgaggggtgnccccctnggaaaancnggtgcaggaattggataattggganagc

SEQ ID NO: 90686 - DNA, 708 bp, Arabidopsis thaliana columbia
cgaacaagaacttttcaattggatgctatcccgcttgccattggagctttcttatgtgcaacagctcagagtgtgcagactatgattgtgggacgtctgctcgctggaattggaattggaatctcatcagcgattgtaccactttacatatctgagatatcaccaactgaaatccgtggagcactcggatctgtgaaccagttgttcatctgtataggaatacttgcagccttgatagctggattaccccttgcagcaaaccctctatggtggaggacgatgtttggtgttgcagttatcccttccgttctattggccataggaatggctttttctccagaaagcccaaggtggctcgttcagcaaggaaaagtctctgaagctgaaaaggcgatcaaaactttgtatggtaaagaaagagtggttgaactagttcgcgacttatcagcctctggccaaggttcttctgagccggaggcgagatggtttgatctattcagcagccgctactggaaagttgtaagcgtacgtgcggctctcttctttgtttcaacaagttagcccggggttaaacgcagttgttggtattactcccccacatcggtattccgtagtgcgggaatccaatcagatgttgcagccagtgctctcgttggagcatcaaatgtctttggcactgctgttgcttcatcgttgatggataaaatg

SEQ ID NO: 90687 - DNA, 537 bp, Arabidopsis thaliana columbia
caaatcacataataattaaagacttcttcttcttcttcttctctacaaattatctcactctcttcgtttttttttccttctcaacaatggcgacttcttctactttctcgtcactactaccttcaccaccagctcttctttccgaccaccgttctcctccaccatccatcagatactccttttctcccttaactactccaaaatcgtctcgtttgggtttcactgtaccggagaagagaaacctcgctgctaattcgtctctcgttgaagtatccattggcggagaaagtgacccaccaccatcatcatctggatcaggaggagacgacaagcaaattgcattactcaaactcaaattacttagtgtagtttcggggattaaacagaggacttgttggcgagtgttgatgatttagaaagagctgaagtggctgctaaagaacttgaaactgctgggggaccggttgatttaaccgatgatcttgataagcttcaagggaaatggaggctgttgtatagtagtgcgttctcttctcg

SEQ ID NO: 90688 - DNA, 468 bp, Arabidopsis thaliana columbia
  unsure (1)..(468): unsure at all n locations
tgcagtaccggtccggattccccggntcgaccccncgcgtccngaggntaattccgaggcatcttcttctcgcgataaggaacgatgaagaattggggaaacttctgagtggtgtcacaatcgctcacggtggtgttttgcctaacatcaactctgttctattgcctaagaagtctgccactaaaccagctgaagaaaaggctaccaaatcaccagtcaagtctccaaagaaagcttaatctgctagagttttcgttgctagtttgtgtttgagctctggtgaatgtagaaatttgaagcttttggatcttagtttctatgtatttggtgatttagaatgttgttcaaaatccttttcctaatcataagaatttatgatctatctattatacgcttcgtctaatcttttggtccactcgtcgtaatgtcattagtgaatatttaataaacaactttgtcatcgacatt

SEQ ID NO: 90689 - DNA, 442 bp, Arabidopsis thaliana columbia
  unsure (1)..(442): unsure at all n locations
acttccgatactttcaatctctctaaactctcaatttcagtaatcgataaccgtagcaatggaatccaccggaaaagtgaagaaacgatttcggaggaagaaaaccacctggtgccccaaaaaccaaatcggtttcgaaatcgatgacagccggtcttcaattcccggtgggacggaatcactcgtttcctgaagaaaggacgatacgctcagagacttggtggtggtgctccggtttacatggccgccgttcttgaatacctcgccgcagaagttctggagcttgcctggtaacgctgcgagagattacaaaggaatcaagggataatttccgaggcatctttcttcttcgccggtaagggaccgtttgaggaattggggggaactcctctggtgggtttcataaatcggttcncggggggttttttnncnaaaaaanaac

SEQ ID NO: 90690 - DNA, 766 bp, Arabidopsis thaliana columbia
tccggaatcccggggtcgacccacgcgtcggacttccgatactttcaatctctctaaactctcaatttcagtaatcgataaccgtagcaatggaatccaccggaaaagtgaagaaagctttcggaggaagaaaaccacctggtgccccaaaaaccaaatcggtttcgaaatcgatgaaagccggtcttcaattcccagtgggaagaatcactcgtttcctgaagaaaggacgatacgctcagagacttggtggtggtgctccggtttacatggccgccgttcttgaatacctcgccgcagaagttctggagcttgctggtaacgctgcgagagataacaagaaatcaaggataattccgaggcatcttcttctcgcgataaggaacgatgaagaattggggaaacttctgagtggtgtcacaatcgctcacggtggtgttttgcctaacatcaactctgttctattgcctaagaagtctgccactaaaccagctgaagaaaaggctaccaaatcaccagtcaagtctccaaagaaagcttaatctgctagagttttcgttgctagtttgtgtttgagctctggtgaatgtagaaatttgaagcttttggatcttagtttctatgtatttggtgatttagaatgttgttcaaaatccttttcctaatcataagactttatgatctatctattatacgcttcgaaaaaacaaaaaaaaaaaaaaagggcggccgctctagaggatccaagcttacgtacgcgtgcatg

SEQ ID NO: 90691 - DNA, 343 bp, Arabidopsis thaliana columbia
gtcttttcagacaattatttgttcatcttgaatttgtgtcccaagaacatatctctctctctctctctcctcaccttggattctctgtttgatgattgctagttctttagaagagcaatgagttattctggagccggactcggcaaccgcctggctcaggtaaaaggagaataagggatcttttaactcaatctgataaccgactctgcgctgattgtggcgctccagatcctaagtgggcgtcagctaaatattggcggtgtctatatgcttaaaaatgttgtgggtgtccacagaaggccgtggcaggcaatatctctaaggtctacgtgacatgatgatg

SEQ ID NO: 90692 - DNA, 904 bp, Arabidopsis thaliana columbia
aggctacgcgagctctatacgacttacttagggaaagctggtacgcctgcaggtaccggtccggaattcccgggtcgagccacgcgtccgattactagttcctttctgatctcttcttcatgcggtttatgtttcatcgagtttgaatatttctttgattctctgtttgatgattgctagttcttttagaagagcaatgagttattctggagccggactcggaaagcctggctcaggtaaaaggagaataagggatcttttaactcaatctgataaccgagtctgcgctgattgtggcgctccagatcctaagtgggcgtcagctaatattggagtgtttatatgcttaaaatgttgtggtgtccacagaagccttggcagtcatatctcaaaggtcttatccgtgacattggatgaatggtcagatgaagaagtcgattcgatgattgaattgggggaatggccttgaaattaatttacaagggtttttcctgaaggtacttaagcctgacctggtgctttttgacaccggttggggtattaggcaaattgaccccagagttttgaaccaggttgggtcacttggggggggttaataaaacccagctttttttttgggtttttaaaagatgggtggttcgcctatttttatccaccaccgaattgaggctggtgatttttggttggaaggactttataggggcctttgcctccgatttgggcgggaccctgtggggctcaggacagaggtcattttggtggagacactacctttggaggggacacgtttgtcctaattgggaggaaggaggtgtcttacttgttggtgaagggagagggtgttccccttacctggggtttgcccatggggattgatgaggggatcccactttaaacccccggg

SEQ ID NO: 90693 - DNA, 732 bp, Arabidopsis thaliana columbia
  unsure (1)..(732): unsure at all n locations
gnnnnnnnnnnnnnnnnnnnnnnnnnnnnnnnnnnnnnnnnnnnnnnnnnnnnnnnnnnnnnnnnccacgcgtccgcggacgcgtgggcaaaatattatccaatttgtctccatccttccgttttttttttccattaccgtacgccgaagaatctgccccaagaagtttaaaggtattgatggaacaaccgaggaacaacaagacctctcaagaacaagctcgtgaatcgctcatcgaaatctcctacacttcacccgaggaagacgaggttataacctactcagatgtgaagcctgtcacctatatctcaaacggaagtgccaaaggaaacaaagatgatgcggagaagctcagagatgagctgatttcgatatcctacgacgagtcaccgtcgccttcaccggatgtggatgtagctgtttcgccgaccctgccgaacggtgtatgtcgtggataggaaagttaatgtaccgcttgaagaagtcttccctttcatatgcaaaagacttttggtttggtctaaaagttgaccattgttatatgttaacgtttcttccttaactatatgattgaaaatcaatgaagtttcttttattgtgtgcttgtttgacctgtcttatataaagttaaaagctaaaaaaaaaaaccaaaagggcgaccgctctagaggatccaagcttacgtacgcgtgcaggcgacgtcataactcttctatagtgtgtacctaaaaa

SEQ ID NO: 90694 - DNA, 609 bp, Arabidopsis thaliana columbia
  unsure (1)..(609): unsure at all n locations
tgcnnnnnnnnnnnnnnnnnnnnnnnnnnnnnnnnnnnnnnnnnnnnnnnnnnnnnnnnnnnnnnnnnnnnnnnnnnnnccacgcgtccgcggacgcgtccgcccacgcgtccgcacaaatctgcaaatcttcttcttcttctgtcttcatgaatttcaagtctaacaattcctagccgtttacaatttgacggcacaattcttcattccttgtcgtgcccggaagtaaaaagatgatctttttggtttctgatgagataaaacagagatcttgttaacacttataagcagacccaactcgggaagctatggccgctattcgttttgcggcggcgattctgatttgctgtttattaccggcggcggttttgtcttacggtttcccggcggcgttgaaacttgaaagagttattccagcgaatcacgaaatggaacttagtcagctcaaggctcgtgatgaagctagacacggcagattgttacagtctttaggtggagtcatagattttcccgtggacggaacttttgatcctttcgttgttggactgtactacacgaaactacgattaggaactcctccaagagatttttatgtacaggttgatacag

SEQ ID NO: 90695 - DNA, 399 bp, Arabidopsis thaliana columbia
  unsure (1)..(399): unsure at all n locations
tgcaanaagtacaaccttaaagaagaaatgggtgagctcccatttttgctgggaggagaaaagcttaatccgttgcttcagcttggaggtaagataagtgacaagagcatatagtctttatgtttcataaaacataattatgtttttactgtaatcttgggttattgtgtaactggttaaatcatctccatgtattattaccagaggttaggggtgatcacaggtactaaaagctaatctaacacttatggaagaatttttctttcttttttttccctattatataaaaataattagagttttggttctaaacctatttgctaagtgtgaatgagtctttacatgttcatatttcagttcaaatggttaaatttgttaaggttctcacttaaaaaaaaa

SEQ ID NO: 90696 - DNA, 527 bp, Arabidopsis thaliana columbia
  unsure (1)..(527): unsure at all n locations
gccggcannnnnnnnnnnnnnnnnnnnnnnnnnnnnnnnnnnnnnnnnnnnnnnnnnnnnnnnnnnnnnnnnnccacgcgttcgctgattataaaatcagattctagactaattaagaagaacaggcaaaacgaatttgctattggcccgttggaaaaaaataatcggatatggatgctctcaaggttcagattctacctgataaccaatcatcaccttcgtccacgcacatgctcactaagcccaagtcgaaaaaagcgacaaaatcgattgccatgctaatcgtcgcttccttggctatcacgttagggttattatttgttttcagttcaaattcagttatgttctctgcaagttttcttcggagaagttcacttcactacagcgtcattatcgatgccgggagttcggggacccgaattcatgtgttcgggtactggtttgagtctggaaaacccgttttcgatttcggagaagaacattacgctagtctgaaggtgagtcctggtttgtcttcgtatgctgat

SEQ ID NO: 90697 - DNA, 590 bp, Arabidopsis thaliana columbia
  unsure (1)..(590): unsure at all n locations
ccggcannnnnnnnnnnnnnnnnnnnnnnnnnnnnnnnnnnnnnnnnnnnnnnnnnnnnnnnnnnnnnnnnnccacgcgtccgctcacattcaaaacactattcgcgaatctaatctctaacaacaataaacctcgcttgaagaagagtgtgatcgagccgatcaacggctctgattcatcagattctggtcgtcttcatcatgaacctgtgattacttcctcacgaagcaacgagaaccctaaatctgatcttgaagaagaagatgaaaaacagagcatgaactctgttttagatgttcaatgggctcaggggaaagcaggggaggatcgtgtacacgtggttgtatctgaagacaacggatgggtctttgtcggaatctatgacggattcagtggtccagatgcgccggattatctcctcaacaatctttacaccgccgtgcaaaaggagctcaatggggttactttggaaacgacgaaaagcttagatctttaggagaaaacggcatgaccaaaaccggaaaatgttctgatgaggaagatcccgagtcaggaaaagagaattgtcccgtgataaacaatgatgatg

SEQ ID NO: 90698 - DNA, 385 bp, Arabidopsis thaliana columbia
cacacgcgtccgcccacgcgtccggaaagtcgaagcttcacgatcgtataataatggcgacggcttcagttgcttttaagtctagggaagaccataggaagcaaattgaattagaggaagctcgtaaagccgggcttgctccagctgaggttgatgaggatggaaaggaaattaatcctcatattccgcagtatatgtcatctgctccatggtatcttaattctgaaaaaccgagtttgaagcatcaaaggaaatggaagagtgatcccaattacactaagtcgtggtatgatagaggtgcaaagatctttcaagctgaaaaataccgcaagggagcgtgtcaaaactgtggtgcaatgacgcatactgctaaagcttgtatgga

SEQ ID NO: 90699 - DNA, 627 bp, Arabidopsis thaliana columbia
  unsure (1)..(627): unsure at all n locations
actctcagctactttttccccaattttgagctcaacatcgaaccctagctcaacgaaccaatcatgtcttccaagcaaggaggaaaggcgaaacctttgaagcagcctaaagctgataagaaggaatacgacgagactgacttagctaacattcagaagaagaaagatgaggaaaaggcccttaaagagcttagagccaaggcatcgcagaagggatcctttggaggttctggacttaagaagagtggcaagaaatgatccgttttatccatgaagtgtgttttaaaatgcaaatttatcaagtgaaaaaaacagataatcctgtgttgatgtaactttttatcataattcgagaagagtaacttcgcttctccaaaaaaaaaaaaaaaanaaaaaaaaaaaaanaaaaaaataaaaaaaataaaacataaaaaaaacaaaaaaaaaaaaaaaaaaaataatctataaaaaaacggggggggccgttttaagggatccaagtttacttccgcgtgcttgcaacgttatagttcttttatggggtcccctaaattaaattcactgcccgccgtttaacaccgtggggacgggaaaacccctggggttccccatcttaatcgctttgaa

SEQ ID NO: 90700 - DNA, 808 bp, Arabidopsis thaliana columbia
ggaaaagccaaagttggggaggaaaatggcctggggggtgtttttgtggaatgggacacttgtgggcgggaacctttgaccatgagggtttttgtgactcctgcaaatttggattcagctgtggaaaatagaaacttgcattcagacggattgttcaaaagtggcttgccagaagaacttcagtcaaattctttgctcagcgggacggggaagctggacgatggagctagcagcaggaggttgagcttgaagtccgtagcgtgagcgaggtctccgcaattgaaatgagaacaggaagtcaagaaaaaggaaaataaaaaataaataacaagaatcagagcaaccctagtgtgtttgctttggacgaccgacagcttcagaactcgaaactattggtaagttcacctaaatatgaaaactaaaagcttaaaaaggaaaaaaaaaaagttctaaaagagaaaagaaaaaagaaagattaacaaacattcaaatgatttacttgttggattcttggtgggattgtgagtatccaaactctgggaagaatgaggcatgaataacgagtttgggacacaaaagacatgcattgttcgatattatggtccaggtgaaatgtggagctgtgctagttcaatgcttttgctgagagagattccaaatttaaaagaaaggaaccagtgagatccccatagaaccaggccagtggtatggttttggttgcctaatcaaggtaattcaagcctggttttggtatataaaatgcttggggcccgggatttgagatcaagcttatcgataccgtcgactg

SEQ ID NO: 90701 - DNA, 637 bp, Arabidopsis thaliana columbia
atgatacgccggctctaatacgacttacttagggaaagctggtacgcctgcaggtaccggtccggaattctccgggtcgacccacgcgtccgccaattctttcataacaaaacactgctcttccttctctccgccgccgcatcgttaaatctctccgtcatctgtaaccggttaaagtatttccctcaggtcgacctgaaaacgatgggcaaacgaggaccgaagaagcttacaaacactcaaggaggaggaggacctaatctcaaatctgtactgagacatgagcacttgaagaatctcgctctctggtcttccaccggagatactcctatcccgtctcttgcttcattactcggtcgacgtctcgctgccgacactgaatccaccggaatcactactgatcccgatctcgtctcttgtcaaaggtgtgagaccattcttaagcctggattcaattgcaatgttagaatagagaaggtttctgctaatgtgaagaagaaacgtaataggtgcaagaagtctaacaacatctgtttccctcagaacaatgtagtttaccattgcaatttctgttctcaccggaaccttaagagaggtactgctaaaggtcagatgaaagagctttacccgttcaagc

SEQ ID NO: 90702 - DNA, 1009 bp, Arabidopsis thaliana columbia
  unsure (1)..(1009): unsure at all n locations
ctaatacgactctcttagggaaacctggtacgcctgcaggtaccggtccggaatttccgggtcgacccacgcgtccgcggacgcgtgggcggcgattagcaaaggcggtggttcgatagagagaggaagagattgaagcgattttcactcagttttcatcagatcgtctcggtgattctagggttcattggtctcgttttgttcggtgactgcttgagtttcacgtttttggtttcgatttcttatgggagattcctcggtttcgacaagttcatgggctgtcattgaatctgctaataggtttcagtggtaggaaacttttgggtctgtttctagttgtgaattgaatagactacaagaagtaagcagaactgaatgtgcattccttttgtttttattgacaattgtgagttaacatgttcaggtgtcgagcgttatgggtgagtcctctggatcaagcagttcattggctgctataaattcgtctcaccattgggtttcagctcctaaagaagcatggctggagggaaggcccctggtcttggaatcgctgaaccaggggtttattggggcccttttccagcagaagcccaaaaccataacaanncgggggagtgggaagctaaaccacccagcttaaaaagaaaaatgggctcaccccccagcctaaggatgaagaagtctcaaagcagagtaagaaactttcgaagaaaatgcggaagatgatggagcccgaaaaacatttccaggaaaaagaatttgaacgagccttctttagggagttctggccccgataatgtaaaactaggttttattcttttacttcttattgacctgaatgttccaaaagcttctgtatttactgcaaatttagaataactctgttttattgccttaaaaaaaaaaaaaaaaaaaaaaaaaaaaaaaaaaaaaaaaaaaaaaagggcggccgctactagaggatccaagcttacgtacgcgtgcatgcgacgtcatagctatctatagt

SEQ ID NO: 90703 - DNA, 935 bp, Arabidopsis thaliana columbia
  unsure (1)..(935): unsure at all n locations
ctaatacgacttacttagggaaagctggtacgcctgcaggtaccggtccggaatttccgggtcgacccacgcgtccgcccacgcgtccggcagtattcaaacaaataaaatatactgctttagctttggacacctcctcttactaatctctataactatatttaaaaagtagaaaataatggcacgtctatttgtcgtagttgcccttttggctttggccgtgggcaccgtattcgccgccgatgcaccttcagctgcacccaccgcctcaccaaccaaatccccaaccaaggctcctgccgctgcacccaaatcctccgccgccgcaccgaaagcatcatcccctgttgctgaggaacccacccctgaagacgactactctgcagccagccccagtgactccgccgaggcacccaccgtctcctccccacccgctcctacccccgaagccgatggtccctcctccgacggaccctcatctgatggacccgccgccgccgagtcacccaaaagtggcgccacgactaatgtgaagctctccatcgccggcactgtcgccgccgccggattcttcatcttctctctctaagttttgttttttaattaaacttgagacggaatcataagattcccattatgagatgaggccgtatctctttaactaactaactatactatatacagtgatttatattaatcaagagattgaatggagttattattattacgtaccgttgttgtactatgttttttttgattacgtaatttttgatgattgtgaacttattaatgtttatttagaaattaaatgaaaaacaaatttttccaaaaaaaaaaaaaaaaaaaaaaaaaaaaagnnnnnnnnnnnnnnnnnnnnnnnnnnnnnnnnnnnnnnnnnnnnnnnnnnnnnnnnnnnnnnnnnncgtctctcaatt

SEQ ID NO: 90704 - DNA, 707 bp, Arabidopsis thaliana columbia
  unsure (1)..(707): unsure at all n locations
agaagaatgatatgttaaagaagggtgttgatgaaggaagatggtccgagaagtttgtttccagaatcgagtttaaaggggacatggttgtggcgactccagatatcttccaagtacctctgacatctgatgtggaattcattattttagcttctgatggattatgggactacatgaagagctcagatgtggttagttatgttagggatcagctccggaaacatgggaatgtgcagcttgcttgtgaatctcttgcgcaagtagctttggaccggcgatctcaggacaacattagcatcattattgctgatctaggaagaacagagtggaagaatctccccgcgcagcgacaaaacgtactggttgaactggttcaggctgcaacgactatcggtttagttactgttggcatatggaggtcttcacatctatcttaagtgaattgaacattctatctctttcgtcaggggatataaaacctggaactatgtctaaccctctagtcttcccatagaaatggagatatgaagatccctcccaaacagaaccagctttatattattaaaaatccccctttccccnnnnnnnnnnnnnnnnnnnnnnnnnnnnnnnnnnnnnnnnnnnnnnnnnnnnnnnnnnnnnnnnnnnnnnnnnnnnnnnnnnnnnnnnnnnnnnnnnnnnnnnnnnnnnnnnnnnnnnnnnnnnnn

SEQ ID NO: 90705 - DNA, 350 bp, Arabidopsis thaliana columbia
ttaataaatttcttttttttggacgttttgttgatgctagccgcgactactaagcacgcctgagggaggaaccaattattgcgttcagtggagaggaaggcaatggtcggcacttggacttgcatgatatgtataaccagtacatcaactctaaatttggggaaagggttgaatattctgcttaccttgatgttttttctcaaccagagaaaataccgcgtaaactgaagttatcgaggcaatacatgaagtatatggaagctttatttgagtacctggtctactttcttcagcgaaccgagcctttgcatgatcttgaccggatactttctaaggcttgttctgatttt

SEQ ID NO: 90706 - DNA, 432 bp, Arabidopsis thaliana columbia
aacttcttaaaaaaaaaaaaaatgggagaaaacggagccaagcgatggaacttcggagctaacgaggtcgtcgaacgatctaactcacttaccattcgtgattaccttaacaccttaatcaattgtctcgacggtggtgatgtaagacccgtcatcccactaggtcacggcgatccttctccgttcccgagctttcgtaccgatcaagccgctgttgaagccatctgtgatgctgtccgttcgaccaagtttaacaactactcttcttcttccggtgttcctgtcgctaggaaggctgttgcagagtacctctctagtgatctctcttaccagatatcaccaaatgatgttcatatcacagctggttgtgtgcaagccattgagattttgatatccgctctcgcaattcctggagctaacattctgctacct

SEQ ID NO: 90707 - DNA, 555 bp, Arabidopsis thaliana columbia
  unsure (1)..(555): unsure at all n locations
tnattttggncccccgaccttnccataatnncctgnccggcattattggaacntttcngancagngaaatntgtggngtttggcctctgccctcccgtggtgattcancttatgtttcgacccattgccgctctcgtggcggcttggcttccgggaacagaaggtcaaggagtggctgatgctctgtttggtgattacgggttcacaggaaagttggcccggacgtggtttaagtcggtgaagcagctaccgatgaatgttggagatcggcattacgacccattgtacccattcggtttcgggttgaccacaaaaccatacaaaatgtagacttccttttagttattcggcaaggagaggacaatattaagggacaaaacgaaataacttcgatgcacaattttgtgggttctagctctcaagttaaggttgaggctttgagattgtctgtctacaaaactagtatgttataaacagtgatgatatgaatcatcttttgttattttcccgttaataaatttttacttttttattatatttttatatattttatta

SEQ ID NO: 90708 - DNA, 410 bp, Arabidopsis thaliana columbia
gaggagagacaaagaaggatgagtatgttgtcagggaaagctgcttacgatctctttgtctatggcagtctccaggaacccgaagtcgtatacgtgcttcttaatcgcgtccctgaccatgtctccgccgtactctccggctttcacaggtttagactcaaaggccgtgtctatccaacaattctaccggacggtaccggaaaagtcaacggaaaggtgctaaagggcataacagatgatgaactgaagatgttagatgagtttgaagatgttgaatatgacagaaagactgttgaagtaatgctgacggatacttcagagaagctgcaagtcgaaacatatgtatggaagaacaaagatgatccggatctttatggagaatgggatttcgaggaatggagacaacatga

SEQ ID NO: 90709 - DNA, 816 bp, Arabidopsis thaliana columbia
atccataagctccctatcgaattcgcggccgcggcgattcgaggagttcccatggtggaacagaataccctagagcctttatgctgccactaattatcactcttcactattgaattggggatggactcagagaaaatcctcaatccaagacttgtttcgattaatagcaccagccgcaaaggtatgtccgttgagttgccgcaaaaaccgccgccaccgccgtcgttgttagaccggtttaaagctttgcttaatcagcgtgaagatgagttcggtggtggtgaagaggttttgcctccgagtatggatgagattgttcagctttatgaggttgttttgggtgagcttactttcaattctaagcctattatcactgatctcactattatcgctggtgaacaacggtaacatggtgaaggaatcgataatgctatttgccactcgaatccttgaggctcctgttgagcacaagttgccatctctgtatcttttaaacagcattgtttaaaacattgggcgggaatatggtcgctatttttcatcccggccaccccgagggccttctggccttgccatatatggcaagccaccatatcgaggtttaaccattccgttcaaatgccgttcacccttggttttgggggactctggggtccgcaaggtgtttttttctcccacccccccccttggttacccttaccccccaagagaatattgaattcatatggcacacaatatgccacatactcttcttcacatttttggccaagcgcaaaatacccccaaatacattattccggttataggggggccctc

SEQ ID NO: 90710 - DNA, 451 bp, Arabidopsis thaliana columbia
  unsure (1)..(451): unsure at all n locations
atttccgatataatctgatcaaatcatcgccgacgatcaccgattcagcgatgcaacagggagattacagttcgtactatcaccaccaatactctcaatttcaaaatcctactccgaatcctaatcctaatcccaatccttctccgccggcgccggcaaccgtagctggtccgaccgatcttactcgaaacacgtacgcatcagcgccaccgttcaccggcggttacggttccgccgattactctaactattcacagaattacactccttacgggcaaaactntgngcatgtccctccttcagctccttccttcacttnaccatcanaaccttcttcttntccgccggcggcatcactaaaccctaatttttattcaacctttnaacccaancaccaaccttcanccanggttnattcnnaanccttttttccttttatggntcaatttng

SEQ ID NO: 90711 - DNA, 746 bp, Arabidopsis thaliana columbia
tatttctccacttgattcccagaagacaaaaaaaaaaaaaatcagaaaaaaagaagaagagagaaaccatgtcttcgccgagcaagcgtagagaaatggatttgatgaaactgatgatgagtgactacaaggtggagatgatcaatgatggcatgcaagagttctttgtcgaattcagtggacccaaagacagtatatatgagggaggtgtgtggaagataagagttgaacttcctgatgcttatccttataaatctccatctgttggtttcattaccaaaatataccaccctaatgtcgatgaaatgtcaggttctgtttgtctagatgttattaaccagacctgggggcccgatgttcgacctgggtgaatgtgttcgagacatttcttcccgcaacttcttctgttatccgaatccgtcagatccattgaatggtgaagcatgctgcattgaatgatgcgtgatcgtcctgcttatgagcaacgagttaaagaatactgtgagaagtatgcaaagccaggggaaggttcagaagataagtctagcgatgaagaactaagtgaagaggaatacggctcagataatgaggatgatgatgatgatgatgttgcaattcctggcaaaccaggtcccttgacccagctttggtaggggccttgttttattgtatatgatcatgaattatctctgcttataactcaactgtgaaatctatttctccctttgtgctttgttcacctgttt

SEQ ID NO: 90712 - DNA, 626 bp, Arabidopsis thaliana columbia
  unsure (1)..(626): unsure at all n locations
tgatcttcaggtctcgtgaaaatatataaataaaaaatcaataaacgaaaatctttcctttttctctcacacatttttcttcatctccactcgaatccggaagaagaacaaaaaccaaaaaaaaaacccagaaaatcagagaaacataagcgaaccgacagagaaaaaaaatgtcttcgccaagcaaacgcagagaaatggatatgatgaagctgatgatgagcgattataaagtggaaacgatcaacgatggcatgcaagaattctatgttgaattcaatggtcccaaagacagtctctatcaaggaggtgtgtggaagataagagttgagcttccagatgcttatccttataaatctccatctgttggtttcattactaaaatttatcatcctaatgttgatgaactgtcgggttctgtttgtttagatgtgattaaccaaacttggggtcctatgttcgaccttgtgaatgtgtttgagacatttcttcctcagcttcttctgtatccaaacccctcaggtccccttgattggagaagctgctgcgttaataattcgggaccgccctctnttggcacggggtaaagatcctttgggggttcaaacccgggaaggtnanagnag

SEQ ID NO: 90713 - DNA, 597 bp, Arabidopsis thaliana columbia
  unsure (1)..(597): unsure at all n locations
agtgnaagaagaaaaatcgagaaccatcttctcagccgattttagtaaccatcttcttgtttgctccgaacaatcaagagatcgaaaatggctgatgttcacaaaggaaaggtttgtgtaaccggtgccggagggtttttgggttcgtgggtcgtcgatcttcttctctctaaggattacttcgtccatggcactgtcagagaccctgataatgaaaagtatgctcatttgaagaagctcgagaaagctggtgacaaactcaagctcttcaaggctgatttgttggactacggctctcttcaatctgctattgcaggttgcagcggagtcttccatgtcgcttgcccggttccaccagcttcagtccctaatcctgaggtagaattgatcgcacctgctgtggatggcacgctgaatgtgcttaaggcatgcattgaagcgaatgttaagcgtgttgtgtatgtttcctctgtagctgcggctttcatgaaccctatgtggtcaaagaatcaagtattaggtgaggatgttgggctnccaggntcctgaagaaacctnngattggatttttctggnaancacggcnaggggtaattt

SEQ ID NO: 90714 - DNA, 440 bp, Arabidopsis thaliana columbia
cccacgcgtccgaaagaagatggtcggttgagctatttttgcttctcccgacaaaattctcaggatccgaatacttccaccatcagtgcattcatttataagatctgggttttacacagctctgcgagtacagtaactatgagaaggagaggaggggatagtttccggagagctggacggaggaagatctcgaatgtggtatggtgggttctctctggtattgccctccggctcttctttctcattctctccaaagctggtcatattgaacctagaccctctattcctaagcgacgttaccgtaatgacaaatttgtagagggtatgaatatgactgaggaaatgttgagtcctacttacgttgctcgtcaagttaatgatcagattgctcttgctaaagcttttgtagtcattgctaaagaaaggaagaatcttcagtt

SEQ ID NO: 90715 - DNA, 855 bp, Arabidopsis thaliana columbia
  unsure (1)..(855): unsure at all n locations
atgattctccagctctctacgactcactattgggaaagctggtccgcctgcaggtaccggtccggaattcccgggtcgacccacgcgtccgcattgacacgatcattaccagcattggctccaactacgaagcttgggcggttgatttctcctcattcgtggtcgactcgagagactctctctcggtccaaaggttcgagaagtcccttaagaagatgaagcccgagacagctcttgccttagctaagatagtgtttggtagcgacgagagagagattttgggacaagtgtcagtgccttgccatgtcatacaaccaggaaacgacgtcgtagtgcctgtctccgtcgcatacttcatgcaggagaagattaaggggaaatcgacagtggagatcatcgaggacgcgatcgggcattttccacagatgacatcacatttggagctgcttggcgtcatgaggcgcctccttgagttttaaggcttatataagagctttgcgtcgtttgatcgagtttcttcttgtctataatatcgtattactaatataacgaagtgggtctattagaatttttcatatatgtttgtgtaatgtgaatgtgttattatattcttagcacaatgattttcatttttagtgttttttttttaaacataggattgaaagtaatatgttataagtttctttatatcacactgtcaaattttttatttcttacgataattttgttgttgttgaataaaacattccaagaaaaagccnnnnnnnnnnnnnnnnnnnnnnnnnnnnnnnnnnnnnnnnnnnnnnnnnnnnnnnnnnnnnnnnnnnnnnnnnnnnnnnnnnnnnnnnnnnnnnn

SEQ ID NO: 90716 - DNA, 675 bp, Arabidopsis thaliana columbia
  unsure (1)..(675): unsure at all n locations
cnnnnnnnnnnnnnnnnnnnnnnnnnnnnnnnnnnnnnnnnnnnnnnnnnnnnnnnnnnnnnnnnnnnnnnnccacgcgtccgtgcgtttgctgtatttgaagatatggtaaaagaaggcatgaaaccagatgttatactatacaacaacatcatctcagcattctgcgggatgggtaacatggatcgagcgatccagactgttaaggagatgcaaaagctgaggcatagaccaaccacacggacatttatgcctatcatacatggatatgcgaaatccggagacatgaggagatcactagaagtttttgatatgatgagacgatgtgggtgtgttccaaccgttcatactttcaatggtttgattaatggtttagttgagaaacgtcagatggaaaaggcggttgagatattagacgagatgacattggcgggtgtaagtgcaaacgaacatacttacacaaagatcatgcaaggctatgcatcagtcggtgataccggaaaagcctttgagtattttacaaggctggaaaacgaaggtttggatgttgacattttcacttacgaggcgttacttaaagcgtgctgcaaatcaggaagaatgcagagcgcattagctgtcacgaaagaaatgcgtgcacggaatatcccgcgcaattccttcgtctataacata

SEQ ID NO: 90717 - DNA, 998 bp, Arabidopsis thaliana columbia
  unsure (1)..(998): unsure at all n locations
nnnnnnnnnnnnnnnnnnnnnnnnnnnnnnnnnnnnnnnnnnnnnnnnnnnnnnnnnnnnnnnnnnnnnnnnnnnnnnnnnnnccacgcgtccgaacgctgcaaggcctaacccccaaggctcataccattacggaaagatcaacattacccgtagcatcaagcttgtcaactctaaaagtgtggttgacggtaaagtccggtttggtttcaatggtgtatcacacgttgacaccgagactcctttgaagcttgctgagtacttccaaatgtcagagaaggttttcaagtacaatgtgatcaaggacgagcctgcagccaaaatcacagcattgactgtacaacctaatgttctcaacatcactttccgtacctttgtagagatcattttcgagaaccacgagaagaccatgcagtcatttcatttggatggctactccttcttcgctgtcgcttctgagccagggaggtggacacctgaaaagagagagaactacaacttgctcgatgcggttagcagacacaccgtgcaagtctaccccaagtcttggtcagctatccttttgacattcgacaacgccggtatgtggaacatcaggtctgagaacttggagaggaaatacctaggcgagcaattgtatgtcagtgttctatcaccggagaaatcgctaagggacgagtacaacatccccctcaacacaaacctctgtggcatcgtcaagggcttgccattacctgcacactactcctaaatcaatattcaattaactactactctacaaagtggggtgcaatattaaattaactaattaaccctttcctaaattttaagtgtaatttgtaaaccccttctttcatatactatcattaaaccataatcatataccaagttttgctttcaaaaaaaaaaaaaaagaaaagnnnnnnnnnnnnnnnnnnnnnnnnnnnnnnnnnnnnnnnnnnnnnnnnnnnnnnnnnnnnnnnnnncgtctataaatc

SEQ ID NO: 90718 - DNA, 421 bp, Arabidopsis thaliana columbia
cggaaacatttctttcttctttcttcttcttctcacgatcggtcaataacttgctcataacagtttcgaaatcctctgcttcatcatttgaacttcgatttaagggttcttgaatcttcgaataaaaatctcacctttaaatgggaaagccaacggcgaagaagagaaatccggagacgccaaaagatgcttccggcggcggcggcggcggtggaggccggtcagggaaaacttaccatcgttctacttcgagggtatttgacgaagatacggagattttcattagcagagcacttgagctcaaagaagaaggtaacaagttgttccagaaacgcgaccacgaaggtgcgatgttgagtttcgacaaagccttgaagctcttgcccaaagatcatatcgatgtagcttatcttagaacgag

SEQ ID NO: 90719 - DNA, 472 bp, Arabidopsis thaliana columbia
ctccgccgaaatttatccttcatcggcgttgtcttttcgctggatttctcaaagccctagctgaagaatctctgaacaagtggaaatgccgttttggtggccactgatcgtcctcgccttcgcttacgcgatctgcaagttccttcttatgctcattcctcccaatgttccttccattgacgttgacgcatccgatgtgttggctcatgggaaagatacggaggagaatagcttcatctatattcctcccagaggaaggagccaacagtctgacaaaaaagttcaatgttatgaacctgccacaatgaaatatctgggatatttccctgctctgtcgcctactgaggtcgaggagcgcgtaacactatcaaggaaggctcaaaagacatgggctcaaagtagctttcaagcttagaaggcagttcttgcggattcttcttaagtacattattgaacaccaagagcttatatg

SEQ ID NO: 90720 - DNA, 573 bp, Arabidopsis thaliana columbia
  unsure (1)..(573): unsure at all n locations
gcgtccgcaacgagaaaataaaaaacgcaccgccggtaacaattttccggcgaatctgaaaactaacgatttttctcgagtttggtagagaaagagaaagagattgattcgttcctggttcgtggatcgaatagagaagaagaaagagtaagtgcaacagaatcaatggtatttcccggtgagatgacgacgacgacaacgagacctgagcaacgatcgaagactcttcacaatttccctctcccgaacttatgggggaatcagagacaactcaagtgcacgaagatcgactctatcagcaacaacaacaacaacggaggaggtcccggcggcgatcaccgactacgacgccgatcttccgcctctggaattcgctgattctcccgtttcgatgccgtttcgattcggtaactccgatcatcgccgaccgtttaaatcgggaagcgaagaagggttcnaaggggttaagggttaagnttnttttcngacnttaaggcggggcaagntnaggtnccaaaattgntttttanaaangggtacccnaggggnggggcaaattgcgggtttgtttgg

SEQ ID NO: 90721 - DNA, 513 bp, Arabidopsis thaliana columbia
  unsure (1)..(513): unsure at all n locations
cnnnnnnnnnnnnnnnnnnnnnnnnnnnnnnnnnnnnnnnnnnnnnnnnnnnnnnnnnnnnnnnnnnnnnnnccacgcgtccgcggacgcgtggggtccaaaagggtcttcttctttgtctctgctcttcactttcaattataacctcttcgtcttcttcgccgtctctggtattaactccggcgagttttttttttttttttttactttgatatgaatttgcgagatttactgtttaattcatgatgacaattttggatttttgatcggatgtgaaattcagagtttttcattcttcttcatcatcttataacaaagaagaaacaaaacaaaaaactttttttttctttctttctattgtttcggaatctatgggtgaagcaagcagacaacaaagggcatggaacagagaaatgacggttacgacaaatctttctctagacatagataaatacccgagagatctgttacgaggtttcatgtctgaaaacggcggtggaagagtctttcacg

SEQ ID NO: 90722 - DNA, 373 bp, Arabidopsis thaliana columbia
acgcgtccaacatactgcaggttctttattcttccaaactctctctgttttgagggtctacatacaaattcaacctttagttgtgcttactctgtttctatgctctgtttttttgtcgtgttctttaaattaatggtttttgtggggttactctggtttgactaatcagcttaatagaagccattgatctgataatcaaaggagcacataatctgattgtccccatacatacaaagccctacactaagaaaaagcagcaaaacgacaacgtttcggtcaccaccaccacccactcgaacggacaacgattctgctggatcacactataagacatcattcagtttctcctcggattcatcgccgcattctctcc

SEQ ID NO: 90723 - DNA, 511 bp, Arabidopsis thaliana columbia
  unsure (1)..(511): unsure at all n locations
cccacgcgtccgaaagagaagaacaaaacatcatcatatattctattgactagattaatttcttctaagtgcaaaagaggagaaatggagtcaatgaagatgaagctcatagtggtgttgatggtggctattgtggctttctccgccgtaggaaacgtggctgcgcagacagaggctccggctccaagtcctacttccgatgctgctatgtttgtcccggcattgtttgcatctgttgctgctttggcatcagggtttctcttctaaaccaatctccacatttcattgagttaggttctaaattgttttgccttttactttcgtttatgtcttatggcatgagctttttgttatttgtttctaatatttggactactatgtgttgtgtgtatatgattcataattaatactatatttaatggggttgataaaaaaaaaaaagggggggccncnnntggggggncccccggttcngaccgggnnnattnggcggcaaaagccctctannggg

SEQ ID NO: 90724 - DNA, 560 bp, Arabidopsis thaliana columbia
  unsure (1)..(560): unsure at all n locations
atgatactccagctctcnnnnnnnnnnnnnnnnnnnnnnnnnnnnnnnnnnnnnnnnnnnnnnnnnnnnnnnnnnnnnnnccacgcgtccgcgtttctcttggcagttttttttgttgtttgaagatggtgtcacatgaagagaacacaagtattgtggaatggtttcttggtccacatccatacacgtatccgccttatggtattgagatgattcatgaggatgatgaagtagcagtagctcatcagcatcatcatcaccagagcggtgagtattacagagagtatgaagatcatcgtagtagcgatgtagataacgatgagatcattgctagaactctccaagacgattttttgcagcttgaaatcgcaggaagtaacgattattcgcatcagaatcaacaacaacaacatcaacaagaaggttatactaacaactatagtaataacaacaatggttatgcttggaatgatcagtctcctgctgtggattattcttcagaatggataggaaatgataatgatcaagatgggaggagcgatgattcggttaatgtcttt

SEQ ID NO: 90725 - DNA, 705 bp, Arabidopsis thaliana columbia
  unsure (1)..(705): unsure at all n locations
gaaaagtaaaggaccctnntnaaatccggtangnnccgtcagaaccattctngtnagaccgcgatccggtcancantggacccnacgacagtnattattgtcatcagtggactgtggaacattgagcaaccaagaagcagtagccatagtccagaatcatccgcgaaacgggatagcaaagcggctggtgaaagtagcgctacaagaagcggcaaagaagagagagatgagatactcagacctgaaaaagatagacagaggagtgaggagacatttccacgatgacataacagtgattgttgtcttctttgatacaaacctagtgagcagaggaagtatgttgagaggaccagccgtgtcagtgagaggagcgggtgtgaatctacctcacaacaccctggcgccttgcaccacgcccactcaagctgctgctgtggcgcctcctgactattgaatttttacggtgtccttaaaattctttccaagatccttcctgtaactatatataaatatatatatttgattattattatcattgactgggaaaggatatatcatcatcaagtgggaaaggatatatcataatcaagtggttagttttgtttgttccctttgttagctgtgtactggagaaagaaaggtgacaagaattcttcttcttcttcattaattttcattgcttgctttttaaggtattactgattc

SEQ ID NO: 90726 - DNA, 582 bp, Arabidopsis thaliana columbia
  unsure (1)..(582): unsure at all n locations
nnnnnnnnnnnnnnnnnnnnnnnnnnnnnnnnnnnnnnnnnnnnnnnnnnnnnnnnnnnnnnnnnnnnnnnnnnnnnnnnnnnccacgcgtccggtcagattgatcaggcttgtcaagtttttgaagatatgaagaagaggcattgtagaagagatgagtatacttacacgattatgatcaggactatggggaggattgggaagtgtgatgaagctgttggtttatttaatgagatgattactgaagggcttacgcttaatgttgttggttataatactttgatgcaagttcttgcgaaaggcaaaatggttgataaggcgattcaggttttctctagaatggtggaaacgggttgtcggccgaatgagtatacgtatagtcttcttttgaatcttttagttgctgaaggtcagcttgtgaggttagatggagttgtggagatttcgaaaaggtatatgactcaggggatatattcttatttggttagaacgttgagcaagttagggcatgtaagtgaggctcacaggctgttttgtgatatgtggagcttccctgtgaaaggagagagagatagttacatg

SEQ ID NO: 90727 - DNA, 442 bp, Arabidopsis thaliana columbia
aacaaaacaaaactaaacaagaaacagaggagaaaaaagggaaacgacgaggaaaaacaaaaacaaaataaaaacaagcctcgttcttcccttttctctcttcaaatcttttcttttacatattttcttttcttttttttgtctttaatacaaatttactaactaatcagaataaaaatgggttcgagtaagtttaaacgagccataggagccgtaaaggaccaaaccagcgtcggtctagccaaagtcaatggtcgaagcgcttctttatctgaacttgacgtagccatcgtcaaagccactcgtcacgaagagtttccagcagaagagaaatacattagagagattcttagcctaacttcttactcacgcagttacatcaacgcttgcgttagcacgctttcgagacgccttaataaaaccaaatgctggaccgttgccc

SEQ ID NO: 90728 - DNA, 561 bp, Arabidopsis thaliana columbia
  unsure (1)..(561): unsure at all n locations
acttaanaanccngtaaggcaaaaaannttnangntcccgggaagnannaaatnttgaccccaacccaaatacccaaccttttaaggaanaaccctttaaangtttttgggccttcctttgattcctttcaagcaagtttacatacccccgggtggaaaggaaattggaagattaggcccttnaagatccgggaatatgtttcctcaaagtcngcaatcaggcccttcaattgtcatcagtgacgatgtactgatgtccttgggattcaagccagtcacggattcctaaggcattctcgacgcagccaaggaagttagggttcttggtagcgtattcgttggccttgtagaaaactcctacaatctttttgctatcaccagaagatgcattaaactgacgtcgagcgaagtaacccgaagaagaagaggaagaacaggccctgatcgttgccttagcggcttgtctcatcgccatggttgagaagagataaatatcaatttggttactctttggtcgatttttgttttgtgtgaaatcagtaattggagcggacgcgtggg

SEQ ID NO: 90729 - DNA, 1666 bp, Arabidopsis thaliana columbia
  unsure (1)..(1666): unsure at all n locations
ttaggtacacctatagaagactatgacgtcgcctgcacgcgtacgtaagcttggatcctctagagcggccgccctttttttttttttttttttaaacaaatttaatatgcctttattcatttttatgtttatataatgagatttgaaaccattgagttcctacgattggggaaacaaatacatatgtgtgatttaaaccactgagtaatatgttcacaaactctcagaacaggggaagtgccctcctattattattgtgcttatataataacaaaaactaaaccaaaagatgactcaagtcattcgacttagcaaagtccaaatacttctttatttgttttcttgaacgttggggtcgtttctcatcatcttcccaatgtcacctcctcaaaagcttaccggtactgaggagcaagttcaccgtccttgacgatgtaattctcagtagggaagtcttctcccttgaagtatctctccaacatgtctttcgtccccgccgcataccgtagctgagcgtcaatggtggtgccggaggtatgaggggtcatagcctggttaggcatgtaacgccatggatggtccttaggagctggctgtgggtcccaaacgtctccgctgtaccctccaatgtgtccactctccaccgcatccaccactgcttgcctctccatgatggctcctcttgcgttgttcactatcaaaacgcctttcttcaatttccctatcaactctttgttgaacattcctcttgtcttctccgtgagaggcatgttgatgactataacgtcacatttagggagcatttcattcagatcctcaacgaacttagctccagtctctttctccagctctggtgccatctgaagcctgtcatggtacaacaagttacacccgaatggtttcaaccgctgcagcaaaagctttccgattcttccagctcccacggttcctatcgtcttcccttcaagatcataagctctgtacgcaatgcccgcgacgttccactcgcctttgacgacctggttgtaccctggtacgaagttgcgcatgaggattaagattctcatgagctcatcttctgccactgagaccacgttgcttcccgtgacttcagcaaccgtcaggccagcagctgcagctgcctggagatcaatatgatccgagccaataccagctgtgaggagaagcttcaagtttttggctttcttgattctttcagcagttacatacgccgggtggaagggagtggagattaggacgtgaagatccgggatatgtttctcaagttcgcaatcagggccttccttgtcatcagtgacgatgtactgatgtccttgggattcaagccagtcacggattcctaaggcattctcgacgcagccaaggaagttagggttcttggtagcgtattcgttggccttgtagaaaactcctacaatctttttgctatcaccagaagatgcattaaactgacgtcgagcgaagtaacccgaagaagaagaggaagaacaggccctgatcgttgccttagcggcttgtctcatcgccatggttgagaagagataaatatcaatttggttactctttggtcgcggacgcgtgggcggacgcgtgggcggacgcgtgggtcgtcccggnaattcagnnnnnnnnnnnggagtatcat

SEQ ID NO: 90730 - DNA, 1523 bp, Arabidopsis thaliana columbia
  unsure (1)..(1523): unsure at all n locations
gataaaagccattttgatttgtcgttttaatgccttccatttttaaaaagaaagattactagcgccgactctctaaaactctctcaaaccataaaaaatattctccgatcatcattttaatggagagtacagattcttccggtggtcctccgccgccgcaaccaaacctccctccaggattccggtttcatccaacagacgaagaacttgtaattcattacctcaaacgcaaagcagattctgttcctttaccagtcgcgatcatcgccgacgttgatctttacaaatttgatccatgggaacttcccgcgaaagcttcgtttggagaacaagaatggtattttttcagtccaagagatcggaaatatcccaacggagctagacctaaccgagctgcgacttccggttattggaaagcgactggtacagataaaccggtgatttcaaccggcggtggtggtagtaaaaaagtgggagttaaaaaggctctagtgttttacagtggtaaaccaccaaaaggagttaaatcagattggattatgcatgaatatcggttaactgataataaacctactcatatttgtgacttcggcaacaagaaaaactctctcaggcttgatgattgggtgttgtgtcgtatctacaagaaaaacaatagtacagcatctagacatcatcatcatcttcatcatattcatctagataatgatcatcatcgtcatgatatgatgattgatgatgatcgattccgtcatgttcctcctggtcttcacttcccggcgattttttctgacaataatgatccgacggctatatatgatggtggcggcggcggatacggaggtggaagttactcgatgaatcattgtttcgcatctggatcaaagcaggagcagttgtttccaccggtgatgatgatgactagtctaaatcaagattccggtattggatcgtcgtcgtcacctagcaagagatttaacggcggcggcgttggagattgttcgacttctatggcggcgacgccgttaatgcagaaccaaggtgggatttaccaattgcctggtttgaattggtattcttgaaaacaatttacgatgaagaatttttaaaatttgtgtatatatatacggtttgagtgattagggggcattgggggattttatttacggttgattattattgtagtgttatagaactaaggagattaaattaaatagattggaggagaggtataaggtaacatatagaaattatacaacaatagtttaaatattcttttcttttctttttcatgttattatttttactaatgtataggtgatgattatacttagatgtttgtagcttgtataaattaatgcatgcatatatataaaaatatattaaccaaaaaaaaaaaaaaaaaaaaaaaaaaaggnnnnnnnnnnnnnnnnnnnnnnnnnnnnnnnnnnnnnnnnnnnnnnnnnnnnnnnnnnnnnnnnnnnnnnnnnnnnnnnnnnnnnnnnngagacctgaagtatcat

SEQ ID NO: 90731 - DNA, 639 bp, Arabidopsis thaliana columbia
agaaagcccaaaacccagaagaacaaaaaatctctcttttgaaaattctccttttgcaaatcattcaagtgaagcacaatcatcttcttcttcttctccagcttcatcaatctcttctagactttttgcgtttacctgaaaaactgttttgatcttttctgataactcttctcagatgagaagttctaagttacttcttctcaagttcttcttcttcttcttcttcaatctgacttcgcttgagtatcaagttgatggagcatttgttggaacatatgggataaattatggaaggatagctgacaacataccatctccggagaaagtagttttacttctaaagcaagctaaaattcggaatgtgcgtatatacgatgtagatcacactgttcttgaagcttttagtggaactggtttagaccttgttgttggacttcctaatgggtttttaaaagagatgagttcaaatgctgatcatgctttcacttgggttaaagaaaatatccagtctttcttacccaagactcggattcgcggtatcgctataggtaacgaagttcttggaggcggtgattctgagctcgcgggagctttacttggtgctgctaaaaatgtgtacaatgcgttgaagaaaatgaa

SEQ ID NO: 90732 - DNA, 636 bp, Arabidopsis thaliana columbia
tgatacgccggacctatacgacttacttagggaaagctggtacgcctgcaggtaccggtccggaattcccgggtcgacccacgcgtccgcggacgcgtgggaaactcttccccaaaaatttgcaaattcaacgactcgtctcggcgatgatggaacgaacctacggccgccgtaagccggggattccgaggaccctatcggactctctaaacgactctgtttctcagactgagtatctctcttcctcttcgtcgccggacatcgagcccattgattactctctccttcctttctccagtcaagagtcttcctctctctggcattcttcttccaggtcaaatttcagagaggattatccacagaacggaggtgttgtacggagggcgaaaagagtcaggaacggtgctgaggctgctgcttttacttccactttgcttgaggctcaggagtttggtgagctgatggagcatgaggatgaggttaactttgcgcttgatgggttgaggaaaggacaccagctcaggatcagaagagctagcttgtcctctctattgtcgatttgtgcatctcaacaccagcgtcgctccttgagggctcaagggatttcccaatccataattgatgcgattttgggtc

SEQ ID NO: 90733 - DNA, 538 bp, Arabidopsis thaliana columbia
cccacgcatccgccaacatcctaaaacccttttgatcaaaacatggcttccatttccagaatcttaccaacagatggcagattaagtcaatgcagaatcaacacctcgtgggttccttctacaaccagaactcaaactcacttagattttcccaagttagtttctgttagtaactctgggataagtttgaggattcagaatagtaaacctattagccctgtctttgctcttgaagcaacttcctccaggagggttgtttgcaaagctgctgctggtgtgtcaggtgacttacctgagagtactcctaaggaacttagtcagtatgagaagattattgagcttttgacaaccctttttccactttgggttattttgggaacacttgttggcatcttcaagccatccttggttacatggttggaaacagatctctttactctaggtcttggatttcttatgcgttccatgggtttgactcttacgtttgaagatttcagaagatgtttacctaatccatggacggtgggtgttggttttt

SEQ ID NO: 90734 - DNA, 610 bp, Arabidopsis thaliana columbia
  unsure (1)..(610): unsure at all n locations
atgctacgcgcgnnnnnnnnnnnnnnnnnnnnnnnnnnnnnnnnnnnnnnnnnnnnnnnnnnnnnnnnnnnnnnnnnnnnnnnccacgcgtccgcccacgcgtccgaaagcaggaaagaagcatatcaactttgttaaatcttgcctagcatttagcgaagtgaccatcccatctatttcatctcccacgaaacacttaaatctttatcttgaaactgctgaggttgcacttttaggtggtttgatttctcattcagatgaactggtcatgtcagctgttgagtatctagagaatgtagtgctgacagatggtttaaaatcaattgatatagatagtatggcctcggttatatgcaaattgtgcagcctcttggtaatgatcccaggtaatcccgagaaaggcgtgatggagatccttaaaagtatcttctctgctactcgctctagttcatgggcaacactgagagtaaaggtgaagattttctgtgctataatgtcactgttgtcgacactttctcaggacaatctgccttaccattctgccaatccagagataattggaaatgaattgctgttctttggtgattcatcatacaagcaggaacttgtc

SEQ ID NO: 90735 - DNA, 742 bp, Arabidopsis thaliana columbia
  unsure (1)..(742): unsure at all n locations
atgctacgcgnnnnnnnnnnnnnnnnnnnnnnnnnnnnnnnnnnnnnnnnnnnnnnnnnnnnnnnnnnnnnnnnnnnnnnccacgcgtccgggatctacacctctcctcagtctcatactcaaatcaataatccaaaccccaaaaaaaagaaaaccagagaagagagtttaaaaaatgagaggttcttgcaaagtctctatagttcttcttctggttttaatcaatggtgtgcttggagataacccttatagattcttcacctggaaaattacttatggcgacatttatccccttggtgttaaacaacagggaatattgataaatgggcagtttcctggacctcacattgacgcaatcacaaatgataatatcattatcagtgttttcaattacttgaaagagccttttctcatttcttggaacggagtgcaacagaggaagaactcatggcaagatggagtcgtagggacaacatgtccgattccaccaggcaaaaacttcacttatgtaattcaagtcaaagatcaaattggtagcttctactatttcccttctcttgccttccacaaagccgctggtgcatttggagccatccgtgtctggagtcgtcctcgcatccctgtcccgttctctccccctgacggtgatttctggcttctcgccggagatgggtacaaaaccaatcactatgttttgagacgtctactaaaagccggaaggaatctaccgaatcctgatgga

SEQ ID NO: 90736 - DNA, 435 bp, Arabidopsis thaliana columbia
acccacgcatccacatcatcgttagttacacatcatcgtcttcttcctctcgctccctctgatagcggggccctaaaatgctctcatgctgctactttccgtaaccaaatcccgacgaattaaccctttttttttttggggggataaaatcatcggagtctcttctctggttcggctgtgatgggtgcgagccggaaattacaaggcgagatagatcgggtgctgaagaaggttcaagaaggtgttgatgttttcgacagcatctggaacaagtggaatgtatatgatacagacaatgttaatcaaaaggaaaagtttgaggcggacttgaagaaggaaatcaagaagctgcagcggtatagagaccagatcaagacatggattcagtctagtgagatcaaagataagaaagtcagtgcatcttatgagcaatcc

SEQ ID NO: 90737 - DNA, 764 bp, Arabidopsis thaliana columbia
  unsure (1)..(764): unsure at all n locations
atgattcttcaggtctctacgactcactatatggaaagctggtccgcctgcaggtaccggtccggaattcccggggtcgacccacgcgtgcggaaaaaaaaaaaacgagatggaggaattccaatctcctagaatacgatcttacaaatcgtatgaaggagataggaacctccaactggttaatcctgcagatttaaaactggtcagagggatatatgttgttagagaatcgaggcgcaatcgatctccgataaaaacagatatatggcgcaagatgtcttacaaagacatgcccgttagaccgagaagatcttcttctcattcgacattgttcaaaggatggtggaacgatccggagataaagagaaagagacgagtggcgaaatacaaactctattcagccgaagggaagatgaagataactttgagaaagagttacaaatggattaagatccaatgctcgaagatcattcatggaatataggtctctctatctctactctgttttatctgtttagaagtttgttttgaaaaaaggtattaaatcatgtatcaaatttaatttattttattcattctgtaactatgttcattgtgtatttctatgacattcaattaacttgtacatccaaaaataaacaaatacgactatatttatatattgttatgatttttttaaaaaaaaaaaaaaagnnnnnnnnnnnnnnnnnnnnnnnnnnnnnnnnnnnnnnnnnnnnnnnnnnnnnnnnnnnnnnnnnnnnnnn

SEQ ID NO: 90738 - DNA, 444 bp, Arabidopsis thaliana columbia
  unsure (1)..(444): unsure at all n locations
ggccagtggttcaaggaagtgaggttgccgctaaccggttccatacaaaaatcaggtttttcccaaaataagtttacaggcttatctcccccctcccaaatttgattaggtttggggattttaaacccttttttgaaaggtatcatctcttcgaaccctattaaaaagtcccgagatgaagtttgtttgattggttattttcatgaagtttccggttattatcttgaccggttaaatgagtcaatttcccataagattatgcccttttaagtttggtttatggatgaagaatggcgataattgaattgttttgtnnnnnnnnnnnnnnnnnnnnnnnnnnnnnnnnnnnnnnnnnnnnnnnnnnnnnnnnnnnnnnnnnnnnnnnnnnnnnnnnnnnnnnnnnnnnnnnnnnnnnnnnnnnnnnnnnnnnnnnnnnnnnnnnnn

SEQ ID NO: 90739 - DNA, 757 bp, Arabidopsis thaliana columbia
tgcaaatggtattactactgtctcagcgaaagacaaagcaacaggtaaagagcagaatatcacaatcagatcttcaggtggtctctcagacgatgagattaacagaatggtgaaagaagctgagcttaacgcacagaaggatcaagagaagaagcaacttatcgaccttaggaacagtgctgatacaacaatttacagtgtagagaagagcttgagtgaatacagagagaagattccagctgagattgcctctgagatcgaaactgcagtgtctgatctcaggactgctatggctggtgaggatgtcgaggacatcaaggctaaggtcgaagctgcaaacaaggcagtgtcgaagatcggagaacacatgtctaaggggtctggatcatctggttccgatggaagctctggtgagggtacaagtgggactgggcagacgcctgaagctgaattcgaggaggccagtggttcaaggaagtgaggttgccgctaaccggttccatacagaaatcaggtttttcccaaaataagtttacatgcttatctcctccctcgcaaatttgattagttttgtgtatttaaaaccttatttgagaggtatcatctcttcgaaacctattgagagtcccgcgatgtagtttgtttgattggttattttcatgaagtttacggttattaaaaaaaaaaaaaaagggcggccgctctagaggatccaagcttacgtacgcgtgcatgcgacgtcaaaatcttactatag

SEQ ID NO: 90740 - DNA, 621 bp, Arabidopsis thaliana columbia
  unsure (1)..(621): unsure at all n locations
ctaatacgacttacttagggaaacctggtacgcctgcaggtaccggtccggaatttccgggtcgacccacgcgtccgcccacgcgtccggtcgaggacatcaaggctaaggtcgaagctgcaaacaaggcagtgtcgaagatcggagaacacatgtctaagggatctggatcatctggttccgatggaagctctggtgagggtacaagtgggactgagcagacgcctgaagctgaattcgaggaggccagtggttcaaggaagtgaggttgccgctaaccggttccatacagaaatcaggtttttcccaaaataagtttacatgcttatctcctccctcacaaatttgattagttttgtgtatttaaaaccttatttgagaggtatcatctcttcgaaacctattgagagtcccggatgtagtttgtttgattggttattttcatgaatttacggttattatcttgaccggttaaatgattcaatttcacataaaaaaaaaaaaaaagggggnnnnnnnnnnnnnnnnnnnnnnnnnnnnnnnnnnnnnnnnnnnnnnnnnnnnnnnnnnnnnnnnnnnnnnnnnnnnnnnnnnnnnnnnnnnnnnnnnnnnnngctgaat

SEQ ID NO: 90741 - DNA, 389 bp, Arabidopsis thaliana columbia
  unsure (1)..(389): unsure at all n locations
cagacgcgtgggcggacgcgtgggaaaacacaaaaaaaaataaaacctttctatttctcttcctcctttgagctttgacctctcctccatctcccccacccttttatgcaacaatgggaaattgttgctctcacggacgggactcagccgataacggagacgcattggaaaacggagcttccgcttcaaatgctgccaattcgactggtccaaccgcggaagcttctgtaccacaatcaaaacatgcacctccttctcctcctcctgcaaccaaacaaggccctataggccctgtcttaggtcgacccatggaagatgtaaaagcttcatattctttanggaaagagctcgggcgaggccaatttggtgtcacacacctctgcacacag

SEQ ID NO: 90742 - DNA, 490 bp, Arabidopsis thaliana columbia
  unsure (1)..(490): unsure at all n locations
cggcacgaggagagaactagtctcgagtttttttttttttttgttggtggagacgaacaacaacaacaccaacagaagacagaaatggcaaccgcagctctctccgccgcccgacccaaccgccttagctcagcctcctccgatgttcctctccaccccctatatctccctaccaagctccaatttccttcccgtaagactcagctgtggcgctccgccgcgattcttttacccacacggcggcgatgcgctccgcctagagctagttctcgcgccgacgattctccacccttcgatatgtctgtggagacggcgcttaaggttctcggtgtctccgaaggcttttcccttcgaccggaaattcttcggtgccaaagaaaatcggttcctggggtttttggtaaaggaccggccctaaaggtcatttttttaaggcttgagggttgcaataattgaaaagctttcttgattnaagagcctttaaaccaac

SEQ ID NO: 90743 - DNA, 1139 bp, Arabidopsis thaliana columbia
  unsure (1)..(1139): unsure at all n locations
nnnnnnnnnnnnnnnnnnnnnnnnnnnnnnnnnnnnnnnnnnnnnnnnnnnnnnnnncggtccggaattcccgggtcgacccacccggcggagacgaacaacaacaacaccaacagaagacagaaatggcaaccgcagctctctccgccgcccgacccaaccgccttagctcagcctcctccgatgttcctctccaccccctatatctccctaccaagctccaatttccttcccgtaagactcagctgtggcgctccgccgcgattctcttacccacacggcggcgatgcgctccgcctagagctagttctcgcgccgacgattctccacccttcgatatgtctgtggagacggcgcttaaggttctcggagtctccgaaggagcttccttcgacgaaattcttcgtgccaagaaatcgatcctggcttctcgtaaggacgaccccaacgccatctctcaggctgaggctgcatatgacatgctgctgatgcagagcctaaaccaacgccgagcaggaaaagttgtaagcaacaacattcgctacgctgatgttaaatctagtaaccctctgggaacaagtactgtgactcagtggatgaagaatccacctgtctctgttgatatgccttccacgagcgatctcgggatacaagctggagtctatggagccatgatggttttgacttatgtgaatgggagttcctttgaatcttctgggatgccttatgctggtgctgatgtgcccggacttatattggctagcagctttggggcttccctatactttatgaccaaaaagaaagtcaagctagggaaagcagctgcgttgacggcaggaggattagtggcaggtgcagtggtgggatcagccattgagacctggctgcacgttgatgtggttccgtttctgggtctccactccccagctgcagtcgtgagtgaattcatagtattctctcagttcttggtgtctctatgcttaaggtagaactttgtacattggcttatgcaaatttggctcaacctgtcacgctggtatatgtacttcgtttatatgcattttgtacagaacactcaaaagtaaacaactcttagacatccattttcatactcaaaaaaaaaaaaaaaaaaaggtcgt

SEQ ID NO: 90744 - DNA, 565 bp, Arabidopsis thaliana columbia
aaaaagatggaacctcagagaaaacactcgacagccctccacacgtgtcatccctgccggcgaaccattccatacagagatctgacgccgtatttcacacgtgtggcatcatagctctcatgtatcaccatgtacactcaattgtcaacgcaaacaacactctaataacatgtcttcttctcctctccgatattgttctcgccttcatgtgggcaaccacaacttccctccggttaaacccgattcatcggaccgagtaccctgaaaaatatgctgctaaaccggaggactttccaaagctggacgtttttatatgcacggctgatccgtacaaggagcctccgatgatggtggttaacaccgctttatcggtgatggcttacgagtatccgtctcataagatctcagtgtacgtatcggacgatggaggttcgtccttgactttgtttgctcttatggaggcagctaagttctctaagtattggttgcctttttgcaagaagaataatgttcaagatcggtctcctgaagtttatttctcatcaaagttacgttctcggagtga

SEQ ID NO: 90745 - DNA, 1007 bp, Arabidopsis thaliana columbia
  unsure (1)..(1007): unsure at all n locations
nnnnnnnnnnnnnnnnnnnnactagagggacagctggtacgcctgcaggtaccggtccggttattcccgggtcgacccacgcgtccgtacggctgcgagaagacgacagaagggtacggctgcgagaagacgacagaagggtacggctgcgagaagacgacagaaggggatagccacaaaacttttttctttcatcctctaaaaaaaatctttctggtgagtaacgaaaaaaatgtgtccggtggagaacaaatggttaaaggtgggtcaaaaaggagctggtcctggggctagaagctcacatgccatgaccgtcgttgggaacaaagtttactgttttggtggtgagcttaagccaacgatccatattgataacgatctttacgttttcgatcttgagactcaagaatggtcgatagctcctgcgaccggagaggctcctttcccctgttttggtgtctcgatggtaacgatcggttcaacgatctatgtctacggtggccgtgacgataaacggagatacaacggtcttcattcgtatgatactgagaccaatgagtggaaattgttggctcctgttgaggaagggcttcctggtcgtagctatcattcaatggctggtgatgatcggaaagtttatgtgtttggtggtgttactgctaaaggacgtgtgaatacgcttcatgcgtacgatgttgttgatcacaaatgggttgagtatccggcggctggggaagcttgtaaaggcagaggagcgccagggcttgtggttgtggaagggagaatttgggttttgtttgggtttgctggttttccaccgggaaatggagggagttttgtcttggatttgattgataaatttggtgtgtttcttctgatcttttagactattgaacttattgatcaaaaaagttagttcccccgaaaaaccaaaaataaaaaaaaaaaaaaaaaaaaaaagatagcggccgctctagaggatccaagcttacgtacgcgtgcatgcg

SEQ ID NO: 90746 - DNA, 523 bp, Arabidopsis thaliana columbia
ctctatacgactcactttagggaaaggtggtacgccttgcagggtacccgtcccgaatttccgggttgaaccacgcggtccgacccggctctgtttcaataaaaaaaatcccctccctctcatatttacctcccgaataaaaccggagggagagaaaaaacataaaaagcaaaaaaaaaggtaaaatcaaaaaggggaaaaatatataacaacaaaaaaaaaaagttagaaaaaatggcagtaggaaaggttgtggtatctgtggcatcactcctcctagtggtgggtgttgccataggagttatcacgttcgttaataaaggaggcggcgccaatggcgacagtaatggtcccataaactctcatcagaaagcggttcagacaatttgccagtcaaccacagaccaaggttcgtgcgcgaaaacactcgacccagtcaaaagtgatgatccaagcaagctggtcaaagccttcctgatggctactaaagacccgatcacaaaatcctcaaacttcacggctt

SEQ ID NO: 90747 - DNA, 794 bp, Arabidopsis thaliana columbia
  unsure (1)..(794): unsure at all n locations
nnnnnnnnnnnnnnnnnnnnnnnnnnnnnnnnnnnnnnnnnnnnnnnnnnnnnnnnnnnnnnnnnnnnnnnnnnnnnnnnnnnccacgcgtccggtgattcatatcaagcaacaggatgttacaatcttctatgttcgggatttatccaaacaaataacaagattgccattggagcagccatatctcctctttctacgttcaaaggaaaccagtttgatatcacaatactcatttggaaggatccgaaaatggggaattggtggatgggtttaggggatagcacactagtcgggtattggccagccgagctattcacgcacttggccgaccacgcgactaccgtggaatggggcggtgaagtcgtcaacacacgtgcttcaggcaggcacacgacgacccaaatgggctctggtcattttccagacgaagggtttgggaaagcaagttattttcggaatttggaagttgtggattcggacaacagtctcgtaccggtgcatgatgtcaagatactagccgagaacaccgaatgttacgacattaagagttcgtatagtaatgaatggggaacttatttttactatggtgggccggggttgtaatcctaggtgtaattgatattagagtgtacatagttcgggttggaggagtggaggaaaaaatagagggggtcgatatatgtattttttttcaagtatgggtagtggaagattgaatactgccgtcctgtttttgccttgtcatatagttcgcgcccccccattcgatatctagcttatcgataccgtcgacc

SEQ ID NO: 90748 - DNA, 928 bp, Arabidopsis thaliana columbia
  unsure (1)..(928): unsure at all n locations
tgannnnnnnnnnnnnnnnnnnnnnnnnnnnnnnnnnnnnnnnnnnnnnnnnnnnnnnnnnnnnnnnnnnnnnnnnnnnccacgcgtccgcggacgcgtccgcccacgcgtccgcccacgcgtccggcagcgcgaatcagagatcttttcaatgcagcaaggaaaaactcaccttccattatattcattgatgagcttgatgcggttggaggaaaacgcggtaggagtttcaacgatgaacgtgaccagacgttaaaccagttgcttactgagatggatggattcgagtcagacacgaaagtcattgtaattgcagcaactaaccgaccagaagcgttagactcggctctttgtcggcctggaaggttctctagaaaagttttggttgcagaaccagaccaagaaggccgtcggaaaatcttggccatacatctgagagacgttcctttagaagaagatgcatttctcatatgtgatctggttgcttctttaactcccggatttgtaggtgctgatctcgccaatattgtcaatgaagctgcattgcttgctgctcgtagaggcggagaagcggtggcacgggaagatataatggaagctatagagagagcgaagttcgggatcaatgataaggaagcgaggccaaggacgttaggaaatgaactcagcaagatgttcccatggatgccatctttggctagaagaaacggaccagatcaagacggtttacaaggacccgttaggttatcaaaactctcagcttaaaccaaacccaaggcagccccgttagagggcaaatcccctttgttaccaagtttctttgtatctgaaaatcttttgggaaatgtacgtttttttgtgtgtttacattgcaaagtcaattgctttttggttcgtagtaccttccaatttgacaaatctcttagat

SEQ ID NO: 90749 - DNA, 370 bp, Arabidopsis thaliana columbia
ttgggattagggttcttcgagtggcagattatcttatggttatcgattgggttggcgatttcgcaacaagcgctgggattgagacctattagggagaaacctcgatcatggagtgacgagtggctctttggtaggaaacaagaagctgaacttggacccttttctgcttggaatataacagagaacttatagaggaacttggaagtttctgaattccttaactagcgcttcgaagtttcaagactttcaataggtagctggtaattctgtggttgagtcagtagcacttccaacgacgatacctggtgtgcattatgttcagggtgtagttgttttccatgacgtatttgacaatgaacaaaatgtgggt

SEQ ID NO: 90750 - DNA, 621 bp, Arabidopsis thaliana columbia
  unsure (1)..(621): unsure at all n locations
nnnnnnnnnnnnnnnnnnnnnnnnnnnnnnnnnnnnnnnnnnnnnnnnnnnnnnnnnnnnnnnnnnnnnnnnnnnnnnccacgcgtccgatttggtgttgtatatgttggatctacatcagtgtatctgaagctggagttcactgtgatataattgcccgtgaactcaggattccgctgcttcaagtcaaggaagcgttagaacagctctcaaacgatggttgcatatactcgactttggacgagacatgcttcaaatcgactgctaacgcttgatgaaaattgatttatatgtcaacacatatcaatcctcctctcatgttcaaaagtcttttgtataggccctaaggtaggacaatatgtagttttaagactaaaaatctttcttatggcttttggatttttttaaagggaactaaactcanaagttcanaatcattttcgtcacttgaaaaaaaaaaaaaaaaaaaaaaaaaaaaaaaaaaaaanagggggggacgctgtagaggatccaggctcaacgccgccggcccgcggacgtcctacctcttctttattgtcacctaaatccaatacactggccgccggtttacatcgtcaagactggaaaaaccctgacgta

SEQ ID NO: 90751 - DNA, 934 bp, Arabidopsis thaliana columbia
  unsure (1)..(934): unsure at all n locations
gctctttttgctcttagatcttccctctcggccggacccggcggcaaaatttgtatgctttattcgatttaatgtctttgatacacttgttcttgttgttgggtctgctgagccttgaagctgcggcgtcgttttcaccgggatcgcgctcgattctccgggacatcggcagtaacgtcgccgatcagaaagacaacgctatcgaattgaacgctaccaactttgattcagttttccaagattcccccgccaaatatgccgttttagagttcttcgctcactggtgccctgcatgtagaaactacaagccacattatgaaaaagttgcaaggctattcaatggagcagacgcagtatatcctggtgtcgttttgatgaccagagttgattgtgcgataaagatgaatgtaaagctttgtgacaagttctctatcaatcattatccaatgctcttttgggctcctcctaaaaggttcgttggtggcagctggggacctaaacaagagaaaaatgagataagcgtagtcaatgaatggcgcactgctgatcttttgttgaactggatcaacaagcagataggcagctcttacggcttagatgatcagaaattaggaaatcttctgtcaaatatatctgaccaggaacagatttctcaggccatatttgacattgaggaggcaactgaagaagcttttgatatcattttggcacataagggttctgcagcttttagtggcacatccatccatccaagaaggtgccgtaccggnagtgctgaaatccttgtgaattttgntgntaaatgcccggcagncgaatncccggatgnccaggaacctggagcgaaantncccctcggaactcccaaaaagnggaagggtgtccncgngngacanngggttccgggggggcaaacaacngggggtcccngggc

SEQ ID NO: 90752 - DNA, 502 bp, Arabidopsis thaliana columbia
ctctattatgctcttagatcttccctctcatccggatcaagcttcaaaatttgtatgctttattcgatttaatgtctttgatacacttgttcttgttgttgggtctgctgagccttgaagctgcggcgtcgttttcaccgggatcgcgctcgattctccgggacatcggcagtaacgtcgccgatcagaaagacaacgctatcgaattgaacgctaccaactttgattcagttttccaagattcccccgccaaatatgccgttttagagttcttcgctcactggtcagttttctcattctctctctctctcgtaaaaaatctgaaaaaaattcaaactttaggcttttaagcactggatcttacacggaatttgtttgcaagtgttcttcatattcgaacctgactttacgttatccaattctctgagatttatccggaaataacttaactttatatataaatgcgaaaggcttgtatactgacattgacccataatttttg

SEQ ID NO: 90753 - DNA, 524 bp, Arabidopsis thaliana columbia
  unsure (1)..(524): unsure at all n locations
nnnnnnnnnnnnnnnnnnnnnnnnnnnnnnnnnnnnnnnnnnnnnnnnnnnnnnnnnnnnnnnnnnnnnnnnnccacgcgtccggtcgatttccttctgcattgcttttccttccttttggaggaatttttaggtctcggagttttgatttcgacctttaaattttgcttcagaggagagattctatccgttacagttcgtgaatttcgcgtttgaagaacttgaacttgattctgaagaatgtcaggtcgagaacaaacaggagagaaactatcagattctgagtacatagaagaagagccacggcgttctagaattgggaatttgaagaagaaggcttttagttgttcaactaaacttacacatcctttgaagatgagaaaaggcaaacgtaaaatcgatttccagattcctttgattgaagatgttagagatgagaaagaggagaagcttgtttctaaattgcgtcaacaacttctttagaaagatttgttgcctccagtacatgatgattatcatatgtt

SEQ ID NO: 90754 - DNA, 664 bp, Arabidopsis thaliana columbia
  unsure (1)..(664): unsure at all n locations
ttgacgtcgcttcgccccttccgtaagctcggatttcggttcgaggattctctgagatttccccaatttttcatcttcttcgagtgattagtacagattagggttttattcgttattattgtctatattactccttgattgtggtcgatgacctcgctacttcttctcagaacgcttccgcttctccgcaacggatttctcaaccatcgtcatcaagttggtatcgtagctggtggaattctcagtcaccgtcggcgtttgttgtgttctcttgctgatagaccacagttttacgagaataatgattctgtttctccggtggagggatccggcgcggcggcgatgaacgtgacatcgcctgttgttgataatagctggcgttatgaagatcctgattatcggaaatggaagaatctagaggctgagattcttcgagatattgaacccatttcctcttctcgctaaagatattcttcaattccgatagggattttggattgggaacccttagnattttaangggttgngaaaattttcaatggaaaactntttcctatnacccnnttncaaagcaaaatttggttgggccttnntttnaaaagggttaccggaccccaatttnggccnaaaggnccctttttttanacaatggggngnaagtctg

SEQ ID NO: 90755 - DNA, 510 bp, Arabidopsis thaliana columbia
  unsure (1)..(510): unsure at all n locations
nnnnnnnnnnnnnnnnnnnnnnnnnnnnnnnnnnnnnnnnnnnnnnnnnnnnnnnnnnnnnnnnnccacgcgtccgcggacgcgtgggcaaaaccagatcaagcttctttcaccattttcactcttctttaagctttctttcttaatttctctcatttcgaattttaaacacaaaacctaaacgatgcctgaggcaccaaagatcgcagctttggaggtttctgatgagagcctcgctgagaagaacaagaacaaactccaattcatcgaagacgtgaccacgaacgcagatgatgttcagagacgagttcttgaagagatcctttcacgtaatgctgatgtggagtatcttaaacgacacgggctcgaaggacgaaccgatcgtgagactttcaaacatatcatgcctgtcgtaacttacgaagatattcaacctgagatcaacagaatcgccaatggggattaggtctcagtccctctgttctaaccccatctctgagttcctaccag

SEQ ID NO: 90756 - DNA, 473 bp, Arabidopsis thaliana columbia
gtgactcttctctctcttcctctccatcaatggcgaccacaaactctttccaccaccaccaccactcctctccttcttacacacaccaccgcggcaatctccattgccaatctcacttcggaccaacttctctttccctcaaacaacccacttccgccgcaacattctcactaatctgctctgcttcttccacctcctcctccaccaccgccgtatctgccgtttcaaccacaaacgcctccgccacaactgccgaaaccgcgaccatattcgacgttctggagaaccatctcgtcaatcaaaacttcagacaagccgacgaggagacacggagattactcattcagatatccggagaagccgccgtgaaacgtggctacgttttcttctccgaggtgaaaacaatctcccccgaagatcttcaagctatcgacaatctatggattaaacacagtgattgtagattcggatac

SEQ ID NO: 90757 - DNA, 529 bp, Arabidopsis thaliana columbia
  unsure (1)..(529): unsure at all n locations
atgatctgccggcannnnnnnnnnnnnnnnnnnnnnnnnnnnnnnnnnnnnnnnnnnnnnnnnnnnnnnnnnnnnnnnnnccacgcgtccgcccacgcgtgcgaagaaatctcgtttcatccgccattaacgacctctcaagatttgtttccgtcgcgaagtatgtaccggccgggtgcagtctgggggaaacttggttatgttgtttaaaggatgcagacggtttgtgagaacaacgtgtcgcgtttcgatccctggtggttctttggggaatgaatcaaaagcacctccaaggtttctgagggatagaaagattgttccagatgctgatccccccaatatggaagatatccacaagttgtatcgactctttgagcaatgctcgagactcaccatcttgactggagctggggttagcacagaatgtggaattccggattacagaagtccctatggagcatacagttctggattcaaaccagttacccatcaggtgatctgaaggagttcactctatcaagccgagctc

SEQ ID NO: 90758 - DNA, 287 bp, Arabidopsis thaliana columbia
agtcttggaccacatcgttaatcaatgttgtttgttgtttgatgtttactttttttttttactcagttttgaaaattcgataagtattctagctctagaattccatatctaggttttttgttttctcctagatagtctgaagaatcaattgtaatggtctgtggaattacacggaaacagttttgttgtaataatggagcatcagttttctttggttgaatgaaaaatcataatttttttgccttaaaacaaaaaaaaaaaaaaaaaaaaaaaaaaaagggccgggc

SEQ ID NO: 90759 - DNA, 876 bp, Arabidopsis thaliana columbia
  unsure (1)..(876): unsure at all n locations
cagctctctacgactcactattgggaaagctggtccgcctgcaggtaccggtccggaattcccgggtcgacccacgcgtccgcttataattaaagaaccataaagacgaacacaaaagaaactctcacattctcaagagtttctttcttctttcaatggctttactaactttcttgccggagaacgcagaggcgccacaaaaacacaagccaacgtctagcaaacgaaagaaacgcgataatcccaccgaccaaacgcagacacagaaacataaaccgcagaaaccgaagaaagcagtacctccgaagcagccatcttcatgggaccaaatcaagaacctattgacttgcaaacaaatcgaagggtcaagagtccatgatccttccaagaactctcaatctggtccgtccatgacaactaacttatctccttccaagcttggctcgtcgtgcagctccatttgcagctttagagacgtggctcacggcaacactcgtgtggttcatagagctgatcactcaccagacgtaggtaactcggctactcctaactcggagactcggcttctgactcggaaacctggtcaacacggttcttcttcgtctcggtctcttacatctggctcaacgagatctaacgccagtgggagttacacgtcatcgtcaacgacttcgtttagagccatgcagttccgtaaactctccggatgttacgaatgtaacatgatcgttgacccgggcagggatccgatttcgcctaggggttgtncttgtncccaatntggngnaggttttcccaaggttnaaantttngngtnatcaagcagttgtaaggagtttcggagtnaggnccgagggttcgggcgaaaaaaagnna

SEQ ID NO: 90760 - DNA, 562 bp, Arabidopsis thaliana columbia
  unsure (1)..(562): unsure at all n locations
nnnnnnnnnnnnnnnnnnnnnnnnnnnnnnnnnnnnnnnnnnnnnnnnnnnnnnnnnnnnnnnnnnnnnnnnnnnnnnnnnnccacgcgtccgggaatagaaattctcgctttggtagaggaaacttgttgtctgcaaggaaatggttgagcggatggtagttgataactaacctcagttttcctcgtacttgttcagctctgtttgttaacatagaaggtttcacatgcccatggggaggtggtcttctcaatgaggtcttctctttggagttggtcgacttcttcgagagcaagattatagtggtttggattcattcctggaaggcttgcttgtgttggatgacatcctcattcttcttgaagggtaatgatatgaaaaagtccggattctttcataaaggtgatgaaaatttggtgaggaactctgaatgtgaagtagcacaagaagccttgataatctcgtctttgatagaatttcatattccatggggtagagatgggagacattagtccatggtagcagttggttcttgtgcttaagtctttttggattccaagat

SEQ ID NO: 90761 - DNA, 531 bp, Arabidopsis thaliana columbia
ttcaatttgtttccaaataacattctctctttaacacagccgcctttgtgaccgtccgatcttaaatcagcgtttccggttcatttgacggcaactatctctctctctctctctagagaattgatgaagaagagcatctatcttttttgtttttgaaaattaacaacacttcacgagggttgacctgtttcggtggtgtttcttcaattccggattttgatctttcgtttcgatcgaagatcaatcaaagtctccacctttcttcaatggatttggatagcatggactgtacatcaaccatggatgtgacagatgatgaagagatccaccaagatcgccattcctacgcttctgtttccaagcatcatcatactaataacaacaccaccaacgttaatgctgctgcttctgggcttctccctaccaccaccagtgttcatgagcttctcgaatgtcctgtctgcaccaattctatgtaccctcccattcatcagtgtcacaatggacatacgttgtgttcaacctgtaaag

SEQ ID NO: 90762 - DNA, 598 bp, Arabidopsis thaliana columbia
  unsure (1)..(598): unsure at all n locations
nnnnnnnnnnnnnnnnnnnnnnnnnnnnnnnnnnnnnnnnnnnnnnnnnnnnnnnnnnnnnnnnnnnnnnnnnnnnnccacgcgtccgcgtggtggtatcagcaaggcctctcgggtcatcaatattagtgaagatatatttgctggtttcaacacaactctacgtcaagggaatgttactcatcatgagtatattcaggtgggcaaagggcgatgatgttgggctcaatcaaatagctctgtttgaagggaaggttgctggtgggaatggtgaacaggttcttagtcgagatgtatacagacttggccagctccttgatttcttccgtatgatgtcattcttctttacaaccgttggcttctatctatgtacaatgttgacggtgcttactgtgtatattttcttatatgggagggcatatctggcactttctggagttggagctactattcgagaaagagctattcttctggacgatactgcacttagcgccgccttgaatgctcagtttctgtttcagattggtgtcttcactgctgtgccaatggttttgggatttattttggaacagggttttctccaggccatcgtcagttt

SEQ ID NO: 90763 - DNA, 601 bp, Arabidopsis thaliana columbia
  unsure (1)..(601): unsure at all n locations
nnnnnnnnnnnnnnnnnnnnnnnnnnnnnnnnnnnnnnnnnnnnnnnnnnnnnnnnnnnnnnnnnnnnnnnnnnnnnnnnnnccacgcgtccgcaaaaccgccgcaaaatcctctaatgacaactaacgcggttaacggaattaacccggaccggtttcgtgatccgaccaccgcgtggcttggacgtgacggagaatggcgagtaatcgtcggaagctcgacggacgatcgacgaggattagcgattcgttacaaaagcagagatttcttcaactggacgcaatcaatgaagcctttacattacgaagacttaaccggaatgtgggaatgtcctgattttttcccggtttcgataaccggatcggacggtgtagaaacgtcgtcggttggtgagaatgggattaagcatgtgcttaaagtgagtttgattgagacattgcatgattattacacgattgggagttatgatcgtgagaaagatgtttacgtaccggatcttgggtttgtgcaaaacgaatcagctccgaggttagattacgggaaatattacgcgtcgaaaacgttttacgatgatgttaaaaaacgaaggatcttgtgggg

SEQ ID NO: 90764 - DNA, 835 bp, Arabidopsis thaliana columbia
  unsure (1)..(835): unsure at all n locations
nnnnnnnnnnnnnnnnnnnnnnnnnnnnnnnnnnnnnnnnnnnnnnnnnnnnnnnnnnnnnnnnnnnnnnnnnnnnnnnnnnnccacgcgtccgcacgctttgggagtgaaaaagattgcagtaccatccctgcaaccgcttggttgtctccctcccttcacattcgtaacctcgttccagcgttgcaacgagacacaaaacgctttagttaacctccacaacaacttattgcagcaagttgtggcaaagctcaataacgagactaaacagtcgactttcatcatccttgatctctacaatgctttcttgactgtgttcaagaacaaaggatctaatccagggagtacaaggtttgagagtccattaaaaccgtgttgcgtaggtgtgagcccgcgagtataactgtggaagtgtggatgagaagggagtgaaagaagtatattgtatgtgataatcctaaaactgctttcttttgggatggacttcaccctacagaagaaggatggagatcggtttactctgttttacgcgaaagtcttaccgcgtctttgattaaagcgtgagaaacaaaagaaaccccccttttgcttaggttttttcttatgaagctcaatgtttgagcgctctgttcctgttttcagtatctcttcattcatttgtgtttgtgtgtttaaagattgtgtgactaataaaatctcttaactggttcaaaaaaaaaaaaaaaaaaaaaaaaaaaaaaaaaaaaacccaaagggcgaccgctctagaggatccaagcttacgtacgcgtgcgatgcgacgtcatagtcttctatagtgcacctaatagaatcg

SEQ ID NO: 90765 - DNA, 420 bp, Arabidopsis thaliana columbia
  unsure (1)..(420): unsure at all n locations
gaaaacatgaatcanctctctctccctctctccggttccacagtaaagaattgattcctcaatctcacgcggaagcaaaatccaaattctaaaattctaagaaaccactctaatcacatcgctctatcgatcaaaagcgaaacccttattcaaaaatctcttattttttccatttttctctcaatcatctgaatcggttttgagatgagctccgattcaccggcggctggagacggtggcgaacaagccgctgcggcgaacaaagcgtgccttcaccttcatacggcaaacagtagggtgaaggcacgtgtgagtaggaccatctctggttactatggcacgcgcagccagtacggccgcagctgcaagttcgggaactcttggaggaagatgcgactttggttcacgctagagactatg

SEQ ID NO: 90766 - DNA, 432 bp, Arabidopsis thaliana columbia
  unsure (1)..(432): unsure at all n locations
tccaatttgatgtcgagaggtcaataaagtgatgagctttttgtgattttttcctcattcaaaatctttgcactttttcactctccttcaatctcaaatttctgagtctttcttggttcactttccttaaacacgatttgacatggatgcaatttcatctcttggaaccaattgtgttctttctggggtttctccattttcacaagagaatcaatcaaaatcgaaactttctccgtttatgagtcttgatttgaaggaacatccaatggcttcagcagatttcaccaaccaaaccttaaccgctttctcttcttcctctgcgtctccttttcaggcaaagacatcatcgattttttggtttccnttaaanccaaacctttgggggctttanagggtcccnaaattggcttgggnttgaaaangggnaggttc

SEQ ID NO: 90767 - DNA, 1116 bp, Arabidopsis thaliana columbia
  unsure (1)..(1116): unsure at all n locations
gacccacaacgtccgcggacgcgtccgcccacgcgtccgctgagtctttcttggttcactttcctgtaaacaccatttgacatggatgcaatttcatctcttgggaccaattgtgttctttctggggtttctccattttcacaagagaatcaatcacaatcgaaactttctccgtttatgagtcttgatttgaaggaacatccaatggcttcagcagatttcaccaaccaaaccttaaccgctttctcttcttcctctgcgtctccttttcaggcaaagacatcatcgattggtatgagtagaggaatgagatggtgggagaagtcaacaaatcacaacatgttagagattcaatctgccaatcatcttgttgactctttgttaaacgctggagatagattggttgttcttgatttctactctcctggttgtggtggctgcaaatctctccacccaaagatatgtcaattggcagaaacaaacccaaatgtgatgtttctgaaagtgaatcaagaagagcttagaacaatgtgtcatggtctaaacgttcatgtgctgcctttctttaagttctatagaggagcagagggtaaagtctgtagcttcagctgcactattgcaactatcaataagttcaagaaagcgttggataagcacggtagtgaaaagatgcagcctcggggatgcaaagggattagacgagaaggaactcgcggctttggcatcggttggtgaactgaaaatgaattctttaacaatgcatcaagctagcaacattggttataaaacagaggagcaatatcaaacgatggtgttataaagagatgacttttttcattaaggttcttattgaattgtagatattagtattatttgtgcttggtttggcacttacattcattttagtttcacaccattactaccagtggcaatttcaattaactgataagattgaatcaatctttggctcttatgattatattgtgataaatcttgtagcttcaacttttttaatacaatctcttttacaataaaaaaaaaaaaaaaagnnnnnnnnnnngtgtacctannnnnnnnnnnnnnnnnnnnnnnnnnnnnnnnnnnnnnnnnnnnnnn

SEQ ID NO: 90768 - DNA, 1042 bp, Arabidopsis thaliana columbia
  unsure (1)..(1042): unsure at all n locations
atgattctccaggtctctacgactcactattgggaaagctggtccgcctgcaggtaccggtccggaattcccgggtcgacccacgcgtccgcaataagcagcatctctataatccctaagattcacaatggagcttggaggaaaatgcaatgcaattacaaccacaacaatgatctcaacagaagtaaagccacatacggatccggaaccagaagccaaacccgaatcagatccatccatggctttattcccgatcaagaaagaaaaccaaaaaccaaagacacgtgtcgaccaaggagctaagtaccgggaatgtcagaagaaccacgcggcctcaaccggaggacacgtggtggacggatgctgcgagttcatggccggcggagaagaaggtacactcggtgctttaaaatgcgccgcctgtaactgtcaccggagcttccaccggaaagaagtgtacggacacaggaacagtaaacaagatcatcagctgatgataactccggcgttttacagcagtaacagctcgtacaagccacgtgtaatgcatccaacgggtgagattggacggaggacttcatcttcaagcgaggatatgaagaagattctgagtcatcgtaaccaaaacgttgatgggaaaagtttgatgatgatgatgatgaggaagaagaagagagtgaggacaaagatcaatgaagaacaaaaggagaagatgaaggaatttgcagagagattagggtggaggatgcagaagaaagatgaagaagagattgataagttttgtaggatggtgaatctgaggagacaagtttttaaggtttggatgcataataacaagcaagcaatgaagagaaacaatagtaacattagtgaatagtttgatgatctgataaaagtgaaataaatttttacaatcccgttttgcttttatatataatttttgcccttcaaaaaaaaaaaaaaaaaagnnnnnnnnnnnnnnnnnnnnnnnnnnnnnnnnnnnnnnnnnnnnnnnnnnnnnnnnnnnnnnnnnnnnnnnnnn

SEQ ID NO: 90769 - DNA, 393 bp, Arabidopsis thaliana columbia
cgtggacccacatcctctttaagctcactagctgattgatatcgtcttatacctttggccgtttcgtctctctctctctcgtttaattacttgtacctatcaactcagtgatactctcgcttctgagagagaagagagaaagcgaagctcgtttcgtatcgtcttctttctcttcatccgacgctggattcataagggcattgataattggacttgttggttaagatttgaatcaacctggagctatgtcgagttttaatctgagtgtagatgtgaatcagaatgggaatatcaagaatgttgattctttatctacattggacgatattgatgacattgattttgccaagttgctagagaagccaaggccattgaatattgatagactgagat

SEQ ID NO: 90770 - DNA, 1194 bp, Arabidopsis thaliana columbia
  unsure (1)..(1194): unsure at all n locations
atgatttgccnnnnnnnnnnnnnnnnnnnnnnnnnnnnnnnnnnnnnnnnnnnnnnnnnnnnnnnnnnnnnnnnnnnnnccacgcgtccgcaaatcgttcatcgtcttccttctctctctctgattctctcattcgcgaatttcaaagctatggcggatacggtagagaaagttcccaccgttgttgagtcatcttcatcatccaccgttgaagcatctaatagcgccgagaagactgagcccacgacggagaagaaaaagtggggcgatgttgaagatgatgatgatgaagaagaagctgtatcggagcttaattcattgagcattaaggaagaagagaaacctgattctattcttgaggaacctgaagattctaacatcaaagctgttacttctggtgacacaccatatacatcagcaagtagatttgaagacttgaacttgtcacctgaattgatgaaaggcttgtacgttgagatgaaattcgaaaagcctagcaagatccaagctattagtttgcctatgataatgacgccgccacacaagcatctgattgcccaggctcataacggatctggaaagacgacttgtttcgttcttggaatgttgagtcgtgttgatcccacattgagagagcctcaagctctctgtatttgtcccactagagaattagctaatcagaatatggaagttcttcagaagatggggaagtttactgggatcactgctgagttggctgtgcctgactcaacgagaggtgcaccggcggcaacaagaggagctcctgtttctgctcatgttgtgattggcacccctggaacgcttaagaaatggatggcatttaagagactaggtctaaatcatttgaagattctggtttttgatgaggctgaccatatgcttgctacgggatgggtttagggatgattccttgaagataatgaaagacattgggagagttaatcccaatttccaggttcttcttttctcggcaacttttaacgaaactgtcaaagattttgttgcgcggacagtcaaagatcccaaccaattgtttgtcaaaagagaggatctggctttggactcggtgaagcagtataaagttgtttgcccgaaggagcaaaacaagatcgaagtcatcaaggatcagattatggagcttggggatattgggcaaaccattatctttgtgaa

SEQ ID NO: 90771 - DNA, 510 bp, Arabidopsis thaliana columbia
  unsure (1)..(510): unsure at all n locations
nnnnnnnnnnnnnnnnnnnnnnnnnnnnnnnnnnnnnnnnnnnnnnnnnnnnnnnnnnnnnnnnccacgcgtccgcaaaagtagttgcgaaaaggagtggaagagttaaacggaagaggagcagaaggatatctcttgttgcagagggaaattatcaacaagtatctgcagctgaggctatagttgatatttctagaaagtctggtcgagaaactgctgcttgtatcacttccttaagcaaaaatctactttggttcgccgacatttcttcctcggttgctgaggacaacaaaatagacacattgcagctgacagaaaagaagctagaggagcacgagacaaatctaaggttgaactcttcagacaacattgcagcagtctccagcattgtccttaaaaagcagaggagaagccgagccaggcaagggaagcggaaatgccaagatgaccagcacattgtggacacattttcagaatgggaagctaatgatgatctgcaggtaataggaa

SEQ ID NO: 90772 - DNA, 666 bp, Arabidopsis thaliana columbia
tcagtttgctgagtgttatggaaacatggcaaacgcgtggaaggaaaaaggggacactgatcgtgcaatccgctactatttaattgcaattgagctgaggcccaattttgctgatgcttggtcgaacttggcaagtgcatacatgcgaaagggaagactcagtgaggcaacacaatgctgtcagcaggccctctcattgaatccacttctggttgacgcacatagtaatctggggaatctgatgaaggctcaaggattgattcatgaagcatacagttgttaccttgaagctgttcgtatacaaccaacatttgctattgcatggtcgaatcttgctggtcttttcatggagtcaggtgatctcaacagagcccttcaatactacaaggaagctgtgaagttgaaacctgcattccctgatgcatatttaaatttaggaaacgtgtataacgccctcgggagacctactgaagcgatcatgtgttatcagcatgccttacacatgcggccaaattctgcaatggcatttgggaatatagccagtatatactatgagcaaggtcaactagatttagcaattcgacactactagcaggctctctcccgggatccacgatttttggaggcttacaataacttgggtaatgcattgaaagatattgggcg

SEQ ID NO: 90773 - DNA, 448 bp, Arabidopsis thaliana columbia
gaatgacgataatgtcagatcttccacgggatttgttagcggagattctcagtagggttccgttgacatctctaagagcagtgcgattgacttgcaaaaagtggaacgatttatccaaagatcggagctttctcaagaagcaaatcgtcgaaacaaagaagaagcaattggaatcgaaggagattgaggtgatcatgatgaggaattttagggtttatctaacaagcatcgatatccacaacaatgttgatccatcatttacgcctaaaggtacacttattagcttaagcgatgatgcaaaccatcatcaagtcgataatgtatctagagtctttcactgcgatggtttactattatgcatcaccaaagacctccactataggcttgtggtttggaacccttattttggtcaaacaagatggatccaacccagaaattcttaccacag

SEQ ID NO: 90774 - DNA, 958 bp, Arabidopsis thaliana columbia
  unsure (1)..(958): unsure at all n locations
atgctacgcgagctctaatacgacttacttagggaacgctggtacgcctgcaggtaccggtccggaattctccgggtcgacccacgcgtccgctcttttttcaatctcgtttaaaattaacataatgatgacgccagtgaagaaaagtatcgccattagaccggtgtcgttctacggaaacgggcttcctcgtcctcgtttcttcgataatcctaagttcaatgattaccgtgttgatcctcccctctctgtgctagatcctcttctctcatgggcgagagacgctcactggtcaatgggtggtctcaacttcacgcgtctccgtctccaaggccggatcgaaggaaacgtcaacaagctccgtgcacagcttgagaaatccacccctgtgaaactcgaatctggaaggaagaagaagagatctggttctgagtctcctccttctgctccgattgtggtgaaacgaaggaggtacttagatctgaacgattctgatgatgaggaagtcggatctgaagatgaaggtgtggttagaatcaggagaaaactctctgatgattttgatagagtcgctgaagaaagcaagaactaaacttgttgaagctaacaagaaatcgattaaatctgagtttgtggagaagaagagattgattgagaagaagaagatcgtaaaagttaacaagacaagttcaacgaggtcatctccaagactggctaagcgtagctctaattagttttcatatttagcctcttcaataatttctcttagggtttagaattgttgaggccctagtttgtttttttgtatttgtgcttataaatatggatttatctatgaactctgacccaatgaacttgaatgcatcaagantatttaaaaaaaaaaaaaaagnnnnnnnnnnnnnnnnnnnnnnnnnnnnnnnnnnnnnnnnnnnnnnnnnnnnnnnnnnnnnnnnnn

SEQ ID NO: 90775 - DNA, 934 bp, Arabidopsis thaliana columbia
  unsure (1)..(934): unsure at all n locations
gcctatacgacttacttagggaaagctggtacgcctgcaggtaccggtccggaattcccgggtcgacccacgcgtccggagagggaggaactaaacgggtctggagaaatgtacgtgcaaaagtatccgaagttgaagataagactagtggacgggagcagcatggcagctacggtggttatcaacaatattccaaaggaagccacggaaattgtctttagaggaaatctcacaaaggtggcttcggctgttgtctttgctctgtgccaaaagggcgtcaaggtggtcgtgttacgcgaggaggaacacagcaaactcatcaaatctggggttgacaagaatctggtactgtctacaagcaatagttattactccccaaaggtgtggttggtgggggatggaatagagaacgaagagcagatgaaagcaaaagaaggaaccctctttgttcccttttctcactttccgcccaacaaactccgcaaggactgtttctaccagtccactccagctatgcgtgttcccaagtctgcccaaaacatcgactcctgtgagaactggctggggaggagggtgatgagtgcatggaaaataggaggtatagtgcatgcacttgagggttgggaggagcatgactgcggcaacacttgcaacgtcctccgtctccacgccatatgggaagctgctcttcgccatgatttccaacctctcccaccatctcctctatgagcttttttcatattcatacatctatgtcccctttcttgattatatctacttcccttccatcattgtttgctgtttactatgtttttctatcgacaatatataagtacccttgttaccaaaaaaaaaaaaaaaaaaaagnnnnnnnnnnnnnnnnnnnnnnnnnnnnnnnnnnnnnnnnnnnnnnnnnnnnnnnnnnnnnnnnntc

SEQ ID NO: 90776 - DNA, 1047 bp, Arabidopsis thaliana columbia
  unsure (1)..(1047): unsure at all n locations
atgannnnnnnnnnnnnnnnnnnnnnnnnnnnnnnnnnnnnnnnnnnnnnnnnnnnnnnnnnnnnnnnnnnnnnnnnnnnnnnccacgcgtccggtttgtttcaatagctatgcggatactagtggagctggaaatgatgtttatgagtttgtaagtattaacatagagatgttctttcttcttcttatgctgtttcttaaagatttggagtttattttgtgcaggtaaagtcgattgggaagtttaaggagactaaacgaacagaggggatatcgacatctgatataatcatgagaatagtgaaagattataaccagtatgtgttgcgtaatctggaccgaggttattcaagagaagaactcggtgtcagcttcgttaaggagaagaggcttagagtgaatatgagattgaagaaacttacaagagaaagttaaagaacaacaagaaaagatacaaaccgtagcaaaaactgctgggatgcaccatgatgagtggcttgaaaatgctgatcgttgggtggctggatttcttgaaatgtttgaggaaggttgtcataaaatgggaacagccatcagagatgggattcagcaacggctaatgaggcaagaatcggaagagaaccggcgattgcttcaaaatggactgacgatttccaaagacaatgacgatgaacaaatgtctgatgccaacgagtttgcagaagaagactgcgtcaatgtgagcaacaaagggattgtaacagtaaagaaatgagagattttgggtcatggttgaagtatttccagatacagaaccaaaatctactagatttccccagtaatggtattaggcttgtttattcaactgtacatcaaactctgtttcaaaatctctacttgtgtttaaaactcaaatgcatcagaaatcaaaagcagtcatggattnnnnnnnnnnnnnnnnnnnnnnnnnnnnnnnnnnnnnnnnnnnnnnnnnnnnnnnnnnnnnnnnnnnnnnnnnnnnnnnnnnnnnnnnnnnnnnnnnnnnnnnnnnnnnnnnnnnnnnnnnnn

SEQ ID NO: 90777 - DNA, 557 bp, Arabidopsis thaliana columbia
  unsure (1)..(557): unsure at all n locations
nnnnnnnnnnnnnnnnnnnnnnnnnnnnnnnnnnnnnnnnnnnnnnnnnnnnnnnnnnnnnnnnnnnnnnnnnnnnnnnnnnccacgcgtgcgctttgttaaatttgaagttttcgaacaagttgcaaagaatgcggtgaggggactatgggcacgtcgttcaaatctcgacttggttggtgctcacatcaatgtctttacaggtgaatggacacagaaggtaacaaaaaatggcttctgtatatgtcagaagaactacggtttgatgaactttgcttcaacaaactaattagtctttttttgtcacccaaattctaaaatggtagtgtttacttggcaggatgctggtataggaacaagcattgattccttctatgagtatctactcaaggcttatatactatttggggatgaggaatatctatacatttttcaagaagcttatagatctgcaatgcagtaccttcacaaggatccttggtaagctttctgtatcttgtatgatagagaaacaagaacaaacaattcctttgtttggacttactgttttttctagt

SEQ ID NO: 90778 - DNA, 638 bp, Arabidopsis thaliana columbia
ctcatgcacacaaacgctgcgtctaacaattccgagttttttgatttcgttggacattttaaccgctctgaaccggtcgcttgtcacttcccaatacgcctgtggtgtgtaaaccatctgaatctgctatcgagaaagctcttgaaatcgccaatattgatcctaaccgaacgctgttctttgaggacagtgtccgaaacgtacaagctggaaaacgcgttggtctttacacggttctggttggtaaatcgaccaaagtcaaaggagcggattacgcgttggaaaacattcacaacatgaaagaggcgataccggagttatgggaatccgacaggaaatcgtcggatgttggatattccggcaaggtcgccgttgagacttctgttagagcttaggaggagtactgtttcgccgttgtacctaattttccaccactgtcattttcattttcttttttcaaatgacgtaatgtcatttttgttttttttttcgacttgtgtttataaaagattaataaaaaatgagaaaataatttccatctaaaaaaaaaaaaaaaaaaaaacaaaagggcggccgctctagaggatccaagcttacgtacgcgtgcatgcgacgtcaagactcttctatagtgcacc

SEQ ID NO: 90779 - DNA, 614 bp, Arabidopsis thaliana columbia
  unsure (1)..(614): unsure at all n locations
nnnnnnnnnnnnnnnnnccaaaaagatctcgcttttctcgattttggttttttttacaatatccacccacccctccgtgctgctcctgctctgtttttataagcctccacttcccgccaagcccctcttagccataaacagtgaaaaacccttttgttccttcaccaagctctaagaccctatccatggagacgccgacgatgaagcctgatacggttttgattcttgattacggctcccaatacacacatctcatcactcgccgtattcgttctctcaacgtcttctctctcgttatcagtggaacttcatcgctcaaatcaatcactagctataacccacgagttgttatcctctccggtggtcctcactctgttcacgcgctcgacgcgccgagtttccccgaggggtttatcgaatgggcagagtcgaacggtgtttctgttttggggatttgctatggtttgcaattgattgtgcagaagcttggaggcgttgttgtggaaggagagagtaaagagtatgggaaaatgggggttgaaggtgaaggggaaaatcggagatttttgggtcggagagtggtggagagaagcaaatggtttggatgagtcatg

SEQ ID NO: 90780 - DNA, 671 bp, Arabidopsis thaliana columbia
tgattcaattgcgtcatagtataatctccatcaacacacagagacgataattctcatatggttaagggaattttgggattgaatgacgttcgttgacgatgatgaagaggaagacttctctgttcctcaatcagcttccaattattatttcgaagatgatgataaagagcccgtttcgtttgctcgtctcccaattcaatggagcgtggaggagaaagttgatggtagtggtttaggtttttacttgcgaggaagatctgataacggccttttgcctctgcataagcttgttaaggcttggagatacgatctttcgaacttccagcctgagatttctgttcttacgaaggataatatatggattaagcttgaggaaccgaggaaaagctatggggaattgattagaactgttttggtcacgttgcattccattcagtttcttaggaggaatccccaagcgtccgagaaagctctctgggagaaattaactagaagtttgaggtcatatgatgtgaagccatcgcagaatgatttggtggatcatattggtttaatcgctgaagctgcgaaaagagatagaaatttggcgaattcgaagtttatacttgcatttctcacaaaaaagcctaccaaaaggagattacctgacgaggacaatgcaaaagatgatt

SEQ ID NO: 90781 - DNA, 604 bp, Arabidopsis thaliana columbia
  unsure (1)..(604): unsure at all n locations
nnnnnnnnnnnnnnnnnnnnnnnnnnnnnnnnnnnnnnnnnnnnnnnnnnnaaaatcccgagttcccgacacaatcccccctttcgttcccctttaactctgaacacatcaggtttggtttcgtgtttcaactttgagatacttctctagatttcaatcggagagtcttttgttccgccaaagtttcaatttttcaataccccacgacggcaaatagggttcatggaagatcaacccattaaccagtgctctagtagcaccaatgcgtctgagaaaactccagaatcaacccttgagcttaacatcaaaacgttagactcgcggacgtatactttccaagtgaacaagaatgaaactgttttgctattcaaggagaagattgctagtgagacaggggtgccggttggtcagcagcggctcattttccgaggacgggttttgaaagatgatcatcctctctcggagtatcatttggaaaatgggcatactttacacttgattgtgaggcagccagcagaatcagctccttcctctggtacaccttcacaaggggcaactgcaaatgatggaaataatacaaatggtggaccatctcgaaatggaa

SEQ ID NO: 90782 - DNA, 353 bp, Arabidopsis thaliana columbia
cgacccacaacgtcaggtcaaagtcaattcttggtcacatttggtggaacagagcataatacgacatcatgtaatgccataggatttaggtcttccccaagatgcattaggtggcacaacagacaccaagtcaagatcagatgtagagctaagccatctcgcctcaaacatcgagtcacgttccagtcttcagacaacagatatgcggttggctgatcttctagatagcacactttgggaccgcaagcttgctccttcctctgagagaattgtgtacgcattggtccaacagatattccagggcatacgagagtactttctcgcctctgctgagttaaagttcaactgttttc

SEQ ID NO: 90783 - DNA, 631 bp, Arabidopsis thaliana columbia
atgctacgcgagctctaatacgacttacttagggaaacgctggtacgcctgcaggtaccggtccggaatttccgggtcgacccacgcgtccgaaaaaaaagtcccactagaaaagctcattatgaaagtgaacgaggaaaacaacaagccgacaaagacccatgtcttaatcttcccatttccggcgcaaggtcacatgattcccctcctcgacttcacccaccgccttgctctccgcggcggcgccgccttaaaaataaccgtcctagtcactccaaaaaaccttccttttctctctccgcttctctccgccgtagttaacatcgaaccacttatcctcccttttccctcccacccttcaatcccctccggcgtcgaaaacgtccaagacttacctccttcaggcttccctttaatgatccacgcgcttggtaatctccacgcgccgcttatctcttggattacttctcacccttctcctccagtagccatcgtatctgatttcttccttggttggaccaaaaacctcggaatccctcgtttcgatttctctccctccgctgctatcacttgctgcatactcaatactctctggatcgaaatgcccaccaagatcaacgaagatgacgat

SEQ ID NO: 90784 - DNA, 394 bp, Arabidopsis thaliana columbia
ccacgcctccgaaaacatcgaaccagcacaagtattctctcgctaggaccatcgttatgtggaagttgaagataggagagggaaatggagaagatccttacttgttcagcagcaacaacttcgtcggacgtcaaacatgggagtttgatcccaaagccggcacacctgaggaacgagccgccgtcgaagatgctcgccggaactatttagacaaccgtccccgtgttaaaggttgcagtgatctcttgtggcgaatgcaatttttgaaagaggcgaaattcgagcaagtgatcccgccggtgaagatcgacgacggcgaaggcataacttacaaaaacgcgacggatgcgttacggagagcagtttcgttctactcggctttgcagtcctccga

SEQ ID NO: 90785 - DNA, 631 bp, Arabidopsis thaliana columbia
tgtaagcttatttctatcgattttttatcacttaatttgctggattatacttgcttaaaaaacttgagaaattatgagaaagtgaatttaatcaagtagttatgagttaatctgtttatcatgagcaatatttagtacaaaaaatataacatatgataagcaaaatatggttgttttcaaagagagttggcgaaataaatgtaaatataaccaaattaatgtgcagattaatatagagagacgagttggaagaggagatgctaaggaagttatatgcaacgcagttcagaaacttagagttgatatgttagtaatgggcactcatgactatggcttcttcaaaaggtaaggtttcaatctcttataagaaacaaaaatattttggtttaatggttatttgataatcatttgatatatttgatagggctttgctagggagtgtgagcgagtattgcgccaaacgagtcaagtgtcctgtggttatcgtcaagaagcaagctcaagataattaagctcatatgattgcattgtgtatatgtttcgaaagaactggtgtaacacttgaatcaatcttcgtatgcgataataaaatacataacggtttaaacaaatttaaaagatatttttgctt

SEQ ID NO: 90786 - DNA, 756 bp, Arabidopsis thaliana columbia
  unsure (1)..(756): unsure at all n locations
cggactcggataatatatttcttctctaataattgaaagcaaaagaaaacagtttttttttttagaaaggtaaagaaatggaggaaacaaaggagagaaagatagtagtagcagtagacgaaagcgaagagagcatggaagctctgtcatggagtcttgacaatctttttccatatggttccaataatacactcatcctcctctacgtcaagccccctcttcccgtttactcttccctcgatgccgcagggtttatagtgacaggagacccggttgcagctttgaagaagtatgaatacgagctcgtggaatcggtcatggctcggtctcgaaccgtgtaccaagattatgagtctgatattaatatagagagaccgagttgggaagaggagatgctaaggaagttatatgcaacgcagttcagaaacttagagttgatatgttagtaatgggcactcatgactatggcttcttcaaaagggctttgctagggagtgtgagcgagtattgcgccaaacgagtcaagtgtcctgtggttatcgtcaagaagcaagctcaagataattaagctcatatgattgcattgtgtatatgtttcgaaagaactggtgtaacccttgaatcaatcttcgtatgcgataataaaatacaaaacggttttanccnnaaaaaaaaaaaaaaaaaaaaaggngagcggcggacagtatacaagcttccgtacgcgtgcatgcgacgtcatagctcttctatagtgtc

SEQ ID NO: 90787 - DNA, 496 bp, Arabidopsis thaliana columbia
aacctgctttcaaagcttttgacatgcaaggactaatcaacaggattaacagatcaatcgttcctccacttccggcgcaatattctgctgccttccgaggtctcgttaagagtatgctccggaaaaatccagaactcagaccaagtgctgctgagcttcttagacaaccgctgcttcaaccgtatatccagaagattcatttgaaagtgaatgatccaggaagtaatgtgttacctgcgcaatggccagaatctgaatccgccaggagaaacagttttccagaacagagaaggcgtcctgctggcaaaagccatagctttggtccaagcaggtttaggggtaacctagaagattctgtttcttccataaaaaaaactgtgcccgcatatctgaatcgtgaaaggcaagtggacttgtctacagatgcaagcggtgatggaacggttgttcgtagaacttcagaggcttctaagagttctaggtatgtaccagtgag

SEQ ID NO: 90788 - DNA, 361 bp, Arabidopsis thaliana columbia
accacacgtccgaaaaaaaaaagcctctctctctcctctcctatttatacctctctcgatctctctcgccggcgctgcaaatccctaggtttttcaatcacacccaaaacatttgtagagccccaagtactcaatttcgcttattgatagagagagagagagattgagaatcgcgatttgattttatcaatcgatgccgtgaaaatctcgtaatcagattcaaaattgaggatggttagctgctaccgtaatccttgcgtgaagattgagaagaactaattttggtttgtgagcaactttcgaatcagctctgttagatttgatttgaacttttatttgaagatggatcggtgtgacacct

SEQ ID NO: 90789 - DNA, 506 bp, Arabidopsis thaliana columbia
  unsure (1)..(506): unsure at all n locations
attaaaatggctgctcgtgtcgaggcggcagcaacacacttgtcgtctctccctgtagcttctctggagttttcgcagtcacgaatcttgttttgaagaaattaatttgaacaagggttttagggcttggatgctttgttttcattgaagaagaagtagaaggagtgtatacaaggattatgggaactcacatcaatttcaacaacttaggaggtggtggtcatcctggaggggaagggagtagtaaccagatgaagccaacgggtagtgtcatgcccttggctaggcagtcctcggtctactcccttacctttgatgagttacagaacacactaggtggaccgggaaaagatttcgggtcgatgaacatggatgaactcctgaagagcatatggncttctgaggaagctcaggccattggccatgacttctgcgccanttctncaannggtacncaaccttggtncttggtatcccncccccanggngggatttnccnaggnaaa

SEQ ID NO: 90790 - DNA, 413 bp, Arabidopsis thaliana columbia
cttcttctcctgccttctgaatcttcttccatggcttctgattctcacacggcaggtgttactacacctgagaaggcattggagaataaggtgagcgaggaagctaagttgatggagaaagagattatttcgtcggattctgcagatgtggtgaatgataaaccggcatcagattcaaacccggtggtcaccaaagaagaggagattgatcaaactcctgctggtgaaccagagaaagaatcaccagcagtggtggaagacgttggagctgttgtgaaagcagaggaatctacagagacagtgaagcatgagaacggtgagaagggagctgaacaagtggaacttaaagagccaatccttgttaaagagacttgtgcagaagttaatgttgaaactgttgataccgaaaaagc

SEQ ID NO: 90791 - DNA, 1841 bp, Arabidopsis thaliana columbia
  unsure (1)..(1841): unsure at all n locations
agggaaagccggtacgcctgcaggtaccggtccggaattcccgggtcgacccacgcgtncgcaattatccattagatagaaactggtcctcgaaacctagaatcatccaccccgcaaagtcgacagatttccagcgaattcaaacccgatccatcgagattctggatcaacccgattacccaagatccaatctttctaattgatgaatcaatcgatcccttctaccgtatcttcttctccgacgactgatacgatggacgcttcgccgcttcttggccggaacagacgtaaccgcccacggtcctctcagccgattcgtggcgcggcgtcgagacttctccgccgtgctagcaaccgccggatgatgctccgtgagccctccgttcgagtccgtgaggtggcggctgagcagcttgaggaacggcagagtcaatgggcttactctaaacccattatagttctcgatatactttggaatttcctatttgtgattgtttcaatcgcgattctagggtttagttctgatgaagatcctgatgttcctcttaggttgtggatcattgggtataatgttcagtgtttgtttcatgttggatgtgtcattgctgagtataaacgtcgccgtgttgctaattctcctcctcctagtggtgaagattcctccaatcacgagtctcttagcggaagtgaagatgaatctgatggctatagcattaacaacactgatgatgatgaccatggaactagtttcactaagcaccttgaatctgcgaataccatgttctcttttgtgtggtggatcatcgggttttactgggtgacggctgataccgaggcactagctcaatcttcgccacaactctactggctctgtgttgcattccttgcgtttgatgttatgtttgttgtcatttgcgtagcggttgctagtcttattggtattgctgtttgttgctgtttaccttgcatcattgcgatcttgtacgcattagcagatcaggaaggtgcaccggatgaagagatagagaggcttttaaaattcaagtttctcacagtaaagaattctgagaaagtgaatggcgaaatacgggaaactcaaggagggataatgactggattagataccgagtctcaaaccgaacgtatgttattaagcgaagatgctgaatgcagcatttgtctatgtgcttatgaagatggagtagaactaagggagcttccttgtagacaccattttcacagtttatgtgtagacaaatggctaaggatcaacgctacttgccctctctgcaaattcaatatcctcaaaaatggtgaacctagtggcagtgaacaagtgtgatgaggagaaagattttgctgttcaatctttgtggaatgtgatgagctcatcatcatcatttacttcaaagcctgtttgttcttttgaccattacagaggaaagaacaagaaagaagcccttgagatttgttttgagatgaagctgcacatcttgtctttttggatatgatatttgtaaatgcaataagtatatatagttcggttggaagatgtttttcatcgagtcagttgtgattttagccgtttggtgtttttaagcaacggataaattagattaatgtacggtgatgaaccatgcatgtttatattgctgtgacgtccttgtagtgaggtgaaaaagagagagagatttccctatttaatcagaattccccttccaaaatatatatattaatccctgccatccattgttaaaaaaaaaaaaaagggcggccgctctagaggatcccagcttacgtacgcgtgcatgcgacgtcagagctgttctataggtacacgc

SEQ ID NO: 90792 - DNA, 822 bp, Arabidopsis thaliana columbia
  unsure (1)..(822): unsure at all n locations
cacatcgtttgtcgcatacaatcagnagtgccggatgaaatagaagctttaaatcaattctccagtaagatctaaaaggaagcgaaatcggaactaagaggataatgctgatagatccggtctcaaccacgtatgttataacgaagatctaatgcagcatttttatgtgcttataagatgagtagaactaggagcttccttgtagcaccatttcacagtttagtgtagcaaatggcaaggataaccctcttgccctctctcaaattcaattcctcaaaaatggtgaacctagtggcagtgaacaagtgtgataggagaaagattttgctgctcaatctttgtggaatgtgatgagctcatcatcatcatttcttcaaagcctgtttgttctttgccccattacagaggaaagaacaagaaagaagcccttgagatttgttttgagatgaagctgcacatcttgtctttttggatatgatatttgtaaatgcaataagtatatatagttcggttggaagatgttattcatcgagtcagttgtgattttagccgtttggtgtttttaagcaacggattaattagattaatgtacggtgatgaaccatgcatgtttatattgctgtgacgtcattgtagtgaggtgaaaaagagagagagagatcactatttaatcagaattcacattcaaaaatatatataataaatcactgcaatcaattgtattctaaaaaaaaaaaaaaaaaaaaaaaaaaaaaagggcggccgctctagaggatccaagcttacgtacgcgtgcaggcgacgtcaagactcttctatagt

SEQ ID NO: 90793 - DNA, 487 bp, Arabidopsis thaliana columbia
aaacaatttacaaaaggccttaaaaaagcaaagattcttcgctgacttcgttctctctttcgctggcgaagaagattttctagggttttttgtttgattttcgtgaagtcggaaaaattattattattaatcgtgttgagctgtttgatcggtgaagactatggcgtcgtcttcagcttcggcgacggtggctgttgataaagctaccagcgatcttttgttaggtcctgattggactacgaatatggaaatctgcgattctgttaattctcttcactggcaggcgaaagatgtagttaaagctgtgaaaaagaggctgcaacataagagttcgagagttcaactacttgctcttacgcttttggagacgttggtaaagaactgtggagattatttgcaccatcaagttgcagagaaaaacattttaggggaaatggtcaaaattgtgaaaaagaaggcagatatgcaagtaagagataagatattg

SEQ ID NO: 90794 - DNA, 607 bp, Arabidopsis thaliana columbia
cgacccacgagtaatattaacacttagtttttcttttccttttcattattttcttttattttgtaacagaaataaaagaaaataaaagaaaatacaaagatgggttacatttcaatgtccgtggttgcattccttgttgtttttgcttcgccggtggttctagccaccgatacagatccgattccagaaaacagagcccaaatcccgcaatggtttaaaacaaacgttaaaccatattcccagagaaagggcacgctagaccccgccctcgaagctgctgaagcagcgcgacaaattatcaccgtgaatcaaaaaggtggcgctaatttcaagacattaaacgaagctatcaagagcattccgacaggaaacaagaaccgtgtgatcatcaagttggctcctggtgtatacaatgagaaggtcacaatcgacatagctcgaccattcattacattgcttggtcaacctggtgcggaaacggtcttgacttaccacgggacagccgctcagtacggaaccgttgagagtgcaactcttatcgtctgggctgaatatttccaggcagctcacctcaccattaaaaacactgctccaatgccgaaaccag

SEQ ID NO: 90795 - DNA, 782 bp, Arabidopsis thaliana columbia
  unsure (1)..(782): unsure at all n locations
cactaatacgactttatatagggaacgctggtacgcctgcaggtaccggtccggaattcccgggtcgacccacgcgtccgcaaaatgcatgtatccataattttcgtcttcaacgtcctcgtcgtttcatatccaaatccatgacaaaaacgatgccggatgctaatcctcttgacctccgtcgacgctcgggcaactatcaaccttcttcatgggaccatagttatctcctctccatcgagaacaaatatgtgaatgaaaaagaagtgataactagacatgtgttgaagaaaaaggtgaagaagatgctagaggaagtagagacgaagagccgtctcgagaaattagagctcatcgatgatttacaaaagcttggggtttcgtatcattttgagcaagaaataaataacattttgacaaattttcatcttgaaaatggaaaaaatatttggaaatgtgacaaggaagaagatttacatgcaaccgcactcgaattccgacttcttagacaacatggttcttggtgtctcagaaggttagtattttcacactcggtaaaaacgaaatgaaaaaattctataaattagtttcactgtataaatatcatatgtaactaaaaagaccatgcatttcagatatatttgatgtaatcatcgacaaaatcgaaagtaatacgttcaagagtgacaatataacaagtaaaaaaaaaaaaaaagnnnnnnnnnnnnnnnnnnnnnnnnnnnnnnnnnnnnnnnnnnnnnnnnnnnnnnnnnnnnnnnnnn

SEQ ID NO: 90796 - DNA, 367 bp, Arabidopsis thaliana columbia
ccggtcagtgaggaacataaagaactggggaacattttggatattttttctccaagtgaagttaaaaggaacaaggagacaaggttggagtcgaccaatcattggtggatctagagaaatctggctacaattcaatttcagatgaggttttcaaaaacacagaagatgaatgttcaaatagcataagaagctgtgaattttcttccttcgtttttgtccaatgggaacaatggcacaattgggaaccatgggaaaatttggagccatggcacaagagcagcaagttaaccagatgatcatggataaacaatcagtagaagaatggctatcgcgcgtcaactcgctaataccatccgtcctcaacaag

SEQ ID NO: 90797 - DNA, 530 bp, Arabidopsis thaliana columbia
  unsure (1)..(530): unsure at all n locations
gtgagaagacgaaatggttgaaagaaggaatggattgcattttgctctattggaaagacaaggttatcgatttcgatctaccgattacagttaagctaaaagtggttgacgttgatcctggccttcgcggtgatactgtgcaaggtggatcaaaaccggcgacaatggaaacgggtgcaatagttgctgtaccactctttattaacgtcggtgaagagatatttgtggacacaagaactggtgcatacatgaaccgagcgtgatccgggtctactacacctagttaattgggtcgttaacaacaaggcaatgatacatcttttttgtatatgagaatgttcgaatccggggacacatgtttgtttttctgaacatcgagagacaatttttcgattaaataaatttatatatattttaggttgaaaaaaaaaaaaaaaaaaaaaaaagnnnnnnnnnnnnnnnnnnnnnnnnnnnnnnnnnnnnnnnnnnnnnnnnnnnnnnnnnnnnnnnnnnnnnnnnnnnnnnnnncg

SEQ ID NO: 90798 - DNA, 1063 bp, Arabidopsis thaliana columbia
attggctaagaaaacagagagaatcggtatttttagcctttgctaagatattttgatcaaaaatcccacttttgagcggtcttatctttattctccacctcaaaggaccatttctcatggcttctgttccggtgagacctctacctcttcttcgccggaacatcacctcgacgacggcttcgaaatcatctccaatgctcgccaacgtttcgagccggcattctctcgggatctctacgtatgatgaatttttgaagcaaataaaaactccggcaactgtgaaccaccggcggcgagtaagtacggtggtggcgtcggcgggaaacttgacggcgccgtcgtgggattcgtggaagcctgataagacggcggcggctacggctcttttgctgagtgacgtcatatggcctgctgctggagcgtttgcggcaatggcattattgggaagaatggatcaaatgctatctccgaaaggcatttcaatgtcagttgcaccacttggcgcagtctccgccattcttttcatcaccccttctgctcctgctgctcggaaatacaatatatttttggctcaaataggttgtgctgcgattggggtggtagctttctccgtcttcggcccaggctggctcgcccggagtgtcgccctcgccgcttccatcgcttttatggtcattactcgtgccaatcgccctcctgcggcgagcttaccactaatgttcatagatggagcaaagttccatcacttgaatttctggtacgcattgttcccaggtgcagctgcttgtgtcatcctctgccttctccaatcgatcgtatgttacttgaaggaaaacatgaatttttgatgaatcacccaccccccatgtacgatcgaattaatggtatatataatacatacatatcgatggaaatcttgtgaaaatatttgattcatatgtatccacttgatgaacgtatgtaaatgcctaaataattattacgttcattcaatattatcgtggtctaaaaaaaaaaaaaccccaaagggcggcagctctagaggatccaagcttacgtacgc

SEQ ID NO: 90799 - DNA, 464 bp, Arabidopsis thaliana columbia
gcgtccgaacgaagcgatacttggttacttgaaaacagagctctattgaggtggtcatgggtcagaactcaagaatcaagagcggcggtatcatgcaaagtgggagccggcgtcaagaaaacaaacaccagcccagaagaatcttcaaatccatgacctttaacggagatctctgtttcttctacccattccaggaaccaaatcaaagatgcgtcgtttggccgtggttggaagtatcaacgtgaatggtacacctgatgatgctgaaggagtagaaggagaaggagcggttgatgtcaaagcgattggagaaatgaggaaatgtgtggatttgaaggaaatgaaaggagacaaagggattattactaaaggttttgttttgtttagaccagccgacgttgtctgttgttcctgttgaggaagatgtttggaatatgatttgtgaattgggaaaatgggtttgt

SEQ ID NO: 90800 - DNA, 1131 bp, Arabidopsis thaliana columbia
  unsure (1)..(1131): unsure at all n locations
nnnnnnnnnnnnnnnnnnnnnnnnnnnnnnnnnnnnnnnnnnnnnnnnnnnnnnnnnnnnnnnnnnnnnnnnnnnnnnnnnnccacgcgtccgatcacaatggtttggttaatgaaagtttttgtctttgtgacattactctctttagtgtttgtaataacagaatcagctcctgaatctgctcttatcaccaaacttcctggtttcgaaggcacttttccttcgaaacattactccgggtatgtgacaattgataaggaacatggaaagaatctatggtattactttattgaatcggagaagaatccatcgaaagatccggtggtgctttggctcaatggtggtccaggttgttcaagcatggatggatttgtgtatgagcatggtccattcaatttcgaactaccaaagaaaaacaatagtctcccactcttgcatcttaatccttatagttggtccaaggtctctaacattatataccttgattctcctgttggtgtgggattctcttactcaaacaataagtctgattacataaccggtgatattaaaaccgcggttgactctcacgcgttccttctcaagtggttccaaatgtttcctgagtttcaatcaaatccttttttcatctctggagaatcttacgccggagtttatgtcccaactcttgcttcagaagttgtcatagggaacaaaaatggagtaaagccggctcttaacttcaaggggtatttggttggaaatggagttgcggatccgaagtttgatggaaatgcttttgtcccgtttgcacatgggatgggactaatctctgatgaactctttgagaacgttacaaaagcttgcaagggaaatttctatgaaatagagggactcgagtgcgaggaacagtatacgaaagttaacgatgatactaaccagttgaatatatacaacattcttgagccatgttaccacggaacatcgctatctgcattcgacattagatcgcttccttcaagtctccttcagctaggcaaaactgaaaaacggttacctataagaaaaagaatgtttggtcgagcgtggccagttcgtgcgcctgttcatccaggcattgtccctagctggtctcaactttttgccgacgtc

SEQ ID NO: 90801 - DNA, 617 bp, Arabidopsis thaliana columbia
  unsure (1)..(617): unsure at all n locations
cgcctgcaggtaccggttcggaattcccgggtcgacccacgcgtccggactcaccgactggtaaacgaaccaaatcggagagatttcctctctcacggtgggaattcgccgtgtttttcaccgtctttctcgttttcaccaccggactcttttgtatttacctcaccatgcctgccgctgaatacggcaagctcaaagttcctagaactatctccgatcttcgattgctcaaagagaatcttgggtcttatgcaagtgagtaccaagcacggttcattttaggttactgttcgacgtatatctttatgcagacatttatgatacctggaacgatctttatgtcattgcttgctggagctcttttcggtgtggttagaggttttgttcttgttgtccttaatgcaactgctggagcatgttcttgcttcttcttatcgaaattggtcggtaggccattggttaactgggtatggcctgaaaagtttgaggttttccaagcttagatttccgaaagaagggntaaggntcctaaactacatgcggttcttaagggtacacccacatttccaaacngnttataaatttggnttcncaanngtgnaacccttaagggtnna

SEQ ID NO: 90802 - DNA, 400 bp, Arabidopsis thaliana columbia
aaaatttgccgcctagcaaaacaaagatgcaccggcacggggcgtatttggcaaagagctagccgcagcatatactactggccggtattaaaaaatgtaaataactaacaatcatatttatctttctttattttaaaagcatatttattttgtcgtgattatgttaattagatttcaaatttatatattttcacatagaccaattaacaactacaatgaaatacttgataacacataccccgatgaagtagttttttattgaataaaaaaaacaaattgaactggtgtagaaaacttgtgaataagagaggttaacattttgtccaaaaaaaaaaagaagaagagagtttaacatattttttttcggttttaagtttagttaacatttttcatatccaaa

SEQ ID NO: 90803 - DNA, 798 bp, Arabidopsis thaliana columbia
  unsure (1)..(798): unsure at all n locations
tgannnnctcagattcgtgctttgttgaggatggaacatttcagaaactttcagacttgcaggctttcaaagatcatttgcccgcgcgtccagaaacaaggaaagaaggagaaactgacttggttgtgctctgttccgagggttctgaatcgaatagtcaagctggacagtcacattcagagcgtgaaagcttcttggaacttgttagttctgtagaacaatccggcagtaaatatacagctctttatgtttctgatccttattggtacacatcttacaaaactctccaaaggtttctagctgaaactgctaaaggaaacagtactcctgaaattgctactggctgtgatgaactctgcaaatttaagtcatcacttttggagggcatactagtgggaatcgtttttcttctcatcttgatcagtggactttgctgtatggcgggtatcgatacaccgactagattcgagactcctcaagattcttaagctgttgaccttaagagccatccccaccttttgctttgcttttgacgagtcttttcttgtgcatagtgcgcattgtggaaggtacttcaatgtcgatttgttacattattacttcaaaacaaaatctgcatatgccataaaatccccttgtatcatttattcatcttgtttgtgagtctttcttaaacgtcataaattaataatggagaacgagtaaaaaaccaaaaaaacaaaaaaagggcggccgctctagaggatccaagcttacgtacgcgtgcatgcgacgtcaaagctctcntataagtcacct

SEQ ID NO: 90804 - DNA, 426 bp, Arabidopsis thaliana columbia
cgttgacggaaaatttgggagagaatattctcgatggggaaaggaggaggttgtgttccgagcaagaagaagaagccggccaccaccggcgatggtcccggaatcgatgatgataacgacgctactaatgctccgatccaaattgacgatgatcaaaccaccattgacggcgatcgaacaacggcgacgaatactggaggaacaacaacaccagcgattactactacggctgctaagatctcgtcaccgctcaagatcttcgtcgtgttctattcgatgtacggacatgtggagagcttagcgaagaggatgaaaaagggagtggatagcgtcgaaggagtggaggcgacgttgtacagagttccggagacgctttcgcaagaagttgttgagcagatgaaggcgccgggtaaggatttggagatt

SEQ ID NO: 90805 - DNA, 482 bp, Arabidopsis thaliana columbia
ggtgataaagatggtctcagtaatgcccggaagctgtatgattctgctgttgcaagttacggtcaagacgtggagctgtggaagaattactactcattggagacaaagctgggaacatcagagacagccaatggagtgtattggcgtgcgagaaagactctgatgttcccagtcttgttctatacaaaggttgcattgaaatagagaccaacctcatatcagtaggtgataaagatggtctcagtaatgcccggaagctgtatgattctgctgttgcaagttacggtcaagacgtggagctgtggaagaattactactcattggagacaaagctgggaacatcagagacagccaatggagtgtattggcgtgcgagaaagactctgaatgaatccgcggatttcatagtttgatctctgatttataggtagtctaatatgtatgatgaaggaaacactatgtttgcctcgtatttggggatg

SEQ ID NO: 90806 - DNA, 791 bp, Arabidopsis thaliana columbia
  unsure (1)..(791): unsure at all n locations
atgannnnnnnnnnnnnnnnnnnnnnnnnnnnnnnnnnnnnnnnnnnnnnnnnnnnnnnnnnnnnnnnnnnnnnnnnnnnccacgcgtccgcaaacttgtagagatgtccatcctatcagcaaccaaaagccatgggagcgaccatgtgttttctcttgcttccacagtggtgaaatttgttcttgaaacaaaaggggcccacagtgcgaggaagatatacaagaggttcttggctcttcctggtcccagtcttgttctatacaaaggttgcattgaaatagagcccaacctcatatcagtaggtgataaagatggtcccagtaatgcccggaagctgtatgattctgctgttgcaagttacggtcaagacgtggagctgtggaagaattactactcattggagacaaagctgggaacatcagagacagccaatggagtgtattggcgtgcgagaagactctgaatgaatccgcggatttcatagtttgatctctgatttataggtagtctagtatgtatgatgaaggaaacactatgtttgcctcgtatttgtggatgcaggtttcagttatgtgatccttaagatatgaattttggttgtaacagaacaggagtcgatgtactactttatgagtctagttatactctaaaacacttttttgatacaaaaacatgttgaagttccaaaaaaaaaaaaaaaaaaaaaaaaaaaaagggcggccgctctagaggatccaagcttacgtacgcgtgcatgcgacgtcatagtaatctatagtgcagctcaatc

SEQ ID NO: 90807 - DNA, 792 bp, Arabidopsis thaliana columbia
  unsure (1)..(792): unsure at all n locations
cgtccggacaaagtcgagctcttgtacacaaagtttttttttttggtcaaatcaaaactcctggtgcaggcgctactgcctccacccccccaaggagagatctgtgacattaatggaacctgtgtggatgctgcggaagatgagtttttcaggttaacgacaaaagaagggaaattgacagttgaaagagagacttttaggacaccaacagctgatttctcgccgatcttgcaattcgagcaagaccctgttcagattcttgatgctttgttgcctctgtatcttaacagtcagattcttagggcattacaggagtcattggctagtgagcttgcagctagaatgagtgcaatgagtagtgcttcggataatgcatcggatctcaagaaatcgctttcgatggtgtataatagaaagcgtcaagctaagattactggagagattcttgagattgttgctggagctaatgcacaggtttgatttgttttgaaccctctttgaatcttctatatgagtccaaaactctcttcttcttctttttttttcgttatcgtttgtataatgtataattgataatctctagaactctttataatcatgcaattacaaacaaaaacgcggttgtatctattttggcttttcattggataaaatgatggagatcttcgttgaaaaaaaaaaaaaaaaaagnnnnnnnnnnnnnnnnnnnnnnnnnnnnnnnnnnnnnnnnnnnnnnnnnnnnnnnnnnnnnnnnntcggtctcaattcaattcnnnnnnnnnnnnnnnnnnn

SEQ ID NO: 90808 - DNA, 618 bp, Arabidopsis thaliana columbia
  unsure (1)..(618): unsure at all n locations
cacccccccnttnccgctntcgcaanttaagcccgncgaagaatgaaggcccgtgaaccgatgnggnnctgtcncgctggcncgctcgagccttcaggtccnaatgggtancgtgcagacgtggctcagtgcggctttaactgatgaggggacttgtacggacggatttaaagncattccacgatgagccgaggaaggatgacatatgcgcacgggtcgatgacgtttaaaagatgactagtaatgcgtgggctctagttaatcgatgtgttgataaggccatacattgatcattttatcattattcactaaagattcttcttctttttttttcttacttgaaaaagaagttattgtttaaatgtttttggttatcacgcgtgcatgatagagatataataagataagcctgtttgtgattggctgtaatgaaatagctgatattatgtagttggttaacgcttttttgtttgtcgaaattacgaaaagaatcaagcctgtgtgtacaaagaattagtagtcaattatttcttaaaagaaaaaaaaaaaaaagggaggccgctctagaggatccaagcttacgtacgcgtgcatgcgacgtcaaactcttctatagtg

SEQ ID NO: 90809 - DNA, 945 bp, Arabidopsis thaliana columbia
  unsure (1)..(945): unsure at all n locations
nnnnnnnnnnnnnnnnnnnnnnnnnnnnnnnnnnnnnnnnnnnnnnnnnnnnnnnnnnnnnnnnnnnnnnnnncaaaaagagtcacttccgtgtcacaagaaaccatgaaactttctcttcatcaaccacttctcttcttcttcttagccagcgtcctcccattaatcctgaccgtccattctcaatcagacgactcagatttcatccgtactagctgcaacaccacattataccctgacctatgcttctcttctctttcctccttctctagctctgttcacaacgatccagccctcttggctcgagccgccatctccgtcactctcaccaagactctcgacttagcctcatacctcgccaatatcaccactctccagccagagagcaacgaagatggtgctcaccacccaaccgcagccgctgtttttcacgactgcttcgacaatcttaaagacgcggtcgaagaaatgaaaggctcgatgaaacagatgagggagctggtctcgactggctcgctcgagtccttcaggttccaaatgagtaacgtgcagacgtggctcagtgcggctttaactgatgaggagacttgtacggacggatttaaagacattcacgatgagccgaggaaggatgacatatgcgcacgggtcgatgacgttaaaaagatgactagtaatgcgttggctctagttaatcgatgtgttgataaggccatacattgatcattttatcattattcactaaatattcttcttcttttttttcttacttgaaaaagaagttattggttaaatgtttttggttatcacgcgtgcatgatagagatataataagataagcctgtttgtgattggctgtaatgaaatagtgatagggcggcacgctctagaggatccaagcttacgtacgcgtgcatgcgacgtcatagatcttctatagttgtc

SEQ ID NO: 90810 - DNA, 669 bp, Arabidopsis thaliana columbia
  unsure (1)..(669): unsure at all n locations
gcgtcgtttgtccaagtttggcggtgcattttatttcaaaggttgacttggagaatgtagaatcaggggcgtaacgatctttaagagttgacaatgctggaagagagggaagaggcaagtatgatcaggccttctctaaagtgacatcaagtttttatcgcatgcagaaacacggttacattggtgagttggtacgttgatgaccacaggtctggaaagagcgtgtcgagcttaatggcgactaacaaatgggggtatgatgcctctttcgatgttgggggaaggagattgaagctgaccgctcgtattcttccttccagacaggtttggggacattgtacttacgacctcggctggtattatggaccacgaagaagccaggagaaagaatgttggtggcaaggttcttggcttcttttactgaatcaagtcttgaagaagagaatcattatggttggtgatactttgctttctcctttttggtgagaagagggattccgattgacctaaatgtttaagggtagtagagtttttnatgtcttcctccngtttgtaatctttaggatggataatgnccatttttgtccggttttggtttttncccaaaaagttnttnaaaggcctttcnaaaggtgggccagtaaattcccaaattnccgnttttcttcc

SEQ ID NO: 90811 - DNA, 906 bp, Arabidopsis thaliana columbia
  unsure (1)..(906): unsure at all n locations
gnnnnnnnnnnnnnnnnnnnnnnnnnnnnnnnnnnnnnnnnnnnnnnnnnnnnnnnnnnnnnnnnnnggctcgagattgcttttctccgtcactgagtaccttgcctctcgagctcccaatcttaagtagaggattgagcttaagggcagaagggtagaatcaagggtcttaaccattcttttaagaaccttgtccatggttaaaaaccaaggcagaaggaggcatgaccaggctttcttccaaggggatattaaggttcttgatggcattccaaaaccccggttccttggggaagttggattttgtcattaaccacagatctggcaggatcgtcgttgaattgaacggaaggttgaacaagtgttggtgttatcagcccacgttttgatgttggtgtcaaggagattgaaggctggaccgctcgttttcttccttccagacagtttgggtacattgttcttacgacctcggctggtattatggaccacgaagaagccaggagaaagaatgttggtggcaaggttcttggcttcttttactgaatcaagtcttgaagaagagaatcattatggttggtgatactttgcttctccttttggtgagaagaggattccgattgagctaaatgtttaagggtagtagagtttttgatgtcttcctctgtttgtaatccttagatgatatgccattttgtccgttttggtttttgcgcaaaagttgttaaagaccttgcaaagtagacaggtaatttccaattctgttttttcacaccaaaaacccctgccttttctgaacccattctatccattcaggcggttccatttccaaaaaaaaaaaaaaaggcggccggtttaaaagaatccaggctaaggaaggggggcatgcgacgtataagttcttcaaaa

SEQ ID NO: 90812 - DNA, 857 bp, Arabidopsis thaliana columbia
  unsure (1)..(857): unsure at all n locations
atgatatcgccggcatactatacgactcactttagggaaagctcgtacgcctgcaggtaccggtccggaattcccgggtcgacccacgcgtccggttaaactttgcctcttcgtcttttgctccagagtttttgtgcggctgccattttcgatttccaaaggttttgagctttgaaaaatggtgagaatcagtgtgcttaacgatgctcttaagagtatgtacaatgctgagaagagagggaagaggcaagtcatgatcaggccttcctctaaagtgatcatcaagtttcttatcgtcatgcagaaacacggttacattggtgagtttgagtacgttgatgaccacaggtctggaaagatcgtggtcgagcttaatggaagacttaacaaatgtggagtcatcagtcctcgtttcgatgttggagttaaggagattgaaggctggaccgctcgtcttcttccttccagacagtttgggtacattgttcttacgacctcggctggtattatggaccacgaagaagccaggagaaagaatgttggtggcaaggttcttggcttcttttactgaatcaagtcttgaaggagagaatcattatgggttggtgatactttgcttctcccttttgggtgagaggggtcccgccgattgaccctaaatatttaaggggtagtagagnttttaatgcctccttctgnttgnaaacccttagntgnaatnccattttttncgttttgggtttcccgaaaagtnttaaagccttcaaagtngccgnattcaaattcntgttntcacaaaaancttgnttntttgncactttcttcgggggtnaaaaaaaaaaggggcccctngggcc

SEQ ID NO: 90813 - DNA, 769 bp, Arabidopsis thaliana columbia
  unsure (1)..(769): unsure at all n locations
ggaaaacccgggccgacccacacgtacgtgcttttctccgtcactgagtaccttgcctctcgagctcccaatcttaagtagaggattgagcttaaggcaagatggtaagaatcagtgttcttaacgatgctctcaagagcatgtacaatgctgagaaacgaggcaagaggcaggtcatgatcaggccttcctccaaagtgattatcaagtttctgattgtcatgcagaagcacggttacattggtgagtttgagtatgtcgatgaccacagatctggcaagatcgtcgttgaattgaacggaaggttgaacaagtgtggtgttatcagcccacgttttgatgttggtgtcaaggaaattgaaggttggactgcccgtttgctcccttctagacagtttggttacatcgtgctgactacatctgctggcattatggaccatgaagaagctagaaggaagaatgttggaggcaaggttctcggcttcttctattgaagttttattttatggggaaacagattttcattgagttatttttaacttttgtcctccattttctctgaaactacctttctctttctttcgaattttgtgataactttgatggatagtgttctgaaatcactctttttggtttggagcccttttttagacttcggaaaaaaaaaaaggattattctnnnnnnnnnnnnnnnnnnnnnnnnnnnnnnnnnnnnnnnnnnnnnnnnnnnnnnnnnnnnnnnnnnnnnnnnnnnnnnnnnnnnnnnnng

SEQ ID NO: 90814 - DNA, 563 bp, Arabidopsis thaliana columbia
  unsure (1)..(563): unsure at all n locations
atgatactccagctctcnnnnnnnnnnnnnnnnnnnnnnnnnnnnnnnnnnnnnnnnnnnnnnnnnnnnnnnnnnnnnncccacgcgtgcgctcagcgtacttagttatatctctgctggaggggtgattgcatcagtgctagtggttttatgtttgttttggattggtttggtagatgaagttggaattcacagcaggggaactacactaaacttgtcaacattacctgtggctataggactctatggttactgctactcaggacatgctgttttccccaatatttatacttctatggccaaaccatctcaataccctgctgttctcttgacatgttttggtatttgtactctgatgtatgccggcgtcgctgttatgggttatacgatgtctggagaatcaacacagtcacagtttactctcaacttgcctcaagatttaattgcaactaacattgctgtgtggactaccgtgggcaatccatttaccaaatatgctttgaccatatctccagtagcaatgagtcttgaggagttgataccatcaaggcatatcaggtcac

SEQ ID NO: 90815 - DNA, 883 bp, Arabidopsis thaliana columbia
  unsure (1)..(883): unsure at all n locations
acccacgcgtccgggaaaacgatcaatctttgttatctctcactcttcctcttcttattttgatcttcctcacttctgtttgattcctaataatggaacacgagggcaagaacaacatgaatggtatggagatggagaaaggaaagagagagcttgggtcaagaaaaggagttgagttaactatgagagtgttggctttgatcctaacaatggcggctgcaacagtacttggtgtcgcaaagcaaacaaaggttgtgtctattaagcttattcccactttgcctcctcttgatatcactactaccgccaaagcctcttacttgtcggcatttgtgtacaacatttctgtgaacgctatagcttgcggttacacggcgatctcgatagcgattctgatgatcagcaggggaagaagaagcaagaagttgttaatggtggttttgctaggagatctagtgatggtggctttgctgttttccggcactggagccgccagcgcaattgggctaatgggtttacatgggaacaagcatgtcatgtggaagaaagtttgtggcgtttttggaaaattctgtcaccgagctgctccttcgcttcctctcactcttcttgctgcagttgtgtttatgtttcttgttgttcttgacgctattaagcttccttaattattaattgtttctgttcttgtcgttttgtgtgatgtaaaataactatcaacaatcatgtaattgtctattgcttctaatgttttatcacatcgttttctatggtgagacgatatattcaaaaaaaaaaaaaaaagnnnnnnnnnnnnnnnnnnnnnnnnnnnnnnnnnnnnnnnnnnnnnnnnnnnnnnnnnnnnnnnnnnnnnnnnnnnnnnnnc

SEQ ID NO: 90816 - DNA, 590 bp, Arabidopsis thaliana columbia
  unsure (1)..(590): unsure at all n locations
nnnnnnnnnnnnnnnnnnnnnnnnnnnnnnnnnnnnnnnnnnnnnnnnnnnnnnnnnnnnnnnnnnnnnnnnnnnnnnnnnnnccacgcgtccgctaagagtctcttcaaagtttatctggtcgggttgggaaaaatccaactagagaagagcataaaagtagacatctgatcaacccgacccataataacctttttttgttggccgcgtaatatgttcgagcgcggccatcacactaagaacattcataaaaaaaaatccacaggattcaaagcccttaagctttgatcatagtctcttaaagaggtagtaaaaccataaactagagccccaatttgcattcacaagccacctaacacattagcttctggtcatttctgctttatatacacatcaagtaaaaaatggtgagaagaagagaaggtcttacattgccaatcataaaaccggcgcttcccgaggtcagatcagcagcgacaacgccggtggcctcacagaaaccaaaacatcgtttatcgaaacaactatctatgtgtgaaacaccaagagacgttgcttgggaaagaagaaggcgtcagatgataatgatt

SEQ ID NO: 90817 - DNA, 539 bp, Arabidopsis thaliana columbia
  unsure (1)..(539): unsure at all n locations
atgattcgccggcannnnnnnnnnnnnnnnnnnnnnnnnnnnnnnnnnnnnnnnnnnnnnnnnnnnnnnnnnnnnnnnnnnccacgcgtccgcggacgcgtgggctctctttatctctcccattttttttttcttctctaaatttttattttttctctgttttatttttcatttctgtaacttcttctccgtcaaagacacagagagtagaaaaaaaagaaaaacagaggaacagattaaaaaaaaaagaaactttattaaacgatgatgcaactgggtggtggtactccgaccactacagcggcggctacaaccgtcacaactgctacagcaccaccgccacaatcaaacaacaacgattcagcggcaacagaagcagcggcagcagcggttggggcgtttgaggtgtcggaagagatgcacgaccgtgggtttggaggaaatcgttggccgcggcaggaaacgctagcgttgttgaaaatacgatctgacatgggaatagcgtctcgagacgctagcgtaaaaggtcccttatcgga

SEQ ID NO: 90818 - DNA, 581 bp, Arabidopsis thaliana columbia
  unsure (1)..(581): unsure at all n locations
aacatggaggatgaagaaccaagatggagagagcttgagtgtagcgcattcccaggcgtggttgtaccgcctccaagactagaccatgtggctgtgagcatgccgtgtggtagggtcatcatctttggagggtcgattgcagggcttcactctccttcgcaactgtttctaatagatccttcaaaagagaaaccgtcatggaggatcctgaatgtcccagggaaaccacccaagttagcttggggacatagcacatgcgttgttggaggaactagagtattggtccttggtggtcacaatggtgaggaatggatactcaatgaattacatgaactctgcttggctagctggcaagactcggatctgtaaagactctttccttattcatttggtttgtggttatgtatctgtcacattccaaactcttatgacagaagcgtgtgtacatagtaaattagtgattgttgtacgctttagatatcaatgtaatgatggtaatggggttgctgcatgagatccttccataatatacttactccctggtacatgaccatgtagcatttgactttgacgganannaa

SEQ ID NO: 90819 - DNA, 1060 bp, Arabidopsis thaliana columbia
  unsure (1)..(1060): unsure at all n locations
tacgcgcgnnnnnnnnnnnnnnnnnnnnnnnnnnnnnnnnnnnnnnnnnnnnnnnnnnnnnnnnnnnnnnnnnnnnnnnnccacgcgtccggttgtccgtttgagtgatgctattaacgatgaaggcaagcgcatagagaatctggtcagagggatatttgctggaaacatctttgatctgggttctgcacagcttgctgaggttttctcaaaagacggcatgtcctttttggctagctgtcagaacttggtttcacgaccatgggtcattgatgacttggataactttcaagctagatggctcaagaagccttggaagaaggctgtgatatttgtcgataattctggtgcagacataattttgggtatcttgccctttgctagagaaatgctacgtctaggaatgcaggttgtactggctgctaatgagcttccgtctatcaacgatgtaacttatatcgagcttgcagagatcttgtctaagctgaatgatgaaaatggacaattgatgggtgttgatacctcaaatcttcttattgcaaattcagggaatgacttaccggttattgatcttgcaagagtatcacaggaggttgcgtacctctcaagcgatgcagacttggtcatcttagaaggcatgggccgtggaatagagacaaacctttatgctcagttcaagtgtgattccctcaagatcggaatggtgaagcatccagaagtagcacagtttctcggaggacggctttatgactgtgtcatcaaatacaatgaagttcagatttaattatatttcacacacatttttactaaaccagccattcagtttattatattaaaaactgttaggctttgtaagttagagatccaatctctatctctgcattcagatgtaagaattgaaaactctttcgacattctttatcaaacacacacaaaaagcaccaatctttctgattggcccttaaaaaaaaaaaaaaaaaaaagnnnnnnnnnnnnnnnnnnnnnnnnnnnnnnnnnnnnnnnnnnnnnnnnnnnnnnnnnnnnnnnnnnnnngctcatt

SEQ ID NO: 90820 - DNA, 576 bp, Arabidopsis thaliana columbia
  unsure (1)..(576): unsure at all n locations
ccgnnnnnnnnnnnnnnnnnnnnnnnnnnnnnnnnnnnnnnnnnnnnnnnnnnnnnnnnnnnnnnnnnnnnnnnccacgcgtccgcggacgcgtgggttgaagctaaatctctctctctctaactacctctgtggtacagagtctccgtgttctaaaagctttgagaccatcttcaatttcacagagaaaaacaaaacaagcaaggagaagaaacatgaacatcttcactaagaaacctaatcccagagaagtgcttcgggagagtaagagagagatgacacaagctaccagaggaatcgaaaaggaaatcggatctctgcaatcagaagaaaaaaagctcgttctcgagatcaaaagaactgctaaatcaggcaatgagggagcgactaagattcttgctcggcaattgatccgtctaaggcagcaaatagctaacttacaaggtagccgagctcaaatgcgaggcattgctactcatacacaggctatgcatgcacacacttcagttgctgctggaatgcaaggtgccactaaggcaatggcagctatgagcaagaatatggatccagcaaaac

SEQ ID NO: 90821 - DNA, 380 bp, Arabidopsis thaliana columbia
ccacgcgtccaataagcttattgctagataaggtgaccaggttctgatcaaagtcgttaatcaagtgccaaacagcatctctctccactggcatgggatccggcagttacgaagtggttgggctgatggtccagcctatataacccaatgtcctattcagacaggacaaagctatgtttacaactataccattggtggtcaacgaggcactctgtggtaccatgctcacatttcatggctaagatcaacagtctatggtccacttatcatccttcccaaacgcggacttccttacccgtttgctaaacctcacaaagaagttcccatgatccttggggagtggttcaacgcagacactgatgcaatcatccgccaagcaa

SEQ ID NO: 90822 - DNA, 549 bp, Arabidopsis thaliana columbia
  unsure (1)..(549): unsure at all n locations
nnnnnnnnnnnnnnnnnnnnnnnnnnnnnnnnnnnnnnnnnnnnnnnnnnnnnnnnnnnnnnnnnnnnnnnnnnnnnnnnnnnccacgcgtccgcggacgcgtgggaaaaaaaatcaaaaataaactcttgagcgatgagcaaccacctcttaccaccggagaacaagatcccgactctcaacttcgaccatctagagattttctcagcccttggacgtggatctaaaggagttgtgttcttagtaaaagccgataacaaatggcttgctttaaaagtcatactaagagaatcaatcgagtcaaagaaggccaaagatgagtacaaacgcataagtttcgaacaaggagtgttgtctcgattcgaccatcctctgtttccacgtcttcatggtgttatatccaccgataaagttatcggttacgcgattgattactgtcctggaagagatctcaactctttaaggaaaaaacagtcggaagaaatgttttccgatgagatcattagattttacgcggcggagcttgtgattgcacttgagtatttgcat

SEQ ID NO: 90823 - DNA, 637 bp, Arabidopsis thaliana columbia
taaaaattaaatttataaaccaaaaacaatgaatctcgccacaaagtttcatgtgatggtacttttgctcattgtaattggagatgtttgtgccaatgtaggcgcaaggccgctagaagaagtttccaaagaacttatggataagaagaccgcttcggttcctaagacactgttaccgttcgcaccaatatcattaccaacattaccgccagcgcagttaccaggtttacccactccgccaaagatgtctaatggtgacactggaggagttgatgagaacgcagatggtagactacccaaagatgcttcagcgggttcccatggtgccacagccagaggatatcgttccggaggtggcaggagtgatgcgtcgggcagcactgacccttggccttgagcgtgaggtgatgatgttcaattgttcattgctcaaacctatataataagataataatactctacaaacgcacggtctcttttctgttcataaataaaactagagattgtcccctttaataataagaaatccctaataataatcatgaaatgctactttctatgtgtaatatataaaataaatgtaataatttactacggctttatcttagtgaataatatatgtatgagtgattatggt

SEQ ID NO: 90824 - DNA, 610 bp, Arabidopsis thaliana columbia
  unsure (1)..(610): unsure at all n locations
tgctacgcgcgnnnnnnnnnnnnnnnnnnnnnnnnnnnnnnnnnnnnnnnnnnnnnnnnnnnnnnnnnnnnnnnnnnnnnnnccacgcgtccgaaacaatgaaaggcgtctcctccaaaaaccaaaaagttattgaatctctctctggctgattgattaatggctgaggagaccgtacgtttgcctaattcgccggatgtaaacatatcatggagaaggatttctactggaaaactgagttttttatacactcaagagaaagttgttcctaattatctcacatctcccactggttcttgtcatgatgcttgtaaatcccgaaggaaagatgaatctgaagacaagccaagagttccacatcgcaaaagcgttagcagaagctattctggagctataaacttggattcaccactgaggaagagggcattgacaaaaccgctgttgagtccttctcgtagatgtgattctgttggtggctttgaacatgcgaagagccaagttaggaacttttctagcggagtttgtgatgttaataacagtcttgcacatggaacaattgaaaaggcactggctgcttctgaatctaggttagctgattcgactaagcgaa

SEQ ID NO: 90825 - DNA, 646 bp, Arabidopsis thaliana columbia
atgatacgccggctctaatacgactttattagggaaagctggtacgcctgcaggtaccggtccggaattctccgggtcgacccacgcgtccgctctgcctcacactttaaaataacatcaaatctctatctatttatacaaacccttttcatctggcatcttcagttcagtaaaatagaagaaagcatctaacgaattggacaagtaagtgcgtttatgagtgatacagggatatcagcagtagcagttgctgctgctgtagtggtggtaactacggttacggtatggatatggaaaggtctgaatgtagcttggcttagaccaaagaaaaatgaggcttatctaaagagacaaggtctctctggaactcctttcacctttcttgtcggagacattaaaagggaagccagtatggtggagcaagaaaagtccagacccatcaatctaactgatgattacacgcatcgtgtcatgcctctgatacaacagaccgttaaggatcatgggaagacatcttacatgtggatgggacctatagcgagtgtgattgtgacgaaaccagaacacatcaaagatgttctaaacagagtttacgatttcccgaagccgccagtgcacccaatcgttgagctcttcgcgactggag

SEQ ID NO: 90826 - DNA, 793 bp, Arabidopsis thaliana columbia
tccatacaactcttataggaaaagctgctccgcctgcaggtaccggtccggaattcccgggtcgacccacgcgtccgttttggactaagtctgcttttgagaagcttgaatctatctatggctcgtttgagaaaccatcagagaagaagaagggttacgtcttgcctcgtgcgaagatggtgaatgctgatcttgctaggattattaactccgatgaggtacagagtgtggtgaacccgattaaggatggttccaagagagcggttctgaagaagaatccattgaagaaccttaatgtgatgttcaagttgaatccttatgctaagaccgcaaagagaatgtctctgttggctgaagcttcaagggttaaggctaagaaggagaagctcgagaagaagaggaaagtcgtcactaaggaggaggcccaagcgatcaaagcagccaggcgaggcttggtatcagcctatgatgtcagacagtgactacaccgagttcgataacttcacccaagtggcttgccgctagtcagtaatgatgctctcgtcatcgcagagtctcttatttctacgccaaagattttgggcttctgcattcaatgcccttcgtgtagcattggatttaatctgggattttcatgttgctggaagttgcgtaagaccactttttaagaaactaatgatgggtggttttcacaactctcttcaacaaaaaaaaaaaaaaaagggcgggcccgctctagtggatccaagctcacgtacgcgtgcatgcgacgtcaaagctcttctatagtgtc

SEQ ID NO: 90827 - DNA, 950 bp, Arabidopsis thaliana columbia
  unsure (1)..(950): unsure at all n locations
gatgcctcttgttgttagcgactcagctgaatctgtggagnagacatcagctgcgagcaaggtattgaagcatattttttcttagaacgatgcagnaaaagctaagaacagtattggaattcgtcctggtaaaggtaaaatgaggaatcgtcgttacatttctaggaaaggtcctcttgttgtgtttggaactgaaggagccaagattgtgaaagcttttaggaatcttcctggtgttgagctttgtcacgttgagaggcttaacttgttgaaattagcccctggtggtcaccttggtaggtttgtgatttggactaagtctgcttttgagaagcttgaatctatctatggctcgtttgagaaaccatcagagaagaagaagggttacgtcttgcctcgtgcgaagatggtgaatgctgatcttgctaggattattaactccgatgaggtacagagtgtggtgaacccgattaaggatggttccaagagagcggttctgaagaagaatccattgaagaaccttaatgtgatgttcaagttgaatccttatgctaagaccgcaaagagaatgtctctgttggctgaagcttcaagggttaaggctaagaaggagaagctcgagaagaagaggaaagtcgtcactaaggaggaggcccaagcgatcaaagcagcaggcaaggcttggtatcagactatgatttcagacagtgactacaccgagttcgataacttcaccaagtggcttggcgctagtcagtaatgatgctctcgtcatcgcaaagtctcttatatctaggcaaagattttggttttctgatttatgttcttcgtttgtattggatttatctgggattttatgttgttgagttggtaagacgatttttaagaactatgatggtgtttttcaaactcttttcaatctgtttcccatctgtttcccttagcgcccc

SEQ ID NO: 90828 - DNA, 515 bp, Arabidopsis thaliana columbia
  unsure (1)..(515): unsure at all n locations
nnnnnnnnnnnnnnnnnnnnnnnnnnnnnnnnnnnnnnnnnnnnnnnnnnnnnnnnnnnnnnnnnnnnnnnnnnccacgcgtccgcaagaacggcttcgatgcctttcacatcgccgccaaaaacggaaatctacgtgagttgacttgattctcaaaagtctttgtgctcaagaattaccaattttgcatatatatgctgaagatcaactccatttttatctctaattaggttcttgatgtgttaatagaggcaaatccagaactctcatttacatttgattcatccaaaaccacggcgcttcataccgcggcttcacagggtcatggagagattgtttgtttcttgttggataaaggtgtggacttagctgctattgcgagaagcaatggtaaaaccgctttgcactctgcagctaggaacgggcacacggtgattgtgaagaagttgattgaaaagaaggctggtatggttacaagagtcgacaagaaaggtcaaaccgctcttcatatggcg

SEQ ID NO: 90829 - DNA, 602 bp, Arabidopsis thaliana columbia
actacgactcaccttagggaaagctcgcacgcctgcaggtaccggtccgcaatacccgggtcgacccacgcgtccgctcgttatttgcgctatggtcacttgtagaggaactcaatttgagatgtttctgccgattgttggatcaaattatatatcatgatgtttcataatatttctgtttcctagactattaaagtgtatcaatgcggagttggctagctttcttctgacagcgatggcttccttagcgtcgtcttggtcggcaccactccggaagcagtagcttacatagtatcgtcttgaccggatttcgggtttgtctccgccgttgttatgtttttcttccagttgtttatttacttacaataaattttattagggatgtgttgataatatcgattgaagcgaattatcgcttaatgaagtgtattattcgatgcttttacttttgagtttgcaattacaggaattgattcatagcttttcaatgaattatggactcttattggctttaaaaaaaaaaaaaaagggcgaccgctctagaggatccaagcttacgtacgcgtgcaggcgacgtcataactcttctatagtgtgtccta

SEQ ID NO: 90830 - DNA, 589 bp, Arabidopsis thaliana columbia
cggagcaagagatcgacttctttggggagatcttggttttccatttaccccccgccacagcaagcactcttcataggcgtttgggaccgcacttacggaagtctaattgagtatagccggcgccacaactactcctaccttgattcatttctatgatcacccgacataccagaggaataaaagagccgatacatatgtgctgctgcactctcctgtcgctctgttaaactaagaaacccgagaaaagagaaaacataaactcaagtcgatctctaatggtgtaaatgatgtgttgtgcaagtactagtaggaatgttgtcacagagagcggatttagttagttaatgttcatttcttgtatgagagttggagttcgtgtattgtacataagtatatgaggttcgggtgagtttgcatcaagtctcaactcttggcacagagacaactttactcgagtctgtggctcgttatttggctatggtcacttgtagaggcactcaatttgagatgtgtctgccccattgatggatcaaacgcggccgcgaattcgatatcaagcttatggtagaccctcgacaacaaggggggg

SEQ ID NO: 90831 - DNA, 358 bp, Arabidopsis thaliana columbia
cattctctctcttaacacactcttattcttcagagagagaatgagaattccggcgacaactggtttttttgttttatacatagtttctgacttttgacggatctctctttccgcttagtcagattttaataattttcggtttagcttggttcgtttccggttaagatcggattatttttagttttatgttttttccctctttctacaggatttcagtgtaaatcccgcttgctgtcaattggtttctttcaggttcatctgttggcttgactcttctccaaagttagagtaatatcttcgccgtaatgtcttcgtcgttatgcgaagtggacctctctatcggtcttgggcggagctt

SEQ ID NO: 90832 - DNA, 531 bp, Arabidopsis thaliana columbia
  unsure (1)..(531): unsure at all n locations
atcaaaatttcatcaacccaaaaaagtaaaaaaaatctgtagctttcgcatgtaaatctctctttgaaggttcctaactcgttaatcgtaactcacagtgactcgttcgagtcaaagtctctgtctttagctcaaaccatggctagtaacaaccctcacgacaacctttctgaccaaactccttctgatgatttcttcgagcaaatcctcggccttcctaacttctcagcctcttctgccgccggtttatctggagttgacggaggattaggtggtggagcaccgcctatgatgctgcagttgggttccggagaagaaggaagtcacatgggtggcttaggaggaagtggaccaactgggtttcacaatcagatgtttcctttggggttaagtcttgatcaagggaaaggacctgggtttcttagaccctgaaggaggacatggcaagtgggcaaaagatttctcaaggtggttgtgtttnnnaatcggtgttcctcttttgnaaacctttttttccacgggnagcctttt

SEQ ID NO: 90833 - DNA, 693 bp, Arabidopsis thaliana columbia
  unsure (1)..(693): unsure at all n locations
nnnnnnnnnnnnnnnnnnnnnnnnnnnnnnnnnnnnnnnnnnnnnnnnnnnnnnnnnnnnnnnnnnnnnnnnncttcttcttcccactctacgccatagctatggttttaccagagcttctcgtgattctagcagaatgggttctttaccgtcttcttgctaattcatgttacagagctgctagaaagctcagaggctatggtttccagttaaaaaatctcctaagcctctccaaaacacaatctctacacaacaattctcagcatcatcttcataaccatcatcaacaaaatcaccctaaccaaacccttcaagattctctagaccctctgttcccaagccttacaaaataccaagaacttcttctagacaaaaacagagcatgctctgtttcgtctgatcattatcgtgatacctttttctgcgatatcgatggtgttttattaagacaacattcgagcaaacacttccacacgttcttcccttacttcatgctcgtggcttttgaaggaggatcgatcatcagagcgatccttctcttgctctcctgttctttcctttggactctgcaacaagaaaccaaactcagagttctctctttcataaccttctctggtcttagagtcaaagacatggacaatgtttctagatcggttctaccaaaattcttcctcgagaacttgaatatccaag

SEQ ID NO: 90834 - DNA, 1003 bp, Arabidopsis thaliana columbia
  unsure (1)..(1003): unsure at all n locations
atgatatcgccggcannnnatacgactactatagggaaagcctggtcgcctgcaggtaccggtccggaattcccgggtcgacccacgcgtccggcaacctctaaacaacacacaatttcgaaaatggcgcagcgatctagggttatcaccatgtctcctctcattctcgatcaagaagttgatctcgatctctgggaagttgttaatccttctgatggcgagttctccgacgattctttctccgtcgatagtctttccgacgatgacgtcatatctcttgacgacgcttcctttgtcgcaccctctgtcatttctccgccgcatgagataattcctattgctgacggtggtgatctcgccgtggatctggatggtgatgatgatgttggcgatgatgtcgttcgcgatgaagttgatgagaatgatcttggatggtctcagcagcggatgatgtttctcggtggaggttctggttattctgttggaattacgtacggagatagtgttaatgacgacggcgaagaagatcgcgagtacgacgattcgtatgatcttgacgaagagttggttccgcgtagcgtgagtaagaaggtggggagacaaaggatgaggaaactggggaaaagagcaatcgccaaggtctatgcctcgaagatatctccgtttttgaagcctggtatcgttcgtggtaagcatggtctcggcatgaaattcaagtgctgattgtgttgggatttcgaagtttcacaaggcgatgggatggtttcttcaagaactctcggtagaatttctcagtttctgggtttaattgatgtgtaaatttgttagttcaatttcaattcctctttagtagtaagtaattcggatgcttctgaagatctcattgtacatgatggaaattaaataactcgcattttaggaaaaaaaaaaaaaaaagaaaaannnnnnnnnnnnnnnnnnnnnnnnnnnnnnnnnnnnnnnnnnnnnnnnnnnnnnnnnnnnn

SEQ ID NO: 90835 - DNA, 518 bp, Arabidopsis thaliana columbia
  unsure (1)..(518): unsure at all n locations
nnnnnnnnnnnnnnnnnnnnnnnnnnnnnnnnnnnnnnnnnnnnnnnnnnnnnnnnnnnnnnnnnnnnnnnccacgcgtccggtagctctctgtctttcgaagcagaagtgagactttgacgacaacagtgggaggaactatgagttcttgtgttgtgacgacaagctgtttctatacaatttcagattctagtatacgtttgaaatcccccaagctcctcaatctgagtaaccagcagagaagacgctctcttaggtctcgaggtggtttaaaggttgaagcttactacggtctaaagacacctccttatccacttgatgctttggagccgtatatgagtagaagaacactagaagtgcattggggaaaacaccatcgaggttatgtagataatctgaataaacagttagggaaagatgatagactctatggatacaccatggaagagcttatcaaggctacatacaacaacgggaatcctttacccgagttcaacaacgctgcacaggtctataac

SEQ ID NO: 90836 - DNA, 746 bp, Arabidopsis thaliana columbia
  unsure (1)..(746): unsure at all n locations
agctgttaggattgatccttcttactccagagctcaccaaagacttgcttctctctatctcagattgggtgaagctgagaatgcaagacgtcacatttgtttttctggtcaatgtccggntcaagctgatctccaacggctacagacgctggagaagcatctccgacgatgctgggaggctcgaaagattggagattggaaaaccgcgattaaggaaaccgatgcagccattgcaaacggcgctgattcgtctcctcagcttgtagcttgtaaagcagaagcctttttgcgtcttaagcaaatagaggattcggatttttgtgtatcttgcattccaagattggatccatcattacccattttcaaccgcaggggaaaactctctttggtatggtagttgaagcttatgtgctctgtatccaagctcaagttgatatggcattaggaagatttgagaatgcggttgtcaaggcagagagagctgcgatgcttgatcaaaccaatcctgaggttgtatcagttttaaacaatgtgaagatggttgtgcgggcacgtactcgtggtaatgagctatttagttcggggagattctcggaagcgtgtgtagcttatggagacggtctcaagcaagatgactccaattcggttttgtactgcaacagagcagcgtgttggtataagctcggtttgtgggagaaatctgttgaagattgtaaccatgcgctcaaaagccagcctagttacat

SEQ ID NO: 90837 - DNA, 643 bp, Arabidopsis thaliana columbia
  unsure (1)..(643): unsure at all n locations
atgtctcgccggcannnnnnnnnnnnnnnnnnnnnnnnnnnnnnnnnnnnnnnnnnnnnnnnnnnnnnnnnnnnnnnnnnnccacgcgtccgcccacgcgtccgcccacgcgtccgcccacgcgtccgcggacgcgtgggctcagtaggctccaacttgagcaatcttgagagtggaaaagtttatcaagataatcatcactcagctgtggagaaacctgttttggtccaaaatacagtaagtagggaacaaatcgatcagattactaacatctcagcatctctagcgcagtttcttgcaaatggtcagcccattccacagcttgaacaggcattgcagctgcctctgcattcagaatctgttcaaccaaatcaggctactactcaaagtaatgtagtgagtagtaatccaaatcagctatggggattagggatgagcactggcgctgaaggagtccccgcggttactgcatcaaagataagcaatgtcgaagagattcaagaagtatcgctagatcccaaggataacggggacaaaaagactgatgaagctagncaggaagaagagggtaagaaaactggagaagacactaatgatgctgagaatgtcgtggatgaagatgaagatggtgatgatgatggga

SEQ ID NO: 90838 - DNA, 517 bp, Arabidopsis thaliana columbia
  unsure (1)..(517): unsure at all n locations
nnnnnnnnnnnnnnnnnnnnnnnnnnnnnnnnnnnnnnnnnnnnnnnnnnnnnnnnnnnnnnnnnnnnnnnnnnnnnnnnnnnccacgcgtccgcccacgcgtccggtttatatctcagaaaatggcaaaaatcgtgatattatttgatttcgatcggactttgatcgacggagatagtgacaattgggttgtcactgaaatgggacgcgcagagatcttccatcagctccgtttcactttaccatggaatcgtcttatggataggatgatgatggagctacaatcacaaggtagatcgattgatgacattaaatcttgtttgaagaaaatgcctattgattctcatattattgaagctatcaaatcagctaaatcttcaggatgtgatttaaagattgtgagtgatgcaaatcagtttttcattgagaagatactagagcaccatgatttggtggattgcttttctgagatttacacaaatccaacctctcttgatgataatgggaacttgcggat

SEQ ID NO: 90839 - DNA, 518 bp, Arabidopsis thaliana columbia
  unsure (1)..(518): unsure at all n locations
tgatatnnnnnnnnnnnnnnnnnnnnnnnnnnnnnnnnnnnnnnnnnnnnnnnnnnnnnnnnnnnnnnnnnnnnnnnnnnnnccacgcgtccggtgaaatcaacaacagcgacgactgcagccgtgccgagcactcatctcttcttctctctcagtctcgctcgccatctccgtggagatcctcggacatggtcatgagatcgtaagagagaatcttcaaaaaattgaaattggaaatcgataagctaggagctaaggagaaatgtcggggaaactttggatcccgagatttattctcatcactctactgtttattagctcacgagttaactctcaatgtgaattcagtttcactggacgcaacaaggtctttcatttcaacctagcatcttcgattcggaattatcctcacggtgtgctcagcgaagatgggttttataaagtggaagcgaacagttccgtgttatggtttcagctttgtgacgtgctgattttcaatcatgatccccctcgatgtg

SEQ ID NO: 90840 - DNA, 589 bp, Arabidopsis thaliana columbia
  unsure (1)..(589): unsure at all n locations
agtcgaccgtatcgatatgcttgatatcgaattcgcggccgcgacggattttgcaaactagcgcgttatgtcagaagcaactaagcaagatcctcgatgattcggatcttgaaagcatcattgaaggatgcttggatttggaaatgaaagaattcaccttaaatgaagtgttgactgcttccacaagtcaagtaatgatgaagagtaacggaaagagtgttcggataacaaatgagaccggagaagaagtaatgtctgacactttgtatggagacagtattaggcttcaacaagtcttggcagatttcatgctgatggctgtaaactttacaccatccggaggtccagctaactggtttcagcttcccctggaggaaaggntcagctccgggcggttctggtgcatccttggccaaacccaaggngatcangggttaaccncanacccggagcntgggnaanccngnngttttttcccaaaccaaatgnttttggggcctgggggaaaatgtgcccaaaaaagggttggcctaaanngggttccccggaacctggggaaaccnnataangggngtttccnnacntttgg

SEQ ID NO: 90841 - DNA, 3892 bp, Arabidopsis thaliana columbia
  unsure (1)..(3892): unsure at all n locations
cgtcgtcgtctgtgttagggagcacaaataatagagaggcgtagcacaagagagaaggtggtgatcgaggccaagatttagaatttaactataacaaaaagcctctgacgagtgtgactagtcacaagatctgatcatggcttcttgaaacttcttcttcttctttcttctctttaaaggaaaaaaatgtcaggctctaggccgactcagtcctctgagggctcaaggcgatcaaggcacagcgctaggatcattgcgcagaccactgtagatgcgaaactccatgctgattttgaggagtcaggcagctcctttgattactcaacctcagtgcgtgtcactggcccggttgtggagaatcagccaccaaggtctgacaaagttaccacgacttatcttcatcatatacagaagggaaagctgattcagcccttcggttgtttacttgccttggatgagaagaccttcaaagttattgcatacagcgagaatgcatctgagctgttgacaatggccagtcatgcagttcctagtgttggcgaacaccctgttctaggcattgggacagatataaggagtcttttcactgctcctagtgcgtctgcattgcagaaagcccttggatttggagatgtctctcttttgaatcccattcttgtgcactgcaggacttctgcaaagcccttttatgcgattatccacagggttacagggagcatcatcatcgactttgaacccgtgaagccttatgaagtccccatgacagctgctggtgccttacaatcatacaagctcgctgccaaagcaatcactaggctgcaatctttacccagcgggagtatggaaaggctttgtgatacaatggttcaagaggtttttgaactcacggggtatgacagggtgatggcttataagtttcatgaagatgatcacggtgaggttgtctccgaggttacaaaacctgggctggagccttatcttgggctgcattatcctgccaccgacatccctcaagcagcccgttttctgtttatgaagaacaaggtccggatgatagttgattgcaatgcaaaacatgctagggtgcttcaagatgaaaagctttcctttgaccttaccttgtgtggctccacccttagagcaccgcacagctgccatttgcagtacatggccaacatggattcaattgcatctctggttatggcggttgtagttaacgaggaagatggagaaggggatgctcctgatgctactacacagcctcaaaagagaaagagactatggggtttagtggtttgtcacaatacgactccgaggtttgttccatttcctctcaggtatgcctgtgagtttctagctcaagtgtttgccatacacgtcaataaggaggtggaactcgataaccagatggtggagaagaacattttgcgcacgcagacactcttgtgcgatatgctgatgcgtgatgctccactgggtattgtgtcgcaaagccccaacataatggaccttgtgaaatgtgatggagcagctctcttgtataaagacaagatatggaaactgggaacaactccaagtgagttccacctgcaggagatagcttcatggttgtgtgaataccacatggattcaacgggtttgagcactgatagtttgcatgacgccgggtttcctagggctctatctctcggggattcggtatgtgggatggcagctgtgaggatatcatcgaaagacatgattttctggttccgttctcataccgctggtgaagtgagatggggaggtgcgaagcatgatccagatgatagggatgatgcaaggagaatgcacccaaggtcatcgttcaaggctttccttgaagtggtcaagacaaggagtttaccttggaaggactatgagatggatgccatacactccttgcaacttattttgaggaatgctttcaaggatagtgaaactactgatgtgaatacaaaggtcatttactcgaagctaaatgatctcaaaattgatggtatacaagaactagaagctgtgaccagtgagatggttcgtttaattgagactgctacggtgccaatattggcggttgattctgatggactggttaatggttggaacacgaaaattgctgagctgactggtctttcggttgatgaagcaatcgggaagcatttcctcacacttgttgaagattcttcagtggaaatcgttaaaaggatgctagagaacgcattagaaggaactgaggagcagaatgtccagtttgagatcaagacacatctgtccagggctgatgctgggccaataagtttagttgtaaatgcatgcgcaagtagagatctccatgaaaacgtggttggggtgtgttttgtagcccatgatcttactggccagaagactgtgatggacaagtttacgcggattgaaggtgattacaaggcaatcatccaaaatccaaacccgctgatcccgccaatatttggtaccgatgagtttggatggtgcacagagtggaatccagcaatgtcaaagttaaccggtttgaagcgagaggaagtgattgacaaaatgctcttaggagaagtatttgggacgcagaagtcatgttgtcgtctaaagaatcaagaagcctttgtaaaccttgggattgtgctgaacaatgctgtgaccagtcaagatccagagaaagtatcgtttgctttctttacaagaggtggcaagtatgtggagtgtctgttgtgtgtgagtaagaaactggacagggaaggtgtagtgacaggtgtcttctgtttcctgcaacttgccagccatgagctgcagcaagcgctccatgttcaacgtttagctgagcgaaccgcagtgaagagactaaaggctctagcatacataaaaagacagatcaggaatccgctatctgggatcatgtttacaaggaaaatgatagagggtactgaattaggaccagagcaaagacggattttgcaaactagcgcgttatgtcagaagcaactaagcaagatcctcgatgattcggatcttgaaagcatcattgaaggatgcttggatttggaaatgaaagaattcaccttaaatgaagtgttgactgcttccacaagtcaagtaatgatgaagagtaacggaaagagtgttcggataacaaatgagaccggagaagaagtaatgtctgacactttgtatggagacagtattaggcttcaacaagtcttggcagatttcatgctgatggctgtaaactttacaccatccggaggtcagctaactgtttcagcttccctgaggaaggatcagctcgggcgttctgtgcatcttgctaatctagagatcaggttaacgcataccggagctgggatacctgagtttttactaaaccaaatgtttgggactgaggaagatgtgtcagaagaaggattgagcttaatggttagccggaaactggtgaagctgatgaatggagatgttcagtacttgagacaagctgggaaatcaagtttcattatcactgcggaactcgctgcagcaaacaagtagtccccaaaagaaaaggggtctggcttgatataaaatagtcactggttgttctttgcttgtaactttccttatcgcttttgttttcgttttcaaatttcagtaacgatgaaatatccatccatttacatcttctgttgaactcttttctgaagctgtaaatatggatgcatatctaatctcctcctgagtgttttggtttcatgatgtatcattcaaaataagtaatataggagaaatgagctaatgtttagcggccgannnnnnnnnnnnnnnnnnnnnnnnnnnnnnnnnnnnnnnnnnnnnnnnnnnnnnnnnnnnnnnnnnnnnnnnnnggtag

SEQ ID NO: 90842 - DNA, 671 bp, Arabidopsis thaliana columbia
  unsure (1)..(671): unsure at all n locations
nnnnnnnnnnnnnnnnnnnnnnnnnnnnnnnnnnnnnnnnnnnnnnnnnnnnnnnnnnnnnnnnnnnnnnnnnnnnnnnnnnnccacgcgtccgcagaacaagatgatcagagaactcgaaagactcagcaaactttgccatgaccatttggttagaccgatagggtttgttatatacgaagacgttgctctcttgttgcatcagcatttacctaatggtaacttaactcagctgattcatgagtccaccaagaaaccagagtaccaacctgactggccaatgagactgtccatagctgttggagcagcagaaggtttagcatttctccaccaagtcgccatcattcacctcgacgtttcctctagcaacgtcttgctagactctggttacaaagccgtgcttggggaaatcgaaatatcgaaacttctagatccctctagaggcaccgcgagtattagctcagttgcaggctcttttggctacattccaccagagtatgcatacacaatgcaagttacagctccggggaatgtttacagttatggagttgtgttgcttgagattctaacctcaagagcgccggtggaggaagagtttggtgaaggagtagatttggtgaaatgggtccatggagcttcagcgagaggagaaacaccggaacagatactca

SEQ ID NO: 90843 - DNA, 805 bp, Arabidopsis thaliana columbia
agctgatatcgataaccctcttttccagaatgctactcagcagaacgacaaatactacattctcaagaagcgaacagcatcatattcaagctatgcagatcatcattctcctggtttaacaactcaaggcaccaaatttggcaggaagatagttaaaaccttggcgtatcgggttaaatcgacgcagccgtcttctggtaacgctaagactgctggtgaaacttcagaagaagatgggttgaagacagatgcttcttctgttgagccacctactctgtctagtactgtgcaaagtgaagcctaccacacgaaaaactctgttgtaagtcttggaaaatctccatcctacaaggaagtagcattggcaccacctggttcaattgctaagtatcaagtctgggttccacaagcggaagtttcagataagcaagaggatgatgagatggagaaaaaaactgaacagggtacatcaatggagcttacaagggatgagcaaatgataacagggttagaggaagaggtaaaaaaggaaatttctgcagacccagaatctaacataacccaaggcgaagaagagatcaaagtagagttacaaccatctgaaggagtactcggaggaagtcatataaatgaaaacgacgaatctgggggtggaattcaggttgaagaacaagtcgaagttgaattgataaacgatggtgtaacagatatgattcattcgaccagagagcaacaagtgatagatcaattagctgctgattccgaagatctgaaggcaaaactgtcaatttctactacggactca

SEQ ID NO: 90844 - DNA, 198 bp, Arabidopsis thaliana columbia
ccacgcgtccgaatttgaaagaaaagaaggtttctcatgagtttgtgagctcacggtgaaagtccataagttatatatagcttgatttgctttcttacagttgttttgatatgacggatatacagaactcccatgtaatgacgtaccacagttgcgcataacgtttgaacgcttttattgatctatataatggacctt

SEQ ID NO: 90845 - DNA, 524 bp, Arabidopsis thaliana columbia
  unsure (1)..(524): unsure at all n locations
nnnnnnnnnnnnnnnnnnnnnnnnnnnnnnnnnnnnnnnnnnnnnnnnnnnnnnnnnnnnnnnnnnnnnnnnnnnnnnnnnccacgcgtccgagagtctagacaatgaatagctcgatgacgacgagtccaacggctcgagccttccttcatcttcactcgtcaccattcactttacgttcgagaaagtcaccgtctggagtttgtctagtctcgtggccgccttctcggtctcgcaggactcgacgactcgtttgtatggccgaaccttacctcattaggaaaatggagtctgttgagaagacatggaaggagttatcggtgaaactagctgacccagatgttgtttcgaatcaatctgaataccaaaaactggcacaatccatgtcggagcttgacgaggttgtaacagtcttcagaagattcaaggactgtgagaagcagttactagaaagcaaagttttggcgaaagaggctggagatgatgaagatatggctgaaatgataggaagtgaaatcaactcg

SEQ ID NO: 90846 - DNA, 437 bp, Arabidopsis thaliana columbia
gggtccacccactcctgcaaactaataaatttccaacccttatataaggaattctgacagagtcggctgctagattagttttgtgtctctctcgtcatctctcttcctctctgtaatcccaaccggagttacgattccttcttatcgtaactcctgcttccgatctcgatccaattttcacttttgttttgtccgaacggtaaatcatttcgcggcttttttttttttaagggaaggaggaataagcaaattttgatttgattccgtttttttgggggtgttagtgatcttttagatgaagtaaagaaattttgattattgaggggactatgtgggttatggtactcatcggcaactatattgcggatggtagcaccatgttggaggcgaccttctgttaaaggagatcattctactagagacgctaatggtcgatg

SEQ ID NO: 90847 - DNA, 389 bp, Arabidopsis thaliana columbia
accgttgaatcaaaaggcagagattgagatgggacctctgcgaatgggtgggcttgtagcttccctcgggtacaaaggtgtggactatcccgcaaaccgggtgttcgagtggcccaagactggaccgtaaagattctgtgattgaacggtttgaaccagtttcactcatggccgttagagtggccgaaatctgcttttccggcgacggaatatcacactttttaatatatgtttggagatttagacttaaatagttgtaagagctaacagtttgaaagtcactttgcattgttgtttatcttcatataaatgagtttagattttgataatttcagaattcgtggaatcataattaacaattttgattgggaaaaataatttgttttttt

SEQ ID NO: 90848 - DNA, 541 bp, Arabidopsis thaliana columbia
ccggaacggaagtcccgggccgagcgacgcgacactagagacacactgatgccatacttctacacgttgttcagagaagcaaacgttacgggtggtgctgttgtacgcccattatggatggaattcccgcaagatgaagctacttttagcaacgatgaagccttcatggtcggtagtggtctactggttcaaggagtttacaccaagggaacaacgcaagcttccgtgtatttgcctggcaaagaatcatggtatgacttgagaaacggtaagacttacgttggaggcaagactcacaagatggatgctccagaggagagtattcctgcgtttcaaaaggcaggaaccatcatcccaaggaaggaccggtttaggcgaagttcctctcaaatggacaatgatccttatactttggtggtagctttgaacagttctcaagaagcagaaggtgaactctacatcgatgacggcaaaagctttgaaagtcactttgcattgttgtttatcttcatataaatgagtttagattttgataattccc

SEQ ID NO: 90849 - DNA, 847 bp, Arabidopsis thaliana columbia
  unsure (1)..(847): unsure at all n locations
aatacngactcactataggagaaagcctggtaccgcctgcaggtacctggtccggaattcccgggtcgacccacgcgtccggatgctccagaggagagtattcctgcgtttcaaaaggcaggaaccatcatcccaaggaaggaccggtttaggcgaagttcctctcaaatggacaatgatccttatactttggtggtagctttgaacagttctcaagaagcagaaggtgaactctacatcgatgacggcaaaagctttgaattcagacgaggctcttacatccatcgtcgcttcgtcttctcaaagggtgttcttacatcaacgaacttagctcctccagaagctcgtctctcttcccaatgcttgatcgacagaattatcctcttgggacacagctcaggtccaaaatctgcgttggtggaaccgttgaatcaaaaggcagagattgagatgggacctctgcgaatgggtgggcttgtagcttcctcgggtacaaaggtgttgactatccgcaaaccgggtgttcgagtggaccaagactggaccgtaaagattctgtgattgaacggtttgaaccagtttcactcatggccgttagagtggccgaaatctgcttttccggcgacggaatatcacactttttaatatatgtttggagatttagacttaaatagttgtaagagctaacagtttgaaagtcactttgcattgttgtttatcttcatataaatgagtttagattttgataaaaaaaaaaaaaaaaggcggccgctctagaggatccaagcttacgtacgcgtgcatgcgacgtcaagactcttctatagtgcnnnnnnnnnncattcgg

SEQ ID NO: 90850 - DNA, 447 bp, Arabidopsis thaliana columbia
  unsure (1)..(447): unsure at all n locations
catttacacaaaaaccctagatccacaacaatggcggaagagaagaaatcgaagcagagacatcgagtcatggtcttcgaatccatgtatcccatcctcgctcttatgcttatactcgtcgcttgcgtcgagctttgcgatgcagctactgttgtagatgtttatcgtctaatccagtacgatatctctggtgttccttttggttctcgtttctcttctcttaatcatcatgctgcttctcttagcttccaacgtggtgccgatctatctcgttctgtacttatacttcctcttcgtgagcttgacattgcttttgttcaagattacatctcgcaaaagcagtcgcttggtggattgttgattttgcttcctcagacgtttaggcctgggaatgttggtgggtgaagtttaagctctgaaaatgatgggtntaggagtttattaggt

SEQ ID NO: 90851 - DNA, 667 bp, Arabidopsis thaliana columbia
  unsure (1)..(667): unsure at all n locations
nnnnnnnnnnnnnnnnnnnnnnnnnnnnnnnnnnnnnnnnnnnnnnnnnnnnnnnnnnnnnnnnnnnnnnnnnnnnnnntcttcttcctctgattcccccagaaaaaacctagctccttccctcatttccccccaaatctcacgacttatttatgctcgggggagactaatcaaaggtcaaaatccattagggagggaatcgaatctcgatcgatctcaatttcttctgagaaaagaaaaaaatgtcatcggagattgaggtggtggaagaaatccaatcgaatcccaaggagaatggggaatcgagttctaaagggattgaagaagagagcttgaagaacgatgtctatactgctgccgcttatggtgatttggagaagcttcatagattggttgagtgtgagggttcctctgtttccgagcctgatgctcttggctactatgctcttcagtggtctgccttgaacaaccgcgtcgccgttgcccagtaccttatcgagcatggtggagatgtaaacgcgacggatcatactggacagactgcattgcattggagtgctgttcgtggtgcgatacaagttgcagaactgttattacaagagggtgcaagagtagatgcaacggatatgtatggctatcaggcaacacatgttgccgcacagtatgg

SEQ ID NO: 90852 - DNA, 510 bp, Arabidopsis thaliana columbia
ggtgtagcagcagtgatcctagcccaaaagcctgatgatcttctttctcgatgcaatggtgtaccatgcatttttccagattacgagtttggaactgagattttaaaatacatacgtaccaccagatctcccacggtgagaattactgcagctactacactaactggtcagcctgcaacaactaaggttgctgcattctcatgtagagggcctaattcggtttcaccagccattctcaagcctgatatagcagctccgggtgtgagcatactcgcggcaataagtccgcttaatccagaagaacagaacggatttgggcttctttctagggacatcaatgtaaactcctgttgtttctggaataatagctctcctaaaatctcttctccctcagtggtctcctgctgcagtgagatcagctttggtcacaacagcttggaggacaagtccatctggagaaccaatctttgctgaaggatcaaacaagaagcttgcagatccatttgacta

SEQ ID NO: 90853 - DNA, 583 bp, Arabidopsis thaliana columbia
  unsure (1)..(583): unsure at all n locations
nnnnnnnnnnnnnnnnnnnnnnnnnnnnnnnnnnnnnnnnnnnnnnnnnnnnnnnnnnnnnnnnnnnnnnnnnnnnnnnnnnnccacgcgtccgcccacgcgtccgaaaacctttagaattttcatttttttacgattccgatgttaactgtttctccggctccagtactcatcggaaacaactcaaaggatacttacatggcggcagatttcgcagattttacgacggaagacttgccggactttacgacggtcggggatttttccgatgatcttcttgatggaatcgattactacgacgatcttttcattggtttcgatggagacgatgttttgccggatttggagatagattcggagattcttggggaatattccggtagcggaagagatgaggaacaagaaatggagggtaacacttcgacggcatcggagacatcggagagagacgttggtgtgtgtaagcaagagggtggtggtggtggtgacggtggttttagggacaaaacggtcgttcgaggcaaacgtaaagggangaaagtaaagattttttntnccgntngaaccgtnttnangaaaaacc

SEQ ID NO: 90854 - DNA, 972 bp, Arabidopsis thaliana columbia
  unsure (1)..(972): unsure at all n locations
nnnnnnnnnnnnnnnnnnnnnnnnnnnnnnnnnnnnnnnnnnnnnnnnnnnnnnnnnnnnnnnnnnnnnnnnnnnnnnnnnnnccacgcgtccgcccacgcgtccgcccacgcgtccgcccacgcgtccgattctctattaatgggacctgaagattttcttcccaaccaagaagcccttgaccagaaacctgcccctaaagaattggagaaggaggtcgcaggaggcaaagaggcagtggaggaaaaggaaagtggcgaaggatcttcttcaaaacaagatacagatttcaaggactttgattcagctccgaagtacccatttctcaaaaagacgagccacatgcttggagccattcctactccatcttcatttgcttcacagttccaaacaaaggacgcaatgcgtctacacgcagcacaatcttctggttcagttcacgtgactgcaggtatgatgagaatatcaaacatgactctagcagcggacagcggtatgggctggtcatatgacaagaacggtaacctcaacgtagtcctttcattcggggtagtccaacaggatgatgcgatgactgcctcgggaagcaagacaggaattacggcgacaagagctatgttagtcttcatgtgtttatgggttctcctactctctgttagcttcaaaatagtaaccatggtgtctgctcggtaataggatcaaagttgaatcgtctcaaagactttttttggtgtttgtacctctccaatcatatagcctttaactttggcagtgctttgctgctcaatatttaaatttttattcgaagggtttggtgtagcttgaattctctatatggtttctagtttgagtttctagaaataagaacattaaccaccttcttttgacccaaaaaacaaaagggcggccgctttaaaggaacccaggctaaggaagggggccaagcgacgtcaagctcttctaaggtcacct

SEQ ID NO: 90855 - DNA, 1425 bp, Arabidopsis thaliana columbia
tttacaatataaatataacgtatcggtctacgagctaagacacaaaagcaattttctactcatttactgttctgtttcactttctctctctctgtatactctctaaatgatggcaaaaaactgtaatttagtcagtgttctatgtgtatttttggtattgaccctctttaacaaacccatcaccgtcgccgggcagaatattccggcggtgggcttgttcacctttggtgactccaacttcgacgccggaaacaaacagactctcaccaaaaccttactccctcaaactttctggccgtatggaaaatcccgagatgatcccaacggcaaattctccgacggcctcatcgctccagacttcctcgctaaattcatgaggattccgatcgtgatcccgccggcccttcaaccgaacgtcaatgtctcacgtggagctagtttcgccgtcgctgatgctactctactcggagctccggtggaatctttgactctgaatcaacaagtgagaaagttcaatcaaatgaaagcagcaaattggaatgatgatttcgtgaagaagtcagtgtttatgatatacattggtgcaaacgattacttgaatttcaccaagaacaaccctaacgccgatgcatctactcaacaagcttttgtcacttccgtgaccaacaagttaaagaacgatatcagcttgttgtattcatcaggagcgagtaaatttgtgatccaaaccctagctccattgggttgcttacccatcgtcagacaagagttcaacaccgggatggatcaatgctatgagaaactcaacgatttggctaaacaacacaacgaaaaaattggaccgatgttgaacgaattggctagaacagctcctgcatcagctcctttccaattcaccgtctttgatttctacaacgcgattcttactaggacgcagaggaaccaaaacttccgatttttcgttacgaacgcatcgtgctgcggagttgggacacatgatgcttatggttgcggttttcctaacgtacattcgaggctatgcgagtaccaacggtcttacctattcttcgacggacgtcacaacactgagaaggcgcaagagatgtttggtcatcttctttttggagccgatacaaatgttatccaaccgatgaacatccgtgagcttgtcgtttaccctgccgatgaacctatgcgtgagtcttgggtgcccccaacgtcagccaccgttcaactcagggagagccgcggttacgagtattactgagtctctaaaatcaatatttagggatcgatcggggtttctataagggttatgagtcaaattataactggatcaatatcggaatcttgagtagttttaatttccaatgttttcatgtttctctagtgagttttcctccataataaaagattgatctctgc

SEQ ID NO: 90856 - DNA, 700 bp, Arabidopsis thaliana columbia
ggggaaaccctggtcacgcctccagggtcccggtccggaatttccgggctcgacccccggggtcgaattttccccgtcctttgatttatacaaatgccgttcttactaggacgcagaggaaccaaaacttccggtttttcgtcacgaacgcatcgtgctgcggagttggatctcacgatgcttatggttgcggtttacctaacgtgcattcgaagctatgtgagtaccaacggtctttcctattcttcgacggacgtcacaactccgagaaggcgcaagaaatgtttgcccatcttctttttggagccgatacaaatgttgtccaaccgatgaacgtccgtgagcttactgtttacccagtcgatgaacccatgcgtgaattttgggtgcctccaacgccagctactgtccacgccagcgactctagctcgtccactagccgcggttacgagtattactgagtctttttaaaactcaatctttagggtcaatcaggttttctacaatggtcatgagttaatttataaccgaatcaaaatcggaatcttgatgtttttgatttgcaatgttttcctgtttctctagtgagtttttctctataataaaagattgatcttatcatctcgaaaaaaaaaaaaaaaaacaaagggcggccgctccagaggatccgagcttacgcatgcgtgcgtgcgcagtcaag

SEQ ID NO: 90857 - DNA, 633 bp, Arabidopsis thaliana columbia
  unsure (1)..(633): unsure at all n locations
nnnnnnnnnnnnnnnnnnnnnnnnnnnnnnnnnnnnnnnnnnnnnnnnnnnnnnnnnnnnnnnnnnnccacgcgtccgcattttcaagtccagcaaaaaaagcgaagagagggttttaatacgattccactcttctcaacaaatttgacgtttttgttcttcgaaattcaaattcacccagaaaaaatctcaatccgcgatggttgaagaatcagcttctgcgtcggaagcttcggtgatacaaaccctaaccgagccggcgacggagattgcgcaaaccctagaacctaacctagcctcaatcgaagccaccgtcgaatcggttgttcagggaggcactgaatcgacttgtaacaacgacgctaataacaacaacgccgctgacagtgctgctactgaggtttgtgatgaggagcgtgagaagacgcttgagttcgctgaggaattgacggagaaaggctctgtgtttctgaaagagaacgatttcgctgaagccgtcgattgcttcagccgtgctctcgaaatcagggttgcacattatggtgaacttgatgctgagtgataaacgctactatcgatatggattagctctcctggcaaggctcatgctgaagctgatccacttgngaacat

SEQ ID NO: 90858 - DNA, 529 bp, Arabidopsis thaliana columbia
  unsure (1)..(529): unsure at all n locations
nnnnnnnnnnnnnnnnnnnnnnnnnnnnnnnnnnnnnnnnnnnnnnnnnnnnnnnnnnnnnnnnnnnnnnnnnnnnnnnnnnnccacgcgtccgggagagtagaacctaaagaaaaaagtggtcgtccaatggacctctcactaattcaaggcatgtctctgcctctctattttctcttaacattattctttttcttctttgctaccgcaaaaacgcggagaagctctagcaccggcacgcttccaccgggtcctccgatactgccattggtcggaaacatattccaactcggattcaatcctcaccgttcacttgctgccttttcgaaaacgtacggacctataatgagtttgaagcttggaaggttaaccgcagtggttatatcttcaccagaagcagctaaagaggcacttagaacacacgaccatgtcatgtccgctcgaacctttaacgacgctcttcgagcctttgatcaccataaacattctattgtctggattcccccctctgctcgttggaggtttctga

SEQ ID NO: 90859 - DNA, 419 bp, Arabidopsis thaliana columbia
cgagacgcgtggggatctaaaaccctatcagagaccatttcgcgtgaacaaagatggcggggcctttgcttcgatctctttggtcaaacaccactcgaagatccttctcttctcattcatcaccttccaaattcggatactcgctctcctccttacgctccttttcagcagccaccgcttccacagctgcagccggagctcctaatagctcgcttgaccctaatcgactaagaaacgtggctgtgatagctcatgtcgatcacgggaagacaacacttatggacaggcttcttcgtcagtgtggtgctgatatccctcacgagcgtgctatggattctattaatcttgagcgtgaacgagggatcactatttcttcaaaggtgacatcaaatatttggaaggacaacgaacttaacatg

SEQ ID NO: 90860 - DNA, 529 bp, Arabidopsis thaliana columbia
  unsure (1)..(529): unsure at all n locations
taatacgactcactttagggaaagctcgtacgcctgcaggtaccggtccggaattcccggttcgacccacgcgtccgagcaagtgtagcaagttctgatttgttcgagattgagaacataacgagcagtgtctatgagccgagtgaggccagcattggatggagtgtggtaacgggaagtatggcagatcaatcggtgatttcggatttcgatatgatgaagagggtcacgagaaatggtccggtggttaaaaccaaaccggtgattggtgagaaagtccggtcggctgggtttttgtcgggttgtaagagtcacaaagctgtctcggttgttgatagttctagaaaagtgaaagaaacagccaaggttgatcatcacgagatgtctcatcagaagaagtttaaaactgagattaggattcaagacttgagctttctttaataaacaatgtttgtgtatgtgtgtgttcttaagtagttttcatcaaatatttttgtaatatttcttcgtgagtatgctaangattttg

SEQ ID NO: 90861 - DNA, 556 bp, Arabidopsis thaliana columbia
  unsure (1)..(556): unsure at all n locations
nnnnnnnnnnnnnnnnnnnnnnnnnnnnnnnnnnnnnnnnnnnnnnnnnnnnnnnnnnnnnnnnnnnnnnnnnnnnnnnnnnnnccacgcgtccgagacggaggcagaatcacagtaccttaatgtactctctgctttcctcgccatcgaaccggtggactccgtcatcactctcgctagagggtgcactggaggatcaattactgagaacgcccagagatttttctgggaaatttgcgttgaagctgctgcgaatggtaacggatcatacgcgaagaagttactgaagaaactcataaatgaagttgagttagagaatggtgaagtattggatgaagtgtatgaagagtatgctctttacatgttaacttctaaggaagatatattggtgaaagaaaacataaggataaccaaattcatttcttttcttttccctgaaggttcgtacaaacacccgagttgtccaagggtcgaggaaattaaggttattcccggctggcattggtccggttggaaccaattgcctttgaacgggagatccccgggggggtnccna

SEQ ID NO: 90862 - DNA, 515 bp, Arabidopsis thaliana columbia
  unsure (1)..(515): unsure at all n locations
nnnnnnnnnnnnnnnnnnnnnnnnnnnnnnnnnnnnnnnnnnnnnnnnnnnnnnnnnnnnnnnnnnnnnnnnnnnccacgcgtccgcggacgcgtccgcccacgcgtccggttcgttggagtcacctgaggagttcattgccatggaattccggtttactctgagagacaatggaatgcaagcggcttttcagctgcttcacatggtgcttgagcgtagtgtctggttggaagatgcatttgatcgagcaaggcagctatatctttcgtattttcgatcaattcctaaaagcttggagcgtgcgactgctcataaacttatgatcgctatgctgaacggtgatgagcgttttgttgagccgacacctaagtcactacagagcttgaatctagaatctgtgaaagatgcggtcatgagtcattttgttggggacaatatggaggtaagcattgtgggggacttttcagaggaggaaatcgagcgttgcatccttgattaccttggtacagttaaag

SEQ ID NO: 90863 - DNA, 767 bp, Arabidopsis thaliana columbia
  unsure (1)..(767): unsure at all n locations
nnnnnnnnnnnnnnnnnnnnnnnnnnnnnnnnnnnnnnnnnnnnnnnnnnnnnnnnnnnnnnnnnccacgcgtccgcccacgcgtccgcccacgcgtccgattgaatggctgtggctacagctccgtcgctaaaccgccatttcccccgccgcatctcgaacctttactcgagagttaagcaacgaaggccatggctgccaccaggagacgcgacccttttcaattctcgccggaattgggattcccatctgtttgtttacgcttcctcttcttcttctccgtcgtcgtcgcctccgtctccaaattcaccgacggatgatctcacggcagagttgtgcgtcaatactggtcttgatctctttaagagaggacgggtgaaagatgctcttgttcagtttgaaactgcactgagtttggctccaaatcctattgagtcacaagctgcttactataacaaagcatgttgtcatgcttaccggggcgaaggaaaaaaagctgtggattgcttgcgaattgcgttgagagattataatctgaagtttgccacgattcttaacgatcctgatttagcatcctttcgcgcattacccgagtttaaggagctgcaagaagaggctaggttaggcggggaagatattggcgataatttcccgggagatctgaaacttatcagtggagggcgagcaccgtttcgtggcgttagaaaattcttttattttgcatttgcaacagcagcgggttatttcatgttctttaccggaccaag

SEQ ID NO: 90864 - DNA, 531 bp, Arabidopsis thaliana columbia
  unsure (1)..(531): unsure at all n locations
nnnnnnnnnnnnnnnnnnnnnnnnnnnnnnnnnnnnnnnnnnnnnnnnnnnnnnnnnnnnnnnnnnnnnnnnnnnnnnnnnnnccacgcgtccggatcagctcatctacattcctcttcctgatgaggagtctcgttaccagatctttaagtcttgcttgaggaaatcacctgtggcgaaagatgttgacctgagggctcttgctaagtacacccaaggcttcagtggtgcggacatcacagagatttgccagcgttcttgcaagtatgcgatcagagaaaacatcgagaaggatattgagaaggagaggaagagagcagagtcgccagaagcaatggaagaggatgaggaggagattgcagagattaaagctggtcactttgaggaatccatgaaatacgctaggagatcagtgagtgatgcagacattcgcaagtatcaggcttttgctcagactctccagcaatcacgtgggtttggaagcgagttcaggtttccagatgcgccgacagggactactggagctttccc

SEQ ID NO: 90865 - DNA, 523 bp, Arabidopsis thaliana columbia
  unsure (1)..(523): unsure at all n locations
gccnnnnnnnnnnnnnnnnnnnnnnnnnnnnnnnnnnnnnnnnnnnnnnnnnnnnnnnnnnnnnnnnnnnnnnnccacgcgtccgcggacgcgtgggcttctgccatggatattcagcgcaacgtagcttcttcttctggcatgatgagtcgcaacatgaatgagtaatattttaatcagatttcgttaattttctcaactttcattttaatatatattacagcaactcacaccaggttggtttgatcaggatgcaaatggaagtgcagagaaggttgcatgaacagctagaggtgcaaagacatctgcaactgaggattgaagcacaaggaaagtacatgcaatctatcttggagagagcttgccaaaccctagccggtgagaacatggcagccgccaccgcagcagccgccgtcggaggaggatacaagggtaatctgggaagttcgagtctttcagcagcggtgggcccacctcctcatcctcttagtttcccgccgtttcaagacctaaacatctatgg

SEQ ID NO: 90866 - DNA, 579 bp, Arabidopsis thaliana columbia
  unsure (1)..(579): unsure at all n locations
ctaagaaaccttcaagtatgantngttcatatganaacagagctatgtncgttcaaggcgattcaggccttgtcctcaccaccgaccctaaaccgcgtttgctttggaccgtcgaactccacgagcgttttgtggacgccgtcgctcagctcggcggccccgacaaagcgaccccaaagacgattatnagagttatgggtgtgaagggtcttactctttaccacctaaagagccatcttcagaaattcaggcttggaaagcagccgcacaaggagtacggagatcactccacaaaggaaggttcaagagcttctgccatggatattcagcgcaacgtagcttnttcttctggcatgatgagtcgcaacatgaatgagatgcaaatggaagtcccagagaagggttgcatgancagcttggaggtgcaaaggccatctgcaactgggggttttaggcccaagggaagtcccatgcaattttttntttggggggggctttccaanccttcgccggttggacctttggaaccgcccccgaagaaccncctttggngggggtcaanggnnttttggnntttgg

SEQ ID NO: 90867 - DNA, 447 bp, Arabidopsis thaliana columbia
aatttagctccttgaaggctcataacgctcactgcccttggcttcatcgttttctctcttgatgaatttggcattgtatatctgaggtctgattgcgtgaaaaaaccacaaatgaaaggagtttagacacaaatcacagtttaagacaaaattatagtcttgtttctttcaaattatgcaaaaaaatcaagaatctgagacataagagaaacgtttatgtctctctcttttaatcaatgctatgttgcttttctcaactgtttcaagcgttattacattactagctaaaaatcttgatgtcttgttcttatttttgcagtttctcctcttgagctttggaattgaagctaagataagaaatttagagagaaatgggatggtctcattcgaaggttgatgacgatgaaacctgtcaaatctgttaagataggaaacgtttcatcaaac

SEQ ID NO: 90868 - DNA, 547 bp, Arabidopsis thaliana columbia
agctccctacgactcactattgggaaagctggcacgcctgcaggtaccggtccggaattcccgggtcgacccacgcgtccggcctgagctagttgattggttcaagtttgcagctttagatgatcctttaactgagctatcttcattctttaattaccaatgggagagtgggtcatcggagctttcatcaacatttttggaagtgttgctattaattttggcacaaaccttctcaaattgggacataatgagagagaaaggttagccctacaagatggcggaggaaagatgccattgaagccaattatacataatcagacttggagagttgggatccttgtctttcttcttgggaattgcctcaatttcatttcgtttggttatgctgctcagtcccttctagcagctcttggatccattcaatttgtatccaacatagcatttgcttatgttgtattgaacaaaatggttactgtcaaagtactcgttgctacagcctttatagttcttggaaacgttttccttgtagcttttggtaatcaccagt

SEQ ID NO: 90869 - DNA, 641 bp, Arabidopsis thaliana columbia
  unsure (1)..(641): unsure at all n locations
nnnnnnnnnnnnnnnnnnnnnnnnnnnnnnnnnnnnnnnnnnnnnnnnnnnnnnnnnnnnnnnnnnnnnnnnnnnnnnnnnnnccacgcgtccgcccacgcgtccgtgtgatttagggtacatttctgaaacatccaagtttggttcagaggatttaccggtatgtagacagtttagcttagaagagatagttaaagctacaaagaacttcgataagactatgatactcggtgaaagctccttatatggcacgctttacaaaggaaatcttgagaatggaacaaaagtggcaataagatgcttaccttcatcgaagaaatactcgataaggaatcttaaactgcggttggatttgctcgcagagcttagacacccgaatcttgtctgcttgttgggtcattgcatagattgtggaggaaaagatgattacagcgttgagaaagtctttttgatttatgagtacattccaaatggaaacttccaatcttgtctctcagataatagttcaggtaagggtatgaattggtcagagaggcttaatgttctcacaggtgttgcaaaagctgttcattctcttcacactggagttattcctggattcttcagcaatagactcaagactaacaacgtgtttgctttaa

SEQ ID NO: 90870 - DNA, 609 bp, Arabidopsis thaliana columbia
actaccccagctctccccctcatcagccacctcttgcaccaccccatcccccatccatccccaacgccaagccctcgcaccccatgtccccagctctgcattgattcttctacaatcaatcgttggaccatctgtatccgcaagagaagaagcatttctacgagtcgaactggcatcgttggagagcgaagaagggaggagaagaatggtgaatccgacagtacaagccacttgtcgaaacggatcactgataagagtgataactctgatgaacaaatgtgtttcacctgaatctttaagccgaccgtccttcgaagatatcttgtggaatttacagtatgcttctcagttgcaagctgcttctgatggtgaccagtgttaatatattcatagcttcttcttctcttagtaaaaaattcaaacgaactttttaatgctttaaagattcgtgtaatgtgtgtgtacgaaaatcccctcgttatttatgtaacgattgggaaaaatggaaattaataacattaactcctttacttaaaaaaaaaaaaaaaagggcggccgctctagaggatccaagcttacgtacgcgtgcatgcgacgtcatagatctct

SEQ ID NO: 90871 - DNA, 969 bp, Arabidopsis thaliana columbia
  unsure (1)..(969): unsure at all n locations
nnnnnnnnnnnnnnttcaattgtcaaaatcggcgatcatccaaagttatcatctttctcataaacccaatttttttcccagtcttccttaatcccaacaacttcttaacaattcaagattcatggctactacacccatctttaatgcttcttgcagctttccttcgactagaggaatcgattgcaaaagctatattggtctgagatcgaatgtgagtaaagtgagtgttgcttcttctcgcattgcaactagtcaacgtcgtaatcttgtcgtaagagctagtgaatccggcaatggacatgctaagaagcttggaatgagtgatgctgagtgtgaagctgccgttgctgctggaaatgttcctgaagctcctccggttccacctaaaccggctgctccggttgggacaccgataattaagcctcttaatctaagccgacgcccacgtcgtaaccgcgcttcccctgttactagagctgcctttcaggaaactgatatctcccctgcaaattttgtatatccacttttcattcatggaggtgaggaagacacgcctattggagctatgcccggttgctacagacttggctggaggcatggtcttgtacaagaggttgcaaaggctcgagctgttggggtaaacagtatcgttttgttccctaaagttcctgaggctttgaagaattcaacaggggatgaggcatacaatgacaatggtttggtgcctcgaacaattcgtcttcttaaagacaaatatcctgatcttattatctacactgatgtgggctttggatccttaactcatcctgatggtcacgatngggntagttagagaaggatggggtaattatggaatggcggaacagtacnccagcnctgtaaanangtgtttcccaggcccgaccnggggctnngnattaancccggggnnnattntgggtgggcnatnagggnaanccgccaacccct

SEQ ID NO: 90872 - DNA, 671 bp, Arabidopsis thaliana columbia
  unsure (1)..(671): unsure at all n locations
nnnnnnnnnnnnnnnnnnnnnnnnnnnnnnnnnnnnnnnnnnnnnnnnnnnnnnnnnnnnnnnnnnnnnnnnnnnnnnnnnnnccacgcgtccgcccacgcgtccgatgatattgaaaacaaactctggtttgagccagaatgtcctggcagcgagtctgaaggacaagtgggtcctacacctcgtgcgtttcatgttgctattacaatcgattgtcatatgttcatctttggtggacgttctggtggcaagaggttgggtgacttctgggttctagatacagatatatggcagtggtctgaattgactagcttcggcgacttacctacacctcgtgattttgctgccgctgctgctattgggagccaaaaaattgtgttgtgcggcggctgggacggtaaaaagtggctgtcagatgtttatgttatggacacaatgtcccttgaatggctggagctatcggtttcagggtcattgccacctcctagatgtggtcatacggccacaatggtggagaaacgattacttgttttcggtggccgaggaggtggtggcccatcatgggtgatttgtgggctttgaagggtctgatagatgaagagcgtgaaacacctggatggacccaactcaagcttcctggacaagcaccatcatctcgatgtggtcataca

SEQ ID NO: 90873 - DNA, 2102 bp, Arabidopsis thaliana columbia
  unsure (1)..(2102): unsure at all n locations
aaaaaagagagaagaaagtccactaaagaaaagagaatagatatagatcaatggcgtttgaagctcttaccggaatcaatggtgatctaatcaccagatcatggtcagcctcgaagcaagcttacctaaccgagcgctatcacaaggaagaagcaggagcagtcgtaatcttcgctttccaaccatctttctcagagaaagatttcttcgatccggacaataaatcttcctttggagaaatcaagttgaaccgtgttcagtttccttgtatgaggaaaatcggtaaaggtgatgtagctactgttaacgaagctttcctcaagaatcttgaagctgtcattgatccaagaacctcatttcaagcttctgtggaaatggctgtgaggagtagaaaacagatagtgttcacaggacattcctcaggaggtgcaactgcaatcttagcaacagtttggtatttggagaaatacttcatacgcaatccaaatgtttaccttgagcctcgttgtgtgacatttggagctcctttggttggtgactctatcttcagtcacgcacttgggagagaaaaatggagccggttctttgtgaactttgtcacaagattcgatattgtccctcggattacgcttgctcgaaaggcgtctgtagaggaaactttgcctcatgttcttgcccaattggatcccagaaattcttcggtccaagagagtgaacagagaataacagagttttacacatcggtgatgcgagacacatcaactgttgcaaaccaagctgtttgtgaattgactggaagcgcagaggcgattttagagaccctttctagtttccttgagctaagtccttatagacccgccggtacttttgttttctctacagagaagagattggttgcagtgaacaactcggacgccattcttcaaatgctgttttacacttgtcaagccagcgatgaacaagaatggtctctaattccatttcgaagtatcagagatcatcatagctatgaggaactggtacagtcgatgggaatgaagttgtttaatcatttggatggagaaaactcaatagagtcttcgctcaatgaccttggagtgagcacaagaggcagacagtacgttcaagctgcattagaggaagagaagaaacgagtagagaatcagaagaagattattcaggtgatccagcaagagaggtttttaaagaaactagcatggatagaagatgaatacaagccaaagtgtcaagcccataaaaatgggtattatgattccttcaaagtttcaaatgaagagaatgacttcaaagcaaacgtcaagagagctgagttagccggtgtttttgacgaggtgctcggtttattgaagaaatgtcaacttccagatgagttcgaaggggacatagattggatcaagttagcaactcgataccgcagattagttgagcctcttgatattgcaaactaccatcgacatttaaagaacgaagacacagggccgtacatgaaaagaggaagaccaacccgctacatatatgctcagagaggctacgaacatcatatactgaagccaaacggaatgattgcagaagatgtattttggaacaaggtaaatggtcttaacttagggttacagctagaggaaattcaagagactctaaagaattcgggatccgagtgcggatcatgcttttgggctgaggttgaagaactcaaaggaaagccatacgaggaagttgaggtaagagttaagacattagaagggatgcttagagaatggatcacagccggggaagtagatgagaaggagatatttctggagggttcaacgtttagaaagtggtggatcacgcttcccaaaaatcacaaatcgcattctcctctgcgagactatatgatggatgaaataacagatacctganccttaggtggtggagtatttaagctattagaacacttgcttctcttaatttgtgcaataagaaatgtttatcaatctggtttccacttcacgatgatcttagaataagaatcatgttgtatgatcattgtgaagtaatgtaatagctctctattctaatgtcaaatttggtttccactt

SEQ ID NO: 90874 - DNA, 552 bp, Arabidopsis thaliana columbia
gccagcactatacgactcatatagggaaagctggtacgcctgcaggtaccggtccggaattcccgtgtcgacccacgcgtccgagcagacaagcattagcatcatagatacatagagagcttaagcaaaagatctcatactttcaagattgatcgatctctcaagtctcaacaatgtcatcatcatcatcagttcctgcttacttgggagatgaagatctgacacaagaaacaagagctctgatctcttctcttcctaaagagaaaggttggttagtgagtgaaatatatgaattccaaggactttggcacacacaagctattttacaaggaatcttgatctgccaaaaacgctttgaagctaaagattccgacattatcctcgtcactaatcctaaatcaggtaccacttggttaaaagctcttgtctttgctctccttaaccgacacaagtttccagtttcttcttctggtaaccatcctcttctggtcaccaatccacaccttcttgtgcccttcttggaaggagtttactacgagtccccagatttcg

SEQ ID NO: 90875 - DNA, 527 bp, Arabidopsis thaliana columbia
  unsure (1)..(527): unsure at all n locations
nnnnnnnnnnnnnnnnnnnnnnnnnnnnnnnnnnnnnnnnnnnnnnnnnnnnnnnnnnnnnnnnnnnnnnnnnnnnnnnnnnnccacgcgtccgctcgtctagctctcacttttgttcgtctcttctgcgtcaaacatttccaccattttcgtttcttaaacctttcttcagctcttctcttcgtcaatctgcgatagtggaattgaagtctcttcggtgagtttctttactaatggagaccgccgcttcgagcgtagctacaactcgtggcggttcccttcagaatccgtcgccgacggctccgtcaagaaaagagtggcgcgccgtttcggattcacaagacaccacagattatgtggatttggtacagttaaagctgaacaggacagatgagagaacgatttatgagaatggaagagaacaggatggttattcaaatagtgagatgttgcagcaacagattcttaatgtttctagaaagaaaggagaattacagcagttggagattgagcttcgagctcagatg

SEQ ID NO: 90876 - DNA, 488 bp, Arabidopsis thaliana columbia
ttccttccgttttctttacttcacaacgcagagcttcaatttctccctcgcagtgattgatcaaagatgggaagtcagaagaatgtgaaacacctcgaggaatgcactgtttccaatgcattgggaacttgggtattctcagtcctaggcgcattggttgcaatcccggtaggcatcaaacgcaagtctctaggtccacttgtgttcttcggcacaaccggaacaatgctcgacattatcattggtgtgagtcaatgcgagagagaacacgcagaacaccaaacgaagttactccaagactctcaaaatgccgcaacaacaacaacaaccaccaacacagagactgaggatagctcttccatgtcctaatcttttttacatctttctcattgatgtactttgatgctactcacaagttaaacttttttcaagatattgtgattattccacttctcttgagaaaacaaagaaaaaagcttttgatgatt

SEQ ID NO: 90877 - DNA, 921 bp, Arabidopsis thaliana columbia
  unsure (1)..(921): unsure at all n locations
agctggtacgcctgcaggtaccggtccggaattcccgggtcgacccacgcgtccggcttcttaagcccaaatctctctctctttctctctttctcttcctctctcaatctactcgccggagatcggctcgattcctccgtcaccaccgcatccgaccggagatttccttccgttttctttacttcacaacgcagagcttcaatttctcccctcgcagtgattgatcaaagatgggaagtcagaagaatgcgaaacacctcgaggaatgcactgtctccaatgcattggggaacttgggtattctcagtcctaggcgcattgggtgccatcccggtaggccataaacgcaggcctttaggtccacttgggttcttcggcacaaccggaacaatgctcgccatttccttggtgggagcaatgccgagagagaacccgccgaccaccaaccgaagttcctcccagactcttaaatgggcccagcaccaccaccacccccaacacagggactggggggtggttttccctggcccaatcttgttttacctccttctcatggatggcccttggaggccaccccacagatttaacctttttccaaaaattggggagttattcccctttntccgtgagaaaaccaaaaaaaaaagctctttggtggattaaacacgtgaaacaaaacaaaaagaggggcggccgctcttaaaggaatcaaagattaccttcccggggcctccgaggcattagtcttttttagggggccccaagtgaacccctcgggcgcggttttacacgggcggggtgggaaaacctcgggttccccacattatcgccctggccccatcacctctgcccagtgggaaaaaagaagggccccccacccccttcccacgctgccactcgatggcggaggggccgcccttg

SEQ ID NO: 90878 - DNA, 670 bp, Arabidopsis thaliana columbia
  unsure (1)..(670): unsure at all n locations
atgatactgccnnnnnnnnnnnnnnnnnnnnnnnnnnnnnnnnnnnnnnnnnnnnnnnnnnnnnnnnnnnnnnnnnnnnnnnccacgcgtccgacaaaacttatctcttcgccttgtctgctttttcatccaaaggtccaattagcctctctcccaaatctctctcctcgccggagatcggctcgattcctccgtcaccaccgcatctaaccggagattttccttccgtcttctctactcacaacgcagagcttcaatttctccctcgcagggattcggatcagttcaatttcaagtttctgaaccactcatggatcaggcggagctgagtatagagcaggtattgaaaagggacattccatgggagacttacatgaacactaagctggtttcagctaaaggtctccagctcttaaggcgctatgataaaaaacctgaaagtgctagggcacagttgctcgatgaagatggtccagcttatgttcatctctttgttagcatcttacgtgatatattcaaggaagaaactgtcgaatatgttttggctttgatttatgaaatgctctcagcaaacccaacacgagctcgattattccatgatgaatctttggcaaatgaggatacttatgagcctttcctgaggttgctttggaagggaaatggttcattc

SEQ ID NO: 90879 - DNA, 507 bp, Arabidopsis thaliana columbia
  unsure (1)..(507): unsure at all n locations
nnnnnnnnnnnnnnnnnnnnnnnnnnnnnnnnnnnnnnnnnnnnnnnnnnnnnnnnnnnnnccacccacgcgtccgggattctgcttcctcgtcagaattcaatttcccggaaatcggtgactggaactcgccggaaaatttgggattcagatgggaagaagacgagggtggaataggatgtgaaggtttgattgagataaagctcgatcattatagccataataggaagatgatgagtaaaacagagattgattttcatgcagaggaagatggtttgatcgagatcgatctttttccatgaagaagaagaagatgatgattctctttgtgcttccgattagaaagcatttttccgattagaaagaaagaaaaagaagcaacaattaatggttgttcatttttttctatacgaatatcatttgtgtaaatattattatacgagtgtaattcaattttcaactttttacacaaggattaattaatctccgataaanaaaaaaaaaaaa

SEQ ID NO: 90880 - DNA, 1086 bp, Arabidopsis thaliana columbia
ctaaaccgaatgttcctggatcgggcaatgtatccgaggatactcagtctagtggtggtaatggtcagaaaggcagagaaacctcttccaacacaaagaagaggaaaagaaatgggcagaagaactctgaagcagctcaatcacacagatcccagcagtctgaggaagaaccagacaacaatggtgatgaaaagcgcaatgatgagcaaagtccaaattcacctggaaagaagtcaaacagtgggaaacaacagggcaaacaaagttctgatcctccaaaagatggatatattcatgtacgggcacgaagaggccaggccacaaatagccatagtcttgcagaaagagttaggagagaaaaaattagtgaaaggatgaagtttcttcaagatctagtaccgggttgcaacaaggtgactgggaaggcagttatgcttgacgaaatcataaactacgtacaatcactacaacgccaagttgagtttttatcgatgaaacttgcaactgtgaacccacaaatggactttaaccttgaaggtcttcttgcaaaagatgcacttcaactacgagctggttcttcatctacaacaccattcccaccaaatatgtcaatggcttatcctcctctacctcatggattcatgcaacaaactctttccagcattggaaggaccattacctctccattgtctcctatgaatggtggattcaagcgacaggaaacaaatggatgggagggtgatttgcaaaatgtgatcccacattaactatggagctggtgatgtcacacctgaccctcaagcagcagctacagcatctcttccagctgcaaatatgaaggttgagccatgatatttcgtcctgttagatagaatattaaattattgtaatcttttttatttatttatttaaagttgctatatgtactatattgtaatgatgttactattaacgaatccgatacttagactaacctaaaaaaaaaaaaaaaaaaaaaaaaaaaaaaaaagcccggccgctctagaggatccaagcttacgtacgcgtgcatgcgacgtcatagctattctatagttcgcctcaatt

SEQ ID NO: 90881 - DNA, 449 bp, Arabidopsis thaliana columbia
  unsure (1)..(449): unsure at all n locations
aagccagagttaccaaaggtaccggagattccaaagcctgaggaaactaaactgccagatattcccaagcttganttgcccaagtttccggaaattccaaaacctgagctcccaaagatgccaganattccaaaacctgagttaccaaaggtaccggagattcagaagcccgagttaccaaaantnccggagattccaaagcctgatttaccaaagtttccagagattccaaagcctgagtttccagagaattcaaagcctgaggtgcctaagctaatggagactgaaaagcctgaggctcctaaggtgccagagattccaaagcctgagttgccaaagttgccagangttccccaaggcttnaggcttcctaaggtaccacagatccacaagccggagttgcccaaaatgccggagttacctaagatgccggagattcagaaacctga

SEQ ID NO: 90882 - DNA, 693 bp, Arabidopsis thaliana columbia
  unsure (1)..(693): unsure at all n locations
gacccacgcgtnccgcacaaagcaacaacaaacaccacaaaagcaaaagaagaaacaaacgcaagagttctcaagcaagctcaaacatggcactaatgaagaagagtctctctgctgctcttctctcatcaccacttctgatcatatgtcttatcgcattgctcgctgatccgttttcagtcggtgctcgccggttattggaggatcctaaaccggagataccaaaattgcctgagctacctaaattcgaagttcccaagttgccggagttccctaaaccagagttgcccaagttacccgaatttccaaagcctgagttgccaaagatcccggagattccaaagccagagttaccaaaggtaccggagattccaaagcctgaggaaactaaactgccagatattcccaagcttgaattgcccaagtttccggaaattccaaaacctgagctcccaaagatgccagagattccaaaacctgagttaccaaaggtaccggagattcagaagcccgagttaccaaaaatgccggagatttccaaagcctgaattaccaaagtttccagaggtttcaaagccctgattttgcaaagttttccagnggntttcaaaagccttnanggtgcctaaaggttaantnggggcttgaaaaggcttangggttcctaaaggngnccanaggatttccaaaggc

SEQ ID NO: 90883 - DNA, 974 bp, Arabidopsis thaliana columbia
  unsure (1)..(974): unsure at all n locations
attggattcacgagagctgtccagatcgagattcagacatggattctaatcctaaaactacttctacagagataaaccagaaaggggaagccgccacggaggaacctgaaagacctggagccattgtgtccaatcatgtttcgtacttggacattttgtatcatatgtctgcttcttttccaagttttgttgccaagagatcagtgggcaaacttcctcttgccgcccgcccgagcaaatgccttggttgtgtctatgttcaaagagaagcaaaatcgcctgatttcaagggtgtatctggcacagtaaatgaaagagttcgagaagctcatagcaataaatctgctccaactattatgctttttccagaaggaacaactaccaatggagactacttacttacattcaagacaggtgcatttttggctggaactccagttcttccggtaatattaaaatatccgtatgagcgcttcagtgtggcatgggataccatatccggggcacgccacattttattccttctctgtcaagtcgtaaatcacttggaagtcatacggttacctgtatactacccatcccaagaagagaaagacgatcccaaactttatgctagcaatgttcggaaattaatggccaccgagggtaacttgattctatcggagttgggacttagcgacaaaaggatatatcacgcaactctcaatggtaatcttagtcaaacccgtgatttccatcagaaagaagaatgaaattttctggcctgacaatgtttgtaatgtagtagtctttaccaaaaacaaccacgaccttgattgaataatggttcttgtgatgataataaaaaccaaaagtttgattacacaaatcgacctttttaccaaaaaaaaaaaaaaaaagnnnnnnnnnnnnnnnnnnnnnnnnnnnnnnnnnnnnnnnnnnnnnnnnnnnnnnnnnnnnnnnnnngtcctaaa

SEQ ID NO: 90884 - DNA, 525 bp, Arabidopsis thaliana columbia
cccacgcgtccgcacacgcgtccgcccacgcgtccgcccacgcgtccgcccacgcgtccgcccacgcgtccgcggacgcgtgggctagatcgcgagcggccgccctttttttttttttttaagtttaacctacaaattttataagttgtaattccttttggactctgaccagacaaatgctagaccaggcatgcttggttcgcagttcgcaaatcgttattgtctgtggttacaaaagagaactaagaagcaacaatttttattcaatatctcaggttctttaaatagtatatccgatgatctttaagctcttccttacttggcaatttattagacttgcaataaagcggggagaaagttgctggtttttttgattttatgatttatttcaagatcttttcggtatctcatctaattcatgtctttatcttttcattgtccttcttctttttaatattaatttcatatactattttataatttgttttcttatgattgtctatatttttttatatttcgtacatt

SEQ ID NO: 90885 - DNA, 465 bp, Arabidopsis thaliana columbia
ccggaacggaagggccgacccgaccgttctctactctctcctcaaaaactcaaaagagcaaaaaaaagagaagaagaatcaaaatcccacacaatggcaacacactcttccttcaccgcaacaacacctctctttctcatcgttcttctatccctatcctccgtctcagttctcggcgcatctcaccaccacgcaacggcgccggctccgtctgtagactgttcgactctcatactcaacatggctgactgtttatccttcgtttcgagcggaggcacggtggcgaaaccggaaggtacatgttgctctggtcttaagacggtgcttaaagctgactctcagtgtctatgtgaagcgtttaagagcagtgcttctcttggagttactttgaatatcactaaggcttctactcttcccgccgcatgcaagcttcacgctccttctatcgctacttgtggattgtct

SEQ ID NO: 90886 - DNA, 964 bp, Arabidopsis thaliana columbia
  unsure (1)..(964): unsure at all n locations
nnnnnnnnnnnnnnnnnnnnnnnnnnnnnnnnnnnnnnnnnnnnnnnnnnnnnnnnnnnnnnnnnnnnnnnnnnnnnnccacgcgtccggagatgagaagaaagttgttacgcctttaagggaaatgacgcccgaaaggattttcggaaagatgggtcatcttcaacggttacttgatacgtttttgtcattgagacctactggtttagctaagaacagtaggatgatattgatcgcgttgtatcccgttgtgagggagagttttaagctgtatgctgatatttgtgaggttttggctgttttgttggataagtttttcgatatggagtattcggattgtgtcaaggcctttgatgcttatgctagtgcggctaaacagattgatgagcttattgcgttttataattggtgtaaggaaacgggtgtggcgagatcgtctgagtatccggaagttcagaggattacaagcaagttgttggagactttggaagagtttgttagagatagggcaaaaagagggaagagtcccgagaggaaagagatcgaagctcctcctccggtagttgaagaagaggagcctgagcctgatatgaatgagatcaaagctcttcctcctcccgagaattacactcctccacctccgcctgaaccagaacctcagcccgaaaaacccgcaatttaccgaggatttagttaacttgaagggaggatgaagtcncagctgatgaccaagggaacaagtttggcgcttggcactccttggctggtcccaccggggttattaacggaaaaatggggaagcttttcctccctccaaaccggaattgaccctcctggctttgggcaaaaaatccccccctggccaaaaccccnggttcaaaaccnggatttggggaattttggcctttggggttgaaaaccaacccaacccttttttttaaaaaacccnancaccccccntttn

SEQ ID NO: 90887 - DNA, 532 bp, Arabidopsis thaliana columbia
  unsure (1)..(532): unsure at all n locations
nnnnnnnnnnnnnnnnnccattgtccaaattccttatcaaaaaaaaactctactctcggtggcaccagatcactcctcctctcccacgcgtccgctttttcacattctcttcttcttcttctcgtgagaaaaagaaagagagattctttattcattagatcgaagcaaaaatgtccacagcgccgtctccaggcactactccatcaccatctccaccgtctcctcccacaaactcgacaaccaccactcctcctccagcagcctcttctcctcctcccaccacaactccttcttctcctcctccgtcgccgtcaactaattcaacctctcctcctccttcttctcctttacctccttctcttcctcctccatctcctcctggatctttaactcctcctctccctcaaccttccccctccgctcccatcactccttctccaccgtcgcccaccacaccctcaaaccctcgaagccctccatctcctaaccaaggaccaccaaacactccctcaggatctactgcgagaactcc

SEQ ID NO: 90888 - DNA, 549 bp, Arabidopsis thaliana columbia
  unsure (1)..(549): unsure at all n locations
nnnnnnnnnnnnnnnnnnnnnnnnnnnnnnnnnnnnnnnnnnnnnnnnnnnnnnnnnnnnnnnnnnnnnnnnnnnnnnnnnnnccacgcgtccgaaaaaacttcgaagaacaaaaaaaatccaaaaaaaggtgaaatcgaagaagaagaaaaaaaaggcaaaagcttgaattgattatggaagacgacgatcagcagaaggctgcagatctagtacaagagcttgttcttcgtctcgtctcacaaaaccctcaaacccctaatctcgatcccaattctcccgccttcctcaaaacccttcgttacgcttttcgtatcctctctagtcgtcttactccttccgtcctccctgacgccaccgctatcgctgagtctctcaaacgccgtctcgctactcagggtaagtcctccgacgcactcgcttttgccgatctctacactaagttcgcttccaaaactggacctggcagtgtcaataacaaatgggctcttgtttatttgcttaaaattgtttctgacgatcgtaaatcggctataaatggtcttgatt

SEQ ID NO: 90889 - DNA, 685 bp, Arabidopsis thaliana columbia
  unsure (1)..(685): unsure at all n locations
nnnnnnnnnnnnnnnnnnnnnnnnnnnnnnnnnnnnnnnnnnnnnnnnnnnnnnnnnnnnnnnnnnnnnnnnagataagatttccacgcgtcctgcctcgatcaacagactctaatcagcagcaaatgtggagcgtcaccggagcattgactgtggcggtgccgcctaccgccgccgcttgccgtacgaaaccctttctcatctcctcttcctttcccaagcagacaaagaaactccatctctcttcgccttctctgtctctaccatcatcacatttctcctcctctttcaaaaccgcagctacctccatcgagcaacagtcttctgttaacaagggagagagcaccaagtaccatttcctggtagcaaacgctaaattcatgcttgacgaagaggagcacttccaggagcaattgtttgaacgtctccgttacttcggtgagcgtgaattagtgcaagacttctggcttgtcattgagcctaaattccttgacaatttccccaaaattactcaaagacttcgtcgtcctgctgttgctcttgtttccaccaatggcacctggatcacgtttatgaagttaagattggatcgtgttctgtatgattcctttgaagctacctctcttgatgaagtcttggcctccaatcctaccactcttgagttcgatatgcctaaaaattgggt

SEQ ID NO: 90890 - DNA, 529 bp, Arabidopsis thaliana columbia
  unsure (1)..(529): unsure at all n locations
angngccaccnnnaatctttntgccggggggnccntccgggncaatttttggaccccccngtactcgggggcgtgaattgggcaagacttctggctnncatgggcctaaatccctggaaatttcccccaaaatttactcaaaaggcttcgtcgtcctgctggtgctcttgttcccaccaatggccacctggatcacgtttatgaagttaagattggatcgtgttctgtatgatccctttgaagctacctctcttgatgaagctttggcctccaatcctaccactcttgagttcgataagcctaaaaattgggtggcgccataccccaagtatgaacctggatggtgggataccttcttgcctaaagtaacccaagaatctgcagtatagaactttgctttttgtcttgtttttgcattctccaatctcagctttgtcttagtgcttcaaagttttgtactactgagctcattatccaagtctatatctttcctngtgtagcttctattactcaaagttgcctgtttgat

SEQ ID NO: 90891 - DNA, 676 bp, Arabidopsis thaliana columbia
ggaggggtgttactcgatgacttattggttgctgaagatcttgctgctgcggaaacaacatatgctgcttctcatgctgctgcagctgcggcaacaaattctccaccaggtcgattacctggaaggtatggtttttcagatgaaagccgcgggcggttatctgaatcagctgctgatggcgctgtggtgctgggaagccctgttgcaccccctgtaaatggtgatatgcggactgatattagccctgaaaatgcattacttccaggaactcggagaacgaataagggtgtggagtatcttgttgaagcatcagcagcggaagctgaggcgatcagtgcgacgttggctgctgccaaggcaagacaagtcaatggtgaagttgaactccctgatagggattgtggtgcagaggctacacccagtgggaaacctacattttcgctaatcaagccagattctatgggctcaatgagtgttacacctgcagggattcgtcttcatcatagagctgtggtggttgctgctgaaactggtggcgccttatgtggaatggttagacagttatccattgatcaatttgaaaatgaaggacggcgtgtcagttattggacaccagaaagtgcaacagcagcaagggaactattagatcgacaaatgtcaatcaacagtgtttcaa

SEQ ID NO: 90892 - DNA, 668 bp, Arabidopsis thaliana columbia
  unsure (1)..(668): unsure at all n locations
cagcactaatacngactcactatagggaaagccggtacgcctgcaggtaccggtccggaattcccgggtnacccacgcgtccggtttttctgtgaagagttatgatgccgaaagctgcgtgggaaccagaataccacagagtatttgtggacttatgcgtcgagcaaaagatgttagggaatcaacctggaacgcagcatatattgaaaccttttctacaaagaactggcgctaggttcaccagaaaccagcttaagaatcactgggatacaatgatcaagcagtggaagatttggtgtagacttgttcaatgcagtgatatgcaatgggatcctcagactaacacttttggtgctaatgatcaagactgggccaactatttacatgtgaatcctgaggctgggcagtatcggttgaatcctccatcgttcctcgagaaacttgagcttatctttgaagatagtaacttagatgatgaaggtacttcaggtagcaaaaggaagcgaatagccaagcatcgtgatgaagataatgataatacctggagatgaagaagacacgcaaagcgcttctaatttctcgagtcctcagtcgaaaggatactggtcaccgtcttcacatgagctgtttgttgatttgttgttccaagaggctnttaaaggaaacaa

SEQ ID NO: 90893 - DNA, 606 bp, Arabidopsis thaliana columbia
  unsure (1)..(606): unsure at all n locations
tgatatttcnnnnnnnnnnnnnnnnnnnnnnnnnnnnnnnnnnnnnnnnnnnnnnnnnnnnnnnnnnnnnnnnnnnnnnnnccacgcgtccgcccacgcgttcgaccacgcgtccgcccacgcgtccgggcgagaattgaaagacgctgcgagagagatagatcatctccgttaaaccctagcgattggaatacggatatactccaaatggctttcttaagtaaagttggaaggttattcagtcagaccagcagccatgtcactgcctctagctcgatgctacagagcatccgttgcatgtcttcatcaaaaatctttgttggaggtatctcctacagcactgatgagtttggcttaagagaagcttttagcaaatatggagaagttgttgatgcaaagattattgtggaccgtgaaacaggcagatctaggggctttgctttcgtaacatttacttcgactgaggaggctagtaatgccatgcaattggatggacaggaccttcatggtcgaagaattagggtgaattatgcaactgaaagaggaagtgggtttggaggaaggggattcggtggtcctggtggtggttatcgagcctcagatggt

SEQ ID NO: 90894 - DNA, 828 bp, Arabidopsis thaliana columbia
  unsure (1)..(828): unsure at all n locations
nnnnnnnnnnnnnnnnnnnnnnnnnnnnnnnnnnnnnnnnnnnnnnnnnnnnnnnnnnnnnnnnnnnnnnnnnnnnnnnnnnnnccacgcgtccggaagatttcaaggtttagggtttctgcaattcaaccatggcagagcagacggagaaggcgtttcttaagcaaccaaaagttttcttaagctcgaagaaatctggtaagggaaagaggcctggtaaaggaggtaatcgtttctggaagaacattggccttggtttcaaaactccaagagaggctattgaaggaacatacattgaccagaaatgtccctttactggtacggtttcaatcaggggtcgcatcttgtctggaacttgtcacagtgcaaagatgcagaggacgatcattgttcgtagggactatcttcattttgtgaagaagtatcgaagatatgagaaaagacactcaaacattcctgctcatgtttccccgtgcttccgtgtcaaagaaggagatcgtgttaccattgggcaatgcaggccattgtcaaagacggtgaggttcaatgtcctgaaggtcattccggctggaagctcttctatcgggaaaaaagcattcactggaatgtaaaagagattcagatttgttgaaaaggtgcgaactagtattctaagagtttagaatttttctagcagagttattggattcgtttcttaagatctatgatcaaaggaaaccagattttctgtttcatttagtgattcaagtatcaagatatgtctatggttatagttttactccaatatatctagtcatgagttgctatctactagtcatgatttcgatg

SEQ ID NO: 90895 - DNA, 547 bp, Arabidopsis thaliana columbia
  unsure (1)..(547): unsure at all n locations
actacactcatcaaagctcacaaaaagagaagagaagagacgaggatcaatcaccattctcatggcttcagcttctttctctgcggtttcttcgctctcgtatcaattccgttcaaaagaagcgatcttttcatcgaaagcttcctgttttagctcgacggctttatcaggaaggagagtgtttggatctatcaaagcagctcaagtgacaagccatgagaatcctagaagacgaactcagaacgtcgaaggagatatatttgttgacaatacttgtattgattgtgatacatgtcgttggatggttccggatttattcactcgagtggacaacatgtctgcggttacaaagcaaccaacttgtaaggaggaaagactgaatgctcttcaggccttactatcttgtccgacgggctctatttcgcactcaaactccacctgctgacataggggaagctcaaggggcctttccccttgtagtggccaaggcaacatcccgggggtttnaattngggttnannccagaancgnatgggaaccntttccc

SEQ ID NO: 90896 - DNA, 689 bp, Arabidopsis thaliana columbia
  unsure (1)..(689): unsure at all n locations
atgtatgccagcactaatcgactactatagggaaagctggtacgcctgcaggtaccggtccggaattccgggtcgcccacgcgtccgttctctcataatatcttctccacaatttcaactcttctaaagtctaaaccatgaagttactctcaaagacctttttgatattaactctcaccttcttcttctttggcattgcactagcgaaacagagctttgaaccagagatcgaagctttgaaatccttcaagaatggtatttccaacgaccctttaggagtattatcagattggaccatcatcggttcgttacgacactgtaattggaccggaatcacctgcgatagtaccggacatgtagtctcggtttccttgctggagaagcaacttgaaggtgttctgtctccagccatagcgaatctcacctatctccaggttcttgatctcacttcaaatagttttaccggcaaaataccggctgaaataggaaagttaaccgagcttaaccagcttattctgtacctaaactatttctctggttcgattccttctggaatctgggagcttaagaatattttctatcttggatcttagaaataatttgttgtccggtgatgttcctgaggaaatctgcanaaccagttctttggtattgattgggtttgattacaacaacttaaccgggaaata

SEQ ID NO: 90897 - DNA, 989 bp, Arabidopsis thaliana columbia
  unsure (1)..(989): unsure at all n locations
atgattttcgccnnnnnnnnnnnnnnnnnnnnnnnnnnnnnnnnnnnnnnnnnnnnnnnnnnnnnnnnnnnnnnnnnnnnnnnccacgcgtccgtctctctttcactttctctctaaaaaccagaaaaaaaaaaaatggagctttcatcgagaaagccttatttcattgaggaagaagaagaagagaatttggcttcttctttatcagaaatggaagctgggttttctggtaacaataataatagtaataaccatggaaatccccaaaacggtgtcgtttcttcaagccgtttctcttacggtagattaaacagtcttaggaacagtcagagttattattacaatcaatactctgtttcgtctccgagatctgttgtgtctggaagatttcatgatttcagattcgatattcaacaacctcatttcttggactcgtgtttcctctgtaagaaacctcttggtgataacagagacatctacatgtacagaggagatacaccgttttgcagtgaagagtgtagacaagaacagatagagagagatgaagcaaaagagaagaaacagaatctgtctcattcggtgaaatcagctatgcggaggaaagaaccatcttccccaactagatctcgtgattatgcttttcaccatggaactggtgctgctgcttaattaaaaatagctggggactttgagaattattataattaattagggtaaggaaaaaattaggtatattggatcctacgctaagaaactggattcgggtcctcttttttttttttgaggtttttagggttcttttaaaccttaagctccagttctggggaaaaaaatgaagaagttaaggacccttaaattttcttttcttttttggtaagaaaaaaatggtttcttgccatgaaaaaaaaaaaaaaaaaggcggccggcttaaaaggatccaagctaacgtacgcgtgcatgcgacgtcaagcttcttctatagtgtcaca

SEQ ID NO: 90898 - DNA, 651 bp, Arabidopsis thaliana columbia
cccacgcgaccaaaaaaaaaaggagaagaagaccatcgttgttctccgatggctattaacagaattgctcatggttctctgtttctgacggtagtcttgttctttctgacggttaattacggcgaagctatatggttgacgattccgacgacgggtggaacgaagtgtgtctccgaggagatacagagcaacgtcgtcgttttggctgattactatgtcgtcgatgagcataatcctgaaaatacacctgctgtttcttctaaggtaacatctccgtatgggaacaatcttcatcaccaagaaaatgtaacacatggtcagtttgcattcacaactcaagaagctgggaactacttggcttgtttctggattgattccagtcatcacttagccaatcctataacccttggggttgattggaagatgggtattgcagctaaagactgggactctgttgctaaaaaggaaaagatcgagggtgttgagcttcagttgaggagactagaagggttggggcttgcgattcgtgaggacctaaactatataaaagacagggaagcggtgatgcgagaagtgagtgaaacaaccaactcaagagtggcttggttcagtataatgtcactcggggttagcgttgtggttggggttcac

SEQ ID NO: 90899 - DNA, 327 bp, Arabidopsis thaliana columbia
agaaacgtgaaggggaagatggtatcagtgtcattatctcatcataatctctggccaccggaatctggatctacggcgtttcgtggtttcgcaaccgccgcttccgtacacgcctgccaccatgttagccgtcacctccgccttgatttccatcttcgctcttcccttaagaaactgcagcatttttctgatgatgcaagaatgaagtttgcaagataccaaagagtatttgtattcaatggggctaattttctcaagtctagagttgatatccggttgtcccaatcttcgccatttgtatgtttctttaatggtggagagagtaga

SEQ ID NO: 90900 - DNA, 534 bp, Arabidopsis thaliana columbia
tgattcgccggcactaattcgactcatatagggaaagccggtcacgcctgcaggtaccggtccggaattcccgtgtcgacccacgcgtccgcccacgcgtacgctctcagtgaccctgtacagcgtatggtttacgatgaaattcatgggtatacagtgactgccatcaatccttttcttgatgactccaccccaagggatcatgtttttgttgatgagtttgcttgtataggctgcaaaaattgtgccaatgtggctccagatatatttcaaattgaggaagactttggtagagcaagggcttgtaatcagcgtggcaacccagatttggttcagcaagcagttgaaacatgcccggttgattgtatccatcagacttctgctgcacagttgtcattgcttgaagatgaaatgcgaagggttgaaagagtgaatgttgctctgatgctttctggaatggggtcaggagcagttgatgttctcagaatggcgagatctcgatgggaaaagaggcaagcaaaagttttgaatcaa

SEQ ID NO: 90901 - DNA, 508 bp, Arabidopsis thaliana columbia
gccgagcactatacgactcatatagggaaagctggtacgcctgcaggtaccggtccggaattcccgtgtcgacccacgcgtccgaaactatctcttccacgacgtcgtcttcttcgtctccgtcctgcgatgtagacgttgacaatcgtggaaaacaattaactccttctacaagacgatctcgagccggcttctctgattctttctcttctcatgatttatcatcattctgtcgagatgaagaagtaaaaacattctgccccatcaaatcggaatcagacgatgaattattaaggagcatagaagccgaaacttcatcttccgtggtgagcacgtcagactcatcagaaactcatcaccatcaccatcatcatcattcgtctggaggtcccaacaacggtcactggagaagaggtttcttccgtttgcttaagaaaggatcatccgcaatgccattcaacacgttcacacctctcaaaggagttccgaaactgaccagacggaagag

SEQ ID NO: 90902 - DNA, 493 bp, Arabidopsis thaliana columbia
  unsure (1)..(493): unsure at all n locations
cccagagaacgttaggaggaggtatctgagagattgtgctgataatttcagcgaagcagcaaaactttttaattcaaagctctccccaaaattggattcgttgcgtaaaaccctaccgggcatcaaaccgatctacattaatatctatgatcctctttttgacatcatccagaatcctgcaaattatgggtttgaagtgtctaataaaggatgctgtggaacaggagccatagaagttgctgtgttgtgcaataaaatcacatcttctgtatgtctcgacgtgtctactcatgtgttttgggacagttatcatcctacagagaaaacttacaaagtattagtctcggacacgagtcgaggctctcaatacgatttgattttgtaactagctgacgtgcnnnnnnnnnnnnnnnnnnnnnnnnnnnnnnnnnnnnnnnnnnnnnnnnnnnnnnnnnnnnnnnnnnnnnnnnnnnnnnnnnnnnnnnnnnnnnnn

SEQ ID NO: 90903 - DNA, 439 bp, Arabidopsis thaliana columbia
  unsure (1)..(439): unsure at all n locations
nnnnnnnnnnnnnnnnnnnnnnnnnnnnnnnnnnnnnnnnnnnnnnnnnnnnnnnnnnnnnnnnnnnnnnnnnnnnnnnnnnnnnnnnnnnaaccacaaatctttggttcactttaacacaacaaccaaaaacaaatctttggttcatatacatagcaatgctttaacaatgctcataactcttgaattattttgctacatatttcatgataaggggtgtctatttaaagggcaatatcagtctaagacgtacttctacagtcatagacaatatcttccgtttcgtacaagcaggatccgattattgggtggaatgccttgtgatgtggggtatcaacccacccttagtacagaaatgggtactaacttccaatttgggttgaaacagagagggtttagggatgatgttcatcagagacccgcacttgggtctccggag

SEQ ID NO: 90904 - DNA, 613 bp, Arabidopsis thaliana columbia
  unsure (1)..(613): unsure at all n locations
ccccccctagacctcgacggtatcgctaagcttgatatcgaattcgcggccgcggagaatttgattctcttcccgaacaggccttttacttagtgggtaacatcgatgaagctactgcgaaggctacgaacttagaaatggagagtaaattgaagaaatgaccttaaatctttgtgtactgactccgaatcgaattgtttgggattcagaagtaaaagatatctttttatctactaatagtggacaaattggtgtattagcaaaccacgcgccgattgccacagctgttgatataggtattttgaaaatacgccttgctaaccaatggttaacgatggctctgatgggcggttttgctagaataggcaataatgaaatcactattttagtaaatgatgcagagaagaataagtgacattgatccacaaggaagctcagcaaacctcttgaaatagcagaagccaaccttgaggaaagcctgaagggtaagagccagaccaattggggcctaatctagcccccagacgggcctcgggcaccagtcgaggngggccgggantccctggancccggggggnccnctagnnctaaccggccncncccnggggggccc

SEQ ID NO: 90905 - DNA, 523 bp, Arabidopsis thaliana columbia
  unsure (1)..(523): unsure at all n locations
ctcattatcaagttttgaatctttgactttttataaatccaaatatttaatattaaaattaaaatattaataaaatcactcttgacagtaatatctgttgtatatgtaaatcctagatatgacaatatgcggaattcatccatgaaaatgaaaaacaagggggggttgctaaagggatgaataaatgggacgcataaccggatatgctaaaatgaaaatacgaaaaaaaaaggctaatgagatcgaaataatgaatcataactaaagttccgtttcgaattcgctagataaaacaaaggcttgcctattcctattatgataaaaaaataaaagactttccgcaaaaaattttttttaattcatatatgtttgagtttttaaaactagggtttcagttagttgagcttgaaatggctattccttcnttgatggataaaaantggtttccncatccgnttgggtgggcccncggattcgngtgntttcnnccccttttgtttgnttncccggtaatttgcttccg

SEQ ID NO: 90906 - DNA, 425 bp, Arabidopsis thaliana columbia
acggacgcgtgggacctagctctattctttctctttgctgctcttaaactttttcttagctttttctatcttcgtgtgataatggctggtaaaggagaaggtcctgcgatcggtatcgatcttggtacgacgtactcttgcgtcggagtgtggcaacacgaccgtgttgagatcatcgctaatgatcaaggaaacagaaccactccctcgtacgttgctttcactgactccgagaggttgatcggtgatgctgctaagaaccaagtcgccatgaaccctgttaacactgttttcgatgcaaagaggttgattggtcgtagattcagtgacgcatctgtccaaagtgacagacagttatggcctttcactatcatctccggaactgcagagaaaccaatgattgtcgtcgaatacaagggagaaga

SEQ ID NO: 90907 - DNA, 852 bp, Arabidopsis thaliana columbia
  unsure (1)..(852): unsure at all n locations
gcagcccacccaaaatttcgaaatgggttctatacaagaaagaannacngcggcgggaaatggaaactttttctgtcttcaaacaaaanatanacctccanataatttgactgaccccgcacctgccaacacaggagcacatcaagatgcgactaccgtactatcaaaaagattaactgacaaacgaacccacccagcaaaagatcctttagatacaacgtcaactatgctacaacctcgaatcggtggcgaagaacattatgaaactgcgcaacaagtgaaacaaactttacaacgtcacaaggagcttcaggacattatagctatcctggggttggatgaattatccctagaggatcgcttaaccgtagcaagagcacgaaaaattgagcgtttcttatcacaaccctttttcgtagcagaagtatttacaggttcnccgggaaaatatgttggtctagcggaaacaattagagggtttaatttgatcctttccggagaatttgattcncttcccgaacaggccttttacttagtgggtaacatcgatgaagctacngcgaaggctacgaacttagaaatggagagtaaattgaagaaatgaccttaaatctttgtgtaccggaccccgaatcgaattgtttgggattcagnagtaaaagaaatcattttatcgacgaatagtgggccaattngggtatgagcaaccacgcgcggttgccacagctggtgaaataggaatttgnaaacngcttgcaaccatggtaccgatggcctnatggggggttccanaaggnanatgancccatttggaaggnccgnaanngggntgncccaggnnnaacntnaacc

SEQ ID NO: 90908 - DNA, 636 bp, Arabidopsis thaliana columbia
  unsure (1)..(636): unsure at all n locations
gcnngagtcagccnaagccgggncncaagagaagttgacccaagaccntctcnagactcccttccaccatgnggacnccancaagccgagaagtttgttgagaagctcccggctgcagccaagaagaagatcgaggtttcctattgagcaggcgattccaatggctcgagggtaaccagttggctgaggctgatgagttcgaagaccagaatgaaggaattggagagcattctgcaaccccaatcattgccaagatgtaccaaggagagctggtggtgaacccggtggtccaggtgcctctggtatggacgatgatgctccccctgcttcaggcggtgctggacctaagatcgaggaggtcgactaatttgttggacattgccctctctctttctcctatctctttctcttttacctgcttttttttgatctctcacagactttttatgttgggcttttttaaagaagcccattttgtggtgttttttggttagtactattttgaacaatggttggttctataccagtttagctacgatgacggataaaattaaaagtttgccaaaaaaaaaaaaaaaaaaaggccggccgctctagaggatccaagcttacgtacgcgtgcatgcggtgtcatag

SEQ ID NO: 90909 - DNA, 564 bp, Arabidopsis thaliana columbia
ttaggtaccactactagaagatctatgacgtcgcatgcacgcgtacgtaagctcggaattcggctatatctgttgtatatgtaaatcctagatatgacaatatgcggaattcatccatgaaaatgaaaaacaagggggggttgctaaagggatgaataaatgggacgcataaccggatatgctaaaatgaaaatacgaaaaaaaaggctaatgagatcgaaataatgaatcataactaaagttccgtttcgaattcgctagataaaacaaaggcttgcctattcctattatgataaaaaaataaaagactttccgcaaaaaatttttttattcatatattttttattttaaaactaggtttcagttagttgagcttgaaaatgactattccttcattgaatgaataaaaaattgaattccacatccgcttgggtgggaccaacgaaatcgagtgcttactcccactttttattgaattaaccgattaatttgctatcgaagattttttctgtattcgaaaaaatttgtaacaaaatttaacatattttttttattatgagaaca

SEQ ID NO: 90910 - DNA, 603 bp, Arabidopsis thaliana columbia
  unsure (1)..(603): unsure at all n locations
gnanttggaatgttcaaggctngaattcanccaaagccnggccccaagaagaagttaacccaagaccctntcgggactccnctccaccatggggaccccacccaagccgagaagattggtgagaagctccccgctgcagccaagaagaagatcgaggattctattgagcaggcgattcaatggcctcgagggtaaccagttggctgaggctgatgagttcgaagacaagatgaaggaattggagagcatctgcaacccaatcattgccaagatgtaccaaggagctggtggtgaagccggtggtccaggtgcctctggtatggacgatgatgctccccctgcttcaggcggtgctggacctaagatcgaggaggtcgactaatttgttggacattgacctctctctttctcctatctctatctcttttacttgctttttttgatctgttaagactttttatgttgggcttttttaaagaagcccattttgtggtgttttttggttagtactattttgaacaatggttggttctataccaggcggccgcgaattcgatatcaagcttatcgataccgtcgacatcgagggggggcgtggccaca

SEQ ID NO: 90911 - DNA, 581 bp, Arabidopsis thaliana columbia
  unsure (1)..(581): unsure at all n locations
ctcaatgtctctgctgaggacaagaccaccggacagaagaacaagatcaccatcaccaatgacaagggtcgtctctccaaggatgagattgagaagatggttcaagaggctgagaagtacaagtccgaagacgaggagcacaagaagaaggttgaagccaagaacgctctcgagaactacgcttacaacatgaggaacaccatccaagacgagaagattggtgagaagctcccngctgcagacaagaagaagatcgaggattctattgagcaggcgattcaatggctcgagggtaaccagttggctgaggcttgatgagttcgccggacaagatgaagggattgggggagcatctttaaacccaatcaattggcaagcttgtcccaangagcttgtggtgaaggcccgtggtcccaggtggcctcttggtattgcacggatgatgctcctccccctgttcaaggcggggttggacccacgttcgggcggtcggctttttgnggggcaaggccccctctcttcctccctttttttcttttnattggttnnnngggctnttaanntttttttntgggtttttt

SEQ ID NO: 90912 - DNA, 779 bp, Arabidopsis thaliana columbia
  unsure (1)..(779): unsure at all n locations
ctcactatagggaaagctggtacgcctgcaggtaccggtccggaattcccgggtcgacccacgcgtccggagaagtatatgtccgaagacgaggagcacaagaagaaggttgaagccaagaacgctctcgagaactacgcttacaacatgaggaacaccatccaagacgagaagattggtgagaagctcccggctgcagacaagaagaagatcgaggattctattgagcaggcgattcaatggctcgagggtaaccagttggctgaggctgatgagttcgaagacaagatgaaggaattggagagcatctgcaacccaatcattgccaagatgtaccaaggagctggtggtgaagccggtggtccaggtgcctctggtatggacgatgatgctccccctgcttcaggcggtgctggacctaagatcgaggaggtcgacccacgcgtccggtgacattgatccacaagaagctcagcaaacctcttgaaatagcagaagctaacttgggaaaagctgaaggtaagagccagacaattgaggctaatctagctctcagacgacctcggacacgagtcggggctctcactacgatttggatttggtactagctgacgtgtaaaaaaaaagaaaaaagnnnnnnnnnnnnnnnnnnnnnnnnnnnnnnnnnnnnnnnnnnnnnnnnnnnnnnnnnnnnnnnnnnnnnnnnnnnnnnnnnnnnnnnnnnnnnnnnnnnnnnnnnnnnnnnnnnnnnnnnnnnnnnnnnnnnnnnnnnnnnnntg

SEQ ID NO: 90913 - DNA, 749 bp, Arabidopsis thaliana columbia
gcagtaccggtcctgtattcccgggtcgacccacgcgtccgaaaaacatctctaaaaatctaaactttaaccttttttctcggaacaccacaaatctcatttttagctttttccgattccaaatctttttgcttatttagtcttcttcaagaactcgatttctttcgcgtttatgtcgacgacgatgaagagacagggctgcagctcagattccggtgatctacggcggcagcccagtcgtctactaaaacgacccccggcgttaaaaatcgttccggcgactccggcggcgaataactggaatacggctatacctctcctctcgccgttagctctttctcccgaatcatcaccggtagaccaaccaccggttgagaaaaatcagtcgacggcggtggcggttgagaaaacgccggttttcaagaaatggcaacatcccgcggcgccgttttattacgagtcatcgacgtttgttccaccgtttgttccgggttagtattggtttagagatccaacggttcaaaagtacagtttgtttgttttttgattctatgtagatctaacggcccagaaaacgcgttttgtgcgtttctactattttgtggttggaacaaactcgattttcgtaaagaatttaataaatcaaaggatttttaattaataagcatggttctggtactgtttttatatggtcccaaatgtaaaagcttaagtccaatttagttattgtggatgtttatggatatagg

SEQ ID NO: 90914 - DNA, 1035 bp, Arabidopsis thaliana columbia
ccggtcgaccgcgcgtccgcggacgcgtgggcggacgcgtgggtcagcgttgtttgaaacgagaaggttcaagatcttcggtggctctatgtcactcctctctcccttggtttggaaactgccggtggtgtcatgaccactttgatcccaaggaacacaaccatcccaaccaagaaggaacaagtcttctccacctactcagacaaccaacccggtgtgttgatccaggtgtacgaaggagagagagccagaaccaaggacaacaaccttcttggtaaatttgagctctccggaattttccctcccgggcctccctcgtggtgtcccccagatcaccagtctgctttgacattgatgccaatggtatcctcaatgtctctgctgaggacaagaccaccggacagaagaacaagatcaccatcaccaatgacaagggtcgtctctccaaggatgagattgagaagatggttcaagaggctgagaagtacaagtccgaagacgaggagcacaagaagaaggttgaagccaagaacgctctcgagagctacgcttacaacatgaggaacaccatccaagacgagaagattggtgagaagctcccggctgcagacaagaagaagatcgaggattctattgagcaggcgattcaatggctcgagggtaaccagttggctgaggctgatgagttcgaagacaagatgaaggaattggagagcatcttgcaacccaatcattgccaagatgtaccaaggagctggtggtgaagccggtggtccaggtgcctctggtatggacgatgatgctccccctgcttcaggcggtgctggacctaagatcgaggaggtcgactaatttgttggacattgacctctctctttctcctatctctatctcttttacttgcttttttttgatctgttaaggctttttatgttgggcttttttaaagaagcccattttgtggtgttttttggttagtacgcggccgcgaattcgatatcaagcttatcgataccgtcgccctcgagtggtggc

SEQ ID NO: 90915 - DNA, 2453 bp, Arabidopsis thaliana columbia
  unsure (1)..(2453): unsure at all n locations
cccctcggtgtcgacggtatcgataagcttgatatcgaattcgcggccgcttcgaattcgcttagataaaacaaaggcttgcctattcctattatgataaaaaaattaaagactttccgcgaagaaatttttttattcatatattttttattttaaaactagggtttcaggtaggtgagcctggaaatgactattccttcattgaatgaataaaaaattgaattccacatccgcttgggtgggaccaacgaaatcgagtgcttactcccactttttattgaattaaccgattaatttgctatcgaagattttttctgtattcgaaaaaattcgtaacaaaatttaacatattttttttattatgagaacaaatcctactacttcaaatccagaggtttcgatacgtgaaaaaaaaaacctgggacgtatcgcccaaatcattggtccggtactggatgtagccttccccccgggcaaaatgcctaatatttacaatgctctggtggttaagggtcgagatactcttggtcaagaaattaatgtgacttgtgaagtacagcaattattaggaaataatcgagttagagctgtagctatgagtgcgacagagggtttaaagagaggaatggacgtggttgatatgggaaatcctctaagtgttccagtcggcggagcgactctaggacgaattttcaacgtgcttggggaacccgttgataatttaggtcctgtcgatactcgcacaacatctcctatccataaatccgcgcctgcttttatagaattagatacaaaattatcgatttttgaaacaggaattaaagtagtagatcttttggccccttatcgtcgtgggggaaaaattggactattcggtggggctggcgtgggtaaaacagtactaattatggaattgatcaacaacattgctaaagctcatggtggtgtatccgtatttggtggagtaggcgaacggactcgtgaaggaaatgatctttacatggaaatgaaagaatctggagtcattaatgaacaaaatcttgcggaatccaaagtggccctagtttatggtcagatgaatgaaccgccaggagctcgtatgagagttggtctgactgccttaactatggcagaatatttccgagatgttaatgagcaagacgtacttctatttatcgacaatatcttccgtttcgtacaagcaggatccgaggtatccgccttattgggtagaatgccttctgctgtgggttatcaacccacccttagtaccgaaatgggtactttacaagaaagaattacttctacgaaaaaggggtccataacctctattcaagcagtttatgtacctgcagatgatttgactgaccccgcacctgccaccacatttgcacatttagatgcgactaccgtactatcaagaggattagctgccaaaggtatctatccagcggtagatcctttagattcaacgtcaactatgctacaacctcgaatcgttggcgaggaacattatgaaactgcgcaacaagtaaaacaaactttacaacgttacaaggagcttcaggacattatagctatcctggggttggatgaattatccgaagaggatcgcttaaccgtagcaagagcacgaaaaattgagcgtttcttatcacaaccctttttcgtagcagaagtatttacaggttctccgggaaaatatgttggtctagcggaaacaattagagggtttaatttgatcctttccggagaatttgattctcttcccgaacaggccttttacttagtgggtaacatcgatgaagctactgcgaaggctacgaacttagaaatggagagtaaattgaagaaatgaccttaaatctttgtgtactgactccgaatcgaattgtttgggattcagaagtaaaagaaatcattttatctactaatagtggacaaattggtgtattagcaaaccacgcgccgattgccacagctgttgatataggtattttgaaaatacgccttgctaaccaatggttaacgatggctctgatgggcggttttgctagaataggcaataatgaaatcactattttagtaaatgatgcagagaagaatagtgacattgatccacaagaagctcagcaaactcttgaaatagcagaagctaacttgagaaaagctgaaggtaagagacagacaattgaggctaatctagctctcagacgagctcggacacgagtcgaggctctcaatacgatttgattttgtaactagctgacgtgtaaaaaaaaagaatgtataaaaaaaataggatcgaaagacgataaaaacaataaaaaaaaaaaaaaaggcggccgctcgcnnnnnnnnnnnnnnnnnnnnnnnnnnnnnnnnnnnnnnnnnnnnnnnnnnnnnnnnnnnnnnnnnnnnnnnnnnnnnnnnnnnnnnnnnnnnaaaatcat

SEQ ID NO: 90916 - DNA, 2424 bp, Arabidopsis thaliana columbia
  unsure (1)..(2424): unsure at all n locations
acgactcactttangggaaggctgctccgcctgcaggtcccggtccggatttcccggttcgaccctcgcgtccgcccaccgacccctagccgccttattcgtcttcttcgttctctagttttttcctcagtctctgttcttagatcccttgtagtttccaaatcttccgataaaaatgtcgggtaaaggagaaggaccagctatcggtatcgatcttggtaccacttactcttgcgtcggagtatggcaacacgaccgtgttgagatcattgctaatgatcaaggaaacagaaccacgccatcttacgttgctttcaccgactccgagaggttgatcggtgacgcagctaagaatcaggtcgccatgaaccccgttaacaccgttttcgacgctaagaggttgatcggtcgtcgtttctctgacagctctgttcagagtgacatgaaattgtggccattcaagattcaagccggacctgccgataagccaatgatctacgtcgaatacaagggtgaagagaaagagttcgcagctgaggagatttcttccatggttcttattaagatgcgtgagattgctgaggcttaccttggtgtcacaatcaagaacgccgttgttaccgttccagcttacttcaacgactctcagcgtcaggctacaaaggatgctggtgtcatcgctggtttgaacgttatgcgaatcatcaacgagcctacagccgccgctattgcctacggtcttgacaaaaaggctaccagcgttggagagaagaatgttcttatcttcgatcttggtggtggcacttttgatgtctctcttcttaccattgaagagggtatctttgaggtgaaggcaactgctggtgacacccatcttggtggggaagattttgacaacagaatggttaaccactttgtccaagagttcaagaggaagagtaagaaggatatcaccggtaacccaagagctcttaggaggttgagaacttcctgtgagagagcgaagaggactctttcttccactgctcagaccaccatcgagattgactctctatacgagggtatcgacttctactccaccatcacccgtgctagatttgaggagctcaacatggatctcttcaggaagtgtatggagccagttgagaagtgtcttcgtgatgctaagatggacaagagcactgttcatgatgttgtccttgttggtggttctacccgtatccctaaggttcagcaattgctccaggacttcttcaacggcaaagagctttgcaagtctattaaccctgatgaggctgttgcctacggtgctgctgtccagggagctattctcagcggtgaaggaaacgagaaggttcaagatcttctattgctcgatgtcactcctctctcccttggtttggaaactgccggtggtgtcatgaccactttgatcccaaggaacacaaccatcccaaccaagaaggaacaagtcttctccacctactcagacaaccaacccggtgtgttgatccaggtgtacgaaggagagagagccagaaccaaggacaacaaccttcttggtaaatttgagctctccggaattcctccagctcctcgtggtgtcccccagatcacagtctgctttgacattgatgccaatggtatcctcaatgtctctgctgaggacaagaccaccggacagaagaacaagatcaccatcaccaatgacaagggtcgtctctccaaggatgagattgagaagatggttcaagaggctgagaagtacaagtccgaagacgaggagcacaagaagaaggttgaagccaagaacgctctcgagaactacgcttacaacatgaggaacaccatccaagacgagaagattggtgagaagctcccggctgcagacaagaagaagatcgaggattctattgagcaggcgattcaatggctcgagggtaaccagttggctgaggctgatgagttcgaagacaagatgaaggaattggagagcatctgcaacccaatcattgccaagatgtaccaaggagctggtggtgaagccggtggtccaggtgcctctggtatggacgatgatgctccccctgcttcaggcggtgctggacctaagatcgaggaggtcgactaatttgttggacattgacctctctctttctcctatctctatctcttttacttgcttttttttgatctgttaagactttttatgttgggcttttttaaagaagcccattttgtggtgttttttggttagtactattttgaacaatggttggttctataccagtttagctacgatgacggataaaattaaaagtttgccaaaaaaaaaaaaaaaagagggtccaagcttacgtacgcgtgcatgcgacgtnnnnnnnnnnnnnnnnnnnnnnnnnnnnnncaccnnnnnnnnnnnca

SEQ ID NO: 90917 - DNA, 552 bp, Arabidopsis thaliana columbia
  unsure (1)..(552): unsure at all n locations
nnnnnnnnnnnnnnnnnnnnnnnnnnnnnnnnnnnnnnnnnnnnnnnnnnnnnnnnnnnnnnnnnnnnnnnnnnnnnnnnnncccacgcgtccgagattttcttcaagcaaaaagggagttatgagatgattggtcgtcctcgccggagaaaagatacgagacttgtctctcaatcctgaagcagactcgattcatccatcagtcaacaaatcttccttcacaatggatgaagaagaagcaatgttactgctaaaggaagaagatgaaggaacaagaagaactagtgttcctacacaactcatgaaactaaaacgaacccattggtggattcttgtctttataagtatcttcttcctcatctctgcacaagccattgctgttcttcttggtcggttttattacaacgaaggtggaaacagtaaatggatctctactcttgtccaaacttgtggttttccgattctctatctccctctttgtttccttcctgcttcacactcttcttcatcttcttgttctttcaagactctggtttggatttatctttctct

SEQ ID NO: 90918 - DNA, 694 bp, Arabidopsis thaliana columbia
  unsure (1)..(694): unsure at all n locations
atgatcttnnnnnnnnnnnnnnnnnnnnnnnnnnnnnnnnnnnnnnnnnnnnnnnnnnnnnnnnnnnnnnnnnnnnnnnnnnnccacgcgtccgcccacgcgtccgattttttttgaaaagcttcacttcccactctctctctctctctctctcttcctacggctgcgaaaatgacaatcggttacagagacgccgccggagacccgctcttcccgtggcttatggagattaaaaattcgatggaggatctatacgctggtaaaaattccggatacgatctcgataagcttctatttgattgtatctcaacttataagaaagattctcggtaccgaaatgacctcagattcctcaagatctgggttctctatcttgaaggcagggaagattttgagagggtttatagagaaattgaagagactgagatatgtaaagggcattcgttgctctatgaatggtatgctatttttcttgaggtcaaaggattgtggcgaagagcatattctgtttatcagactggtctttcaaggaaagctgaaccatctgacaggttaaaagaggctcactcattgttcttacaaagaatctctaagaggaccaaagcatcttcccttganaaggttggtgatgatgctcaggccactgacttggagacgcgttttgtgaatccatgggaaacatccactgtgaacg

SEQ ID NO: 90919 - DNA, 993 bp, Arabidopsis thaliana columbia
  unsure (1)..(993): unsure at all n locations
nnnnnnnnnnnnnnnnnnnnnnnnnnnnnnnnnnnnnnnnnnnnnnnnnnnnnnnnnnnnnnnnnnnnnnnnnnnnnnnccacgcgtccgggctactagggaagagagagataagtatagatcagtccttgaagatgcaggacaggttcaatggaggtatgataaccctccagacttcaatagtgtgaaccagctctttgaagaaggccagactaaggtgtggccagaaggttcgttagaagagacagtgcaaaacgcgatcaagtcatgggagatggagttctcacataagatccgtttacaggacttcaagactataaaccctgagaagtttaagctctttgtcaatgggagagaaggtttatcagctgaagagacgcttaggcttgggagttacaatgctttgctcaagaactctttgcctgaagagtttcagtactataagcccgaggaagagagctttgagtcatcacatgacgcctttagatctgctttaccacgcgggtttgcgtgggaaatactctctgtgtactcggggcctcctgttatagccttcaaatttagacactggggatactttgaaggaactttcaaaggtcatgctcctactggggaaatggttcaattcctgggtctaggagttctaaaggttgacgaatcacttagagcagaggagattgagatttactatgatccaggagagctgttcgggggactactcaagggacctcctatatcagagaccaaaaccacagacagtggagacaacactgcagagaaacaaagctgcccattcacacactaagataataagaaaagtagaagtgtatttgaccctttaaagaatatattgtaacagtctcttggttattgatgcatggaataaattataagtaaaaaaaaaaaaaaagggcggccgctctagaggatccaagcttacgtacgcgtgcatgcgacgtcatagctaataatgatagtgtcacgctaaattca

SEQ ID NO: 90920 - DNA, 515 bp, Arabidopsis thaliana columbia
  unsure (1)..(515): unsure at all n locations
nnnnnnnnnnnnnnnnnnnnnnnnnnnnnnnnnnnnnnnnnnnnnnnnnnnnnnnnnnnnnnnnnnnnnnnnnnnnnnnnnncccacgcgtccgaaaatatattctctcggttttttccagagcgtatattcaaattcttccttaaaaagtaaaaattaatctgattctctctactactactactacgatgggtgagaaaaaggaagaaacggcgacgaaacctcaaggagagaagaaacctaccgatggtggaatcaccaccgtcgttatgaagcttgatatgcattgtgaaggttgcggcaaaaaaatcaaacgcatcttcaaacatttcaaaggtgtggaagatgtgaagattgattataagagtaacaaattgacggtgatcggaaacgtagatccagtggaagttcgtgataaagtggccgacaaaattaagagaccagtcgaacttgtctctacagtagcgccgccgaagaaagagacacctccttcatcaggcggtgcagagaagaag

SEQ ID NO: 90921 - DNA, 720 bp, Arabidopsis thaliana columbia
  unsure (1)..(720): unsure at all n locations
nnnnnncnnnnnnnnnnnnnnnnnnnnnnnnnnnnnnnnnnnnnnnnnnnnnnngttatttttgtttcgtcgtctctcccacgcgtccggaaaaattagcagaatccgtcatgtcttccggcgtaaattcaactggctccgccgcagcagcaccggaggttgacaagatgttcttctgctaccagtgcaatcaaacagtcacaatctcaatttcctcatccgctgatcctttttgtccaatttgtaaccaagggtttcttgaagaatacgaagaccctaaccctaatcaatccctcaatttcaaccctaactcttctgattcctttttccccatggccgatcctttctccaccttgctcccgctcatattcggctcttccgctgccgctccttccggcatggacttcatgagcttattcggtccttcgatgcaaccacaggctcgttccactcagcagaatcctcagtctgacgcgtttgatccgtttacgtttcttcagaatcatctccagactttgcgatctagcggtacgcactttgagttcgtgatcgagaatcatccttcggatccaggtaatcgtatgcctgggaatttcggtgattacttcttttggtccaggtcttgaagcagttgattcaacaactagctggaatgatccaattggaanggaacncnncngttccaaancgncataaggtttccnactgtaaggaacgngg

SEQ ID NO: 90922 - DNA, 451 bp, Arabidopsis thaliana columbia
tcgcgggacgcgtgggctcaacttattgtttgaatataaaaagagatatcaaaaagaagagaagaccaaaaacaaaacaaaaatctctaataaaaatggcttccaaagctatcttcttctctttctttgtcgtctccgccgtgtgtttgtcttctctggcaggtttcgccgccgctgatgctgacgacttcgatcgtttccagattcaaggatcagtttactgtgacacttgccgtgtccaattcgttacccgtctcagcaaattcctcgaaggcgcgaaagtgaagttggagtgcaggagcagaacaaacggaaccataacattgaccaaagaagctgttaccgacaaaacaggaagctacaaaatggaagtaaccggtgaccacgaggaagaagtttgcgagcttgttttggtccaatcaccagacagtggttgcagtgatgtcagcac

SEQ ID NO: 90923 - DNA, 900 bp, Arabidopsis thaliana columbia
  unsure (1)..(900): unsure at all n locations
nnnnnnnnnnnnnnnnnnnnnnnnnnnnnnnnnnnnnnnnnnnnnnnnnnnnnnnnnnnnnnnnnnnnnnnnnnnnnnnncccacgcgtccgctcaaacaaagaaaacgattacaaaagagaagaggtatcaaaaagaagaccagaatcttttaacattttgaaacaaatggcgtccaaagccatcttcttcttctttgtctctgccgtgtgcctgtcctctctcgccggtgtggccatcgctgatgccgatgactttgaccgtttccaaattcagggatcggtttattgtgacacatgccgtgtccaattcgttacccgtctcagcaagttccttgaaggcgcgaaagtgaagctagaatgcaggagcagaacaaacggaaccgtaacattgacaaaagaagccgtaacggacaaaacagggagctacagaatggaagtgaccggtgaccatgaggaggaagtttgcgagcttgtgctcgtcgaatcaccagacagtggttgcagtgacgttagcaaagaggcttacctacgtaacgccgctaagatcagcctgaccgcgaatgacggaatcgtctctcacgagacacgtatcgttaaccctctcggtttcatggttcaaactccgtcagctgaatgtcccgctgctttcaaggagctcgggatcgttcctgatgtcaccttctaaatttaatgatttcaagatcgtcatttaagtgtaatctattgtttgtttctatataacaaaacaaaaatgtaatttgataaaacacaaaaaaaatgcagtaaataaaataaattattttcttaaaaaaaaaaaaaaagnnnnnnnnnnnnnnnnnnnnnnnnnnnnnnnnnnnnnnnnnnnnnnnnnnnnnnnnnnnnnnnnnnnnnnnnnnnn

SEQ ID NO: 90924 - DNA, 869 bp, Arabidopsis thaliana columbia
  unsure (1)..(869): unsure at all n locations
nnnnnnnnnnnnnnnnnnnnnnnnnnnnnnnnnnnnnnnnnnnnnnnnnnnnnnnnnnnnnnnnnnnncatttttngctcttcccagcagcctctctctctttaagatttggaaaagacctttgcttctcttcgttcggaaaaccagctcaaagattcaatatgtcaggtgatgaggctgttgctgctcctgtggttcctcctgttgctgaggcagcagtgatcccagaggacatggatgtgagtactgcattggagttgactgtaaggaaatctcgtgcttatggtggtgttgttcgtggtctccatgaaagcgctaagcttattgagaagcgtaatgctcagctctgtgtcctggctgaagattgcaaccaacctgattatgtcaagcttgttaaagctctttgcgctgaccacagcatcaaattgcttactgttccaagtgccaaaacactcggcgaatgggctggtctttgcaagattgattctgagggcaatgcaaggaaggttgttggatgctcatgtctcgtgatcaaggatttcggtgaggagacaactgcactaaacattgtcaagaagcatcttgattctaactaaatcaagcaaaaaggtcaagtttacagatgctttcttctcaaaaggaaacgcattttgtggccactctttttttctttccagtcttttctgtttttgacattaaatactcagtagtggacatgtcttgagatttgtttggaacatgaaagttttgatgtttatgtaggttctttcagttcgctcaaaaaaaaaaaaaaaagnnnnnnnnnnnnnnnnnnnnnnnnnnnnnnnnnnnnnnnnnnnnnnnnnnnnnnnnnnnnnnnnnnnnnngaa

SEQ ID NO: 90925 - DNA, 672 bp, Arabidopsis thaliana columbia
  unsure (1)..(672): unsure at all n locations
atgatctgccagcactaatcgactcacttagggaaagctcggtacgcctgcaggtaccggtccggaattcccgggtcgacccacgcgtccgcggattcggagctgctggtataaggccatgtgtttcctcatttggtgctgaccagtttgatgagaagagcaaagactacaagacacatttagaccgtttcttcaacttcggcgagctatcggtcactttaggcgcaatcattgccttcactttggtggtatatgttcaaatggaacttggttggggtatggcttttggcacattggccgtagccatggggatttctaatgctttgttctttgctggtacaccgctntatcggcataggttgcctggtggtagtcccttgactagggtagctcaggtcttagttgccgctttccgcanacgaaatgcagctttcacaagcagtgagttcatcggtctttacgaagttcctggcttgaaatctgctattaatggcagtcgtaanatccctcattccaatgatntcatatggctagaaaaggcggtagagtggcagcgcttagccgagaaagcgacggaacatanacttggttcttccgttatgaattttgagacnggttgtagcaagtttcttttgngacannaatcacaggattaactaaaatataagatga

SEQ ID NO: 90926 - DNA, 906 bp, Arabidopsis thaliana columbia
  unsure (1)..(906): unsure at all n locations
tatacgactactatagggaaagctggtacgcctgcaggtaccggtccggaattcccgtgtcgacccacgcgtccgatcgattcagagggttgctctagccattgctcctcgtcctggctccaatatcagtccaatatctgttcccacttcccctgaagctctcactctggtccgttggatctcccggagttacagccttcacactggtgcagatctctttggatctgattctcaaaccagtggtgacacgttgctgcatcaactctggaatcactctgatgcaatcttgtgctgctccctcaaaacaaacgcttcaccggttttcacattcgcaaaccaaaccggtttagacatgctggaaacgactcttgtagcccttcaagacataatgctagacaagacccttgacgaacctggtcgtaaagctctttgctctgagttccccaagatcatgcaacagggctatgctcatctgccggcaggagtatgtgcgtcaagcatgggaaggatggtatcttacgagcaggcaacggtgtggaaagttcttgaagacgatgaatcaaaccactgcttagctttcatgttcgtgaattggtcgttcgtttgaagaataataagaaataagaagaccagattttactccatttttcccttggtagggaggttatttatgtaagatattaaagttaggtcccactaggctccaaagtcttttgaaattcgaggaccaatatgtaatatgacgaaggtctgatctggtatggatggttctggtccctatgttacgttatatggcaagattattatgataaaaaaaaaaaaaaaaaaaaggcnnnnnnnnnnnnnnnnnnnnnnnnnnnnnnnnnnnnnnnnnnnnnnnnnnnnnnnnnnnnnnnncgtcctaaa

SEQ ID NO: 90927 - DNA, 550 bp, Arabidopsis thaliana columbia
  unsure (1)..(550): unsure at all n locations
nnnnnnnnnnnnnnnnnnnnnnnnnnnnnnnnnnnnnnnnnnnnnnnnnnnnnnnnnnnnnnnnnnncttttttgtattctctcattacttcgtctcttcccctgtaatggcgcttccacacgtagtctcttcaccttcttcaacttcattatctccttccttcaaatccaaaccaccgtttcactcccttagatctttatcaccgacggttgataatcgccggcgttgtaaactcaacagttccttccgatgttcatcttcttcattctccgagaagcatcacaacgcgaaatctccaaaatccgatgatatcgtcgagcttcctctgtttccactcccactcgttctcttccccggagcaatccttcctcttcagatcttcgaattccgttaccgtatcatgatgcacacgcttcctccaatctgatctacgattcggcgtagtttactccgattccgtctctggctccgccgcagaagtaggatgtgtaggagaagtcgtgaaacacgagcgtctcgtcgatgatcgattctttctagtctgcaaag

SEQ ID NO: 90928 - DNA, 1053 bp, Arabidopsis thaliana columbia
  unsure (1)..(1053): unsure at all n locations
atgatcctgccaagcatcaatacgactcacgttagggaaagctggtacgcctgcaggtaccggtccggaattcccgggtcgacccacgcgtccgcggacgcgtgggcgagctctcatcttcttcctcaggcattgcatatgataccgagaaccccttctttctcgtcgaagaatttaggggtttcttcaattctaccacgagcatcatcagtgaactcaagactatcagtttctagggtttttctcaatcattcgagctccaattttggtttcgccatcgattccaagaagagaaaagagtttatcgctaaagctgaagagagtactgaaggtgaaactgaggctgttgtggagaatgctgttgaaactgaagcggaaggagaaggagaagccactgttgcggcggaggaagctaaacctccgtggaagacgagagtcaagctcggagatatcatggggctactgaacaagaaagctattgaggttgcagagactgtaagaccggttcctggacttaggactggggatattgtagaaatcaaactggaagttcctgagaacaaacgtaggctatctatctacaaaggtattgtgatgtctagacaaaatgcaggcatccacactactatccgtatccggaggattattgcaggcattggtgttgaaatcgtctttcccatatactctcccaacataaaggagataaaagtggtaagtcacaggaaagtgagaagagcaagactttactatctgagggacaaacttcctcgtctctcaacttttaaatgatcaccaaacccaacaccagtcttgtcttgtgttgtcttcaatctccaaaggtagctagctactctcttttctcttgtaataattgtttgtttgtttcgtcttttggatttcatttcttttcatgtaatttacagtaacagtaatttaagaaaagtaaatcaatgttgattgttaaaaaaaaaaacacaaagnnnnnnnnnnnnnnnnnnnnnnnnnnnnnnnnnnnnnnnnnnnnnnnnnnnnnnnnnnnnnnnnnnnnnnnnn

SEQ ID NO: 90929 - DNA, 1141 bp, Arabidopsis thaliana columbia
  unsure (1)..(1141): unsure at all n locations
atgatttgccnnnnnnnnnnnnnnnnnnnnnnnnnnnnnnnnnnnnnnnnnnnnnnnnnnnttatccgcccgagtaactgagagtttgctgcagctatggcgatgagctttcatcgtcttcctcaggcattgcatatgatacccagaaaccctacgcaatcatcgaagaatttagggttttcttcgtttctatcgtgtgcaccatcgatggattctcgtatatcagtttctaggctttctctgaatcatcccggctcgaaatttgggttctcactcgatactagggtgagaaatgagtttatcgttagagcagaagaaggtaacacagaagctgaatctgaagaatttgttgctgaaatcgctgatacggaaggaaatgtagaggaagtggtcgaagctaaacctacaagaaaacctaggatcaagctcggagatgtcatggggatactgaaccagaaagcaattgaggtagcagagaaagtgagacctgttccagaaatcaggacaggagatattgtagaaatcaaattggaagttcctgagaacaaacgtaggctatctatctacaaaggcatagtgatgtcgagacaaaatgcaggcatacacactaccattcgtattcggagaattattgcgggtatcggtgttgaaattgtgtttcccatatactctcccaacatcaaagagataaaagtggtgagtcacaggaaagtaagaagagcaaggctttactatctgagggacaagcttcctcgtctgtccactttcaagtgaacaccatccaccgtgctgtgtttgacctccagaggtagtaatcttccgccattgtgctctttttttgtaagaattgtttctttctttcttttttttaagcctgtaagtcattccctgcacattttctgagaaagtaaattaagattagttgaacttccggttgatggatgtagacctgttccttgtttgataatgaatgatatatggcttaggatgacctaaagtccatactttaatagaaactatgtatgaatgagtctgtgttctgtgcaaaaaaaaaaaaaaaaaaaagnnnnnnnnnnnnnnnnnnnnnnnnnnnnnnnnnnnnnnnnnnnnnnnnnnnnnnnnnnnnnnnnnnnngtaccta

SEQ ID NO: 90930 - DNA, 596 bp, Arabidopsis thaliana columbia
cgcgggtcgacgcaagactctatactgattcgaaataacgacagaaggggatgtcgagacaaaatgcaggcatacacactaccattcgtattcggagaattattgcgggtatcggtgttgaaattgtgtttcccatatactctcccaacatcaaagagataaaagtggtgagtcacaggaaagtaagaagagcaaggctttactatctgagggacaagcttcctcgtctgtccactttcaagtgaacaccatccaccgtgctgtgtttgacctccagaggtagtaatcttccgcattgtgctctttttttgtaagaattggttctttctttcttttttttaagcctgtaagtcattccctgcacattttctgagaaagtaaattaagattagttgaacttccggttgatggatgtagacctgttccttgtttgataatgaatgatatatggcttaggatgacctaaagtccatactttaatagaaactatgtattgaaaaaaaaaaaaaaaaaaaacccaaaaagcggccgctctagaggatccaagcttacgtacgcgtgcaggcgacgtcataactcttctatagttgtaccta

SEQ ID NO: 90931 - DNA, 764 bp, Arabidopsis thaliana columbia
cgcgtccgaattcctttttatttctccctttactttttttataatcgcaaaaacaaatttcaatagttcttgtaagcgcaacgtgtaagtagagacatacacacatttgtagtgttttgttttgtataataacatcatcgcatatagagaaaagaagttaagacgaccgtatatatcgttttgaaaaccgggtcggataaaaaaaaaccggtttctttaaccgagtcggcgcgcatggagctatgcaatcaaaacaatcacatcaccgccgtctcgggcgatccgttgaactggaacgcgacggccgaagctttgaaagggagccacctggatgaggtgaaacgaatggtgaaagagtataggaaagaggcggtgaagttaggaggtgagactttgacgattggtcaagtagccgccgtggctagaggaggaggaggatctacggtggagctggcggaggaggctcgtgccggagtcaaagcgagtagcgaatgggtgatggagagcatgaaccgaggaacggacaggtattggagttaccacagggtttggtgcaacttcccatagaagaaccaaacaaggcggagcacttataaatgagcttattaagttcttgaatgccggaatatttggccccggcgccggggacacgtcacacacgttgccaaagccgacaacaagagcggcaatgctcgttcgtgtcaacactctcctccaaggctactccggtatacgcttcgagattctcgaagtaattacaaagc

SEQ ID NO: 90932 - DNA, 516 bp, Arabidopsis thaliana columbia
  unsure (1)..(516): unsure at all n locations
nnnnnnnnnnnnnnnnnnnnnnnnnnnnnnnnnnnnnnnnnnnnnnnnnnnnnnnnnnnnnnnnnnnnnnnnnnnnnnnnnnnccacgcgtccgcttagtttttgtgcttcgcgaacagcaagttgagctatggtgaaggagagtgagtactacgacatattaggcgtcaagattgacgcctctggtgctgagattaagaaagcttagtatgttcaagcaaggcaagttcatccagacaagaaccctggtgatcctcaagctgctaaaaactttcagatactaggtgaagcttatcaagttctaggcgatccggagaagcgtacagcttatgacaaatatggaaaagaaggggttcaacaggatgcaatggttgatcctgcagctgtgtttggtatgctctttggtagcgagctctttgaggattacgttgggcaacttgcccttgcttcagcagcctcaatcgatgctgaattagaatcgtatgagcctgagattagaaaacagatgcttcaggg

SEQ ID NO: 90933 - DNA, 595 bp, Arabidopsis thaliana columbia
  unsure (1)..(595): unsure at all n locations
ggaattaccggggcggaccacacccgtccgcggacgcgtggccagccgaaaatccaagtcgactattacgacgattttagttattcggccggaaaggttgataatttcgtgtgattaatctatggagttggaatttgaatcaaagtacgagattaaccgtacggcggagttcattattagcaaaagcttcaccagaattgctttacagttcccggatgagttgttaaaagattcgactaaggtcgtgagtgctcttaagagcaaaactcgtttgcttactgacagagaagtcaggttctttgtaatggctgacacaacttatggtagttgctgtattgatgaagttggagctttgcatattgattctgaatgtgttgttcattacggtcaaacatgtctaagcccgacatcagttcttccagcattcttcgtttttgggaaagcttcgataaacgtctccagctgtgttaagcatttgatagattatgcgtcaaagagcgataaagccatttcatgggttcctttattgggcctagaataccgcgcatttaaatcccccaaaatccggggngntttngggtntnccgaggctngt

SEQ ID NO: 90934 - DNA, 971 bp, Arabidopsis thaliana columbia
  unsure (1)..(971): unsure at all n locations
acgcccgtnnnnnnnnnnnccccctctagggttggttggtccgcctgcaggtaccggtccggaattcccgggtcgacccacgcgtccggatagtgataacgaaatcctaattccatggccgacaacgacggagcagtgagtaacggcatcatagtcgagcagacgtcaaacaaaggacctcttaacgccgttaagaaaccaccgtctaaagatcgacacagcaaagttgacggaagaggaagaaggattcgtatgccaatcatttgcgcagctcgagtttttcaattgaccagagagttaggtcacaagtccgatggtcaaaccatagagtggcttctccgtcaagctgagccttctatcatagccgccactggaactggcactactccggcgagtttctccactgcttctctctccacttcttctccgtttactctcgggaaacgtgtcgtcagagcggaggaaggagaatccggcggcggaggaggaggagggttaacagtgggacacacaatggggacttcgttaatgggtggtggtggttctggtgggttttgggctgttccggcgaggccggatttcggacaagtctggagctttgcaaccggagctccaccggaaatggtttttgcgcagcagcagcaaccagctacactcttcgtccgccaccagcagcaacagcaagcttccgccgccgcagcagctgcaatgggtgaggcttcagcagctagagttgggaattatcttccgggtcatcatctcaatttgcttgcttctttgtctggtggagctaacgggtcgggtcggagggaagacgaccacgaaccacgttgagaaatggtattgtctttttggtaatgtatagaaaaattcctatgttttatgtcatcgaaagtgtttagaaagtacctctaatttgcggtttcttttgctccttttttacttcatttaagcttattgcttgtttgatt

SEQ ID NO: 90935 - DNA, 658 bp, Arabidopsis thaliana columbia
  unsure (1)..(658): unsure at all n locations
ctcacttttagggaaagcctggacgcctgcaggtaccggtccggaattcccggttcgacccacgcgtccgataaactccaccgttaggcccttgttgtgtccatcccgtctcgccgtttgaaaccgtattcgttgttcgctccatcagtccaatccgtcaaagttggagagaaaggttttcatgtcgtcaaataggaatatatatgctgaaagacattggatgtatgaaagaatcgatcctacaaccaatcgagtatcacaagctttttatgaaggattggacaattttttgaagtttgcaaaaagtcagcctttatttttggagaataaaaaacttttttgtccgtgtattaagtgtggaaatggaggaagacaacaagaagaacacatccgtggcaacacattttgttcaccaaagggtttatgcttaactactgggtttggacttctcatggggaaattataatatgttataaacaacaattctgaagagatactgttaggtttgagtctcacacagaaccagtggatccttatgtggaaatggtgtcagatgcaatttggtagtacagaaatcagagtttgatcagatgagggaagatgatcctaattttgaggcaaaaaagtttatgatattttggatgctgcnaacaaccta

SEQ ID NO: 90936 - DNA, 534 bp, Arabidopsis thaliana columbia
  unsure (1)..(534): unsure at all n locations
nnnnnnnnnnnnnnnnnnnnnnnnnnnnnnnnnnnnnnncggacgcgtgggcggacgcgtgggctccaatgcttaagctgaaatctagtttattttttctatttactaaaacctcccaaggaccaaagaacatcgacaaaggaagacgacgaagaagatttcgagcttcgacaaatcatgcggattcttactgctcgcatagctaaccatttttgcagggcacgaaacgcgaatcctcgatctcgaaatttctcctcgtcgaacaagaaagatgaccttacattggaggaagaagctgagaggaaaataggttggtgtctcaaaattttctttgcgggcacagcaacgtatattggataccagtttttcccttacttaggtgataacttaattcatcaatcaatatcgcttttacatgtgaaggatcctttgtttaagagaatgggagcttctcggctttcccgtttcgctattgatgatgaaaggaggatgaaggttgtagagatgggtggggctcaagagctactacatatg

SEQ ID NO: 90937 - DNA, 852 bp, Arabidopsis thaliana columbia
  unsure (1)..(852): unsure at all n locations
nnnnnnnnnnnnnnnnnnnnnnnnnnnnnnnnnnnnnnnnnnnnnnnnnnnnnnnnnnnnnnnnnnnnnnnnnnccacgcgtccggaagaggatagttctaacacatccctgacaaatactcttgctgaatttgatcccttctccccatcatcgttgtaccccgaacatgagatcaatgctacttctgatctcaacatggaccaagattacgatttttcacaatttttcgaaaaattcggaggagataaccacaatgaggagaacagtatgaatgatctccttatgtccgatgtttcccaagaagtctcatcaactagcgttgatgatcaagacaatatggtaggaaacttcgagggatggtcaaattatcttcttgaccataccaattttatgtatgacaccgactcagactcgcttgaaaagcatttcatatgagtcttcatatccaaacagaaaggtttcaaactattcgacgacttaaaataatggttctgtacccaaggttagtcgattactaactcgctcgaacgagatattgtgtatgtattaattagtatttgggttgtttactatatgtccaaggcgtgtttatttccatgttaaccaagggttaatcttaacccttaagtttccccaagaataaataaaatagggtttgagttagggtttctcttacattgagacccatgcatgtatcctcgcgaatcaattggtaattgatttgtgcgggccacgatgtttatactaatatttctttctaaaaaaaaaaaaaaaaagnnnnnnnnnnnnnnnnnnnnnnnnnnnnnnnnnnnnnnnnnnnnnnnnnnnnnnnnnnnnnnnnnnnnnnnnnn

SEQ ID NO: 90938 - DNA, 512 bp, Arabidopsis thaliana columbia
gctttttctgtcttatttttttgtcattaaactatataaccaaacacaaacatcatctttctccttcatttcacaaacttaaaattctctgtttttgtttcttcttctttcaaaatctcaagcaaaagaaaaaatggagctattcacaaaaggtaacaacgttaagttacgtagccacctagataagtttttagtcgccgacgatgaccaagaaaccatccgtcaaagccgtaaaggagatgcacggcgtgccgtttggacggtggagcccgtcgtcgataaacctaatctgataaggttaaagagcagccacggcacgtacttaacggcgagcaacaaaccgttattgttaggtatgaccggtgagaaagtgactcaaacggcgtcgtttaacaagctgatggattggcaaacgcagtgggaaccggagcgagatgggtttcaggtgaagctaaaatcttggtgcggtaagtggatgagggctaacggtggaacgccgccgtggagaaact

SEQ ID NO: 90939 - DNA, 763 bp, Arabidopsis thaliana columbia
  unsure (1)..(763): unsure at all n locations
cgccgcaggaccggcattaggcgtcgaancgacccacgcgnncggaccaatgaaaaggtgagaacccttatggagttagcccaactacgacaggaatatcagtcgctaagagacaaaatgagtggtagaagagaggaagaatcaacgggaaacagtggcaggatagttatctccaatgagaaagatggaagactaaagaatatgtggaagaaatcttacataaaccgttggattgacccaagttcaagaggcggaagtcacttgaacactgaagcagattatgccagtaacatcgaatattccagaatgaaagtagaatatgcagctataccacgcgtccgggaaagcatggggcacttgacgacttcaatccgcaggctccgtctagcgctcttgaaggtaaaggaattaaatgatactgaaacaactgcaagaagttgcgaagtagcgattgccaacatccttgtggaggcaacccatttgaagactgcccttgggatctccataccaattagctggtcggcggaatcagacattgaatcagttactgatggcgagtcgagctgtgaaaggaccgattctgtttctgctgcaggatttgagatggtggagcttgttattctagcagccgagataatgaaagaacaacaccattgaaattcattcttcagtttgttaccggcattttaagttggtctgtggctctgtgaatataatttattgagaatttgatttcaaaatctcttgtataacctctcatggg

SEQ ID NO: 90940 - DNA, 511 bp, Arabidopsis thaliana columbia
  unsure (1)..(511): unsure at all n locations
nnnnnnnnnnnnnnnnnnnnnnnnnnnnnnnnnnnnnnnnnnnnnnnnnnnnnnnnnnnnnnnnnnnnnnnnnnnccacgcgtccgttcaccctcggagcttttcttgaagcagggattcttctaatcattaatccctacttctttctttcttttttgtttgttctcctttgagatctatctagtactagtagtaaggccccctcccctccattgaatttgaattgaattgaatctctgggaatcaaatctttgatgtcgcatctggacgacattccttctacgcctgggaaattcaagatgatggataaatcccccttcttcctgcaccgtactcgttggcaatcctccgtcgccaagcttgccttttggtcccttgtctttttcggattgctcttcatcttcttctaccgatctcccatctccaatcccgattcctctcgccgctctcttcgcacctactcttggggcgggcccgcctgggagaaacgcgtccgatcctccgctcgtgt

SEQ ID NO: 90941 - DNA, 937 bp, Arabidopsis thaliana columbia
  unsure (1)..(937): unsure at all n locations
nnnnnnnnnnnnnnnnnnnnnnnnnnnnnnnnnnnnnnnnnnnnnnnnnnnnnnnnnnnnnnnnnnnnnnnnnnnccacgcgtccgtggagctgactggataagttcagataagcgggaagatgatcttggtggacgaataggtggtctagttcaggaatacgcagcgaaaggaagtcccgagtttttcttcattgtaaacatacaggtccctggttcggctatgtacagtctagcattgtactatatgctgaaaacaccattggaggagcatcctttgttagagagttttgtgaatggtgacgatgcttatcgaaactcgcgctttaaactcatccctcatatctccaaaggttcatggattgtgaaacaaagtgttggaaagaaggcttgcttggttggtcaggtacttgaagtttgttacacccgcggcaagaactacttagagcttgacattgatgttgggtcttcaactgttgcaagaggtgtaaccaatcttgttcttgggtatctcaacaatttggttatagaaatggcatttttgatacaggcaaatacagtagaggaactaccagaactgctactaggaacttgtcggctcaattatcttgatgtttcaaaatctgtaaaagaaaggtgagacatccttaacaacaaacactattgcaggagcagaggatattttcgatttttgtttctttgtaaaagctgtgttttaaactgtgattcttgttatgtcaactcgtttttacactcaaactgatgtatagtcaggatcagtagtttggttctctgtgttgtctgatccaagattgaataaataaacttgttgataagacatgaaaaaaaaaaaaaaaaaaaaaagnnnnnnnnnnnnnnnnnnnnnnnnnnnnnnnnnnnnnnnnnnnnnnnnnnnnnnnnnnnnnnnnntgtcctaa

SEQ ID NO: 90942 - DNA, 428 bp, Arabidopsis thaliana columbia
acgcgtccaaaaactactctctccgaccccaaatccagaaattcaagcgaggaatagaatctcccactagagaaaagcaatcccagaaaccctaagttcttcacgtttcgttcttttgcttgttgatcaagcaggatatctccgagatttgtgagtctcttgctacttcttcctggagaacgattcagggtttgatgtgataagaatagtcatcgaggaagatagatttggggattttttttttatttgtagattcatgaaacaaattcgtcgatggcagaggattttgatcctcgctctgctatcgatatctgtattcgctccgcttattttcgtatcgaatcggcttaagagcatcactcccgttggtcgtagagaatttattgaagagttatccagaattagattcacgacaaatgaccttagac

SEQ ID NO: 90943 - DNA, 621 bp, Arabidopsis thaliana columbia
  unsure (1)..(621): unsure at all n locations
nnnnnnnnnnnnnnnnnnnnnnnnnnnnnnnnnnnnnnnnnnnnnnnnnnnnnnnnnnnnnnnnnnnnnnnnnnnnccacgcgtccgctcttctgcttcttcttcttcaaaatctctctcttcaccaaatcctcagaagatgagcaacgacaaggatagcttcaacgtctccgatcttactgctgctcttaaggacgaggatcgagctggccttgtcaatgctctaaagaacaagctgcagaatctggctggtcagcgttctgatgtgctcgagaatctgactcccaatgtgagaaagcgcgttgatgccttgagggatatacagagccaacatgatgaactagaggcaaaattccgtgaggagagagctattcttgaagccaagtatcaaacgctgtatcagcctttgtatgtcaagcgttatgagattgtgaatggcactactgaagttgaactggctccagaggatgataccaaggtggaccaaggagaggagaaaactgcagaagagaaaggagttccaagtttctggctgacagctctgaaaaataacgatgttatttcccagggaggtcacagagcgggatgaaggggctctcaaatatcttaaagatattaagt

SEQ ID NO: 90944 - DNA, 662 bp, Arabidopsis thaliana columbia
  unsure (1)..(662): unsure at all n locations
ctcactatagggaaagctggtacgcctgcaggtaccggtccggaattcccgggtcgacccacgcgtccggcaactctggagagagcgtgttcgtcattgaaatcgaagcttggagattcaatatttcttcgatctcgtgttcttcgtctcgtttcgtcggtccagtgttaataaaaaatgagttcaactgtttcaaatccccaaggaatcctgcaaccaggctcatttctgcttccagaatcagaatctatgaaaaaagaggaagcagagttagtttctgtgtgttggaatcaggattcaagttgttttgcagctggaacgagtcatggttttcgtatatataactgtgaacctttcaaagaaactttcaggcgtgagctaaaggacggtggttttaaaatcgtagagatgcttttccgtagcaatatactggcacttgttggtggtggacctaactctcagtatccttcaagcaaagtactaatttgggatgatcatcagagccgttgcattagtgaatntgcatttaggtctgagattcgtgcagtgaaattaagaagggatcggattgttgttgttcttgaacataagatttatgtttataactntatggatcttagacttcttcatcagattgaaactcaagctaatcctagaggatt

SEQ ID NO: 90945 - DNA, 628 bp, Arabidopsis thaliana columbia
  unsure (1)..(628): unsure at all n locations
actcactttagggaaagctcgtacgcctgcaggtaccggtccggaattcccgggtcgacccacgcgtccgtacggtggagaaacagaagggggccaaatcctttcaacgccaaaccattcccctatataattatatatacaattacaaattttatgttacagtcttcatttattcgcgtaaagatttcaaaaagtagtgaatatattcttgtaggaagctgcaggggttaaggagagaaaagggatggtgaaactgagagaaacagaagtgatcctgagactctgcatcgtcttttttcttctcctcacttcttgtttgatcggtttggattctcagaccaaagagattgcttatatccacaagaacgtcagtttcagatatttgttagctctcgaggctgagttatacatagatgttgtggttgctgcgtataatttggttcaactagggcttggttggtacaatgttgaacaaaaagacctccaatcccaaatggttctcttaccctctttggntcagacggcggcatacgtggttttcgccgggacaatcanccgggnngaaacactcatttnctagttggnttacggggttcaaaggnngcttcaantggntnaaatggggtcc

SEQ ID NO: 90946 - DNA, 672 bp, Arabidopsis thaliana columbia
  unsure (1)..(672): unsure at all n locations
aactgcttcttcagaaaattcattacttctaaagatggatgttgtaggtggctgatgactcttcttccctagcatgacctttattgatacagagatgtgtatgagaagaaagaacatcaatttaacaacagtcatagattctaacgaagccattggtatggaacatgaattagattctgctagacatcaatattcttcagtgctcactgcaattccattcttctccgctacattgtttattcctctctctttgaaaatcactatacgtgacgggtttcacgaaagtctttaataacatttccatacacaaaacacaaatagtttagagatttgttcttagggagatttagctatctctctgttcaaaagattggtctaaagatgcaagcttttgctttaagtgggaagaaaaggattgtgaatcacggcatgtgtttttccaaaggaaatcttgatctcggttcacgcttgtctgagaattttatggatgatcctttgatcccgggattgcctgatgatgtcgctaagcagtgtctagcgcttgtnccgcgtgctaggttcccatccatgggaagtgtatgcaagcaatggaggnttgttgtncagagcaaagagtttattactntgagaagactcgctggtatgctttaggngtggctttatttcttaacg

SEQ ID NO: 90947 - DNA, 657 bp, Arabidopsis thaliana columbia
  unsure (1)..(657): unsure at all n locations
nnnnnnnnnnnnnnnnnnnnnnnnnnnnnnnnnnnnnnnnnnnnnnnnnnnnnnnnnnnnnnnnnnnnnnnnncgctaatggaccacgcgtccggattcaatacgttacgaacattattgtccatgggattcatgtccatgactgtaagcctacgggtaacgctatggttagaagctctccgtcccattatgggtttagatcaatggctgatggtgacgcgatctcgatttttggatcgagtcatatctggattgatcacaattcgctttctaattgtgctgatggacttgttgacgctgttatgagctccaccgccattactgtctcaaacaattttcttcacccaccacaatgaggttatgttgttggggcatagtgattcatacacaagagacaaggtgatgcaagttacaattgcttacaaccattttggtgaaggtttaatccagagaatgccaagatgtaggcatggatatttccatgtagttaacaatgactacactcattgggaaatgtatgcaattggtggtagtnctggtccaaccatcaacagtcagggcaatcgatttcttgctccagtcaacccatttncnaaggaggtgactaagngagngtacacaggtggatcggaaatggnngcnctgggnttggggtca

SEQ ID NO: 90948 - DNA, 562 bp, Arabidopsis thaliana columbia
  unsure (1)..(562): unsure at all n locations
tcccgggtcgaccacccgtccgttctttaaaacaattattttcagacacagagagactcagacaggagatatgaactgcggaggaaaggtggtctgcgttaccggagcttccggctacatagcgtcttggattgtcaagcttttgctcctccgtggctacaccgtcaatgccactgttcgagatccaaaggacaagaagaaaacagaacatcttcttgcactagacggtgcaaaagaaagactcaaattgttcaaagcagatcttttggaagaatcttcttttgatcaagctatcgatggttgtgatgctgtcttccacactgcttctccagttctattcactgtcacagatcctcagacctgagctgattgatccagccttaaaggggtactattaacggccctaatacatgcaaacaaggtttttctgtcaagagggtcattctgacatcttccacggctgcggttctctttcgtagccccctttgccaaagggccctggtggccgggtttttttcgtccagnttnaggggnanattggttnccccantttggcggatta

SEQ ID NO: 90949 - DNA, 594 bp, Arabidopsis thaliana columbia
taatacgactcatttagggaaagccggcacgcctgcaggtaccggtccggaatacccgggtcgacccacgcgtccgcccacgcgtccgctcttaactcatcttatactttcttcttctattagtaaagatgagtactctctctaccaaataaataaggaaacataaaaaacatctctccttctttctctacatgaaaaacaaaagattcctcaattttgttcttatttttcatttagtcacagtacctctctcactataaaccacactgtcttgagataaaatacaaaaagagaagagattaaaaacctcatccgatgatagactacgagagaagcaataccaccaagaacatcaacacccatcatcacaaccctcctccatcttcatcttcctctgatcttcttcccgacggtaatggaaccgccgtgactcagaagcggaaacggagacccgccgggacaccggatccggaggcggaggtggtatctttatcaccaagaacgttactagaatcggatcggtacgtatgtgagatctgtaaccaaaggtttcaaagggaccagaatctacagatgcatagaagacgacataaa

SEQ ID NO: 90950 - DNA, 454 bp, Arabidopsis thaliana columbia
aagactctataatgacgtcgtattacgagaagacgacagaaaggacctggaggtgtcactatcaagaagacaaaccaagctttggtctttggcttctacgatgaaccaatgactggaggtcaatgcaacttggttgtcgaaaggctcggggattaccttatcgagtctgaactctaaaaccaaggtttcatttcaggttcttcttaactaaagagtgtcaatgcactttttattgtgattgattgtaatgctttcaaacacaaatcatttgttactttagaaccaattgtgattgattggtctccttcgttaccgagtttgagtttgtgtgttcttgtaatgacatttgatcacttgtttctccataataagagagttttaagcatttgaaacaaaaaaaatggcttccaaggctttggttctgttgggtctctttgttgttcttctcgtcgtc

SEQ ID NO: 90951 - DNA, 800 bp, Arabidopsis thaliana columbia
atttccttgtctacacgatcataaagctcacaaagagagaattgagaagaaacaaactcgtcggagaattcagtactcgccgaagaggaagaagaagaagatgtcttggcaatcatacgtcgatgatcaccttatgtgtgatgtcgaaggcaaccatctcaccgccgccgcaattctcggccaagacggcagtgtctgggctcagagcgccaaatttcctcagttgaagcctcaagaaatcgatggaatcaagaaggactttgaggagcccgggtttcttgccccaaccggactatttctcggtggcgaaaaatacatggttatccaaggtgaacaaggagctgtgatccgagggaagaagggacctggaggtgtcactatcaagaagacaaaccaagctttggtctttggcttctacgatgaaccaatgactggaggtcaatgcaacttggttgtcgaaaggctcggggattaccttatcgagtctgaactctaaaaccaaggtttcatttcaggttcttcttaactaaagagtgtcaatgcactttttattgtgattgattgtaatgctttcaaacacaaatcatttgttactttagaaccaattgtgattgattggtctccttcgttaccgagtttgagtttgtgtgttcttgtaatgacatttgatcatcttttttctccatatgtattgagttttgatttttgtttcttcatattattatttttcttgaaatgatctgctgtttatgatttggggttcaaaatatttttggtttggcaaaaaaaaaaaaaaaaaa

SEQ ID NO: 90952 - DNA, 597 bp, Arabidopsis thaliana columbia
ttcttaaccaagcaatcgagatggccaggatttcctcagacccgcttatggttgggagagtgatcggagacgttgtggacaattgtttgcaggcagtgaaaatgacggtgacctataattctgacaagcaagtctacaatggccatgaacttttcccttctgtagttacatacaaacctaaggttgaagttcatgggggtgacatgagatcattcttcactttggttatgactgatcctgatgttcctggacctagtgatccttatctgagagagcacttgcactggattgttaccgatatcccggggacgactgatgtatcatttggtaaagagataatcgggtacgagatgcctcggccaaacatagggatccaccgctttgtgtatttgttgttcaagcagacccgtagaggaagtgtggtgtctgtgccatcttacagagaccaattcaacactcgagagtttgctcatgagaacgatcttggcctccccgtcgcggctgttttcttcaactgccagcgtgagaccgccgctagacgccgttgaatgactttccaccgctgccgcagctgccctaactaactctggctgtgcc

SEQ ID NO: 90953 - DNA, 647 bp, Arabidopsis thaliana columbia
  unsure (1)..(647): unsure at all n locations
gactcactatagggaaagctggtacgcctgcaggtaccggtccggaattcccgggtcgacccacgcgtccgcaagtactatggatagagattttccagcaacagtgaagataggaactatgagaacattcaaaggagtgtcactttacaaaggcagaacagttttgcctaagaataaacagtatcctctggtttacttaggaaggaatgcaagtagtcctgatccaacctcgttctgtctagatggagctttggatcggcgccatgtagcgggaaagatcgtgatatgcgaccgcggtgttactccacgtgtgcaaaagggtcaggttgtgataagagctggtggaattgggatggttttaactaacactgcaacaaatggtgaagagcttgttgcagattctcatatgcttccagctgttgcagttggagagaaagatggtaaactaatcatacagtacgcgatgacgagataaagagcgacagcgagtttagagattcttggaacaagatttgntatcaaaccttcaccagttgtagcagcgttctcttcaagaggaccanattgtctgtctttggagaatcttgaaccagacttgttggctccaggagtgaatattcttgcagcttggactggagacatggcac

SEQ ID NO: 90954 - DNA, 621 bp, Arabidopsis thaliana columbia
  unsure (1)..(621): unsure at all n locations
agntttaacnanaacagttnggccctctgnttttnccccggcgtaancatttgatccggnanaancttttcccactttgcnccaaccctatggtagaaatggtggggccggataatgagctgacctcctctgcaaatgtgtaaacatgggagctaaatgtgacatgaccaagggtcgggttgataatcccgtttgcttcgacctattgtttatatgatcttagtagaggtttccattttgcatatattcatatactaggaaccggtgtttcccatctgcacaatagccgatcaaagagaccagatttgggtggtcgagtctgctcaagatatccacctccacacgaaattctctttctccgtcagcctttttaaacgtaggtaaatccatcttcttgattgcaacaaccttcaaataacaagggattaagatatgtatcctactctaatagctcctcttcgatagaaaagtttttgtaacattacaaagcctgtaaatcacataaatgaagctatatagttcctaccaaaaaaaagaaaaaaaaaaaagnnnnnnnnnnnnnnnnnnnnnnnnnnnnnnnnnnnnnnnnnnnnnnnnnnnnnnnnnnnnnncattcnnnnn

SEQ ID NO: 90955 - DNA, 1080 bp, Arabidopsis thaliana columbia
  unsure (1)..(1080): unsure at all n locations
agggaaagctcggtacngcctgcaggtaccccggtccggaattccacgggtcgacccacgcngtgcgtccttctccaactcctcctaaggaatcaccttatatctgtaacatgactgtcaaagaggatcttagaaggagaggaattgggtggcatttgttgaaggcgagtgaggaactgatatctcagattagtccatcaaaagatgtatacttgcattgtaggatggttgatgaggctcctttcaatatgtacaagaaggcaggatacgaggttgttaagacagatacagttttggtccttctgatgttacagcggcgtaagcatttgatgcggaagaaacttcttccactatgcaccaatcctatagtagaaatggtggggtctgataatgagctgacctcctctgcaaatgtgtaaacatgggagctaaatgtgacatgaccaagggtcgggttgataatcccgtttgcttcgacctattgtttatatgatcttagtagagcacccggttctgttcttttgggccctgagttaagtcaactgctctgcgtccagtaagtagttctagcagcacaaccccaaatgcataaatgtcgctttgtagagtaagtttacctgtctgccacagaagaggggaacaaaaattatgctaaaaattgtcctccgttgcctattggctctgatatgtttccattttgcatatattcatatactaggaaccggtgtttcccatctgcccaatagccgatcaaagagaccagatttgggtggtcgagtctgctcaagatatccacctccacacgaaattctctttctccgtcagcctttttaaacgtaggtaaatccatcttcttgattgcaacaaccttcaaataacaagggattaagatatgtatcctactctaatagctcctcttcgatagaaaagtttttgtaacattacaaagcctgtaaatcacataaatgaagctatatagttcctaccaaaaaaaaaaaaaaaaagggcggccgctctagaggatccaagcttacgtacgcgtgcatgcgacgtcatagatcttctantagtgcgtcctaa

SEQ ID NO: 90956 - DNA, 869 bp, Arabidopsis thaliana columbia
  unsure (1)..(869): unsure at all n locations
nnnnnnnnnnnnnnnnnnnnnnnnnnnnnnnnnnnnnnnnnnnnnnnnnnnnnnnnnnnnnnnnnnnnccacgcgtccgaccttcttccttcacagtgaatcaatggcgtcttcttctctatcaactctttgcagctcaacttcttcttctctacatcccaactccaaactctcacattctctttcagctaaattatcctccaaagcaaatgtttccgtccaatttctgggaaagaaacagtctccgcttctctcctcaactccgagatttctcactgttatcgccatggctccacctaaacccggaggcaaagctaaaaaagttgtgggagttatcaaacttgctttagaggcgggaaaagcaactccggcaccaccggttggtccggcgcttggttctaagggagttaacattatggctttttgcaaggattataatgcaagaactgctgataaagctggttatatcattcctgttgaaatcactgtcttcgatgataagagcttcacgtttattctcaagaccccccctgcttcgggtttggtgcttaaagctgcagggtgtggagaagggatcaaaagatccccaccaagataaagtgggggggataacaatagaccaactcccacaattgcagaagagagcctaccgacctgaccggacgccattgaaccgctatgagatcattgcaggaactgaactaacatggggatagacatggaccctccaatcttgacccaaaagaaacagtttattggaaaacccggggggaggttcattccctaaagcctattccgttaaaggggaatttccaccggaccctaaaaagagcgattaaggtgcccccggtggggttttttgtttaaaa

SEQ ID NO: 90957 - DNA, 674 bp, Arabidopsis thaliana columbia
  unsure (1)..(674): unsure at all n locations
nnnnnnnnnnnnnnnnnnnnnnnnnnnnnnnnnnnnnnnnnnnnnnnnnnnnnnnnnnnnnnnnnnnnnnnnnnnnnnnnnnnccacgcgtccggtgtgaaccatgctcctcagactattgtggcttgttgtgtgttgcataatctttgtcagattgctagagaacctgaaccggagatttggaaggatccagatgaagctggaacgcctgcaagagttttggagagtgagaggcagttttactattacggggagagtttgaggcaagcattggcagaagatttacaccagagactctcctcgaggtaaaagacatgaacagatcttggtcaaaaaatggagctttctatctttgttatcatgtaagaagcagatgctttcaagtgtttagaactttagatagcattgtagattcaatcctcttgagaagaaagtttgaggattcagaaatgttaaaaagctgactttgttgcctagccatcccaactgtcagttttgtaacttaggaatgggtttatggtttgttctgtaacaccttttgagaatgaaatgtatgacttctattgatatggattaaaaaaaaaaaaaaaaaaaaaaagnnnnnnnnnnnnnnnnnnnnnnnnnnnnnnnnnnnnnnnnnnnnnnnnnnnnnnnnnnnnnnnnnncgtcctaaa

SEQ ID NO: 90958 - DNA, 865 bp, Arabidopsis thaliana columbia
cgggatcgccgcaccggcccacgcacgcgtgctcacaacccttcggcaccggttaacaatggctcaagaatttagcggctcgtcgtcagcttctgttaacctgcacgctcaagcaacatcatttgcacgattatctgccacgcgcccgggaaaaactcacagtctaaacagtgattcacctgttcttccagtatcagctgagatggcaaagttgcttcctcaacgcaaagagagtgcaagaggatctgatttaatgttagaggcggttcttgaagcggaagtagcacacaaggcgaaaagctttttcgcacaagccgagaaagaaactccagctttgaaagggaagtttttcagtgacaggaaaggagaaaattgaactcaaaagttttggggaccatcatcgatcacaagacaccggcaaggtacaaaagagtaggccttgttatttaactgtttttttttttatgttcgatgagccaagaatctgagggacctttgtttctgatgcggcaacaagtgagctaaacttggagcgaagtcagttcactctttcatcttgtaattaatgcttccgctttataggtttaggttttgttgtttacttcggaggtttagtgtgagttggatttgcatagagttggttgggtttttttaaagagtagagatctattaaattttataaaattttgtgtatttttacaagtgtagttataaaaatccaatggacatccatggttttctcaaagttttcctttataaaagaaaattaaggttatgattaaaaaaaaaaaaaaagggcggccgctctagaggatccaagcttacgtacgcgtgcatgcgacgtcaagactcttctatagttgtc

SEQ ID NO: 90959 - DNA, 680 bp, Arabidopsis thaliana columbia
acgaaaaacatacacaagtaattaactaacaacaaatggcgaacaagctcttcctcgtctgcgcagctctcgccctgtgtttcatcctcaccaacgcttccgtctatcgcacggttgtcgagttcgacgaagatgacgccagtaaccccataggcccaatacagaaatgtcagaaggagtttcagcaagaacagcacctaagagcttgccagagatggatgcgcaagcaaatgtggcaaggacgtggtggtggtccttccctcgacgatgagttcgatatggaagacgacatcgagaacccgcagagacgacagctactccagaagtgctgcagcgagcttcgccaagaagagccagtttgcgtttgccccaccttgagacaagctgccaaggccgttagattccagggacagcaacaccaaccagagcaagtcaggaaaatttaccaggcagctaagtacttgcctaacatttgcaaaatccagcaagttggtgtttgccccttccagatcccttcaatcccttcttactactaaattccaaacaagtgtgagcgtgtggttgttgatatatgttaacaccacatctcgccttgtgtttttataaaaaaataagctttgggatgtttgaggctaatgtaataattagcatacaacgtaataaataagagaggtttgttt

SEQ ID NO: 90960 - DNA, 788 bp, Arabidopsis thaliana columbia
  unsure (1)..(788): unsure at all n locations
nnnnnnnnnnnnnnnnnnnnnnnnnnnnnnnnnnnnnnnnnnnnnnnnnnnnnnnnnnnnnnnnnnnnnnnnnnnnnnnnnnccacgcgtccgttttactatagaataataagggtaataaacaaagacacccaaagatgggtctcaaggtctcctcttctctcctctgtctcaccatcttactcgctgtttcatccattgtatcagcggttaacataacccgagtgctcgagaaataccctgaattcagcaccatgaccgagcttcttgccaagaccgagctcacaccaattatcaacaaacgtcagaccatcaccgtgctggcccttaacaacgatgctatcggttccatctctggtagacccgaggaagaggtcaagaacattcttatgaaccatgtggttcttgactactttgatgagcttaagctcaaggctctcaaggaaaagagcacattgctcactaccctttaccagtccaccggtttgggccaacagcaaaacggtttcctcaactgcaccaaatctaacggaaagatttactttggttctggtgtgaaaggcgctcctcaaaccgctgaatacatcacaaccgttttccgtaacccgtacaatctctctgtggtccagatcagcatgcccattgtggcacctggactcgggtctccggttaaggttcctccaccaccacccatgtcttcaccaccggccccatctcccaagaagggtgcagccactccagctccagctcctgctgatgaaggggattatgcagatgctcctcctggt

SEQ ID NO: 90961 - DNA, 951 bp, Arabidopsis thaliana columbia
  unsure (1)..(951): unsure at all n locations
acgactcactatagggaaagctggcacgcctgcaggtaccggtccggaattcccgggtcgacccacgcgtgcgtgagcttaagctcaaggctctcaaggaaaagagcacattgctcactaccctttaccagtccaccggtttgggccaacagcaaaacggtttcctcaactgcaccaaatctaacggaaagatttactttggttctggtgtgaaaggcgctcctcaaaccgctgaatacatcacaaccgttttccgtaacccgtacaatctctctgtggtccagatcagcatgcccattgtggcacctggactcgggtctccggttaaggttcctccaccaccacccatgtcttcaccaccggccccatctcccaagaagggtgcagccactccagctccagctcctgctgatgaaggggattatgcagatgctcctcctggtttagctccagaaaccgcacctgcatctgcaccatcagaaagtgattctccagctccagctccagataagtctggcaagaagaagatggcagcagctgatgaggctgaaccaccttcttctgcttctaacaccggtttgagcttcggtgctgtccttgttctcgggtttgtggctagctttgttgggttctaagatgatttaagacagcgagtcgaggataaattaaactgataatgagactcgaacatagtcagaggcaatggtgatacgaagtggatcaaagacactaacaatttctactcacattattgtacctcaatcatttatcattagacaatgaaagtgtgatgttctgtcctgtgaagcttgtattaccacattgtaactaaatgttttatcttcattcatccaatccgtaaaaaaaaaaaaaaaagnnnnnnnnnnnnnnnnnnnnnnnnnnnnnnnnnnnnnnnnnnnnnnnnnnnnnnnnnnnnnnnnnnnnnnnnnn

SEQ ID NO: 90962 - DNA, 496 bp, Arabidopsis thaliana columbia
  unsure (1)..(496): unsure at all n locations
ggggcttactcgagagcaggtccgttgtttgataggcaaggggatagtgtggttggtattcctcatcctttgcgggccttggcagctgcaanaagaggaagaagcagacttatggtgtcccagatgcagaatgtcttggatgtcaatgcgtagggatgctaattaaataacaacttgcggcttgagggcgttatgcttctaaatcactcagtactattttgattggggctactggtcatgacccggtataggggacatgcgaccttgatgtggacaaacatgtcatattgagggatttttttggccctagaagagccggatttggaggatgttctttaaccccgtgtaaaccgnggggaaccccttttcaaaacccggtttaaaggcaaccggaaatttccaaaaggnaccacaaaatttttccccaangnttcaaagggcccatccttttttttttaaaggggggtttnncccngnggggnanganntgggnncc

SEQ ID NO: 90963 - DNA, 795 bp, Arabidopsis thaliana columbia
  unsure (1)..(795): unsure at all n locations
nnnnnnnnnnnnnnnnnnnnnnnnnnnnnnnnnnnnnnnnnnnnnnnnnnnnnnnnnnnnnnnnnnnnnnnnnnnnnnnnnnnccacgcgtccgcaccaccatcttctaatctagcgtggacttcttaccagaatgcaccacattatcaaagaagaaggactgaaaggtctgaacttgcacgtaggtccttgctttcttcccttgcagcagatgctacaaaccagagatctggtgatcatccaacacttcgttcgttggcccctcctgcctcttcggatgggcttgtgcttcagcctggtggtgataatagtcagatgcataatcgggcttactcgagagcaggtccgttgtttgataggcaaggggatagtgtggttggtattcctcatcctttgcgggccttggcagctgcaagcagaggaagaagcagacttatggtgtcccagatgcagaatgtcttggatgtcatgcgtagggatgctaataataacaacttgcggcttgaggacgttatgcttctaaatcactcagtactatttgatggggctactggtcatgaccggtatagagacatgcgacttgatgtggacaacatgtcatatgaggaattgttggcactagaagagcggattggagatgtttgtaccggtgtaaacgaggaaaccatatcaaaccggttaaagcaacgaaaatacaaaagcaacacaaaatctccacaagatgcagagccatgctgtgtttgtcaggaggaatacaccgaaggagaagacatggggacactagaatgtgggcat

SEQ ID NO: 90964 - DNA, 488 bp, Arabidopsis thaliana columbia
gtgcgtctggctcaggtgacaatgcaaggaggatcatcgggtattggatacggtttgaagtatcagtctagatgtatatcggatgtgaaagccgatacggattacacaagctttctcactggaactcttagtttagaagaagaaaatgaggttcatcttcttcgtttgtcatctggtggatctgagcttatatgtgagggtttgttctctcatcctaatgagatttgggaccttgcttcttgcccttttgatcaacgcattttctccaccgtcttctccactggtgaatcgtttggagcagcgatatggcaaattcctgagttatatggtcaactgaattctccacaattggagcgagtcgcttctcttgatgctcatgttggcaagattaattgagttctttggtggccttctggaagatgtgacaagttaatcagcattgatgaacaacatattctcttgtggagcttagactgttcgaaaaagtc

SEQ ID NO: 90965 - DNA, 731 bp, Arabidopsis thaliana columbia
acgcgtccgatttgaaagtgaatgagctagttacatggggttatatatattaataggatgcttggacaaccgtcacttattcgagaatcttcaatacgtagatttccatggacatgctcagtgtctcaatttaagatcaggatctcatggaacaagttttctcagtgaaactcttagtttaaaagaagaaaatgaggtgaacccatctcttgattttgatttgtcttctatttaatcatcaagatactaaaagtgtttttttttaatctctccaacatttgagatgctattaaggttcatattctcttcgtttgtcatctggtggatctgacctgatatgtgagggtttgttctctcatcctaatgagatttgggaccttgcttcttgcccttttgatcaacgcattttctccaccgtcttctccactggtaaattcgcttgtcttgagttgactagcaagaatttggagctctggtctttgtattgatttatagcgtgagtgtgtcaaaaactgataatggttttatccgttaaggtgaatcgtttggagcagcgatatggcaaattcctgagttatatggtcaactgaattctccacaattggagcgtgttgcttctcttgatgctcatgttggtaagattaattggtgagtttatgatcaaacgttttcagcgttctattgctaacagttatgtaaaagtgtttaagagcttatttttttcttatcct

SEQ ID NO: 90966 - DNA, 633 bp, Arabidopsis thaliana columbia
  unsure (1)..(633): unsure at all n locations
taatacgactcatatagggaaagctggtacgcctgcaggtaccggtccggaattcccgtgtcgacccacgcgtccgagcaagtggaagtagaagaagaagaagcgaaggggatatctggtggattcggtggtgagttcatgacggtggttcaggagatgataaggacggaggtgaggagttacatggcggatttacagcgaggaaacgtcggtggtagtagttctggcggcggaggtggcggttcgtgtatgccacaaagtgtaaacagccgtcgtgttgggtttagagagtttatagtgaaccaaatcggaattgggaagatggagtagagtgataagaacaagttttccctctgtttctcgggaaaataaaagtttcaggcttttcatgtatagagccagtagtagagacgacgaaaggaggaagcgaaatcaaaaaatgttttgttatcatcatcatatgatcttctttcgtgattcaattaaaagcaaagcaagatcatttattaccattaaaaaaaaaaaaaaagggcggccgctctagaggatccaagcttacgtacgcgtgcaggcgacgtcataactcttctatagnnnnnnnnnnnnnnnnnnnnnnnnnnnnnnnnnnnnnnn

SEQ ID NO: 90967 - DNA, 517 bp, Arabidopsis thaliana columbia
  unsure (1)..(517): unsure at all n locations
nnnnnnnnnnnnnnnnnnnnnnnnnnnnnnnnnnnnnnnnnnnnnnnnnnnnnnnnnnnnnnnnnnnnnnnnnnnnnnnnnnnnccacgcgtccgctcttccagatcttcaagtgtatctagatcgagctctccttcttccttatcggattccatatctgtaagaggctcttggttttcttcttcggtctgatccctagactcttcttcggtaggaatggtttctgtctcagttggactttcttccactggttcatcagcttcattgtcttgttgtgcttccacatattcctctgttttctcctctgcattctcggcttctgtttcttcattgtcaccatcagttgtagttgtagcatccatcaattcgtctatggctggctcttttgcaaggttttcaccttcggaagtatcaggatgagactcagatccttttgccttcttcgatgcaggaggtgcaatctcagaactggtttccccttgagtcagactatcttgttgtggctcagaaaccaacg

SEQ ID NO: 90968 - DNA, 674 bp, Arabidopsis thaliana columbia
  unsure (1)..(674): unsure at all n locations
ctactatagggaaagctggtacgcctgcaggtaccggtccggaattcccgtgtnacccacgcgtccgggcactccagaaccgcctaaagggaaagggaaggcatctttaaaaggaaggacggatgaagctatgcccaaaaagaaacagaagatagattcttcatcaaagagcaaggccaaagaggtggagaagaaggcctcaaagcccgaaactgagaaaaatggcaaaatgggtgatattggtgggaagattgtagcagcggcatcacgcatgagtgaaaggtttcggagcaaggggaatgtggatcaaaaagagacatcaaaggcctcgaaaaaaccaaagatgtcttcaaagttgaccaagaggaaacacactgatgaccaagatgaagatgaagaagctggtgatgatattgatacttctagcgaagaggcgaagcctaaggtgttaaaatccntgcactccaatgctgatgaagttgctgaaaattcttctgatgaagatgagcccaaggttctaaaaaccaacaactctaaggctgataaagatgaagatgaagaggagaatgaaacatctgatgatgaggctgagcccaaggccctgaaattgagcaactccaactcttgatatgggtgaaacaattcatctgatgatgagaaagagataacantat

SEQ ID NO: 90969 - DNA, 509 bp, Arabidopsis thaliana columbia
  unsure (1)..(509): unsure at all n locations
cggacacgtccggtttctccttttacgcttcttcacacgcagctaacgaagagatttgtggaatcatcgcgtattcgtttcaggagtcattcatttttggtgtctctgcttcacaggggacttgacgatctctcctactgaaaggagcttgctttcttcactgtgacggttgacattggttgaaagatgggttatatgtgtgatttctgtggtgaacacagatcaatggtgtattgtcgatctgatgcagcgtgtttgtgtctttcgtgtgaccgtaatgttcattctgctaatgctctatcgaaacgtcattcgcggactttggtatgtgagaggtgtaatgcacagccagcttctgtccggtgtagtgatgagagggtttctctatgtcaaaactgtgattggtcacgccatgcccgcccgcccccccccactactttanattattaaaggcaaaccattaacccccccccccccccgcccctccagtgccgaattattctcgatat

SEQ ID NO: 90970 - DNA, 841 bp, Arabidopsis thaliana columbia
ggatttcatcagcattcagcagccagacgaaacttttaacgatctaccatcgaaccaggtgtctgagatcttccgatcatcgtctgggattacgattctttccttctcgtttttagattagctcagaaatttttctaaccttttcttctctgtcgatctaacacctgacctcgattttcgttaccgataccaccattttcgaggatacttcttcattaccatggcaacaagaaatgctttgagaattgtgtctcgtaggttctctagtggcaaagttcttagcgaagaggagagagccgctgagaatgttttcattaagaaaatggagcaggagaagcttcagaagttagctcgacagggtcctggagaacaagcagcagggtcagcaagcgaagcaaaggttgctggtgcaacagcatctgcatcagctgagtcgggcccaaaggtgtcagaagacaagaacagaaactatgcggttgtggcaggtgtggttgctattgtcggttcgattggttggtacttgaaagcaggtggaaagaagcagccagaggtccaagagtaaagagatagattgattgatggacttgtgatgagtgaataaaacagggagtagcattactcattcctcccttgtgagacactttggaatcaaatcttacgttgctgctactctctttgagtcttttcttttgtttttgttacttgacacagttttttttggtttccggtttgttgacatttagtttctcaatctaaacttcagaaacttattttggttaaaaaaaaaaaaaaaaggcggccggcttaaaagaatccaggctaaggaaggcgggcatgcgac

SEQ ID NO: 90971 - DNA, 736 bp, Arabidopsis thaliana columbia
  unsure (1)..(736): unsure at all n locations
nnnnnnnnnnnnnnnnnnnnnnnnnnnnnnnnnnnnnnnnnngtcccggttccggattcccgggtcgacccacgcgtccgatttcttctgtaagcggatttcatcagcattcagcagccagacgaaacttttaacgatctaccatcgaaccaggatacttcttcattaccatggcaacaagaaatgctttgagaattgtgtctcgtaggttctctagtggcaaagttcttagcgaagaggagagagccgctgagaatgttttcattaagaaaatggagcaggagaagcttcagaagttagctcgacagggtcctggagaacaagcagcagggtcagcaagcgaagcaaaggttgctggtgcaacagcatctgcatcagctgagtcgggcccaaaggtgtcagaagacaagaacagaaactatgcggttgtggcaggtgtggttgctattgtcggttcgattggttggtacttgaaagcaggtggaaagaagcagccagaggtccaaggagtaagagatagattgattgatggacttgtgatgagtgaataaaacagggagtagcattactcattcctcccttgtgagacactttggaatcaaatcttacgttgctgctactctctttgagtctttccttttgttttggttacttcacagttttttttgttccggtttttcattnggttccaaccaaacnccnnncttttccgcccctttnnccaagttggggntct

SEQ ID NO: 90972 - DNA, 686 bp, Arabidopsis thaliana columbia
  unsure (1)..(686): unsure at all n locations
nnnnnnnnnnnnnnnnnnnnnnnnnnnnnnnnnnnnnnnnnnnnnnnnnnnnnnnnnnnnnnnnnnnnnnnnnnnnnnnnnnnccacgcgtccgctggaactgttactcttgaagaggtaaacactgttggcgccaaggtgctagaatttatttctgatttcggaagacccactgcccctcttcccgcagcaatagttgcttgtgttcccactaaggtgcatgttgatggggttggtgagagtgatttcaatatatctcctgatgaaataatagagtctgtcaaatcaggattattagcacccattgaagctgagcctgagctcgaggtgccaaaagaattgatctctcaatcacaattgaaagagttaaccttgcagagaaatccatgttttgtccctattcctgggtcaggtttaaccaaattgcatgacaaagagactgggatcactcagcttcggttatccaatgggatagctgtaaattacaagaaatctacgaccgaatcccgggcaggtgtcatgcggctcattgttggtggtggacgagctgctgaaacatctgattccanaggagctgtggttgttggtgttcgtacactcagcgagggtggtcgagttggagactnttcaagggagcaggtggagctgttctgtgtaaatcatttgataaactgttcgttggagtc

SEQ ID NO: 90973 - DNA, 831 bp, Arabidopsis thaliana columbia
ccaagattatactcaagcagaggcctgacgtggttgcctttggtggtatgtccctcttcttgtatggtatgggcgtcgctgtctattccttcgaaggcgttggtatggtcttgcctcgtgaatcggggatgaaggacaaggacaagtttggcaaagtcttggctctcggtatgggattcatctctctcatatacatcgcatttggtatcttatgttacttggcttttggtgaggacaccatggacattatcactgctaacttgggggcatgacttgtcaacactgttgtccagcttggactgtgcatcaacctcttcttcaccttccccttgatgatgaatccagtgtttgagatagtggagaggcgtttctcacgcgggatgtactctgcgtggctcagatgggtactcgtcttagcagtgactctggtgcccctttttgtgccaaacttgcagattttttgtcattggttggcagcagcacttgctgtgtgttaggctttgtgttacctgcattgtttcatttattggtgttcaaggaagagatggggtggctgcaatggagttcagacacagcgattgtggtactaggtgtggttcttgctgtgtcgggaacttggagttccctgagtgagatcttctctgtcaaagtgtgagcgtccgtgaagtcagagattggagaggtttttctctccttgtgtgcaattatgtatatggaattggttgtggttttaagagtaactgtgattgtatttgtattttgatggtttggaataaaagagaccagctctgtcttctgttttgtgtttacaagaacaaaaaaaaaaagaaa

SEQ ID NO: 90974 - DNA, 957 bp, Arabidopsis thaliana columbia
aaccgcccacgcgtccgaaattgtccaatttccatcttacggccaacaaaaaaaagagtaaaataacaatttaattttgtatcgattgcgtcgtcgttagttttcccatttcctcataattctccatctctttcctttctcatctctcgattcctttctttctttccatattccattgatttctctcttcttataaaaatacagattctctcttcttagaaccatcaccgattcgaacagatctaataaatcgtttttttcaccagatttttttcgccggagtttgttttgatccattctgttatggcggaagaacacagacttcaagaaccacgattatgtgctaacaattgtggcttcttcggaagcacagctacacaaaatctctgttccaaatgttttcgagatcttcaacatcaagaacaaaactcttccaccgccaaacatgctcttacccaatccttagccgccgttggcgctgctgcgtcttcctccgtgtcgccaccgcctccgcctccagctgattcgaaagaaatcgttgaagcgaaatcagagaaacgagcggcggctgaaccggaggagggcggatggtccgccgcaagatccgaagcggtgtttgacttgtcggcggcgcgtgggaatcacggggtttcgggtgtaaggtgtggctttcgttttctgcgggacccattagggtacgcggagcaccatgaatgttccgtttgatttcaagcggtttggggaaggataagatccctaaagcgaatccgattgtgaaagctgataagcttgagaagatttgactttgttgtttgttgtttgttgttgttgctttggttttgtgcgtttgaatgaaacacacatgaagaagaaagagcaagaaacaaacatgtcaatgtaaatttaagctttatttgatgatttcttcagtttggtaaataaatttgcttattattg

SEQ ID NO: 90975 - DNA, 932 bp, Arabidopsis thaliana columbia
  unsure (1)..(932): unsure at all n locations
nnnnnnnnnnnnnnnnnnnnnnnnnnnnnnnnnnnnnnnnnnnnnnnnnnnnnnnnnnnnnnnnnnnnnnnnnnnnnnnnnnnccacgcgtccgcccacgcgtccgttcgaattttccatctttcgattctcagtagtttcgtctcaatttcataattccattgtagccgataatgaattccgctttagattttgcttttccggctacatttccggttaaatcgagttctgttggcggacatcggattgcttcccctggattcagttcccgcttaagattgtgctctcttcctccttcttcatctatcaaggctgagtcatgtttaaaaagagacgtgcacaggcaaagaagcagtcttgagtcaatgttctgttatgataaaccaataccagaggaaataatcgaggagccagttggattatccatgtcagagagagagattggtgataatcagcgttgcacttgttgtgaagctaaaggtgcattgctttgttccacttgttctggaactggtctatatgtagattccattatggagagtcaaggcatcattgttaaagtccgttgcttaggttgtggtggaagtggtaatattatgtgcaaactttgtggtgggcgtggtcacgtaggacactgatgactccgtgtttcacttgtttgcactcatggttctgttttacctattcgccactttttctagctctgatcttattgtaaaagcctacttttttgagttccatacatagatttgtgttcttgtactgatgtaatctctagctaaactatgcacaatcttgtcccagactactcattttctgttgttatataaaatggtttcctaaaaaaaaaaaaaaaaagnnnnnnnnnnnnnnnnnnnnnnnnnnnnnnnnnnnnnnnnnnnnnnnnnnnnnnnnnnnnnnnnnngacctaa

SEQ ID NO: 90976 - DNA, 662 bp, Arabidopsis thaliana columbia
  unsure (1)..(662): unsure at all n locations
nnnnnnnnnnnnnnnnnnnnnnnnnnnnnnnnnnnnnnnnnnnnnnnnnnnnnnnnnnnnnnnnnnnnnnnnnnnnnnnnnnnccacgcgtccgagcagaccctgttgtagagaaggattgtctgtcgatagatgataaaaaaaatctttccactgcagccatttccaattcagatgttgccagtgtcatcagcttaaagagaaagcattcagattgcagtggggatgatggcaactcagaaactaaacctgagatttacgaatctctcaatgaactaaaactggaggaagaggaagaattaactaccgttcaccacgagagcagatccccttcaaacaatacaactgttgatatattcagcattgtcaaaggaactggccgtagaaaaaatctcatgcgttcaaatcctactgataagtcttcagaagcagagaatgctgctggtttgagggtaaagaagatcaagaggacaccggaggacgagaaagagtcaatggttctggttgagaaactaaggaaaganataagagaagccgttcgtaacaaatcgatggaggacatcagagaaaaccaattcgatccaaaacttttggctgcctttagagctgctgtggcaggacctaaaactggtgaagcacctagaagaagttctgctctggct

SEQ ID NO: 90977 - DNA, 507 bp, Arabidopsis thaliana columbia
gccgagcactatacgactcatatagggaaagctggtacgcctgcaggtaccggtccggaattcccgtgtcgacccacgcgtccgggtagtctctctctctccatttgataggaagaagaagaaagatacaaaaagataaaagaaagagagaaaaagagttttaattaaaatgcaatgttatacaaatgaagaagcactagcaagtctcttcatcaatgtctcaacatctttctttcttctcctcatcctcctctactccgccgtctccctcctaatcaagcttctccacttcatcggcggctaccctctcctccaaaggaatgaagatgaatatgattccgcggcatggtattccgaagaagaggaggaagaggaagaagaaggggaagaactcaagatgtcgtgtaactcaagttaccatgtgatatctagagatccaaatccggatttgatagctgatatagcagacgacggagaatctttagtgttttacaataatatttctca

SEQ ID NO: 90978 - DNA, 506 bp, Arabidopsis thaliana columbia
  unsure (1)..(506): unsure at all n locations
aatggtggatcgtttaaaagatcggaccggtcgggaatattttttacctcatcccctaatcgaccagcaagagattaaccaaacccctagtagtagtattcctcccaccagccggcaagggaaaaactggcgtgccttctcctagaccggccactcgtagggacaagcttctcaagggatgttatgtgttagtaatgttttcgaaataacccaaagttaagagagacatagagagtttattaggatctgggatgatgataataagacacatgtctgtaagatatataaaactagctagggctatgatagctgttgttatggtttgagaagcaatgtaatatacctgcggagttatttcatggattagtaagtgtttgagataaattaattaagtatatctatcccaaaaaaaaaaaaaaaaaaaagtaaaannaagnnnnnnnnnnnnnnnnnnnnnnnnnnnnnnnnnnnnnnnnnnnnnnnnnnnnnnnnnnnnnnnnnnngtc

SEQ ID NO: 90979 - DNA, 820 bp, Arabidopsis thaliana columbia
  unsure (1)..(820): unsure at all n locations
ctccccctctggcgctcgggggggagtatcgccagcacctnnnnnnnnnnnnnnnnnnnnnnnnnnnnnnnnnnnnnnnnnnnnnnnnnnnnnnnnnnnnnnnnccacgcgtccgcggacgcgtggggtttatctctctctctctctcattctcttccaactcttcctctccttcatattctccgtctgtcttctgctaatttaaggaaacaaaaatggtggatcttgaaagaagagtgtgttgcatgtgtggtgatgtgggattcttcgacaagctctttcactgcagcaagtgccttaatcgctttcaacactcgtactgtagtagctattacaaagagcaagctgatccaatcaagatctgtgattggtgtcagtgtgaagcaaaaagtcgaaccggagcaaaacacggtgttaatggtggatcgtctaagagatcgtaccggtcggaatattcttcacctcatcaccaaatcaaacagcaagagattaaccaaaccactagtagtagtattcctccagcagccgacaagggaaaaactggcgtgccttctcctagaccggccactcgtaggtacaagcttctcaaggatgttatgtgttagtaatgttttcgaaataaccaaaagttaagagagacatagagagtttattaggatctgggatgatgataatangacacatggcctgtaaggtttnttaaaccgngcctangggctatgataanctggttgtaatgggtttgaaaanncattgtaattancccccggngggggttttttccccgggggtntaanaaaagngttttgggggnaatttt

SEQ ID NO: 90980 - DNA, 751 bp, Arabidopsis thaliana columbia
  unsure (1)..(751): unsure at all n locations
nnnnnnnnnnnnnnnnnnnnnnnnnnnnnnnnnnnnnnnnnnnnnnnnnnnnnnnnnnnnnnnnnnnnnnnnnnnnnnnnnnnccacgcgtccgcggacgcgtgggtcttgacgtctcgctgatctgttttgctaagattcaagcttcaaaaccctaatttctctagccattagcatcgatttcagctcaacttcagattcaaggaaacaattattagcttctcaagtgcttcagtgatccgatacaatgtcagctttgttcaatttccattcgtttctgacggtggtgctgcttgtgatctgcacatgcacatatctgaagatgcagttccctgccattttagagcagaaaactgggtttcgaggatttttctggaaggctgctagaataggtgagcgtttgagcccttgggtctccgctggatgcttcatgatgggtgtgtcgatcattttcttttgagtgtcaacttcttacatatccagttcttgtagatttttacttctttgggatgctcatttttctgtatgcaaaagattccaaggggttgttgatgaaactgaaagagtagaatattatcctctttggattatggatatggtcttgtatttggaacaaattgtgtctgttattttaatgtggagacaagtccataaaaaaaaaaaaaaagnnnnnnnnnnnnnnnnnnnnnnnnnnnnnnnnnnnnnnnnnnnnnnnnnnnnnnnnnnnnnnnnnnnnnnnnnnnnnagattc

SEQ ID NO: 90981 - DNA, 800 bp, Arabidopsis thaliana columbia
  unsure (1)..(800): unsure at all n locations
aagaaatcaagggaatatgaccatgttagtagaagaagcctctagtgtggataacaagggaccacattttacaccggtaaagaaatcttcggaagaaacagaagagaaggctaactcagggggaccagatataatcaaacatactatctctgagaaaagcagggaagatagtaaagtatcccgcgcggccggtttgaggtctggctcaagggttgcaccttgtagtgacgatggtgattctgtaaagaattgtaaagatgatgttgaagagagcaagaaagatagtgaggaactgtctttgatacgggaacagcttgctctgattgagaaccaacagtctagtctcttagacttactacagaaattcatgggaacctcacagagtggaattcagtctctggagtctcgtgtaagcggtctagagatggcgttggatgaaatatcgtgcgatctggcggtttcaaacgggagagttcctaggaatagtagtggctgcgcaggagacagttgttccaaactacctggtacagagttcttaagtcccaagttctggagaaaaaccgaggagagaccacggaacagaaacacagctaatgaaatggctgcgtacgaccaggggatgcgagaatcaacagatacgaacaacggtcaaagaggaggttcagtttttcaaaagagatcacgaagagaccagttccaagactgtatgcatacaacactacagaaaccaaccaccagattatctacttgaagcanaagtgaaaagagtgcactntttgagaagaaagtgatgtgataat

SEQ ID NO: 90982 - DNA, 653 bp, Arabidopsis thaliana columbia
  unsure (1)..(653): unsure at all n locations
nnnnnnnnnnnnnnnnnnnnnnnnnnnnnngggacgaccccgcggncggacagagagagagagagagagagagagagaaagaaagatccaacttccacaaagaaccatggaagctgagaaagaaacagaacaagaaggaaacttgacagtaatgaaacttccggtgttaccaactaaacccaacactcacagccactctatgtcatcaccaattcacagttccatatcagcttcagttccctttagctgggaagaagagcctggcaagcccaagcaacactctacttcttcttcctcctcttcctcttcctcaccattaacttcttattcttcatctccttttgaaactcacaagtccttagagctaccaccaaggcttcacttacttgaaaaagatggaggatcagtaaccaaacttcactcgcctataacagtctttgatggaccttatagcatgacgacatcaaaaaggatggattcaccttcctttaggatgatggtgaaaggtagtgctgattgttatgggtctttcagggggtgatttcgtgggtgatttagggggtttggaagtgggctctaagcagcaggagaacttgagtagtggctctttggctgttgtgaagaagagagggagattagggttttttgggttt

SEQ ID NO: 90983 - DNA, 1225 bp, Arabidopsis thaliana columbia
  unsure (1)..(1225): unsure at all n locations
gaatggaaggaccgagccgacgccacgcgtacgcggacgcgtgggcggacgcggggattaaataatttgaacagngtaagcccccactgtatgccttcttgccaactaaaactacattgcgtgacttcttctgtaaccatttttctattccgatcaaaccatggcgtatttagctccgatttcttcatccttatccatattcaagaatccccaactctcaagattccaattttcttcttcctcaccgaacccacttttccttcgacctaggattcagattctgagtatgaccatgaacaagtcgccgtctttagtggtggttgcggctactactgcggcagagaagcagaagaagaggtatcctggagaatcaaagggttttgtggaggagatgaggtttgtggctatgagacttcatactaaagatcaagctaaggaaggtgagaaagagactaaatctattgaggaacgtcctgttgctaaatgggaacctactgttgaaggttacttgaggtttcttgtggatagtaaattggtttatgatactcttgaactgattattcaagactccaatttcccaacttatgccgagttcaagaacacggggctggaaagagcggagaaattatccacggatttggagtggttcaaggaacaaggttacgagattccagaaccaacagctcctggtaaaacatattctcaatatttaaaggaattagcagagaaggatcctcaagcattcatttgtcacttctacaacatctactttgctcatagtgctggtggacgaatgattggcagaaaggtggcagagcggatactcgataataaagaactcgagttctacaaatgggacggcgaactttctcaattgttgcagaacgttagggagaaactgaacaaggttgcagaggagtggactagagaagaaaagaatcattgtttggaagagactgagaaatcgttcaagtattctggtgagatacttcgtctcatattgtcctgatttggtgcgcagtgtctctagatatctcaatacgtcttgtggcaactaaaatgatgcacactggttatattcctgtattatattaatcatcttccacatgtattaaactcttcttttgcttcaaagctgttactaaagttcaaggttcaaatttaataataaataaattatttttattccttttatatttattatttattttttttatataaaatt

SEQ ID NO: 90984 - DNA, 933 bp, Arabidopsis thaliana columbia
  unsure (1)..(933): unsure at all n locations
nnnnnnnnnnnnnnnnnnnnnnnnnnnnnnnnnnnnnnnnnnnnnnnnnnnnnnnnnaaactctgagacagagcaagaaaaagataaagtgagtgaaaagaatggcaacggtcacgattctctcacccaaatcgattccaaaggtcactgattccaaattcggagctagggtttctgatcagatcgtcaatgtcgtaaaatgcggcaaatccggccggagattgaagttagcgaagctggtctcagcggctggattgtcacagatcgaaccagacatcaacgaagacccgattggtcaattcgagactaatagcattgaaatggaagatttcaagtatggatattacgatggagctcatacttactatgaaggagaagttcaaaagggaacattttggggagcaattgctgatgacattgctgctgtggatcaaactaatgggtttcaaggtttgatctcttgtatgtttcttcctgctatagctcttgggatgtattttgatgctccgggtgagtacttgttcataggtgcagcgttattcacggtagtgttctgtataatagagatggataaacctgaccagccacacaacttcgagcctcagatatacaaattggagagaggagctcgtgacaagctcattaatgactacaacacaatgagcatttgggactttaatgacaagtatggtgatgtatgggatttcaccattgagaaagatgatatcgccacacgataagataatggattgtgatctcgttataatcatgacttttgatgtaaactgttttataaaattgatgaatgaacggggtacaatgtgtataatatggattgttcattctcttatttaaaagtagtaccatnnnnnnnnnnnnnnnnnnnnnnnnnnnnnnnnnnnnnnnnnnnnnnnnnnnnnnnnnnngtaccta

SEQ ID NO: 90985 - DNA, 527 bp, Arabidopsis thaliana columbia
  unsure (1)..(527): unsure at all n locations
nnnnnnnnnnnnnnnnnnnnnnnnnnnnnnnnnnnnnnnnnnnnnnnnnnnnnnnnnnnnnnnnnnnnnnnnnnnnnnnnnnnccacgcgtccgcagagatcttagccaatagacttttgagctactcgaggcatttccatggcggcgacgatagctgtttttaccggtggtctgaaagtgaaggctggagttctcgccgttcaaatctcatcgcttcctctccgccgcgaattccctcgttacttgtcgtcttcctcgaggaggacagtagcggcaatctcctcgtctcttcgagtctccgccgtatataaccatcagcagcgtaatcgaagctcttggcctcgagttgctactttctgtacggcggctccagatgccggcacgacggtttcagcggatgaatcggagaagaagagcgaatctcagaaggaagaggagaatgtgaaggagacggcgaatctgttagatataaaagtaggacgaattgtgaaagcttggcaacacgaagaagctgattctctgtatg

SEQ ID NO: 90986 - DNA, 535 bp, Arabidopsis thaliana columbia
  unsure (1)..(535): unsure at all n locations
nnnnnnnnnnnnnnnnnnnnnnnnnnnnnnnnnnnnnnnnnnnnnnnnnnnnnnnnnnnnnnnnnnnnnnnnnnnnnnnnnnnccacgcgtccgcttcattttctcaggctccaatgtcgctggacttagctcgttgatcatcgtacaaaaagcttgctcgtagctatcagctccccggagaagaagatggtgcggaaacagtttcaacaggctaaaactggaatagaggcattgaagtcaatggatgctaacaactacttgaagaaggttggattagggcgtgacgatatgttcttttggaaacaagtgggaaaagcattgctatgcacttacacaatctttggtatggcttggatttacaatgaaacgtctcctttaggttggtggacgctgaagccaagaccaaaggaagagagagaattggctcatttgtatgagcggcgtgagtttccttatcctggtgatacagaggctatggaggattttgttgcaaaggggggaatgattggtactgcaattggaccgaaaggaatt

SEQ ID NO: 90987 - DNA, 768 bp, Arabidopsis thaliana columbia
  unsure (1)..(768): unsure at all n locations
taggtacacactatagaagactatgacgtcgcctgcacgcgtacgtaagctcggaattcggctcgagggaacgtacaaggcgagatagtccactgccgatgggctatgctaggagccgccgggatattcatcccagagttcctaacgaagatcggaatcctcaacactccgtcatggtacacggcgggagagcaagagtatttcacggacaaaaccacactctttgtcgtttagctcagtgtgatcggatgggcagaaggacgtanatgggccgatatcatcaagcccgggagcgtcaacactgacccagtcttcccaaacaacaaaacttgacggggcacaggacgtttggttacccaggtgggttatggttcgacccgtggggttggggaatccggtaccccggctaagctcagggagttgaggaccaaggagatcaagaacggaagggggcctatgttggcagggatgggtgcttggttccaacacatctacactggcactggtcctattgataacctttttgcacatcttgctgatcctggtcacgccacaatcttcgctgctttcacacccaagtgagacaacgaaaaagggttatggggaggtgaatgcgtttgtgtgtgatcatgtttgtacaaatatcattttgaacttaaaattattatgtactttatataaattgtggtcgaatgcaaattaaggttncccgcggccgcgtaattacgatatncaagcttnatgcgatgaccgtacgnaccttcgtag

SEQ ID NO: 90988 - DNA, 540 bp, Arabidopsis thaliana columbia
  unsure (1)..(540): unsure at all n locations
tnaaggtcaacaacgtcgagaataatggcatcatctctttgtgcttctnctgccatcgctgccatttnttctccaagtttcttgggtggtaagaaactnaggctgaagaagaagttgactgttccagctgtgtccaggccagatgcgtcggtgcgcgccgtcgcagctgatccanatagaccaatctggttcccgggaagcactcctccagagtggctagacggtagcctccctggtgactttcggatttaatcctcttggtctttcatcggacccggacagtctaaaatgggaccgtacaagccgagatagtccactgccgatgggctatgctaggcagccgccggggatattcaatcccagagttcctaacggaagatcggaatcctcaacaattccgtcaatgggtacaccggcgggagagagcaaggagtatttcaacgggccaaaaccacatttttttggtgggtcattggctcggttggcaatcgccgtagtggccgtgttataagnccgngggtaaaatncccntttccaaaa

SEQ ID NO: 90989 - DNA, 1256 bp, Arabidopsis thaliana columbia
  unsure (1)..(1256): unsure at all n locations
gaagttgccacgtgccaatgagttgaccaatgaggaaactcagtgcgttatccgtagggataatcagataagcagaatctgattttgtcaccagagtgcttttatagattacacagactcactatatggaacacacgttcgtttctttcttcttctaacacactctgagtcttgaaggtcaacaacgtcgagaataatggcatcatctctttgtgcttcttctgccatcgctgccatttcttctccaagtttcttgggtggtaagaaactgaggctgaagaagaagttgactgttccagctgtgtccaggccagatgcgtcggtgcgcgccgtcgcagctgatccagatagaccaatctggttcccgggaagcactcctccagagtggctagacggtagcctccctggtgacttcggatttgatcctcttggtctttcatcggacccggacagtctaaaatggaacgtacaagccgagatagtccactgccgatgggctatgctaggagccgccgggatattcatcccagagttcctaacgaagatcggaatcctcaacactccgtcatggtacacggcgggagagcaagagtatttcacggacaaaaccacactctttgtcgttgagctcattttgatcggatgggcagaaggacgtagatgggccgatatcatcaagcccggtagcgtcaacactgacccagtcttcccaaacaacaaactgacgggcacagacgttggttacccaggtgggttatggttcgacccgttgggttggggatccggtagcccggctaagctcaaggagttgaggaccaaggagatcaagaacggaaggttggctatgttggcagtgatgggtgcttggttccaacacatctacactggcactggtcctattgataacctttttgcacatcttgctgatcctggtcacgccacaatcttcgctgctttcacacccaagtgagacaacgaaaaagggttatggggaggtgaatgcgtttgtgtgtgatcatgtttgtacaaatatcattttgaacttaaaattattatgtactttatataaattgtggtcgaatgcaaattaaggttccccgtaacactcttttcctaactcaataatgcttttcctttattggggtaagggccttaatttttttcnnnnnnnnnnnnnnnnnnnnnnnnnnnnnnnnnnnnnnnnnnnnnnnnnnnnnnnnnnnnnnnnnnnnnnnnnnnnnnnnnnnnnnnnnnnn

SEQ ID NO: 90990 - DNA, 821 bp, Arabidopsis thaliana columbia
  unsure (1)..(821): unsure at all n locations
nnnnnnnnnnnnnnnnnnnnnnnnnnnnnnnnnnnnnnnnnnnnnnnnnnnnnnnnnnnnnnnnnnnnnnnnnnnnnccacgcgtccgcggacgcgtgggggatactatatatacgaaaagggaagcaaaccaaaacctgatccatcagtgctttcaattgttgagaaatcaaggaaactgaccaatatcatgcctggtgggaagcctatatcagtaactgataaagaaattgtagagatgatcttattccctgttgtcaacgaggcatgccgcgtcctagatgaaggagttgtgatccgagcctcagacttggacattgcgtctgtccttggaatgagttttccttcttaccggggaggaattgttttctgggcagacactgttggaccaaagtacatatatgagaggctcaagaaattgtcggagacttatggcagctttttcaaaccatcgaggtatctggaggaaagagcaatgaatggaatgcttttgagtgaatcgaaatcgtcgaggtccaaattgtgaagcgtttaattaagtatatgcagaaggagaggctgaaggtgttagtcactaaatgaaaataaatcagtctctcttgttgtttcaaagttcaaagttaaaatgctattaaggtgtggttgttgttaacactcttaaaataaacaattttctgctcttaataaatgtttgtagtgacgtcagtttcataaagtaaaaaaaaaaaaaaaaaaagaaaaacccaaagnnnnnnnnnnnnnnnnnnnnnnnnnnnnnnnnnnnnnnnnnnnnnnnnnnnnnnnnnnnnnnnnnnnnnnnn

SEQ ID NO: 90991 - DNA, 820 bp, Arabidopsis thaliana columbia
atgatttgccagcactaatcgactcattaagggaaagctcggtacgcctgcaggtaccggtccggaattcccgggtcgacccacgcgtccgcggacgcgtgggtgtttctcaagacaaaaaaagaaaaaatggtggaagatgaacaatgacgaagaatcattgttattgttcatgcattaaccttgttgttatgttcctccatggcctgttacatcgttccttattaccaccatcctgttttgtctcatcccaatagagaaatcttcagtcaccgtcaccaccaccaccaccgtttctgcaacaatctcttgaatagaagaattagtgttcctcgaagctccgctattagtgacggtggtgtctcctacaatactctagtctccgaggcggtgaggcttttggttccacaagcaaactttgattcttcaaagcttaaagttgagttcttaggagagttattggagaacaagagtaacggaggaattattacgccgcggacttatattctttcgcattgtgacttcactgctaacttaacgttaacaatctcaaacgttatcaatctggatcaactagaaggctggtacaagaaagatgatgtggttgctgagtggaagaaggtgaatgatgagctgcgtttacatattcattgttgtgtgagtggtatgagtttattgcaggatgttgctgctgagctcaggtttcatattttcttcaacgaattgcctgtgggggtgaagctgtgatgcatggagattcaatcttgtttagtgagaatccttgcctaatggtttcctatttattggtttatttccattc

SEQ ID NO: 90992 - DNA, 310 bp, Arabidopsis thaliana columbia
ggtgaagttcggttgcttgtgtccgggaggagagaagatgataaaaaaaaccggatcagatccggatatccgcggatactcgtactttttcacggacttcaggatcccgaatatcaggggttggcggatacggatccggagactgaaatgacggatccgcctgttacggatacggatccggatacctccaaaataccggatatccggatccgtaacaggcctatttgatatagatgtacaaacaaaatcagtatatcttttttcccatgtgttgctttctcataaaaattaaattggtacaaatgtactt

SEQ ID NO: 90993 - DNA, 658 bp, Arabidopsis thaliana columbia
taatacgactctaatagggaaagctggtacgcctgcaggtaccggtccggaattcccgggtcgacccacgcgtccgctctaccaccatggcaccaaatcgtcatcctcctccaccaaatcaccctcatcctcaacctccaccgaaacaaccgctgcctctatctcttcttcttccccttggcgttggattcactctttcgttgcagatttggagctgttttttctggaaagaatcttggcggtgaagttcggttgcttgtgttcgggaggaaagaagatgataaaaaaaaaccggatcggatccggtccgcggatactcgtactttttcacagacttcaggatcccgaatatccgaggttggcagatacggatccagagactgaaatgacggatccgccggatacggatccggatccggatacctcaaaaatcccggatatccggatccgtaacaggcctaatagccaaccatttaatataaaaacttgtcaatacagctaagttttttttcttaacaactaattatttttggtctttctaaattctttattataaaaagaatagtcgtttattatattgatctcaaatcactaaaagtctaaactcttataagtctttcctttcttagtaatgaagcctaaatcttaaaacatatat

SEQ ID NO: 90994 - DNA, 777 bp, Arabidopsis thaliana columbia
acgactcactatagggaaagctggcacgcctgcaggtaccggtccggaattcccgggtcgacccacgcgtgcgcggctgcgagaagacgacagaaggggccggaagttaaaaaggcgaaaagctacagaacccttttggaagcggtgttgcctatctttaagagcgtcggaggtgatataactgggagactcttgatgagatgttggcctatctggaatacttcccagtagcgagaccaacggagctgaacaccgtcaacaacgcacctacaacccatctcaagagcttggacacgagggagaaggttggtgcctggatcaaacagtggtgcatccaaaacgcaagccatgtagctttttgtttcgggttctacatggccattgcgaagaagggtgaccagttaccctaaagacgtcctgcgctttgagggaactcagaagacaatttgaactttttttctttagccctcatagaagaagagcaaagagacccaacggataatatgaagtcttttccatccttaagtgatgttggtagtgccccctttgccattattggcacaagagctgatcttgcttggtttgtgggagtgacatgttgtcccatgatatgttgtctatcagcttcagtatatgttgctaaaccattacaaaagtttttcaataataacttcgtgtaccatatttgtaaaaaaaaaaaccccacaccaaaaaaaagcggccgctctagaggatccaagcttacgtacgcgtgcatgcgacgtcatagtcttctat

SEQ ID NO: 90995 - DNA, 861 bp, Arabidopsis thaliana columbia
  unsure (1)..(861): unsure at all n locations
caatatatcggctagaggaatgggaagagtggatagtagaacaaggctctatgccctttcttcatactctctatatcgatgattgtccaaagttaaagaagcttccggatgggctgcaatttatctattcattaaagaatttgaagatatcagaaagatggaaggagagattgtcggaaggaggagaagaatattacaaagtccaacacattccttctgttgaattctaccatagggtgttgcatatctttaggagcgtcggacgtgatataactgggagactcttgatgagatgagatgttggcctatctggaattcttcccagttgggagaccaacggagattaacaccgtcaacaacgcacctacgacccatctcaagagcttggacacgagggagaaggttgttgcctggatcaaacagtggtgcatccaaaacgcaagccatgtagatttttgtttcgggttctacatggccatggcgaagaagggtgaccagttggaaggtgcatacaccctaaagacgtcctacgctttgagggaactcagaagacacaatttgaacttttttctttagcactcatagaagaagagcaaagagaccaaacggataatatgaagtctttaccatccttaagtgatgttggtagtgttgtatttgccattattggcacaagagctgatcttgcttggtttgtgggagtgacatgtcgtcccatgatatgttgtctatcagcttcagtatatgttgcttatgtaacagtttttctataataactttgtgtaccaaaaaaaaaaaaaaaaaaaagggcggccgctctagaggatccaagcttccgtccgcgtgcatncnacgtcatag

SEQ ID NO: 90996 - DNA, 375 bp, Arabidopsis thaliana columbia
aaaagagttgtgcgattgaacatcaaggaggagactaggaagttcgatttgtgtaatctcgatgtcgactctatcagctgccagggcagataactcttactatcctccagaatggactccggatcaacgttccttgaacaagtttcaaggacagcatcctctcagagagagggcaaagaaaattggcgagggaattttggtcataaggttcgagatgccctataatatatggtgtggtggctgtagttctatgatcgccaagggtgttcgatttaatgcagaaaagaagcaagttggcaactattattctacaaagatatggagctttgcaatgaaatcaccatgctgtaaacatgagatagtcattcagacaga

SEQ ID NO: 90997 - DNA, 668 bp, Arabidopsis thaliana columbia
  unsure (1)..(668): unsure at all n locations
atgatttgtccggccactaatacgactcacttagggaaagccggtacgcctgcaggtaccggtccggaattcccgggtcgacccacgcgtccgcgaaccaaaaacttcctctctcttttataatatctttctctcaatctatgtttagaagaatggtttcgtattctaataatcattttgcatacgcatttctacttcttctaacaatcggtaacacgcttgcattttcttcgagtttgccggatcatgttcaagatccaaatctagtcgttgacgacgttaacagaagtgtattcaatgcgtcaaggaggagcttggcctacctatcttgtagaaccggaaatcctattgacgattgttggcggtgtgaccctaattgggaaacaaaccgccaacggttagcagattgtgccattggatttggcaaaaatgctatcggagggcgcaaaggtcgaatctatgtagttacggatcctgccaacgacgatcccgtaaaccctagacctgggactctaagatatgcagtgacacaagaagaaccattatggatcattttcaagagagatatggtcattaggctcanaaaagaacttatcatcacatctttcaagaccattgatggtagaggctcgagtgttcacattaccgatggaccatgcttaaagatc

SEQ ID NO: 90998 - DNA, 426 bp, Arabidopsis thaliana columbia
ctatgacgtcgcatgcacgcgtacgtaagctcggaattcggttcgaggacgacgacgactgcttctctggttaagacttttctgtttcggtgcgactcgttttcatctttcaaattcaaatgcaaattcgaatctcccgcgaaaacgcgattgctctctccggcgaccgagaaacatgttgtcagatcgtcaagagcctggcgtattcgttgcttatccgatgatcctggttcgagtcatgttttcgttgcaagtagaaggaaaatggtagtcttgttgtcgacggtgcagcttctgtctcatatgcttccgcaaaacgggaacgcagctgagatttatccggtgatgcaaaacgaaataaggaaagtggtgacaaagggcaaggctgctggtgtgcttcgtttagtgtttcatgatgctggaacc

SEQ ID NO: 90999 - DNA, 528 bp, Arabidopsis thaliana columbia
  unsure (1)..(528): unsure at all n locations
atgatttgccnnnnnnnnnnnnnnnnnnnnnnnnnnnnnnnnnnnnnnnnnnnnnnnnnnnnnnnnnnnnnnnnnnnnnnccacgcgtccggggagagagtagaagagaaatatcaaatttcccttcaaaagcctctcctctctttgttcaagtttttttccttggatgtgcatgtttcttgtggaacaaggcagttctgtttttaagtaaaattcatggcgacggattcgttcatcaagttaaatccaatttcctttaaccgtgcccgcttcgacctccgagattttgctggcataagtcctaaaagcatctcttctctgtgttgcattagcccaagattgatatcttgcaaccatttcagcccgagaacattgatatccggcgagaatggtaacatattgttttccaagaaaaagatccccgcgtttgtccgatgtcagacaagtcttgggatcggaaggaaccaaaaatggtgggagaaggaattgaaaccgaacatgaagtcggttacatcaccgcaagatctt

SEQ ID NO: 91000 - DNA, 414 bp, Arabidopsis thaliana columbia
ggatgcttgaaatcatcgcctgaagctagaactaatgaggtcaaacgatgtctgggtttataaccctattacattgaagtaactaacaacaagcactacaatttttgaacttattgttggagaattaagatctctctactattcctcggtaacaacaacaccaatctcgcctctctcaagcaaatcatagaagactcttgttttcctctgctcgttccagtgatgcatcttccatagcccaccagccgctagtcccagtgtgagaccaataactaactccttcacaacacttgggccttttaaagttgcgtgtgctatcttgtgcccagccatctctttgccactctccctgttgtccaagtgtatgttcctacccaattgtataattgtatgttccaatacgaagaagaatca

SEQ ID NO: 91001 - DNA, 873 bp, Arabidopsis thaliana columbia
atcaaatcaaatcgaagaaggagagaagaacagagaaaaagagttgaatcaaatatggctgggagagctacgatccctgctcgcaactctgccctcatcgcaatgatcgccgatgaggacactgttgttggatttttgatggctggagttggtaatgttgacataaggaggaagacaaattacctcatcgtggattcaaagacaactgtgagacaaattgaggatgctttcaaggaattctcagcaagggatgatatcgctatcattcttttaagccaatatatcgccaatatgatccggttcttggtggatagctacaacaagccagttcctgcaatcttggagatcccttccaaggaccatccctatgatcctgctcatgattcagttctctctcgtgtcaagtacctcttttctgcagaatctgtgtcacagcgttaaacatatgcattttgcaagctctcggagcctatatcatttgtttgtttttgatattcttgtctttctccttcggaacccgaaaaatctacaataatgtataactcttgatttttatttggagaggaatgttatattatgaagaagcaatggtagcttcatctggttctttgcattcaattaagaaagaatcattgtgggtattcaagagacaagagcagacttcaaagatttagtgaagaattctagctccttaagtccttgctcaggtgattcagactcgcccaagatcttaaccatcgcgctaccaacaatgactccgtctgctccccattcagctacctgtttcacatgctcaggttttgatatgccaaatccaactgccactggcttgctagttgcctctttgatttgttgtagaagagattgaacttt

SEQ ID NO: 91002 - DNA, 559 bp, Arabidopsis thaliana columbia
  unsure (1)..(559): unsure at all n locations
aatgaggtcaaacgatgtctgggtttataaccctattacattgaagtaactaacaacaagcactacaatttttgaacttattgttggagaattaagatctctctactattcctcggtaacaacaacacaaatctatctatcaaatcaaatcgaagaaggagagaagaacagagaaaaagagttgaatcaaatatggctgggagagctacgatccctgctcgcaactctgccctcatcgcaatgatcgccgatgaggacactgttgttggatttttgatggctggagttggtaatgttgacataaggaggaagacaaattacctcatcgtggattcaaagacaactgtgagacaaattgaggatgctttcaaggaattctcagcaagggatgatatcgctatcatccttttaagcccatatatcgccaatattgatcgggttcttggtggatacctccaacaancagtcctgnatcttgggancctccaaggcatcccatggccgnccangtcagtccccccgggcagacccttctggaaccgggccacggnaaaanagc

SEQ ID NO: 91003 - DNA, 527 bp, Arabidopsis thaliana columbia
  unsure (1)..(527): unsure at all n locations
nnnnntactgccnnnnnnnnnnnnnnnnnnnnnnnnnnnnnnnnnnnnnnnnnnnnnnnnnnnnnnnnnnnnnnnnnnnnnnnccacgcgtccgcggacgcgtgggccgttttgcaaggagttttccaagttttgggaagttgatgattcctcatcagctcccaaggagccttcaattctcatcggtggtaaaatgggggaccgaaatagctcgtttaagattgagaaagctggagaaggagctagagcaaacgtttataagttgaccaccttttacggaaccgttggagccatcccaggggtttggttaagcgcaccacaactaattatcaccaaggatacggctaagaccttactcgtcaaattcaaaaaggttgatgatgctactacggctactagcaacttatacttcccgggttgataatttaggtctaaggatgttcccgttctactaatcaactggtaaaaattattgtaatattaagcctgagactcgtccatggccctaaataatgagttattttcaa

SEQ ID NO: 91004 - DNA, 470 bp, Arabidopsis thaliana columbia
  unsure (1)..(470): unsure at all n locations
acccacgcccccgaccacgcgtcagcccacgcgtccggtttgtgaagtcctccaaatcgaatgcttacttcaagagctaccaagtgaagttcaggagaaggagagatgggaagactgattacagggcaaggatccgtcttatcaatcaagacaagaacaagtacaacacccctaagtaccgttttgttgttcgatttaccaacaaagacattgtggcacagattgtatctgcaagcatagctggtgacattgttaaagcttcggcttacgcacatcgagcttcctcagtatggncctcactgttgggtcttaccaactattgctgcnagcttactgtactnggccttctttttggctcgtcggtgttctgaaaatncttggaaattggnttgnatngaggtncgggggggaaaccgtangagggccacttngnggaggggctttttcttttgggacccaaccttntttcc

SEQ ID NO: 91005 - DNA, 557 bp, Arabidopsis thaliana columbia
  unsure (1)..(557): unsure at all n locations
atgtctcaaactacatgaagctgttgggagaagatgagccagagaagttacaaactcacttcagtgcttacatcaagaaaggagttgaagctgagagcattgaggagttgtacaagaaggttcacgcagctattcgtgctgaccccaacccaaagaaaaccgtgaaacctgctcccaagcaacacaagaggtacaacttgaagaaacttacttacgaggagaggaagaacaagttgatcgagagagtcaaggcattgaatggagcaggtggtgatgatgatgatgaggacgatgaagagtaaatcagtcaagccttctttatctcatgcctcttgtagttttttatcttttgagcttaatgcctcaaattttctgttttcagactaaaacactcagcttttgtgttcacattttaattgtgttcgaggattttgatattgaggatacattttctttgaagtatcattaaaaaaagattaccttnnnnnnnnnnnnnnnnnnnnnnnnnnnnnnnnnnnnnnnnnnnnnnnnnnnnnnnnnnnnnnnnnnnataatcg

SEQ ID NO: 91006 - DNA, 611 bp, Arabidopsis thaliana columbia
  unsure (1)..(611): unsure at all n locations
acgactcactatttggaaagctggtccgcctgcaggtaccggtccggaattcccgggtcgacccacgcgtccgcccacgcgtccgcttttgtcactcatcttcacaggaaacaatggtgtttgtgaagtcctccaaatcgaatgcttacttcaagaggtaccaagtgaagttcaggagaaggagagatgggaagactgattacagggcaaggatccgtcttatcaatcaagacaagaacaagtacaacacccctaagtaccgttttgttgttcgatttaccaacaaagacattgtggcacagattgtatctgcaagcatagctggtgacattgttaaagcttcggcttacgcacatgagcttcctcagtatggactcactgttggtcttaccaactatgctgcagcttactgtactggccttcttttggctcgtcgtgttctgaaaatgctggaaatggatgatgagtacgagggaaacgtagaggccactggagaggacttttctgtggaaccaactgattccagaagacctttccgtgctcttcttgatgttggacttatcagggctccactggaaccnggtnttnggcaccaagggggtttgcggggg

SEQ ID NO: 91007 - DNA, 1275 bp, Arabidopsis thaliana columbia
  unsure (1)..(1275): unsure at all n locations
gccnnnnnnnnnnnnnnnnnnnnnnnnnnnnnnnnnnnnnnnnnnnnnnnnnnnnnnnnnnnnnnnnnnnnnccacgcgtncgcggacgcgtgggttcactcacaatctcacagcaaagcctctcgttgctagaggaatcaaacaatggtgtttgtgaagtccaccaagtcgaatgcttacttcaagaggtaccaagtgaagttcaggagaagaagagatggaaagactgactacagggcaaggatccgtcttatcaaccaagacaagaacaagtacaatactcctaagtatcgttttgttgtccggtttaccaacaaagacatagtggcacagattgtatctgcaagcattgctggtgacattgttaaagcttctgcttacgcacatgaactgcctcagtatggtctcactgttggtcttacaaactatgctgcagcttactgtactggccttcttttggctcgccgtgttttaaagatgttggaaatggatgacgagtatgagggaaacgttgaggccactggagaagacttttccgttgagccaactgattcaaggagacctttccgtgctcttcttgatgttggacttatcaggaccacaacaggaaaccgtgtgttcggtgctcttaagggtgctttggatggaggtcttgatatccctcacagtgacaagagatttgctgggttccacaaggagaacaagcaacttgatgctgaaatccacaggaactacaatttacggtggccatgtttcaaactaccatgagggcttntttgggggaagtcttagcccgagnaagttccaaactcccttcaaggggttacattnaggaaaggagttaaagctggagcaccgggggggtgtccaagaaggttcacgcggctttccgggcagaaccccaccataagaaccccgagttaatctgctcccaaggaacacaagaggtacaacttgaagaaactgacttacgaagagaggaagaacaagttgatcgagagagtgaaggcattaaacggagcaggtggtgatgatgatgatgaggatgatgaaaagtaaaataccaaacaaggcttctttggctcatgcctttaggagctttttacttaattattttcagactaaaacactcaagttttggttttacattttagttgggtttgaaggttttggattcgaggatatggtttggttgtagaatttatttttattttttatttcaccaatttgtatttttaggtaattatttatgttttattttatttattattata

SEQ ID NO: 91008 - DNA, 990 bp, Arabidopsis thaliana columbia
  unsure (1)..(990): unsure at all n locations
nnnnnnnnnnnnnnnnnnnnnnnnnnnnnnnnnnnnnnnnnnnnnnnnnnnnnnnnnnnnnnnnnnnnnnnnnnncggcgcgtgcgcccacgcgtccgcactgttggtcttaccaactatgctgcagcttactgtactggccttcttttggctcgtcgtgttctgaaaatgctggaaatggatgatgagtacgagggaaacgtagaggccactggagaggacttttctgtggaaccaactgattccagaagacctttccgtgctcttcttgatgttggacttatcaggactaccactggaaaccgtgtgtttggtgcactcaagggagctttggacggaggtcttgatatccctcacagtgacaagagatttgctggtttccacaaagagaacaagcaacttgatgctgaaatccacaggaactacatctacggtggccacgtctcaaactacatgaagctgttgggggaagatgagccggagaagttgcaaactcacttcagtgcttacattaagaaaggagttgaagctgagagcatcgaggagatgtacaagaaggttcacgcagctatccgagcagaacccaaccataagaaaaccgagaaatctgctcccaaggaacacaagaggtacaacttgaagaaactgacttacgagagaggaagaacaagttgatcgagagagtgaaggcattactcgcagcaggtggtgcatgatgatgatgaggatgatgaagagtaaatcaccaatcaagccttctttgtctcacgcctctagtagctttttacttatttatcttcagactaaaacactcagtttttgttttcacattttagttgcgtttgacgattttgaattcgaggatatgttttgtttgaagaatttattatcatctcttattacaccaaaaaaaaaaaaaaaagnnnnnnnnnnnnnnnnnnnnnnnnnnnnnnnnnnnnnnnnnnnnnnnnnnnnnnnnnnnnnnnnnnn

SEQ ID NO: 91009 - DNA, 920 bp, Arabidopsis thaliana columbia
gttcccaataaaacctaggggcctttttgccttgttttaaatttggaatatattgacagggaactaaggccttgaaggcttttttgaaccacattctcaagccctccggctttttggttggccaaccggcacccgtggaaccgtttttgggcccccaaggagtttggacggggtcttaaatcctccaggtccaaaattttttggttccccaagaaacaaccactttatgttaatccccaggaatactttcggggggccggtttcaaatccattaacttgttggggagaattacccgaaaagttccaactccctcaggggtttccttaagaaggagtttaagttgagaccatccaggagatgtccagaagggttcacccacctatcgaaccagaacccacccataagaaaaccgaggaaatctgctcccaaggaacaccaagaggtacaacttgaagaaactgacttacaagagaggaagaacaagttgatcgagagagtgaaggcattaaacggagcaggtggtgatgatgatgatgaggatgatgaagagtaaatcaccaatcaagccttctttgtctcatgcctctagtagctttttacttatttattttcagactaaaacactcagtttttgttttcacattttagttgcgtttgaagattttgaattcgaggatatgttttgtttgaagaatttattatcatctcttattacaccatcgtcattttcaggaatttgcctgtcaatagttagattttatgcgtagtgtggttttagtgcttgtggaaaatggggattcttgaagtaatgaaagtgatcattagtgaaaaaaaaaaaaaaaaaaaaaaaaaagggcggccgctctagaggatccaagcttacgtacgcgtgcatgggacgtcatagctattctatagt

SEQ ID NO: 91010 - DNA, 668 bp, Arabidopsis thaliana columbia
  unsure (1)..(668): unsure at all n locations
cagcatctatacngactcactatagggaaagccggtacgcctgcaggtaccggtccggaattcccgggtcgacccacgcgtccgcccacgcgtccggctaaatgacattcctggtgtgtcctgtcctgatgacatagttatgagattctcggtgctacagaatgaggtggttcaaagcactatgaagattggggaagcaagtacccgtattaaaccaactggaggagacatctggaggctatacaacttggcagacagaatgctgtaagtgaggctgcattagcgaaagagaaatctgaggctctcaaaacagacgtgaagagaattgaagtaatgctcactttggtcacggaggagaaagaacagttgaaagctgttgttaatgaattaaggaagtcaaacagtgaaggatctgtgtctggagccgcagatggagcccttattcaggggtttgaatcttctcttgcaaagaaggagaactatattaaggatttagagcaggatctaaatcaactgaaggatgtcaataatcgtcaacgtactgaaatagaacttctaaatgagaaactagttgatgaagcaaggaggaataagtcgctggaagggatagtgatcgtcttcgctctgagatctctntactggagtcaaagctgggtcatggtgattat

SEQ ID NO: 91011 - DNA, 660 bp, Arabidopsis thaliana columbia
  unsure (1)..(660): unsure at all n locations
atgatctcgccggcactaatcgactcacttagggaaagccggtacgcctgcaggtaccggccggattccgggtcgacccacgcgtcgctaaacccagaggacatggagatacacatgggaagctcaatctcattctccaaaccttcgtctctttcttttcgattccaaaactaaccctaagatccactgcaaaagcctcaatgtatcaaccatcgtcggaaaatctcaacttctcgtcacatggatcaacgaagaagatgaagaagctgcaagcaaagaagagattgtttctcttctagttcctatccctagggtcttactagatactgaatctcctgtaaatttcaaagctttagacgatcacatcgaggttagacttgttctgttactccctgttgatcatcctttagtctcagacttcaatttggtgactgattctagagaaaagtcggcgcctttagtgatgggttatgatctaaagactctatctttaatgggaggagttcattnttactgtagaagttgttcanataggttaacaaagaaggaacttttagatttctcagaaatgccgtctattaattggagagaatcagctgataattgggttggacttggtggtgtcatttggtggattagtgagagatggttgtaagacac

SEQ ID NO: 91012 - DNA, 906 bp, Arabidopsis thaliana columbia
  unsure (1)..(906): unsure at all n locations
ttttaggtgcactatagaagagctatgacgtcgcatgcacgcgtacgtaagctcggaattcggctcgagtgtagccatcggtttagactctcgttaccacggtgaacgtgctgattgcaaaactgcatatcgagatgctcttatatcatcttggagaaatggaaacactatgccttttatctttgatactgtatgggatttgatcaaactagctgaatatcttactcagagggatgatatagacccgaaaaagataggaatcaccggtatttcgctaggagggatgcatgcttggtttgctgctgcagctgacactcgctattccgtggttgtcccattaatcggtgttcagggttttagatgggcaatagagaatgatgagtgggaagcaagagtcaacagtatcaaacctttatttgaagaagcaaggattgatctcggaaagaacataatcgacaaagaactagtcgagaaggtgtggaacagaatagctcctggcctagcttcgaagtttgattcaccgtactcattaccagtgattgctccacggcctctttacatccttaacggcgcaaatgatcctcgatgtcctcttggcggactagaacttgcgttaaagagagctgaaaaggcgtataaggaaacagcttctcctggaaacttcaagttcaaagcagaagatggagttggacacgaagcgacgagtttcatgatcaaagaatcatcagactggtttgacaaattccttaaacaagaagatatgacaacttgacagattgtaatattgtgaactaataaagaagaatcatcttcttctcgttaataatgtattcactcaagcaaatcaatatcattacnnnnnnnnnnnnnnnnnnnnnnnnnnnnnnnnnnnnnnnnnnnnnnnnn

SEQ ID NO: 91013 - DNA, 532 bp, Arabidopsis thaliana columbia
  unsure (1)..(532): unsure at all n locations
tggcttcttcacttcctctgttacccaaacccatttccccattctttaaaacgccgccgttttctacctccaaaccactcgtcttcctcaactttcagactcgtcttacgtcgagatcttccgatgtatcggtcaatctcaagaagaagaataatccgtggctcgacccgtttgatagcggtgaagacccggataacgaatacgggtccttgtttgccgacggaaaacaagacggggatccaagaccaccggataatcctgataacccttacggcttcttgaagtttccaaaggggtacaccgtcgagcttgcttctttaccgttgaaaatcagagggagatgttagacggatgtttgctgcggtatctncggtggnggtttacgnggaatttactcttttttcccggcttttntagntaattnaaaggcaanggtttcctnggggttcagggagggtatntttaccggcttnaaaggggggaacnaancatttgggngtaacaaaaaacgnggggttggccaatntttnta

SEQ ID NO: 91014 - DNA, 385 bp, Arabidopsis thaliana columbia
cttttatttctaacaagatatataacaatggcaagagttcagctatttttatgctttaccattctttttgcatcagtgactcttctggacatcgtttcagctcatttgaagcttaagccaactttgcctcagattgaacctccacaaacgttgaaggatgttgaaccttacaccgttaaagtagtgatagtctttgtgtccgacctcgagaaagaatgtcccaagacaaataaattcaaggctttctttgagaaacttagggcattcgccaagtatgtctgcccaataaaaagaaaagaccaagtagattacgaccgagacatgaaggccaaggctggaggcctcttccaagtcatatcttcttttgcgattggaaagataaaaa

SEQ ID NO: 91015 - DNA, 795 bp, Arabidopsis thaliana columbia
  unsure (1)..(795): unsure at all n locations
nnnnnnnnnnnnnnnnnnnnnnnnnnnnnnnnnnnnnnnnnnnnnnnnnnnnnnnnnnnnnnnnnnnnnnnnnnnnnnnnnnnccacgcgtccgaataaataatattccgtggcgcctgcggcagagatcaatgacgataccggatctctgtaacgatttggtcgatgagatactctgtcgcgttccggcgaggaatctgaaacggttacgatctaccagcaaacgatggaaccgtttattcaaagatgataggagattcgcaagagagcacatgcataaagccccaaaggagtatctacctctcatgttgacaagcgagtacaggatctgtcgcggtgagcatcaatctccaaggagatgttccttctgtagtgttaaagagagagcttagcctaccagatccggattattcacatcaattcgatataggtcgagtctttcactgcgacggcttattggtatgcaaccacgtaggcaagaatccccgatacggatctaaaatgcgggtttggaacccgctgactggtcaaaccaggtggatcgaagccggctatcgttggaaggaatacgaagtcagatttgttctcggatactgctaccagcaagacgagaacaattcctgcagtaaaaaaatctacaaaattttgtgtttttatcctaatggccaagatacagaaatctacgagcttaactactctgataggtggacaaggacgattcctgatggtgatctcactccaggctggaccttgatatactcagagcagaccgtgtctatgaacggaaatctttac

SEQ ID NO: 91016 - DNA, 433 bp, Arabidopsis thaliana columbia
ctcagaaaccttatgttctctgcgaaacattctcttatttcattttctttctctaaagtttttacttctctgacaaggaagatatccctttaggtggattcttgtttaaatttaaaaatcctcaaggagaagaagaagaagaagaagatagtcaaatgaaaatacattcttctgatcattcatggcttttactagccgttctcgtgattctcctctccttctctggagctctctcaagcgatgacaaagagaagaagacgaagtcggtcgataaaaagaaagaagtaacttatgatggaacgtctttgatcatcaatggaaatagagaactcctttactctggctccatacattaccctcgtagcactcctgaaatgtggccaaacatcatcaagagagcgaaacaaggcggtttgaacacgattcagacata

SEQ ID NO: 91017 - DNA, 443 bp, Arabidopsis thaliana columbia
ctcaagtgttcgtcttcaccatcatgctctctcgtttattccttagacattcgaatctccggtggcgtaaccctagttgcatcgaaatcaaattctcagatcttctcttcgtttattcgtccgctttcgactaacagtagcggcggcggaggaaatggtgacgggaatggtcgtaatcggaatgattgttccgtggagtttcactggagtaaacgatgataagtctggacctttctcttccgatgattcttttggttcctctggagttgcaggatctgctttacctggtggagaggggaaatggccggaggagcctaagagatggaatataaaggaggaagaggaaaaagttgtgtttgatactggtggtgaagtaggtcaagggattgagactagtcgcgagaggaggggtaatgaatgggaggagactaagagatgggata

SEQ ID NO: 91018 - DNA, 447 bp, Arabidopsis thaliana columbia
acgcgtccgatatattcaatatggccactctcctgcaaataggttcaggtgtgatttatagtaatgcccttaggaagacgcttcgacgtcctcagtcgtctacatgcatcatagtgaccgaaaccacaccatgtgggaagtctcccacagttcagcgtcgttctgcgaactatcagccttctcgttgggaccatcaccatctcctctcggtcgaaaataaatttgcgaaagataaaagggtacgagagagagatttgttgaaggaaaaagtgagaaagatgctcaatgatgagcaaaagacttatcttgaccaattggagttcagtgacgatctacaagaactcggggtttcttagcattttgaagcggaaatcgacaacattttaacatcttcttataaaacagatagaacaaacatccaggagagtgacctacatgccaccgcac

SEQ ID NO: 91019 - DNA, 553 bp, Arabidopsis thaliana columbia
  unsure (1)..(553): unsure at all n locations
nnnnnnnnnnnnnnnnnnnnnnnnnnnnnnnnnnnnnnnnnncacgcgtccggatcatggagatcattgtcgacgcggaagaagaaaactacattcctgccattgcaattattggtcggccaaatgttggcaaaagtagcattttaaatgcacttgtccgagaggatagaacaattgttagccctgttagtggcactacccgtgatgctatagatgcagaatttaccggaccagatggggagaagtttcggcttatagatacagctgggatcaggaaaaagtcatctgtggcttcatcaggcagcactacagaggccatgtcagtgaatcgtgcatttcgagcaattcgtcgttctgatgttgttgcccttgtcattgaagctatggcatgcataacagagcaggatctgaagattgcagaaagaatagaaagagaagggaaaggatgtctggttgttgtaaacaaatgggatacaataccgaacaaaaaccaagagactgcagcacattacgggggcggttttcggggggagntccgtcccncaattggccc

SEQ ID NO: 91020 - DNA, 669 bp, Arabidopsis thaliana columbia
  unsure (1)..(669): unsure at all n locations
ctcactatagggaaagctggtacgcctgcaggtaccggtccggaattcccgggtcgacccacgcgtccgaggtaagcaagttcacgcctttctaatcgtaaacagcatttccggtgatagctataccgatgagaggatcttggggatgtatgcaatgtgtggtagcttttcagattgtggtaaaatgttttacagactagatttaaggcgtagtagcatcaggccatggaattcgattatcagcagttttgttcgaaatggtttgttgagtcaagctttggcattttacttcaagatgctctgttttggagttagtcctgaggtatctacgtttccttgtctcgttaaagcttgtgttgctttgaacaattttaaagggattgactttctttctgatacggtttcttctcttgggatggattgtaatgagtttgtggcgagttctttgatcanagcttatcttgagtatggaaagatcgatgtgccgagtaaattgtttgatagagttcttcagaaagattgtgttatatggaatgtactgcttaatgggtatgcaaagtgtggagcttntgatagtgttataaaagggtttagtgtaatgaggatggatcagattagtcctaatgctgtcacctttgattgngtttatcggtgtgtgcatctaagtgt

SEQ ID NO: 91021 - DNA, 688 bp, Arabidopsis thaliana columbia
  unsure (1)..(688): unsure at all n locations
nnnnnnnnnnnnnnnnnnnnnnnnnctcactatagggaaagctggtacgcctgcaggtaccggtccggaattcccgggtcgacccacgcgtccgcggacgcgtgggcggacgcgtggggggctgttttctttcaaactaaatagggccggtcagctcgaaccaatcgtggttagcctgtggggaaaattgcgaaccagaagtagcaggtgaggtcggtcagaaacagatggttctcgctacctccacgaagtagcaggggcttacttttcctgacgatgaaacccaaatcctattgttgttaatatcaaattgaataatcaaaccaagatggtgaatttgttcttatctgaaccaaagtggaacgatgatgcccagaaaagtagtaacatcaatgttattttgcctctgttaaacaaattaggctctcaaattcaatcattggtgactcatggagctcgatcagaagctaggctttggctttgtagtgctctttccactatttctatatctcctagcaagcaacttaatatcttcatgaagttattgagatcaaaacctagaaagatgcagtttttatctcaggttttgacaatgatgtttgagaagagaccaaggaaaacttggattttgttagctaaaagaagttatatacttgagaagttctttgaagggaatcagaagcgtata

SEQ ID NO: 91022 - DNA, 521 bp, Arabidopsis thaliana columbia
  unsure (1)..(521): unsure at all n locations
nnnnnnnnnnnnnnnnnnnnnnnnnnnnnnnnnnnnnnnnnnnnnnnnnnnnnnnnnnnnnnnnnnnnnnnnnnnnnnnnnnnccacgcgtccgcggacgcgtgggttcaatttctccacttcttcttcttcgtttcgcttcttcaacgtctctccttgttcgacagttctaaattcaccatgaggaagacggtgaagcgagaatcggaagccaccggcgggaaaagagaagccgacgacgagccggagaagttgaggtctgtgaagaaagagaaacagagaaaaaccgaagctgactccgtacgacccgacgagcctcctccgcctcaggaggaagaacaaggaatatctgatcggagaattctcagatccaagtatctctctcttcaaaacgaaatcaacgattgtaaagatgatttgatgaagattgattctgacaaattctccagaattattaatgcagttgaaaacttgcaccaacaagtttcggaagcctagggaacaaattgcagacgcagagg

SEQ ID NO: 91023 - DNA, 862 bp, Arabidopsis thaliana columbia
  unsure (1)..(862): unsure at all n locations
cccatgtgtccggcataagcagctcggttgttgacgatggcttgataaacaaggaagagtttgaacttgctttgttcaagaacagaaagaaagaaaatttgtttgccaataggatatttgatttatttgatgttaaacgaaaaggcgtaattgattttggagactttgtgagatcactcaatgttttccatcctaatgcttccctagaggagaaaacagactttacctttaggctttacgacatggactgcacaggcttcattgagcgccaagaggtgaagcagatgttgattgcacttctctgcgaatctgaaatgaaactggctgatgatacaatagagatgatacttgatcagacatttgaggacgcagatgtggatcgggatggaaagattgataagacagaatggagcaatttcgttatcaaaaacccatctttgcttaaaatcatgactcttccgtatctcagggatataacgacgacatttccgagtttcgtatttaactcggaggtggacgagattgcgacgtgaaagagacaagacaagctggtttatagagaccaagtcgtaggctggaccaagaataaaaagaagattgattccaacaatgttatatagcaggatcgagctctatttcctttggaatttttagtctattggatttcaatttcatgtattgcgattacttttggctctctttctttaacagttttgaatactcaagttgtagttctacgaaaagattaatataaaaccacaatttctgattaaaaaaaaaaaaaaaggnnnnnnnnnnnnnnnnnnnnnnnnnnnnnnnnnnnnnnnnnnnnnnnnnnnnnnnnnnnnnnnnnncaccnnnn

SEQ ID NO: 91024 - DNA, 572 bp, Arabidopsis thaliana columbia
  unsure (1)..(572): unsure at all n locations
agttgcaanggttatagatatgaagtcccggtcttcctcttctgtggatatctcggnatctctctcctcagccctgtgatgcacaatctctggatatggcggggacccggaaatgcaaatttctactttggaaacgctatccgctacgcgtgctttcagatcgttttcgtggttgagagcgtaagcgcaatgctaaaccatgacagggcgctgaagagatcaaactcaaaccatcgagaagtcaagagctaagccattgaaggtcattgcgccacttttctgttacacgtaaagaaaagagttgggtctttagcttaaagttggcaacatgtgatttgtgtgagtagcttttctttgtttgagaacatcatataaataacaaatctcctgtgcctttccgtttagagtaaccattaatttgtactttttaccgagaggttttaaagttcttgttttgatccgcaaagcacacaatcatccctatatttgaagttacatcgcatgtaaaaacaaaacccaaagggcggccgctctagaggatccaagcttacgtacgcggcgatgcgacgtca

SEQ ID NO: 91025 - DNA, 670 bp, Arabidopsis thaliana columbia
  unsure (1)..(670): unsure at all n locations
nnnnnnnnnnnnnnnnnnnnnnnnnnnnnnnnnnnnnnnnnnnnnnnnnnnnnnnnnnnnnnnnnnnnnnnnnnnnnnnnnnnccacgcgtccgctaaatcggctgagcatcaccgggaaatcgccggtcctttagccggaccgagcagtggtattaaagccggagtatttagtctctttaccgttcttggtatcccattggccattacttacagtattccatttgcactagcgtccattttctcaaccaattccggtgccggccaaggactttcattaggcgttttaaatatagcgatttgtataccacaaatgatagtatcattctcaagtggaccattggacgctcaattcggcggtggaaacctaccttcatttgtggtcggagcaattgccgcggcggttagtggagtcttagcgttaaccgttttaccttcaccgcctccggacgcaccagccatgtcaggggctatgggattccattagttaactagtttttacatatatatgaatttccatctaatacagtattgttgtgcaaaagtgaaacccccaaaaaatggataaagtgagaaaaaaaaaaaaaaaaaaaagnnnnnnnnnnnnnnnnnnnnnnnnnnnnnnnnnnnnnnnnnnnnnnnnnnnnnnnnnnnnnnnnnnnnnnnnnnnn

SEQ ID NO: 91026 - DNA, 637 bp, Arabidopsis thaliana columbia
  unsure (1)..(637): unsure at all n locations
actcattatagggaaagctggtacgcctgcaggtaccggtccggaattcccgggtcgacccacgcgtccgcccacgcgtccgcccacgcgtccgcccacgcgtccgcggacgcgtgggaatcgttcctcctcctcctcatcttcctcacagctctcgcttctgatctcttacttgcacagaaatcgaaaaggttcggaagcttttgttctattctcttcgttttcctctgagtttattaactttcactgatgggtttcggttctgtgtatcgatctctaacggaaatatttcctcagattgatgcacgaattttgagggctgttgcaatagaacacccaaaggatgctgatgaagctgctgctgtggttctttcagagattattccttccttttcctcanatttgttccataattttactcaatcttcgtacaagtcatctggaagcatttcagagcgcgaagaacatggtttggaagatgttgcttctaggtgccgcccttttcttggagcttctggctcanaggccagcacttcttcttcttcttcttcttcagaaactcttccnctgggtgttacccgtgaccacaatancccgtgctctaagtactgatttggtctanacatgaacgagctac

SEQ ID NO: 91027 - DNA, 627 bp, Arabidopsis thaliana columbia
  unsure (1)..(627): unsure at all n locations
nnnnnnnnnnnnnnnnnnnnnnnnnnnnnnnnnnnnnnnnnnnnnnnnnnnnnnnnnnnnnnnnccacgcgtccgataaagaagagtctttgagtttgttggttgcattgatcggatataagagacatgggtcgagtgaaattggagataaaacgaatagaaaacacaacgaatcgacaagttacattctccaaaagacgaaatggtcttataaagaaagcttatgaattgtccattctttgtgacatcgacattgctctcctcatgttctctccctctgatcgccttagcctcttttcgggcaaaacaaggattgaagacgttttctctagatacatcaatctttctgatcaagaacgagagaatgctctagtattccccgatcaaagtcgacgcccagatttccagagcatagagtatctactccggactttgcagcaactcaaggctgagaatgatattgctcttcaacttaccaaccctacagctatcaactccgacgtcgaggaacttgagcatgaagtttataagttacaacaacaacttctcatggcagaggaagaactaaggaaatacgaaccagatccaatcaggtttacaacaatggaagagtacgaaacttgtgag

SEQ ID NO: 91028 - DNA, 1000 bp, Arabidopsis thaliana columbia
  unsure (1)..(1000): unsure at all n locations
atgatcttgccnnnnnnnnnnnnnnnnnnnnnnnnnnnnnnnnnnnnnnnnnnnnnnnnnnnnnnnnnnnnnnnnnnnncccacgcgtccgcggacgcgtgggcggacgcgtgggcttgcttcctgttattgttggggatgctgctgttgagaaacttttagacgtaccactacaaggccacactgaggaatgccctgatcagttccagttcgtgtctgctgttgtcgacaaacttggatatgaagttaaaatggtgaaacttacaggtagaattgtaaacacttattatgcaagtctatgtcttggcaagcctggggacattgaggctatatgcattgattcacggccatcagatgccatcaatgttgcaagagcatgccaggctccaatatatgtgaacaaagcaatagtgctggaagaggctatcaaaattggttatggaggcagaccgcagagcgcaaagcctgttttcaatgttatccttgacagcgctcccgatggaccagatcctttatcggaagagcttaaattagtgaggaatatggatttggcgtctaaagaggaaaggtacatcgatgcagcgatgtggagggacagactgaagaaccttcagaactcgagctctgttgtatataataagggtgtagaaactcctgagagctatgagtagtgaaagaataggagctaagaaaggaaatggatgtagatataatgtggtggatttcaagggtatggagagagaaatataagaagctcatagattgatggtaccgcatgtacctgagaggaagctcttagattgatgggatcgcaggatgtattcaaagtaaatgaaagatgtatgaataacctgagggaatgtgtaaatgtaaatggaagaagactaaatgaaatgcatttcttttaaaaaaaaaaaaaaaaaaaaaaaaaaaaaaaaaaaaaaaaagggcggccgctctagaggatccaagcttacgtacgcgtgcatgcgacgtcata

SEQ ID NO: 91029 - DNA, 654 bp, Arabidopsis thaliana columbia
  unsure (1)..(654): unsure at all n locations
nnnnnnnnnnnnnnnnnnnnnnnnnnnnnnnnnnnnnnnnnnnnnnnnnnnnnnnnnnnnnnnnnnnnnnnnnnnnnnnnnnnccacgcgtccgcaaggctacttgaaaaagagcaccgggcttttgccttgttggctagagggtgcatgtcttcacctattgaaagctgtatagctgatgccattagagcttccagtactgataattacccagtagaaagcatcttaaacacactcgagaagagagatcggattggtcgaaccccttcttattggtcgagtactgggcaacacaaaactacggtgcccgaatcacttctttacaagttgattggtgatttgtgtctcattactgaagtcagcatccatcctttccaagcttattttcagcgcggtcatccgatatactcttcacattatgttcgtttccggttgggtcacgaaaaggacaattcacctcactacaacatttcacaggataaaaaaggtgagccaggatagagttcaattgaaagcaactatgtatggacttacacttcacaagagttttcgatggctcatgataatcgattgcagagctttcagcttccagaacctgttctttgcattggtgggtatctgctagtcgagtttctaggtcgagttcagacacaa

SEQ ID NO: 91030 - DNA, 994 bp, Arabidopsis thaliana columbia
  unsure (1)..(994): unsure at all n locations
nnnnnnnnnnnnnnnnnnnnnnnnnnnnnnnnnnnnnnnnnnnnnnnnnnnnnnnnnnnnnnnnnccacgcgtccgtcaaaagagtcgttttctttcctctccccactttttcagcgtttcttagatctctctctctctgcaaatattcaccattgtcttcttcttcttcaacgacgcttttggattttcttctctaagcaatgaagtcaggaagttctacattgaatccttacgcagcagcttatgtaccactctcgaaaagagaaggttctttggttgatacaaagcctgtcacacaacaacacatgcagcagcagcaccaccagcaacaaccttattatgggtatggagttcaaggaatgggaagttatcaaggaactcaaatgtcacctaagaagtcaccatctgagatggtatacaatcatcagctgaaggatgaggatttggagatggacatggatattgagtatctattagctacataccctggtctttcacaagagtctatcaatgatgtttacttggctaacacttgtgatcttgatgcaactatcgaaatgctgaatcaactcgagatttccagtactgaagctgaggaataccttccagacacactggacattggtgatgtacctgagatcatcacagagtcttcgaaacaaaagaatgatgggagtagtgcatcgtcatcttcgggtatccgcaacgctaacgtatcctcctcctgatttggtccgtccttaaaaaaatgtgaagtttttttcttcttaagtttcttttgcaaatggatgatatgaagttcatgatatattgttaggagatctctttctacattttccccactttgtctctgggaaaagagagtacaatgtatagtttttaagaaagatttcagtttgacaaaaaaaaaaaaaaagggcggccgacaaannnnnnnnnnnnnnnnnnnnnnnnnnnnnnnnnnnnnnnnnnnnnnnnnnnnnnnnnnnnnnn

SEQ ID NO: 91031 - DNA, 529 bp, Arabidopsis thaliana columbia
  unsure (1)..(529): unsure at all n locations
nnnnnnnnnnnnnnnnnnnnnnnnnnnnnnnnnnnnnnnnnnnnnnnnnnnnnnnnnnnnnnnnnnnnnnnnnnnnnnnncgacccacgcgtccgaaacaatcaatcaaaaacataaaattcaaagtgtaagcaaaaccagaacgagagaaaatggacaacaagcaaaacgcgagctaccaagccggtcaagccactggccagactaaggagaaggccggtggaatgatggacaaggccaaggatgctgctgcttcagctcaagactccttgcaacagactggacaacaaatgaaggagaaggcgcaaggagctgctgatgtcgtcaaggacaagaccggcatgaacaaaagccactaagcaagcaccttggacttcttttctaattaattcccctcttcgacttgtgtttaataaatttggggttttaattctcattcctgctactttctgatgttgtttccttgcgtccatttggatctttatgtaatcttatctatctagttaataaaagtatgctttttaatatc

SEQ ID NO: 91032 - DNA, 755 bp, Arabidopsis thaliana columbia
  unsure (1)..(755): unsure at all n locations
nnnnnnnnnnnnnnnnnnnnnnnnnnnnnnnnnnnnnnnnnnnnnnnnnnnnnnnnnnnnnnnnnnnnnnnnnnnnnnnnnnnccacgcgtccggttgaagaatcagatgaagcaagaaagaagttcacaaacgcaaagtccatatcttcagctcagtactttggggatcagaacaaaaacgctgatctggaatcaaaagctacgcttgagatagatgctgagcctgcaaacttctgaagcgctgatttttacggtcacgaccaagatgattccaatattgatataacagctagtgatctcattaaccgactttctttccaggcgcaacaagatctatcgtcgctggtgaacatagcaggagaaacaaagaagaagcttggaactttggcttctggtatcttcagtgatattcaagacagaatgctgtaagaagaccacgagtctctcacatgtttttgatattgacagagaaaaaaaagtaagaaagaagctttgtcggaaaacttccaatgaggttcacgtttctctgtttttattttatagaactttttttttgaaaactattgagacgtggctattgttgttactcaccaaaatctatattgatactattatactcgatatgttatagactttattaaaaaaaactttgtttgtttgcagaaaaaaaaaaaaaaagnnnnnnnnnnnnnnnnnnnnnnnnnnnnnnnnnnnnnnnnnnnnnnnnnnnnnnnnnnnnnnnnnnnnnnnnnna

SEQ ID NO: 91033 - DNA, 988 bp, Arabidopsis thaliana columbia
  unsure (1)..(988): unsure at all n locations
atgattcgccggcactaatacgactcactaagggaaagccggtacgcctgcaggtaccggtccggaattcccgtgtcgacccacgcgtccggaagagactagttctcttagaaaacaattggacactcagacaaaggagcttaaccagagaatgcgccaaatagaagaacttaaagaaaaggagaggatagcaaacgaaaacgttgaagggcttatgactgacattgctgctgctgaagaagaaataacaagatggaaagtagcagccgagcaggaggctgctgctggtggagctgttgaacaagacttcacgtcacagctgtatgtgctaaaagaagaacttgaagaggcaaagcaagcaataatagaatcagaaaagaaactaaagtttaaggaagagacggcagcagcagcaatgggtgcaagggatgcagcagagagatctctgagactcgcagacaatagggcgactaagttgagggaaagaatccaagaactaaaccgtaaagttgaagaattagaaacccatcgagatatgaatacttcaaacaagagctagatatgcgtgttggccatggcaacttctcgggattgattttgtgcccggtcgaagaattgagtcgggacaagaaagtgcgaacgagatggaactcgctgaacctttactatgaaaaaaaccgggtattgtataccaaacccatactctcgggatttggtttagatttttatgtaaaaaccacctgaaaaatgtttttaaaagctttaaaacgttctcatgttgtaatgtttgagttaaagaagtttaatttggaggcttggcgaaaagtaagatgtttcccacacccaaccagtgatcaataaaatataaaacttcccaaaaaaaaaaaaaaaaaaaaaaaaaaaaaaaaaaaanaaanaaagggcggccgctctagaggatccaagcttacgtacgcgtgcatgcgacgtcatagatacttctatagtg

SEQ ID NO: 91034 - DNA, 683 bp, Arabidopsis thaliana columbia
  unsure (1)..(683): unsure at all n locations
nnnnnnnnnnnnnnnnnnnnnnnnnnnnnnnnnnnnnnnnnnnnnnnnnnnnnnnnnnnnnnnnnnnnnnnnnnnnnnnnnnnnccacgcgtccgcccacgcgtccggttctcttctctccatctgtctgccgctcctttaacgtcggttcccattttcttattcacaatgaccccaagaaactcgaggagatggaaaaaagcaaaaggtaaaacaagggcaaaaaagctttcttcgagaaccagagcacattgattccaagattgaatgctgtttctggtggattagtttctctgagttttggtgatagatcagattaacaggcagaattttgagaatgtcgacagtgggaaattcaacgaacatattttggcaagaatcccccattgggaaaactgaaaggcagaagttgttaaatcagaagggttgtgtggtgtggatcacagggctcagtggctcagggaaaagcacgttagcttgctcgcttagtagagagctgaacaaccggggaaagctatcatatattcttgatggtgacaatcttcgtcatggtttgaacaaagatcttggtttcaaggcagaggatagagtggaaatatacgcagggtcggagaagtagccaaactctttgcggatgctggtttaatctgtattggcagcctcatatccccgtatagaaaaga

SEQ ID NO: 91035 - DNA, 857 bp, Arabidopsis thaliana columbia
  unsure (1)..(857): unsure at all n locations
atacngactcattatagggaaagctggtacgcctgcaggtaccggtccggaattcccgggtnacccacgcgtccggtgggactgaaaggtgaagctatgaatcttgcatttccaaccaacactccctctattggatggatggatgcgtccttaactgtacaaaagcctcagcctttgacatggcacaagacttattttgatgcgcccgaaggaaatgagccgcttgctttggacatggaaggaatgggaaaaggtcagatttgggtgaacggtgagagcatcggaagatactggacagcatttgcgactggtgactgcagtcattgtagctacactggaacatataaaccgaacaaatgccaaaccggctgtggtcaacctacacaaaggtggtaccatgtgccgagagcttggttaaagccgagccaaaatctgttggtcatattcgaggagcttggtggaaacccatcaactgtctctttggtcaaaagatcagtatcaggagtttgtgctgaagtttctgaataccacccgaatatcaagaactggcaaatcgaaagctacggaaagggacagacatttcatagacccaaggttcatttgaaatgtagtccaggtcaagcaattgcatccatcaaatttgcaagctttggaactcctttaggaacctgcgggagttaccaacaaggagagtgtcacgcagctacctcatacgctatcttagagaggaagtgtgtagggaaagcgagatgcgcagtgacgatatccaacagcaatttcgggaaagacccgtgtccaaatgtgctgaaacggttgactgttgaagcagtttgtgccccagagacatctgtaagcac

SEQ ID NO: 91036 - DNA, 562 bp, Arabidopsis thaliana columbia
  unsure (1)..(562): unsure at all n locations
atgatctnnnnnnnnnnnnnnnnnnnnnnnnnnnnnnnnnnnnnnnnnnnnnnnnnnnnnnnnnnnnnnnnnnnnnnnnnnnnccacgcgtccgtacggctgcgagaagacgacagaagggggtgagaaaaaacacagagaaagagagagaaacaatggaaacggaaggaagaagacgagaagtggttgtttcatctctccaattcgcttgctccgacgatatctccaccaatgtcgccgccgctgagcgattagtcagagaagctcacgctaaaggagctaatatcattcttattcaggaattttttgaaggatattacttctgtcaagcacaaagagaagacttctttaagcgagccaagccttacaagaaccgtcctaccattgcaaggatgcagaagctggcaaaggaattgggtgtagtgatacctgttagtttctttgaggaggcaaatactgcacattacaattcgattgctataattgatgctgatggaactgacttgggaatttataggaagtctcatattcctgatggacctggttatcaagagaagtttta

SEQ ID NO: 91037 - DNA, 1015 bp, Arabidopsis thaliana columbia
cggacgcgtccgcccacgcgtccgtaatttttgccgaactcgtcttctgctgaaaaccctagatctacagatctcccgaatctcccagggagataatttgaagatggtgtctgacgctagcaagaagaaggcagctcagaagaaagctgctgccgccgctaaaagaggtggtaaagctgctgctccatccaaatccgccgctacttcttccaacggtgttgatagcttgtcaagcggtgtcgatgctcttcaaatttctgatcggacttgtaccggagttctctgttctcatcctcaatctagagatatccgaatagaatctctgtctgtgacgtttcatggttatgaccttattgttgattcaatgttggagcttaactatggaaggcgttatggtctccttgggttgaatggttgtggaaagtccactcttttaactgcaatcggacgcagagagataccgattccggatcaaatggatatctaccatttgtctcacgagattgaagctactgacatgtcttccctggaggctgttgttagctgtgatgaggagaggttgaggttagagaaagaagttgaaattcttgtacagcaggatgatggaggcggagagcgtcttcaatctatctatgagaggttagacgccatggatgcagaaaccgctgagaaacgtgctgctgaaattctgtttggacttggtttcgacaaggaaatgcaggcgaagaagacaaaagatttctctggtggttggaggatgagaattgcattggcaagagcactcttcattatgccgacaatccttttgcttgatgagccgactaatcatttagatttggaagcttgtgtgtggctagaagagagcctgaagaattttgatcgcatccttgttgtggtatcccactcacaggatttcttgaatggagtgtgtacaaacatcatccacatgcagagcaaacagctcaagtactacactggtaactttgatcagtattgccagactcgttctgaactt

SEQ ID NO: 91038 - DNA, 385 bp, Arabidopsis thaliana columbia
atcgtcttggcgcacagaagatggaactcgggcttggaattcatggagaacctggtgctgctgtggttgacgttgaacctgtggatgtggtggtgtcccatgttcttcagcaaatacttagtcctgagaccaattatgttccaattactcgtggtaacagagtggttctcatggtcaatggtttgggaggcacacctttaatggaacttatgattgctgctggaaaagcagtccctaaactgcagttggaatttggacttgccgttgatagggtgtatacaggcttttttatgacttctcttgatatggcaggattctcgatttcaatcatgaaggctgaccattcgattttagaccgattggatgctccaaccaaggctccaaa

SEQ ID NO: 91039 - DNA, 708 bp, Arabidopsis thaliana columbia
  unsure (1)..(708): unsure at all n locations
agggaaagctcggtacgcctgcaggtaccggtccggaattcccgggtcgacccacgcgtccgaaggggaggcttttgctacacggaagataatgtctttgattttcgcacagatgatggccaagatgttgaaggcttgccaactgaaggggttgagattacgtgtttccatctggatggatcacactatatggtctacacaccttcagatccacttctctttgttgctgctaaggatcaaaatgggctgctgcaaatcgctgatgatgaactcttagacgatccagctgtgatcagcgccatagacgaggaaaccgaattcaatgccttggtggaggaagaggcggctctcctggaatcactgcttggggaaagaatttgatgttttcatagggactacttagctttctttttgtattccataattgcaatgccatgtaatctaaattttctcttagaaaaactcattttgcctttccaaatctctcttgttgacaattgggttcgatcattaccgaaacagaagtccctccaaatgaacatgcacctacttgtaaaccgaaggattcttttcagttttcactaatacatcattaatatatgttatgcgtgctcaaaaaaaaaaaaaaaaaagnnnnnnnnnnnnnnnnnnnnnnnnnnnnnnnnnnnnnnnnnnnnnnnnnnnnnnnnnnnnnnnnnnnnnnnnnnn

SEQ ID NO: 91040 - DNA, 413 bp, Arabidopsis thaliana columbia
  unsure (1)..(413): unsure at all n locations
atgactcgccggacnnnnnnnnnnnnnnnnnnnnnnnnnnnnnnnnnnnnnnnnnnnnnnnnnnnnnnnnnnnnnnnnnnccacgcgtccggatgagtatcgtgatcgttcttttgagggtcatcggtgaattcacaatctttgttttttatgtgttatcttctctagtgatagattcgctatgtgtaacttggaaattggaatagtcaaatctctgtgacatataatgctgataagagtgttcaatgaatcaagtatttatcaggttttagatgatagagttcgaatctaactcatgtagtgacttggttatatgatggttagaaattaacaatgaagtttcctgtgtattgatagnnnnnnnnnnnnnnnnnnnnnnnnnnnnnnnnnnnnnnnnnnnnnnnnnnnnnnnn

SEQ ID NO: 91041 - DNA, 429 bp, Arabidopsis thaliana columbia
agatcgatttctctctatatcggagccgtcatgaatcatcgtcggagctcgatcgtactattgatcctctcaaggttatctcccgtgacacgctcgtgtacgatacgagctactttctgggcacacgaaatgcatctcagaggagattcacgcaaacgcaatgaccatcggaaaatacagcattataaaccctcacgaggatcatcctcttccttcttcccataaagtcaccgtcagggtcacatcgccacaagggacggcttatcacgaatcggacggagtagaatcgggacaattctcgtttgtagctgtggaaacaggggattacataagttgcttctccgccgtcgatcacaaaccagagacgacgctgatcattgactttgattggaggacgggtattcataccaaggattggtcgaatgtggc

SEQ ID NO: 91042 - DNA, 919 bp, Arabidopsis thaliana columbia
  unsure (1)..(919): unsure at all n locations
nnnnnnnnnnnnnnnnnnnnnnnnnnnnnnnnnnnnnnnncgcctgcaggtaccggtccggaattcccgggttgacccacgcgtccagctgttcgcaccactaccttctctccgtcagttgaaaccgaaacacatctctatttccgccgcagcgccgaagaaaaaatcggagactgtcacggcgccgacaccggcagcgaagaagaattcgagcgtggaggaggaaacagaagaggaagtagaggaagatatgccgtggattcaagagaaggcgttagacctagtcgagttcactggatcggtgagtcaggcgattcctggtcctcgagttggaagtagcaaattgccgtggatgctcgccgttccgttagcttacgccggcgtcactttcgtcactgctttcgtcaaaaccggtcagaagttcccttctcctaaagctcagcgcaagaaactggtgaatcagaatgctatgctttgcagatctatagatgaggcattaaggaaagctggaacagtgcatagctctgagcttaaggcacttgaacaaaagacagagtttaacatggaggagatattgcggaaatacattcgttatgcgttgaatgagaaaccgtttaatcccgaccttgttgctgatctcattcatctaagaaaagcttctggtttgaatgattctcagattcctgagattttaaatgagatctctcgtcgtattgtcaaggaaaaaggtccggtagtgatgaaaatgcaaggctttaccgaaaaaggattcaagagaaaactcgccgtgcaagcgctttttggaaagatttactatctttctgagcttcctgacttctgctcaaaagacaactccttaatcgtcaaggaaatattcggcgttacagatgaagacgcagagaaagctgcgatacacgct

SEQ ID NO: 91043 - DNA, 540 bp, Arabidopsis thaliana columbia
caaaaaatccagattttgtgtttagccgacgagaattgggaaaaatgtcgtgtacgcatgatcacaactgcgaagatcatgagtgttcttccgattggtctctctacaaacacattgatctctccaaggtttcagctctgaatgaatctgtttcgggaagtgcaaaatcagtcttcaaagcgtgggaacagcgattacactcttctggggagcatttggagagcaatgagggagaccctgaattgcttgtttttgtaccatttacatcagacgtcaagatcaagagcatatcaattgttggtggccctgaaggaacaagtccttctaagttgagagtgtttatcaatcgtgaagggattgacttctccgatgctgagagtatgcaagccgttcaggaatgggagttagctgaaaatttgcaaggagtcttagaataccagaccaggtattcaaagttccagagtgttggaaacatcaccctgcatttccctgagagttttggaggtgacacaacccaaatacgttatatcgggttcaaag

SEQ ID NO: 91044 - DNA, 631 bp, Arabidopsis thaliana columbia
cacacgcgtccgatctttttttactttcctcagagctctctcctctccgcaacttccaccaccaccaaatcggaactctcggcgttctactccgtctccggcgttacctccgtcgatttcatcttctcagttggaaggagtgaattgagaaggtcgggccaatatggcgaacttacaagtttctgggatactcgaaaagtttcagatgacgggtaaagataaagattacagatacatggcaacctctgatttgcttaatgagttgaataaggattcctttaaaagcgacctggacttggcggtgagattgtcgagtatcatattgcaacagctcgatgatgtggctggtgatgtttctggattggctgttaaatgtcttgctccattggtgaagaaggtcggagaagaacgaattgttgaaatgaccaacaagttatgtgataaactgctgcatgggaaagaccagcatcgtgataccgtaagcatagctctcaggactgctgtcgctcaaattgctcctacgcttgctccatctattcttgttactctaacaccacaaatgataggaggaataagtggccaggcgatgagctcagggatcaagtgtgatgtcttgagatcatgtgtgatg

SEQ ID NO: 91045 - DNA, 893 bp, Arabidopsis thaliana columbia
  unsure (1)..(893): unsure at all n locations
nnnnnnnnnnnnnnnnnnnnnnnnnnnnnnnnnnnnnnnnnnnnnncctgcaggtaccggtccggaattcccgggcccccccgcccgcaatactctcaagtctaaagaagaataaaaaaaatggatgaagaagttgagaacaaagtgatactccatggatcattcgcgagtccttacagcaaaaggattgagttagccctaaggcttaaatctataccttaccaattcgtgcaagaagatctccagaacaagagccaaaccctgctccggtataacccggttcacaagaagatcccggttcttgtccacaacgaagacccttatagaagatctaaagtccggttttgggctaactacatccaattacatctttacgatttggtgataaaagtggtgaaaagcgaaggagaagagcaaaagaaagctctcacagaagtaaaggagaagctgagcgttatagagaaagaagggcttaaggagattttctctgacactgatggtgaaccaactgtgacgaacgagaccatgagcctcgtagacattgtgatgtgcactttgcttagcccttacaaggcacacgaagaagttttgggtctgaaaattattgacccagagatagttcctggtgtctacgggtggatcaatgctataaacgaaaccagcgtggtcaaagatctaagtcctccttatgaacaaatcctagagattcttcgggctttcagacagatgtctctctctcccgttcttgaaacttatcagtcataactcttaagttttggattgcttgatccaaagttataaaattatgtgctctgttttcatnnnnnnnnnnnnnnnnnnnnnnnnnnnnnnnnnnnnnnnnnnnnnnnnnnnnnnnnnnnnnnnnnnnnnnn

SEQ ID NO: 91046 - DNA, 655 bp, Arabidopsis thaliana columbia
gcaacaatcccttttaaacacaagaaccaactcaatacgcatcacaaagaaccctaaattcctggaagatctcaaaaggaaaattcaaaaccaaagcttcaagcaatcatcaagcaaaggaaaagctcaaattttgggtcttttatatatttatttcttaaagttacaatctttttgattgtggtttcagtgtacgaacacgcaagaactcgcgtgaaaaaattgtatccaagcttcgtgaaaggagtctctctgtatttagtggcgttttgttctgttgttatttctgaaatattgaagcttttgatttgggtttcaagagagcagagatgtgtagtttgtcggcgattatgttgttaccaacgaagctgaaaccagcttattcagacaaacggagtaacagtagcagcagcagctcactcttcttcaacaatagaagatccaagaagaagaaccaatcgattgttcccgttgcaaggttgtttggaccggcgattttcgaatcatccaaattgaaagtactcttcttaggggttgatgagaagaagcatccttcaacgctccctaggacttacacactcactcacagtgacattacagctaaactaaccttagctatttctcaatccataaacaactctcagttgcaaggatg

SEQ ID NO: 91047 - DNA, 824 bp, Arabidopsis thaliana columbia
  unsure (1)..(824): unsure at all n locations
nnnnnnnnnnnnnnnnnnnatacgactcaccttaggggaagcacgnacgcctgcaggtaccggtccggaattcccgggtcgacccacgcgtccgcccacgcgtccgcccacgcgtccgcaaaatcttaaaaacaacaacaaaaatgaaaagtctccactttttagctcccaattcaacgattatcaatctgaagcaacaatcttatacaaaaaccaagttccagttgcatcgtagcaacagaagaactctatcgataaactgcgtaaacagtggcggtgatgaagagaagattactcagccgttggatggagtggagataagattcaaaagaggatccagaaggaaaatgagggaagagggttcaggagaaggaggaggacaaagcgggaagaaaaaagagactgttcaaaagccatgggaagagatgacattgaatgagaaggcattggagctttatgttggagagaaaggtttgttgttttggctaaacaaattggcttacgcgtcgatatacattgtcattggaggttggatttttttccggtttgttggaccggcgtttaatctttatcaactcgatacaccgcctcttgatcctaagaacatcttaaagggttaagaaatgctttgtagctgtgtctgcattctctgttccaaaacattttgaggcttatatattcaagttagtttcgagtaatgtgtagccatgtctcactagattaagatacacaagagaacaacactcttcatgaattttcaagattgttctgttggagttatgtcctgatcaaggatatctcgtgtagtcttgcccctgacatgg

SEQ ID NO: 91048 - DNA, 514 bp, Arabidopsis thaliana columbia
cgcctgcaggtaccggtccggaattcccggttcgacccacgcgtacgatcagattgaaataccacgagcttttgtttgcgctgagggaaaagtctttgatgtctcagaatgggctatttgtcagggaatggcgtgtagaccaaatacacataggccaagtttccatgtgaacatggtcggtttagaaaaggcaacacagagatcaaagtcgagcaggttcccgtgggatcttgatgtggagatgatggacgaggatgaggaagagtttgagttatggcttcaacaagctctagcttccggtctattctgtgaaacatcaaaacgcagaaaaagctggagtcctttcaagttaaccaagaaacaatcccgaagaacatcgacttgaccaaaagaagacatcaacaaggatggcaagatcaacaacaatggctgaatggcttgttctttccaacaatggaaaatgggcgaagataagaacgaagagcataaaaaggaaacaatctttaaggtgata

SEQ ID NO: 91049 - DNA, 885 bp, Arabidopsis thaliana columbia
taaaagaaattggaaattgttgtagtctgccctttttttaaaaaaagtttattgttaaaaggagagggacccggtaaaaggggatttccccttgggttgccccacaggtaagaaggcccaggggtccgaagggggtaatttctcaaccaaaaaggggtggaagggttgaccaaaagggttttggtttcgaaaaccattaaatttaaacccccgcctttttttcgttgaggaaaaatttctgatttcaaaatgggcttttttcaggaaagggggtagcccaaaaccaataggccaggtttccttgtgaaaatgtcgggttaaaaaggccccccaaagtctaagttgagcaggtttccggtggggtcttaattggaaaataatggccagggataaggaaaagttttagttaggggttaaacaagctttaggttccggtttattctgtgaaacatcaaaagccagaaaaaggtggagtcttttccagttaaccaagaaaccaatcccgaaaaaacatggacttggccaaaagaagacattccaagggatggcaagatcaccccaatgggttgaatggcttggtctttccaccaatggaaaatggggaagataagaccgaagagcatataaaggaaccaatctctaaggtgataatgaagaagtaatgttctatgggagcttgaaacccatatgtcccctcgatcacttgttggatcccttctctgtaaatagaatccgtggatcctgtgcactgtgatgttgttatggtttttctctgagaaaccctaaactatgtaatgtgaaaggtacaaagaagcccagttacccagaaaaaaaaaaaaaaaagggcggccgctctagaggatccaagcttacgtacgcgtgcat

SEQ ID NO: 91050 - DNA, 492 bp, Arabidopsis thaliana columbia
  unsure (1)..(492): unsure at all n locations
gatgtctgggcaacacgtggtggattagagaaaattgattggagcaaagctccattttatgcttattacaaagatttcgacatcgaaggttgtcctgttcctggaccaaccttttgtccatcgaaccctcataattggtgggaaggttatgcctatcagtctcttaacgccgttgaagctcgacgttaccggtgggttagagtaaaccatatggtttatgattattgtactgaccggtctaggtttcctgtcccaccacccgagtgtcgtgcttgaaaataattgcatacgtacgttgcaatgatcatgtttcgtcttgtacgagattttatatataaattgtgggaaaatgtggattgtattgtcctcttacgcaattgtgcagacgtacgtgagtgtgtatagatataattgtgatttgtggttatttgaaatttttatcaacatagatgaattctgtgnnnnnnnnnnnnnnnnnnnnnnnnnnnnnnn

SEQ ID NO: 91051 - DNA, 478 bp, Arabidopsis thaliana columbia
ttttaccccaagctctaatcagaccccctatagggaaagctggtccgcctgcaggtccggttccggaattcccgggtcgacccacgcgtccggcagattgttgctactgccgctcctcctgaacaatctgatgaacaacaacctaatgtcaatggtgaagctcaggttttacctgatcagtcagtagaaccaaaacctgaggaatcatgatccttataccaagtctagttgaagaaaagtggatgagaattgagaactattgtctccacagatgttgcgctttgcttttctgtctttcaaaagcattatatgctgtttgttgtacttaattctagaggctttagggaagtgattcttgacatttttgtatgtttatgttttgggcaaaggttttttaaatcgaagcaaagccagcagttccatacaaaagcataacccaagggcggacctctagaggatccaagcttacgtacgcgtg

SEQ ID NO: 91052 - DNA, 347 bp, Arabidopsis thaliana columbia
gtggatttggtaagggcggaggatttggcggtggaggcttcggaggtggtggcggaggtggaggcggaggaggtggcggaatcggacaccactaaacaaaaacacatgaagaagttgcattgagtgcatgtctcacgtcacgtacaacatggtttacaagtttgagagtgttgttaccaaatatagtactagttttatctttttatgtactttgtctctatttgaattactagctatgagttttgttagacgtacgcactctaataatattcattttatcatgtaaaacgctaggactgtatttggttgtaagtcaatgttcttaaaaaaatattgatgaagcaatg

SEQ ID NO: 91053 - DNA, 822 bp, Arabidopsis thaliana columbia
cgtcggtcacgctgttccacgaagcttcgctgtcaacaccatcatcggaacttaccggagttcgttacgaaacacaaagatgaacgctgagaataatcagactactactactcactcgaaagtgatctcacatgtattctgcactggtactgctaagctaggctctgttgggccacccattggtcttgttgatattggcgtcagcgaagttgcttacatcttccgagtctctcttcctggcattgagaaaaatcaagataagatcaaatgtgaaattcagagggaggggagagtttgcatccaaggagttatacctgagattgcgattccaagtgacacgggatgcttatacagaatgcaagtgcaacagctctgtccgcctggtccattctcaatcacgtttaatcttccgggacaagtggatcctcgcttgttttctcctaattttagatctgatgggatctttgaagtcgtcgtagtcaagctcggagtgcgcatcccaacttcatagttccggttttcattcacccacgatatcctccatgcttaatcagcatttagttgcagtggccgacctgtaagtctttggtcggatttagcagaggttagaccctccacaatagttctagtttcttttgtgtagaaccatgtccaatgatccggttccttaagatgttcttagactctgaaaaaaagcaccttgatgtgaaacggaactgttttaaccaagattttggcaatcacatcttactgctaaaaaaaaaaaaagacaaaccccaagggcgaaagctctagaggatccaagcttacgtacgcgtgcag

SEQ ID NO: 91054 - DNA, 430 bp, Arabidopsis thaliana columbia
agcacacgcgtccggccgagtggtgcgggaaggagttacggggctgcataggggccatcttccaagaaagcttatagtcaggagcagcatggtttggactggaaggaagacgcgggtgtacgctcagttccccctcttgctcctcctgaaaattatgctataaaggaatctgaatctcctgcaaacattgatagaatgtcttcctggaaaaaacttccatctccagcactgaaaactgtgaaagaagcgccagcgtcagaagagcagaatgatagcaaagttgaacctccaaatatagttgggagtcgacaaggtacggatgatgccgctgttgctattctcaactttcctccagcaaaagattctcatgaacactcctccaagcatcggcacaatatttcttggggttactggggggaacaacccctta

SEQ ID NO: 91055 - DNA, 1080 bp, Arabidopsis thaliana columbia
  unsure (1)..(1080): unsure at all n locations
tgactaatgactggagggtttctgtctatgcggcaaggggctggtgctgcttcgagatcagctatttttggaggggttttgcttgctttgattgaaggagctgggatcatgttgaacaaggtactggctcagcctcggaatatggtgatggaggaccctggaatgcaaggaatgcctggnatgcagggaatgcagggaatgcctgggatgcccggaatgcaaggaatgcctgggatgcaaggaatgcagatggggcagatgcagagtcaagcacagataaggtcagagagtcaaaaccagaatacagcttcatcatcatcatcatcatcatggtttggagggctttttgataagaaaaaggaggaggtgcaaccaggcagtgaaagtaaaacagaggtgttggagagttttgatgctcctccggtgccatcatttgagttcaagtaagctttgtggacatctatttctctgtcatccaatggtttacctactgcctcaactatcaattccatttcgtcgtctttttgtctatcctaagttctcagctgaactcttcttgttcatggaagaatcagcatgctatgttctctctcttttcacttatggttatgtttcaatgagcttatgcactcaatctaggaatattctctttgtgaaaccattccacagatattgttggttcttaaataatgtagttataaaactccgacgaacgaaaaatgaagtcattagcttcgccgccgtgtctccgcctgataccgacggcacaccgtcagctcaattcgcgtcaatcttcctccgcctgttatatacacggtggctcttctgtgaacaaatccaataatctctcattctcctcatccacatccggatttgcgtcaccactagctgtagagaaggaattacgctcttcattcgtacagacggctgctgttcgccatgttacggggtctcttatcagaggcgaaggtcttagattcgccatcgtggtagctcgtttcaatgaggttgtgactaagttgcttttggaaggagcgattgagactttcaagaagtattcagtcagagaagaagacattg

SEQ ID NO: 91056 - DNA, 322 bp, Arabidopsis thaliana columbia
tcgcggacttttgggcggacgtttgggcttcaacagaataggcaaataatgggggcccttcccaacaggataagcttccacgtgatggcggcgcctcaaaacagaagcgcttgggttataagcagaagcaaaatattatatttgagaaaaaaccgacagggagctctgttgctactgcagaggtgtttgatgttgtcccgtctcctgaggttgttaatgaaggtgtctcaagcaataactcagacatgccagcgacgtcaaccgtttcagctgagtcaactttcccgaaaagaaaaaataacaggaatggtaagaaaaaaca

SEQ ID NO: 91057 - DNA, 527 bp, Arabidopsis thaliana columbia
cggacgcgtgggaaaaaaaaacagagcacaatgactagatttgcggtattgccactctctgttctccttctcgttctcttgttcctctgcactgagtcgttggctaagtcggaggagtctgaagaatacgacgtcgctgtgccttcatgttgcgggttttcgtctcctcttctgattaagaaagatcaatggaaaccaatcttcgagacgaagtttggacagatttcaaccgttcaaatcggcaatggatgcggtggaatgggaccttacaagatacattccataacgttggagccaaacacaattttgctccctcttcttcttcattccgacatggtcttcttcgttgactctggaagtgggattctgaattgggttgacgaggaagcgaagagtactgagattagactaggggacgtttacaggctacgtcccggttcggttttctacttacagagcaaaccggtggatatcttccttggaaccaaacttaagctttacgcaatcttctccaacaacgaggagtg

SEQ ID NO: 91058 - DNA, 529 bp, Arabidopsis thaliana columbia
  unsure (1)..(529): unsure at all n locations
cagctctcatacgactcactatagggaagctggtcgcctgcagtaccggtcggaatcccgggtcgaccacgcgtncggtctctctaaaccttggcttccttcgacttcttctgttttctccggcaatgtcgttaaaactcaacactccttttccaattttcgcgccatctctatttcctaatcataacccaagagcacccagcgagatccgattctctagatggggcaacgctaatgccgaacggttcgagcagcgtcgccggagccaagaagaactcgaggctgagatccgtcgggaccgccgattcgacgccgctactaaaatcgtccatacccatgattccgaagcagcagctgctgagcctaaaacgtcaccgtttagatcaagaggcactccttcacttccctctgctcgttcgattccgggtcgaagatccaaatactccaaacccgattcaggacccaatagacccaagaacaaacctagagtacccgattcgccgccgcaactagacgctaagcctgaggt

SEQ ID NO: 91059 - DNA, 427 bp, Arabidopsis thaliana columbia
gggaaagctggtacgcctgcaggtaccggtccggaattcccgggtctgacccacgcgtccgagggtattggaggatttcactgagcttgcaagagagaacactgagaaggacctcgagacttgtgggactctcgctgcctttcttgaaagaggaattttttatgtaaccactctgataatacctaagcaagaatcaacttctaattcttgtcaggctatgaatgaagtggaagtgttttccattcaaaacgaaagagaactctatcccgtaggatggattcatactcatccttctcagggttgtttcatgtcatctgtagatctgcatacacattattcgtatcaggtaatggtgccagaggcttttggcattcggcggagctcccactgatagctctaagaattaccggatatttaagcttaccgg

SEQ ID NO: 91060 - DNA, 481 bp, Arabidopsis thaliana columbia
gagagtggaaacatatccatggatcaacaagaatgatcctgatattggtggagaatgggatttcgaggaatggaaacgattacacatgaagacattcatagaggcgttcacggagatcatggaaaggaagaggaatccacaaggaaagggtagagatgatttcagcaatgtactcaaagaagaagatcccgcgaatgctccatcgtcttgaatggatttgtgtcgagtatgttctatatatcacctttgtgtctaaactccatattaaataaaaaaagctggagagtctagctaggttattgtggagactaatgacaagaatgtttttgtcatgttgtattgtaagatttgagttatatatcatgtggattgtattattgtgttatacaagagtctttaagagattttggcatcttgaaaaaaaaaataaaaaaacccaaagggcggacgctctagaggatccaagcttacgtacgcgtgc

SEQ ID NO: 91061 - DNA, 720 bp, Arabidopsis thaliana columbia
gttgaaaaaaaaaacagagtagagattgataaaaaaaaaatgagtagctccgattctcctcagcttcacaatatcttcgtctatggtagctttcaagagcctgacatcatccatgtcatgcttaatcgtattcctgagattgtctctgcaacacttcctggcttgtacgttacctctctctctcgatcttgatcttgatctcgaatgataattctctctgttttttagatctaaggtttaatgccgattttgggttgttttcagtaagagatttaggcttaaaggacgtttgtatccatgtattatcccctctgagaatggagaagttcatggaaaggtactaatgggattgactaatgatgaacttgagaatgtagattgggttgaaggaaacgaatatgaaagagtgtttgttgaagtcttaagataagacatttttccaattatgcgcactctaaacatttatttagtacagcacgtgtgatcactttttttgctggtggacaactattttatcttttacaaacgttttcttttttcaacgtagtttgattccttattggttagcttattatatgagattgtacttaatcaaatttttttacatttatcattcttttttattcaatgtttattttgttaggtaataatttttttttttcactttattttattattctaattaatattttttttttttattctgaatttctttctctt

SEQ ID NO: 91062 - DNA, 677 bp, Arabidopsis thaliana columbia
caagaagaaaaaaaaaaacagagtagagattgataaaaaaaaaatgagtagctccgattctcctcagcttcacaatatcttcgtctatggtagctttcaagagcctgacatcatccatgtcatgcttaatcgtattcctgagattgtctctgcaacacttcctggctttaagagatttaggcttaaaggacgtttgtatccatgtattatcccctctgagaatggagaagttcatggaaaggtactaatgggattgactaatgatgaacttgagaatgtagattgggttgaaggaaacgaatatgaaagagtgtttgttgaagttgtaagaaaagacaattctgagaagatgagagtggaaacatatccatggatcaacaagaatgatcctgatattggtggagaatgggatttcgaggaatggaaacgattacacatgaagacattcatagagactttcaagaaaatcatggaatgtaagaagaaacctcagggacagggaaatgatgatattagccatgtcctacgcggagatcaataggataagaccccatcgtcttggatggacttgtgtttgagtatgttctaaaaataaccacctttgttaaattatcaacaaccaaaaaccttcgtttttaaaaatctaaaataaataaaacgtagagagtgttgtattg

SEQ ID NO: 91063 - DNA, 426 bp, Arabidopsis thaliana columbia
gaaaatgaatttcagattcaaacttgttcatcgaaattttgcgtgaagattcgaatcgagaagtccgtggaagaggaagaagaagaagatgtctgtgcaagagtatttagacaagcatatgctttctcggaaaatcgaagacgccgttaatgccgccgtaagggctaaaacctcagatcccgttctcttcatcgctaatcatctgaagaaagctgtatcatctgtgataacgaaggttaaagcacgacagatccttgacagcagaggaattccaacagttgaagttgatctgcacacgaacaaaggcgtttttcgtgcttctgttcccagtggtgattcttctggaacgtatgaagctattgagctacgtgatggagaacaaggaatgtatcttggaaacagtgtggctaaagctgttaagaacat

SEQ ID NO: 91064 - DNA, 1726 bp, Arabidopsis thaliana columbia
gacactatagaatagctatgacgtcgcatgcacgcgtacgtaagctcggaattcggctcgagcaatgataagcccacccacttcgattaccaactccgaccgccagagacagcgagtttcagatcaaagatgtcggcgacgcttacaggatcgggaactgctttggggttttcgtgttcctcgaagatctcgaaaagagtttcttcttcaccagcttctaaccgatgctgcatcaagatgtctgtttccgtcgacgagaagaagaaaagtttcagtcttcagaaatctgaggaagctttcaatgctgctaagaatctaatgcctggaggtgtgaattcccctgttcgagcattcaaatccgttggtggacaacctgttttgattgattctgttaaaggctcaaaaatgtgggacattgatggaaatgagtatattgactacgttggctcttggggacctgctattattggccatgctgatgacgaggttcttgcggctctagctgagacgatgaagaaaggaacaagctttggtgctccttgtctcttggagaatgttttagctgagatggttatatcagctgttcccagcattgaaatggttcggtttgttaattctggtactgaagcgtgtatgggtgtgcttcgtcttgccagagctttcactaacaaagagaagttcattaagtttgaagggtgttatcacggtcatgctaacgccttccttgttaaagctggtagtggtgttgccactttggggctaccggactctccaggtgtccctaaagcagctacttcagatactttaacagctccgtacaatgatcttgaagctgttgagaagctctttgctgcgcataaaggggagatttctgcggtaattctcgaacctgttgttggtaactccggattcatccctcctactccggaattcatcaacggtttacgccagcttactaaagacaatggtgttcttctcatcttcgatgaagtcatgactggatttcgtctagcctatggtggagcccaagaatactttggaatcacgcctgatctaactactcttggtaaaattattggtgggggtcttcccgtgggagcatacggtggtagacgtgatattatggagatggttgctcccgctggaccaatgtaccaagccgggactctaagtggtaatccgctggcaatgactgcagggattcacacgctgaagcggctaaagcaggcaggaacatatgagtatttagacaagatcacgaaggaactaaccaacggaatcttagaagccggaaagaaaaccgggcatccaatgtgcgggggttacataagcggtatgtttggattctttttcgcagaaggaccggtttacaactttgcagactcaaagaagagcgacacagagaagtttggtaggtttttcaggggaatgttggaagaaggtgtttactttgcaccgtctcagtttgaggccgggtttacgagcttggctcacactcccgaggatatacagttaacaattgctgcggctgagagggtactgagtaggatctagaatgttcccaaccctgagtctagtttcacaatcttcatgttttggggacgatgtgtatggtttgatgagcggatggaataattcttgtgtagtgagttgaattttgtttcatcagtagagcttgagattttttgtattttaagatcatctgttaatgtaatggttttatgtt

SEQ ID NO: 91065 - DNA, 572 bp, Arabidopsis thaliana columbia
cgcctgcaggtaccggtccggaattcccggctcgacccacgcggccagacccgcgtaccacagcttgacaatcatcggaatcagcttattcaggtacgtgaatgtcgaaagcccaaagtttttttaatatgtcatcttcttttgttgatcatcttcaaaatcctgcagttggagctagtgttaagttctggaacagtttgcttatcgatgtactctcttgtcgctggaattttcgggatgaacattccatacacatggaacgacggtcatggatacatgttcaaatacgtggtgggcttgacggggacactttgtgtagtcgtgtttgtgatcataatgtcgtacgctaggtacaaaggacttgtgggatcttgatggctgaatttgggttagatggagagattgtgaaggggcattgggcagatcttgttttcgattattatacttgtggtcgttctgagttttgaacgagcttcacaattattttagctgtcgcatcataaaatttaatcgtacatattggaataaaaaacccagggcaaccgctctagaggatcccagcttacgtacgc

SEQ ID NO: 91066 - DNA, 499 bp, Arabidopsis thaliana columbia
ggggaagaacgtacgcctgcaggtaccggtccggaattcccgggtcgacccacgcgtccggtttttcacagtagaagtagaagatggagcagctagtgagcatgggtttctccagcgatttggccgccgaggctttaacggccaccggcggagattccatccagaaagccaccgactggattctctcccaccgttcttcccctcaatccacggccacgttacagcccaaactcgaccgcttcctccgtctccatcccaaagccctagcccccgccatgggtgacgattccagcaagcgccccaatcccaaaacccaaatccacgtcgcggctgatgattccaacaagcgtcacaagctctcatcatccagccaccgccaacaccagccattgtcggagcgtatgcgtcctcgcactctagatgacgttgtaggtcaagaccatctcctctctcccagctctctcctccggtccggccggggaatacaatcgcctccctt

SEQ ID NO: 91067 - DNA, 503 bp, Arabidopsis thaliana columbia
cgcctgcaggtaccggtccggaattcccgggtctgacccacgcgtccgaaaccctaactattaaaaagaatcgaaaaaatcaaagttctgaacttctgatcaatttcgatatgttatcgttaatcatcagaaggtctcgaagcagattcatcatccatggaatcaaaatttcttgtaactctctgtcggctgtagattcaagttcttcagttttggtttctagaagaaccttcagttcaacacctgcgttaagctattttggattcaattatggaaaaatctctaatttgaatcagagatttggtaattacgcttattctgggagtagtttcgcttccagtactcgatcattgagctcagaagctgtagctgtggcagcgacttgtgatggacttactgtggaacgaattatagctaatcagtggccgattgtagatgagaatgaaggtgattggaagagtcacgctgcagcaattgcgcagtctattcaagtcatcaagaga

SEQ ID NO: 91068 - DNA, 419 bp, Arabidopsis thaliana columbia
acgcgtccgaactatctctctccgcctccttttaagaccaaatctctctctacctctatctctctctccgccattaccagagctcaacgagctctcactttctttacgcacacttgttggaacgaaatatattcatagagaagaagaatctcgaaactcttgaatctaaaacaactcggagactctgttttccctttccggagatcagatcggatcaagatgcagacaaccaacggctcagattcgacgttggcaacttccggagccacaccgccgaatcaacaaacccctcctccacctcagcagtggcagcagcagcaacagcaacagcaacagtggatggctgccatgcaatatccaccagcggcggcgatgatgatgatgcagcagcaacagatgctgatgtatcctcatcaata

SEQ ID NO: 91069 - DNA, 468 bp, Arabidopsis thaliana columbia
gaaaaaataaaaaaaataatgggtcatcgaacaagaatgatccttgtcctaaccctagttgtaatgtccatatggggttcggacgcatcagcaatgcaaaagacgaaattcgacgccccacttttgactgaaaaaatcgcgacaaatagatcgataattgtagatatcgaaggcaaaggagactacacttcggttcagaaagccatcgatgctgtccctgttggtaactctaattggattattgtccatgtccgtaaaggaatctacaaggagagagtgcacattccggagaacaagccgttcatattcatgaggggtaatggaaaaggaaaaacggtgatcgaatcttcgcaaagttcggtcgacaatgttgcttcagctactttcaaagtcgaggctaatcactatgtcgcttttggtatcagcatccgaaatgatgcacctgtcggaatggcattcacatctgag

SEQ ID NO: 91070 - DNA, 503 bp, Arabidopsis thaliana columbia
  unsure (1)..(503): unsure at all n locations
aacggtccccngggattgccccgtgatcccntccaggaatgagtgngcaccgctttggatgggnncatatgtccgtattggacccgatcccttcagagatatgccncgatncgtctaaagaagccatgactctgattgagaagcagactcaggcgctctttggacgaccggatataaggatactcgaggatggaaagctcgatacttctaacgacgaggttctgtctctgagtgtctctggacttgcgatgttggttttggaagctgtggcttttgggtctttcttatgggattcagagagttacgttgaatccaaataccatttcctcaaggcttgagtttagtcctccttgacatttgtacctttttgagagtagtgaatgtaaatgttaaatctctcatgtgaaattggtagcaactcctattcgtaaaatgtaataaacttcacttcaatactttaggctttaatcnnnnnnnnnnnnnnnnnnnnnnnnnnnnnnnnn

SEQ ID NO: 91071 - DNA, 475 bp, Arabidopsis thaliana columbia
ccacgcgtccgctctatctctgtccaaataagaacaaaaaaagacaagattcagaaaaaaatggaggtttcgatgagaaagccttatttcatagaagaagaagacgatggttttgtttctttatctgagatggaagctggagtttcaagtccttcttgttacaactatcctcagagttattattataaccatcatcatcatcagtactctgtttcatctcccagatctggaaaatttcatgattttagattcgacaatagctattacggttatggacagcctcatttcttggactcttgcttcctctgcaagaaacgtcttggtgataacagagacatcttcatgtacagaggagacacaccgttctgtagtgaagagtgtagagaagaacagatagaaagagacgaagcaaaagagaagaaacagaggctgtctacatctgtgaaagctatgagaagaaatgaaaagcgaagct

SEQ ID NO: 91072 - DNA, 396 bp, Arabidopsis thaliana columbia
gaatccttctaattgcgaaaaaacaagagaatcgagtaatgcaacaacaaggtgaaccatcggttttgagtttgagacccggcggtggcggcggcaaaagcaggcttttcgtccctcgctttagctcctcttcctcttttgatcttaccaatggcggctccgaagaaaccccttttcccgtcaagagagaaaattctggtgaacgtgtgaggttttcccgagaagagatacttcagcacagagagtctgttcaagtctctgatgaaattcttagacgctgtaaggaaatcgcagttgagctttttggcgaagagcagagttgggggaatcatgcagccgagagtaaaataacaaatcatactcagcatcgtcataccgagactgataaccgtgact

SEQ ID NO: 91073 - DNA, 519 bp, Arabidopsis thaliana columbia
  unsure (1)..(519): unsure at all n locations
gatcgagcctctcatcaaatacgtcatttaccaggacgagagagcaaagcagtggagagttcaagcagtggcggtcgcaccagacaggtttgagaaccgaaagcctctccctccgccctcgagaggccttagggatgaggaactctcgaaagctgctgagattcccggttgtgtctttgtccacatgagtggctttatcggcggaaaccaatcctatgacggcgctctatccatggctcaaaccgcactcactctctgagcatcaaaagaatcatttacccattactcatagagagagaccgagagttttgatattgccattatcttctgcaatttctgtttcattgagtcttctcgtgacaaaaaatttaagaactagatttgtagtctcaagctgattagatcatattatatgtttgcttcctaaaaaaaaaaaaaaccaaagnnnnnnnnnnnnnnnnnnnnnnnnnnnnnnnnnnnnnnnnnnnnnnnnnnnnnnnnnnnnnnnnnnnnnnnnnn

SEQ ID NO: 91074 - DNA, 494 bp, Arabidopsis thaliana columbia
gagaagatgacgatcatggcccagaaagatgataaaacaagaaggctcctgtgaaaagaaagaagtcaaagaaagagacacccagtagagaaatagtctttgagggtgaacccgatgaggagaatgaagacgagattgagaaggctccggtcaaaccaaaaaagtcaaagaaagagcaacgcagtagagaaaaagtctctgaaggtgaagagaaagacgagctaacaagcaagaagacacgagagctcaagaagaagcccaagatagtggccacaccatcaagaagactaggtttaagttttgaagacccattgttaacttggctctgatctgagctacagttttgaactaaacactcgcacaaaagaaacagagtttgtgtgttatctataaagactagttttgataaaacgatgcctcttctcaaaaaaaaaaacccaaagggcgacagctctagaggatccaagcttacgtacgcgtgcagttctccccat

SEQ ID NO: 91075 - DNA, 633 bp, Arabidopsis thaliana columbia
  unsure (1)..(633): unsure at all n locations
cgcctgcaggtaccggtccggaattcccggttcgacccacgcgtccgcggacgcgtgggcctagttctcgtttcaccaacttaaatctgaatgcatctcatcccggaggcatcaaacaagaagttagaagacgacagtcacagcatggatggcttcacagactggatcctaatgaaccggtaatgctattcccaaaaccccttggttcccgataaactggcagctgcagggattgttcctccaacaccggattcatcaccaggtcaacctccaagtcggtttcaggggaggattgggcgtggtggccgaattattttcgatagatggaatccgttgatgcaatctcacattaattgtggaaactcttattacattgctccaaatcaccggtctaccaacttcgattgagatattttcacaatcttgctttgtaaagaattttccatcaccaatggtgtatgcaataacgattctcagctaaataagttttagcactttggaactacctgggtagtgtgtggatttctgtttatttgcggttaagaaaaaaaaaacaaaaagtccnnnnnnnnnnnnnnnnnnnnnnnnnnnnnnnnnnnnnnnnnnnnnnnnnnnnnnnnnnnnnnnnnnnnn

SEQ ID NO: 91076 - DNA, 533 bp, Arabidopsis thaliana columbia
  unsure (1)..(533): unsure at all n locations
nnnnnnnnnnnnnnnnnnnnnnnnnnnnnnnnnnnnnnnnnnnnnnnnnnnnnnnnnnnnnnnnnnnnnnnnnnnnnnnnnnnccacgcgtccgcccacgcgtccgcccacgcgtccgcccacgcgtccgaaccaaaatccgatttccccatacttagaggtcaagagaaataaaatatttttccggcgacgcaatggcttcttactccggttgtttcttcgtcgttactttggcagttctgtcacaatttctcttagccccagcttcagccttggtcaacagggaatacatcgattccaattgccaaagagtcaaaaacaaagccttctgcatccaaactttgaccacctatcctcctgccgctgctgccaccggcctgttaccattggctgaggccgtggttggccttgcaatatcccactgcgagaagacagctggtttcgcagcagagacagccaaaaaggacgcaacattgaagactcagttcaacgagtgccacgacgcctatgttggtattttggcgtctctaaag

SEQ ID NO: 91077 - DNA, 497 bp, Arabidopsis thaliana columbia
caggtaccgggccggaattcccgggtttacccacgcgggccgaggtcgatcctgaggatgagaacattgatttcctgaggatgtgccaaagcataaaggagaaagaccctaactttaagttcgagtttactttggatgcaaatgataagttagaaaatattgcctggtcgtatgcttcttccattcagtcatatgaactctttggagatgctgttgttttcgatacaacacatcgcttaagtgctgttgagatgccacttggaatatgggttggagttaataactatggtgtcccttgcttcttcggttgtgtgcttctacgggatgaaaatttgagatcgtggtcatgggcactacaggcattcacagggttcatgaatgggaaggcacctcaaacgatattaacagaccataatattgggtctcaaagaagccatagctggggagatgccagcccttaagcatgccctctgctatggagggggggtaggaaaggt

SEQ ID NO: 91078 - DNA, 494 bp, Arabidopsis thaliana columbia
ctccaggtaccgggccggaattccctggtttacccacgggggcggggccctttctaactccaataaaaacacaataatggatcttcttgttatgctcctctctcttctcgtctcttatctcatcttcaagatctggaaacgcatagactccaagagagaccaaaactgctacatcttggactaccaatgtcacaaaccttccgacgatcgtatggtgaacactcaattcagcggtgatatcatccttcgaaacaaacaccttcggctcaacgagtacaagttcctcctcaaagccatcgttagttccggtatcggagagcaaacttacgcaccaaggctcttctttgagggccgcgaacagcgtcctacgctacaggatgggctctcggagatggaagagttttacatagacaccatcgagaaagtccttaagagaaacaaaattttcacctttcgagattgacatcctcgtagtcaacgtctcaatgctcaat

SEQ ID NO: 91079 - DNA, 798 bp, Arabidopsis thaliana columbia
  unsure (1)..(798): unsure at all n locations
ccgnnnnnnnnnnnnnnnnnnnnnnnnnnnnnnnnnnnnnnnnnnnnnnnnnnnnnnnnnnnnnnnnnnnnnnnccacgcgtccgtattattccaaaatttggtgaaagcaacgcctaaagcaaaaatgtctcttctctaaccttttttttttttttttttttttgctctccaactttcccttcattttctggggaaaagcgagccaaaaaacgcaaaagcaatccacaagaagcaattgttcgatatcaatggggaagaacaataagatcggaagcgttgttcggatccgtcagatgcttaaacaatggcagaaaaaagctcacatcggatctagcaacaacgatcctgtttccgatgtacctcctggtcacgttgctgtttccgtcggtgagaatcgtcggagatacgttgtccgtgctaagcatttgaaccatccgattttccgacggcttctagctgaggctgaggaagagtatggattcgctaacgttggtccgttagcgattccttgtgatgaatcgttgttggaggatattattgccattgtgactcggggtgagtcggcttatcatctggacaggtaatcctccgcggcgaccttgagatctccggagtgtagcatgttggatggcaaaacaacgtgaatcctgtcgtacttctggattgctgaaatctggtctaagaattgcaacggaatggataaacttggtagaattatcttaaagttatttatttctcgtatttttaaggatttgccttttttggaagaaagcaattaggttgattgttttgttgc

SEQ ID NO: 91080 - DNA, 385 bp, Arabidopsis thaliana columbia
  unsure (1)..(385): unsure at all n locations
gtccgcaaacgcatgggggggagtgctaatctatctggagaactggtgccacagcttgctcagcttccaaacttgcagtacttggaactttttatcaataatattactggggagatacctgaggagcttggcgacttgatggaactagtaagcttggacctttttgcaaacaacataagcggtcccatcccttcctctcttggcaaactangaaaactccgcttcttgcgtctttataacaacagcttatctggagaaattccaaggtctttgactgctctgccgctggatgttcttgatatctcaaacaatcggctcagtggagatattcctgttaatggttccttttcgcagttcacttctatgagttttgccaataataaat

SEQ ID NO: 91081 - DNA, 574 bp, Arabidopsis thaliana columbia
  unsure (1)..(574): unsure at all n locations
actcacttagggaaagctcgtacgcctgcaggtaccggtccggaattcccgggtcgacccacgcgtgcgcccacgcgtacgcccacgcgtccgctaacctttctttgaaatcttgacctttcccttccttctccgctaaattcgttttaatttcatcttcttcttcttcttcaattcgatgcaataatagtcacttcaatctcaatctagggttttcaattttcttcatgtgaattttttttccccttcttctcaatttcaattcaatctgggattcgtaaattctcggaagatgaaacgcgatttcgacgaaatctccgaggaagagtggtctcaacactcgtttaacgcttcgcgagttcttaaacgaccacggactccgaagaagactcgcgcggcgacgaatccaacgccgtcgattgagtcttttgcgtttaggagaccttcgacggcgatgacgattgagagtaatagcagcgatggtgattgggttgagattgaggatttgggaaattcngtttcggatgtgaagattgggaatggggaggatttgttggttagaggatgaaaaaaa

SEQ ID NO: 91082 - DNA, 418 bp, Arabidopsis thaliana columbia
gtccgaaaaaagaagagaaaaggagttatatatggattgtattttacttattctgactactcttgttgccattttcatcgtcaagattgttctcctagtcactaaacctaacaaaaaccttccaccgtcgccaaatatatgttttccgatcatcggacaccttcacctcctcaaaaagccactgctacaccggactctcagccatctctcccactccctcggccccgtcttttctctacgcctcggctctcgccttgccgttatcatctcatctccaacggcagccgaagaatgcttcttgacgaaaaacgacatcgttttagcaaatcggcctcgtttcatcatgggcaagtatgtggcttatgactacacctccatggttacggctccttacggtgaccactggcgaaacctccgt

SEQ ID NO: 91083 - DNA, 640 bp, Arabidopsis thaliana columbia
  unsure (1)..(640): unsure at all n locations
nnnnnnnnnnnnnnnnnnnnnnnnnnnnnnnnnnnnnnnnnnnnnnnnnnnnnnnnnnnnnnnnnnnnnccacgcgtccgtgcggctgcgagaacgacagaagggggtcgtcgcgtctcttttctggaaaaaacgagaaactgtgatcttggcccttttattacccctatcctcttcttcttcaatctctccgatcaaaatccttttaagctctgtagacccaggttacgcagagaagaagaacagaacaaggaattatataatcattggcttgatcaatctgaattgcagttcatggcgctaaaccctcaattactacccaatgggatgcctgttccctttgttaatgaaatgttcgtcctagtccgagatggtgttgagtttgaagtcgacaagatccctggagggcatggaggtcatgttaaggccaagggggtgatttacttgtctaatatacggatggtctttgtttcaagcaagcctgttgacaactttgttgcttttgacatgcccctgctttacatccatgccgagaaatttaatcagccaatatttcactgcaacaatatttgctggacaagtggagcctgtggtgccagaaaatgagcatagagctctatattcaacacacagtttcaag

SEQ ID NO: 91084 - DNA, 510 bp, Arabidopsis thaliana columbia
agaaaggattttgggattaggggatcttggatgtcaggggatgggtataccggttggtaaattggcgttatattcagcacttggaggtgttcgtccttctgcgtgtttacctgtcaccattgatgtgggaacaaacaatgagaaactgttgaatgatgagttctacataggactcagacaaaagagagcaactggtcaggaatatagcgaactcttgaacgaattcatgagtgctgtgaaacagaactatggggaaaatgttcttatacagttcgaagattttgctaatcataatgcctttgagttacttgcaaaataccgcgatactcatctcgtcgtcaacgatgatatacaggggacagcatcagttgttttagcaggattagtttccgcacagaagttaacgaatagcccacttgcagagcacaccttcctctttcttggtgctggtgaagctggaactggaatagcagaactcatagctctctatatgtcaaaacagatgaatgc

SEQ ID NO: 91085 - DNA, 337 bp, Arabidopsis thaliana columbia
cggacgcgtggggtttctgattcaacaaatggctgcatccctctttaggttgattgcttctgtgtgcagaaccatgatgattgctaatactggtggtgctctcactctacttcttgtgttcttgctcggaggcttccttcttccgaaaggcaagattcctgactggtggggttgggcttactgggtatctcctctcacctatgctttcaacggtctagtagtcaatgaaatgtttgctcccagatggatgaacaaaatggcttcttctaacagcacaataaagcttggaactatggtgcttaatacttgggatgtctaccatcaaaagaactggtac

SEQ ID NO: 91086 - DNA, 1111 bp, Arabidopsis thaliana columbia
  unsure (1)..(1111): unsure at all n locations
nnnnnnnnnnnnnnnnnnnnnnnnnnnnnnnnnnnnnnnnnnnnnnnnnnnnnnnnnnnnnnnnnnnnnnnnnnnnnnccacgcgtccgcggacgcgtgggaaagattgtttatccgatgagaacgatattaagaaaaaacctaaggtggattggacgccggagttacaccggaaatttgtacaagcggtggagcaattaggggtagacaaggcggtgccgtctcgaatcttggaaattatgaacgttaaatctctcactcgtcacaacgttgctagccatcttcagaaatataggtcacatcggaaacatctactagcgcgtgaagcagaagctgccagctggaatctccggagacatgccacggtggcagtgcccggagtaggaggaggagggaagaagccgtggacagctcctgccttaggctatcctccacacgtggcaccaatgcatcatggtcacttcaggcctttgcacgtatggggtcatcctacgtggccaaaacacaagcctaatactccggcgtctgctcatcggacgtatccaatgccggccattgcggcggctccggcatcttggccaggtcatccaccgtactggcatcagcaaccactctatccacagggatatggtatggcatcatcgaatcattcaagcatcggtgttcccacaagacaattaggacccactaatcctcccatcgacattcatccctcgaatgagagcatagatgcagctattggggacgttatatcaaagccgtggctgccgcttcctttgggactgaaaccgccgtcggttgacggtgttatgacggagttacaacgtcaaggagtttctaatgttcctcctcttccttgagaaagatctccaaaatttgtcgaaatctcaaacttttaacttcatttttttggtatcttctatgtatttttgcaagggaaagacgataaatccttgttgcttgatcatatgtatttctctatatgagtgcatgtatcgaagttaagcccctttaaaaaaaaaaaaaaaaaaaaaaaaaaaaagggcggccgctctagaggatccaagcttacgtacgcgtgcatgcggcgtcatagtctagctatagtgtc

SEQ ID NO: 91087 - DNA, 992 bp, Arabidopsis thaliana columbia
  unsure (1)..(992): unsure at all n locations
agtttagagattcgaaattcttctggccttatttggcaccgtattggttcccttggccatatccggatctacctccattgccaactctaccgccttttccgtctttccctttcccttctttacctttcggaaacccgaatctggcattgccggctttcgattggaaaaatccggtcacttggataccttatcttccacgttttcctccaggagatcataatccttagggacactccatatttggattcctctgttttttattttcttggtgatcacctctgtttagggttgattgtatgtgtttgtgatatgattacttattaatgtgtaattattcttcacttacagaagattaagaattggtttaaggaggacagttttgatggacaactttatattacagttgaagccgtttaaattaggcctccgcatccactaggaagcatatatcgcaagagaccccaagagtgaaaacaaaaaaaaaaaagtgaagaagaaaagacatagggcctgatacgggtaaacttgtcgactactgcacaaccaaaaaaaggttttttttcttctgattcttgatcaattaacatcgacgaccggctctgcagttaagagcacccgagtaagaggtcatggtgccgacgagtgaggatgatttggctgataaactcgaagctctggcatagttggctccagctccagctccagaacgtgtgaaaaatgctccgtttaaggaaaagatctccttctgatctcccatttccagtggctcccattttcgattccccctggggtactcccctccttaggcacctcctttagcaaatggggttgactgggagcaagaaatcggntgcccngactggttgangggttgggccagcccttcccccaattggatacatttcccaatgggggagccattggtaccnctcggaataccaagccaaattnggatcccgggtaaccctcccaanggggaacattgaactgnc

SEQ ID NO: 91088 - DNA, 825 bp, Arabidopsis thaliana columbia
  unsure (1)..(825): unsure at all n locations
nnnnnnnnnnnnnnnnnnnnnnnnnnnnnnnnnnnnnnnnnnnnnnnnnnnnnnnnnnnnnnnnnnnnccacgcgtccgaacagaacaacaaacagaagtggcgtgtacaagctcgagatccctcacgtagatggcatcgattgtgtcgacggaatcgctatatcatcacaatgcagtgccaagatactcaaaacctcctctgacgacaacggaggctgcagcatccctgttttccaaactgcaaccaacgaagtatccatcaaatcaaagcaagatcgtgtctgtatctacagcttaagcgcactaagctataaacctcctcacaaaaacacatcattgtgtggaaacggagggaagaaacatcaccgaaaggacgagaaggtggagaagaagtttagagattcgaaattcttctggccttatttggcacccgattgggttcccttggccatatccggatctacctccattgccaactctaccggcttttccgtcttcccctttccttctttacctgtgggaaacccgaatctggccttgccggctttcgattggaaaaatcccggcacttggattccctattctccacgttttccttcagggagacactatcctcagggacactcactattgggatgcctcgggttttatttcccttgggatcacccctgtaagggttaatgatgcgcctggaatcaatacctataatggggaatattcttccttcaaaaataaaaattggttaaagagacggtttggcgggacaatactcccccgcgcagatatacggtcgcccgcgttctcttccgaaaacacattatggg

SEQ ID NO: 91089 - DNA, 554 bp, Arabidopsis thaliana columbia
  unsure (1)..(554): unsure at all n locations
cggggcgtctccacgcgtcgcgcgctattttaacaaaatcactgtctactcccttttttaacactaaaaaacgttatcactattcgtcgtgacgaatctctcttcgtgtaaatcgacgatccttctctatctctgcaactatgtcttcatctactaagaaggttttgattcccgttgctcatggtacggagccgtttgaagcggtggttatgatcgatgtgctacggcgaggcggagcggatgttacggtggcttccgttgagaatcaggtcggcgttgatgcttgccatggaatcaaaatggtcgctgatactcttctctctgatatcaccgactcggttttcgaccttattatgctccctggaggacttcctggtggtgagactcttaagaattgtaaacctttagagaggatggtgaagaagcaagacactgatggacgacttaacgctgctatctgttttccggcggcgttggcggtttggnaccttggggcctcctagagggnaaaaaagctncatgttacccggttttattggngaacctnncggttt

SEQ ID NO: 91090 - DNA, 614 bp, Arabidopsis thaliana columbia
  unsure (1)..(614): unsure at all n locations
cctgcaggtaccggnccggaattcccgggttgacccacgcgtgcgagacaggccacaaagaagaggataaaacagaagactaagacacacaagagagatagcgtctgtgaatggcaacaaaggcagttcttctcccgtggcttatcccatcgccgagacacgtatcgctgttcccagtggttcaattgccggcgttggagaccgccgggtggtgtgtaagaaagaggagggcagaagacgtagcagtctccgtcgccttcaatccttctggcaatttcgacatctctgccttcgagaatgaccaagattcagataaagtggaacctccgatgcctccaacgaccggccggtacgaagtagtgatcgacaacgactcaattgggcggcttgacctatccccgtttcagagagccatcggcataacctcgcctgatgattttggtgtagctgaaccaaaacgggtattttggatcggaaccatcggattcaccatcaattncaagggngaagaccccggggntccccgggaggttntnnaagtancccggacgnaaaactttngnttctnaagggttangggntttnncctttggtngcctttgttnttgantttg

SEQ ID NO: 91091 - DNA, 460 bp, Arabidopsis thaliana columbia
atccgcccaagcgtccgcggacgcgtggggaaaattaaatggaggaaaaagctaaactttcttaatcacagatgcagattgattctccatttttctcgggagaaaagttcctcgccggagatggagcatatgatgaaagaaggaaggtctcttgcagagacgccgacttactctgttgcttcggttgttactgttttggtctttgtttgctttctcgttgaacgcgccatttacagatttggaaagtggttaaagaagactagaagaaaggcactttttacttcacttgagaaaatgaaagaggagttgatgttgctgggacttatatcacttctgttgtcacaaagcgcgagatggatttcagaaatctgtgttaactcttcccttttcaatagtaaattctacatttgcttctgaagaggactatggaatccataagaaagttcttctggaacacacc

SEQ ID NO: 91092 - DNA, 892 bp, Arabidopsis thaliana columbia
  unsure (1)..(892): unsure at all n locations
acccaagcgtccgcccacgcgtcggcccacgcgtccgatatttgatagaatcaagcgatgatgaatcttagggttttgttcctcgctctccttctccttgcatctcctctgcttcaagttgctagatgtcaatcggatgccgaggatcattcaagtcttgttgacgatgttgtgggagaaaacactgatgatgcggttgaggaagatgaccatgatttggatatgaacttgtcctcatttccaggagttgagactgtttgtgttttccccaaaaacagtgccaaattggttccagctggagaagagactgagctccttgttggtcttaaaaatgaagggaaaactagagtaggtgtgatgggaattagggccagcgttcatcttccttatgatcataagttgttggttcagaatctaaccatgttgagacttaacaatgcatccatcccaacgtctcttcaagcaacattcccatacatctttgcagtcagccagtacttgcagcctggagcatttgatctggtgggttatatcatatacgatgtggaaggaaagccataccagagtgtcttctacaatggaaccatagaggtagttgaatctggaggtcttctcagcggcgaatctgttttccttttaacactcggaatcggtcttcctcctcctcctcggtcttaggggcatccagccaagttcagcgtctaccccagggaaacccaaaagggtttcccaagggggggaaggttgggccctagggtctaccgcgggaatcaacttcgntgaatggcttcgagggacctncttttgggccaagaaatnggcntggggaaacaaagggccaaggaggcnttaaggtngggcttgtttttnnccttnccngtttntannnggc

SEQ ID NO: 91093 - DNA, 849 bp, Arabidopsis thaliana columbia
  unsure (1)..(849): unsure at all n locations
cccggcccctttgattgcgctggccgcttgcagtaccggtccggaattcccgggtcgacccacgcgtccggagccagcgttcatcttccttatgatcataagttgttggttcagaatctaaccatgttgagacttaacaatgcatccatcccaacgtctcttcaagcaacattcccatacatctttgcagtcagccagtacttgcagcctggagcatttgatctggtgggttatatcatatacgatgtggaaggaaagccataccagagtgtcttctacaatggaaccatagaggtagttgaatctggaggtcttctcagcggcgaatctgttttccttttaacactcggaatcggtctcctcctcctcctcggtctatgggcatacagccaagttcagcgtctcaccaagaaaaccaaaaaggtttccaaggtggaagtaggaactaggtctaccgaggcatcactcgatgaatggctcgagggaactactttggccaagacatcgtctgggaaaacaaagaacaagaagaactaaagtagagctgttttgctccttccagttgttatagactcagcttcggcgttttgaaagagtttccaagtttaaagttcagtcttgaggaaatttagggttttaaacgacactttttttgttccagcattgtactctttagacaatctttacttcttgtcataaatattctcctcatgaaacaagttaacttataaatggtttagatctgtttttcgttgctnnnnnnnnnnnnnnnnnnnnnnnnnnnnnnnnnnnnnnnnnnnnnnnnnnnnnnnnnnnnnnnnnnnnnnnnnnnnnnnnnnnnnnnnnnnn

SEQ ID NO: 91094 - DNA, 919 bp, Arabidopsis thaliana columbia
  unsure (1)..(919): unsure at all n locations
nnnnnnnnnnnnnnnnnnnnnnnnnnnnnnnnnnnnnnnnnnnnnnnnnnnnnnnnnnnnnnnnnnnnccacgcgtccggggttttaaggtttcttatccttcctcttcctccgccagattcttttcttgcgaagatgagcaacgacaaggacagcatgaacatgtccgatctctccaccgctcttaacgaggaggatcgtgccgggcttgttaatgctcttaagaacaagttgcagaatttggctggacaacactctgatgtccttgaaaacttgactccaccagtcaggaagcgtgtcgagtttctaagagagattcagaaccaatatgatgagatggaagcaaaattctttgaggagagagcagctcttgaagctaagtatcaaaagttatatcagcctttatataccaagcgatatgagattgtgaatggtgtggtcgaagttgaaggtgcagctgaagaagtaaaatccgaacaaggagaagataaatcagctgaagagaaaggagtaccagatttctggcttattgcattgaagaacaatgaaattactgcggaagagataactgagcgagatgaaggggctctcaagtatctcaaagatatcaagtggagtagggttgaagaaccaaaagggttcaagcttgagtttttctttgatcagaatccttacttcaagaacactgtcttgaccaagacatatcacatgattgatgaagatgagcctatccttgagaaggccctcgggacggagattgagtggtatcctggaaagtgtttgacacagaagattctaaaaaagaagccaaagaaaggatccaaaaacacaaagccgatcactaagactgaggactgtgagagtttcttcaactttttcagtccacctcaagttcctgacgatgatgaggatcttgatg

SEQ ID NO: 91095 - DNA, 1062 bp, Arabidopsis thaliana columbia
  unsure (1)..(1062): unsure at all n locations
taatacgactcacttagggaaagctcggtcgcctgcaggtaccggtccggaattcccgggtcgacccacgcgtccgcccacgcgtccggaagatgagcctatccttgagaaggccctcgggacggagattgagtggtatcctggaaagtgtttgacacagaagattctaaaaaagaagccaaagaaaggatccagaaacacacaagccgatcacttaagaactgatggactgtgagaaagtttcttcccaactttttcaagtccaccctttcaagttcctgaccgaatgatgaggatcccttgatgatgacatggccgctgatgaccactccaaggaccaaatccggagcatgatcctatgatatcggttcaacaatcaaagagaaaatcatctcgcatgctgtgtcatggttcactggtgaagctgttgaggcagatgaccttgatattgaggacgacgatgatgagattgatgaagatgatgatgaagaggacgaggaagatgatgaggatgacgaggaggatgatgatgaggatgatgacgaggaggaagaagcagatcaaggaaagaagagcaaaaagaagtcatcagctgggcacaagaaggctggaagaagtcaacttgcggaaggtcaagcaggtgagaggccaccggaatgtaagcagcagtgaagaagtgaagaatcttggcttagttatgatgaagaagaagagtgaagagtgtctttgagccgaggttgtgtttctttaatttgcagagtcatggtccggtttattatatatcagttttgggtgattggtttgctatttaaaaaaaaaaaatgggttctttggtttggtttgtgtctcttgatttttccttttgtaatgatcttatgaatttgtttcgagttaatgtcgttctctggtcagatttcgaattcaattctatttatcctccctcgttaatgagagaatttgtgagcccttcaaaaaaaaaaaaaaaaaaaaaanaaagggcggccgctctagaggatccaagcttacgtacgcgtgcatgcgacgtcatagctgttctaaggg

SEQ ID NO: 91096 - DNA, 911 bp, Arabidopsis thaliana columbia
  unsure (1)..(911): unsure at all n locations
nnnnnnnnnnnnnnnnnnnnnnnnnnnnnnnnnnnnnnnnnnnnnnnnnnnnnnnnnnnnnnnnnnnnnccacgcgtccgtttgaattactatttgcagtggaagtctcttccgtctactacagaagagcacgtcaaaactggattggaggcggcgtatccatatggccttggacattgctcgcggtatgaattatcttcaccattgtagtccacccattatccatcgtgatctgaagtcatcaaatctgctggtagacaagaactggaccgttaaggtagctgactttggtctctcgcgtatcaagcatgaaacatacctaaccagcaagtctgggaagggaacgcctcaatggatggcaccagaagttcttcgaaatgagtctgctgatgagaaatctgacatttacagctttggagtagtattatgggagcttgccaccgagaagatcccatgggaaactctcaactctatgcaggtgattggagctgtggggttcatggaccagaggctggaaatcccaaaagacattgatcctcgttggatctcattaatggagagctgttggcacagtgatacaaagctgagacccacattccaagaactgatggataaattaagagacctgcaaagaaagtatatgatacagttccaagcgactcgtgctgcgttatctgacaattctcttctcaaggacaactaattaaaataaaagttgagccctttttaccttttttgtcctcaatgccatgcttcaagactcanagacggtcatgagaacagagaaagatagagaatgggtctgtttgagcagtagtaccagtgggttgatgtgtattacagcgtggaggagacctatagcagagactgccactgaattatgggagtgggtgtgaggatttgggcataca

SEQ ID NO: 91097 - DNA, 457 bp, Arabidopsis thaliana columbia
attagtcctgaggcagatgcagttggggaaacaataagcactttgaagtttgcagagagagtagctacggttgagcttggggctgcacgagtgaacaatgatacttcagatgttaaggaactcaaagaacagattgctactcttaaagcagcactcgcgagaaaagaagcagagtcacagcagaacaacatcttgaaaactcctggtggctctgagaaacacaaagccaaaactggtgaagtagagattcataacaataacatcatgacaaagaaatctgagagttgtgaagtggaggagattacagtgaactcaccaccttggccaccagtagcaagtccaggacaagcctacagagaggatgaccgaagtttcgggtccagcgagtgggttgacaaggtgatggtgaataacagacaagacgagatgagaagagtggagagtctttggggaggag

SEQ ID NO: 91098 - DNA, 493 bp, Arabidopsis thaliana columbia
cgcctgcaggtaccggtccggaattcccggcttgacccacgcgtccgatcacctctcgctaagtgtgcgttagccgttagggttccgatctaatcatggcggactctgttttgaaggaggttaactgtggccggcctgaaaagatcccgaagttggacaaagcttgcgaaggatcgaaatcgtcctggaaacatctcaagctaggaaacgtggaagatgatgagtatcttcgacagtattgtttgtttcactacgaattccataaatccgagggtttcacggttgattgggagaaatatgactacatgttccatataaggccgttggaaaattcaccacctatcagcgatatacgaaccaatgctgatgtgatccgtgatgtgacactctttgccattgagaaacacaatgaagcctcttggccctaaactttggggtggtcaaacatgtctcagcttatttaatattggcccatgggctcccctgatggtaa

SEQ ID NO: 91099 - DNA, 500 bp, Arabidopsis thaliana columbia
acgcctgcaggtaccggtccggaattcccgggttcgacccacgcgtccgcccacttggagagagaaatggcgacggcatcggaaaattcaagaggaatcagcggcggtgatcgaacggcgaaagctgtcgtcgccgatcagatttcacaagccgtaaattccactgctaaccttcttcatctgatgcggctatcctccttctgcgcaggctcagttggcaaagctcccgaagaatctgttggcgaaagcttcactgactaaggccactggacaggcgttggcgcagcttcctcaagtgatttcatctctagatgctcatatagaaagcggattgcacagcggtgttcatctaaacacagtaaccccagttacttgaaaacctggaaagcccaccgcttcgtgctcttcgacaatttaatatttcccctggggtgtaaactctgatctcttattagcaataaagatgttttttcttctggacattttttctagcagccatt

SEQ ID NO: 91100 - DNA, 871 bp, Arabidopsis thaliana columbia
  unsure (1)..(871): unsure at all n locations
cgcctgcaggtaccggtccggaattcccgggttgacccacgcgtccgaggacgcgtgggcggggatgcaagtgacgatagcgtttaatcatttcggacaaaggcttgttcagaggatgcctatgtgtcggagaggttacattcatgtagtgaataatgatttcactgagtggaaaatgtatgctattggtttgctctttaaggggaccattaacaggcaaggaaatcgntactctgctccttctgatcctagcgccaaagaggtgaccaagcgagtggactcaaaagaccaatggtgaatgggccaaattgggatttggaaaaacagaaggggatttgatgggaaaatgggtctttctttgtggcctctggtgaaggaatgagctcaatgtactctaaagcttctagtgttgaccctaaagctgcttctctcgtagaccagctcactcgaaacgctggcgtttttggcggtcccagggatgatcaaggtcagagtggcaattcttactctccttatggaggcgacggcggtggcggtgggagcagcggtgggagcaccggtggagggatggacgttatgggaggtacgacgagaggaagcagcagcagcagcgcccctgacagcaatgtcttccagatgatatttggaagcgatgcaccgtctcggccgcgtttaacgttattgttttctttgttaatgatttcggttttgtcgttatcaactctattattgtgacgaatggataacaaataggatttggaccgttcaattggaatataaaaaccaagggcagccgctctagaggatccaagcttacgtacgcnnnnnnnnnnnnnnnnnnnnnnnnnnnnnnnnnnnnnnnnataaatcg

SEQ ID NO: 91101 - DNA, 846 bp, Arabidopsis thaliana columbia
  unsure (1)..(846): unsure at all n locations
gatactccnnnnnnnnnnnnnnnnnnnnnnnnnnnnnnnnnnnnnnnnnnnnnnnnnnnnnnnnnnnnnnnnnnnnnnnccacgcgtccgcggacgcgtgggcggggatgcaagtgacgatagcgtttaatcatttcggacaagggcttgttcagaggatgcctaggtgtcggagaggttacattcatgtagtgaataatgagtgcactgagtggaaaatgtatgctattggtggtagtggtaatcccaccattaacagtcaaggaaatcgttactctgctccttctgatcctagcgccaaagaggtgacgaagcgagtggactcgaaggacgatggtgaatggtcgaattggaattggagaacagaaggggatttgatggagaatggagctttctttgtggcctctggtgaaggaatgagctcaatgtactctaaagcttctagtgttgaccctaaagctgcttctctcgtagaccagctcactcgaaacgctggcgtttttggcggtcccagggatgatcaaggtcagagtggcaattcttactctccttatggaggcgacggcggtggcggtgggagcagcggtgggagcagcggtggagggatggacgttatgggaggtacgacgagaggaagcagcagcagcagcggcgatgacagcaatgtcttccagatgatatttggaagcgatgcaccgtctcggccgcgtttaacgttattgttttctttgttaatgatttcggttttgtcgttatcaactctattattgtgacgaatggataacaaataggatttggacaaatcaattgattggtttttggtgtaaaaaaaaaaaaaaaaacaaa

SEQ ID NO: 91102 - DNA, 563 bp, Arabidopsis thaliana columbia
atacgactcaccttagggaaagctggtacgcctgcaggtaccggtccggaattcccgggtcgacccacgcgtccgattttgaaactcctgctccatctgttgcaattcaagcaccactatcgaccacatctcagcctgctccacagccaacaacttcatctaatgataactgggcatctttcgatgctgcacccagtgcccctagtttaaatgtatcgcaaccaccacccagtggaaacacactggattcacttctctcccagttggcagtgacttcttctgtgccaggtcaggcgtctacaccatctaacggacctgtgaatcttggtcattccacgtcacaaatctttgcaccctttcagaatgagcattcgagtgaacagccatggaacacagcacttgcatctaatgtacagaggtcaatgagtgcaccgtcattgcaacctcttcaaggagtcccttctggtggcctgcagtcttctgaagttaaaccttcgggaagatcagaattacctgcggatttattcgctgtaaactacccatcataccatgcaccagtgcct

SEQ ID NO: 91103 - DNA, 630 bp, Arabidopsis thaliana columbia
  unsure (1)..(630): unsure at all n locations
ctatcngaattgcggccgctctcttctcctgcttcgttctctccgcgatcatgatcatatcagagactaaccgccgtgagatctccaagtacctcttcaaagagggtgttttgtttgctaaaaaggatttcaacttaccacaacatcctttgattgagagtgttccaaatctgcaagttatcttgttgtttgcagtagtttcaaatctaaggaatatgtgagagagacctttgcttggatgcattactactggttcctcacaaatgaaggtattgactttctccaggacttaccttaatctcccatctgagattgttcctgctacctttgaagaagcaacagaagcctcttggtcgaccttttggaggtgggggtgaccgtccccgtggccctcctcgtggtgcatggcagagaggaggtttggtgaccgagatggactccggggaagggcctaaatcaggtggagaagtatcggggacaaggctgcgacctgctggttacaanctggctcaggggngaactggtgancaagcaagggttggccctgnactggngggtccggggggggncccggactaactccttaaagngttnctggtcctttgncatttnangnaaaaaacccttggc

SEQ ID NO: 91104 - DNA, 737 bp, Arabidopsis thaliana columbia
  unsure (1)..(737): unsure at all n locations
cgnnnnnnnnnnnnnnnnnnnnnnnnnnnnnnnnnnnnnnnnnnnnnnnnnnnnnnnnnnnnnnnnnnnnacccacgcgtccggaagaagttaaagcaaaacacatacaaacgcagtcaccttctctatcgcctccttcttcaatctcatcgcaatcatgatcatatcagagactaaccgccgtgagatctccaagtacctcttcaaagagggtgttttgtttgctaaaaaggatttcaacttaccacaacatcctttgattgagagtgttccaaatctgcaagttatcaagttgatgcagagtttcaaatctaaggaatatgtgagagagacctttgcttggatgcattactactggttcctcacaaatgaaggtattgactttctcaggacttaccttaatctcccatctgagattgttcctgctactttgaagaagcaacagaagcctcttggtcgaccttttggaggtggtggtgaccgtccccgtggccctcctcgtggtgatggagagaggaggtttggtgacaaagatggataccgtgggggccctaaatcaggtggggggtttggtgccaaggctggagcacctgctgtttaccagcctggcttcaggggtggggttgttggcaagcaaagggttgccgtgnccttgtggtttggggnggcttgccnctctgncttcntccctnaaaggttttttttttttgcttttaggaaagncctttgcggttttc

SEQ ID NO: 91105 - DNA, 437 bp, Arabidopsis thaliana columbia
ttgttctctttctcatcgcctcttgattcacgcgaacgagaaagcgacgatcgtaaccaccggcgctgaccaaaaagtaatcgattctcttcccgagctgatctctcaggtgtcttgaatctgaatctgtggctatatttggtgctcggtggtgagcaggaagggagggggatattgtcagggttttaatgtacgtcagatgaatagagcaactaatgttactggcagtagaaggagggggtttattctcagcgtccgcgtctgggtatagtaagggattgacccttcttttctctggtgataaagacgtagataggcccatgagagttgtcccgtggaatcactaccaggtggttgaccaagagcctgaggctgaccctgttcttcagctggattctattaagaaccgagtttcccgcggttgcgctgcttccttc

SEQ ID NO: 91106 - DNA, 600 bp, Arabidopsis thaliana columbia
  unsure (1)..(600): unsure at all n locations
gccgggacgcctgcaggnaccggncctttttcccggggcgacacacgcgttatacgagaacttctttatggggtctgtgcatttcaaggatgtggctttagctcatattcttgtatacgaggatccatattcgaaaggaaggcacttgtgcgttgaggctatctctcactacggtgattttgtagccaaagttgctgagctctatcccaattacaatgtccccaagttaccgagagagactcaaccgggtttacttcgagataagaatgcatcaaagaagctcatagatttggggttaaagttcatttccatggaggaaatcatcaaggaaggtgtggagagtcttaaaagcaaaggatttatctcttaatacctacctctgtaactctgtttgattgagcaattaacacaatctctaggcagcagaaacatttcatatgatatacgattttgcacttttgtaataaataagctggcctatggtatggtatgaacatccaaaaaaaaaaaacccaaaaaagtaaagatccaacttannnnnnnnnnnnnnnnnnnnnnnnnnnnnnnnnnnnnnnnnnnnnnnnnnnnnnnnnnnnccaa

SEQ ID NO: 91107 - DNA, 741 bp, Arabidopsis thaliana columbia
ggcccgataagcgcgaagctcattgacacataccgtacaaagcacaatatcactgcatctactgggtccaccgatccagctgttgttgctactgggatctcggacttaatctatgagtccactcagcctgcccccgctgcctcaaactccagtggtctggatgatgatttggtgaatgcttgggctgcaaaccttggtgatgatggtcttcttggaaacaatgccccagcaatgagtagggtcaatgaattcattgctggagtcggaacagatgcaccggatgttgaggaggagaatgtcttctctagaccttcggttgggtatgatgacatgtgggctaaaactcttttagaaacttcagaattggaggaagaagatgcgagatcaggttcatcgtctccagattctgctggatcagtggaaagctcaatatcctctcactttggtggaatgaactacccatcattgttcagttcaaagccttcctcacaagcaacggcaaaatcaggtggaagtaaataccagtccacatatgaaggctatggttccccaattagagaagagcctcctccgccttattcgtattctgagccacaaagtcgtgaatcgtttgagaaccctgtagcagggtctggttctcgaagttatgaatcagatgatgaagaacctaggaaatctactggtacaagatttggaacagcgctctatgacttcacagcaggaggagatgatgagctaaac

SEQ ID NO: 91108 - DNA, 502 bp, Arabidopsis thaliana columbia
gtccgaattgagttcttcttggtttcttcttcttctccactgctactaaatcacaagaatcttccgttgtctacgtttctggtgcttcccccgaaatccccatttctcaggcttctccacgaatgggagctcaatccccaggacctcccattgttaaagtggtgcttcgccaggacttgaacaagaagattctaattgctcttatagtctcatcatctctgctctgtgtcacagtcatgttccttgtgtatctcttgctatggaggtacaggaatatgaagaacagcttcaccggtatcaaacgcaaatccgattcggtgaagagtgtaaccacgaaaccgactgtacacaagattgattctgtgaggaaaggaaccatccctgtgtatgaatatcaattgctggaatctgcaacaaacaagtttagtgatagtaatgtgttgagccgaggtggtcgtggatgcctttacagagcttgtctcgatgaaaaatcctcagtcac

SEQ ID NO: 91109 - DNA, 539 bp, Arabidopsis thaliana columbia
aggtaccgggccggaattccctggttgacccacgggtccggggccagtttcagaaaacagagcaagaagaaacagctttctctcaaatgcagacgagtcgggtactctccttctcctctaactctccgagttttggcagcttctcctccgccgttgacctcgctgcaatcgccgctcgagtcgtcgaagaattcagagatcacgaccaaacacaatccgattcttctccccaccgcgacgacgataatgattccgacttcgctttcgactgtccaagcaacacgtgttctcagcctctcgctaccgccgacgagattttctgtaacggtcagatccgtccgttgaatccgtacggtggaaatgctccggtggaatctcaaccgacgagtaagattactactcttcctcctcgtcgtcgtagacggcgttgaggaaactgatgagcgaggatcgagatccgggttcgaattcttccgtcggaagctgaaggaggatcttactgggtgttccctccggagacgtactgttgtattgggaaa

SEQ ID NO: 91110 - DNA, 480 bp, Arabidopsis thaliana columbia
cgcgtccgccaacgcgtccgagctacttcaccacccgcagattctgccatgtggcttctctctcttctacagctcacttcttctctctctgtctctctctaactacattgaaaccaaaccagagtgcttcaatgtcattgctgtgattctctttaagtccagacataactcccatatcttcttcttctgtctttttttatttctttgaaccggagaagaagaagaagaaggagaaggatatatgggaggctgtacttccaaaccttcctcctccgtcaaacctaatccttacgcacccaaagacgcggttctccaaaatgacgattctacccctgctcatcccgggaaatcaccggttcgttcatctcccgccgtaaaggcctctccttttttccctttttacacgcctagtcccgcccggcaccgccgtaacaagagccgcgacggcggaggaggagagagtaagagcgttaccagcac

SEQ ID NO: 91111 - DNA, 538 bp, Arabidopsis thaliana columbia
caacaacaatcactccaaattttgtctgctcaccatttttccacaaagccaattctcttgtatccaatgcctatgttctactcctctcgttttctcttcttcttcaccatcgtccccttactcgtctctatcgctctctaccaactcgacacattcgaccccgctccggttccttccgaggcattcgcctcctctgctacttcactcccgccgcttatcagcgacgaatttctcaccggagctgagtttatcggcgtcggtcttctcgatatacccgaagatatcgcctaccatcaggactctaatctcatctacactggttgtgttgatggatgggtgaaacgagtcaaggtcgccgactcggttaatgactcagtcgttgaggattgggtcaatactggtggtagaccgctcggaatcgcgttcggaatccacggcgaagtcattgtcgcagacgtacacaagggactgttgaatataagcggtgacggaaagaagacggaattgttgacggacgaagcggacggtgtgaagttta

SEQ ID NO: 91112 - DNA, 494 bp, Arabidopsis thaliana columbia
  unsure (1)..(494): unsure at all n locations
tctnnnnnnnnnnnnnnnnnnnnnnnnnnnnnnnnnnnnnnnnnnnnnnnnnnnnnnnnnnnnnnnnccacgcgtccgagcgagtctaagcgagagagcaaaagagaaggcactggaagttatcggaatttgcatctttttgattccgccgttttgcgtctgacgtgttcacggcggcaacctccatggacgacggtgacctcggtaacaaccaccataacttcctcggtggagctggtaatcgtttatcagccgaatctttgccgttaatcgatacgcgtcttttgtcccagtcagaacttcgcgctctctctcagtgttcttctctatctccatcttcttcagcgtctctcgccgcttccgccggtggagacgacgatttgacaccaaagatcgatcgctccgttttcaatgagtccgctggtagccggaaacagacatttctccgtctccgccttgcgcgccaccctcaaccaccggaggaacctccttcg

SEQ ID NO: 91113 - DNA, 489 bp, Arabidopsis thaliana columbia
  unsure (1)..(489): unsure at all n locations
cctgcaggtaccggnccggaattcccgggttgacccacgcgtgcgaatcctaagaatttaccaggtgttaagagtgatgggacggtgtctcacttcttccataaagcaatcaaagcttatagcacaggaactcgaaagcgtagaaagattcacgacgatgattttggcgatgtgcgctggcataagacaggaagtacgaattccgggggtgtgggatggtgttcaaagaggttgcaagaagataatggctctctatggcggaaaagctgtgaaaaccaactgggtgatgcaccaataccatttgggaatagaagaagacgagaaggaaggtgattatgttgtttctaagattttctaccagcagccacaacagctagtagtcaagcgaggtgataaagctgaacaggaagtctctgaggatatctttgctgcagtgactccaacagcggatcctgtcactccaaaattagctacacctgagcctcgaaa

SEQ ID NO: 91114 - DNA, 810 bp, Arabidopsis thaliana columbia
  unsure (1)..(810): unsure at all n locations
atgggctctaccctgaagcgattaccgttggtgaagttgttagtggtatgccaacattctgtattcctgtccaagatggtggcgttggatttgactaccgtttacacatggccatagctgataagtggatagaaatgctcaagaagagagatgaagactggcaaatgggcgacatcatttacacacttaccaacagaaggtggtcagagaagtgtatctcttatgctgaaagtcacgatcaagctcttgttggtgataaaacaattgccttctggttaatggacaaggatatgtatgatttcatggcagtagacagaccatcaactcctcttatcgatagaggaatagctttgcacaaaatgattaggcttataactatgggattaggcggtgaaggttacttaaattttatgggaaacgagttcggacatccagaatggcttgattttcccagacgcgagcagcgtctttctgatggtagcgtgattcctggcaacaatttcagttatgacaaatgccgccgcagatttgatcttggggatgcagattatctcagataccgcggactacaagaatttgatcaggcaatgcaacatcttgaagagaattacggttttatgacttcggagcaccaattcatatcacaaaaagacggagcagatagagtaatcgtattcgaaagaggtgatctcgncctttgcctttacttttcnncnggcccagcaagctnctttnattnccgcattgggttnnnccaagnctgggaaanttaaggcnggtttggnctgggcggnncnntttttggggggt

SEQ ID NO: 91115 - DNA, 400 bp, Arabidopsis thaliana columbia
tcgattctttttgctgctatttttcaagcagtttcttcacgatattttgctcgattttttggcactgaacgggcttcttcagggatgaaattctctcagtccactggtaaatcaaattctgttgaaaaggacattgatgaagtgaaagtgaaaccaaatatggatatccgtctgagtgatatgaaacttgttttaggaccagagctgaggataatgtaccctttaattcttaattttgctgttagtggtgagcttgaacttgatggcatggctcatccaaaatttatcaaaccaaagggtgtcctaacattcgaaaacggagatgtcaatcttgtggctactcaggtacgtctgaagagggagcatctcaacgttgcaaagtttgagcctgaacatggac

SEQ ID NO: 91116 - DNA, 870 bp, Arabidopsis thaliana columbia
  unsure (1)..(870): unsure at all n locations
taggacaactatagaagagttatgacgtcgcatgcacgcgtacgtaagctcggaattcggctcgagcagagaaagaaagaagccctagattttgtcaaaaggcggttgcagaacaaaaaaccatggccggaattggaccgataactcaggattgggagccggtggtgatccgtaagaaacccgctaacgccgctgccaagcgcgacgagaaaactgtcaacgccgctcgtcgatccggcgccgatatcgagaccgtcagaaaattcaatgctggaaccaacaaggcggcatcaagcggcacatctctgaacacaaaaatgcttgatgatgacactgagaaccttactcatgaacgtgtgcctactgagctaaagaaagccattatgcaagccaggacagacaagaagctaacccagtcccaacttgctcaaatcatcaatgagaagccacaagtgattcaagagtatgagtctggcaaagctatacccaaccagcaaatcctttctaagctggagagagcgcttggagctaagcttcgtggaaagaagtgacccaagttctcctgatgtagcaagtaacaagaatcaatgctatcgtttaatgccgtaacttttccaagaacaatattttctgattgtaagaaagcaaacccgtttgaatgtttgtttcgttgaaggaatctccatctcataaactcagagcaatataataacgagggtcttttcctccacagaaacaatgaaaaaaaaaaaaaaaaaaaaggnnnnnnnnnnnnnnnnnnnnnnnnnnnnnnnnnnnnnnnnnnnnnnnnnnnnnnnnnnnnnnnnnnnnnnnnnnnnnnnnnnnnnnnnnnnnnnnnnnnnnnntcat

SEQ ID NO: 91117 - DNA, 764 bp, Arabidopsis thaliana columbia
  unsure (1)..(764): unsure at all n locations
tcttaggnnaaagtggncnccccggtgncccttnaactggggccccgggttcaggattcngccgaacccttgncgggattgccgttactcnggtttggncccgttgtncncgttaggaacccccttaccnccgttncaagcgcgccgggaaactgtcaccgccgctcgtcgatccggcgccgatatcgagaccgtcagaaaattcaatgctggaaccaacaaggcggcatcaagcggcacatctctgaacacaaaaatgcttgatgatgacactgagaaccttactcatgaacgtgtgcctactgagctaaagaaagccattatgcaagccaggacagacaagaagctaacccagtcccaacttgctcaaatcatcaatgagaagccacaagtgattcaagagtatgagtctggcaaagctatacccaaccagcaaatcctttctaagctggagagagcgcttggagctaagcttcgtggaaagaagtgagccaagttctactgatgtagcaagtaacaagaatcaatgctttcgtctaatgccgtaactttgccaagaagaatattttctgattgtaagaaagcaaaaccgtttgaatgtttgtttcgttgatggaatctctatctcataaactcatatcaatataataacttgggtcttttcctcaaaaaaccaaaacaaaaaaaaaagggggccccctttggccggtttggccgggtgggggnnncttttgggccaattntcnggngngtttngcgggggc

SEQ ID NO: 91118 - DNA, 598 bp, Arabidopsis thaliana columbia
  unsure (1)..(598): unsure at all n locations
nnnnnnnnnnnnnnnnnnnnnnnnnnnnnnnnnnnnnnnnnnnnnnnnnnnnnnnnnnnnnnnnnnnnnccacgcgtccgatcgtcatcaataccgcctccccaggctacttccaacaccagcaccaatgccaatgcaggctcgagtgtttctgctacctcatctgaaaacagtgctgttaataatagccagaggaaaccttttagacggaataacaacacatcatcttccagtaccagtagtaacgtctccaatgctgcgcctttaaacaccagagatcagaatcacagccaaaggggtggtggctcttttggttcagggaatttccgtaattctcagaggaatcgcaacagcagctcttaccctcgtggggaaggtcttcaccatggaaacaggcgcaattatgagcatggcaaccaaagcggcttttctcaccgtaactatagtgggagagacatgcacttgcaaccgcagaggggtgctgggatgattagaccccattatctacccagattatgcacagcatgtctttttgccacatccatcttccagatccgatgggtttagntggacccttccccttcaaccatgtattttc

SEQ ID NO: 91119 - DNA, 555 bp, Arabidopsis thaliana columbia
  unsure (1)..(555): unsure at all n locations
tttcggtggtcgagagctagctagaagcaattctaatatgcgtgattatggtgttagtgaaggcaacattctccacttggttcttaagctctctgatcttcaggttcttgatgttaagactacctgtgggaaacactgcaggtttcatgtcgagagagggagaaacattgggtatgtgaagaagcagatttcgaaaaagcgtggagactttgttgatcctgatgaacaggagattctttacgaaggtgagaagttggaagaccagagtcttattaatgacatttgtagaaacgatgactcggttttgcatctgcttgtgcggagatctgctaaagttcgagttaagccggtggagaagaactttgagttgtctattgttgcccacaagcaaaagattaagaagggtccgtgaagctaagagcattgtgccacccaaaaaagcttttttttggagccggnaggttttaaacnccaaggctaaaggancccntnggngggtaaaaganatgatncaggcntnttcctgatnggcttaaaagggnatnnccggcagta

SEQ ID NO: 91120 - DNA, 522 bp, Arabidopsis thaliana columbia
ctcacttaggggaagcactacgcctgcaggtaccggtccggaattcccgggtcgacccacgcgtccgtgcagttacttgtttcagttcccgatgatcaattcttagtttttttggcttgttttcttcgtctctctttcatcaggcctttggagttttgtgttaccattttcgctcgcgtcattactggtgttagggttttcttcaaaagcttcttaatccggcgaaattgctcttttctctccctcattgtcgacagagataaatggcttcaaagattattgctggcaagccggatgataccgagtatgaaatcattgaaggtgagtctgagagcgctttagcagcggggacaagcccttggatgaattcatcaacgttgaagcttcgacatcgaattggaagaggtcccttcggtgatgtttggctggctactcatcatcagtcaactgaggactatgatggagcttcatgaaggggccatcaaaatgccttatcccatcaaggaagatcaaagaggggtt

SEQ ID NO: 91121 - DNA, 747 bp, Arabidopsis thaliana columbia
  unsure (1)..(747): unsure at all n locations
cgcctgcaggtaccggtccggaattcccgggtcgacccacgcgtccagacagacgacatcgaaccttctatcttcaaggctatgcttagcttcatttacaccgatgtacttcctaatgtgcatgaaattaccgggtcaacttctgccagttcgtttacaaacatgatacaacatctcttggcagctgctgacctccatgaccgggcaaggttaaagatattatgtgaaggtttgctatgcgaaaaacttgatgttgataatgtggcaacaacacttgcgttggctgaacagcaccaatttttacagctcaaagcgttctgcttagaatttggtgcatctccagcaaacttgggagctgtaatgaagtcccaagggttcaagcacttgaaacagagctgtcccactttgttatctgagttgctgaacactgttgcagcagcagataagagctcgacgagtggacattcaaacaagaaaagaagtgcgagcagtgtattagggtgtgacactacaaatgtgaggcaattgaggaggagaacacgaaaagaagtgcgagcagtgtcttaggatcattacataccgtatgcaaaattctagctntatgccttgtgccccacanagatagaattcccagtcatcccggacttttttccatgagaataaagctgacttaccactgtggcactttcattgcaaaagctccccaaacgtagagccgataaccggcacgttaagacagcttcgcgc

SEQ ID NO: 91122 - DNA, 357 bp, Arabidopsis thaliana columbia
tcgcccacttttccggggagattgttaagctgcctgtaaactatgacaaggctcttgaaatgattgacaaacacttgttgtactggcccaagttgttgcagcataaggttaaacaaagactgactaaaatgactcagatgcgtattcgtatgaggaaacttgctctgaaaacaagggaggtagtagtcactacgcctaggaggcaaataaagagggggtcgagaagagaggaaaaggctataaaagcacctcagttggataaggctattgaaaccgagttgatggaacgtttgaagaaaggcatttaccctactgaaatatacaatttatctgacagtgtgtttaacaaactgcttg

SEQ ID NO: 91123 - DNA, 492 bp, Arabidopsis thaliana columbia
gcctgcaggtaccggtccggaattcccggtttgacccacgcgtgcgagcgcgcgtccgatttatttgtgctgaggtcatgaaattcgaggatctcaaggaacttggcaatgaacctgcagtcaaggccgcaggaaaatacagacaggagggtaaaacatatgttgttcaggatggagatatcattttcttcaagttcaatgtttccggtggtgggaagaaatgagatccatccgtctgtccacctatccgcggtgtcctctctggatcttgaagctctatccatttccgagaaaggaaccaagctgtattttccgtttttgagtggctttaccaaacaagtatttgtaactctttacattttgcagttagctaagacatgtctttgcctttagacagagcattaagcctgctgtatcgtttagaactctttcaataagtttttctctactatttggcaattataacaattgtgtggggggtaaaaaaaaaaa

SEQ ID NO: 91124 - DNA, 623 bp, Arabidopsis thaliana columbia
  unsure (1)..(623): unsure at all n locations
cggnnnnnnnnnnnnnnnnnnnnnnnnnnnnnnnnnnnnnnnnnnnnnnnnnnnnnnnnnnnnnnnnnnnnnnccacgcgtgcgcagacggtggcaagacatcaagaacccaggaagtgtgaaccaagacccttaggtaagctgtattgccccacgcgtccgcccacgcgtccgcaacatttttttttttcttctccattgccaccatcaagaagtaacaatggctgaagctttcacaagtttcaccttcacaaatcttcatattccttcttcctacaatcactcgccgaagcagaattcaggaccgaatcatggatattggctatctaagaatgttaatgagaagagggaaaggaatttgatgagaggaagcttatgtgtaagaaaggcattgccacatgatttgccattaatggctgtgatggttcaacaaatagaaggaatgcgtgatatcattacagagaaacacgtgtggcatctaagtgataaagctatcaagaatgtttatatgttctacatcatgttcacttgttggggatgtttgtacttcggttcagcaaaagatccattctacgactcanaggagtaccnnngagatggtggggatggaactngatattggg

SEQ ID NO: 91125 - DNA, 508 bp, Arabidopsis thaliana columbia
accacgcgtccgattatcaccggagccgcttcaacatttcccatcgtcgctcgagttttgaacgctatgaatcgccgtatgtatgctgctactactctatcatctgccaaatcaatctctgcagaatccctaaatcttcgttccgattccaattcagaggcagcgcatggtgcttctgagtctgagactcgagtctctttaaggaagaagaggataaagcaggatgatttggagcctgtaaagaaatgttccgccagagaaaccaaggcccgcaaggacatgtgtggattacctgatatagaagactctccttataagaagactaatggaactgcttcatctaggacgagaaaactaaactcatacataaaatcaacagaagctagcccttctgcatcgtcgatcaaaacagcaggaaaggcgattttatgtgctcataggaacacttctttcaagtcagactaaagagcacataactggtgcggcagtagaacgacttcatcaaaat

SEQ ID NO: 91126 - DNA, 993 bp, Arabidopsis thaliana columbia
  unsure (1)..(993): unsure at all n locations
tgctattatctcaagtgagtacatactggaaaaacaatgtacaaatgacggcggtggcaattgataggatgatgggttatagactagtatctaatcaggcaatcctcgcgtccgcccacgcgtccgaaaatgttgatcagtttcatgtgtctgatcagccatgggagatacttggcaatgctcttaacaagacttataaccgtatctctgatttgaggaaagatatatcaaacattacgaaaaatgttttggttgctgagaaagcttcagccaatgcacgagtagagttggaggctgctgagagcaaactttccctagtggaaggtgaacccgttcttggtgagaatccagcgaagatgaagcgtttaaaatcaacagtggagaagacaggggaagcggagttatctcttcgggagtccctagaggcaaaagaggctcttcttaacagagctctctctgagaccgaggttttactgctcttgctgttccaaagtttcttaggtgtactgaaggaacggctcccagatccaactaaagtgagatcagtgcaggatctaaaatctataggtgctgaagatgacaagccatctccgatggacgtggacagcgagaatggaaacccaaagaagagttgcgaagtcggtgagagagaacagtggtgcttatcaacacttggctatctcccggcatttccaaggcaatatgcgagcgagatatggcctcacatggagaagttggagtcaagagtgttctcgggtgaagatgtgcatcctctctttctccaagccatattttttgcacttcaattcccattacattaatcttcctctttcaatctcaatcaaacctgtctcttttgttttttgttatgagattctgattctgacatcaagtttttaggaatttgtaaagggtcaaaaaacaagagttttacctttaaaccccccaaaaaaaaaaaaatntttntgaataatggaggaagaagaaggacga

SEQ ID NO: 91127 - DNA, 434 bp, Arabidopsis thaliana columbia
aaccgtggaccgtggttgtctcaacagggatgaacttggaggttccatctctggttggattcaggtgttttgagctaatcttcttctgggtttacttctctaccatactttctaccgatttgaagatttgtcttctgtacctttgatgatgattctcagttttgcagcaatgactcagtttttcgccttctagtcattaaactactttcccacaatgagatacttagtgtttttgtaggttctttcacacttgttagcaagggtatatgtatgttgccgttctcagaatttggtaggtatgaatcacagatgtcattgtttattattgataacataagtgattcttgctggtagtgtgacctcttgagggcaggctcatagaagatgaagagcctcttggttttgatgataatgctccctacttctgagttctg

SEQ ID NO: 91128 - DNA, 497 bp, Arabidopsis thaliana columbia
gtccttccattaaaaacggaataaacagaatgaacggtggtgatgtcaccgtcgccggatccgacgatctgaaatctccgctcttaccggtcgtccataatgatgaaccattcgaacgacaaacggtgggacaacaacttcggacaatattcacgcccaaaaactgttacatcgctcttggtcctcttctttgcgccgtcgtgtgtctatgcgtagatctcgggggagatgaaacgacgacggcgaggaacatgctcggtgttttggtgtggatgttcgcgtggtggttgacggaggccgttccgatgccgatcacctccatgacgccgctcttcctcttccctctctttggtatatcggctgcggatgacgtagcaaattcttacatggatgacgtcatctcccttgtactcggcagcttcatacttgctctcgccgtcgaacactacaacatccatcgccggcttgcccttaacgttagtctttcctttatctct

SEQ ID NO: 91129 - DNA, 659 bp, Arabidopsis thaliana columbia
  unsure (1)..(659): unsure at all n locations
ggcagaagaagaaacttcagatagatgagctagagagaatcgtgaggctgaagcaagcggaggcagacatgttccagcttaaagcaaatgaagcaaaccgggaggctgataggttccagaggattgtcctaccgaaaatggataagtctgaggaggaatacgcaagtaactatctgaaacagaggctgagtgaggccgaggcagagaagcagtatctgtttgagaagattaagctgcaggaaaactcaagggtggcatcacaaagcagtggtgggggaggagacccgtcacaggtgatgatgtactcaaagatccgcgatctgcttcaaggatacaatctctctcccaaggttgatcctcaattaaacgagcgtaatcctttcagatccaatccctaatgcttcttcctcccttatatatatatgtagttttcatatcctaaatttcatcactgtgttttgtaaaacgagtgtttgttgccgtgtaggatctatctatattactgatgttttgtaatttgtgtgttctcactttgttgatatgacgttgtttatctccgttatggtttcttggttggttgnnnnnnnnnnnnnnnnnnnnnnnnnnnnnnnnnnnnnnnnnnnnnnnnnnnnnnnnnnnnnnnnnnnnnnnnnnnnnng

SEQ ID NO: 91130 - DNA, 543 bp, Arabidopsis thaliana columbia
  unsure (1)..(543): unsure at all n locations
aagntcaacgaggtaggaaactnttttggaagtgtgaggngcttattgacaagattaaaggtggtttggctgaagcaactnctgccaaattnatattaatgttttnncaagagatcgaatcagactctgcgaagagctttgaaaatggagaaggtggacgtttgatggcacctcaggatgcatgcaaccgaattgctgaagttgtacaagagactttgaggaaaatggagatagtggctgaggagaagatgagaatgttcaagaaggcacgcatggctcttgagacatgcgatagagagctcgaagacaaagccaaggaagtttcagaacctgaaagcagagaggcaagaagcaagaaacttcagatagatgagcctagagaggatcgtgaaggctgaagcaagccggaggcagacatgttccagctttaaagcaattgaggcaaagcgggaggctgattaggttgcagagggttgtccttccgaaattggatgagtcttaggaggattcggagaaccttnttaaccanaggcttgttagccc

SEQ ID NO: 91131 - DNA, 380 bp, Arabidopsis thaliana columbia
aaaaacaatgaagaaaacaccgtaacgaatcataaaatttctcaaaatccaaactctgttttttgttcttcctcttccagatttggtttctttttttgaaaaactctctagcttcagtttttttttttctctctctctctctctctaggaatgtttttgttcgtggatactggaatcatgagaataagattttgaaggagaaagcaagatccatgttctttgtcggagaatttagggctaatatgtggatttgagcttctttgattcccaatttgtgaaagttttgaaatttttgggaaagagagaatgtttaagcagtttctgagtaaacttccgaggaagtcttcaaaatctgattcaagagagctgaatcgttcgag

SEQ ID NO: 91132 - DNA, 739 bp, Arabidopsis thaliana columbia
  unsure (1)..(739): unsure at all n locations
gggaaggtgggacgcctggcgggacccggcccgaatttccggggtcgacccaggcgtccggggggaggggttattcttccattcaatagccaggggaccagattttgggcccccattatcagatttagcaaagaggggactaaccttgaggacccccctgagagcgagtggaagagatggaatgggagatcttccggagattggtggctaaacggggcgttttttactccgtctgggggggcagcctcgtctagctatgcaaaggcttcgagccttggggctaaaccgtcttctctagttggaccattgacgtctacttctggtgcactgaattgccgtaaaggttcccgttgctgattgtggcttagtggtcacacttaagtttttcccccattattatataggaaaaggcaattaaagccaccaattaagggggattaagtagtgtagtaagactttcttaatcccttgattcactcttttttttttgtttgtttactcgggtaaaattgaaggagaatcccccctctggctagctgctctctagggcccttcttaaggattctctgttttaaggaatctttaaattaggttaaagtgtgggaccaagtgcagatgtgttgatcttgatattaatataaatatgattttgtgtcttaagaaaaaaaaaaagaaaaagaaaaacccatagggcgaacgctctagaggatccaagcttacgtacgcgtgcagnnnnnnn

SEQ ID NO: 91133 - DNA, 642 bp, Arabidopsis thaliana columbia
agctgctacgcctgcaggtaccggtccggaattcccgggtctacccacgcgtccgagaaaacgtaatccaagccaatggaggagacgacatggggacagagaatacaagcggtgacacatatcctcacaaacccaacaacgaaaccatcactttactctcaattcttcatcggagccataattccaaactacgtatcgtgggattaccctccggtctattcgccgacgcatctccgtcaatggtgggtttctcagttcttcaaaagggtatcgagatttgggctgcctgatacatcgtggaggtcgaatagcccgtattatcagccaccggcggcggttatggctgtcggagttgaggaagggaaatgggggaaagaggagaggagagagtatgcgaggaacaggctgaggaggaagagattggtgaatgaagcgcatccatatattcctctctttagttccgaatttgcttttgtttactctcttgttatgggatcctcttcctgagtaaatttatggtggtgaatctgttacagattatctgtaagttattgaatttgttgtaaacaagatctgtgtgttttgtaaaaaaacaaaaccaagggcgaacgctctagaggatccaagcttacgtacgcgtgc

SEQ ID NO: 91134 - DNA, 425 bp, Arabidopsis thaliana columbia
  unsure (1)..(425): unsure at all n locations
nnnnnnnnnnnnnnnnnnnnnnnnnnnnnnnnnnnnnnnnnnnnnnnnnnnnnnnnnnnnnnnnnnnnnccacgcgtccggttcctctcttctctctcgatttcgaagtttccagcaatttagggttctttctcgattggagaattcgtatgttgttatcatgttctcgtcattgttgtgctttctttgttaaattctagatttggaatcgaaattctagactaatgtttaggaaacggaacttagttctagaatcatttcgtcgattcgatagcggtaacgtagaaaccctaatttcatgggtcttgtgtagtcgcacctcaaagccctctctgttctgtactagtgttaaacctgctagattaaactggggaagtttcttctcaagtaattctcaagaagaagctagaaacagctcttaaaga

SEQ ID NO: 91135 - DNA, 948 bp, Arabidopsis thaliana columbia
  unsure (1)..(948): unsure at all n locations
taatacgactcatatagggaaagctggtacgcctgcaggtaccggtccggaattcccgtgtcgacccacgcgtncgtacggctgcgagaagacgacagaagggtacggctgcgagaagacgacagaagggtacggctgcgagaagacgaccagaagggtactggcttgcgagaagacgacagaagggtacggctgcgagaagacgacagaagggtacggctgcgagaagacgacagaagggtacggcgcgagaagacgacagaaggggacgcacactcgcacatgggaacaaaagaatctgtcttcttctctgttctattatttatacttacttggtaaaatatctttcttgtgcagaacagaagaaaaagaaacacccatggctctgttttctagcgtctcagtttccgcgtttctcttgatcgttgtatcggttcaatggactctggtttgcagtgaatccacaatcttagcttctcctgctgttttaccgtatatcaatgcaccagatatgtcttcatttttcccttctccgaccaaagactggccaatagagacagcgacatctcctgttccggaaccagaagcgcctggtccaagctcaggccagcttaatgggaagatttcaggcagatcaatgcggctccatcctgatatttccttggttctagccattgttgggatctgtacctttctatgttttaatgaaccaatacttgttaggtttctacactattgatgttgtaatcttttgtggttcgcttttagagcctcattgttccttcttggagtctgttttactcttcatcacatgaacttcaacatatactacgttgttactgttaaaaaaaaaaaaaaaagaaatnaccnnnannnnnnnnnnnnnnnnnnnnnnnnnnnnnnnnnnnnnnnnnnnnnnnnnnnnnnnnnnnnnnnnnnnnnnnnnnn

SEQ ID NO: 91136 - DNA, 525 bp, Arabidopsis thaliana columbia
  unsure (1)..(525): unsure at all n locations
ggnatttttgacgcattgtggatggaactcgttattagaaggggtggcagcgggcctgccaatggtgacatggcccgtgggagccgagcagttctacaacgagaaattggtgacacaagtgttgaaaacaggagtgagtgtgggagtgaagaagatgatgcaagtagttggagacttcattagcagagagaaagtggagggagcggtgagggaagtgatggttggagaagagaggaggaaacgggccaaggagttagcagaaatggcgaaaaatgcggtgaaagaaggaggatcttcagatctagaggtagataggttgatggaagagcttacgttagttaaactgcaaaaagagaaggtataaagaagttgaatgtattgcaagttatggaacaataatgtttttgtaattctgatggtttgagttacaacagtaaaagattgtatttgttcattcaaatttacaatggatgagggcggccgctctagaggatccaagcttacgtacgggtgcatgcgacgtca

SEQ ID NO: 91137 - DNA, 519 bp, Arabidopsis thaliana columbia
  unsure (1)..(519): unsure at all n locations
gcaagtgattgagaaatacactaagagtactaggtttgcgctcattggaaaccatgtcaataagatcatcccagctttgcagtcgagatgtactcgatttagatttgcccctcttgatggagttcatatgagtcaacgtcttaaacatgtaatagaagctgaaaggcttgttgtaagtgactgtggtttggcagctcttgtacggctgagcaatggggacatgagaaaagcattgaacattttgcaggttctgtaatatttccttttggttctgtcacataatctacaattgtaaatctaaaaaagataatacatttcaatcactatgaatggatctgtaaaaatttctaacggatttattggtgtggacagtcaacgcatatggcgtcaaaggaaattacagaggaagagtcaaagcaaattacagaggaagacgtttacctctgcaccgganacccattgcccaaggacattgagcagatatctcactggcttctgaataaaccatntgatgagtgc

SEQ ID NO: 91138 - DNA, 443 bp, Arabidopsis thaliana columbia
cacgcgtccgagataaccgccgtgagttgagcatgggatggaactcaatactcgtgccatctgcagagagacgtataacagaagcggttgcagacgcacggtgttaccaagttttacgagcgaacgaggtcgagtttgagattgtgtcgacagagagaaccaacattgtggatatacggacacgggattgctcatgccgtcgttggcagatttacggattgccgtgtgctcacgcggctgcagcactgatctcgtgtggtcggaatgtgcatctgtttgcagaaccgtgtttcacagtgtccagctatcagcagacgtattcgcagatgattggagagattcctgatagaagcttgtggaaggatgaaggagaagaggctggaggaggagttgagagcttgaggatacgaccaccaaaaacgaggagaccaccaggtagaccg

SEQ ID NO: 91139 - DNA, 538 bp, Arabidopsis thaliana columbia
gctgctccccctgcaggtcccggcccggaattcccgggtctacccacgcgtccgcccaggcgtccgtaatcagcaacaacaatggctgcttcgctcgtcaggagttgttgctctcgtgcttcgagagccatcaccaccgtccggtttatgagcaacgtaccggaggacacggtttacggaggaccgaaaccgcagaactcgaatcagagagtgactttgacgcaattgagacagaagcatcggaaaggtgagccgataactatggtcaccgcctacgattacccttctgccgttcacatcgatacagctggaatcgatgtttgtctcgtcggagattcagctgccatggttgtccatggctatgacaccactcttcctatctccttagaggagatgcttgttcactgtcgcgcccgtgctcgcggagccaaaagaccacttcttgtcggcgatttgccgtttggtacttatgaatctagcaccaatcacgcggttgatactgcagttagggtgttgaaggaaggaggaatggatgcta

SEQ ID NO: 91140 - DNA, 813 bp, Arabidopsis thaliana columbia
  unsure (1)..(813): unsure at all n locations
ggctgacaatgacgagcagattgtnactcttgctgagcatctttcaactgactactgctacacatttccagtcaaaaagcctgcagcggtacctccagtaagagagcttaggaagctgctgagaatccaggctttacgttgccatgtcgtttatagtcagaatggcacccgaataaacgtcataccggtgctggcttctcgtatacaagctctgaggtatttgttcgtccggtggggaattgacatggcgaaaatggcggtatttgtgggggaatcaggtgatactgattacgaaggattgcttggtgggcttcacaagagcgttgttctaaagggagtgtcgtgcagtgcatgcttgcacgctaaccggagctatcctctcaccgacgtgatctcctttgagagcaacaacgtggttcacgcatcaccagattcggatgttcgtgatgccctgaagaaattagagcttctcaaggactgaaacctaaaataaaacgatcacatctccagtcatcaatgggttggtaccaaatgcgaactatctttttcatattgaccacatggtttggtttgttttattacttcgtcgtacataagctgccggaaatacctaactcttcatatggttgtctctttgacacctaccggattttacttcatttatgcaaagtattgtaataataaaaagaaaaagaggatattcccggtattttaattaacagaacaacattcatataaaaaaaaaaaaaaaaaaaaaagggcggccgctctagaggatccaagcttacggacgcgtgcatgcgaagtcatagc

SEQ ID NO: 91141 - DNA, 388 bp, Arabidopsis thaliana columbia
cccacgcgtccgcttcgcttaaaaaaatatcgcttctctcgagaggggaaggaaagttcatttctttttgtccaattctttcaacttctcgttccaatcccctcaattctccgtttcaccgaacgcacttcgaacccttaattgctttttgcgggtcaagtttcgattcgagcgttttagggtttcgtatctgaatcggtcgacaagataaacccttttgtgggggtttcctctagatttcgaaaacagagggatagctttcgtttggatggaaattctctgaaactaaactacatagtgatatggagacacaaattcatcaacttgagcaggaagcatataccgctgttttaagggcttttaaagcgcagtctgatgcgatttcttg

SEQ ID NO: 91142 - DNA, 533 bp, Arabidopsis thaliana columbia
gtccgaaaaagagctttagacagacgctcctccccttttgtaatttttttgatatcacgtgtgctctacgcgaatctatcaatatctaaatcctctctttctctgtctctctcctccttcttcttcttcttcctgtcgctgccttgtggttgagtgagcaaaaaactcaaaaccctccatggaaatgggagagagaatcaattcgagttgttgttagggggtttgcgatatttcaggcttctgtcggtgatctcgaccaaaaaaaataaacaaaggagctagtagggttctgttttctctatcactcggaaggaagctggtttatgtcaaaactttgttcttcggaaaatgcgaaaatcgttcaaggattcactcaaggctcttgaagctgatatccagttcgccaacactctggcgtcagagtacccagaggagtatgatggtggctacgctcagatgagattatcttacagcccggcggctcatctctttctcttccttcttcagtggactgattgtcatttcgctggcgc

SEQ ID NO: 91143 - DNA, 575 bp, Arabidopsis thaliana columbia
cgggtcgacaacgcgtccgctcgtctcctaatctgtacggttcttatttcgaaagggtaaaaaccaaaagcgacgcaaagggcaaaatcggaaaaagtgttttatttatggccgccgttagtagttcgtcggagaccggagactgcggcgttacgggaaagagagatgagatcatgttgttcggagttagagtcgtggttgatccgatgagaaagtgtgtgagtttgaacaatctctctgattatgaaaagtcttctccggaggatgagatccctaagatagtcaccgccggagctggagatggtgaagataagaacgaaacggatgcgacggtgattgtcgctgacggttacgcctccgccaatgacgctgtccagatttcgtcttcttccggcgggaggaaacgaggggttccatggacagagaacgagcataagaggttcttgattgggtttcagaaaagtaggaaaaggagatttggaaggaatatcaagaaactttgtgaagagtagggctcctactcaagtagctagtcatgctcagaaatacttcctcccgacgaacaacctcaaacg

SEQ ID NO: 91144 - DNA, 480 bp, Arabidopsis thaliana columbia
  unsure (1)..(480): unsure at all n locations
atcaatccaactgaggaaaaaaaaagaacagtccaaattagctagagttgtctttattatcatgcggaggaaaaaagaatggcagatcatgacaagagaaggaaggtgatacagaggagaaggagatcagaaggtaaacatgagtacaagagccatggtgaagaagatgtggagaggcttcaagagaatgaacgatgttagagattctagttgctttacctacaagatctaggccttgtggcagcttttcctcctcaacacagccaaagctgcttagtgtttttacttttattacaagatgttgtaggtttgtggagcttttcttccccacacagcaaaagctgctgcttaagtgtttaaggaatccaaaagccttttcattattagatccccactgagtttatggttcctgtagaacctgcagatcaccagaatcctttagctggnaaccattttaagttatncggggtggttttcntt

SEQ ID NO: 91145 - DNA, 643 bp, Arabidopsis thaliana columbia
  unsure (1)..(643): unsure at all n locations
cttttatctctttcttgtatttattttcctcccaaaaaacatctttaagagtcctcatggcgatgtctttatcaggagctgttctcagtggcatgggttcttctttccacaacgtaggagcaaagcagagtggtgttggtaccgtcagagttggccggaagagtgagctcgtcgtcgttgctcagcgcaagaagtcgttgatatacgccgttaaaagtgacggcaacatcctcgatgacctcaacgaagccacacgaaggaggccttggcggatggcgagaaaacaaaagactacattgttgagaaaaccattgaagccaatgaaactgcgactgaggaagctaagaaagctttggattatgtgactgagaaaggaaaagaagccggaaaccccccggctgagttcgtagagggtaaagcagaagaggctaagaatgccacaaagtcctgattcaaccactcatgtagtcatgttcaatagtttacaataagatcagtttgttgtaatttctttttcaccatttgaaatgaagagctgttaattaaaaaaaaaaaaaaagnnnnnnnnnnnnnnnnnnnnnnnnnnnnnnnnnnnnnnnnnnnnnnnnnnnnnnnnnnnnnnnnnnnnnnnnnnnnnnnnnnn

SEQ ID NO: 91146 - DNA, 804 bp, Arabidopsis thaliana columbia
  unsure (1)..(804): unsure at all n locations
cgacccacgcgnccgctccttctaccactaggttcaccacccacgcgtccgctaaccaccaagaatccaaattcagcagagatatatagctgcaggaggcatagcttcagaaacaagagagcaaagctgtaaaatcagtaatctctctagcccgagagaagcaatgcttttggtactcggcgtctcaggaggattatcaatgagctcacttgccggcgtatgcagctggtttacctccagaggataaaccaagactctgggaagcagaatgcgagaaagagcttgaaaatgttccaatggtaactacagagtcagggcttcagtataaggatattaaagttggtagaggcccgagtccaccggttggttttcaggttgctgctaattatgtggctatggttccatcagggcaaatattcgacagttctctggagaaaggtctaccgtatctatttcgcgttggctctggccaggtgatcaaaggacttgatgaaggaatcttgagtatgaaagctggtggcaaacgtagactctacatcccagggcctttggcgtttccaaagggtctagtttcagctccagggaggccgagagttgcgccaaacagcccggtgatatttgacgtgagcttagaagttcataccaggtctcgattcagaggaagagtgaaactctgttttttcaagtgcaaattggaatcttccatacaccattttacaagattctatgtatgatatttatctcattgtactcattcattgaagaacatcacattgattaaaaacgtcagtatttttcaattct

SEQ ID NO: 91147 - DNA, 520 bp, Arabidopsis thaliana columbia
aatacgactcactttagggaaagctgctacgcctgcaggtaccggtccggaattcccgggtcgccccccgcgtccgcgcgaaatagatacggtagacctttctcgttggctctggccaggtgatcaaaggacttgatgaaggaatcttgagtatgaaagctggtggcaaacgtagactctacatcccagggcctttggcgtttccaaagggtctagtttcagctccagggaggccgagagttgcgccaaacagcccggtgatatttgacgtgagcttagagttcataccaggtctcgattcagaggaagagtgaaactctgttttttcaagtgcaaattgtaatcttccatacccacatttacaagattctatgtatgatatttatctcattgtactcattcattgaagaacatccccttgattaaaaaaaaaaaaaaatcacgcaacccccaagggcggccgctctagaggatccaagcttacgtacgcgtgcatgccacgttatagctcttttatagt

SEQ ID NO: 91148 - DNA, 367 bp, Arabidopsis thaliana columbia
ggcagtgcgtaccaccagttgagtccggtggaagctcgaagttatagatgggtccgagtgaaccatatggtctacgattattgcactgacaaatctcgttttcctgttccacctccagaatgctcggctggaatctgatccaaacattattgtcttaaaagcaaaacaagtgcgaagtggttccataagcaacgttgcaatgtatgtgaagtgattaatgagtcttgtggtatgtggtgaattgctcataatcgatctgattgtggtcaaatgttcatatatatatgtatatctttgaattttactttgttttcatgatgtcttatgttttgttgatctattgaagagaaccatgtttgtttgttgg

SEQ ID NO: 91149 - DNA, 482 bp, Arabidopsis thaliana columbia
ctttacctgtctctgcccttaacctcacacagatatcgagtctcggcgattgaagtgaactctcatccttataatttcatccgaaagattttggataaagttttgatttttttggttcgcaatgacgctgctcgaagctatctccaacgccgtagcgaatcaggacaaggtcgactcgcaatccgattatccaatccctcttagccacgatggtatctttgcgaatctgaaaccaaagctagaaaaccctaatcttggtacccttgtcaatccaatttccgggtggggaatctctgaaagtgatgttgaagtcatcgatttgggtaaaaagttttcatctaagctgaaaaggaagcttaaggatactaacgggtttgtcaaagatgagtttgtcaagatgttaaagcagcttcttgagaaaattggtgagaaagtcgggatgtcagaggctgagtctgaaacaggtttgggagatcaagctg

SEQ ID NO: 91150 - DNA, 489 bp, Arabidopsis thaliana columbia
ccccctgcaggtcccggtccggatttcccgggttgacccacgcgtccggcacactgttcgattgtcgccggcgactcaacttcacggcgctatctctagcaatctgtcaccacccaatcgaaaacctaataattccatcgtccgatacggatgcggatcttcgaagcgtttccgtatcgtaacggtcttggcgtcactccgggaaaacgatgcaaacggaagggataactccgtgagagctatggaagtgaagaagatctttgaagactcgcctctgcttcctaagccgttatcatcgaaccagctcacggaatctgtctctaatggctcccgcgttcgtgttgcgtatcagggagtccgaggtgcatacagcgaatcagctgctgagaaggcttatccaaactgtgaagctgttccatgccaagagtttgacactgcttttgaggcggttgaaccgtggcttgttgacagagcttgtttaccgattga

SEQ ID NO: 91151 - DNA, 618 bp, Arabidopsis thaliana columbia
  unsure (1)..(618): unsure at all n locations
tttcgtccgcggacttttgggcggacgcgtgggcggacgcgtggggggcaattttacctctaagcttcgaagctccgacttcttcggtctgtttcttattaaacacacaaacaagaaaacgcaaaactaatcctctctcgaattagggtttcgtcaagatcctggagttgatgtattgagagaagccattgagataagagatgagctctacgcaggctaatctatgcagaccatccttgttctgtgcaaggacaacgcaaacaagacatgtctctagtgcaccttttatgtcgtcattacgctttgattatcgaccactccccaaattagctattcgggcatctgcatcatcatcgatgtcttctcagttttcgcctctacagaatcatcgctgccggaatcagaggcaaggtcctgttgtgtgtttacttggtgggaaggataagtctaacgggtagtaatgagctatcatcaacatggggaagctatttnngnaagcaaattggggnaggaatccagttttaaggnnattttttccgggggcngggttncanaaggaaaggccccttggggggntttccnccccgggggcccngnnntgaanggggnttacccggg

SEQ ID NO: 91152 - DNA, 520 bp, Arabidopsis thaliana columbia
  unsure (1)..(520): unsure at all n locations
cccacgcgtccgaaagagagaaaaaagacgatgagagctctaacatggacggcaatgtcgccgccggtgatgtcacggacggcgacttctacggttaacttacgacgtatcagcctacggagagatcgcgtctgtgttagagccacggcttcgtctagcgccacggtttccggcggaggagtagtagaggcggtagaattggcagagataggagaaagaagcaagaaatggaagtggaaaggagaatattctgttaactactttgtcaaagattcgccggaggaagttactccggcgagtcaaactgttcttttggttcatggctttggtgcttctattcctcactggcgaaggaacataaatgctttgtctaaaaaccatacagtgtatgcaattgatcttctcgggtttggtgcttcggataagccccctggttttagctataccatggggtcatgggctgagttgatacctcaacttctttggggaannngttnanaacccgctttttttnnttgna

SEQ ID NO: 91153 - DNA, 585 bp, Arabidopsis thaliana columbia
  unsure (1)..(585): unsure at all n locations
acgcgtccgaaagagatagaagtaaaaaaaaaagaaggggattttcgcatttgccctgagcgaaagagagagaatgtatttgacgagttccaggagaaatcagagctagagaaatctagtggtaatggggagagaacttgtagacaaacacatggataagaaagcgaatagtttgacagctagctcgacgggatcttcagatgataataaagtcccaagtccgtctactaatgaagctgcagaggtgaaagaatgcaccgagcagaatttggttgcggatgatgctcgtttgaggcaacaagggataactgagacacctggatcccataaatcttctgttaaacctcgtgttactgcgaaaacaactgttccaaagccgttttccctgtcggctgaaaagcctaggaagagcagccggtttgataataaattccattaagggaaatngtgcttagnccataanctnttcnttcagcntnaaggngtttcacagcttaaacttttcctttnccaactagggggggtncccgttcntaaggttccccctttntnaagnaggtagnttttttntttngttcccaacta

SEQ ID NO: 91154 - DNA, 457 bp, Arabidopsis thaliana columbia
agctactacgcctgcaggtaccggtccggaattcccgggtctacccacgcgtgcgctcttaataaagaaaatgatgaaaatgagtatcggaacaccaccttccggcgacggtgaaatggagctccgacctggaggaatggttgtacagaaaaggacggatcatagctcaagcgtgccacgtggcattcgggttcgggtcaaattcgggtcggtccatcacgagatcagtatcaactctcaatctactttcggtaaacgacacaaaacattccgagttatacagtatttcctttatactattagtatgctctggttttggaatttgattggtggtggtggtggatttaacaaccggggaattaaagaagatattggctggtgcgaccggagttcatcatccagacctgccgattatattccaagaccaagaaagagactctaagatggttcttgatct

SEQ ID NO: 91155 - DNA, 584 bp, Arabidopsis thaliana columbia
  unsure (1)..(584): unsure at all n locations
tacgcgcaannnnnnnnnnnnnnnnnnnnnnnnnnnnnnnnnnnnnnnnnnnnnnnnnnnnnnnnnnnnnnnnnnnnnccacgcgtccgcttttctcacaattccgattttctcaaaaaccaaaatcacaatcgaagaaatcttttgaaagcaaaatggaagagatttcgacggatccggttgttccagcggtgaaacctgacccgagaacatcttcagttggtgaaggtgctaatcgtcatgaaaatgacgacggaggaagcggcggttctgagattggagcaccggatctggataaagacttgctttgtccgatttgtatgcagattattaaagatgctttcctcacggcttgtggtcatagtttctgctatatgtgtatcatcacacatcttaggaacaagagtgattgtccctgttgtagccaacacctcaccaataatcagctttaccctaatttcttgctcgataagctattgaagaaaacttcagctcggcatgtgtcaaaaactgcatcggccttggatcagtttcgggaacactacaaaggggtgggatgtgtcaattaagagggtgataatctt

SEQ ID NO: 91156 - DNA, 637 bp, Arabidopsis thaliana columbia
cgcagtaccggtccggaattcccgggtcgacccacgcgtccgtgctattttatcctatgagattgcagtggtggatctgagaggggctgttactcgtggtgttggggctcaaggaattgaactcagtgaaacagtgcgtaggatggaagagtctattccccaagttgttgttcttcttgaagctgcagttgaaaggtgtattggctttactggagggtcagaggcagacgagctgatacttgcattagatgacataatgttgcagtatatctctatgcttcaagaaacactcaaatctttgagagttgtgtgtggagtggatggtacaggtgatggagttggctcaaagaaagatgcaaatgcagagaaaagggagagctctcgcaagatggatttgacttcaaatgaagaatggtccattgttcaaggagcacttcaaattcttactgtagctgattgtctcacgagcaggtcttctgtctttgaagcctctttgagagcaactctagctagactaaactccagcttgtctatttcatttattggcccagatttggatcacaacctatcacatttgaaaagtgaacaaactgctggagaattgtctatggctggacaaactttcatggatgtggca

SEQ ID NO: 91157 - DNA, 408 bp, Arabidopsis thaliana columbia
cccacgcgtccggtggagatatgatgacattacttatgaggaatgacacacttactgaagatgaggcaagattttatgttggggaaactgtcttagctatcgagtccatgtcataagcacaattagatccacagagatatcaagcctgataatctgctactcgacagaagcggtcacatgaagttatccgattttggattatgtcagccattagattgtagtattctccaggaaaaagatttcgtagttgcacacaaccttagtggggctctacaaagtgatggccgccctgtggcaccgagacgtacccgctctcaaatggaacaattacaaaactggcagagaaatagaacgatgcttgcttattctacagttggaactcctgactatattgctccagaagttttg

SEQ ID NO: 91158 - DNA, 411 bp, Arabidopsis thaliana columbia
aagaaaataaaattaaggatggctttgagcggcggcgatgatcaggtacctcctggaggtccgatgacagtttcaacacgtctgattgatgccggatcgacgatcatgcagcggcgattaccggtgaagcagatgaacactcatgtctctactttggcgatatatggtggtgacatgtcccggctaatagggactcaccactatgtccaccgcgtcaacgacgagttccttcagtgtgctgtttacgcctctgaccgctccgatgcacctctaatcggaattgaatatgtaatatccgaccgattatatgaaactttgtctgaggatgagcaaaagctttggcactctcatgcatatgaggttaagtcaggctcgtgggcttatccacgattgcctgagttgtggctgctc

SEQ ID NO: 91159 - DNA, 533 bp, Arabidopsis thaliana columbia
tacgactcactctatggaaagctggtacgcctgcaagtaccggtccggaattcccgggtcgacccacgcgttcgcccacgcgttcgcgtttcaccagtggtggttggactttgatttttcctttgtagcatacttacaacagatgacatcggtggtctcaatgttggagatgggtttgtacagagtaaagcgatgttcaacatcctcattgcttctttctttcgaaaaccttgtaccgagatctggatccccgagttctagaagactcccttggtcttgcaagacatatgcccaagtcaagaagggtaataaaactccttcttttggtctgtaatttagtgttgcttctctccgcttacaatctcttaaccagactaccaccgaagctataaacatctggctttgtctggtaaagtaccttttattggatacctcgggagccctggtacccttttgcttaaatgaaattataaagtcggaaagtggtaaccccttcctcaaataatgctctactccatcacttcctgtactca

SEQ ID NO: 91160 - DNA, 551 bp, Arabidopsis thaliana columbia
cggacgcgtgggcggacgcgtgggcggacgcgtgggaaacgataatgggaagcgcaccagctcagattccgactagcttcggccatgagcttagggcttgtcttcgttgccgactcgtcaagacctatgaccagtttagagacgctggttgcgagaattgtcctttcttcaagatggaagaggatcatgagcgtatcgtggaggtcactacccctaatttcaatggtataatctctgtgatggatccaagtagaagctgggcggctaggtggttaagaatcgggaagtttgctcctggttgctacacacttgctgtctcagagccactccctgaggaaatgcagcacttatgccaagaggagcgtgtacaatatgttctgccgaaacgcatgtgaagaaatctatcacgatgaaggctagtagggaagaccaagtattccactttttcattaaaagcttcttgaaacattattaggtgctttatttgaatcttcaatcttgtggaatggtcgatgttaatgaagtcagagactccttaacacttttctatg

SEQ ID NO: 91161 - DNA, 427 bp, Arabidopsis thaliana columbia
attattagttcaaaataacaaaaacagaagaaaattaaaatctaaacacctgaaaaaaaaaatgaaatatctgtcagtgtttctatttttttatggcctatgcataattggtaatgtatatggacgagcaaacaagctccatatctggaacgatcttgatcccaatcagaagcactcagacctctttgtgcagtgtaaatctggaaaggccgacatgggaaaacattatgtcaagtatggaaaaatatatcaatttgatattagggataatttttggaagacgacacttttttggtgtacctttagacatgggcctgattataggactggccaacaatttgatgtgtatgaatataaaccgggtgtggctcaaggaggcacatatgaatggacagctagagaagatggaatatattttacgttaaat

SEQ ID NO: 91162 - DNA, 370 bp, Arabidopsis thaliana columbia
gcttcttttctcccttctcttcccgccgtgaatctggtgtctgtgtctgcatctccttccgacgaaaacagatacactcgagtgaagaaagtatgaaatttaactttaacgagacagaggatgcacccagattcacgacgatctccgacgcccaaagagccggttaggtgggttcctctccagagccacccggttttcgcttctcttccttcctcccaagatgaacccgccgtgtcgcagctgtttccgagaaatttcatggcttgggacggagactcgcgcgtatactactgggattcgagacgatatctccttcaccgattatctctgcgcttgggtgaacctgaaccatcctccgtcctcgccgcag

SEQ ID NO: 91163 - DNA, 649 bp, Arabidopsis thaliana columbia
  unsure (1)..(649): unsure at all n locations
aagtcccatcactttcggcaagctttcnttcnaaccacttttcgcttttnccaccccaaggaggttncgatgaagaattttntggaacccctnatgaccancncgataagatcaaggattcctgagaggtttacccctgacaaagctttcacaggggcttcagagagggtgggtagtaagagagaccgacctgttgagtttgacaaggaaggaggaaccaagatcctttcggtcctgagaagtgggtttctgatttaaagaaagggtaagaaacctttggaccagatcgggtctggtggaactatgagagcaagtggcggtggtggtagctcttcaagggacgatgaccccggcgggtctggtccaaccaaggtccatttcgaaacgcagtggccggcggttaaagtccagacaaagaaaaagctcaggaactggtctttggtttccatatataacctggtattttggatctggtaaaaccagttggctttggattatccggatttatggtggtgtgagtctctttaacgtactcggaatcaatctttcaagtttcaaaaaaaaaaaaaaaaaaaaggcggcccgctctagaggatccaagcttacgtacgcgtgcatgcgacgtcataatctttctatagtgtcacct

SEQ ID NO: 91164 - DNA, 832 bp, Arabidopsis thaliana columbia
  unsure (1)..(832): unsure at all n locations
gaccgtgacatcagtgagaaagttgctcttggaatggcatctactggaggaaaaggtggtggtgaagttatgtatgatcaacgtctgtttaacccagacaaaggaatggactctggtttcgctgctgatgaccaatacaacttatacggcaaaggcttgttcactgcacaaccaactctttcgacttttgtacaagccaaagaaggataccgatgaaggaatgtatgggaacgctggtgagcagctcgataagatcaagaatactgagaggtttaagcctgacaaagctttcacaggggcttcagagagggtgggtagtaagagagaccgacctgttgagtttgagaaggaagaggaacaagatcctttcggtcttgagaagtgggtttctgatttaaagaagggtaagaaacctttggacaagatcgggtctggtggaactatgagagcaagtggcggtggtggtagctcttcaagggacgatgaccacggcggttctggtcgaaccaagatcaatttcgaacgcagtgaccggcgttaaaagtcaagacaaagaaaaagctcagtaactgatctttgatttcaatatataacttgttattttggatctgttaaaacagtttgctttggattatcagtatttatgttgttgtgagtctcttaaactactcgaatacaatctttcagcttcataatatcagatcttttgagcttaaaaaaaaaaacaaaaagaaaaaagnnnnnnnnnnnnnnnnnnnnnnnnnnnnnnnnnnnnnnnnnnnnnnnnnnnnnnnnnnnnnnnnnnnaacgaaagcatacaaccggccggggg

SEQ ID NO: 91165 - DNA, 586 bp, Arabidopsis thaliana columbia
cccacgcgtccggagaaatccaaaatgagaattcttttgttctttcttcatttgatttaatacctttcttcatctacttgtcaatatcactgactctttcacttttacgggtcccagggtcttcaaagagaggaacaaaaagaaaatcagatttcagtttttttttttcatttctaacataacattccttggtccgatttattctttttttcaagatcatgaagactaacagagaagaacaaatgataaaactgtttggaattcctctttctgataaacccagatggcaacaatttctcatctgttcttctggtttcttctttggttacctcgttaatggcatctgtgaggaatatgtgtacaaccggcttaaattcagttatggatggtatttcacgtttgcgcaaggattggtgtacattgccttgatttacatgtatggcttcaggacgaagcaaatggtgaatccatggaagacttacgtgaaactctcaggtgttcttatgggttctcatggcctcaccaaaggctccttggcttatctcaattattctgctcaaataatgttcataatcactaaggtttt

SEQ ID NO: 91166 - DNA, 443 bp, Arabidopsis thaliana columbia
cccacgcgtccgctgaagagtttagactcaagtctgatgtcagtgttcatgtttgtgtatgtatattggttttgtcggaaaataattaaattggtgatataattcatatgtatgataattttaaagattgcaagcataagaagtcggattagagatgaggagagattattagggagcgatctatcgctagcaatgatgacgacgactgtcagatcggaaaagcagcaatcggacggtggaggaaatcgagtggtgggaatggcagcatcatcaggattctctcctcaaccttccccttaccgcattcctcgcaccttccacttctctcgtccctgattcatcatcatcatcatcaactatcattacaatcatcatctgagctagtgttaaccaagttatgctttaatgaatttgagttattctcgagctatttttgggctctg

SEQ ID NO: 91167 - DNA, 734 bp, Arabidopsis thaliana columbia
ctctagggtaagttgggccgcctgcaggtcccggtccggaattcccgggtcgacccacgcgtccgcctctttaagagtcacttgactttaatatttctctttttgtttctttctccttttctctgttttttcttttcttttctctttgcgattcgctgagagcatgcctgaatgtcaagagaaagggagagatttgaagagatagggaagaagatcaaaagagaagcagatgcttggcctcatcaaatggctggaattagaagaccaatgtcgggtcctcccggaaccctcaataccattacgccttgtgctgcctgcaagcttttgcgccgtagatgtgctcaagaatgtcccttttcgccatatttctccccacacgagcctcataagttcgcttccgtccacaaagtctttggagctagtaacgtctccaagatgctaatggaagtacctgagagccagagagcagatgccgcgaatagccttgtgtatgaagcaaacgtgaggctaagagatccggtgtacggatgcatgggagccatctcagctctacaacaacaagtccaagctttaccagccgagctcacggccgtaagatccgagattcttaagtacaagcaacgagaagctgtcgccactttgatcgtaccttccaactcccaagtgccggatttcacaactccgggtgtttcgtgatgcacaccacacaagaccacactcacacaactacacgg

SEQ ID NO: 91168 - DNA, 588 bp, Arabidopsis thaliana columbia
cccacgcgtccgaaaatggttcatgtgtcatcatctcatggagccaaagatggctctgaagaagcctatgattacagaggaaacccaccagataagtctaaaaccggtggatggttaggcgccggtttaattttagggagcgagctatcagagagaatatgcgtgatgggcatatcaatgaatctagtgacgtaccttgttggagatttacacatctcatcagctaaatcagcgaccatagtcaccaacttcatgggaactcttaaccttctagggcttctcggtggttttttggctgacgctaaactcggtcgctacaagatggttgcaatctcagcttctgtcacagctctgggagtgttgcttttgacggtggctacaactatctcaagcatgagaccaccaatatgtgacgatttcaggagacttcatcatcagtgcatagaagcaaacggacaccaggtggctcttctctatgtggctctctataccatagctctaggcggaggaggaatcaaatccaacgtctctggttttgggtctgaccagttcgatactagtgatcctaaagaagagaaccagatgatt

SEQ ID NO: 91169 - DNA, 730 bp, Arabidopsis thaliana columbia
  unsure (1)..(730): unsure at all n locations
nnnnnnnnnnnnnnnnnnnnnnnnnnnnnnnnnnnnnntgcaggtaccgggccggaattccctgtttaccccccggccccgggcgcgtgggcaaaaacaaaacaaaacttaagttcatacatcatggccttaatagctaccaaaataagttcacgttcttgttttgtttctgcttatccaaacaattctccaacgtttctgatatccaaatttcccaagtacggtcgattctttgtcgcctgcaaatactgctaaaagatcgatcttgagaaacgtccatgcttcagtttctaacccttcgaagcagtttcataataagacatccttagtatatatattctgcttactttttggtgctcatgctgttttcagaactaagaatgtgtttgttcttgtacgtaggaatatttacacgagttgaatatcaagaagatcaagaatatactaagtgcaaacgtagatgttccatccgaagaacctggagatgatcgatgtcattcaaagtttaggctttgatctccattttcgacaagagatcgagcaaacccttcacatgatttacaaagaaggcctccaattcaacggtgatctccatgagatagcgcttcgctttcgattgctgagacaagagggtcactatgttcaagaaacttctgagctccgtgtagaaggtgaagaaacactcgacggtgcgagagaattcacatatagccgccttaatgaactttgc

SEQ ID NO: 91170 - DNA, 521 bp, Arabidopsis thaliana columbia
atacgactcacttagggaaagctgcgtacgcctgcaggtaccggtccggaattcccgggtctacccacgcgtccgacgtgactttgctcgcattgatggatggtatttggctcccaattcaaatttatcatcacctgtaagtgaaacgcttggaggaaccaagtcaggagatattatattcacagacatcagcctggttagcctagtgcaatttcaccggccttcaaatttacccggagctactaatactttgcattgttcttagaagtaacacttgaatgcatatctcaaatgctcttaccgataagtggcatggagcaaactagctttctcttccagcaggcatctaagggttggattttctcattcaaacattctgcgaacaatcgtccaccgtgcttgctcgagggttcccctcttgaatggtataattatgggtatagtcaattactccaaggttcaaccacccttgaagtctctgaggacccccagaaagtgtttgtcatatttggaggagatac

SEQ ID NO: 91171 - DNA, 658 bp, Arabidopsis thaliana columbia
  unsure (1)..(658): unsure at all n locations
ancntgggcccnagcggggttttttcccgggctcacctngttcccntnggcaattcccccgccntcaatttccccggggntnctaaaccttgccatngtcttaggaggtacccctggaatgccaatcccaaatgcccttacaagataaagtggccatggagcaaacttagctttcttcttcccagcaggccatcttagggttggatttccccattcaaaccattctgcggacaaatcggtcccaccgtgcttgcttcgaggtttccccatcttgattggtataattatgggtatagtcaattactccaaggttcaacaaccctggaagtctctgaggaccccctagaaagtgtttgtcatatttggaggaagatacttcacgagcggcagggtgtcccgtcatgagtggtactaaatgtctgggtacaatttgcaaagaatatgtagattgtaagttgaaaaagaacgcagacatccattttgaggtgttatcattgtatctttatgaaatccattaattccctgtgtatattgtcattaaacgataatagtgggtgcaataggattgccctgaaaaaaaaaaaaaaaaaagggcgaccgctctagagggatccaagcttacgtacgcgtgcatgtgacgtcatagtcttctatagtg

SEQ ID NO: 91172 - DNA, 728 bp, Arabidopsis thaliana columbia
gtgaagaagacgacctccaagaagaaagatacaaaaacagagcaacgccacccacccacggcggttcttccgccacaccaaaccaccagcaccaccgccgtaccaacagcgacaacaagcaccagcacactctaacacctctccaccacaacggcaaaccccaaaccagaaaacgacatgacgacaacgacgaagacgatggtggtgccgtatcctgcaacaagtgtcgacctcaccactctcaccgtgacaaattctccgtcgtacctctcgaaagccacaacaacccttctttcatctctagccccaatctcataatcaaatccatcttccaatctctcacacggagaagccccaaaccttcctctgcaacggcgggcgcttccaccgcgctctgcctcatcctccgccgcagatgcttctagagaagaacagtggcggttagctgtggcggagctttctcataaactgattcaagccacgaagaagaaagaagacgcggttatagaagcttctaggttgaaatcatccatggcagagctagagaagaaactcaataaactcgagatttactgtcacaatctcaaatcaggtctcgacgaatgcagcaacaaaaaacagagtgttctcgattcgaaaagacggtttcatcgacaggatcattcagcagtttctcgtctctgtgtcggaatctcgttcttcgatcagagctttaagtagatctctcg

SEQ ID NO: 91173 - DNA, 449 bp, Arabidopsis thaliana columbia
ccgggggggtcccacccgtccgataattttgacaaaccccccttttcaaaaaaaaaaaaaagagttcaaaatgaaaaacgtgagaaatggatttgtcatcattcttctcaccgtccttagtctctgaaaataaattctgattttgatttcgaattttagggattttgagagagagtcagttatgagtagttcggagagagtaccgtgcgatttctgcggcgagcgtacggcggttttgttttgtagagccgatacggcgaagctgtgtttgccttgtgatcagcaagttcacacggcgaatctgttgtcgaggaagcacgtgcgatctcagatctgcgataattgcggtaacgagccagtctctgttcggtgtttcaccgataatctgattttgtgtcaggagtgtgattgggatgttcacggaagttgttcagtttccgatgctcatg

SEQ ID NO: 91174 - DNA, 392 bp, Arabidopsis thaliana columbia
  unsure (1)..(392): unsure at all n locations
cggacccctccgcccacgcgtccgaaaactcttgagagctaacaaaacagagaaccaacgaataaaacaaaaatgccttctttagagaaatctgtaacaataatctcaagaaacagagtcttcccagaccaaaagtcaaccctcgttgacctcaagctctccgtctccgatcttcccatgctctcttgccactacatccaaaaaggttgtcttttcacgtgccctaaccttcctctccccgcgcttatctcacacctcaaacactctctctcaatcactctcacccacttccctcctctcgctggccgtctctcaacctcctcctccggccacgttttcctcanctgcaatgacggcggcggcgntttttgttttcggccaagcaaaatcca

SEQ ID NO: 91175 - DNA, 943 bp, Arabidopsis thaliana columbia
ttgttttaggtgcacactatagaagagctatgacgtcgcatgcacgcgtacgtaagctcggaattcggctcgagaaggaatattcattaagatggcatcttctatagtctcttccatgtttctctttctccttcttcttcttgtatttccacatatagataatgtccttggcgcacgaatggaactccgtgaacttggagagataaattatgctgatccactaggttttactcggcccattgtccccattcatgttccgggttttccgcctcggcggccaactattccgcagttaccaccatatcgtcccagaaggtgccctttctgttatcctcctcctcccccaaaggctttcccaaaaaactcaccaagtcactgatgtcactatagctacgaaattgcgtcaataaatgtatgcacgttaatttgtttcatttgtgatgtgtggggctctttatctattatatgcatgtcacgtgtttgtcatatttgcaatgtatcatgtatgtggctctttatctattatatgcatgtgtttgtcaattgtcatatttgcgatgtatcatgtatgatgtatgtgggctctttatttattatatgcatgtgtttttcataaaaaaaaaaaaaaaggaatgaataaaaacaaaaaaataagaaaaaaaaaaaaaaaaaaataaaaaaaaaaaaaaaaaaaaacaaaaaaaatactactatggggggggcccctttaaagaacccaagtttacgtccccgggcttgcaaattataagcttttttttagggccccctaattcaaatacttggcccggggttttccaccgcgagggctgggaaaaccccgggggttccccacttaatacccttggcaaaaaaaccccctttttccccggttgggggtaatttgccaaaaaagccccccccccccaatcgcccttttcccaaa

SEQ ID NO: 91176 - DNA, 1140 bp, Arabidopsis thaliana columbia
agcgtctctacgactcactatatggaaagctggtcacgcctgcaggtaccggtccggaattcccgggtcgacccacgcgtgcgtaatacacgaaaatggaggtcaagtgtacatggatggtgccaacatgaatgcacaggttggtttgacgagccctggttttattggagcggatgtgtgccatctcaatctccacaagaccttctgtattcctcatggaggtggtggtcctggtatgggtcccattggtgtgaagaatcatttggcaccatttcttccttctcaccccgtgataccgactggtggtatcccacaacccgagaagacagcacctttgggtgcaatatccgctgcaccatggggatctgcgcttatcttgcctatatcttatacttacattgccatgatgggatctggtgggctcactgatgcctctaagattgcaattttgaatgccaattacatggcaaagcgcctagagaaacactacccagttcttttccgtggtgttaacggaacagtagcacacgaattcatcatagacttgagaggcttcaagaacactgctggaatagaaccagaggatgtggcgaaacggctaatggactatggattccatggacccacaatgtcttggcctgtccctggaactcttatgattgagccaaccgagagtgaaagcaaggcggagttagacaggttctgcgatgctctcatttcaatcagggaagaaattgcacagattgaaaaaggaaatgcagatgtccagaacaacgttctcaagggagctccacatcccccatcgttgctaatggcagacacatggaaaaagccgtattctcgagagtatgctgctttccctgcgccttggctccgctcctccaagttctggcccaccacagggcgtgtggacaatgtatatggagacaggaaactggtgtgcactctcctcccagaggaagaacaagtcgcagctgcagtgtctgcttgattactgctctgtcccattgtgttgtgtccctttctctcaccacgcactcttctctttcacattctgtccatagtgttctcattatacgctttctgtctcttactctattatttcattcgaatacatcttctataaattatatattccac

SEQ ID NO: 91177 - DNA, 613 bp, Arabidopsis thaliana columbia
  unsure (1)..(613): unsure at all n locations
agaaatgtgtgcatcatacctgtttctgcacacgggacaaaccctgctagtgctgccatgtgcggaatgaaaattgttgccgttggaactgatgccaaaggaaacattaacatcgaagagttgaggaacgccgccgaagccaacaaggacaacttggctgctcttatggttacatacccttccacccatggagtctacgaagagggtatcgacgagatctgcaacataattcatgaaaatggaggccaagtttatatggatggtgctaatatgaatgcacaggtgggtttgacaagccctggttttattggagcggatgtttgccatctcaatctccacaagaccttctgtatccctcatcggaggtgggaggtcccggaaatggggccctatcggtgtgaagcaacatttttgggntccattcccacccttttttacccagtggttacctacccggtgggatcccttgaccccgggcaggcattaaccgttcgggaccatttttttaaganccatgggggttttngttatttnncaattccggatacttnnattcatnatgggtntnggggctaccgntncccaaagttaaattttanggtctncatgnaag

SEQ ID NO: 91178 - DNA, 886 bp, Arabidopsis thaliana columbia
ctatacgacttatatagggaacgctggtgcccctgcaggtaccggtcctgaattccgggtcggcccagggcgtgcgagtaaacttcccaaaagagaagtctcggcttcagcttctaaagttgtagagaagaaatggttagtgaaagatgaaaagaaaatatgctacaagatgaaataaaccgggttaattcggagaacaagatctaaccgggggtgggcaagatctgggaaaatactataatcttaataatcttatgggggagttgcaagtcgaagatcctgaaaggttaactttcaaacaaacgctaacggggaaccaaacaaaactgttagtttgtagctcccattggacttaggtcgggccattcggaacttaccacgttaagggagggttcaaccgttacttggttgtgggaatcttgcccaacgttggaaggaaattctcttcagtatcgtctttggggtttgattggaaccattgtgtgtggtttccgtcctgggaacttgaaaagaggattcaaggggagaattcgggccaaaattccgagaattattcctttcttaggctttctaagggtctgtttcaccggttgttaaaaaaaaaagggcacggaggccaaaatctttttttggggccccttcaagggacttacccacgggccatgggggggccaggagggaatgttttatgagggggcttgacctggggaacaaaaggagggcattcaagtgttgggcaaaagggtttttttgaaaagaccaagtaccggtttgccggttttcgggggtgtaactcaaacctgggtttaacgtgttgtgttgtttttggcccccaagaagggatttgtgttttgggctttgtttgtgggtttttccactaggcggg

SEQ ID NO: 91179 - DNA, 629 bp, Arabidopsis thaliana columbia
  unsure (1)..(629): unsure at all n locations
aaccttcggttgttcctgtccctggaggaactatacatccattgacaaggtatgtaatgaattacctcaacttgatctctgactatagggaaacgttgattganctcatcatgacgaaaccatgtcggggtttgaaatgtaccaatgatcgaaacgntccggatatggatatctctnagcttgaaggaatatctccgttagctttgcatattatatggacaatggtgatgctacaattcaatctagaagagaagtctttgcattacagggacgaacctttatctcacatcttcgtcatgaacaatgtccattacatagttcagaaggtcaaaagctctccggagctaatggagttgataggagacaagtatttaaggaagcttaccgggatatttagacaagcagctaccaagtatcagagagctacatgggtcagggtgttgaatagcttgagagatgaaggattacatgtgagcggaagcttctcttccggtgtatcgaagagtgctttaagagagaggtttaaagctttcaatacaatgtttgaagaggttcacaggattcaatcgacatggtcggttccggatactcagcttagagaagaactcaggatatctctatcggagcat

SEQ ID NO: 91180 - DNA, 590 bp, Arabidopsis thaliana columbia
  unsure (1)..(590): unsure at all n locations
aaaagttgcagcttgtgcaaagcattttgttggagatggaggtacagtgagaggaattgatgagaacaacacggtgattgactcgaagggcctgttcggaattcacatgcctggatattacaatgctgtaaacaagggtgttgcaacaataatggtgtcttactctgcctggaacggtttgagaatgcatgctaacaaggaacttgtcacgggtttcctcaagaacaagttgaagttcaggggttttgtcatctctgattggcaggggattgataggatcacgactcctcctcatcttaactattcatactctgtttacgcgggaatcagtgctggaattgacatgattatggttccgtacaactacactgagttcatagacgaaatcaacagtcagatacagaaaaagcttatnccgattagcaggatcgatgacgccgtgaagagaatcttaagggtcaaattcacaatgggactctttgaggaaccacttggctgatctncaacttttgccaaccagccttggtngcaaggancataggggacctagctcntaaagccnttaaggaagnntctagtgctgcnnaaga

SEQ ID NO: 91181 - DNA, 510 bp, Arabidopsis thaliana columbia
atacgactcactttagggaaagcacgtacgcctgcaggtaccggtccggaattcccgggtcgacccacgcgtccgcatcatcatcgtcttcatcatcatctctctctctcttctcttcgttcctctttctttacacgcttgaaaccctagcaatttcaatttcgtttcctctaatagaatcttcatctttttatggcgtaacgttacacgaatttcaacgatttaggttttttttttttttttttgaagaatcaaacacaaagatagaaacaatgtcaacggagactaccacgggaaattcctcgttaattccagcatcatcatcatcgtcatcctccgacgctatcgatccagctccgttgcttttaaacggcgacgataatgaaggaagcaacggaggaggaggaggtggggaacggagatctcaggagacaagggttgagagaagctgcgaggtttcttagtcgtgctagtagcggacgcgtgaggcgtgagccttctatgcttggg

SEQ ID NO: 91182 - DNA, 613 bp, Arabidopsis thaliana columbia
  unsure (1)..(613): unsure at all n locations
agctccctacgactcactattgggaaagctggcacgcctgcaggtaccggtccggaattcccgggtcgacccacgcgtgcggatcgccgaatttgcagtaaggagacgaaaatatggtgcacgtttgctactaccgcaactatggaaagaccttcaagggaccacgtcgtccttacgagaaggagcgtcttgattctgaattgaagctggttggtgagtatggtctgcgtaacaagcgtgagctctggagagtgcagtactctcttagccgtatccgtaatgctgctagagatcttttgactcttgatgagaagagtccaagaaggatctttgaaggtgaggctttgctccgtaggatgaaccgttacgggcttcttgatgagagccagaacaagctcgattacgtcttggctttgactgttgagaactttcttgagcgtcgtcttcagactattgtgttcaagtctggtatggctaagtctatccatcactctcgtgtcctcatcaggcagaggcatatcagggtggaacaattgggacatccacatcatggggncttgtccagagncatgncttgccccagcctcgggggcgcccaaataaaaanaaaant

SEQ ID NO: 91183 - DNA, 973 bp, Arabidopsis thaliana columbia
  unsure (1)..(973): unsure at all n locations
tgaactatcgatgagctatgacgtcgcatgcacgcgtacgtaagcttggatcctctagagcggccgccctagttattcagatcgccgaatttgcagtaaggagacgaaaatatggtgcacgtttgctactaccgcaactatggaaagaccttcaagggaccacgtcgtccttacgagaaggagcgtcttgattctgaattgaagctggttggtgagtatggtctgcgtaacaagcgtgagctctggagagtgcagtactctcttagccgtatccgtaatgctgctagagatcttttgactcttgatgagaagagtccaagaaggatctttgaaggtgaggctttgctccgtaggatgaaccgttacgggcttcttgatgagagccagaacaagctcgattacgtcttggctttgactgttgagaactttcttgagcgtcgtcttcagactattgtgttcaagtctggtatggctaagtctatccatcactctcgtgtcctcatcaggcagaggcatatcagggttggaaagcaattggtgaacattccatcattcatggtgagacttgattcacagaagcacattgactttgccctcaccagtcccttcggtggtggccgtccaggaagagtgaagagaaggaacgagaagtctgcctccaagaaagcctcaggtggcggtgatgcagacggtgatgacgaagagtaaatctgaagtcgcaccgttttagctatgaatcaatctgctttttgatattttgtagtaagcaactttgttgttcgttttcagaggattgttttatggtttctttcttttactctcgagattgctaaacctttgggttatcatctatttctcacaattatcttttaaagttttgccttaaaaaaaaaaaaaaaaagggannnnnnnnnnnnnnnnnnnnnnnnnnnnnnnnnnnnnnnnnnnnnnnnnnnnnnnnnnnnnnnnnnnn

SEQ ID NO: 91184 - DNA, 514 bp, Arabidopsis thaliana columbia
agcggacacgtgggttcgtctctctttctacggttcaaacattaaaaagatagatggagaagaggagctctattaaaaacagaggagtacttagattaccaccagggttccgatttcacccgaccgatgaagagctagtggttcaatatttacgtcgaaaagtaaccggtttacccttaccagcttctgtaataccggaaaccgatgtttgtaaatccgatccatgggatttaccaggtgattgtgaatcagagatgtatttttttagcacgagggaagctaaatacccgaacggaaaccggtcgaaccggtctaccggttcgggttattggaaagcgactggtctcgataagcagatcggtaagaagaagcttgtcgtggggatgaagaaaactcttgttttctacaaaggtaaaccaccaaacggaacaagaactaactgggttcttcatgaatatcgtcttgttgattcacaacaagattcattatatggacagaacatgaattgggtttt

SEQ ID NO: 91185 - DNA, 608 bp, Arabidopsis thaliana columbia
  unsure (1)..(608): unsure at all n locations
tgtgtgcgttggtttgttcgtcgaggagaatgttgcttgctgtgagattctcatggatcatgttctcgttgctgtgaaggtgagctaaaccacgactgattccttttgctatcttcattcttgtttcccacggaattagggtttctggtcctcgagcgtgaagaaatgcagagaggcttcctttagacatgtaatcanagacgagaagcttctctcctttaggtcctaagtagtaagctcttagtgcaagaagattctgatgacgaatcttgcctaaagctgtgacttctccttcgaattctttgactccttttgttgttttctctctcagacgcttcacagcgacttcattgccgtcttctaatgtggccttgtatgctgtgccatatgtacttttccccatgatctcagctgtggcacagagcagatcatcggcggtgaacacgaacggaccatcgaaatggactagcttgcctcccatttcacctcctgctgatgctgttcctgcgacacctgctgatactgtcttctctgaggtcttgtcctttccatctttttgtttcaaggcggcgcgtttcttgatcaggcagcagaggagtatgcagcat

SEQ ID NO: 91186 - DNA, 818 bp, Arabidopsis thaliana columbia
  unsure (1)..(818): unsure at all n locations
acaatacgactcaccttanggaaagctgctacgcctgcaggtaccggtccggaattcccgggtcgacccacgcgtccgccagttgccacgattaactagaatgtggactcatcttgagcgtcaatctggtggccaagttaagggtatgggagaaaaacaaattgaagttgataagcgaatcttgcgtactcaaattggagttctcaaaaaggagttggaatctgtaagatagcatcggaagcagtatagaagcaggcgtgttgctatacctgtacctgttgtatccttggtcggttacacaaacgctggaaagagtacactattgaaccaattgactggtgctaatgttctcgctgaaaatcgtttgtttgcaactcttgatccaactacgagaagggttcagatgcaaaacgggaaggaatttcttctcacagatactgttggttttatccaaaagttaccaaccactctggttgctgctttcagagcaacacttgaagaaatagcagagtcaagccttttggtgcatgttgttgacatcagccacccactggcagagcaacaaatagaagctgtggagaaggttatgtctgaactcgacgtttcatcaattccaaaattggtcgtgtggaataaggttgatagagtggatgatcctcaaaacgtcaagctggaagcagaggaaactggggatacaatttgtatatctgctctgactggagaagggcttgacggcttctgcaaaactggttcatgagagccccagggttcaatggnttgggttaagnccctttnccncttntaaaggggcctntagg

SEQ ID NO: 91187 - DNA, 541 bp, Arabidopsis thaliana columbia
  unsure (1)..(541): unsure at all n locations
nnnnnnnnnnnnnnnnnnnnnnnnnnnnnnnnnnnnnnnnnnnnnnnnnnnnnnnnnnnnnnnnnnnnccacgcgtccggaaaatcatcaccaccgtcaacttttctcttgcggacaagacgattctccgattatccccaagaggagaatcctcataatcattttctccgattcgattcgtcttccttggtcctggattgcttcatgaatttctaggacaacaatggaggctcgtccagttcatagatcaggttcgagagacctcacacgcacttcttcaatcccatctacacaaaaaccttcaccagtagaagatagtttcatgagatcagataacaacagtcagttaatgtctagaccattaggacaaacctaccatttactttcatctagtaacggtggagctgttggacatatatgttcttcttcatcatctggttttgcaaccaatctccattactcaactatgggatctcatgagaaacaacaccactacacaggaagcacgcgtattaatgctgtgcagacaccaagcaacaac

SEQ ID NO: 91188 - DNA, 371 bp, Arabidopsis thaliana columbia
gggcttttaaaatccgcacaagcaaatcggagttactgtgtggaccgtgaaaccggcggcgatgccgaatcaatttcttatgagacccaccgtagcaacttctgtcggctattcacagccaccaccaccgcataatgttatgatcgagaattcttctgaaattttctgagctcaatttcttaatttgtgaattgatttgtggcaagagcgactccatgggacttggagccatctcgtctctgctacatatatgtgggcaagagcagtgctacttatgcaacaggtaactccagtgtttttctttgggttttagctaagatttttaggctatatgaattgcatttggtttggactatatgttatctgtgtgg

SEQ ID NO: 91189 - DNA, 363 bp, Arabidopsis thaliana columbia
aaaaaaagaggagaatgaagaaaccatgacactaacagctgaacaacaaaaggaaatcaaagaaggaatcttgaaatgggaaaccattattactcggatcacaaacacaatggtatcgagcacagcaacctctgcttcttccagtgaagagtctagtgttgggaaagaaagtgagacttccgctaaaggtgaaagtgagacttccgctaagaatgaaagtaagacttccgctaaaggcgaaagtgagacttccgctaaaggtgagagtaagacttccgctaaaggagaaagtgagacttacgctaaaggtgaaagtgagacttccggtaaaggtgaaagtgagacttctttttcaaaaactgc

SEQ ID NO: 91190 - DNA, 532 bp, Arabidopsis thaliana columbia
  unsure (1)..(532): unsure at all n locations
nnnnnnnnnnnnnnnnnnnnnnnnnnnnnnnnnnnnnnnnnnnnnnnnnnnnnnnnnnnnnnnnnnnnnnnnnccacgcgtccggatttcttgcgactaaaattgtgggaagccgcaaaaaggaggagagcgaggaatcaatgaagctaacagcagaacaacaaaaagaaatcaaagaagggatcttaagatgggaaacaatcattactcggatcacaaacacaatggtatcgagcacaaccaactctgcttcttccaatgaagagtctagtgttgggaaagaagcttccagcgaaaacagcaaaagctctggtaaagaaagtgagagttccgctaaaggtgaaagtgagacatccgctaaaggtgaaagtaagacttccgctaaaggtgaaagtgagacttcctcttcaaaaagtgctggtggaagctctacaagcgctactaaagaagaaagttccgctagtcacagcagtggtgtaacagtgacacaagtcgaggaagagacgtccaaagatgtttcgacattcataat

SEQ ID NO: 91191 - DNA, 456 bp, Arabidopsis thaliana columbia
aaaaaaaacaacacagagacctctccgtcgtgttctctccccctctcttgaactttccgattttgtatcaaacacgaacctaatactgcttccttgactggtaatgtaagtatttgggttgttaactccatggaaaaatcaggcccggtgcagaaagccgttgttctccagccatttgtcaagttggtgaggcttgtagcgagggctttctatgatgattatactacgaaaagcgataatcagcagaaatctgctagaagtgacaacagagggattgccgctgtggtgctagacgcgctggcaaggcggcaatgggttagagaagaagactgggcaaaagatgtgcagttgcacgccaagcaacttcgaaaaataatatgactctttgaagaagaaaagttgattatgcgtgaccaccggaaagagactgcaaagggtgcaaagatgtatagtgct

SEQ ID NO: 91192 - DNA, 512 bp, Arabidopsis thaliana columbia
cgcctgcaggtaccggtccggaattcccggttcgacccacgcgtacagcgcaatcatacgtttttccacaaatggatcaagaagaggaagagatcgagattcctaattactttatctgcccaatctcactagagatcatgaaagatccagtcacgaccgttgctggcatcacttacgaccgacaaaacatcgctaaatggctcgaaaagggtcccttcttggcccgtcacgaagcaacctcttcccttagactccgatcttacacctaaccacatgcttcgccgtcttatccaacactggtgcgtcgagaacgagacacgtggcgttgtcagaatctctacacctcgagttcctcctggaaaacttaacgtcggcgaagagatcaagaatctcaaaaagttcggccaagaagccttaggaagagaagaaacgttgcagaaccttgaagttgtggcaatgggccgcaataacagaagattgatgtgtgaatgtggcgtacataagtctttgat

SEQ ID NO: 91193 - DNA, 408 bp, Arabidopsis thaliana columbia
gagagcttatcagagaagaagaagatatttctgtaagcgagaaaaatggcgagagaacatgcgatcggagaagccaccggaaaacgaaagaaacgcggcagagttgaagaagcagaagaatactgtaacgatggaatcgaagaacaagtagaggatgagaagcttccgttagaggttgggatgttctattacccaatgactccgccttcgttcattgtttccgatgctctggagccagattttcctttgatctatgtcaacagagtcttcgaagtcttcactggctatcgtgccgatgaagttcttggtcgtaactgtcgattcctacagtacagagatcctcgagctcaaaggcgtcacccattggttgatcctgtggttgtatctgagattaggagatgtcttgaa

SEQ ID NO: 91194 - DNA, 788 bp, Arabidopsis thaliana columbia
  unsure (1)..(788): unsure at all n locations
acgcgcaannnnnnnnnnnnnnnnnnnnnnnnnnnnnnnnnnnnnnnnnnnnnnnnnnnnnnnnnnnnnnnnnnnngccaggcgtgcgagaaaagtcagcagttgattctaggacggcgacttgacttgacacctgaaaaatccttaccgtgtttgatagtttttcgaaaacccttcaaattgtttcattttttttaagtcttgagactttaaaaaatcctcgcttgctcttgttttaggtctcctgacaaggaaaaatttggaaacttgtgggagttgattgataagagttgttaagatggcaaatgatgcggctgcatgtgcagaaagggctacaaatgatatgctgattggtccagattgggctattaacattgaattgtgtgatcttatcaacatggatcctagtcaagcaaaagaagctgtgaaggtgctcaagaagcggttaggaagtaaaaactctaaaggccagattcttgcactttatgcattggaacctttaagtaagaattggggcgaaaacgtgtaccaccttatcattgaccgtggtctattgaatgacatggtcaaaatagtgaagaaaaagccggaactgaatgtgagggaaaagatactaactttgttagacacatggcaagaagcctttggtggacgtggaggtcgatacccacaatactacaatgcctataacgatctcaggtctgctggaattgagtttccgcctcgaacggaaagcagtctatcgttctttactccaccgcagactcagccagatgaagatgctgcta

SEQ ID NO: 91195 - DNA, 592 bp, Arabidopsis thaliana columbia
  unsure (1)..(592): unsure at all n locations
tacgactcactatanggagagctgacacgcctgcaggtaccggtccggaattcccgggtcgacccacgcgtccgctggaattgagtttccgcctcgaacggaaagcagtctatcgttctttactccaccgcagactcagccagatgaagatgctgctattcaggcttcgttgcaaggagatgatgcttctagcctcagcctggaagagattcaaagcgctgagggatcagttgatgttttgatggacatgcttggagcacatgatcccgggaatcccgagagtttaaaagaagaagttatagtagacttggttgagcaatgtcgtacttatcaaagacgtgtaatgactcttgtgaacactacaacagatgaggaacttctgtgtcagggattggcattaaacgataatttgcagcatgttcttcagcgtcacgatgatatcgcaaatgtcggctctgttccttcaaatggaaggaatactagagctcctcctccagttcagattgttgacatcaatcatgatgatgaagatgacggtccagatgatgagtttccccggcttgctcacagggtttaaaccccaaaggggccc

SEQ ID NO: 91196 - DNA, 727 bp, Arabidopsis thaliana columbia
ccccacccgcccggaaaaaccaaccaacgtcacataatcgtcttcttcaactaacaaaatccaactaatcatcatctgtctctctggctctggcttgtgtctgagctcgaacttaaagaaaaagaatctcaccatgtctttagctccgagcagttatccatctctgtattcttcgccttcactgccaagaacccagcaaaccaagcaaaaccctagtttgatcactcaatccagtttcatttccgccaaaagtctcttcctttcgagcaattcggcttctttatgcaatacccatgttgccaaacgccggaatttagctttgaaggcgttcggagacagagtcttcagctaaagctgaagcaggaggagacggggaagaagaagagaagtatgaaacatatgaaattgcagtggagcagccttatggtttgaaattcacgaaaggaacagatggtggcacttacattgatgctatcttaccaggtggatcagctgacaaaaccggaaagttcactgttggcgatagagttattgccacaagtgcaatatttggaacacagatttggcctgcagctgagtacggtaggacaatgtacacaattccgcagagaattggccccttgctttagccaaattggagaacagaaaatggtccgggctgaagaaactgggtgagttacaccgaaaaagggagatccttaccagcctgagaagaaatgcccggatc

SEQ ID NO: 91197 - DNA, 585 bp, Arabidopsis thaliana columbia
  unsure (1)..(585): unsure at all n locations
ccacgcgaccggaaactcaacagcgagagaaccacaaagcgtaacaaagagagtaataactatgagtgatttttcaatcaaacccgatgataaaaaggaagaggagaagccagcaacagccatgttaccaccacccaaaccaaacgcttcttccatggaaacgcaatctgctaacaccggaaccgctaaaaaactgcggcggaaacgcaactgcaaaatctgtatctgtttcactatccttctcattctcctaatcgccatagttatcgtcatcttagctttcactctcttcaaaccaaaacgcccaactactacaatcgattccgtcaccgttgatcgtctccaagcttccgtcaatcctctccttctcaaagtcctcctaaacctaacgctcaacgtcgatctctctctcaaaaaccctaaccgcatcgggtttaggtacgattcgtcggcgggcggttttttgtatttcaagngggccaagtgttcnggtgaaggtnctttttccgggtanncggattngggggnggggaaaacgggtgcccgttgnannttaccgttncggnaatgggggtncggtccttt

SEQ ID NO: 91198 - DNA, 484 bp, Arabidopsis thaliana columbia
gaaagtagacaatgaatgattagggatagcgaatgaagaaggtggaagatgatgttaacttcggattggcgcgaaataagataaaaaagcttgttcttcagagaagaaagtgtttatgattggacaaagaaagaaagaagcaaagcctatccacttctcatcttctctattaccaacaaaccttccccttctctgtcggttcctccttttctattatttttaattccagataataaaaagaaaatctttttttgcttaaagagctcaaaccgaaacccatttcaagatttcatcctccggagtgtttcaacgaagcttgggtacataagtctgatatgagaggtttcgtcataacttgtcttctaaggtaagtttcctcacctgtggcgtagattgcatcatcaatccatggacgttgaagaaaagagggtttcatctggttatgccaagcctccatggatattcaaaggaagtgcgttgtacc

SEQ ID NO: 91199 - DNA, 414 bp, Arabidopsis thaliana columbia
atataaagctaaaaaaaaaacacatcacacaaaagattctctacactatggatactaagaaatcgttagtgatcctattgactaacgtcgtcgtcttcttgcttctctccacgactgtccattcttgcttaccgtccgaccgagcggcgcttctagagttccgagcaaagctcaacgagccctacattggagttttcaacacatggaaaggtctagactgttgcaaaggctggtatggtgtgagctgcgatcccaacacccgtcgagtcgccggcattacactccgaggtgaatccgaagacccgcttttccaaaaggcgaaacggagcggactaatgaccggctccatttcgccctctatatgtaagctcactcgtctctccggtatcatcatcgctgattggaagggatctc

SEQ ID NO: 91200 - DNA, 520 bp, Arabidopsis thaliana columbia
acgactcacttctgggaaagctggtacgcctgcaggtaccggtccggaattcccgggtctgcccacgcgtccgatgcaatgcaacgaatgttgatgaaagcaagccagatccaaaacttgagtgcttcaaaaactgttccataagttgtggcaaacaaaaccaaccttgttacgaagtttggttgacgaaatgtggtctcccaaaacgtccttctacatcaacaccatcatcttcctccaccacggcgtaataagtttccatttgtgtgaaattgtgtgtcttttggtttataccaagttttaatcttaatattgatgtgccaacaatgccgtgcccaggcttataagggcttaagacgaagttgaattttggagtccttccataataattcttatttgaattaaaaaaaaaaaataaggggcgggccgttcttaaaagatccaaggtttacctacgccttgctttccgacaataatatctttttttatatataaaccttaatttaaatgtactggccgt

SEQ ID NO: 91201 - DNA, 970 bp, Arabidopsis thaliana columbia
acgcgtccgctcgaacacgatgctctgaagacttataaattgcgtaaacttttttcacctggctagggttcttggtcgtcgttaacaggcatctagtatggctttctgcactaaacttggcggtcactggaaacaaggggtaaatgttccagtgtcatcaatgctcggttctcttcgctacatgtccacaaaactttatattggtggcctgtcccctggaactgacgagcactccttgaaggacgctttctctagcttcaatggagtgacagaggcaagagtcatgacaaacaaagtgaccgggaggtctagaggttatggatttgttaacttcataagcgaggattctgccaactctgctatttcagcaatgaatggacaggagctgaatgggtttaacataagtgtgaacgttgcaaaagattggccaagtttgccattgtcgttggtcgagagtatagaagaagctgagaagaaagaaaataagatgatgagccgatctgtatggaaagatccattcgttgatgcgttcctgatgaagaagaagaatgcagctctgaacaggaaaatatggtcaaggagatcgacgattcttcccgagtatgttgattcggcggtgagaatctacaacggcaaaactcatgtgcgttgtaagatcacagaggggaaagttgggcataaattcggagagtttgcgtttacaagaaaagtgaagaagcatgctaaagcaaagtagcatctttgagaatgaattggtcagctgcttgaaaggattgtgttgaaaagccaaaaacgaatcaaatcaataaattctcaataggtaaaactcattagctcacatgatcatgtagacgaatattgagctttagaaagtctttagttttcttgtcgatttcgtatttttggaccacaaaagtgccaatgttattttggaattcgattaacaaatatcaaaaaaaaaaaaaaaaaa

SEQ ID NO: 91202 - DNA, 473 bp, Arabidopsis thaliana columbia
tttcgtccgcttcattctctcttcagttcctgaccaacacctttatctccaaacctcagggtttctgcaacggaattgtgtcagcaccaagacccagaagcaatttattaagagacagacaaaatggtgtacgacccatcaaagttgcgtctattgagacacaacctttccctctgtttcaatctcctgcttccgaagaatcttcctcgtccgagctggagacagcagatccggatttctacaaaattggctatgttcgaagtgtgagagcttatggagttgagtttaaagaaggtccagatggttttggtgtctatgcttctaaggatatcgaacctcgccgtcgagctagagtgattatggagattcctcttgaactgatgataaccattagacagaagcacccttggatgtttttccctgatattgtaccaattggtcatcctattttcgatatcattaactcgactgat

SEQ ID NO: 91203 - DNA, 421 bp, Arabidopsis thaliana columbia
agcatacacgactccttgaaaggctccctgaacttgtctgcagacgtggctcgtattttcagaaaaatccatctacagacaagctaacaatcatccctgagcttgattggaaatatttctgcgacgagtggggagggctcatggagaatggaatatctgcttttattgaggttggcaatacagaccaaagttcatccccagacgtcattgaccttgagaaggattcttctccggatgataatatggacgttgatgctcaacagcttattctcagggcatccccagagatttgcgaggaatgcataggagagagagaaagctgtgagttgatgcagaaacttagttactctgagggagatgtatttgtctgttttgtgcgtggaaaggaagctccaaaagcaatgttagaggcatctgactc

SEQ ID NO: 91204 - DNA, 812 bp, Arabidopsis thaliana columbia
caacaaatttcatagagaagcagaaatggcgaaatcactcctttgttcatcaaccttaaaccctttcttctccaccactctctcctcttcgaagaagaaccaaattgcatactcgggaaacagcaagaaccagacatcgtcgtctctgttatggaaaagaagggaactgtcgcttggatttatgagcagcttagttgcgattggtctcgtgagtaatgacagaagaagacacgacgcgaatgcagcgattcttgaagctgatgacgatgaagagcttctcgagaaagtgaagcaagatcggaaaaagaggattgagagacaagctgttcttaattctgctgtcaaggaaaaggggtatttgcaggatcttgtttacaagttgagcaaggtaggacaagccattgagaacaatgatctaccagctgcaggattggttttggggaaaggcattgataccgaatgggtcaaaaccgttaatctggctttcacaaagttgagtacaagcccagaagagaatacagaggtggaagcattcaattcatcattggcttctcttatcacatcagtgaacaagaacgatatagagtcatcgaagctcgctttcgtttcatcagctggtgcatttgagaaatggactactttgacaggtcttttggaacagcttaagggactgtgataggctggctacaaattctttactctttttttgtattttccaacagatttgtcaaagagggtcttttttttctccaaataatcctttgaataatcatcattcactttcttaacttctttggttattatttaccttt

SEQ ID NO: 91205 - DNA, 354 bp, Arabidopsis thaliana columbia
  unsure (1)..(354): unsure at all n locations
ttccttatcncttattcgagaacacaatgtctgtcaccaagttcaatgcgatggtgtccggattattccaattgggtagctcttacgagtggattgtcacaaagaaagctggaagatcatcagagtcagatcttttatctatcaccgagaaagagacaccaaccaagaaaagtcaattgcttaggggagtttccgacagcgaacttttggagctgagccaacttgaagaacagaaacaagcggtttcaaagaaacctgtcaagaaaaccaacaagatataccacaaagagctcgcattggcctttcttttgctcactgcagcgcttaggagtctcttggcagcacaaggagtgc

SEQ ID NO: 91206 - DNA, 523 bp, Arabidopsis thaliana columbia
  unsure (1)..(523): unsure at all n locations
gnnnnnnnnnnnnnnnnnnnnnnnnnnnnnnnnnnnnnnnnnnnnnnnnnnnnnnnnnnnnnnnnnnnnccacgcgtccggtctacaatggcgacatggacaccaagctctctccagctcagaattgccctaaatcacggtatcttcaaagctccggagagagcgaagatgaccaagctcagtcgtcgtctccgtagatcatgcgtcgcgcagaacgcagagccaggtcgcgattcgggtgagagtaacgggtcggatcgttttcgtgggtgggctgattcgggagacgatgagaacaattctcgcggtggcgattggtttaaaggaaccttgttatctggagttgctggaatggttttgttcgttgggctaacttacgcagctttatcttccaaacgcaatgtcttaagaccaaaagtagaagtgatggtgaccacagttactaaaagtgcaattgatcaaatcagcacggatgagaatgaaggaaatattgtgactagtcaagaataccaggaaagctata

SEQ ID NO: 91207 - DNA, 486 bp, Arabidopsis thaliana columbia
  unsure (1)..(486): unsure at all n locations
tctttctgacacattaactacttatccttcttgcattcttctctctctctacacccaaacaaacacacttataatatatcaagaaagaagatgtctagcagaagatcatcacgttcaagacagtcaggaagctcaagaatctctgacgatcagatttccgatcttgtttctaagctccaacacctaatccctgaacttcgccgccgccgttctgacaaggtgtcagcttctaaggtactacaagagacttgcaactacatcaggaacttacacagtgaggttgttgacctcagtgaccgtttgtcggaactcttggcttcgacggacgacaacagcgccgaagcagccatcattaggagctggcttaattattaaatccgcattacttaatctgagagctattaatcatccgtttccggccaccaaatttatcttattatgggtatcgnctgtttacttctacatcatatattatgagatatagct

SEQ ID NO: 91208 - DNA, 1074 bp, Arabidopsis thaliana columbia
  unsure (1)..(1074): unsure at all n locations
nnnnnnnnnnnnnnnnnnnnnnnnnnnnnnnnnnnnnnnnnnnnnnnnnnnnnnnnnnnnnnnnnnnnnnnnnnnnnnnnnnnccacgcgtccggcaaaatggaaatgattgataatctcttcaaacccgtcaatggcaaagacgaaggaatgttcagggaactcttgttagacttttactacagttcagagaataggaaaccagagcacatcattattttcagggatggtgtaagcgagtctcagttcaatcaagttcttaatattgaattggatcagatgatgcaggcatgcaagtttcttgatgatacgtggcatccgaagtttacagtgatagttgcccagaagaaccaccacacaaagttcttccagtctcgaggccctgataatgttcctccaggaacaatcattgacagccagatctgtcacccacgcaactttgatttctatctctgcgcccatgctggcatgattggaactacaaggccaacacattaccatgttctgtatgacgagattgggtttgccacagacgacctccaagaacttgtgcattctctgtcctatgtctaccagaggagcaccactgcgatctcagtcgttgcacctgtatgttacgctcatttggcagctgcacagatgggaactgtgatgaagtatgaagagttgtctgagacttcttcgagccatggaggaatcaccacacctggagcagtccctgtgccacctatgccgcagctgcacaataatgtttcaacctccttgttcttctgttgatggaacatggtccagtccacacgatagctgagtttatatgcttttgatggagaaccaacgaacttttgtttactcttctctgggtttggttcctcttttgtttttcgtcgaccctttaacattgaggagatactctttatattctgtcggtttttgtggcccctgttggttgatactcccctatgcttaatcagatttggtaaaaaaaaaaaaaaaaaaaagnnnnnnnnnnnnnnnnnnnnnnnnnnnnnnnnnnnnnnnnnnnnnnnnnnnnnnnnnnnnnnnnnnnnnnnnnnn

SEQ ID NO: 91209 - DNA, 616 bp, Arabidopsis thaliana columbia
  unsure (1)..(616): unsure at all n locations
nnnnnnnnnnnnnnnnnnnnnnnnnnnnnnnnnnnnnnnnnnnnnnnnnnnnnnnnnnnnnnnnnnnnnccacgcgtccgcccacgcgtccggaaaatcaaagagttagctcagctccgatcactctctccgattatctttcgctctttagattcatggtgaatcgtttaccgtcactctctcctcgtaaaccctagctctctccgaaaccctaacgcgctgcgttggaaactaatcgagctcgtccctctcctttcggaagcatttctttaatcggtgttgcagaggcgttttggtttctgatcggtttagctttctgagttagaacagtctaaggctgcaatgagtattcctcagtcgaaatcttcatcaaatggatttccactcaaaagaggtgaaacagaggaagttttacataagacaaatacatcaaatacaggattcaatggggaagctggaagcttgaagaggctttcacttgatcggttagtgtacttcacaacatgtaagatcgggcatcatgtggaagtgcttctaaggaatgggtcagtgtataccggtttatttcatgctggcatgtagagaaggattttggaatcattctaaagatggcatg

SEQ ID NO: 91210 - DNA, 354 bp, Arabidopsis thaliana columbia
ggctcttgctacctaaacttttctcaatctctagaacacaggttccagctgcatcattgttcaataatctgtacagacgtcacaaacgtgggtgttcaggtggacgagtaagatgtcaacagatagtgttagatcatccacaactggtggttctgcttctggagctagaacattttgctccctcgcagatttatcaaccaaaaagtgtgtgccatgcaatgcgaaggatctgcgcgccatgaccgaacaaagtgcccaagacctacttcaaaaggttgctggatgggatttggccaatgacaatgatacattaaagctgcatcggtcatggagggtgaaaaagtttacaaaggg

SEQ ID NO: 91211 - DNA, 448 bp, Arabidopsis thaliana columbia
gagtgttatctatgaatcttccatcgtcaacgacggcgacgtcaacctccgcgacttccgatgcagcggcgaattccaccgaaagatgcgatgattgcggaagctcagacgcctgggtgatacacacagtacgtctccgtgcatctctccgcttcttctgcactcattgtctcctccgcaaccatccggcgtcgttttgtcccggttgcttcgccttgtacgattcatctccgccgtcttttcgccgcgtctcttgttccattaaagggtgccactccttgactcacattcactgtgccggcgatgaaagtcacctttcttatctctgtcctccttgccgagaccctaattccttctccttcttccgccctatcgtcgacgaaaacggctctcgcttcgtcgataaagcactctccgaagctttcttatgcgctgctaagatcgctgc

SEQ ID NO: 91212 - DNA, 744 bp, Arabidopsis thaliana columbia
  unsure (1)..(744): unsure at all n locations
cannnnnnnnnnnnnnnnnnnnnnnnnnnnnnnnnnnnnnnnnnnnnnnnnnnngcagattcgtccacaccacgcgtccggctgatttggttggctccccaagcagaatcgagcttcttaggtctaactcggtacccccaagacttgctcaccacttcatgactcgctcttctctcccttctttttcaactaaaggtgttaacttgcagcaaaacgatgttcaaagagctgctgctgctttgatgataggagatgaattgcagaagcttggaagatggagacctgaaaggattgatctttctgctatggcttgtccagcttcaagacagatctatctgacattccctgccgacagtaggttcagggaggaagatgtgtccaattacttcagtacttttggaccagttcaagatgtgaggataccatatcagcaaaagagaatgtttggttttgtgacatttgtgtaccctgagactgttaagagcattctcgccaaagggaatcctcactttgtgtgtgattccagagttcttgtcaagccttacaaggagaaaggcaaagtccctgacaaattccgaacttaccaaaccacagagcgagaactgtccccaacaggccttgattctagccctagggacgttctagggagggagagggtttttataaccaacactcaaggatgtgttgtgggagggagtaaagttttgaaggaaggagntttctttgaacctttcagagccagaa

SEQ ID NO: 91213 - DNA, 520 bp, Arabidopsis thaliana columbia
  unsure (1)..(520): unsure at all n locations
nnnnnnnnnnnnnnnnnnnnnnnnnnnnnnnnnnnnnnnnnnnnnnnnnnnnnnnnnnnnnnnnnnnnnccacgcgtccgcccacgcgtccgcccacgcgtccggcacatttgaggcacaactacataacggtgttcacaatgacagcgatggagatgttgagacgatttcaatgggtatttttcagagtagagaatgagtggaacaagatcactaaatcacatccaatgggtgagatttcacttgaagaagataaactacttggttctactacacctcatgatgtttagcatccaactatttttgtttatttcctctaatcctatgcaaaattctggttttcctaaaaaaaaaaaaattttaaaaaaaaaaaaaaaaaaaaaaaaaaaaaaaaaanggggggaaaggtgtagaggttttaagggatccaactttaggttcgcatgcattaaacgttatatgttgtttattgggttacataaattgagttacttggccgaagttttacaatggaaaaacg

SEQ ID NO: 91214 - DNA, 517 bp, Arabidopsis thaliana columbia
ccggcactaatacgactctaatagggaaagctggtacgcctgcaggtaccggtccggaattcccgggtcgacccacgcgtccgaaacttttgactccgtcgtaacaaagaacaaaacttccgtatcctggagagtaaattcctttatggctacgaatgggttaatggcgtcgtccagtgtgtttcttcatcgcccgcgtatcgcatttgcttctagaacgaatcagactgtaggaaaatacggtaaaggccgtgttagtttcatgggcattgggacacgtcgtcttccggtggttttatccatgacggcgatggcggattccggtgaggaggccgtgaaatctgttttgcctggaaatggcatatccatcatggtgaatggatgtagtggcaaaatggggaaagctgtattaaagcagcagactctgcaggagtacatattgttcccatatcgtttggatctgctggtgaggatggtcagagagttgaggtctgtggaaaggagattactgtgcacg

SEQ ID NO: 91215 - DNA, 721 bp, Arabidopsis thaliana columbia
ctgacttcgcaaagaagaacactttcttcctgaaatctcaaattcatctcttctcttccgatttcgctgaatcatgtcagacgacgagcatcacttcgaatccagcgacgccggagcttctaagacttatcctcaacaagccggtaacattcgtaaaggtggtcacatcgtcatcaagggacgtccctgcaaggtggttgaggtatcgacttcgaagactgggaagcatggtcacgccaagtgtcactttgttgccattgatatctttacttctaagaagcttgaagatatcgttccttcttcccacaattgtgatgttccacatgtgaatcgtgttgattatcagttgattgatatctctgaagatggctttgttagtcttcttactgataatggtagcactaaggatgatctgaagctgccaacagatgaagctttactcacacagctcaagaatggatttgaggagggtaaggatattgttgtgtctgtcatgtctgcaatgggagaggagcagatgtgtgctctcaaggaggttgggcccaagtaataataataagtaagcattctctcttttacagaggctatgtattatcaagtttgacagagtcaaatgttataagaacaaagtttggtccttttttttggtcttcttagtataatttaagcccacatgtgtttcccatgcaagacactcttagatttactagtatatcttact

SEQ ID NO: 91216 - DNA, 481 bp, Arabidopsis thaliana columbia
gatggcgatagagaagacaatggaaaaagacgttgatgaagttggaagtattgcccgtttcataaaggggaaactcgaggagttggacagagagaacttggcaaatagacaaaaacctggatgtgcaaaaggatctggtgtggatcgatcaagaacagcaacaacactttccttaaagaagaagttgaaagacaagatggccgagtttcaggttctacgagagaacattcaacaagagtatcgcgatgttgttgataggcgagtttatacagtaactggggagcgggcggatgaagatactattgatgaattgattgaaactggaaacagcgaacagatcttccagaaagcgattcaggagcaaggaagaggacaggtaatggacaccttggcggaaatccaagaacgtcatgatgctgtcagagacttggaaaagaaacttcttgacttacaacaaatattcttggatatggcagttttg

SEQ ID NO: 91217 - DNA, 580 bp, Arabidopsis thaliana columbia
  unsure (1)..(580): unsure at all n locations
nnnnnnnnnnnnnnnnnnnnnnnnnnnnnnnnnnnnnnnnnnnnnnnnnnnnnnnnnnnnnnnnnnnnnnnccacgcgtccgcttttttagattttgagctctggaatggagaaaagtatcaatggatcatgcagactcatcaagagactcgtgattatactttcttgtctttcatattcctttgttcgatcagactttacagagagaacaaatatcaattatgtatcagctgtgggagatcccgggatgagaaacgataacttaagggtggctatagaagcttggaaccaatgcaacgaggtcggtgaagaagctacaaacatgggaagccctcgaatggcagattgcttcgatatcgataactctagctttcccgtgaagataatccacaaagtcgacgaaagagacaacaggcttggggtaggaaatggaacctacggaggaataagcgctggagacaacgcagatatctacgcagcgcaaaagggggtatacttaggaaacaaatgtcaagttgtggacaagccaaatccatggcagttttggatgataatgctaaagaacggtaatacggatact

SEQ ID NO: 91218 - DNA, 578 bp, Arabidopsis thaliana columbia
  unsure (1)..(578): unsure at all n locations
nnnnnnnnnnnnnnnnnnnnnnnnnnnnnnnnnnnnnnnnnnnnnnnnnnnnnnnnnnnnnnnnnnnnnnccacgcgtgcgcaaaaacaaagtttcatttcttcttcttcttgaaatggcgacgagcaagtgctactatccacggccaagccaccgtttcttcaccactgaccaacacgtcaccgccacttccgatttcgagctagacgaatgggatcttttcaataccgggttcagattcctcttcaagtttcagctttagtgaccttacaatcacatccggtcgaaccggaactaaccggcaaattcacggtggttctgactccggtaaagctgcgtcttctctaccggttaacgtaccggactggtctaagattcttggagacgagagtcgacgacagaggaagatttcgaatgaggaagaagttgaccggagatgaaattttatgcggcgaaggtacacggcgaaggtccaccgcatgaattgctttgcgaaccggaggatggcttcgttttcggttcatgaaggtgctgggaggactttgaaaggaagagatctgagtagggtgcgaatacta

SEQ ID NO: 91219 - DNA, 900 bp, Arabidopsis thaliana columbia
  unsure (1)..(900): unsure at all n locations
taggtgaactatagaagagctttgacgtcgcatgcacgcgtacgtaagctcggaatcggtacagaagaagaggaagaagaagaagaagcagagacaacaagaagaagaagaaacagtctcatctcgccggagaagaagaaagatgtcgtggcaatcatacgtcgatgaccatctcatgtgcgaggtcgaaggcaaccacctcacacacgccgccatcttcggccaagacggcagtgtctgggctcagagctcagctttccctcagttgaagcctgcagagatagcaggaatcaacaaagactttgaagaagccggacatcttgccccaaccgggctattccttggcggtgagaagtacatggttgtccaaggtgaggctggagccgtcatccgagggaaaaagggacctggtggagtcactatcaagaagactactcaagctctagtctttggtatctatgatgaaccgatgaccggagggcaatgcaacttggtcgtggagaggctcggcgattaccttatcgagtctggtctctaagttcactcaaagtgcttcaaacaaatttcatttttcgggttctttcttcactagagaagcacccttctgccatgtattgtgatttgattgttgttgtgcatcaaacaaagttattatactcttaaaaagaacaaagaaacaatcatatttgttatggttttgatcctctcctatgatggctcttatgtttttctcttgtactgtatttcgtaatgtataattacgctttggaataaaaatttgagtttgtgatcaaaaaaaaaaaaaaaaaaannnnnnnnnnnnnnnnnnnnnnnnnnnnnnnnnnnnnnnnnnnnnnnnnnnnnnnnnnnnnnnnnnnnnnnnnnnnnnnnnnnnnnnnn

SEQ ID NO: 91220 - DNA, 806 bp, Arabidopsis thaliana columbia
  unsure (1)..(806): unsure at all n locations
tgatcctgccagctannnnnnnnnnnnnnnnnnnnnnnnnnnnnnnnnnnnnnnnnnnnnnnnnnnnnnnnnnnnnnnnnnnccacgcgtccgcccacgcgtccgtccacttcttctatctctcacaattcagcaatggcttcttctatagttacctctagcttgaagcctttagccatggccgattcttcctcttctaccattttctcccatccttccatctcctctaccatctcttcctccagaattcgcagctccagtgtttccctccttaccggacgcattaacctgcccctctctttctctcgcgtctctctatctcttaaaaccaaaacccaccttaaaaaatccccctttgtctccttcgttgcccagacttcggattgggctgaagaaggtggagaaggaagcgtcgctgttgaggagaccgagaacagtttagagtcacaagatgtgagcgaaggagatgagagcgaaggagatgcgagcgaaggagatgtgagcgaaggagatgagagcgaaggagatgtgagcgaaggagctgtgagcgaaagagctgagttcccggagccatcggaagaagccaagcttttcgtcggaaatttggcttatgatgttaatagccaagctttggctatgctctttgagcaagccggtactgttgaaatcgccgaggttatatacaatagggaaactgaccagagtcgtggtgttggatttgttacattgagattctgttttctgtatgttatatattttttgtttattctattctttttccatttttatatatttattactcttta

SEQ ID NO: 91221 - DNA, 794 bp, Arabidopsis thaliana columbia
  unsure (1)..(794): unsure at all n locations
tattaggtacacactatagaagagtctatgacgtcgcctgcacgcgtacgtaagctcggaattcggctcgagtctatctctcacaattcagcaatggcttcttctatagttacctctagcttgaagcctttagccatggccgattcttcctcttctaccattttctcccatccttccatctgctctaccatctcttcctccagaattcgcagctccagtgtttccctccttaccggacgcattaacctgcccctctctttctctcgcgtctctctatctcttaaaaccaaaacccaccttaaaaaatccccctttgtctccttcgttgcccagacttcggattgggctgaagaaggtggagaaggaagcgtcgctgttgaggagaccgagaacagtttagagtcacaagatgtgagcgaaggagatgagagcgaaggagatgcgagcgaaggagatgtgagcgaaggagatgagagcgaaggagatgtgagcgaaggagctgtgagcgaaagagctgagttcccggagccatcggaagaagccaagcttttccgtcggaaatttggcttatgatgttaatagccaagctttggctaatgctctttgagcaagcccggtactgttgaaatcgccgaggttatatacaattagggaaacctaccccagagtcgtggggttttggattttttgaccaattaaagttcctttggcccggaagctttagacaaacttttttggagaagttcaaccccgttattnttctttaaacggggcggntttttaacttttaacaa

SEQ ID NO: 91222 - DNA, 1404 bp, Arabidopsis thaliana columbia
  unsure (1)..(1404): unsure at all n locations
tacgactcctatagggaaagccggtacgcctgcaggtaccggtccggaattcccgggtcgacccacgcgtccttcccttcctcttcttttctcttctccttccacttccacttcttctatctctcacaattcagcaatggcttcttctatagttacctctagcttgaagcctttagccatggccgattcttcctcttctaccattttctcccatccttccatctcctctaccatctcttcctccagaattcgcagctccagtgtttccctccttaccggacgcattaacctgcccctctctttctctcgcgtctctctatctcttaaaaccaaaacccaccttaaaaaatccccctttgtctccttcgttgcccagacttcggattgggctgaagaaggtggagaaggaagcgtcgctgttgaggagaccgagaacagtttagagtcacaagatgtgagcgaaggagatgagagcgaaggagatgcgagcgaaggagatgtgagcgaaggagatgagagcgaaggagatgtgagcgaaggagctgtgagcgaaagagctgagttcccggagccatcggaagaagccaagcttttcgtcggaaatttggcttatgatgttaatagccaagctttggctatgctctttgagcaagccggtactgttgaaatcgccgaggttatatacaatagggaaactgaccagagtcgtgggtttggatttgtgacaatgagttctgtggacgaagctgagacagctgtggagaagttcaaccgttatgatcttaacggacgtctactaactgtaaacaaggcagctccaagaggatcacgtccagaacgtgcgcctcgggtatatgaacctgcattcagagtatatgtagggaatctaccatgggatgtggacaatggccgtctagaacagcttttcagtgagcatggtaaagttgtggaagctagggtggtttacgaccgtgagacaggtcgttcacgtggattcgggtttgtcacaatgtctgacgtggatgaactcaacgaagccatctctgccctcgatggacagaacttggagggtagagcaatcagagtgaatgtagcggaagagcgtcctccaaggcgtggatattaaagctgagatctagctgtgccctctctctctccctatcttgcattttgtttagacgagattcttacactcttcaacgattgtttttggctgaactctgaatgtgaaagttaagctgcttctaaagtaatttgtatcgcttgtttttgatgatctcttattcatagtttaattcctaaaaaaaaaaaacccccaaccccccccagggcggccgctctagaggatccaagcttacgtacgcgtgcatgcgacgtcaaagtcttctatnnnnnnnnnnnnnn

SEQ ID NO: 91223 - DNA, 843 bp, Arabidopsis thaliana columbia
  unsure (1)..(843): unsure at all n locations
nnnnnnnnnnnnnnnnnnnnnnnnnnnnnnnnnnnnnnnnnnnnnnnnnnnnnnnnnnnnnnnnnnnnnggaatccacgcgtccgccccacgcgtccgagatggatcatctgatatttcttttgttagttacaactatgtattttgggataaatgaagcttgcaaaaaaaatcatgtagtaattcataacgaaatcggtcctggtattgatctcaacattgcatgccggcaattcagcccaaaacgcacaccttcaatgtttcacaccctaaagtacaaagatcctttttacatcattgagttcgcggacaacaatcagctacctcacggtgagaaatggtattgtctgattagtcacggaacaagaccaaaatattggtttgatattgaagtatatcgtcaaggctattatcctcgatgtggtcagctacgctcatggattgctagaaaggatgggatttggtttacaagaaaatatcatagtccaccagggcacgtacttgattggaaaatccagtaatgttctcttgcttttattctccctataattaactaatgtttatgtaagtggtttttgttttgtgtcataataagtaatacgccgtaaaagctaattaagtcatcaacataaattggtggtagactatatggcaacatgttgtatcaaaatatgagtccatttgatgtctatgtattttgcatcaacgttaaataataaaacaatatactttatacctaaaaaaaaaaaaaaaagaagnnnnnnnnnnnnnnnnnnnnnnnnnnnnnnnnnnnnnnnnnnnnnnnnnnnnnnnnnnnnnnnnntgtcctannnnnnnnnnnnnc

SEQ ID NO: 91224 - DNA, 554 bp, Arabidopsis thaliana columbia
  unsure (1)..(554): unsure at all n locations
nnnnnnnnnnnnnnnnnnnnnnnnnnnnnnnnnnnnnnnnnnnnnnnnnnnnnnnnnnnnnnnnnnnnnnccacgcgtccgctccaaagccgtcgtttttgcaaggcagatggcgaagcagattcgtgttacgacgccgtcgatgtccgcaacacgctttctctcaacgggcgacaatggtcaagtagacgagcagcagaaccctccagagcccttacccaacagacccttgcgaggggagagatcttccaactctcacagagaaccacccgctagacaagcccacaaccttggaaagagtgatactactctgtctgacgatggcttcctcgaacagttcaagcttggagtcaatcaggattcacgggaaacccccaaaccggaacaatacccgcaggagcccttaccgccgcctgaggattccgatgagatcttcaagaagatgaaggaaggaggtctcatccctaacgccgtcgccatgcttgacggcctctgcaaagatgggcttgtacaagaggccatgaagcttttcggattgatgcgtgacaagggta

SEQ ID NO: 91225 - DNA, 667 bp, Arabidopsis thaliana columbia
aacttcgacttggaattctttcagccgccgtcccaattgctttgccgccaccgaagcaaagagtagagagataatggctgaggaagaagctaagggtttggattacataccggagatagtactgaagaagaggaagaacagagatgagcttgcctttatcaggaagaagcaacttgagttgggtaattccggcaagaagaagaagaaagtctctgatatcaaacgtcctgaagattttgttcatgagttcagggctaaggaagtagatatgatccggatgaagcaaagagtaaagaggccaaagtcatctcctccaccagttaaatctgacctggttttcatcatacgcattcaaggcaagaatgatatgcacccaaagaccaagaggattcttaacaatttgcaactaaagagcgtctttactggtgtactgctaaagcaactgacagtttgttccaaaagcttctcaaagtgcagccttatgtcacttatggatacccgaatgataagagtgttaaggaccttatatacaaaaagggatgcacaatcattgagggaaatcctgttcctcttaccgacaacaatattatcgaacaggctctatgagaacacaaaatcttgggcatagaagaccttgtgaatgagatagcaagagtcggcgatcatt

SEQ ID NO: 91226 - DNA, 436 bp, Arabidopsis thaliana columbia
tcttaacactctctacaatgttgtctatgctctggttccttctatctcttctctctcttcttctacttccttgtctccgaccttgctttcctgctaaaggatctctgaaaaacaaaaagaagattgacaagggaacttatgtggtcggagaggaggagacacctaaagagcttcagagagagctgatgccgagacacgtggcagtgataatggacggaaaccggagatgggctaaacagaccggattgttgacgtcacaaggctacgaggctggagctaaacggcttctcgagttcgctgacctctgcttcaaactagggataaatactgtctcagcttttgctttctccactgagaattggggaagacacaagattgaagtcaaatgcttgatgtatttgttccaacgttacctcaagtcaaagatccaattttt

SEQ ID NO: 91227 - DNA, 629 bp, Arabidopsis thaliana columbia
  unsure (1)..(629): unsure at all n locations
gccggccctatacgactttattagggaaagctggtacgcctgcaggtaccggtccggaattcccgggtcgacccacgcgtccgcccacgcgtccggctgacgccaatcctggtttctttggttagcaaggactcttccatgttggatggtcttgataatgccagcattgaaatggaagcggccaaggctagattgaatgagattgtaacgtctggcacaaagatgatagacgacgaccaagtctcctctgaagatttcccttggatgactgatggagctggacttcctcccaacgctcatgaactcctacgtgaactggtgaaattaactaagaatgtgactgaacaagtaagactacttgcaatggatgaagacgagaacctcactgagccatacgatataattcctccatatgatcaagcaaaagcccttggcaagacaaacattgacagtgatcggattgcttctgggttaccatgtggtagtgaaggattccttctgatgtttgctcggtggataaaacttgctagggatctctacaatgaaggaaaagaccgntttnncatcacacagattccggttgttncgntncattgnagtacgcctgtacataattccntctcgtctaa

SEQ ID NO: 91228 - DNA, 690 bp, Arabidopsis thaliana columbia
  unsure (1)..(690): unsure at all n locations
nnnnnnnnnnnnnnnnnnnnnnnnnnnnnnnnnnnnnnnnnnnnnnnnnnnnnnnnnnnnnnnnnnnnnnccacgcgtccgattagaaaaggctccggctttatcattctcagaccatcatcactaagcagtaagtaagcactataatcgcagaagatagataaaatggaagtagggtttctgggtttgggaatcatgggaaaagccatgtcaatgaatctattgaagaatggattcaaagtcactgtatggaacagaacactctccaagtgtgatgagcttgtggagcatggtgcatcagtatgtgagagtccagctgaagtaatcaagaaatgcaaatacactattgctatgctctctgatccttgtgctgctctttcggttgttttcgataaaggcggtgttttggagcagatatgtgaaggaaaaggttatatcgatatgtcgactgttgatgcagagacttctttgaagatccaatgaggcaatcaccgggaagggtggtcggttcgtagaaggtccggtttcaggtagcaaaaagccacctgaagatggccacctcattttcccttccttcttggtgacaaggcccttttttggggatcaaatcccagctttttaannccttggggaaggncccntttnctttggccaanttggaacggggctnaatnnggctttttgtgccnt

SEQ ID NO: 91229 - DNA, 576 bp, Arabidopsis thaliana columbia
actaatacgactcctatagggaaagctggtacgcctgcaggtaccggtccggaattcccgtgtcgacccacgcgtccggtttgtttctcaaggaaaaatttcaactttctttcttatttcagtaaacgagagatatgttttcaatctcaatctgattctttctcgcagcggctaattctagtgtcgctaatagggtctctgtttcttcaaatttagttctttaaattcactacgaagatttttgttatggcgagtagaaagctggttcgagatttactgatcacaaagcagcctcttctccagcaattggtgcaccaacggagagtgggcgcaagactaggtcttcttcagggaaatgggtttgcgagtcatcgacggtttagtgttttcagtgagttctcgaagaagattagaggagaagctgatagcaatcctgaatttcaaaagacagtgaaggagttcaaggaaagagcagaggagttgcaaggtgttaaagaggacttgaaagttagaacgaaacaaactactgagaagttgtataaacaaggtcaaggcgtctggacggaggctgaatct

SEQ ID NO: 91230 - DNA, 526 bp, Arabidopsis thaliana columbia
  unsure (1)..(526): unsure at all n locations
cagaattccgggtcgaccatgcgtattctctcacctaacaactccacacaagattcttcgcatggaaagttgttcttcgacttctcttctctaactcgctatcttttaactcacccagctccactgagtcgaaaatttcaaacctttactcgtttccttcatggctaataacaacaacatcccacatgatagcatctccgatccatctcctaccgacgatttcttcgagcagatcctcgggctttccaacttctccggttcttcaggttctggtctctctggaatcggcggcgtgggtccacctccgatgatgcttcagcttggttcaggcaacgaatgggaatcataatcatatgggtgccattggaggaggtggaccctgtagggtttcataatcagatgtttccgttggggattaaagtctcggtcaaggggaagggcatggtttttcttaaaacctgattgaaccttgggaaacgtttccaagccgcatgttctttgataaatgcaggntccnntttgaacc

SEQ ID NO: 91231 - DNA, 524 bp, Arabidopsis thaliana columbia
  unsure (1)..(524): unsure at all n locations
atacgactcaccttagggaaagctcgtacgcctgcaggtaccggtccggaattcccgggtctgacccacgcgtccgacaacatcccacatgatagcatctccgatccatctcctaccgacgatttcttcgagcagatcctcgggctttccaacttctccggttcttcaggttctggtctctctggaatcggcggcgtgggtccacctccgatgatgcttcagcttggttcacgcaacgaacgggaatcataatcatatgggtgccattggaggaggtggacctgtagggtttcataatcagatgtttccgttgggattaagtctcgatcaagggaaaggacatggctttcttaaacctgatgaaactggtaaacgtttccaagacgatgttcttgataatcgatgttcctctatgaaaacctatttccatggcgcagccatgtcacagccagctccaccaatgcccgatcaacagtctactattcngcctannagtagggctaggcgaggtcaagctaccgatc

SEQ ID NO: 91232 - DNA, 651 bp, Arabidopsis thaliana columbia
  unsure (1)..(651): unsure at all n locations
tggcggcaannttcnttccanaaccctttcctcnaaangggacccgntggccaggtccttcccaaactgntctccgccngggccnccaattacggggggnctgggtttnttgnnggaatatgttnggccanccttggtgctggcggccttaagtggcccaaacccaaccccaatgttcccccctgaagagcggattgcgactcagttgcaacagttgcaagaaatgggattctacgacagagcagagaacataaggctttgcttgcaaccaatggtaacgttaacgctgctgtagaacgactcttggggagtattggccagtaacatacaggatcgcgaacttgtggatagaaaagccgctcatcgatacactcatttgttttccaatggtcatcttctttcctctttacccaatccccacaaccttttttacatactttgggtcgtctgttatctttcagattctatttgaagttgttacctcgtacatctgtagaagttgatttcgaaatgctggaatggttacatttacgttttcttatctccattttacttattaaatatagctgtagtgacgttgataatttgtgattgagcgttaagtttttcattcgaataacaaagataaatacaataataattgaaaaaaac

SEQ ID NO: 91233 - DNA, 978 bp, Arabidopsis thaliana columbia
  unsure (1)..(978): unsure at all n locations
taatgtaaatccacttactaattcttggggtgacacggttggccagacaactgcccctggaaggacaaatgctggacttggtggtcttggtgggcttggaggccttggtggactcggtatgctgggagcggactcacctcttggtgcgactccagatgcttctcaattgagccaaatactgcaaaaccccgctatgtcgcagatgatgcaaagcgtactttccaatccacagtacatgaatcagcttatgagtcttaacccacaactccgaagcatgctagatatgaatcctcagttgagggaaatgatgcagaaccctgatttccttcgccagtttagctctcccgagatgatgcagcaaatgatgtctctacaacaatcacttttctctcagaataggaacacggctggccaggatcctacgcaaactggtgctgcgacagggacagccaataacggaggactagatttattgatgaatatgtttggcagccttggtgctggcggcctaagtggcacaaaccaacccaatgttcctcctgaagagcgatttgcgactcagttgcaacagttgcaagaaatgggattctacgacagagcagagaacataagggctttgcttgcaaccaatggtaacgttaacgctgctgtagaacgactcttggggagtattggccagtaacatacaggatcgcgaacttgtggatagaaaagccgctcatcgatacactatttgttttcaatggtcatcttctttcctctttacccaatccccacaaccttttttacatactttgggtcgtctgttatctttcagattctatttgaagttgttacctcgtacatctgtagaagttgatttcgaaatgtggaatggttacatttacgtttaaaaaaaaaaaaaaaaaaaaaaaaaaaaaaaccccagggcgnccactctagaggatccaagcttacgtacgcgtgcatgcgacgtca

SEQ ID NO: 91234 - DNA, 633 bp, Arabidopsis thaliana columbia
  unsure (1)..(633): unsure at all n locations
ccnnnnnnnnnnnnnnnnnnnnnnnnnnnnnnnnnnnnnnnnnnnnnnnnnnnnnnnnnnnnnnnnnnnnnnnccacgcgtccggtcaactaaagccaaccgagcaggaaaactcacgccagcatctcaaaaagtagtggaggaaaaatctgcccaaaaccagagaaggcgcaactccgacccaataaaacagaggcttgcatagccctgtttaagtgtgtaacttgagaattgtcagcccaagtcactctcccatcgttctgtacatacacagcttttgatgagaggaaagagataagatcatgggagaaacagaacacaaagtggttttcagataaaagagttgcttggttcatcgatcaatcaagaagagaatgaagccatattggcgtctctctctgccttcattgttgttgttatttatgttagccatcctttttttgtccatgactctctggagttggattcttatatgtatcggtaagtagtgttattatttaagttatatgaactctctcgaggtgtacatttgtcaaaccttttcagtttttgctgggaaaatggccatgtctaaaaaaaaaaaaaaaaggcggccgctcagagatccaagctacgtacgcggcatgnacgtca

SEQ ID NO: 91235 - DNA, 457 bp, Arabidopsis thaliana columbia
caacaatggtggtgtcactcttctcttccagaaatgttttctatacgttaagcttatgcttatttgcagcattataccagccggttatgagtagaccggctaagtttgaagatgactttaggatcgcatggtccgatactcatatcactcaaattgacggaggcagagccattcagctcaaattggaccctagctcaggatgtggatttgcttcgaagaagcaatacttgttcggccgtgtgagcatgaaaatcaaactgatccccggtgattctgccgggactgtcactgccttctacatgaattcagataccgattcggtacgagacgagcttgattttgagttcttaggaaatcgaagtggacaaccttacacagtgcaaaccaatgtgtttgctcatggtaaaggcgatagagagcaaagagttaacctttggttcgacccttctcgtgattt

SEQ ID NO: 91236 - DNA, 478 bp, Arabidopsis thaliana columbia
aatacgactctaatagggaaagctggtacgcctgcaggtaccggtccggaatttccgggtcgacccacgcgtccgagtgaacacaggaatcatcaaaggtgctgataccgcatcagcttcaatccattttcctccattgtcgagtaacaatgctagattgaagatgggaaaggtagcaaaccgaggttgtgtccagagaagctatggttgctcaagagctcgggctcaggtaatgtctctatcacgactactttcttgcaacgcatcatcatcttcttctcctcccgatagcagctccagtgaatacctcaaagactccggcctctgggaaacaccggttggggacatgagcgtggttttgtcgctgcaaattcagacaaaatgttctgatttgtttgctgaaactcctgctgtgtcttgagtctctcttcttctggagcctttgtcgtcgagttcttatgcccttcagggcttcttt

SEQ ID NO: 91237 - DNA, 1321 bp, Arabidopsis thaliana columbia
  unsure (1)..(1321): unsure at all n locations
aaaagacgacagaaggggacgcacaacaatagactcaaagcaaacgcaactcatatccaatcgcttttaaacgccaataatcgcgttacagtaacaactcgaaaaatggtaacactaatcgtggccaccaccgccgatccagcgtcgatcaaccctgcggcggcgcgtctcgccatgcccggttggaccgccggacctatcttaccgccggacataaagagttttagtaacaagcaaacgagagtgattcaacacgatagatctatagtaaaagaagacgatctcgatttacgttgggaagaagctaccggtgaagttgttgatgaagtcatcttcctcagccgtcacaccgccgtctcaaatcgtcctgctttaactgttcatccgattggagtgcttcatctaaaggatggagaatcaccgccgcaaggaggaaagcctggatgggcggcgttgccaagcactagaattggtccatggtttcgtcttttgaagaaaatggctgaagctcatggtttagttcctgagtttgagataacattggaagctactcatcatggaccaataactaacaagccaacgatgtttttggagattggtagtaccgaggaatactggaagaggcaagacgcagctcaagtcatggctcttttaatgtgggaaggtcttgggctaggaggcagtgaagaagtagggaagtggaaaagtgaaaccggaaagaggaaagttcttttaggcattggaggtggacattatgctcctcgtcacatggatatagctttgaaagatgatatttgggtaggccatttgctttctggatactcattaccgatggaagatccaactcaaaccaaaacaacgcctggagagaattacattggtggaaattggagacaatcaattaaggcagcatttgaagctactaaagcatcattccccggaggcgagatcttggctcatcttgaccacaagagcttcaaaggatggcaaaagaaggccattacagagtttttagcagaagagagcatcaatgttgggaagccaaacgatttcacatgaactgtgagagacccccttaaaacatatcttgagatctgagtttttggtttattggttcagaatctatcattgatgatgatgggtttagattattttcagctgttacaagtaagtagagattgaaattcatctgtaagctgccctttttaaagttcacattcagatttaagataaaaaaaaaaaaaaaaaaaaagnnnnnnnnnnnnnnnnnnnnnnnnnnnnnnnnnnnnnnnnnnnnnnnnnnnnnnnnnnnnnnnaagga

SEQ ID NO: 91238 - DNA, 622 bp, Arabidopsis thaliana columbia
atcagaaagctgaagcaatgtgggcagacttcagctcacgatggttctctttgatgcacagcactaggccgatgcgattacacgatgtcaatgaacttgcagaccatgcggcctctgcttttgagacggtgagggacataaacacagcatctcgtttgataggggacatgcgaggagacacactcgttgatccgttgtctgataggtacaaaaaacttggctgcaagatatctgtggtagacaaagagtctgaagattacaagatggttgtgaagtatctcgagactacttatgagcctgtgaaagtctctgatgttgagtacggtgtgtcagtgcagaatgtttttgcggttgagtcagatgcaattccttcattagatgatatcaagaagttaccaaataaggtccttttatggtgtgggtctcggagctcaaatctattgagacatatctacaaagggttcttacctgctgtatgctctcttccggttcctggttatatgtttgggagagcgatagtgtgttcagatgcagctgcagaagcagcaaggtatggttttacggctgtggatagaccagaagggtttcttgtattagccgtagcatcacttggtgaggaagt

SEQ ID NO: 91239 - DNA, 711 bp, Arabidopsis thaliana columbia
  unsure (1)..(711): unsure at all n locations
acgcgtccgcgaacgcgtgggtgcgcatatcgacaattttccgagcggccagtttacgtattttgtttgtagttaacgtgtttcaaggactttgacaatggctgaggaagcgcataaggtaacattgaatgtctatgatttaagccaaggcttggcacgccagctctcacaatcactcctgggaaaggttattgaaggtgtatggcatacaggaatagttgtctatgggaatgagtacttttttggaggagggatacaacatttaccagttggaagaactccatatggaacaccaattcgaacgatagagttgggtctatcacatgtgcctaaagatgtattcgagatgtacttggaagaaatcagtcctcgttacacngctgaatcctacaatttacttactcacaactgcaacaacttcagcaacgaggtcgctcagtttttggtgggtaaagggattcctgactacattctccagcttcctaatgatgttctaaacagtcccatgggtggtcttataatgcctatgttgcaaggcctcgaaacaactctaaaggctgggtgctgttcctcaagttccacagttttaggccacaggcacaaccttttgggngctttttagtaaagnttatgggccccaaaatngtgataggtcccaaagctcgnggaagcagaaacctaactggaactnggaagggncccngttttttt

SEQ ID NO: 91240 - DNA, 892 bp, Arabidopsis thaliana columbia
ggtcagattctataggatcaaacttatgggacttaagaatgatggaagggaataaaatcaaaaaagaaatcaaataaagaaaagagagagaaaataaagaaaaaataagtaaatcaaaatgaagtagaagaacccagattccaaatgaacaaattcaaacttgaaaaagtctctttctgattctcgaagaatgaggggcaaagagattgattgagaaagatctcttgttcttattataagatcgtgtgattggacccgcagatgtttggtaaaaagaataatcttatcctttgagaataatcaaaaatagaaagtgttcagttggaacatgaaaacgtgaccgagtttgtcctagttactcttcgggacggagtggaagaagggaggagattcgcgaacgaggaaagggacccaatgacttcgaaagaattgaacgaggagccgtatgaggtgaaaatctcatgtacggttctgtagagtggcagtaagggtgacttatctgtcaacttttccactatcacccccaaaaaaccaaactctgctttacgtaaagttgccagagtacgattaacctcgggatttgaaatcactgcttatatacctggtattggccataatttacaagaacattctgtagtcttagtaagagggggaagggttaaggatttacccggtgtgagatatcacattgttcgaggaaccctagatgctgtcggagtaaaggatcgtcaacaagggcgttctagtgcgttgtagattcttatccaagacttgtatcatttgatgatgccatgtgaatcgctagaaacatgtgaagtgtatggctaacccaataacgaaagtttcgtaaggggactggagcaggctaccacgagacaaaagatcttctttc

SEQ ID NO: 91241 - DNA, 643 bp, Arabidopsis thaliana columbia
  unsure (1)..(643): unsure at all n locations
acgcgtgcgaactaatctaaaccagcccattatttatatgattccgtatgccaaccagggaacgagcttatgagaaggggaggacagccaatccgaaacgtcacgaaatccccagcgcttcggggatgccctcagcgacgaggaacatgtactcgggtgtatactatcacccccaaaaaaccaaactctgctttacgtaaagttgccagagtacgattaacctcgggatttgaaatcactgcttatatacctggtattggccataatttacaagaacattctgtagtcttagtaagagggggaagggttaaggatttacccggtgtgagatatcacattgttcgaggaaccctagatgctgtcggagtaaaggatcgtcaacaagggcgttctaaatatgggggcaaaaagccaaaattaaagattgagcccttattaaaaggaaacagatcttgaacccctttaagntcatgtacgccgaggnntgcngaggaaaaactggaaatccgtccatttttcggaancggtnngttacaggtgggtaccggattctgaaanccgggaaaatcntngggttccaatttcttcgggcctgaaaggtcccnaaggggacaanccntcggttngcagannggggnccctc

SEQ ID NO: 91242 - DNA, 392 bp, Arabidopsis thaliana columbia
catacaacagggccctgtgttctctgagtcaagtcaggggctgatgaataaccctgtaccgggtcagtcggtctctggtggcaattctggtggttatttgtttccttcttcctctggatactgcaatgtttcagctgtcttgcctcatggaaggaatttgcaaaaccagccacctgtttccaccgtgcctagagacagattggctatgcaggattgtcctttgatagctcaatcctcgttgattaatcatcaccctcaagagttcatagatccacttcatgagttctttgatttctctgatcatgttcctgttcagaatctacaagcagagagtagtggagtaagggtggactcatccgtggaacttcataagaaaagtgaatggcaagatt

SEQ ID NO: 91243 - DNA, 976 bp, Arabidopsis thaliana columbia
ttggccccggctttcctttattttgggttgtttgttgtgattgtgagggatacaatttccccggaacagttatgcccttattcgccaagtttattaggcttcctataggaaagtggttcgccttcaggtccggttcggaattccggggtggacccaggcgtccgaaaaaaggctttaggtcaaacagaaataacgacctaaagctatgtttaaagcttagcagttctccacatatatttcaatatataaaaagattacccctttttaaaaaataaaatagatatttgttttccgtaaaagaaaggggtaatcaaataaaatggagacggctaggcttttcaaattagtgtgtgtgatatgtattgccagtttgattccgaccatacgagccaatgttgctgatgagaccgatgagtattgggtaaacaaggccaatgaagctcgtaaacatacccttatggcttatcatcccgacccttatgagatcgtcgaccacttccacgagcgtcattacgacaactcgactgacgtcgaggggaccgaggaagagaaggcggtcgcttccgaggaagaggacgtcattgagatgatttctagtccgacaaacagcacaaggggtatcctaaccggtaggggcaagggaaaagcacacgcaaaatggagcaagctaacgggaccttgcaccgcaagcaaccccatcgataaatgctggcgttgccagcctgattgggccagacgtcgcaagaagctcgttcactgtgtccgtgggtttggttacaggaccaccggaggcaaacgcgcccgctttagaggatccaagcttacgtacgcgtgcattatggtgaaccctagacctggaacactacgtcacgctgtgatccagaaagaacctctatggatcgtttttaagcacgatatgagcattcggttaagccaagagctgatgattactagtgacaagacaatcgatgctcgt

SEQ ID NO: 91244 - DNA, 611 bp, Arabidopsis thaliana columbia
  unsure (1)..(611): unsure at all n locations
aaaaaaaaaaaatatatcctcttccttctctcttaaaaacaaaagcaccgcttcaattccgccggcgttgtgagccaccacggtcatgacgtcggtttggctttttggtttatgttcagttatgtctctttaagttgtggttaaggagatttctgggttggtttcgatttcgtttcctcctcaatttctcttattagatctatagtttcgattggtgattttgcaaattagcgtggttttcttctctgactaaatactccctggcctaatcacgatcgctctatgccactcactgtcggtgttgtggtgattcgggttgggtgacctaattttgggtttcctcacacagcttcaacaatacggatctagggcgaaatccgcccagattttgggttctttctaccgggttcaagtcgcataggcgataatctccggccacggggttctcgacggtctctgaatgnttagnctgaggttccancggctgccatccaaaggatcccaagggttttcttnctnaggcttttaatntnaaggnnggaaagaggcaaatttcttnaaggggggctnaaccccggcggancnccggtaaattcggcctgggnnnttgg

SEQ ID NO: 91245 - DNA, 712 bp, Arabidopsis thaliana columbia
  unsure (1)..(712): unsure at all n locations
cggaccgcgtggccagtatttcgtaacggccaaagtttcccaattctttttttttttgcataataagatctgaaatcggagatagaaaaaaaaaatcacatttttatttccgccggaacaaaaagcgatggttcagtgtagcaacaatctcctcggaatcctcaatttcttcacattcctcctctcaatcccaattctctccgccgggatctggctcggcaaaaatgcagcaaccgaatgcgaacgtttcctcgacaaaccaatggtcgtactcggaatcttcctcatgttcgtctcaatcgccggactcgtcggtgcttgttgccgtgtctcttgcctcctctggctttacctcttcgctatgttcctcctcattctcctcggcttcttgtttcacaatcttcggctttcggagtcacaaaccgggggcgccggtgaggttatatcggatcgggggtttaaaaggggtttcatgtcgccggttaccttaattggttgcagaaacgtgtcaacaatgctaagnatttgggacggatcaggagttgtttnatgactctganggttnnncacttatngnanctcgtaatgcagattaacggtgangtttttcaaatcaaacntaaagcnttcagctggtttttnagcggccatggctnaanttacctttnaccggtantggnaggtcggcctnaaangggtaatttggnaaggc

SEQ ID NO: 91246 - DNA, 1207 bp, Arabidopsis thaliana columbia
  unsure (1)..(1207): unsure at all n locations
tccatttctcattgtatcttcatcagtctcttcttattccattttttcaaaccacttgcaaaattcgaatcagatcttctcttcaatcgaaaaaaaagaaaggatttgctctagattgttgaatcgaagatgtcgacaagggaagagaatgtttacatggcgaaattagccgaacaagctgaacgttacgaagaaatggttgaattcatggagaaagttgcgaaaactgttgatgttgaggaactttcagttgaagagaggaatcttctctctgttgcttacaagaacgtgattggagcgagaagagcttcgtggagaatcatttcttcgattgagcagaaagaagagagcaaagggaacgaagatcatgttgctattatcaaggattacagaggaaagattgaatccgagcttagcaaaatctgtgatgggattttgaatgttcttgaagctcatcttattccttctgcttcaccagctgaatctaaagtgttttatcttaagatgaagggtgattatcataggtatcttgctgagtttaaggctggtgctgaaaggaaagaagctgctgaaagcactttggttgcttacaagtctgcttccgacattgccactgctgagttagctcctactcacccgataaggcttggtcttgcactcaacttctctgtgttttactatgaaatcctcaactcgcctgatcgtgcttgcagcctcgcaaagcaggcgtttgatgatgcaatcgctgagttagatacattgggtgaggaatcatacaaggacagtacactgattatgcagcttcttagagacaatctcactctctggacttcagatatgactgacgaagcaggagatgagattaaggaggcatcaaagcccgatggtgccgagtaaacccgaagaagaggaagagtcattttataatggtagaaaactttcatgtgataatctgagtgagggatagctcaggattcttataagagacacagttttattgttgtttgtttgttttgaaactacttgcgatttatcattcctcctttagcttcctcaatatttcctattctcctttctaatgaaatcaaaacttggttatttctgaaaaaaaaaaaaaaaatatgttctnnnnnnnnnnnnnnnnnnnnnnnnnnnnnnnnnnnnnnnnnnnnnnnnnnnnnnnnnnnnnnnnnnnnnnnnnnnnnnn

SEQ ID NO: 91247 - DNA, 491 bp, Arabidopsis thaliana columbia
aatacgactttattagggaaacctggtacgcctgcaggtaccggtccggaattcccgggtcgacccacgcgtccgccgcacaaactgcttaaattgaagagacgactatgtgcgtaaaacgaagagactcaaaacaattttgggattcgtgagagatattgattcgctgcaatggaagaatctgttcatcaatcgatacgattcggctcagttgcagatttaatcatgtggaagaatcgacgcggagggtttcttctacttggatcaacgacattgttatggttcctctttgagaaatgtggatacagtttcttcccctttgttgttaatactcagcttctctccgtcgttatactcttcctctgggccaaatctgctattctcttcaataggcctatgcctcaactacctaatcttgaaatcactgaggaatttgtgtttatggtggctgatgctatacgagtctggatttaatacgtgctcgctgttgc

SEQ ID NO: 91248 - DNA, 890 bp, Arabidopsis thaliana columbia
  unsure (1)..(890): unsure at all n locations
tatacgactccttaagggaaagctggtacgcctgcaggtaccggtccggaattcccgggtcgacccacgcgtncggatctttctaaaagtcgatcatccaacagaacattacatctttcatgggataaaattatgttcatagagaaaaggatgcccgagcttggagccggagaagaaagtggctgcatcaacagagaaattttaaagaagctggaagaatagctgcagaagccaagtctttaaatttagaaaaggataagacacagatggaaacaggaaaagctaacgctgagctcgaaaaagcagagcatgagattgaagaaaccatcaagaggctacaagagatagagaagttgattttgtcgaaagaaaaagaattggctattagtagattccagaggttgcggattgacagtggaactgcaaaagctgagagatcagctgctctggaactgagcgaccttgaagaagctaatcttctacttgaggaagcgcaagaaagcagaatccgaggcagagaagcttaaactcacaggcgggtctcaaagaagaggaagaggaagaagggaaagcaaaatcttatgaagtttttgtctcgatggaactcatagccaccgttggtttgaaaaaattacaagaactggtggaatctgttccatcttaactctgaaactgcttcaggttcaatcctagggacaaaaaggaatgtcttgaatcatcaaggaaaagaaccgaatggttggttttgtaaatctatcaacaacattaagctccataacgcagtccacgtatatggtttttgtttggttgttaaaaaaaaaaaaaaaaaaaaaaaagggcggccgctctagaggatccaagcttacgtacgcgtgcatgggacgtcatag

SEQ ID NO: 91249 - DNA, 637 bp, Arabidopsis thaliana columbia
  unsure (1)..(637): unsure at all n locations
anngaaantactntgacccgaaaacagatttaagttgaagaaccctccagggcccncaanagaagaaganttntttttcgaaagaaaaagaanttgcctattagnagattccaagngnttgnggattacaagtggacctccanaactgaanagatcaactgctctggaactgaccgacccttgaagaacctaatcttctacttgaggaagcgcgagaaagcagaatccgaggcaagagaagcttaaactcacaggcggtctcaaagaagaggaagaggaagaagagaaaccacaatctaatgaagtttttgtctcgatggaactcatagccaccgttggtctgaaaaaattacaagaactggtggaatctgttccatcttaactctgaaactgcttcaggttcaatcctagggactacaggaatgtcctgaatcatcaaggaaaagaaccgaatggttggttttgtaaatctatcaacaacattaagctccataacgcagtccacgtatatggtttttgtttggttgtttttgggatccatgtgttgatcgatttggttgttcaaagaaaagagagaaagcttattctantcaacatgttacgaggatagaaacnccaagacttttnggctnnnnnc

SEQ ID NO: 91250 - DNA, 404 bp, Arabidopsis thaliana columbia
ctcgttgctaagaaaaaaaaacatcatcttctgagatttgaaccttttaatactcgaaatggacaagaagaagaagagaaaaagatgtattgtcttcaagttgcagcatatcacgtgttcttcaacgcatctcggatatgttatcttcttgctctgattatttttgtctttctcagattcttcgctattttccagaatatctcaccagataatcgagtcggcgagccaagaacggcatcgtttatgaggttcagtgatacacaacaagctcagggagattttaatctaactttctctggtgttttacttagaatctgtaatcaaagatgtcgctgaaattgttttttagttttattttgtagtattgtttaattatgtacttatcgctatattaattaccatgt

SEQ ID NO: 91251 - DNA, 720 bp, Arabidopsis thaliana columbia
  unsure (1)..(720): unsure at all n locations
cacgggtaccacaaccgtgtcatcgggtttnaggatctctggtttcgaagtgtatgatcacaaagaatcgagtttntggaagcccgagaggaagcttcttcgcgggctcgatgtagatggagcgagattgactcttaggaagtttgtatcatctaactcactttcggacactggctcgaaacctgactctgcttttgcctcgagtgtttacggcggttcccacgggatcttaacgcagttgctggaactcaagacctggttcgagaaccaaacgctctaccatttcaactcttgttcgattttaatggtctatgagaatgaatccatcttaaagggaaatgatgatgatgctagaccacaagtcaagctggtggattttgctcatgttcttgatggtaatggtgtcattgaccataacttcttgggtggtctttgctctttcataaacttcattcgtgagattcttcagagcccagatgagtctgcagattcttagatttaagttaatttgtttgttatggctttggctgattccaatttttggatataaacttatgtttccttcacatatgtacttgattacctaaagagcagaatacattcgtactcttttctcaaagagtattccatttcaaaaaaaaaaaaaaaaaaaaaaaaaaaagggcggccgctctagaggatccaagcttacgtacgcgtgcatgcgacgtcatagctttt

SEQ ID NO: 91252 - DNA, 901 bp, Arabidopsis thaliana columbia
  unsure (1)..(901): unsure at all n locations
ccnnnnnnnnnnnnnnnnnnnnnnnnnnnnnnnnnnnnnnnnnnnnnnnnnnnnnnnnnnnnnnnnnnnnnnnccacgcgtccggtcttctccatcgtttctccctgaagatttgttctactactctttttgggttgcaggacacattgctaaagacgggaagcctggtcctctcgtagatgacaagggtcggttcttcaagccacttcagggcgattctcgtggtgaaatcgaggtaaagttctacgaatctttctcctcaaacacagaggttccagaacacatccatagatatttcccggtgtatcacggcactcaagcagttgaaggttctgatggagcagccatgatggtgttggaaaatcttcttgcagaatacacaaaaccatcagtaatggatgttaagatgggttcgagaacatggtatcctgatgcatctgaagaatacatccaaaaatgtttgaagaaagacacgggtaccacaaccgtgtcatcgggtttcaggatctctggtttcgaagtgtatgatcacaaagaatcgagtttctggaagcccgagaggaagcttcttcgcgggctcgatgtagatggagcgagattgactctgaggaagtttgtatcatctaactcactttcgggacacttggctcgaaacctgacctctgcttttgcctcgagtgtttacggctggttcccacgggattccttaaccgcagttgcctggaacctcaagacctggggtttcgagaacccaaaacggtctaccatttaaactcttgtccgntttaatggctatggnataatccattttaagggaatntnntgttnttgcccaagtaagctgnggntttnccagtcttntgaaagggnattccnantttgggggntttccttaaaantc

SEQ ID NO: 91253 - DNA, 466 bp, Arabidopsis thaliana columbia
aatggaaacaatggttatgatgagatccgtgctgccattagggaagctaaggctgtaacagacaagcccactttgattaaggtcactactacaattggttatggttctcccaacaaggcaaactcatacagtgtccatggagctgcgcttggtgagaaggaagttgaggctacccgaaacaatcttgggtggccatatgagccgttccatgtacctgaggatgtcaaaagccattggagccgtcacacgcccgaaggggctgctcttgaagctgattggaatgccaaatttgcagcttatgagaagaaatatccggaggaagctgcagagttgaaatctattatctcaggtgaattgcccgttggttgggagaaggcacttcctgtaagtagaactttctggtaatctataacgttctatcagtattcttcatatataaggctcttattttaggcaacttaaaatt

SEQ ID NO: 91254 - DNA, 1166 bp, Arabidopsis thaliana columbia
  unsure (1)..(1166): unsure at all n locations
nnnnnnnnnnnnnnnnnnnnnnnnnnnnnnnnnnnnnnnnnnnnnnnnnnnnnnnnnnnnnnnnnnnccacgcgtccggcctatatgcattggtagacatgcctttggtgaccagtatcgtgccactgatacagtaattaaagggccaggaaagttgaaaatggtttttgtcccagaagatggaaacgcacctgtggagctagatgtatatgatttcaagggcccaggtgtcgcacttgctatgtacaacgtagatgagtcaattagagcttttgctgagtcatctatggcgatggcattaactaagaaatggccattatacttgagcaccaagaacacaattctcaagaaatatgatggcagatttaaggacatatttcaagaagtttatgaggcgaattggaagcaaaagtttgaagagcactcaatctggtacgagcaccggttgattgatgacatggtggcttacgcagtcaaaagtgaaggtggctatgtctgggcttgcaaaaactacgacggtgatgttcaaagcgatcttcttgcccaagggtttggctcattaggcctcatgacctccgttttgctgtccgctgatgggaaaacactcgagtcggaagcggctcatggaacagtaactcggcatttccgactgcaccaaaagggacaagaaaccagtactaacagcatagcctcaatatttgcatggacacgcggcttagaacacagggcgaaactggataagaacgagaaattaatggatttcgtgaagaagctcgagtcgtcatgtgtaaacactgttgagacagggaaaatgaccaaggatcttgcccttttaatccatggtcccaaggtgagtagggatttgtttttgaacacggaagagttcattgatgcagtagcctccaagctcaaaacacagttcaaagagcttcctcttgtctgaccattcctgggaattgggaacaatacaaaaataatgctcgcaataattcataacccaacacaaaacaaaaataatattggcgggtttatatgaatattttggttggaaataaacgtttttgcttaatttttccaatttattttaaaaatttgagtgacaaaaaaaaaaaaaaaggcggcccgctctagaggatccaagcttacgtacgcgtgcatgcgacgtc

SEQ ID NO: 91255 - DNA, 1125 bp, Arabidopsis thaliana columbia
  unsure (1)..(1125): unsure at all n locations
cccacgcgtccgcacaatgtcttcgaaagacaagaaaccgtcgttgccatcgagtagtcgtggtggaatccgagctcggtccgatcttaaccgggggtcgggtcctgactccgacagtgattccgatggtccacaagaatactacacaggtggtgagaaaagtggtatgttagttcaagatccatcgaaaaaagatgatgttgatgagatatttaatcaagctagacaactaggagctgtagaaggacctcttgagccacctccgagttccaggagtttcactggaactggtagattgctttctggtgaaaatgtgcctactggtaatcaacagcctgagcctgttgttcacaacattgttttctggtctaatggtttcactattgatgatggtcctttgaggaaattggatgatcctgagaatgcatcgtttctcgagagcattcgaaagtctgagtgcccgaaagagcttgagcctgccgatagaagagctccggttcatgtcaacttgatgcgaaaggaagagaaatgccctgaaagacagaaacgtagggtttcttttcagggtgttggaagaactctaggtggtagcaatgaaggtagcggaagtagctcacctgtggctccagactccgctcccattcccatccaaaccgaaccagcaccatctcaaagtcttgtaatagatgaaaccgttccaaccacatcgatacagcttagactagcggatgggacacgtctggtggctaagttcaatcaccatcacacggtcaacgacattcgcggtttcattgactcatctcgacctggagcctcgttgaactaccagcttcagacaatggggttcccacctaagcctttgactgatctccctcagaccattgaagaagctggtctcgccaactctgttgttcttcagaaattctagaaaattctacaaggtgtggttctttttgtctatctatatgcattataatgagattttcataactgttgtagtaaccaggttctttaaaatgtaagttacttcttcactctgtatactcagcataagccggcggggacttgtcgcacagtttttctaaatctctctccttttttttgtgtccnttaatgtttaattat

SEQ ID NO: 91256 - DNA, 1084 bp, Arabidopsis thaliana columbia
  unsure (1)..(1084): unsure at all n locations
nnnnnnnnnctaatacgactcactatagggaacagctggtacgcctgcaggtaccggtccggatacccgggtcgacccacgcgtccgtacggctgcgagaagacgacagaagggtacggctgcgagaagacgacagaagggggtgctaggttgttcttgggtggtataggtgtggaaaacaccggaactgagattgcaactgctttgaacaatatggtcgtgagctgcgagtacattctcaaactaaagcatgaaatcgaggagcaatgtactgaggtatttcctgcaccagcagatcgagagaggataaaatcatgtctatccgagctaggcgagttaagcagcacgttcaagcagttactcaactcaggcatggaacagctagtagcaaccgtaacaccaagaatccgtccggttctagacaccgtggctaccataagctacgagttaacagaaaccgagtacgcagagaatgaggtgaacgacccttgggtccaaagacttctccactcagtcgaaacaaatgccgcgtggctccaaccactaatgacatccaacaactacgactcgtttctgcatctcataattgatttcatagttaagagactcgaagtcataatgatgcagaaacggtttagccagcttggtgggcttcagcttgatcgagacacaagggctttggttagccatttctcgggtatgactcaaagaacagtgagagataagtttgctcggttaacgcagatggcgacgatactgaacttggaaaaggtctcagagattttggacttttggggagaaaactcaggacccatgacttggagactcacaccagctgaggttagacgggttttgggtctccgggtcgagttcaaacccgaatcaattgctgctctcaagttgtgatgttacttcttttctttattatgtcatctacacaactcgaaccaattctttcgaaatctgattggttcctcaaaaaaaaaaaaaaaaaaaaaaaaaaaaaannnnnnnnnnnnnnnnnnnnnnnnnnnnnnnnnnnnnnnnnnnnnnnnnnnnnnnnnnnnnnnnnnnngttcaattc

SEQ ID NO: 91257 - DNA, 535 bp, Arabidopsis thaliana columbia
ctttactcgagagagagaagttctaaagtcctgacgcgtgggaaagctttttcagcttctttgttgaattgcgagcagaggtagaaatcagcaggaaacaaaaatgttgttcttttcttacttcaaggatttggttggacaagaagtgacggttgagctgaagaatgatttagccataagaggaactcttcactcagttgatcagtatctgaatatcaagctcgagaacactagggttgttgaccaggacaagtaccctcacatgctttcagtgagaaactgtttcatcagaggatctgtggtaaggtacgtgcagttacctaaagatggagtcgatgttgatttgcttcacgacgcagctagaagagaagctaggggtggctgattctgaaatatctttgtatctccaaaacttgaatacttttcattcggcgtaatggctttataatgaatatttccctgatgtagagccaatggtatggccatgaatcttgttccattttattaacaatggataatttaatttcttttcctc

SEQ ID NO: 91258 - DNA, 794 bp, Arabidopsis thaliana columbia
  unsure (1)..(794): unsure at all n locations
nnnnnnnnnnnnnnnnnnnnnnnnnnnnnnnnnnnnnnnnnnnnnnnnnnnnnnnnnnnnnnnnnnnnnnnnnnnnnnccacgcgtccgcccacgcgtccggattttgttgttgtcatgtgtgtgtaaaatcaaaatcgtaaagatcagaatcaatattctcttgccacatatatcctttatatatacacctttctctcccgcatcttcaacatatatccagtgccattgcaattttctcgagaaagtgacggaaaatggctccgcagctgcaaaattgagattcggattctcccttctttcgtcactctcattcattctcgcctgtatcaggcgtacacgcgttgttatcatctgttgcttatatttgaaccatggcgcaaccaaggtacactaggatagataacaggaggccctcatcaaattattgctctacagtgacagtagttgtgtttgtggccctatgcttagtcgggatctggatgatgacatcatcttctgttggaccggctcagaatgttgatgaggtttctctggacaacaaagatgggataaagaaacagatgaccccacctgcagaggagggtaatggtcagaagtttgaagacgcacctgttgaaacaccgaacgaggataaaaaaggagatggtgatgcaagcttgcccaaagaggatgagagctcaagcaaacaagataaccaggaagagaagaaagaagagaaaactaaagaagagtttactccatccagtgagacgaaaagtgagaccgaaggtggggaagatcaaaaagatgact

SEQ ID NO: 91259 - DNA, 382 bp, Arabidopsis thaliana columbia
atcaaccggcgaatatagtgacataaaaatctacctcagtgaccatagtctcactttccaatcccacaaagtcattctaagtctttggagtgttgcatttgcaaagatgtttacaaatgggatgagtgaaagccattcatcaacgatttacctaaccgatgtatcaccagaagcattcaaggctatgatgaatttcatgtatagtggagagttgaacatggaagacactgtgaattttggcaccgagttgattcatcttctctttctagctgaccggtttggagttgttccacttcatcaagaatgctgcaaaatgctcttggagtgcctctcagaggattctgtatgctcagttctccaagtggtttcgtctatctcatca

SEQ ID NO: 91260 - DNA, 518 bp, Arabidopsis thaliana columbia
  unsure (1)..(518): unsure at all n locations
atgatctnnnnnnnnnnnnnnnnnnnnnnnnnnnnnnnnnnnnnnnnnnnnnnnnnnnnnnnnnnnnnnnnnnnnnnnnnnnccacgcgtccgcccacgcgtccgatgctgcaaaatgctcttggagtgcctctcagaggattctgtatgctcagttctccaagtggtttcgtctatctcatcatgtaaactcattgaggagatgtgcaagaggaagttctccatgcacttcgactattgtaccactgcaagtttggactttgtcttgttagatcagaccaccttcagtgatattcttgagtctgcagatctgacggtgacatctgaagaaaagattctgaatgctgttctcatgtggtgcatgaaagctgaggagtcgcacagttggggagtaatagatgagatgatgaactatgctgaccccaaaagtttgttcaaagaaaggcttcagtcacttgatgacctgttacctcatgtacgcttctctttgttgccatatgagttacttaaaaggttag

SEQ ID NO: 91261 - DNA, 495 bp, Arabidopsis thaliana columbia
  unsure (1)..(495): unsure at all n locations
aagtagtagaagctgtcagaagacaacgtgaaggatttgtcaagtgatttgcagaaactaattgatgtatacatgaagaagatagaggagctctacaaacagaaagaaaaggaattgatgaaggtgtgaccataatggttgttaggggaggagccgtaattcaccaatctggtaaaatcccgcaatttccaatgccttcgtttcttttactatttgccctgatgtttccttggggtacaagcatgtcttttgggaattgagagcaactttgtttaaattttcggttgcaaaatttttagaagaagcctctgatattttgtttcttttattaaaggatccctctttgtacagcaaaactcttgttaattttggttcatcaccccaattatcaaatcttatttttggcttaaaaaaaaaaacaaaagnnnnnnnnnnnnnnnnnnnnnnnnnnnnnnnnnnnnnnnnnnnnnnnnnnnnnnnnnnnnnnnnnncacc

SEQ ID NO: 91262 - DNA, 482 bp, Arabidopsis thaliana columbia
gccggcactatacgactcttatagggaaagctggtacgcctgcaggtaccggtccggaattcccgggtcgacccacgcgtccggcagaactatgtaccggcaatgttcttttccaaaatgattctccggctactttacttgcaacggtcatcggtataatcggatcaattgaccaagaaatgcttgccaaaggacgtgaggcatgcaagtacttcaccaaaaatcatttaccatatgagaggaaccaggagagtaacaatttggagtacctaataccgataaagtcatcgctcacgcgtagactaccaacgggtgaccaaggcttcatagactttgtggcatacttgctccaagttgatccatagaaacgcccgtctgcatttgaagctcttaaacatccttggttgacttatccctacgaacccatatctgcctgattctgtaggtgcaacaaaagcagaatggatgagaagctagtcaag

SEQ ID NO: 91263 - DNA, 430 bp, Arabidopsis thaliana columbia
ccaaactccaattttttttgtttctctcaataatatttgtgttcatactgtttcgctgtttccaatacatactaatggataacacaaaccgtcttcgccgccttcactgtcataaacaacccaagttcactcatagctctcaagaagtgagtagtatgaaatgggagtttatcaatatgaccgaacaagaagaagatctcatctttagaatgtacagacttgttggcgacaggtgggatttaatagcaagaagagtggtgggacgtgaggcaaaggagatagagagatactggattatgagaaattgtgactatttctcccacaaatgacgcaaaagtcactctctttaaaaaatctcgagaatctccctgtttttctatttctcatcctcattaaataatttctgtgattgtggacaagaaaagcttta

SEQ ID NO: 91264 - DNA, 502 bp, Arabidopsis thaliana columbia
  unsure (1)..(502): unsure at all n locations
actcaatanagggaaagacggtacgcctgcaggtaccggtccggaattcccggtgtcgacccacncggtaacgctctcatcatacttcccaacatcaaagaagacctttacttctggttagaatagaccaagaacactgagtacgacaaagaaccatgatgaatctttcttctcgtcgcgcctcttccactctcacattgagcttcactgttctccttatagcttccacaggttcgtatggctcaacattcacattcgctaatcggtgcggctacaccgtatggcctggaatcctatcgaatgctggctcacctactctctccaccaccggatttgagctccctaaaggcacctctcgctctctccaagctcccaccggttggtccggtcgattctgggctcgtaccggttgcaagttcgacagttctggctccggaacatgcaaaaccggtgactgcggctcaacgctgtcaaatgccccgggcttggtgccgcaccgcct

SEQ ID NO: 91265 - DNA, 556 bp, Arabidopsis thaliana columbia
  unsure (1)..(556): unsure at all n locations
cccacgcgtccgaaatcttatcacaaaccaaaaaaaactttctttcaaaatcgttctctgaggcattttaacgaacagatggcggacttaaacggtgcgtattacggaccatcgattccaccgccgaagaaagtctctcacagccacggcagacgcggcggtggatgcggttgtttaggtgactgtcttggctgctgcggctgctgtatcttaagcgtcatcttcaacatcctcataaccatagccgtcttattaggcatagctgctctaatcatctggctcattttcagacccaacgctatcaaattccacgtcaccgacgctaaactcaccgaattcacactcgacccaaccaacaacctccgatacaatctcgatctcaatttcacaatccgtaaccctaaccggccggatcggtgtttactatgatgaaatcgaagtcagagggtcctcggtgatcagggttcggatgggaacaacattttggaggttttccngggcatagncacggcggtngntngcctacttgtgggcagaattgggntttttcggngga

SEQ ID NO: 91266 - DNA, 761 bp, Arabidopsis thaliana columbia
cggctacaatacgactcactttagggaaagctcgtacgcctgcaggtaccggtccggaattcccgggtcgacccacgcgtccggtgaattttcccgtgaattttcgcggagcttttctcgggaaaataatctaaagaagattcgagattaagacacgtcatctccggtttcgtagagagatctgaagaacgagtctcttctcttctccgatgggaacgctacagtcatggagaaaagcctatggagccctaaaagactccaccaaagtcggacttgtccgtgtcaacagcgaatacgccgatttagatgttgccatagtcaaagctaccaatcatgttgagtgtcctcccaaagatcgccatctcagaaaaatcttcgctgcaacatcagtgactcgtgctcgagcagatgttgcttattgtattcacgccctttcacggcgtttgcataaaaccaggaattggacggttgctttgaaaacactaattgtgatacatcggcttctaagggaaggagatccaactttcagagaggaactattgaatttttcgcagagagggcggattttgcaactttctaattttaaggatgattcaagtcctattgcttgggattgttcagcttgggtacgtacttatgcattgtttcttgaggaacggcttgaatgcttcagggttttaaaatatgatactgaggccgaacgtcttccgaaatctaacccagggcaggataaggggtatagtagaaccagggatttagat

SEQ ID NO: 91267 - DNA, 371 bp, Arabidopsis thaliana columbia
ccgggtcatccacgcgtcccaagaaagctgaggcacaaggagctgagtttgtgtcatttgatccagtgaaaggcgaatggaagtttcgggtcgagcattttagtcccgtataagctgggcgacgaagatgaagaagatggagtttaggcatcccagggttactctcttggaactcatctgttttgtgtagtgaatgttggaattgtgcagtagcaaatagtgctctactcctttgttgtgtgtttctttctataccttttttctcatagtttttctcttgcttccttataattgtctccttttttgggggttcggtaatcacggtgtgtattgtgtaatggaacctaatggtatctgttaatctatttgaa

SEQ ID NO: 91268 - DNA, 479 bp, Arabidopsis thaliana columbia
agggaaagcacggtacgcctgcaggtaccggtccggaattcccgggtcgacccacgggtacgccggcttcaaaccctactaagtttggcatcaccctacagccatatcttgaagagtcaggctgatagtagaacaggagcacagttactggagagtattattttcattatcgattctgtccgacccttgatccgcaagctgcctctttgtgtcacaggagatctggaacaggatctaaagcatatgattgttcggcattcgtttctaactggtgtgcatgcttgccttaggggtctttggtctgggagtaaattggccgggaaaggggttagcatagttgagcatcttcttcagttcttttttaagccgctggaggcccaagggtcccattacacacagattgctgggccggcccttttttggcttggcttgcttattcgccatggaaactttttttataataccttaaggtgggagaa

SEQ ID NO: 91269 - DNA, 886 bp, Arabidopsis thaliana columbia
  unsure (1)..(886): unsure at all n locations
nnnnnnnnnnnnnnnnnnnnnnnnnnnnnnnnnnnnnnnnnnnnnnnnnnnnnnnnnnnnnnnnnnnnnnnnnccacgcgtccggaacggatgaggctagatgaagaggttctcatggatttctttagggagtatataagtgcatctaaagtggagagcagaatcagaataatgagcgatctgagagaacttgcatctgcagagagtctagatgcatttacactcgtgtactcgaatattctagagcaccagcctgactgcccggccgaggtcgtagagaagcttgttagtctgcgtgaaggcataccacggaaggacacaaaagaggtggtacaagagtgcaaagagatatatgagaacacactggtagatggtaatcctccaaagacaggatttgtattcccgagagtcaagtgcttaactgcttccaaaggatctatgtggcgaaaactcacttaatctgtaaaacagcgttcagcgtttgcgtccgtaactgcttttctagttgagatgatgttctttctccaaattatggcgtttgcgtccatgtcttctttttctttgcatggtatctttcctctgtaaattctgtgttttctcttgttttgttctttttcttacctttattcctggatttgaaagttgaaacgctcggtggccacttgcactaggatattatcccgttgtatttaggaggcgtatttttttgtcgcaaattttaattctactgtttcatttaattttgataaaatcttcttaaagttcgtctctctgtcataacaaaaaaaaaaaaaaaaaaaaaaaaagnnnnnnnnnnnnnnnnnnnnnnnnnnnnnnnnnnnnnnnnnnnnnnnnnnnnnnnnnnnnnnnnnnnnnnnnnnncatt

SEQ ID NO: 91270 - DNA, 604 bp, Arabidopsis thaliana columbia
aaaaacctctcttaacgaggaaaaacaacaacatggcccctggtttctcttctctttcgaatctatcttcttcttttatccaatcctttcctatttttattctcaccttctcctcgtttttcccgaaactgttcttttgccctcttctctcaattttaatccaccaaacaaatcgaacagtgttcgataacttttagattgcaagtcctgtttttgatttggtcgggagaaagaaaactagggttttgatgggaactgatacagttatgtctggacgagtaaggaaagatctatcaaaaacgaatccaaatgggaatattcctgctaattcacgtaagaagatccaacgacggagtaagaaaaccctaatctgtccggttcaaaaactattcgatacttgtaagaaagttttcgctgatggcaaatctggtaccgtcccttctcaagaaaacattgagatgcttcgagccgttttggatgaaatcaagcctgaggatgttggtgtaaatcctaagatgtcgtattttcgatctacagtgaccggacgatctccgttagtgacgtatcttcacatctatgcatgtcatagattctcgatttgcat

SEQ ID NO: 91271 - DNA, 681 bp, Arabidopsis thaliana columbia
  unsure (1)..(681): unsure at all n locations
cgnnnnnnnnnnnnnnnnnnnnnnnnnnnnnnnnnnnnnnnnnnnnnnnnnnnnnnnnnnnnnnnnnnnnnnccacgcgtccgggcttttaggacctatcatagttacacgtatatctgggagcctagcaatggtcgtcttatcatgttacccactaatagcaaagttatctggtttagcccttaccgtgactgtaacttctgcatccgtagcaaagagtgttttaggtacttctgctataactggattattcatccttcaaaacaaggctgtgagacaagaccaaagaggagcagctaatggaattgccatgacagcgatgtctcttttcaaagccataggtccagcagcagcaggaatcattttttcgtggagcgagaaacgtcagggtgctgcttttctccctggcacccaaatggtattctttatactgaatgtggttttggcacttggagttgtattgacattcaaaccatttctagctgaaacacaacagtagaaaatgatgaagattttgatggtattcaaattacataatcagaatgtattgtataatatatagatttgtatgtctgatccaaagttagattagaaaaatggcaagagaaaagaaaaaaaaaaaagggcgaccgctctagaggatccaagcttacgtacgcgtgcgttcgacctcataatttt

SEQ ID NO: 91272 - DNA, 684 bp, Arabidopsis thaliana columbia
gtccgccaaccccatttttaagcccctttctttgtttttatcctccgatcgatcaaaccaagaaaaaacactttcgtatttccctcgacgaaaaaaatggcaaccatttcgaatctcgctaatcttccccgcgccacctgcgtcgactccaaatcttcttcctcttcctccgtcttacctagatccttcgtcaatttccgcgctttgaatgcaaagctttcctcttctcagctttctcttcgttataaccaacgatcaataccttccctctctgtgaggtgttcagtgtctggtggaaatggaactgctggaaagagaacgactcttcatgatctatatgagaaggaaggtcagagtccttggtatgataatctttgccgtccagtcacagatcttctcccgttgattgctcgtggtgttagaggtgttactagcaaccctgcgatcttccaaaaagccatttccacttcaaatgcttataatgatcaattcaggacacttgtggaatcgggaaaggacattgaaagtgcgtattgggaacttgtggtgaaggatattcaggatgcctgcaaactttttgagccaatctatgaccagacagaaggtgcggatggctatgtctctgttgaagtttcacctaggcttgctgatgatacccaaggaactgttgaagctgctaaatat

SEQ ID NO: 91273 - DNA, 768 bp, Arabidopsis thaliana columbia
actcaaatcgtctaattctctctctatctctctctctatctctacttattatttcttaagttgaagaaacagagattaaaaaataaaaagccttctcgggttgtttaaaaatactgtttcaccgcagtaattaatttaaaaattactgtcgatgacgtggcatgcacttaaaaagaaacagccatgaatacaaaaacgatgcgtcttcccccacgccgagttacctccggcgccgtcgccggcaaacaaacggaatccgccgtgataaatccaccaccgccgccgactaaatccatcgtcaagaaaacgccgatcatccctcgaccaactaccaccgccactgtagccttagccgagccggtttgttcgaatcagctcttagccggttacttggctcatgagtttctcaacaatggcacactcttcggagagctttggaatccaactaaagcccaagccggcccattaacgacccaatctattgaccctagaaagaataagccgagccatgatatagagccgagtgatcataaacggaggagatatgtggaggttgctaacatactccgggtagatgggacccatttgcccggtatcgttaacccgtcacagcttgcccgattccttaaattgtgatgcgtaaatccacgtggagtcgtattattggttcgtcgtttagaaaaacaaaacagctgtaacaccgaaacattcctcttctctatcttttattttttgtccattaatgttttttagaaaaaaaaaaaagaa

SEQ ID NO: 91274 - DNA, 393 bp, Arabidopsis thaliana columbia
cccacgcgtccggagtatagtttagcatatcgggcgcttcgagtttttcttgaggaagaatccacacacacacaggggaagaatctcatcacgaattttagctatgggttggatctggattgacgattcatccgcctctaaagccggtgctgatctcaccgataaaccgctcggagattctgccgccgccgccgaaaattgctccacgaccacggtggtaagatctcagtgcaagacggaggaggtcgagcctggaaagttcgtcaggaaatgcgacaaaacagaagaaatcctccgccactgttttgggaagccctctgaagtcgttcaatccaacacagagcacacagaagaggatgtgacagaccagatggtgggaagatccgctcttcc

SEQ ID NO: 91275 - DNA, 782 bp, Arabidopsis thaliana columbia
  unsure (1)..(782): unsure at all n locations
gaagaatccacacacacacagaagaagaatctcatcacgaattttagctatgggttcaatccaacacagagcacacagaagaggatgtgacagaccagatggtgggaagatccgctcttccgaatcagtttgaggataaaaacccgctaaacttcccgggactccgcagagatgtagacgccatcgaacgccatttcttgagcggaatgaagagtttctttgatgcggctgaagagatgacaagcagcttatttgatatcatgggagaccatcacccaagcaccaggagaggagggatacccattgaaaaccatcccaaggtacaggagcaccgcaatgacgaaactgcccctacacgaccacactcctctggcgagattgatctctcgggcttggccaaggacgtttgagaaaggtcgtctgcttcgtcttcttcttctttttttttttcacaaaggtcgtcttgttctagcttttggcatatataatcttaaaaatgtaatgtgactttctaagaagcgtggggattgtagccccatgttagcggcttgcacgtttttccgagtgggtgctactactatctatcaatatcatcatactactatattactatgtgttatgcttgtgtcttttattatcactttgtcttaaaagttattttacatttttaaacatgttaccttatacaaaaaaaaaaccaaagnnnnnnnnnnnnnnnnnnnnnnnnnnnnnnnnnnnnnnnnnnnnnnnnnnnnnnnnnnnnnnnnnnnnnnnnnnnnnnn

SEQ ID NO: 91276 - DNA, 518 bp, Arabidopsis thaliana columbia
taatacgactcatatagggaaagccggtacgcctgcaggtaccggtccggaattcccttgtcgacccacgcgtccgagaaatctccgccggtttcttctctcgccggcgttttgacagtcgtcgtcactgttaccgtctcaaaagcttactatttcagttataaaaaaaacaatcaaagagctaagagatcttcttctttcatcctcgtctttcttcttcgattttcttattattattttaataatttcctagagatctccacaataaaaaaattgggggttatcgttgccatcataacgtgtattagtaaagcagtagtagtgctgatgtatttgctcacgactaagtcccattcctcgtctcttctttttcttctccttaattagtttgggcaacacgatcacagttgattccttcacaatcgatttgttaaattaagaaatcattttcttctctctctctctctctctgtctaaaatatctatcggttgaagaagatctgaagcttaactttgct

SEQ ID NO: 91277 - DNA, 400 bp, Arabidopsis thaliana columbia
ctctctctcactatgtctctctcgcaaacgaatttcctcagttcttcattactctcatcgagccatgacctgcgaattccttattctagagcggtactttcgtatccccgtgtccaaacgcaccggattctctgtgctgcgaagcgagccgggaagcggagatatccttctgagaggaggaagctgaggacagagcagaaggaagctgtggctaaggttaagaacaagcttgaaggagtttggcgtctctctaagctcggagttcctgttggtgatgaccctggaaaggaccttctcgggatttcagaagggttgcttcaagcccatcgcttaagttatcgagtttccggttgcatcaatgctgccagaagaagcattttcagtgattaggaaatctttt

SEQ ID NO: 91278 - DNA, 918 bp, Arabidopsis thaliana columbia
  unsure (1)..(918): unsure at all n locations
nnnnnnnnnnnnnnnnnnnnnnnnnnnnnnnnnntacggctgcgagaagacgacagaagggtacggctgcgagaagaccacgcgtccgtacgggctgcgagaagacgacagaagggggcagcccgattcttctattagccgccatggtgaagtactcgcaagaacccgacaatcagaccaagtcttgcaaggctagaggatccgatcttagggttcacttcaagaatactagggaaacagcgcacgcaatcaggaagctaccattgatcaaggcgaagaggtaccttgaggatgtgatagctcacaagcaagcaattcccttcacacgtttctgcagaggtgttgggagaactgctcaagctaagaacaggcactctaatggtcaaggacgttggccagccaagtctgctcagtttgttcttgatttgctcaagaacgctgagagcaatgctgaggtgaaaggtttggatgttgatgccctcttcatatcacacatccaagtgaaccaggccgcaaagcaaaggagaaggacttaccgtgctcacggaagaatcaacccttacatgtccaacccatgccacattgagttgattttgtcagagaaggaagagcctgtcaaaaaagagccggagactcagttggctgccaagtccaagaaatcagcagcttaagctttctttctttattttcatgtcccttgtgttcttgaacgagattttgttctcttttttctttagctcgaatcgttttgtaagacaatggatagatttatcttggaaattttcgttctatgacttatgaaatcagtgatcatggttctccccaaaaacttgnnnnnnnnnnnnnnnnnnnnnnnnnnnnnnnnnnnnnnnnnnnnnnnnnnnnnnnnnnnnnnnnnnnnnnnnnnnnnnnnnnnnn

SEQ ID NO: 91279 - DNA, 497 bp, Arabidopsis thaliana columbia
  unsure (1)..(497): unsure at all n locations
agaatactctccactccttcataatttctctggcaacgatggcgatgatatctcaccgtctccgacgagctttactcactgcgacttcctatgttagccgatcaattagctcttcgatcacaccagcgtctgagttcccttctgtgtcggcggcggtgttaaagagatccgttatagggcgttcgacggaagtagctactcgagcaccggcgagactgttttcaacgaggcagtacaggctttacaaagaaggtgatgagatcacggaagacactgtgttgttcgaaggatgtgattataatcactggcttatcactatggatttctccaaagagggaaactcctaagtctccagaagaaatggtcgctgcttatgaaggaactttcgcccaaggactttgcatcagcgtgggagaggtaagcaaagnatgattnttntagnccaacacttccagggttcagcatctgctacaggtagaagtcaggntccgggggtt

SEQ ID NO: 91280 - DNA, 469 bp, Arabidopsis thaliana columbia
  unsure (1)..(469): unsure at all n locations
gcannnnnnnnnnnnnnnnnnnnnnnnnnnnnnnnnnnnnnnnnnnnnnnnnnnnnnnnnnnnnnnnnnnccacgcgtccgagagatactcattaggaagaaaatcagacaaaggagaaactattttttgtcatctcttgtttggtggtttatattttggttgtgagtcctgtgttgacctataagccgatcaatttcgacatgcctcttttgatctttgtttgacttctgatcaacttctcaactttgtacttgcaaggcttgaaaaatgaggcgtgagtctccatggctatggaaagtagaaagcagacggcttctatggctattaggactcacatttgctctcattgttacctttcaatacatcgagctaccgtacgctatctcatccatcttttcttccaccaagattcccatttcaagaaactcaacttcacttataggtaactcgacttccgctatagcgccg

SEQ ID NO: 91281 - DNA, 534 bp, Arabidopsis thaliana columbia
taatacgactcatttatagggaaagctggtacgcctgcaggtaccggtccggaattcccgtgtcgacccacgcgtccggtcatgcatatggaacttttggttatgattcctggaaacttgggcgaggatggtatcccgttgatggttatagaaagaccagaagcttcaatcatgggcgtggttacagtgatgagaaagcagataggcttaatgagctatgtcgaggaccaaggagtagtgatttcaagaatccacaagttcttaactcttcaatgctagatgcaatgaagcaagacgtttcagcagtagatctccagcgctacaatggggagaatttccctgaatcatttgtgaaagcaaaattctttgtgatcaagtcatacagcgaagatgatgttcataactgtattaagtatggtgcatggtcgagcacaccaactggcaacaagaagttgaatgctgcatattatgaagccaaagaaaactcccaagaatgccctgtgtatcttctgttctcggtgaatgcaagtgggc

SEQ ID NO: 91282 - DNA, 934 bp, Arabidopsis thaliana columbia
  unsure (1)..(934): unsure at all n locations
cgnnnnnnnnnnnnnnnnnnnnnnnnnnnggggtttgaaaacaccgatatggcgttacactatggtactatgtttagggactgcatccgtcatcagattgttgcaaaatatgttttggactcggagcacgtgaagaagtttttttactacatacagcttcccaatttcgacattgctgctgatgctgctgcaacttttaaggaacttctgacaaggcacaagtctacagttgctgatttctcattaagaatgaagactggttttttgcagactacaactcaaagcttcttgaatcaactaattatattacccgacggcaagctattaagttgttgggcgatatattattggataggtcaaattcggctgtgatgacgaagtatgtgagctcgatggataacttgaggattctgatgaatcttctcagagaatcaagcaagactattcagatagaagctttccatgttttcaagctgtttgtagcgaaccaaaacaagccttcagacatcgccaacattctggtggcaaacagaaacaagcttctgagattgttggctgatatcaagccggacaaagaggacgagaggtttgacgcagacaaagctcaggttgtgagagagattgcaaaccttaagctgcgagagcttgcttgagcatgcacatatacacagaagctcatgatttctgttaatctttgaaagacatttttggaccatcaaagattgttgttatttattaggtactgtttcttttctctctctcagcatctacgctgttgactactctggatttttttagatcatatgaattcacatgtacactcctttagtgttgatcaaataaaaatggcattataaatcctaaaaaaaaaaaaaaaaaaaaaagggcggccgctctagaggatccaagcttacgtacgcgtgcatgcgacgtc

SEQ ID NO: 91283 - DNA, 453 bp, Arabidopsis thaliana columbia
gataacggagatctgcatcgtagaaatagccggggggggatcgacagtgcatagtcgtgcttgtcgatggcgatcaaagcgggaaaggtgttgagaacggcgactgctgctgcgaggaagttccaacagaaacagttctcagcctcatcttcggcgtttccagagccaccaccggtgtctccatcttccggtgtaggagcatttctgggtattcccaagattattcgctcggaatccgatttattagtctccaagtacatcagaattgcccagggtcgattgacgaagaatggtgattacacagaggagaagctaaagaaaatgttgtctggtgaagacagggtatggatcggtgagaccatgaagttactcgagggtcgcaacactggactagtatcctctaaaataccaaactccggtcgattcaaaaagtgattcctctgtttccatcat

SEQ ID NO: 91284 - DNA, 555 bp, Arabidopsis thaliana columbia
  unsure (1)..(555): unsure at all n locations
caaagtacgctgctgaaatcgtcaattatgctcggcgacgagggatccatgtcttggctgagattgatgttccaggacatgctctctcatggggaaagggatatcctgccttgtggccctccaagaattgtcaagaaccacttgacgtgagcagtgacttcacattcaaagtcattgatggcattctctctgatttcagcaagatctttaagtttaaatttgtccacttgggtggtgatgaagtaaatacaacttgttggtctgcaacaccgcgaatagcccaatggcttaaaaaacatcggatgagtgaaaaagaagcctatcaatatttcgtgttgcgggcgcaaaaaatcgccttgtctcacggatatgaaattatcaactgggaagagaccttcatcaattttgggaagcaaattaaaccggaaaacccgtggttcacaactggctttacacaggctttttgagatttgcctccggtccggttttcagggtgtatagttagtaccccaggattttggatttggcaatggcggcctgaaggntttcggaagc

SEQ ID NO: 91285 - DNA, 805 bp, Arabidopsis thaliana columbia
  unsure (1)..(805): unsure at all n locations
nnnnnnnnnnnnnnnnnnnnnnnnnnnnnnnnnnnnnnnnnnnnnnnnnnnnnnnnnnnnnnnnnnnnnnnnnnnccacgcgtccggtggtagcggacaacatgttgaatatgatcaacgtcctgatatgtttagagggacagttagatacgcaagtgcacatgctcatttagggagaactgctagcagaagggatgatctggaatcattagcatatacactgatctttcttcaccgaggtagattgccatggcaaggatatcagggagataacaagtcattccttgtttgcaaaaagaagatggcaacatcgccggatatgctttgttgtttttgtccccctcctttcaaacaatttcttgagatcgtggtaaatatgaaatttgatgaagaacccaactatggaaagttagtatctctgtttcaagacctcttgggcgaaaatccggcaattaggcctataaacacagagggtgctcaaaagatcatattccaagttggccagaagcgaggtaggttgagcattggggaggaagaagaagatgcccctaggaaaaaggtccgtctaggagtccctgcaacgcaatggatatcgatttacaatgccaggcaaccaatgaagcagaggtatcattataatgtggctgatataagactggcacagccatattgtagagagggtattgcagatgggtttgttgataaagctcgtgtatcaatcattgttccgaatctcttggggcattggttaatgggatgcttggaacttggcttcacgggacccaagtctttgaactctctccct

SEQ ID NO: 91286 - DNA, 416 bp, Arabidopsis thaliana columbia
  unsure (1)..(416): unsure at all n locations
ctcagccctaaaaaagcttcacgccggtttgtttcaccgccgttgtgcttctccttcttcttctacctgggttctctctcaaacaaacaaatctccgacgactcattcgttcctcccagaatcagaagatttagtgaaatggctttttgcaataagctaagccgtttcgtgaggaggcagagtgagaatgcttccatgattggctctctcaggtctttctctgctgatgccactcaccatagattccaccaggagactcacaattttcttgagccagaatactatattggtagctgggaagctccgagtgatccgaaagatgcagggagaaagcttgctcagcttaggagagattatgcttaggaaagttcgggtgttcggaaagggtcctttcagggnttnnnatnctccgnttt

SEQ ID NO: 91287 - DNA, 799 bp, Arabidopsis thaliana columbia
  unsure (1)..(799): unsure at all n locations
nnnnnnnnnnnnnnnnnnnnnnnnnnnnnnnnnnnnnnnnnnnnnnnnnnnnnnnnnnnnnnnnnnnnccacgcgtccggaaaaagcttgaagtcggggtgctacaccggcgttggggttcttgatcttcatctacctgggttttgtctcaaacaaacaaatctccgaagacttattttgtccttccagaatccggagatttactgaaatggcttcacgcaataatctaaaccctcatctgggtaaggaaatgagatgctacatgacggttctcctcaggtctctctctagtgatgccactcaccatagattccaccaggcagactcaccctcgcgtgcggccagaatactatattggtagctgggaagctccgagtgatccgaaagatgcagagagaaagcttgctcagcttaggagagattatgctaagaaagttcgagtgtatcgtaaagagtacattcatgagattgagatgcttcgtgttgagaaacaccgtaaggatgaggctagattgttggctgaacgagctgctaatgaagagaggcgactcttgaaggctgaggctgctaaggttagagctgaggaacgtaagattgctgacgaagagttcaggcaaactctgataaaagaaagagcagaaaagctagagatgtggaagatgatgggccaaaagagggaagagaagatcaaagagagagagaagctactgcgtgaacagagttcactatggatcgagcaaaaagaactggagaggaagattacagaagccttggttgacaacgttgttctctaaaccaa

SEQ ID NO: 91288 - DNA, 532 bp, Arabidopsis thaliana columbia
  unsure (1)..(532): unsure at all n locations
nnnnnnnnnnnnnnnnnnnnnnnnnnnnnnnnnnnnnnnnnnnnnnnnnnnnnnnnnnnnnnnnnnnnnnccacgcgtccgcccacgcgtccgcggacgcgtgggcggacgcgtgggcttttcttttgatttcgtctttttcattttcctctcttctttgttcttccctctctaaaatccttctcccaagaatcaaggagttgagagagggaagaactttaacaaaagaatttaagaactgaagaaggaggaataaacatcgaaatgtcgggctcgaggcttttcttcggagtttctacaattgtatcgataattttcgccattttgttgccgatggcacatgctcaatccgcagctcctgctccggctccaacaagcgacggaacaacgatagaccaaggcatagcatatgtccttatgttggtggctttggtcctcacatatctcatccattgatcctcttgttaatttaattttggtctctatttagtttaattatatttttgcatcttgattataactaaatagagac

SEQ ID NO: 91289 - DNA, 727 bp, Arabidopsis thaliana columbia
  unsure (1)..(727): unsure at all n locations
gaaagaaaggtgctattattaatatgggttctggtgctgctgctcttattccttcttatcctttttactctgtttatgctggtgctaaaacgtacgtggatcagttcacaaagtgtctacatgttgagtataagaagagtgggattgatgttcaatgccaggttcccttgtatgttgcaacaaagatgacaaaaataagaagagcatccttcttagttgcatcaccagagggttacgcaaaggcagcactgcgttttgtaggctatgaagcacaatgcacaccgtactggcctcacgctctcatgggtgcagttgtctctgcattgcccgaaagcgtttttgaatcatttaacatcaagagatgcctccagatccggaagaagggtctccaaaaagactccatgaagaaagaatgaatcttccaggtttaagttactaccaagaatttccttcttctgaagttgttggtttcttgaaaagcttctgttctgaatcttttgtaagacttgtactctttagttttctaagttttttatattttaaggttaaaaaccctaacgtacacgaataatttacttcctctgtttctatttattaatttaagcagtgttgtattgaatgtgtttttgctaaaaaaaaaaaaaaaaaaaagnnnnnnnnnnnnnnnnnnnnnnnnnnnnnnnnnnnnnnnnnnnnnnnnnnnnnnnnnnnnnnnnnnnaacggaat

SEQ ID NO: 91290 - DNA, 812 bp, Arabidopsis thaliana columbia
ggcacttatcatatatatggtcgtcaatttattccatggaagcatggtaactaatcccgagacagttgagggaatgcttggaagcctaggtgatttacttatgcttttgaatgtttcatctgctgagggtgttttgttaacaacgtatggcaagttgcaaccacctcttggaaaacacagattaaagattgtagagtttatttcagtcttgctcactgtcggtagtgaagcagcagagaaggaagtaattcgacttggagcggtgaaaagagtgttggacttgttctttgagtatccctacaacaattttttgcatcaccatgtggagaatgtaattctctcatgtatggagagcaaaaactctcaacttgttgaccatcttctcagtgagtgcaatcttattgggagtatactagaggcggaaaaggactccacattaactgctggtgattctgataagcttcagcctacagtccctgcagagggtaaaaagccactcaggattggaaacatcggtcatttgactcgtatctccaacaaacttcttcagctagctaatagcaatgtcgaaattcagtcacatttgcaggaaaatagcaaatgggtggactggcagacagatgtcttgtcgaagcgtaatacattggaaaatgtctacctcttgggcctgcgggaggcctacttcactccatgatcgtagtagagatagtgatgatgatgattaccacgatagagattatgatgtggcagccctagcaaacaatttgagccaggcttttcgatatggaatttacagcaatgatgacatggat

SEQ ID NO: 91291 - DNA, 768 bp, Arabidopsis thaliana columbia
  unsure (1)..(768): unsure at all n locations
taatacgacttttatagggaaagctggtacgcctgcaggtaccggtccggaatttccgggtcgacccacgcgtccgaacggacccaaatgtagctgtccgaagaggttctgcacttgcactaggtgtcttgccatatgaactattgactgcaaaatggaaggatatagttttgaagctctgcagtgcgtgtaagatagaggtgaaccctgaagacagagatgcagaggcacgtgtgaatgctgtaaaaggactcacatccgtgtgtgagactcttactcagaaaagggctagcgatcctggaaatgatgacctgtctctttttcttcttatcaagactgaagtgatggatactttactgaaagctcttgatgactattcagttgataaccgaggtgatgtaggttcttgggttcgtgaagctgcagtccatggtcttgagaagtgtacatatatcctctgtaagaaaatggaaacatattcagagggtgattataacgatgatacgtcctcacttttcgattcgaatcttgcgacccgtctaattggaggtatgctgaagcaaggagtggagaaaatggntaaattaaggggaacagctgcaaaggttcttcaaaggnttttgtatcacaaatctgtttccgtccctcatgtaccntattggggaaaactggaaggaattnttnccaacaaggcaaacttncaatngggcggttccggntttctctttccccnggttttgnaagttttnaaaccccttnttaaacaaa

SEQ ID NO: 91292 - DNA, 482 bp, Arabidopsis thaliana columbia
cccacgcgtccgttccgagtctccgagcattctctctctctttctctttctccatcgccgcgactcggctcagctctgagaacggcgcaagcttagattgccggagaaaactttatgcaattttttttgtacttgggagcagcttcaacattggagcatcggcgatccaagtcggaagttcacttaccttcggatatcgcgactctgacctatcggaaatattgcatggacctcatatggagtgtgtctaattgctagtggttgtgtggcttattgaagtcttgggaatagtatattgaggatgctattgtagtaaagaaagtatggaagatcttcggctatcaccgctgaaattaggtagctttaagtcttcattgtcagggaggtctactccaaggggttcacctacacttcggaaagtgcattcaggcaggactccacgtagagagggtaaaggtagcggtggagctgctcaatggttc

SEQ ID NO: 91293 - DNA, 564 bp, Arabidopsis thaliana columbia
  unsure (1)..(564): unsure at all n locations
nnnnnnnnnnnnnnnnnnnnnnnnnnnnnnnnnnnnnnnnnnnnnnnnnnnnnnnnnnnnnnnnnnnccacgcgtccgcccacgcgtccgcggacgcgtgggctcgtggagaggatcctcttcgtcgccgtcgctcggaaaacacacgccttcaatttttctccgcggaatgcgatcgagtgccttggtaaactagattaatctctgctatgtcgaattggagacataaactatggagaaaattgagctcatttcagagagctagttactcaactacatcttcaagaaacaacaaattaaagcttgatgaccttagaaaactccggccaatgattctaaagagaatcgaaaatcgagctaaagattacccggttaaagagattgttcctgtagctgaagaaatccttatagctagaaagaatctaatcagtaacatcgccgctcttcttaaggtgtttcctgtcttgacatgcaaattctgttcagaagtgtttgttggcaaagaaggacatttgattgagacatgtcgtagttatatacggcgtggtaacaataggctacacg

SEQ ID NO: 91294 - DNA, 460 bp, Arabidopsis thaliana columbia
atacgactttattagggaaagctggtacgcctgcaggtaccggtccggaattcccgggtcgacccacgcgtccgactgatggttatggtggttgtagcagttgtagctgcggctcaaggccaagaagagactactggattcgtgacatggggtaacaattactaccagacatggggacatcaagctttggttattaataaaacctctgagctccagctcaccctcgataaaaactctgggtccgggtttgaatcccaattgatttacggatcaggatacttcaacgtaagaatcaaggcacctcaaactacgtctacgggagtcattacttccttctatttaatctcccgttcaagccgccatgatgagctctgtttccagatcttgggaaagaatgggccaccgtatttgctgaatacgaatatgtatctgtacggtgaaggaggcaaagatcagaggt

SEQ ID NO: 91295 - DNA, 526 bp, Arabidopsis thaliana columbia
  unsure (1)..(526): unsure at all n locations
nnnnnnnnnnnnnnnnnnnnnnnnnnnnnnnnnnnnnnnnnnnnnnnnnnnnnnnnnnnnnnnnnnnnnccacgcgtccgcccacgcgtccgctttttaatcaatattctgaattctccctggttaaggaggagggtctccgttaatggcggcggcaatgttcggcgtcaggagctttttcttctcggcggtgattgtgatactgttcgccggccgttatggagaagccaccgcagctgacagaggatacattaagtacaaagatcctaaagtagcggtcgaagaaagagtagaagacttgctgatacgtatgacgttaccggagaaacttggtcaaatgtgtcaaattgatcggttcaacttctcacaagttaccggtggtgtggccactgttgtgccagaaatcttcacaaagtacatgatcggaagtgttttgagcaatccgtatgataccgggaaagacatagcaaagcggatattccagactaacgcgatgaagaaattgagtctttcgacgaggctcgga

SEQ ID NO: 91296 - DNA, 568 bp, Arabidopsis thaliana columbia
  unsure (1)..(568): unsure at all n locations
agacggacggcgccccgcgggcgcgctgggnaaagaaatcccgcctcacatccacatctattagggaagagctggtccgcctgcaggtcccggcccggaattcccggttcgaccacacgcgtccgcggacgcgtggggcaaagcggatattccagactaacgcgatgaagaaattgagtctttcgacgaggctcggaatccctctgctttacgctgttgacgcggttcatggccacaatacttttattgatgcaaccattttcccccacaatgtcggacttggtgccactagggatcctcaacttgttaaaaagattggggctataaccgcgcaggaagtaagggcaacaggagtcgctcaagcttttgcaccttgtgttgcggtttgcagagatcctagatggggaaggtgttaccagagctatagtgaacaccctgcagttgtgaatatgatgaccgaaagtatcatccatggatcacaaggaaacgctcctttacctcgctgatcccaagattaatgtggctcggtgccccaaacattttgttggggacggaggcacaataaatg

SEQ ID NO: 91297 - DNA, 945 bp, Arabidopsis thaliana columbia
ttggtcgcgtgggcggacgcgtgggattggaaatgagagacgaaatgaagaacaaaggtgtcaaactcgatattccagcctatggtgctcttatcgatgggttctgcaaaaggagtaacatggaaagcgcatctgctctgttctctgaactccttgaagaaggattgaatccaagccaacctatatacaacagcttgatttctggatttcgtaatctgggaaacatggtagcagcccttgatttgtacaagaaaatcgttgaaagacggtctacgatgtgatctgggtacatatacaacactgattgatggattgttgaaagatggaaatttgatcctggcctctgagttgtacacagaaatgcaggcggtgggtcttgtccctgatgaaatcatttacacagtaattgtaaacggtcttagcaagaaggggcagtttgtaaaagtggttaagatgtttgaggagatgaagaagaataatgtcactccgaatgtccttatctacaacgcggtgattgccggacattatagagaaggaaatctcgatgaggcttttagacttcacgatgagatgcttgccaagggctttttttcccgattggtgctacattggatattctaggttagtggccaagtcggaaacctccaaacctgtacgtgcaagcaagtttgtagtctcccaaatccagaccccaattattgactgatggcttagctttggcttttcgtgagaccccgataaatatgactgcttaaggtgtgcacttttcattttgcacggttgtagtataaatgttgttattcatgaaagagggagactctatagactttctgtaaagaaactaagaagggccttctgtttttgtcacttttataaaaaaaaagaaaaacaaagggcggacactctagaggatccaagcttacgtacgcgtgcatgttacgtcat

SEQ ID NO: 91298 - DNA, 583 bp, Arabidopsis thaliana columbia
acgcgtcgctttctgctgcgagggggagggtagtatcgccggctactatacgactcatatagggaaagctggtacgcctgcaggtaccggtccggaattcctttttcgacccacgcgtcacgcggacgcgtgggcggacgcgtgggattggaaatgagagacgaaatgaagaacaaaggtgtcaaactcgatattccagcctatggtgctctttatcgatgggttctgcagtaggagtaacatggaaagcgcatctgctctgttctctgaactccttggagaaggattgaattccacgccaacctattttccacagctttgatttcttggatttcgcaatctggagaaacatggcgagcagccctttgattctggtcaagaaaattgtgtgaaaggacggcctacgaatgggtatcttgggtacatatacaaccactggattggttggattcgtttgaaaggatggaagatttggatccttggccttctgcggcttgaacacacgcaaatgcaaggcggaggggtgtttggtcccttgatggaagtctttttcacacagttctttggttacgtgggtctttag

SEQ ID NO: 91299 - DNA, 507 bp, Arabidopsis thaliana columbia
aatactgactcaattagggaaagacggtacgcctgcaggtaccggtccggaattcccgggtcgacccacgcgtacgcccacgcgtacgcggacgcgtgggctgcttccgtgaattctgaataaaaagatcatgaagctcacaagcttgagcaagaatgctaattccacagcaacagcagtaactgtatcttcaatacagaaactcccgtttctgtcgctgtctgaaactgtgccttgtccgaagagttcgagaaaacccacgtttcttcctttaagatgtagacggagaccaaagttggatttgctctggggaaaatttagagttcgtgcatcagatgctggtgttggatctgggagttatagtggtggacaagaggatggatctcagagtagttctcttgatcagtctcctgccacttcatcagaaagcttaaaacctcgagggccatttccttattctttgtcaatagcgcttgtactactgagttggggtttggtattttctct

SEQ ID NO: 91300 - DNA, 449 bp, Arabidopsis thaliana columbia
ggctttgtctatggagtctgcgatgagaaatcagcttggccttacaggaaagagagggaaaattcagaagaagtctacttcggtctgaaaaccggacaaggtcttttggagttcaagtgcaagagcaagattcacaagcagagatgggttgatggggttcagtctcttctccgccaagtaaattgctttgaggctgccaaatgctcgctgggatctctgaatctcactggtcacacgtgatgcaggatcctgtatatatttgattatattcatatatataatatccaaatttttgctgttgtgaggtatttgcaaaacctggcaatgtaacctcagaagacttttggataaaacaaagcaggttgttcaaatgatcacaacaagtgttaggaacattgctatgtacagaaagacatcagaagaatgatgaatctcaattgaacttttta

SEQ ID NO: 91301 - DNA, 525 bp, Arabidopsis thaliana columbia
  unsure (1)..(525): unsure at all n locations
ctattgctgataaagtacatgggaagcctctacctacaatcaaagtagaagagccaactgtgaaaatgtccttctctgtaaacacctctccattttctggtcgtgaggggaagtatgtaacaagcaggaacttacgagatcgtttaaaccgtgaacttgaaagaaatctagctatgaaagtggaagatggtgagacagcagacacattcattgttagtgggcgtggtacattacacattaccatcctgatagaaaacatgcgaagagaaggatatgaatttatggttggccccccgaaaggtatcaacaaaagggttaacgataaattgctggagccatatgagatagcaactggtgaagtaccagaggctcacatggggcctgttcgttgaacttcttggcaaaaggcgtggccagattttttnaaattccagggtttttgggtcggaangaannaaccttttttggggncaaaaaattccccncccggggggccttttttggnttttngggcccgatttttaa

SEQ ID NO: 91302 - DNA, 780 bp, Arabidopsis thaliana columbia
  unsure (1)..(780): unsure at all n locations
ctctatacgactcatatatggaagctggtcgntgcagtccgtcccgattccggtcgacacgcgtcgtcggctggagagacacagagggggaccttgggccggtgatattagcacccgcgatctaggttcgctggttgcctttgaagatggaacatcaacatcatatgccctggcgagtgcgcaggagagagggcaaatgtttgtaggttctggagtggatgtatacaaaggtcagatagttgggatccaccagagacccggcgacttgggtcttaatatctgcaagaagaaggcagcgacaaacataagatccaacaaagatgtaacagtgattcttgacactcccttaacatatagtctggacgactgcatcgaatacattgaagaggatgagttggtggaggttacaccttctagtattaggatgtgcaagaatcagaaaatggcaaagaaaggcaggcagtaaaacccatttttgcaagctgggtttggaggaaattgaagaaaagcttctactaaaaaaaaatgaaagctagtttctagtgttatttataggcttgtttgattgttatacatagtcttattcttatagcaaagggtgagtcctgatgttatccaattaatgtttttttggaatatctccatgccctttgatcatctgatacttaaagctgtacaacttctgaagcggccgcgaattcctgcagcccgggggatccactagttctagaacggccgcccccgcggtggaggttccggttaaggtaaacttgggtgggt

SEQ ID NO: 91303 - DNA, 1120 bp, Arabidopsis thaliana columbia
gacgtcgcatgcacgcctacgtaagctcggaattcggctcgagatcctgattgaaaacatgcgaagagaaggatatgaatttatggttggccccccgaaagttatcaacaaaagggttaacgataaattgctggagccatatgagatagcaactgttgaagtaccagaggctcacatggggcctgttgttgaacttcttggcaaaaggcgtggacagatgtttgatatgcagggtgttgggtcggaaggaacaacctttctgcggtacaaaatcccaacacgtggacttcttggattgaggaacgcaattttaacagcttctcgcgggacagctatccttaacactgtatttgacagttatggaccttgggccggtgatattagcacccgcgatctaggttcgctggttgcctttgaagatggaacatcaacatcatatgccctggcgagtgcgcaggagagagggcaaatgtttgtaggttctggagtggatgtatacaaaggtcagatagttgggatccaccagagacccggcgacttgggtcttaatatctgcaagaagaaggcagcgacaaacataagatccaacaaagatgtaacagtgattcttgacactcccttaacatatagtctggacgactgcatcgaatacattgaagaggatgagttggtggaggttacaccttctagtattaggatgtgcaagaatcagaaaatggcaaagaaaggcaggcagtaaaacccatttttgcaagctgggtttggaggaaattgaagaaaagcttctactaaaaaaaaatgaaagctagtttctagtgttatttataggcttgtttgattgttatacatagtcttattcttatagcaaagggtgagtcctgatgttatccaattaatgtttttttggaatatctccatgccctttgatcatctgatacttaaagctgtacaacttctgaagttgcgcactagcagatattaaagtgtgaatccttgagcatatactggaaaatataggcttgtttggttaaaaaaaaaaaaaaaaaaaaaacaaaaaagcggccgctctagaggatccaagcttacgtacgcgtgcatgcgacgtcatagtcttctatag

SEQ ID NO: 91304 - DNA, 444 bp, Arabidopsis thaliana columbia
gtcaaaaagaggagctaataataatatggcggctttgaagatgactatctcttgtttcttgtttcttcaagtaatatattgcttgctctcttcatttgctccaacaaatgtgcaaggattgaaagttggattctacgacaaggcatgccccaaagccgagcttattgtcaaaaagtctgtcttcgaggctgtgaagaatgatcggacaattgcagctcctttgctcaggatgttcttccacgattgcttcgttaggggatgcgaagggtcggtattgctagagctaaagaacaaaaaagatgagaaaaactcaattcctaacctcacccttcgaggatttgacgatcatagacaatgtcaagggcagcctctagaaaaggagtgtcccgggcattcgtttccttgcttctcgatggtattggctcttgtcgctagagacgcaat

SEQ ID NO: 91305 - DNA, 505 bp, Arabidopsis thaliana columbia
taatacgacttacttagggaaagctggtacgcctgcaggtaccggtccggaattcccgggtccgcccacgcgtccgaaaaaaaaaaaaaaaaacgctcgcctacttctcttctctctcaccatagagatagtttcaagctccaaaagttcttcaatcagattctggaaactaggttgttggtagaagttatggtgagaaatgaagcttagattgagatttaagttatgggttgtgtatttggccgagaggcggcgacaacaacaacagctgaagctaaacaagctaagagctctaaagctagtagtggagtagtagtagtaggagagagtagtgtgactaagagtaatggagttattgctgatgatgtagagaagaagaagaatgaggaggcaaatggtgataaagaaaggaaatcatccaaaggagatcgaagaaggtcgacagagccgaatccgcggttgagtaatccttccaagcattggcgtggtgaacaggttgctgctg

SEQ ID NO: 91306 - DNA, 491 bp, Arabidopsis thaliana columbia
gtcaaaaccaaactcgtagacaaaataatagaccactagcctgcacgatctgcttgattaactttgtaaatttattttgatttatcaatgcgataatagacgcagattttttccggccaatcttctcctacgagtagctaaaccctagcgacggcggcaacaatggtctagattcaacgtatcgcttcgtggtttatcgggtgacactttggtgagagggagagtatttgtgaaagaaatcaatggatttagattttgatgatcaaccctcggatcatgctgcaccagcagttagggctggtgcaaggtttaaaccaaaaggcagaccacaacccatgaagaagcaagtctctctttccacaacccaaacaacactctcccctgatgttgcccaggaaaaactctcaacacaaagtgaagatctcgtccctctagacggatcatcggagattcccagcaatgctttaccttctgagactaatgtgccggat

SEQ ID NO: 91307 - DNA, 1016 bp, Arabidopsis thaliana columbia
  unsure (1)..(1016): unsure at all n locations
cgnnnnnnnnnnnnnnnnnnnnnnnnnnnnnnnnnnnnnnnnnnnnnnnnnnnnnnnnnnnnnnnnnnnnnccacgcgtccgcccacgcgtccgcaagatcttagtgacggatcctgattcagtgttgggtcctctcacccgtgagatcaaagaagttgggcctgatgggcaagaggtgactaaggttgtacctgctgttacggaagaagtgaaagatgcacttgtgaagaacattaggaggagaatgacaccacaaccaatgaaaatccgggctgatatcgaattgaagtgttttcagtttgatggagttgttcacattaaggaggctatgaaaaatgctgaagccgctggaaatgaagactgtcctgttaagattaaattggttgctccacctctgtatgtccttactactcagacacttgacaaggaacaagggattgaaattctaaacaaagccatagcagcatgcactgagacaattgagacacacaaaggcaagcttgtcgttaaggagggggctagagctgtgagtgaacgtgatgaaaagatgctgacagaacacatggctaagctacgtcttgacaatgaagaaatgagcggcgatgaagatagcggagacgaagaagaggacactggtatgggcgaagtggatctcgatgcaggtgccggaatcatcgagtaagattgccggatttttctttctattaaatctacccaatctcaacagtcccagtattttggtttaagctttgacaaggcagtagaaaaacctccgagaggatttatgtgctttttgatgactctgaggcattttattttacccatagggggtggttacatatcaatcatacattcatggttttataaaagatttgattctttgcaaaaaaaaaaaaacaaaaagggcggccgctctagaggatccaagcttacgtacgcgtgcatgcgacgtcaaagctcttctatagnnnnnnnnnnnnnnnnnnnnnnnnnnnnnnnnnnnnnnnnnnnnnnn

SEQ ID NO: 91308 - DNA, 637 bp, Arabidopsis thaliana columbia
  unsure (1)..(637): unsure at all n locations
nnnnnnnnnnnnnnnnnnnnnnnnnnnnnnnnnnnnnnnnnnnnnnnnnnnnnnnnatcaacactcgctctgcgctgcgttcgcctccagaactctctgaccatcccaaagcaaaagcttcaccgatcttcctcgtttggtctcgaatattaagtgaaatatgggtttcataatggaattcgcggagaatttggtgttaaggttaatggagaatccagaggaacgagacaggaaagcgagggaacacatatatgagatgcatgagaggtgcaagaagattaaggagatgtgggcattgcctattcgtccttatggattctggacatttgagcgtcacaatgctcagcttcgttgggatcctcagatcagtcaggttgctggtcgaagggatccttatgatgatcttctcgaggacaactacactcctccttcttcctcttcctcatcttcagactaatcaaacaatgaaagaagatgtgttatgctgtctggatggatgcatgtttgttttcaagctatttttctccggagtttgtccgcctgtttctatttgtccttaaggtgcttggggtttggtcaaaacncaaataatanctnaaaacttnttncgggcgngaannaaattcctatgggttac

SEQ ID NO: 91309 - DNA, 607 bp, Arabidopsis thaliana columbia
cgggccgtcggggtaaatagccgactctatacgactcacttagggaaagctggtacgcctgcaggtaccggtccggaattcccgggtcgacccacgcgtccggatcttcagaataagaaccaagagttgatgaaacaaatagaaatctgtcaggaagaaaacaaaattctagaccgaatgcacaggcaaaaggttgcggaggtggaaaagcttactcagactgtacgggaactggaagaggccgttcttgctggtggtgctgctgcaaatgccgtgagggattaccagcggaagtttcaagagatgaacgaagaacgaaaaactcttgaccgggaacttgcgcgtgcaaaggttacagcaaacagagttgcgacagtggttgcaaatgaatggaaagatggtaatgataaagtgatgcctgtgaagcaatggcttgaagaaagaaggtttctacagggagaaatgcagcaactccgcgataagcttgccatatcagatcgagctgcgaaatctggagcacagcttaaagacaagtttcaactacgacttagagtgcttgaagagacactgagaggcacatcaagcatcagcataaggaacacacctg

SEQ ID NO: 91310 - DNA, 564 bp, Arabidopsis thaliana columbia
  unsure (1)..(564): unsure at all n locations
agctcccnnnnnnnnnnnnnnnnnnnnnnnnnnnnnnnnnnnnnnnnnnnnnnnnnnnnnnnnnnnnnnnccacgcgtgcgcccacgcgtccgcaataacacaatctccctggaaaaattctctacgacttcctctcgtcgtcgagcttgttattgatcggagagagagatcagtgttctttggatcttccaatttcttccacgtttgtgcttgaattgcagaagaagttttgtataggactctgttttgcttgttgatagaatttgggaatctagggtttatcgaatcgtttattttggttttcgtttagtttctcttcttcgagctggtgtttctcaactagttagagagtttctcgattggtcagagctgcttttattgaattttctttggatttcgtgcttatagatctttgaaaagtctgagaatcctgttttggagttactgctccaagttattggaagaaattaggggttcgatccaattttagaattgactcaaggaattccgatattggggttttgttgtagttctgattctcagtgaataagatagaagataat

SEQ ID NO: 91311 - DNA, 489 bp, Arabidopsis thaliana columbia
gccggcactatacgactcttatagggaaagctggtacgcctgcaggtaccggtccggaattcccgggtcgacccacgcgtccgcaagcagcaatggaggaaaaaagcagcggcggcggcgttaggcttcacgtcggcggattaggagaaagcgtcgggagagatgatcttctcaagatattctctccgatgggtaccgtcgatgccgtcgaattcgtcaggaccaaaggtcgttcctttgcctacatcgatttctctccatcttccaccaattcactcaccaagctcttctctacatataatggatgtgtctggaaaggagggaggctgagactggagaaagcaaaagagcattatctagctcgcttaaagcgagagtgggaggcagcgtcttctacctctgataacaccattaaagctccctccgattcaccacctgccactcaccttaacatcttctttcccagactcagaagggtgaaacctatgc

SEQ ID NO: 91312 - DNA, 472 bp, Arabidopsis thaliana columbia
gccggccctatacgactctcttagggaaagctggtacgcctgcaggtaccggtccggaattcccgggtcgacccacgcgtccgcggacgcgtgggctgttttcttcatctccacaaagataactaaatccgatctcgtcttcgcaatcatcaaccatcaatggaagttgaagaagaagttaaacaaatcatagatgaggtcaaagagcttcatgactccgccgcttctttcatctcatcttcttctcaacaagagctctctctccgtcaaaaagcctccgccgttgattcctctatccgtcgtctccactctactatcgtctccaacaaaaatctcgatcctaagctcgtcgaaaagcttgaggaagatctgcatcgtgctagatgcatgcttgttgacggagaaacatcttcatttctcccatccaaaccacaaggacgctttgtgagaatgttttgtggacctgtgaatg

SEQ ID NO: 91313 - DNA, 765 bp, Arabidopsis thaliana columbia
  unsure (1)..(765): unsure at all n locations
cttttccccactgatagagaagcttatcttgaacaactcgcatcgtgttaccatagagatgcagcctgatcctgaaaaagctactcaagaggaagtggaagagaaaaatatcctggaaaaagttccacccgcccggacagaagaagatcttgcagagctagcacgtgctacagaggagctgaaattgaaacaagaaactcctgaccctcctgaagcattgagatgtgtcccaagtttgaacttgggtgacattccaaaagaacctacttatgttcccaccgaggttggagatattaatggtgtgaaggttttgcggcatgaccttttcaccaatgatattatctatactgaagtagtctttgatattggttcgctgaaacatgagcttcttccactagtaccacttttctgtcaatcattactggagatgggcacaaaagatttgacttttgttcaacttaatcagttgattggaaggaaaacgggagggatatcagtttatccccttacatcatcagtgaggggtaaggatgaaccatgcagcaaaattatcgtacgcggaaaatccatggttgggcgtnctgacgaccttttnaacctgatgaactgcttgtngcaagaggttcaatttacagatcagcagaggtttaaacagtttgtttctcaaagcagagcacggntggagagccgattgaggggaagtggtcatggaattcctgcggcgaggatggatgcaatnttgancattnctggatggatntttta

SEQ ID NO: 91314 - DNA, 402 bp, Arabidopsis thaliana columbia
gaattttgcaacgatgggacaaggtaaagaagttaagacgagaccagatcctcaagttgagattcaggaaagaggagaaatattcttcttttatagaccaaaggttaacaaagaagaagctcacagtgtggacgatgttcaaaggctatacatagtgatgcgtcctgagtctggtgagaatcccaccgaagagaaacaagaccctctttcaggtaaagaaggctccgataaagattccggtgacggagaggcgagtggtagctcctccggcgccaagaaccaaggtgaaggaggacacggcgtcgagaaagtgaacatcgtgaaacagcttctgctacgattcattgtgatgggcaagataatgtcttcctgatccgagcaagaagtcgcaatctttttggg

SEQ ID NO: 91315 - DNA, 486 bp, Arabidopsis thaliana columbia
gatgatgtatcatcctcaagcctattatcatccaaatggacaacctcagtacccacagcagcaaatgatacctggtcagcagcagcagcaaatgatacctggtcagcagcatcctaggccagtttattacatgcatcctcctccttacccgcaggacatgccatatcataataaaggacgagagtaataactactactacccgatggtgatgatgttttttttttttgtgaaggaagtgtacgaacccctctctggttttatccactctcccttacccaatcactgaaaccattttcttctcttttttagattcgcctactgattttggtatttcgtgttgaaaccaaaaagaaagaaaaaaagaaagaaaaaaaacgatctatctgaagtctgtaaaaaaaaaaaaaaaagggcggccgctctagaggatccaagcttacgtacgcgtgcatgcgacgtcaagactcttctatagttgacctaaa

SEQ ID NO: 91316 - DNA, 499 bp, Arabidopsis thaliana columbia
  unsure (1)..(499): unsure at all n locations
gacnnnnnnnnnnnnnnnnnnnnnnnnnnnnnnnnnnnnnnnnnnnnnnnnnnnnnnnnnnnnnnnnnnnccacgcgtccgaaaaaaacaaaactagctcacataaaggaaatcatattttgatttaatttgtagtgtctctaatggcacggtttgagccatataactataataatggtcatgatcctttctttgcacacattaaccaaaatccagagctaataaatctggacttaccagcttctaccccttccagtttcatgcttttctccaatggagctttagttgatgccaatcacaataattctcacttcttcccaaatttattgcacggtaatacgacaagaaaaggcaataaagaagagagtgggtcgaagagaagaagaaagaggtcggaagaggaagaagccatgaatggagatgagactcagaagccaaaagatgttgttcatgtccgagctaagagaggtcaagctactgatagccataagtttggctg

SEQ ID NO: 91317 - DNA, 399 bp, Arabidopsis thaliana columbia
acgaatacagagatcggagacatggcggagagtcacggtggtggtggtggttgctgtccgccgatggatctgatgcggtcagaaccgatgcaactcgttcaagtcattgttcccatggaatctgctcatcttaccgtctcttatctcggcgatctcggtctcgtccagttcaaagatcttaattctgagaagagcccatttcaaaggacttatgctgctcagataaaaagatgtggggaaatggcacgaaaaatacgtttctttaaagagcaaatgtcaaaggctggagttactcccaaagagaccctagatagagaaaatgatattgatttggatgatgtagaggtaaagcttgaagagcttgaagctgaacttgttgaaatcaatgctaataacgac

SEQ ID NO: 91318 - DNA, 665 bp, Arabidopsis thaliana columbia
tatacgacttacttagggaaagctggtacgcctgcaggtaccggtccggaattcccgggtcgacccacgcgtccggtttaataatctccttctcttgtcttgcttccttgtgaatcaaaaaccagcgatcaaaagtcttcttcttgtgaatctgtgatctcaaaagctcctttaaccatggcgacttttgatgatggagatttcccagctcaaacccattctccgtctgaacacgaagactttggtggctacgataatttctccgaagcacagcaacctccgactcaacatcaatccggtggattctcttctttcaatggagatcctgcttccccaaatggatatggatttggtgcttcttcacctaaccatgacttttcctcgccttttgaatcttccgttaacgatgctaacggaaacggcggcggcagcggtggtgatgcgatcttcgcttccgatggtccgattcttccagatccaaatgagatgagagaggagggtttccaacgccgtgagtggcgccgtttgaacaccattcaccttgaggagaaggaaaagaaagagaaggagatgcggaatcagatcataactgaagcagaagatttcaagaaagccttctatgagaaaagagacaagaccattgagaccaacaagactgataaccg

SEQ ID NO: 91319 - DNA, 519 bp, Arabidopsis thaliana columbia
  unsure (1)..(519): unsure at all n locations
nnnnnnnnnnnnnnnnnnnnnnnnnnnnnnnnnnnnnnnnnnnnnnnnnnnnnnnnnnnnnnnnnnnnnccacgcgtccgcggacgcgtgggttttctcattagtttctttctactccatttcttgattttgtggtgtttcgtttagaaatagaaagacgaaaacagaaattagggtcaaacaaacttggaccaagagtaactttttttgtggaaatttttgtactcagattatttatcatgccgttatgagatttctctgaaactgagctatttttcaggaatctgagtttcgatttcactgagatgttcgactcctactctctttatcccaccggaaaactatctccggtggttgattcgtacgtcaccgccgagctcgacggcgaagatatgagagacgactacgcgttttttgagtccggtttcaaagacaacaaatctcagtttatctcttacccacaacgcatcttagtcggtgaggacgctgtttcttagagaatcggagattttaagtttt

SEQ ID NO: 91320 - DNA, 500 bp, Arabidopsis thaliana columbia
  unsure (1)..(500): unsure at all n locations
atacgactcatanaggggaagacggcacgcctgcaggtaccggtccggaattcccgtgtcgacccacgcctccgctaaaagagaagatgctcagcctttggttttcgaggtcacagagcgaagtaatcggggtttcgcagggacttggggccgagagaaagaaggtgggaaagggagtaatttacttcggtttgatgctccttgtgttctgcagttcattcgagagggcgaggggaaggatggagtgaagaactatttttcagggctgtttctttgtacacctacacggcaagggaagtctatgcttattgttagggttggggtcacaaaatgatcccctttggtttcggtgttacctcaatggttctggcatcaaattgcccgccagggttttgaacaagacattggggttcttatcgggatataatgagcgtcttaacaagtgaaaaagtaccatctatcggctttgtctttgaatccaaaggtattcggacacatcg

SEQ ID NO: 91321 - DNA, 539 bp, Arabidopsis thaliana columbia
  unsure (1)..(539): unsure at all n locations
nnnnnnnnnnnnnnnnnnnnnnnnnnnnnnnnnnnnnnnnnnnnnnnnnnnnnnnnnnnnnnnnnnnnnccacgcgtccggtctatgcttattgttaggtttggggtcacaaaaagatcgcctttggtttcggtgttacctcaatggttctggcatcagaatgcctgcaaggtttttgaacaagacatggggtttctatcgtctcaaaatgaggttctgatgaaggagaaagtaccaactaaggacttgtatttgaatctaaagtcatcggacacatgggtcgctgaatatagaaagtggatggacaaagttggtcatgggatgccttaccatttcgggcataggaccatatctctccccaaagtccctcctgtcgtggaacatgccccggcagggctcattgcagctctctctgcttcttaccctgcaaaaggcggaattgggactatgcatgctcccaatttggcttaccggtacttcagacatattattcattggagaagctgcagcaatgtgatcaaatcttttgagctctggaa

SEQ ID NO: 91322 - DNA, 756 bp, Arabidopsis thaliana columbia
  unsure (1)..(756): unsure at all n locations
taggtacaactatagaagagttatgacgtcgcacgcacgcgtcgtaagctcggaattcggctcgagtttgaaggagagcgacccagggccttgtatttgaatctaaagtcatcggacacatgggtcgctgaatatagaaagtggatggacaaagttggtcatgggatgccttaccatttcgggcataggaccatatctctccccaaagtccctcctgtcgtggaacatgccccggcagggctcattgcagctctctctgcttcttaccctgcaaaaggcggaattgggactatgcatcctcccaatttggctaaccggtacttcagacatattattcattgtagaagctgcagcaatgtgatcaaatcttttgagctctggaaaaatatcctctctgccacggcagtggctttgacggctttggccattctggtggttagtagacagtggaaggctgtcctgttaggttcagcagcattgtgctcagccgcagcttatacctgcttaagagctataaatctaaacaccaataacttcattagaacacacagaagactatgaaaatgtatagtgtcatgtttcctcttcttccaacaatatgtatttcatgaaataaatttttgcttgtaaacgcaattacataattcagaaggttccaatgtttgccatantatnnnnnnnnnnnnnnnnnnnnnnnnnnnnnnnnnnnnnnnnnnnnnnnnnnnnnnnnnnnnnnnnnnnnnnnnnnnnnnnnnn

SEQ ID NO: 91323 - DNA, 500 bp, Arabidopsis thaliana columbia
  unsure (1)..(500): unsure at all n locations
cgnnnnnnnnnnnnnnnnnnnnnnnnnnnnnnnnnnnnnnnnnnnnnnnnnnnnnnnnnnnnnnnnnnnnnnnccacgcgtccgaaaataaatagatagtcataactagtgtattacaaaaaaaaaataaagtaaataaaagtaatcactagctagtgactaaactaaatcccaattatgggtcgtgtacattttggtgtatcagcattctttgttttttgtttgttaggtttatcagctaatgcaaagatcttcaatattaattctcctccaggttctgatatcactaacgcattgttgaaagcattcaatgaggcatgccaattcccgacaaagagcaccgttatgatcccaaaaggtgaatacaagcttggggagatcgtgatgatgggtccatgcaaagctcctataaggattgctcttctaggtaccgtgaaagctgacggtaacgctaatggaaaggagaaatgggtcgctttccgcaacattaatgggtttaa

SEQ ID NO: 91324 - DNA, 411 bp, Arabidopsis thaliana columbia
gaaagataataaatgcgaggacgtaactggtaaaatcacgaaactgcctgattcaccttcactattcagagtgtttccttataaatatctatcacacggcgcaaaacgaaacgctcaagccctcaagtttatcttcctcagccgtgtagttcaaatcccggcacaaaactctgtcgtcgcttccccgagaaaaggggtcacacttaaacttgtcgaaaccaaacaacaatggaagatgacaaggatatatacacaaaagatggaactcctgacattcacaagataccagccaacatgaataaaactggaacctggaaagcttgcagattcattcttggaactgagtgctgtgaaagattagcttactatggaatgagtactaatctcatcaactatctcgagaaacaaatg

SEQ ID NO: 91325 - DNA, 757 bp, Arabidopsis thaliana columbia
tggtcatcagacacaaaagactctcaaaccctaactagtctcgcttttgcgctctctcgaaccttcttcgatctctgtcctttctcgatcacttgctaaaatcaaaattttaggcgggaattcgatacccaagcccaagacccaaacacttcccccctcacgtttcgctgctttcgttagctagctttctcaaacgagatctgggcttgtcgaaagaaacgtgatatatatgcagtgagccagtgatcatgcaaaagaaattcagagtgcgatagagaagatggagcctgaacgtttaaaatttggaggtccaagagagttgtgcggtgctgcggatcttatatctcaattcaaactagtgcaacaccatgaattcttttgcaagaaatctcttcctgtttctttatcagattcccattatcttcataatgtggttggggacacagagatcagaaaaggagaaggaatgcaattagatcagcttattgagagcatatcacagagccgggagactaatattcgcatccagccttttgatatagatgagcttcaggagtctttccaactaaatgatatgactcctgttgaattacccccagcagagaagggagctcctacaattccgtctaaagtcaaaaagtgagtcgcaatgatagggccaggaaaccattaaggaacacaaggccaggggttaagacaaagatagagagcataagaagcacaagcacaaacataaagatagaagcaaagataaaga

SEQ ID NO: 91326 - DNA, 518 bp, Arabidopsis thaliana columbia
  unsure (1)..(518): unsure at all n locations
tttaagtttcactcagagacagaagctagaacaaagaaaagagaagccttttgaaagcaatcaactttaatctttttcaaccaacactagtactctagctgttgctctttctcttcgttttcttccttccttcttctcttagatctctttcttttaacttgagtcttatcctttggatttttattcgatttgattcctccgtttggtttggtcagttttctttagactcttagtctttcctctgatctgggttttagctgtagaaactcgtgagttagatcgattgagaacccaactataaattagtaaaaagagaaaccctttataggttttttggggtttttgtctcagtctgaccaatgggttcacaggtttcttgtctagttgcttgaggtttttgggttttggtttgaatagngtatgagaagaggngnggnaaaggcaagaggcagaattctacctncngggaagnnnaggnaccgccgngaagaaaantcccancttttnggaaanaggng

SEQ ID NO: 91327 - DNA, 475 bp, Arabidopsis thaliana columbia
  unsure (1)..(475): unsure at all n locations
nnnnnnnnnnnnnnnnnnnnnnnnnnnnnnnnnnnnnnnnnnnnnnnnnnnnnnnnnnnnnnnnnnnnnnnnnnnccacgcgtccgcccacgcgtccgctcgaatagaaacggatagttggggtagaatcgcttttacacttctgggatttgttggttctgctcttcttgtattcgcattttctttgtcatgtattctgtgatactccatggaagaaggttggtacagttgcagaaatggcgtcatttgagatttgttgtgcaaaatggatcagctttttctaattcctattcttctgctagtgctactgatttgagctcaagagatggtcgaaaagtgaagaactttactgtctcttacctcgttgattcattgggtttagctacaaaactcgctgaatcaatctcaaagaaagtcagtttcgtgaacaagggcaatcctgatttagttctgagtctttttagaagttatgggt

SEQ ID NO: 91328 - DNA, 457 bp, Arabidopsis thaliana columbia
aatcaaaaaaaaagtaacgactatgcaaatatactatatattacataggcttcaccagatcatctcgaatcttaatcacattattaatacaattacatagaaggagcaattaaatctctatatataaaaggaagcgtgtgtttcgccttctcttttcaccattttcagttactttctctctttcatcttttaccattctcttcttcttttttttctctcattctgatcatggcttcctctatttccactggagtgaaatttgttccagaagaagataatttcttgcagagacatgtcgcttttttcgataggaacaaagatggtatcgtttatccctcggagacatttcaaggatttagagcaattgggtgtggatatatgttgtcagcagtcgcttctgtgttcataaacataggtctcagcagcaaaactcgtccgggtaaaggattctctatct

SEQ ID NO: 91329 - DNA, 519 bp, Arabidopsis thaliana columbia
atacgactttcttagggaaagctggtacgcctgcaggtaccggtccggaattcccgggtcgacccacgcgtccgattacatagaaggagcaattaaatctctatatataaaaggaagcgtgtgtttcgccttctcttttcaccattttcagttactttctctctttcatcttttaccattctcttcttcttttttttctctcattctgatcatggcttcctctatttccactggagtgaaatttgttccagaagaagataatttcttgcagagacatgtcgcttttttcgataggaacaaagatggtatcgtttatccctcggagacatttcaaggatttagagcaattgggtgtggatatttgttgtcagcagtcgcttctgtgttcataaacataggtctcagcagcaaaactcgtccgggtaaaggattctctatctggtttcctatagaggttaagaatattcaccttgccaaacacggaagcgattcaggcgtttacgacaaagatggacggtt

SEQ ID NO: 91330 - DNA, 450 bp, Arabidopsis thaliana columbia
catgattgtaccggagtggtccatggaatggaatccggtttaggggtgtaccggagatgcaaccatttcaatacatggttttcagtttcactacgagtaaagaggaagtgacttactcatttagaatcactaaaagcgacgtttactcgagattaagcataagctcctcacgagtgttacaaagattcacttggattgagacagcacagaattggaaccaattctggttcgcaccaaaagaccaatgtgatgagtacaaagagtgtggtgtttacggttattgcgactcgaacacttcacctgtttgtaattgtattaaagggtttaagccgaggaatcctcaagtgtggggattgagagacgggtcggatggttgcgtgaggaagacgctactgagctgtggtggcggagatgggtttgtgcggttgaagaaaatgaaattgccggata

SEQ ID NO: 91331 - DNA, 516 bp, Arabidopsis thaliana columbia
atacgactcacttagggaaagccggtacgcctgcaggtaccggtccggaattcccggttcgacccacgcgtccgcacgcgccgccgtactcgccacgatccgtctttggagaccaatttatggagccgccgaagggagataccgtagtgaagactgaggtcccggtgaaggatccatcgctaagcgtcgtcgattcgaaaacgaagggagtcgaggatgcgaacactgagatagccttgtccgatgaggttgaaatcgagacgaagggaagcgattcgacaccggtgaaagctccgagtcgaacatcgtctggatcgaagaaatctgtacattggagccccgaattggtgtctggatctcaggaaccggatcagaaagctgcatcgtcttcttcggctggatctaatccgtatattgctcgttctccagctgagacttcagatgcttcgttgaaagatacgatggagactgtgaaaggagtgcttggtagatggggaaagagggttgcagaagcag

SEQ ID NO: 91332 - DNA, 481 bp, Arabidopsis thaliana columbia
tatacgacttttttagggaaagctggtacgcctgcaggtaccggtccggaattcccgggtcgacccacgcgtccgcgaagaatgggtcacacagtttggcgagaaaccggagaaaggtcggtatcgctatgctggtcaatggaagcacagtcgaatgcatgggtgtggtgtctatgaagttaacgaacgcatcctatatggtagattctactttggggagctattggaggaggagcatggctgtaccgtagatatttgtgcgctgcattctggtttggcggaggtggctgcagctaaggctcgaatgtttgtaaacaaacccgacggaagtattgccccttttctttaccacttcttctgtttggttctgtgtattaagtataaaccaagacatattttagggatttgtttgattcctttagatcagtgcaggaccctctctagtaaccatcattctgtttcaaatatatatttcgctttt

SEQ ID NO: 91333 - DNA, 514 bp, Arabidopsis thaliana columbia
aggctctatacgactcatttagggaaagctggtacgcctgcaggtaccggtccggaattcccgggtcgacccacgcgtccgggcaccatgaaatggagtttaaatctaaagtaacatacacaaggcataggataacagaggcatacttgtggtcacttggaacatatttcgagcctcaatattctcaagcacgagttataaccactatggcactaatcttattcacagcgctggatgatatgtatgatgcatatggcacaatggaggaacttgagcttttcactgatgcaatggatgagtatagcatttgtaacatataatttagggagtattataaagggtaaggttgattttttttttgatggttttgacttctctctaacgtaggtggcttcccgttgttcctgatgagataccgatacccgatagcatgaagttcatttacaatgtgacggtagaattctatgataaactcgacgaggaacttgagaaagaaggaaggtcagggtgcggt

SEQ ID NO: 91334 - DNA, 556 bp, Arabidopsis thaliana columbia
cccacgcatccgcggacgcgtgggcggacgcgtgggcaacaaccacacgcttctcaaacatcaaaccaagcctctctttcacttcctcatggaatattccgacgacggcagattcgacgtgattgtcgttggagcaggagttatgggaagctccgccgcgtatcagctggcaaaaagaggccagaagactcttttgttagagcaattcgatttcctccatcaccgtggctcttctcacggcgagtcacgcaccatacgtgccacttacccggaggattactactactccatggtttccgagtcgactcggttatgggctgcggctcagtccgagattggatacaaagttcatttttccaactcaacaattcgacatggggtccggcagatcagcagagtcctcctctccggttgtgggccacggtgtcaaaaaaaacgggctagctcatcgggttttgggcttctcatgcagttttccgggcatttttcccggggggtttagtttccccgggaattggttcgggttttgacggaacttgggggggttttaaaaccc

SEQ ID NO: 91335 - DNA, 650 bp, Arabidopsis thaliana columbia
  unsure (1)..(650): unsure at all n locations
nnnntaatacgactcatttagggaaagctggtacgcctgcaggtaccggtccggaattcccgggtcgacccacgcgtccggaaaaacacacaccaaacaaaacaaaacaaaaaacagagagatggaaaacggaaactcctccagcgacaacaaatcttcacataaaccgatccgatgcaaagcggcggttagtaggaaggctggagagccgttggtgatggaagaaatcatggtggcgccgccgcagcctttcgaggttcggattcgaatcatctgcaccgcgttatgtcacagtgacgtcactttctggaaactccaagttcctccagcctgctttccgaggatactaggccacgaggcaataggcgtagtggaaagtgttggtgaaaatgtgaaggaagtggtagaaggagacaccgtactaccaacggttcatgcctgactgtgggtgactgtgttgattgcaaaatctcacaaaagcaacttatgtagcaaatttcctttcaaggtatccccttggatgccaagattccggtatttccagcaggttcacccgacctcaattggnggaactttntttnaatttttttaacgnttccaggttttannggnttancggtttttaattncgntaacggtgtnagnttgtt

SEQ ID NO: 91336 - DNA, 620 bp, Arabidopsis thaliana columbia
cctttatatttattttcttccttcgtctccttcaaattcaatctttctccgtcattcagatttcgaggagacagagacagtgaaaaggattcttgtaaggaaaagcttttaaacttctctttctatttatccctcctttcttctatctctctctctctcgatatcgatacaagagagatggagaaagaagaaggagaaacaacaacaacgatcggcgttgttccggcggcgccggcgaaattaccgactccgatatattctctgagcttttgggaggtcacggcagcttccggcgtcgttttagggtttattttgggtcttgtttgcgtttatctcacaatgcctcaatctgattacagctttctcaagctacctcgtaatctcgaagatcttcagattcttagagataatcttgagatatacacaagtgattacacagttcaagttcttgttggctactgtctggtgtacgtttttatgcagacgttcatgattcctggcactgtgttcatgtctttgcttgctggtgctctctttggcgttgtcaaaagaatggctcatgttgtctccactgcaatagctggcgcatcctcttgttatttcctctctaagctcattgg

SEQ ID NO: 91337 - DNA, 559 bp, Arabidopsis thaliana columbia
ttcccgcccccacagccaatagtatcgccagctactatacgactcatatagggaaagctggtacgcctgcaggtaccggtccggaattcccgtgtcgacccacgcgtccggtttgatgagaatgatgagaatgagaagatcaagaaaagttctttcttcaactggttttacttctccattaatgttggagctctcattgctgcaactgttctcgtctggatacaaatgaatgttggttggggatggggtttcggtgttccaacagtcgcgatggttatcgcggtttgctttttcttcttcggaagccgtttttacagacttcagagacctggagggagtccacttactaggatctttcaggttatagtagcggcttttcggaagataagtgttaaggttccagaggacaagtctctgctctttgaaactgcagatgatgagagtaacatcaaaggtagccggaaacttgtgcacacagataacttaaagttttttgacaaggcagcggttgagagtcaatctgatagcatcaaagacggggaagtcaatccatggagac

SEQ ID NO: 91338 - DNA, 473 bp, Arabidopsis thaliana columbia
gaaacgagcaggtcctgtcttcttatgaactcaatttcttcatttctgattctataaaacatcgttaggaacatgtctacgcgcatggttgagaacaattcagctaaaccagttctcacttctcggaactagcttgttaagaaggagaaggagtaacaacttctccgtgaggtcttgtggaagccaaacaacgacgacccatgaagctaaacagtcttctccaacaagggttgctccaaaaaaccacaaaagcaaccaacttgatgagattctgagagattacgaagctgtaattgggatagagactcatgttcagctctctacattgacaaaagccttttgtagttgctctaacaattacggttcttatccaaacacaagtatttgtcctgtttgtatgggtttgcctggtgctttgcctgttttgaattccaaagttgttgaatttggtgttagattgggtttagctttga

SEQ ID NO: 91339 - DNA, 500 bp, Arabidopsis thaliana columbia
gccggaactatacgactttcttagggaaagctggtacgcctgcaggtaccggtccggaattcccgggtcgacccacgcgtccgcgacgacggtgatgacgatggacagagaaaaggagagagaacttgagctcgagagtgcaatgtacacaaactgtttgcttttaggtttggatccgaatgtgatcggactcggagcctccaatggcacgcctcgggtcgggttatttcgccattcgaatccaaagctcggtgaacaagcttctctacttcatcctctcttctcttcgtggccctgctcagtcttcaaaggattttgataagggttggccaattttcgattcggctcaatctcgcgattttcgtaaggttgttcaagcgattataagcgagcttgaatcacaaggggcattaccaaggagtaatttcgagggtttcatcactagccacttgctgtggaccaagatttgtggagctcttgtggcaactttcactgcatgc

SEQ ID NO: 91340 - DNA, 966 bp, Arabidopsis thaliana columbia
  unsure (1)..(966): unsure at all n locations
nnnnnnnnnnnnnnnnnnnnnnnccggcactaatacgactcttatagggaaagctggtacgcctgcaggtaccggtccggaatccccgcgtccgcccacgcgtccgagaagttgagaaagaaaaaatagtaacgatgaaaatggccggaaggatctttctccttttcctctccgtctacgtcacggtggccatcgccggtaaagctccaccgccaacattcaccgagaaaggcaaagccctagcggagaaactctgcgagaaatccgaagacaaagcgttttgcgttgcaagcctaacgtcccgtcctgaggcagcaaccgcaaccgcaccaaaactaggcgtgatcgcgttaagcatcgcgtcctcaaatgcttcggacacatctttctacatcaaagccaaactaaagcaaaagaacctcgagccggctttagaagacaccctcgacgattgctctaagaattacttagatgcggtcgcgcagctcgacgattctctagccgctttgatgcagaactcgttcatcgacgtcgatatttggctcaacaccgcgataagcgacggtgaggcttgtgaaaacgctttgaacgatcgtgccggtaatgatgctgagcttgctcgtaggaacacaaacttgttgaagctttgcaaggatgctcttctcattaacactattttaactccctaaatttaaagttattgcccattaattattttatatttgttcacattgttataatttttttttaaatggctcgttgatttgtcccgggggtaaattgtaacgatatttgaaatacttgtttttgggaatttttgaatgagcttattaaattatatataaagtatatacaacccantatgcatattttcttgtttaaaaaaaaaaaaaaaaagggcggcacgctctagaggatccaagcttacgtacgcgtgcatgcgacgtcatagactcttctatagtg

SEQ ID NO: 91341 - DNA, 515 bp, Arabidopsis thaliana columbia
atccgactcactttagggaaagctggtccgcctgcaggtcccggtccggaattcccgggtcgacccacgcgtccgactgagctctgtttttgtttttaccgtagatcgtttcgagtctctttaatctttggcgggttccgtaaaaaaaaaaatggcctcttctagattccaatctgggttttgtcctatctcttcgtgtccctctcttgagaatttcatcgaaaggattaaagacgcatgtcgtttcaccctctccgctgttctagggacaattctctcggcggtcttgactttcttcttcgctttagtgggcacattgcttggagcacttactggagctttgataggccaagaaaccgaaagtgggtttatccgaggagcggcggttggagccatttcgggagctgttttctctatcgaagtctttgagtcatctcttgttctttggaaatctaatgagtcacgttttggatgtctcctctacttgattgatgtcattgttagtctgataagtg

SEQ ID NO: 91342 - DNA, 1488 bp, Arabidopsis thaliana columbia
  unsure (1)..(1488): unsure at all n locations
atttaattttattttattgtttccattaaagcaaaaaccccacactctctctctctcttgctcctcgctctcttcctgtctctatctctctctgcaaaaaccctaaatttcctccgatttcaccatcttcaatctccttcacaccccaacttagcctcttaatcactccccaagctaaaccctccaacgattttccatgattcgaagatacagagccttagcgatgaagaaaaagccctaaaaaccaaagctttgatctctccgaaatcggagtttctttctttgtttggtaaatttggttttcgaaatgtataagaaccagctacaagagttggctcagaggagctgctttaatcttccttcgtatacttgtattagggaaggtcctgaccacgcgccgcgattcaaggctactgttaactttaacggcgagatctttgagagtcctcagtattgttctactcttcgtcaagctgaacactctgctgctgaagttgctctcaatgctctctctaatcgtggtccttctcactctcttgccgccaggatcttggatgagacgggtgtgtataagaatcttttgcaagagatagctcaaagagtgggagctcctttaccgcgatatactactttcaggtcaggtcttggtcaccaacctgtgtttactggtactgtagaattggctggaattacgttcactggagatccagctaagaacaagaagcaagcagagaagaatgctgcaatggctgcttggtcttccctaaaacaattggcaaaagaaacatcaagttcaatgcctgagcctgagaacattgacgaactagaacaggtgattatagcaagagctttgataaactatcgtatcaaggaaaacattggcacaggaagctcctcgagtgccccagttccatttgcaaagaagttctttatgcagaaccttagaccaacaagtccacagccttctcctgcaaccacatcgagaatcttaccctttatttgcccaaaacaaccttccagaagcagcagatcatccttagcagcaacttccggtattgacagaattatggcagcagccttggaaagccgcagctaccagcggcctcagcagagatttgcaaatccgccttatgttcctatgaggcaattttagatcgcaatgccatggggatggctccaccctgtcacaatcagaaccgctgtaaccggtcttctcttgcaccttccaatgcctccttccaccatgtacaaacaacactcagcgtccctcttctgtgtatgtcccatcgctgatgcgaactgcaccacctgtgangatcgcgccgcctgtcacaatcagaaccgcggtgcccgtatttgcttctgcgccaccggttagaattanaaccgctgtgaagcccacagttgaaggcaggagaaaacccgcntatcatcnntcccagaaaaaggagaattatncccngtcttggcctgatantcttgaaaatt

SEQ ID NO: 91343 - DNA, 518 bp, Arabidopsis thaliana columbia
  unsure (1)..(518): unsure at all n locations
nnnnnnnnnnnnnnnnnnnnnnnnnnnnnnnnnnnnnnnnnnnnnnnnnnnnnnnnnnnnnnnnnnnnnnnccacgcgtccgcggacgcgtgggcagagaagttgtttcaacttaccatcatatacttgcataagagaaggaccagatcatgctccaagattcaaagcttctgttaacttcaatggtgagatatttgagagtcccacttactgttctactctcagacaagctgagcatgcagctgctgaagtttcccttaatgtcctttcgtctagagtcccttcaaagtctctaactgctaagattcttgatgagacagggatttacaagaacctgcttcaagagacagcacatagagctggtcttgatctaccaatgtacacaagtgtgagatcaggatcttgtcacttcccaggtttctcttgtactgttgaacttgctgggatgacgtttacaggagaatcagcanagacaaagaaacaagctgagaaaaacgcagccattgcagcttggtcct

SEQ ID NO: 91344 - DNA, 539 bp, Arabidopsis thaliana columbia
  unsure (1)..(539): unsure at all n locations
atgatatgccnnnnnnnnnnnnnnnnnnnnnnnnnnnnnnnnnnnnnnnnnnnnnnnnnnnnnnnnnnnnnnnnnnnnnnnccacgcgtccgcccacgcgtccggctcacgcgatattgtctaacctggggaacctctacagacagaaaaagcagtacgaagtctcaaaggcaatgttctcaaaggcgttggaactcaaacctggttatgcacccgcatacaacaaccttggactcgtgtttgtggctgaacgcagatgggaagaagcgaagtcttgtttcgagaaatcccttgaagctgattcattgctagatgcagcacagtctaacttgcttaaagccacaaccatgtcaaggctctgtacttgcttctcttcttcaactgttgtccgagattcttgatgctctgtaatacttcttgtttcgttttgtggtttcacaactctcacattatgtgccttgaatagtattaagtacaaagaccataatatcgcgagaggcttgtgaaactaaannaaaaaaaaaaaaaaaacgagaaaa

SEQ ID NO: 91345 - DNA, 672 bp, Arabidopsis thaliana columbia
  unsure (1)..(672): unsure at all n locations
nnnnnnnnnnnnnnnnnnnnnnnnnnnnnnnnnnnnnnnnnnnnnnnnnnnnnnnnnnnnnnnnnnnnnnnnnnnnnnnnnnnccacgcgtccgctgaacaaaccaaaaaaaactcttcttttttctatctttcacgcgttgaagattcttgattttctttcttctccttccttacacgaccactgatatgtgtcggtgactgaaaccatctgttctcttttgcctctgatttatcgatatgttttaaagaaaaacggtgtttgaaacttttgtaatttaaggttcatcaaatactcagatcttgtctgagaaattaagctgaaatctgataaatgggtttgtttaaattcatcttcttgttatctcttctatggagtttctacagtttaggctcatctcagctacaagcttcacaagcacaagttcttcttcagctgaaaaaacacttagaatatccacaacagctagaatcttggtatgatcacagaaccaatttctgctacttacaagcaacaccatcgatgaacatcacttgtttctctaattcagtctcagagctaaacatcttcggtgataagtcatcagaaaaagccaaaagctttgatggttttgctatctctaatgttactttatctgatggattctccattgaatcatttgtcactacactg

SEQ ID NO: 91346 - DNA, 760 bp, Arabidopsis thaliana columbia
  unsure (1)..(760): unsure at all n locations
cgcagagaggagaaacctgccccnnatttcnctaatgtcaaggagnnnctgagacaaaagcgtatcgtaatggaggttattggtcaaatggaatactcaaggaagattagcccaggagatggtgttactacttctggagctggtgatagggtcatggatttcggctcagtgttccttccatctcctaccaagggtgatacagctgtagcagctgcagcaactcctggagcgaatattgctgaactcattatttcccgtggcttagggactgtggttcgacatcgtgactttgaagagaggtcgaaccattatgacgctctcctggctgctgaagctcgtgctattgctgggaagaagaatatccattctgcaaaggattctccagccctacacattgcagacctgactgtggcctcggccaagaaggctaaagatttcctgccatccctgcagagaatcaaccagatatctgccgttgtggaatatgtgctaagtggacatcggttcaagctatacattccaaaagaatcgtgcagcattgcctttgcattctctggtgtcagatgtcctggccgtggcgaaccctattcggaagaagctattgctttaatgagacgtaagatcatgcagagagatgtcgagattgtagttgaaaatgtggatagaaccggtactttcttgggatcaatgtgggagaaaaactcaaagacgaacgcaggaacatatcttcttgaagctggcctggcaaaaatgcagactg

SEQ ID NO: 91347 - DNA, 533 bp, Arabidopsis thaliana columbia
  unsure (1)..(533): unsure at all n locations
nnnnnnnnnnnnnnnnnnnnnnnnnnnnnnnnnnnnnnnnnnnnnnnnnnnnnnnnnnnnnnnnnnnnnnnnnnnnnnnnnnnccacgcgtccgactgattgttcaaaagagacttctgatgcaactttgggatctgaagaaaaccaacaagataaggatcatcaatgcctcgacaagaaaacagcagatgtacaagatacaatgatagaggaagatgacattactcatgaagctccaagtttcgacccaaaccaaaaggaaaatgcagaaatggaagaaaatcacaacaattttgtttatgctgatgatgaagctggttctgatgttaagaccaatggtgtgaaacgaaaggctgatgtcctgagtgaggattcaccaggagaaggtaggaagactgtttcattcgccaaggtgtcttttgccgaaaggccgtcctttaaaattggtgcatgcatagccagggctgcaagtcagatggcaggatctccttcagttttgaagggtagtaactttggtgatgaaactctttctg

SEQ ID NO: 91348 - DNA, 1752 bp, Arabidopsis thaliana columbia
  unsure (1)..(1752): unsure at all n locations
agcgtctctacgactcactattgggaaagctggtcacgcctgcaggtaccggtccggaattcccgggtcgacccacgcgtgcggtgagagagtaacagagaaacgtagagatatagcaaaatggctgcgacgcttactggatcagggattgctctagggttttcgtgctccgcaaagttctctaagagagcttcttcgtcgtccaaccgtcgctgcatcaagatgtcggtttcggtagaggagaagacgaagaaattcactcttcagaaatctgaggaagctttcaatgctgcgaagaacttaatgcctggaggtgtgaactcacctgtacgtgctttcaaatctgttggtggacaaccagtggtgatggattctgcaaagggctcacgaataagagacattgatggaaatgaatacattgactatgttggatcttggggacctgctataattggtcatgctgatgatgaggttcttgctgctttggctgagacaatgaagaaaggaacaagctttggtgctccttgtctcttagagaatgttcttgctgagatggtgatttcagctgttccaagtattgaaatggttcggtttgttaactccggtacagaggcatgtatgggtgtgctacgtcttgctcgtgccttcacagggaaacaaaagttcatcaagtttgaaggttgttatcatggtcatgcaaactctttccttgtcaaagcaggtagtggtgtagctactttgggtctacctgactcgcctggggtccccaaagcagctacttcagatactttaacagctccatacaatgatattgctgctgttgagaagctttttgaggcaaacaaaggagagattgctgccatcattcttgaacctgttgttggtaactcgggttttattacacctaaaccagagttcattgagggaatacgccggatcactaaagacaatggtgctcttcttattttggatgaagtcatgactggttttcgtttagcctatggtggagctcaagagtactttggaatcacacctgacttaacaactcttgggaaaatcatcggtggtggtcttcctgtgggagcatacggtggaagaagagacatcatggaaatggttgcacccgcaggaccgatgtatcaagctggtacgctaagtggtaatccgttggctatgacagcgggtatacacacgctgaagcggttaagtcagccagggacatatgaatacttagacaagatcacaaaagagcttacaaatgggatactagaagccgggaagaaaaccgggcatgcgatgtgtggcggttacataagcgggatgttcggtttcttcttcacggaaggacccgtctatgatttctcggatgcaaagaagagtgatacagagaagtttggaaagtttttcagaggaatgttggaagaaggtgtctacttggcaccttctcaattcgaggccggttttactagcttggctcacacttcagaagacatccaattcactatcgcagcggccgagaaggttctaagtcggctctaaaatgtctctggaagcttccagggaaccatgaatgtatttgaaattttttgatgtagagaaaattagattcaattgagagcaagcaagcaatctcgcaaaatttccctgtggtaagacaagtcaaaatgtctccgaaaaaagttagtttttttnnnnnnnnnnnnnnnnnnnnnnnnnnnnnnnnnnnnnnnnnnnnnnnnnnnnnnnnnnnnn

SEQ ID NO: 91349 - DNA, 585 bp, Arabidopsis thaliana columbia
aaaaaagcttccaccatttttttttctgtgcttcctcttttaagctattttcttgatgttttgggtttcactggaagaagaaggataagaaaaaatggcaggtgatggcgtagaaaatgcaaagccaccgcagaaacaggaagatcttcagcctcatccggtgaaggatcaactttacggtatcacttactgcctcacaagtcctcctccttggccggagacaatacttctggggtttcaacactacttagtgatgcttggaacaactgttctcattccaacaatgttagtttcaaagattgatgcaagaaacgaagataaggtaaagttgattcagacgttgctctttgtgtctggaatcaacacgttatttcaaagcttctttgggactcgtcttcctgctgtcattggagcttcttactcttatgtgccaactacaatgtcaatcgtcttagctgctcgttacaatgacattatggatcctcaaaagagatttgaacagatcatgcgtggaatccaaggtgctcttattattgcctcatttcttcatatccttgttggtttcagtggcctttggcgcaatgt

SEQ ID NO: 91350 - DNA, 631 bp, Arabidopsis thaliana columbia
  unsure (1)..(631): unsure at all n locations
nnnnnnnnnnnnnnnnnnnnnnnnnnnnnnnnnnnnnnnnnnnnnnnnnnnnnnnnnnnnnnnnnnnnnnnnnnnccacgcgtccgcccacgcgtccgcccacgcgtccggagctacagctgatgtccaaaccgcattgaagacaggattcagtcatgtcaacattaacacatggcttgttgtgctacctcaaatcattgctaggatacattctaataatcgtgctgtcagggaactgattcagtctcttctcatccgcataggcgaaaaccacccacaggctctgatgtatccccttctcgttgcatgtaaatcaataagcaatcttcggagagctgcggctcaagaggtggttgataaagttcgccagcacagtggtgcactcgtggatcaggcgcaacttgtatcacatgaacttatcagggttgccatactttggcatgaaatgtggcatgaagcactagaagaagctagtcgcttgtattttggtgaacataacattgaaggcatgctgaaagtacttgaacccttacatgacatgctcgacaaggtgtaaaaaaggacagtacgaccatacggaaagagcatttatagaggcataccgtcacgaactaaaagaggcacatgaatg

SEQ ID NO: 91351 - DNA, 527 bp, Arabidopsis thaliana columbia
  unsure (1)..(527): unsure at all n locations
atacgactcacttaagggaaagctggtacgcctgcaggtaccggtccggaattcccgggtcgacccacgcgtccgcgattgatgactctgcaacagatcatcaagaggatgtagcaaatgggaacaaagatccagaggtaaaatatcaggctgccgattcttggtcagaccctacaacttcaactccattggtctgtacaaaatccaaacctccggtgagagatatggacaccaagatgatcgacgctcagtgatgtggtatgttacaacatttgaaaatcagcagagctttttagcttacaaagttacaatagtgatgtagatactattacacaatgacttctatggtaataaagggtgattatacgtnnnnnnnnnnnnnnnnnnnnnnnnnnnnnnnnnnnnnnnnnnnnnnnnnnnnnnnnnnnnnnnnnnnnnnnnnnnnnnnnnnnnnnnnnnnnnnnnnnnnnnnnnnnnnnnnnnnnnnnnnnnnnnnnnnnnnnnnnnnnnnnnnnnnnnnnnnnnnn

SEQ ID NO: 91352 - DNA, 392 bp, Arabidopsis thaliana columbia
gatccttttaatgtatcgcagaccatcctcagctatggcctcctgtgtgtccttttaggtatcttcggagctcttcaccgtaaataatcccgacccatctagaggacggagccgccggcgaggaaattcaggcagattacatcggcgatttggccttgttttcaacgaagatcgtcttgttagggtttcgtccgcagctatggattctctgtcaaatgcgggtattgatatgaatttcggctttcgtgatgacggaatctatctggttaaacgatcaatcttctcctcggtcgatgataccttcagcaaaaccagtggctaatgtccatcgccagaggtgtaggagtgtcttcaagttactagtccagagggaaatttcaccaaacacaaag

SEQ ID NO: 91353 - DNA, 579 bp, Arabidopsis thaliana columbia
  unsure (1)..(579): unsure at all n locations
nnnnnnnnnnnnnnnnnnnnnnnnnnnnnnnnnnnnnnnnnnnnnnnnnnnnnnnnnnnnnngatccacgcgtctattttgttgttcttcgtcatcgacctacgctgcgattatctctccctctcaaaattccttatctcgtcgattaatttctctcagatcatgttgactgaaactccatttaggccacgagagaagcttctggagaaacagagattgttccagagcatccaaaggcacacttacttgaaaggaccaatggacaagatcacttctgttgctattcctattgccttggctgcaagttctctctacatgattggaacaggaatctacaacatgtcgaatggaatcggcaaaaaggaataagcagcttcttgatttttccttcttttttatatgcttttggtttctcaatgtatcagtcactgcccatatgcagtagcagactaaggttgcactggtctttttcttgaagctgtttattccgtcttgccaaataattgcttagttgcagacaatgtcgaaagctaaagatgtttgatgttataaagttccaatattttggggaaaaaaaaa

SEQ ID NO: 91354 - DNA, 596 bp, Arabidopsis thaliana columbia
  unsure (1)..(596): unsure at all n locations
cnnnnnnnnnnnnnnnnnnnnnnnnnnnnnnnnnnnnnnnnnnnnnnnnnnnnnnnnnnnnnnnnnnnnnnnccacgcgtccgctcgagaaaagaagattcacttccatctgcaaattccttcactccctgtgagctcaatagagagagaagaagagatgccgctcggagagagaggaggatgggagaggaccgagtccagatactgcggcgttgagactgatttctccaacgatgttactcatcttctcaacttcaacatttccaccggcggttttgactatgttctcgctcctctggtggatccttcgtataggccgagcttggtggaaggaaatggtgtagatactcaggttcttccagtctgtggctctgacttagtcttgtcaccttctcaatggagcagtcatgttgttggaaaaattagttcgtggattgacttggattctgaagatgaggtcttacggatggattcagaaaccacattgaagcaagaaatagcttgggctactcatctctccttacaggcatgccttcttcccactcctaaagggaaatcgtgcgccaattatgccagatgtgtgaaccagatcttac

SEQ ID NO: 91355 - DNA, 806 bp, Arabidopsis thaliana columbia
caaaatatcctctcaaaatatagaacaaaaatcggctgggtattgaaaaaagactatttgcaagttcttctcataaaaacatggcggcttctgatagtagaaacaacagagcagatgaacctggttttgttgtgcaacctaaaggagagcatagagtcattatagtatggctgcatgataaggatgagcgttcctctgattcacttcagtttgtggaacaattgaatcttaaaaatgtcaaatggatatgtccctctctcgtgttccccgattcattcataaaaggagtgggaggtttaggaatgggtgcagcagtagctctccactttgcaacaagttgtgctcttaaccattatactataaatccccgagttgttgttggaatcagcgggtggctttctaattcggggagcctaaaacgcagtatagaatctgcttcacatggggctccagctcgtgctgcatcgcagtcaatctttattacgcatggaatatgcgattctgttcctcacccctgtgactgtggagaagaagctgttttgtcccttagagaggctggatttagagacgtcaagttcacaccatttgcaaggtttggaccgactgctcatgagaacaatcgcaacgtaatggtcaaaagctggttggaagagaagctccagctcgatgttactataccatagagactttcctctttctagtgactagtagtttactaaatatcgtcgtttgttttctttgtcctgaataaattagcgtgactcatgttatgacttatccctaagtttttattttttacagccttt

SEQ ID NO: 91356 - DNA, 643 bp, Arabidopsis thaliana columbia
gaaaaacaagagagctatcggatttttacttctggtcgtacttatcaatggagttatgatgacgagatcaaatgggtatgaaggagaagaagagtggggaggagcaggaggaggagagtggggaggagcagaaggaggaggagcatggggaggaggaggtggaggaggaggagcatggggaggagaaggagaaggaggaggagagtggggaggaggaggagaaggaggtggtggaggaagaagaggatggttcatgatgagagagtcgaggcaagtgatcaaatcagaaggtggagagatgagagttgtgttatcaccaagaggaaggatcattgagaagccaatgcacattgggtttctaacaatggaacctaagaccctctttgtccctcagtatcttgactcaagccttctcatctttattcgtcaaggtgaagcaacccttggagtgatatgcaaagacgaattcggagagaggaaactgaaagcaggagacatctactggattccggctggttctgtcttttatttacattacacatgcctaggttaacgcctttttgtcattttcagcatttatccaacgttcagatttggtttcttatctcttcttcttttttatatatgttgttttccttttttt

SEQ ID NO: 91357 - DNA, 886 bp, Arabidopsis thaliana columbia
cgcccgacggacccggaaggcccgggggggcccacccatccggacgaggatggttcatgatgagagagtcgaggcaagtgatcaaatcagaaggtggagagatgagagttgtgttatcaccaagaggaaggatcattgagaagccaatgcacattgggtttctaacaatggaacctaagaccctctttgtccctcagtatcttgactcaagccttctcatctttattcgtcaaggtgaagcaacccttggagtgatatgcaaagacgaattcggagagaggaaactgaaagcaggagacatctactggattccggctggttctgtcttttatttacataacacaggcctaggtcaacgccttcatgtcatttgcagcattgatccaacgcagagtctcggcttcgaaaccttccaacctttctatataggtggagggccttcgtctgttctagctggatttgatcctcacactttaacttcagcattcaacgtttccctacctgagctgcaacaaatgatgatgagtcaattccgtggcccgattgtacacgtcaccgaagggccacaaccacaaccacaatcgacggtatggacccaatttttggggttgagaggggaagagaaacataagcaactcaagaaactcttggagactaaacaaggatcccctcaagatcaacaatacagttcagggtggtcttggaggaatattgtaagatcgattttggttctaacagaagaaaagaataaagggtcaggatcttctgaatgtgaggactcgtacaacatttatgataagaaagataaaccaagtgttgataacaaatatggatggagtatagctcttgattatgacgattacaagcctcttaaacactcgggatc

SEQ ID NO: 91358 - DNA, 532 bp, Arabidopsis thaliana columbia
gccggcactaatacgacttttttagggaaagctggtacgcctgcaggtaccggtccggaattcccgggtcgacccacgcgtccgggacgatcgaaaaatcgagacttgcgaattcaacacggaagcgagacagtaaccgacttaacaatggctgcttcatcgtctccgtgcatcttcttcgccactaccttactggtgctgcttctcactttctcatccgggaaattaccatttcaccctcgagacctgcttccgctttttccgaggcaagtctcgtggccggtagtcaattctctcaacactgccgtcgatctcctccctactttcatcggctccgcttctgttagaaacgacgccgtggagtggaaaggtgcttgcttttatgagaacaaagcttggttggagctcaataacaagtccggttccgaattcggcgggggcacactttcacattaaggtccgataaggcacatagttggacgtgcatggatatttatgtctttgtcacaccatatcgtgtgacatgggattg

SEQ ID NO: 91359 - DNA, 1028 bp, Arabidopsis thaliana columbia
gaaacttgaaagagagaaagagtttgattttgattaaaatggggaagaagtgtgatttatgtaacggtgttgcaagaatgtattgcgagtcagatcaagctagtttatgttgggattgcgacggtaaagttcacggcgctaatttcttggtagctaaacacacgcgttgtcttctctgtagcgcttgtcagtctcttacgccgtggaaagctactgggcttcgtcttggcccaactttctccgtctgcgagtcatgcgtcgctcttaaaaacgccggcggtggccgtggaaacagagttttatcggagaatcgtggtcaggaggaggttaatagtttcgagtccgaagaagatcggattagagaagatcacggtgacggtgacgacgcggagtcttacgatgatgatgaggaagaagatgaggatgaagagtacagcgacgatgaggatgaggatgatgatgaggatggtgatgatgaggaagcggagaatcaagttgtgccgtggtctgcggcggcgcaagttcctccggtgatgagttcttcatcttctgacggaggaagcggaggttcagtgacgaagaggacgagggctagagagaattcagatcttctctgctccgatgatgagatcggaagctcttcagctcaagggtcaaactattctcggccgttgaagcgatcggcgtttaaatcaacggttgttgtttaactcacactctaccgtatcgtcagaatgaacggcgccgatacatcgtcttctccgatccttgcgatctccaaaactagaagcgatctcagtccgttggattcctttttttttcttgtttaagtaaatcaccaccgttcagttttctgacaatactttgttttagagatgaggtagtttctttctttctttgaatgtcgtacaaaatcaaatcttaactttttatttttctaaaaaaaaaaaaaaaaaaaaaaagggcggccgctctagaggatccaagcttacgtacgcgtgcatgcgacgacatagctgttgtatagt

SEQ ID NO: 91360 - DNA, 501 bp, Arabidopsis thaliana columbia
aatacgactctttatagggaaagctggtacgcctgcaggtaccggtccggaattttcgggtcgacccacgcgtccgccggcttatacaaatcctactgccgtcaaaatcgattcaaagcgaaccagagattgaatggaagatgcagctgctccgaattcaggatccgaatttaatccaggagcaagacgcggcaaatctatcgatgaatgccaagacatgagttcgtaggagtttccgaaacccaatagtgaagtttctgatggagcaaatggagaaatctgggtgtagagttggtgattatttcgttaaggctgttggttgtactggacctgtagctggaggttacactaaagggaagagggataactgtctgcagtaactatctgaccattcaggatgaagtgaaccaaggagttatacatgagttgattcatgcttatgacgagtgcccagccaagaatttggattggactaattgtgctcatcatgcttgcagcgag

SEQ ID NO: 91361 - DNA, 451 bp, Arabidopsis thaliana columbia
tctttttacttctcctctcgattcgaaaatttcacatctccggaattttcatttctggagaatattgtttcacatccctacaatggcgtctgagaatctgaatgacaagatctctgtttttaagaaactcaaagccaaatcagataataagatttgttttgattgcaatgcgaagaacccaacatgggcttccgttacttacgggatctttctctgcatcgattgctcagctgttcatcggagtcttggcgtccacattagcttcgtcaggtcaaccaatttagattcatggagctcagagcaattgaaaatgatgatatatggaggaaacaacagggcacaagtctttttcaaacagtacggatggagcgatggaggtaaaaccgaggctaagtataccccaagagctgctgatttgtataaacagatacttgctaaagaagttgctaaa

SEQ ID NO: 91362 - DNA, 875 bp, Arabidopsis thaliana columbia
gagcactatacgactcacttagggaaagctggtacgcctgcaggtaccggtccggaattcccgggtcgacccacgcgtccgcggacgcgtgggcggacgcgtgggtctctcccctcaaacttaaattcacattttaagacttgttacttcaactataataataataataatctttcttcattatatattttcctctcctctcagatcttctctctcaccatcttctcttgagatcaagattgagtattcttgtctcaagaatcgatactcgagagctcttatggaccaaaatggtcataacgacgaagcagaaacagtttcatgcggcaacggcaactgcaaaagcaagatcgtgcctggagatgatcacggtggagatgagagtagtggtaccaagagaaggaagaagagaaaaacgcaacaaaagacaatgaaacgacgtgaattaatgtcgtattgtgagctaccggagtacatgaaagacaacgaatacatattgaattattacagagctgattggtccattagagatgctttcttcagcgtatttagtttccacaatgagtccctcaatgtttggacacatttgattggttttatcttctttgtggcactaaccgtcgccaatattattcatcacgacggattcttccccgtggatgcaaagagtccagggaatgtaacaagatggcccttcttcgttttcttaggagggtcaatgttctgcctactcgcaagcagcatttgtcacctcttctgttgccactcaaaagagcttaatgtcttccttctccgaataggctatgccggtatcacccccatgatcatcacttccttcttcccaccaatcttctacatcttccagtggcactcct

SEQ ID NO: 91363 - DNA, 522 bp, Arabidopsis thaliana columbia
  unsure (1)..(522): unsure at all n locations
nnnnnnnnnnnnnnnnnnnnnnnnnnnnnnnnnnnnnnnnnnnnnnnnnnnnnnnnnnnnnnnnnnnnnccacgcgtccgcagtaatcaatacatagctctttcggcaacgcaatttgcagacacgtcagactcagagcttttccaatcagcgagactctctgcatcttctttaaggtattacggactggggctagaaaatggaggctatagtgtaacggttcagtttgctgagatacaaatacaaggttctaatacctggaaaagtcttggaaggcgaattttcgacatatatgtccagggaaaacttgttgagaaggattttgacatgcaaaaagctgctaacggttctagtatccgagttattcaaagagtctataaagcaaatgtatcagaaaattaccttgaagttcatcttttctgggctggaaaagggacctgctgtattcctgctcaaggcacttatgggccattagtctcagctatcagtgcaactccagatttcatacctactgtaaaaaat

SEQ ID NO: 91364 - DNA, 340 bp, Arabidopsis thaliana columbia
cttgaagatgttgaaatagctaacagagatggtgttgcctgctctgctgtgaaacctcagagggaacaagatgctggaaatgaagccgtgaaaaggtttggaaaacctatcccaatggatattagcgaaagagcagccatcatcgagtagtatcaatcccaggtggggcagaaaacaatcattgtgtagtaggcaaggatgtgctgccaggtgcacatgagattcaggccaaaccaagcgacaccctcactgatattcatcatgatgtagatagcattgaaactgttcattcgactcagggaggtgatgttggcaattcgatagttttggcaaatggatt

SEQ ID NO: 91365 - DNA, 946 bp, Arabidopsis thaliana columbia
  unsure (1)..(946): unsure at all n locations
ccagtcaattgcatcaacccccttaccagccacctcctcaacagccacaatacccgcaacagccgcctcctcagctccaacacccgtcaggctacaacccggaggaaccaccttaccctcagcaatcttacccgccaaaccctcctcgtcaaccaccttctcatccacctccaggttctgccccatctcaacagtactacaacgctcctccaacgccaccatcaatgtatgatggaccaggcggcagatccaattcaggttttccttccggatattctcctgaatcatacccgtataccgggccaccttcacagtatggaaacaccccatctgtgaaacccacacatcagagtggaagtggatctggtgcctacccacagctcccaatggcacgcccactaccacaaggtttaccaatggcatcagccatcagcagcggtggaagtggtggtggctcagattccccaagatcaggaaacagagccccagtcgatgatgtcattgacaaagtggttagcatggggttcccaagggaccaagtgagaggaacagtgagaacattgacagagaacggtcaagctgttgacctcaatgttgttttagataagctgatgaatggagatagaggagctatgatgcagcagcagcagcagcaaccgccaagaggttggtttggtggtcgttagctgtgttgtctctaattccggtttggctgacattgtatagtcttttatctctcatgtcagatttcctcgaacatatcttttggattaccttggtgtttcatttgtgacttcaatattttttcaaagctttccatgtatgtttgaaacttgaagcttcgatcatttatttttttctgtgtttcattcatttgcctatttgactcttagaaaaacaaaaaccagtgagtgtaccaataatataaaaaaaaaaaaaaaanaaa

SEQ ID NO: 91366 - DNA, 835 bp, Arabidopsis thaliana columbia
  unsure (1)..(835): unsure at all n locations
ttttnnaacccacccnttccaaggggttntttncccccnattttaaaacaggttcnttcaaaccggnnnccttcnaaccgcccacccnattnaaattnttnttgngttgggccccaagggccggcaaaancnccaaanttccaggggttttnccnttccccggganttattcctcccttgaattnnattcccccgtnatncccgggggccaccctttcaccaggtattggaaccacccccaatcttgtgaaaccccaccaccattcaggagtggaaagttgaatcttggtgccctaccccaccagctcccaatggcacgcccactcaccacaaggtttaccaatggcatcagccatcagcagcggtggaagtggtggtggctcagattccccaagatcaggaaacagagccccagtcgatgatgtcattgacaaagtggttagcatggggttcccaagggaccaagtgagaggaacagtgagaacattgacagagaacggtcaagctgttgacctcaatgttgttttagataagctgatgaatggagatagaggagctatgatgcagcagcagcagcagcaaccgccaagaggttggtttggtggtcgttagctgtgttgtctctaattccggtttggctgacattgtatagtcttttatctctcatgtcagatttcctcgaacatatcttttggattaccttggtgtttcatttgtgacttcaatatttttaaaaaaaaaaaaaaagaaaaaaaccaaaaaaagnnnnnnnnnnnnnnnnnnnnnnnnnnnnnnnnnnnnnnnnnnnnnnnnnnnnnnnnnnnnnnnagtcacc

SEQ ID NO: 91367 - DNA, 563 bp, Arabidopsis thaliana columbia
  unsure (1)..(563): unsure at all n locations
ggtgtttaccactttttgttacatctcttgcttttgcattttcttgaattagccatggtggcacattcactcgttcctctctcaccggctgctcacgccgccagactctcctctccatcgccgcggtcactgccgcaggctcctcccgtcgtccttgcagttccaccaattaatcgcaggacaattttggtggggctaggcggtgcgctatggagttggaacgctctggccgctaaggaggaggcaatggcggcagcaagacggccgcctccaccaccacctaaggagaagaaagacccgaccgtgaccggagttcaggccaaggtattggcgagtaagaagcgtaaagaagaaatgaaggcttccattgctaaacttagagagaaaggcaaacctgttgttgaagcaaaaccatcctcttcttcttcagaatagcatccgagcaacaatttaaaccctttccattaattcatctgtctaccaaattcatccctatgatgttaattcactactatttttcggggttnttcttangntggttttttggggggaaattnannggg

SEQ ID NO: 91368 - DNA, 481 bp, Arabidopsis thaliana columbia
gccggccctatacgactttattagggaaagctggtacgcctgcaggtaccggtccggaattcccgggtcgacccacgcgtccgagatgtaccttctagcttccgatttcccccgatgaccaagaagccacaatggtggtggagaactttggcttgcctgccttacctaatgccactgcatgaaacttggatgtatgcagaaaccgcttaccatctccacccattcctagaagattttgaattcttaacctacccatttctaggcgccataggaagattaccaagctggttcctcatggcttacttttttgtagcttatctagggatagtgcgaagaaaagaatggcctcacttcttcaggttccatgtagtgatgggtatgctgcttgaaatcgcactccaggttatagggaccgttagcaagtggatgcctcttggagtctattggggtaagtttgggatgcatttctggactgctgttg

SEQ ID NO: 91369 - DNA, 749 bp, Arabidopsis thaliana columbia
  unsure (1)..(749): unsure at all n locations
ccccaagaccagaaccccaagggggggagacttgggttgccgcctccctaaccccggcataaactggaggaagaagaaccgcttccatccccccctccttaaagatttgaatttttacccacccattttaggcgccaaaggaagataccaagcgggttcctcagggcttccttttttgtagcttatctagggatagtgcgaagaaaagaatggcctcacttcttcaggttccatgtagtgatgggtatgctgcttgaaatcgcactccaggttatagggaccgttagcaagtggatgcctcttggagtctattggggtaagtttgggatgcatttctggactgctgttgcgtttgcttatctgtttaccgcccttgaaagcatacggggggcccttgcgggtatgtacccacacatcccgtttgtctgtgatgctgcctatatccagattccgtgcgactaagaagaaacaccattggatcggtatgaccccccctttttttttttttttgttaattaggcccctgttttgttgttacaatgactcttcttgaatgccaattatgtttgtaatcaacgtttcatgaacccacccgtcaaagttacaaacttttgacccnnnnnnnnnnnnnnnnnnnnnnnnnnnnnnnnnnnnnnnnnnnnnnnnnnnnnnnnnnnnnnnnnnnnnnnnnnnnnnnnnnnnnnnnnnnnnnnnnnnnnnnnnnnnnnnnnnnnnnnnnnnnnnnnnnn

SEQ ID NO: 91370 - DNA, 466 bp, Arabidopsis thaliana columbia
tacgactctctatagggaaacctggtacgcctgcaggtaccggtccggaatttccgggtcgacccacgcgtccggtgaattcaggtgggaatttgtgaagaataattgcgacaatggcatctggtgttttcgaggatgaagctgaaggaactataacgatcaatgaatatatcgataggcttgacgcacaagagctgggaatgttctctttctcctcgtgatcagttttaaagcttatgtatgtttctgatccttacgaaagtttaagacgcttccacattttcactccgtggttggtgataaatccgttagagttaagtgtagacaaacgtcttgaaaattggattcctgacctttaaattgactaccctttttctgaagctactgggtgggggctcggattgttatttgaacagtctctagaggtttcgggctaagctagtaaatgatagggggggggtctcct

SEQ ID NO: 91371 - DNA, 590 bp, Arabidopsis thaliana columbia
  unsure (1)..(590): unsure at all n locations
aatcgactcatttagggaaagccggtacgcctgcaggtaccggtccggaattcccggttcgacccacgcgtccgctcacaataattctctcacattcccatggaaggtaaagccatcgcgacgtctctcggtggtgatcgtgtattgatattcccgtgttctcctcgctcttccttcgtttttacatcccggctctctagcctgcctctaaagcgtgcgtctatcggtggtgctgtctcttgttccggcgtcaatggcttgactcggtggaattccattgtttcgactcgcccactcgttcctgttcgttcaattaactcggaatcggactcggactccgacttccctcacgagaatcagcagggaaatccaggcttggggaaatttaaggaataccaagaatggggctcatggaccgccaagttctccgggggagcaaacattcccgtttcttatgccccaaattgcctcagagcaatcctcaatacccagaatttttttcggggggaaaaaaaccgntctttnggntnnccatggctgggaatttttcctggtttttaaggaacnttncgtgcttttnatttgcaagt

SEQ ID NO: 91372 - DNA, 431 bp, Arabidopsis thaliana columbia
ctcacaacaatggcgtcttcgctgtgtgtatcaaattccacaatttgccctctgcctaatgtatcttcgcagccgctgctatcattctcccactctctcaggccattcatttccaagtcgaaacctatgtgtgcctcgatacagaagagagatggctctcaatttgtggtgaaatctcaggctcttgacttctctggaactttctttgaaggtggattcgggtcggatgatgacccgacttctccttccgggtcgggagtctcaactgcccttgaagacaaaccggaacctcagtgcccacctgggctcaggcagtacgaaacaatggcggttttgagaccagacatgtctgaagatgaacggcttggtcttacccagaaatacgaagagttgcttgtggcaggaggtggaatgtatgtggaagagtttaa

SEQ ID NO: 91373 - DNA, 515 bp, Arabidopsis thaliana columbia
ggcccgcatcatcaaggatcgaaaacattaagtagctagttaagagagagagagagatggagatgaacattaagtttccagttatagacttgtctaagctcaatggtgaagagagagaccaaaccatggctttgatcgacgatgcttgtcaaaactggggcttcttcgagctggtgaaccatggactaccatatgatctaatggacaacattgagaggatgacaaaggaacactacaagaaacatatggaacaaaagttcaaagaaatgcttcgttccaaaggtttagataccctcgagaccgaagttgaagatgtcgattgggaaagcactttctacctccgtcatctccctcaatctaacctatacgacatccctgatatgtcaaatgaataccgattggcaatgaaggattttgggaagaggcttgagattctagctgaagagctattggacttgttgtgtgagaatctagggttggagaaagggtacttgagaaggtgttcatgggacaac

SEQ ID NO: 91374 - DNA, 572 bp, Arabidopsis thaliana columbia
tatacgactcacttagggaaagctggtacgcctgcaggtaccggtccggaattcccgggtcgacccacgcgtccgaaacagtggaccacctgatcaacaatgctggagtacctcaaactgttatattcgaagatttcacacaaattcaagacgctaattctataatggtgagtttttaatgatattcttttacaagttcattaataatccatatatttacaaaaatgcttagctcttcttaaacatgatttgattgcttcaaacgcaagtattaatgaacttgtaaacttaggttttgaatggatgttgtggttagtgtggactaatccctcagcggtctagtctatactgtttttggggcggacaataaaccgctgcggagttagtttaaagacggtccacaattagcccgcaacggttttattttatttttttgggtctgcactgtagacggttttgttcgcttggaccgctgtaatcattcgaaaccttagaatttagacatgtacgctaaattttgattgcttcaaacgcatgtattaatgatgtagttaatgttaatctgatacatc

SEQ ID NO: 91375 - DNA, 414 bp, Arabidopsis thaliana columbia
cccaagagtccgctctttccccatcaaaaaaaacaaaaacaaaacacaactctgtttctctcatcttaaaattcatgtaaaaaaaatctacaaatcaaagagagaaacagagtaaagagaaagagaagaagatggcgcggaaatactttcagagagaagttttgccggtaacggctttggtaataatggaatgtgcaaacgttggtttaaacactctgtttaaagcagcaactttgaaaggcatgagctttcatgtcttcatcgtttactcttatggtctcgctgctctgcttcttcttccttctctgttttgctctttcagattaagaactcttccaccgatgaatttctctattctctacaaaatcgtgctcttaaggattattggatgctgttcaaacataatgggataca

SEQ ID NO: 91376 - DNA, 554 bp, Arabidopsis thaliana columbia
  unsure (1)..(554): unsure at all n locations
nnnnnnnnnnnnnnnnnnnnnnnnnnnnnnnnnnnnnnnnnnnnnnnnnnnnnnnnnnnnnnnnnnnnnnnnnnnnnnnnnnnccacgcgtccgggttcatcggtttctcttttccgatggcaaaagcttgcctcttgcagtctactctactcccagcttactctccacttcacaaacttcgtaatcaaaacatcaccctctctttctcaccgcttccgctgtcccgatgccgtcccggaatccactgctcagtttcggccggtgagactacaatacaatccatggaggaagctccgaagatatcatggggatgcgagattgattcacttgagaacgctacttctcttcagaactggctctctgattcaggtctccctccgcagaaaatggctattgatagagtcgacatccgtgagcgaggcctcgtcgcttcacagaatctcagaaaaggagagaaattgctcttcgttcctccttctctcgtcatcagtgctgattccatcaatgcaaggttaaagtatctggctttcatgaatgtgaatatctaatatcg

SEQ ID NO: 91377 - DNA, 573 bp, Arabidopsis thaliana columbia
  unsure (1)..(573): unsure at all n locations
nnnnnnnnnnnnnnnnnnnnnnnnnnnnnnnnnnnnnnnnnnnnnnnnnnnnnnnnnnnnnnnnnccacgcgtccggctttcttcagcaccatgggatatttgatctctcctacaatagattgtctggccctataccagaagaacttggcgagtgtttggtattggtagagatttcactgagcaacaaccatctctctggagagattccagcttcactctctcgtttgaccaacctcacaatcctggatctatctggaaatgcactgactggatctattccaaaggagatgggcaactctcttaagttgcagggattaaacttggcgaataatcagctcaatggccatattccagaaagctttggcttgttaggtagcttggtgaagctaaacttgactaagaacaagcttgatggaccggttcctgcttctcttgggaacttgaaagagcttacacacatggacttgagctttaacaacctaagtggcgagctttcatcagaactgtctacaatggaaaaacttgtcggcctctacattgagcagaataagttcaccggngaaataccttca

SEQ ID NO: 91378 - DNA, 535 bp, Arabidopsis thaliana columbia
aatacgactcattatagggaaagctggtacgcctgcaggtaccggtccggaatttccgggtcgacccacgcgcccgcggacgcgtggggcgaagctaaaggagatgggaggaaccaacatatttgcccatgggaaggtagaagcaagagcctattttaggcggtgtccgtaaaccaccaggtggagagacaagcatcgcacttgtttaatatcatctttggcgggaccaacttacctcttttataaaccgcgggttgttcggtgtgtgttcttgtggtttcccatacacttcagctcaaagtgtgatttgtattttgccggtttcgtggttggtatttttattgagttggtttttaagccgttagggctttctaatgtaaggtcgagcttaaactgttgggaagattataagcatttctatcgggacagaggatgctgctcggttcagaaaagaagcacaaaaaaaaaaagggcggccgctctagaggatccaagcttacgtacgcgtgcatgcgacgtcatagtaatctatagt

SEQ ID NO: 91379 - DNA, 429 bp, Arabidopsis thaliana columbia
tcaagggagatgcggcgtcatctaatgttgaaaagcatctgagtcaagcgaagctaaaggagataggaggaaacaacatatttgcagatgggaaagtagaagcaagagactatttaggcggtgtccgtaaacccccaggtggagagacaagcatcgcacttgtttaaaatcatctttttcggtaacaacttaactcttttataaaccgcggttgttcggtgtgtgttcttgtggtttcccatacacttcagctcaaagtgtgatttgtattttgcggtttcgtggttgttatttttattgagttggtttttaagccgttagggctttctaatgtaagttcgagcttaaactgttgggagattataagcattactacgggacagaggatgttgcttgtttcagaagttattgtttttcttttccgggtct

SEQ ID NO: 91380 - DNA, 864 bp, Arabidopsis thaliana columbia
tttcatttcatcttcaccaaactctcatggacttcgattccgcagtgagtttttatttcctctcctaaccaaatctttactctacttattaattttgatataaacaaaccctttgaattcatttgttttacaaatttggaccgtaatttttgaacattacaaaaggaaaccctattatctgttttgttttctttaggacaaacgagagagtgtggaggagacagtgatgatggaatacgatgaagaaaccaatcaattcgacgttgaattttgtccggttgagcatcctattgaaccggaggaagaagatcgtccggttaaatgtcccgtaccaatatcatcttctctcatccacaaaccaaaggagaaatcgaaaccggggtgggttaaacacagagccagcagctacgaaactccggtttatccaccgccacgtcatcatgtacgtaacgtacgaaagagacacaactcgtttgacgtggaagggaacaacaatttcttcacgagatctcatgatgatgacgaaaccacctctcgaagatccaacgtcacgttctaccgagttcttcaacaagttcaggagttcgagtcgtaacaaaatatcaaatctctttgagatgtttatgttggggtaatgtagtagttctatgtagtaccaaagtttcggtatacttgttatttatattgttattcggtgataaccggtccggtcagattcggttaacagcttaaaaaatgttataatttctacttttctagtttcttatgagtgcatgggcattttcagtataatcctacgttagaatgggccgtgttttatgaaagtcaatatatgggcttaactgggctatactttctaagttc

SEQ ID NO: 91381 - DNA, 539 bp, Arabidopsis thaliana columbia
  unsure (1)..(539): unsure at all n locations
nnnnnnnnnnnnnnnnnnnnnnnnnnnnnnnnnnnnnnnnnnnnnnnnnnnnnnnnnnnnnnnnnnnnnnnccacgcgtccgggccaactgattctggtttcggtggatgaacaatgaacagaacgagagagatcctgataacatcaacaacaagaagaagaaaaaggaatctccattgttgatttactccgtctcgaaagcaaagaaacgaatcgtgtctaagttcagaaggagacccttatcgccgaatacgtctccttcttctgggttttggaaaagagtctgcttttgtggaattgaacctgaccctgaagatgacaactttaagcttagggttctgctacagaccaatgatttcttctccaaggattctaatccacatctctgtttgtaagttcagatatatatatatatatatatatatatagcgtagttttcatttagtataccaccaatatctgtatagatcttcttttaaacttcatcaatatcaaaagtgtgttcatcaatgttaccaaagatttttgcagaacagagt

SEQ ID NO: 91382 - DNA, 1028 bp, Arabidopsis thaliana columbia
  unsure (1)..(1028): unsure at all n locations
gggtgaacttaaagataaagtggttcttgtgacaggtgcttcatctggtatagggagagagatctgtcttgatctatgcaaagctggttgtaagattgtagcagcagctcgtcgtgttgatcgtctcaactctctctgttctgaaatcaacagctttggtgcaatcggagtccaagccgcagctcttgagctagacgtttcatcagacgcagacactattcgaaaagcggttaaagaagcttgggaaatctttggaacgatcgatgttttgattaacaatgctggaatcagaggcaatgtcaagtctagtttggatttatcaaaagaagaatgggacaaagtctttagaaccaactggaccggatcttggttaatatccaaatacgtctgccttttgatgcgtgacgctaagcgtgggggctcggtgattaacgtctcgtcgatctctgggcttcatcgcggtttgttgcgcggtggactagcgtatgcttgttccaaaggtggtgttgacaccatgacgaggatgatggctattgagttagctgtttataagatcagagtgaactcgatcgcacctgggattttcaggtcagagatcacacaaggtcttttccagaaagagtggctcgagaaggtaacggaaaagattgtaccattaaagatgcaacagactgtggatccggggcttacatctctcgttcgctatctcattcacgattcttcccaatatgtcaccgggaatacatacatagtcgattccggagctacactccccggtgtgcccattttttcttctctttgaaaatcttagtcaaaatcttctgtgcttgtacatacaccgtgataagaatgatgtcttttccaataaatggcagtactggcattaacattgaatttactttctcagatatgtttttttgtttatgtgtccaacaaaaaaaaaaaaaaaaaaaagggcggaaannnnnnnnnnnnnnnnnnnnnnnnnnnnnnnnnnnnnnnnnnnnnnnnnnnnnnnnnnnnnnnnn

SEQ ID NO: 91383 - DNA, 999 bp, Arabidopsis thaliana columbia
gaaaaaaggggccggccgacgcgaacgctctgggacaaaatacttcaaaggtttgtgttatactccgaagatgatactaaaaaagttggtgttcttattctcagtgttgggccttactgacatctacaaggtgtggttcaccgtgaccttaaacccgagaactttcttttctctaccaaggatgagacttctcctctgaaagcaattgattttggtctttctgactatgtcaagccagaccagaggttgaatgatattgtagggagtgcttactatgtggccccggaagttttacacccgacatatggaacagaagctgacatgtggagtataggagtgattgcttatattcttctctgtggcagtcgacccttttgggcccgtactgaatccggaatctttcgagctgtactaaaggcagaaccgaattttgaagaagctccttggccttctctatcacccgaagctgtagattttgtgaagagattgctaaacaaagattaccgtaaaagactaactgcggcccaggcttcgtgtcatccctggctggttggctcgcatgaactaaagattccatctgctctgatcatatacatgcttgtaaaagtgtacataatgtcaacttcattgagaaaatcggctttagcggctcttgccaaaacattaactgtaccgcagttagcgtatcttcgggagcaattcacattgttggggccaagcaaaaatggatatatctcgatgcagaattacaaaacagcaatcctaaagagttcaacagatgctatgaaggattctcgagtgtttgattttgttcacatgataagttgtcttcaatacaagaaactagactttgaagagttttgtgcttcagcattaagcgtttatcagctcgaagcaatggagacatgggagcaacatgcacggcgtgcttacgagttgtttgagaaagacgggaataggcccatcatgattgaagaacttgcatcggaactcggacta

SEQ ID NO: 91384 - DNA, 347 bp, Arabidopsis thaliana columbia
ttctctaatggcttcctgtcaagcaagcttgatcggtaggtccaaagattcctgcaacgttcctggcttcagaactacaacggagcaggttgtgtttaagtccaagatatctaatctctgtgtctatgggtttactgctttaaatttcagacctttagagaagaatcttcatttgtgtggcaagtaatagagaacaaactgcaataatctaagtctttgtttgtttctactctaactttgtccttaagacaagaacaggatcactctgttctgtcttcttgtcctctgtattttatccttagacttttgttattttatttatatatgagttttagtttgttaaaaac

SEQ ID NO: 91385 - DNA, 544 bp, Arabidopsis thaliana columbia
  unsure (1)..(544): unsure at all n locations
nnnnnnnnnnnnnnnnnnnnnnnnnnnnnnnnnnnnnnnnnnnnnnnnnnnnnnnnnnnnnnnnnnnnnnnnnnnnnnnnnnnccacgcgtccgctagttttgctttccttttttttttgtaggaaagggttaattatacgtaacacagaaacaaaaacaattctctttttcctctagaaaaagagattaaaaaaaaaatggaggggaggttattgacggtgttggtctgcctcgtctctacggtggcgatcgtgaacgccggtgatccttacttcttccatacatggaacgtgacttacggaactgcctcacctctcggtgttcctcaaaaggtgattctcatcaacggtcaattccctggtcctaaccttaactcaacctctaacaacaacgtcgtcatcaatgtcttcaaccacctagacgaacctttcctcttgacctggagtgggattcagcataggaagaactgctggcaagatggtgtggctggaacttcatgccccatcccagctggacagaactttacttaccatttccaaccta

SEQ ID NO: 91386 - DNA, 550 bp, Arabidopsis thaliana columbia
atacgactcacttagagaaagaacgtacgcctgcaggtaccggtccggaattcccggttcgacccacgcgtccgctcaaatggcgctctcctctttcaatctctcttctctattattcctcctcttcttcactccttccgttttctcgtattcgtatcaaccttctctaaaccctcatgaaacttctgctacaagtttctgcaaaaacacaccatatccagatgcatgttttacctccttaaaactatccatctccatcaacataagccccaacattctctctttcctcctccaaaccctccaaacagctctttccgaggctgggaaactcaccgatctcctttctggcgctggggtctccaacaacctagttgagggacaacgtggctctcttcaagactgcaaagatcttcaccacatcacttcttctttcttgaaacgatcaatctccaagatccaagacggtgttaacgattcacggaaactagccgacgctagagcgtacctaagcgccgctctcaccaacaagatcacatgcttggaaggtctt

SEQ ID NO: 91387 - DNA, 612 bp, Arabidopsis thaliana columbia
  unsure (1)..(612): unsure at all n locations
taaccaacggacataaataaaatctactttttcttctgatattttatctaaacaccaaagaaatgggcggcttttggtttttaaagactgttgtttttgtttctgtctgtaaaacataaaagaaaattttattgctcttgaagatattaaaaatcagacaagctgttcaagaaaaatattattctgttgaataaagtaaactgatggggaagagaaggtttcagaaagcaaaggaaacgtcgtcagtagcagaagcttcatctccgacggagtctcaggctacaaggagacgaagaggaaggccaaggaagaatcttgagaacccagaagatttcaagaaggaagaatctgaggaagacgaggattacgaagagtacgaggacgaagaagaagaagacgaagaagctgaggtggttattaacagagagaagctgaagaagaaagttaggagcagcagtggtagtatggaagaggagcaaaagatgaaacatgaagagttagaggaggaggagaagccggagatgacggtcaaggtagtggttccaccgccgtcntctngacggtcgaggaggaaaagcacgcccgtnaagagcttgtaaactttanttncnt

SEQ ID NO: 91388 - DNA, 577 bp, Arabidopsis thaliana columbia
  unsure (1)..(577): unsure at all n locations
ttggctttagtgggaacaccatagctgaaggtcttgtggttagcacctgcttaggcggcntttattgggtctctgttcagtgggttggtagctgatngtgttgggcgccgtagagtttccagttgagcgctttaccaatgattgttggagcttctgtgagtgcatcaactgagagtcttatgggcatgctcctgggaaggtttttggtcggaattgggatgggcataggtccttctgttacagctctctatgtcactgaggtgtcacctgcttatgtgagaggtacatatgggagttctacccaaatcgcaacatgtattggactcttaggttcgctgtttgctggaatcccggcaaaagataacttgggctggtggcgcatatgtttttggatatccacagtcccagctgcaatgcttgctgtcttcatggaactctgcgtggaaagtcctcagtggctttttaagaggggaagggcagctgaagctgaagctgtgtttgagaagctattgggagggtcgtacgtcaaagctgctatggcagagttagtgaagtcggataggggagatgacgccga

SEQ ID NO: 91389 - DNA, 474 bp, Arabidopsis thaliana columbia
ccgggccggcccacgcgtccgacaatcaatcatttctttgttgcgaaccaaacttgtgatatggcgacaccgaatcaggaagccgccgacactttcatcagcatcaccggcgcttctgacgccgtcgcccttcagaaactcgaggagcatcgtggtgatcttaatcaagcagtgaatgcatatttcagcgaaggagatcgaaatgtagtacgtgaagcgccggttaatgatgatgatgaaatggatatagatgatgtgattccggctccacaatctcctctctctatgttcaatgcagctagaacaattggccgtcctcccttttcgcttttggatttcggactttgctagacgtgtatttgatagcgatcctcttatgccacgccctccgtttgttagtcatcctagagaggttaggcagatacctatagaggttaaggatagcagtgggccatctggacgatctagtgatgc

SEQ ID NO: 91390 - DNA, 555 bp, Arabidopsis thaliana columbia
cttccttttgattctctctgccactctcatgtgacacaattataccattttttctttgatattttgtacaaaaaacataacattattttctctctattttcattaactcatttctgtatttttcattaactataagaaagtacagaaataaatataatacgcattaaaatgaagaaataataaaacgagagaaaaggtttaaggaaagggaaagggttagtgtagtgttgacaacgccactcttgactctctttctcttcttcttctcgagatcctgaaaatgtgactgacagattcttcaacttcactctcttcttcttccattcactgaactcaaaccaccccctgtgagctatgacccaccaaacccatcagcgtcgtcgccgtcgtcactccgccgtctgtcaccgtcatccttcttccaaacccaccactggtttctgtgccacctgtctccgtgaacgtctctctaccatcgaagctctatcttcctctgtctcagcttccactgagctccgccgtgttcgctcctactctgttcgtgacgcatccgct

SEQ ID NO: 91391 - DNA, 557 bp, Arabidopsis thaliana columbia
gagcactaatacgactcacttagggaaagccggtacgcctgcaggtaccggtccggaattcccgtgtcgacccacgcgtccgcccacgcgtccgcgccactcttgactctctttctcttcttcttctcgagatcctgaaaatgtgactgacagattcttcaacttcactctcttcttcttccattcactgaactcaaaccaccccctgtgagctatgacccaccaaacccatcagcgtcgtcgccgtcgtcactccgccgtctgtcaccgtcatccttcttccaaacccaccactggtttctgtgccacctgtctccgtgaacgtctctctaccatcgaagctctatcttcctctgtctcagcttccactgagctccgccgtgttcgctcctactctgttcgtgacgcatccgcttctgttttggaccagccacgacgcagatcgtgtgatgttaggtctaatcacgacgacgatgatgatgatgagctgctaaagagctcgattcgattccccattgtaccggatttgatagaggatgaagaagaagaagatgatg

SEQ ID NO: 91392 - DNA, 624 bp, Arabidopsis thaliana columbia
aggacgcgtccgcccacgcgtccggatggaattgattgttgatttggatgatgaggtcatggagaactatttagaaggagttgagcctgacgaggccacggtaaagagagtgtgtttgaaaaggaaccatcacgggcaagtttgtgccaattctatgtggttcagcctttaagaacaaaggagtgcagccattgctcgacgctgtggtcgattatctgccttcgcccgttgaagtcccgccgatgaatggaacagatcctgagaacccggaaattaccattatacggaaaccagatgatgacgagccatttgctgggctagcattcaagatcatgagtgatccttttgtgggttctcttacatttgtgagggtttactcagggaaaatctcagctggttcttacgtgttgaatgctaacaaaggaaagaaggagagaatcggaagactcttggataatgctcgcaaacagcagagaagatgttaaagtggctttgacaggtgacattatcgctcttgcgggtctcaaagatacaatcactggtgaaaccttgagtgatccagaaaaccccgttgttcttgaacgaatggacttccctgatcccgtcatcaaggtagcgattgag

SEQ ID NO: 91393 - DNA, 459 bp, Arabidopsis thaliana columbia
gtgtgtgcaaaacgtctctctctctgtctcataaaatctcagagaagaaacatcgtcgggtcaggtcgaagaaaggagagaaatgagtggtcacgattcgaaatacttctccacgacgaagaagggagagatccctgagctcaaggaagagcttaattcccagtataaggataagagaaaagatgcagttaagaaggttattgcggcgatgactgttggaaaggatgtttcatcacttttcactgatgtagtcaattgtatgcaaacggaaaatttggagttgaagaagcttgtttacttgtatctcataaattatgcgaaaagccagccagatcttgctattcttgcagtaaatacctttgtaaaggattcacaggatccaaatccgctgattcgtgctttggctgtgcggacaatgggctgcattcgtgttgataaaatcacagaatatctatgtga

SEQ ID NO: 91394 - DNA, 448 bp, Arabidopsis thaliana columbia
  unsure (1)..(448): unsure at all n locations
annnnnnaaaaaaaactctccatatatctattacttctacgctagctagagagggagattagggctcgtaagtgatggaggaaggaaagaagagggattgtatggagaaggcaaggccattcatttcaatggtagtgttgcaagtagggctagcaggaatggatattctctcaaaggctgttctaaacaaaggcatgagcaattacgtccttgttgtttaccgtcacgccgttgcaaccatcgttatggccccgttcgccttctatttcgacaagaaggtgagaccgaagatgacactgatgatattcttcaagatatcactccttggtttactcgagccagtgatcgaccagaacttatactatctcgggatgaaatatacgacagctacatttgcaaccgccatgtacaacgtcctacccgcaatcacnttcgtccttgcctatat

SEQ ID NO: 91395 - DNA, 633 bp, Arabidopsis thaliana columbia
  unsure (1)..(633): unsure at all n locations
atcgccgggaaaaaatcacagatttcttcgacgccgccgatgaggttccggtacgcaatggtttgttcgtcgaatcagaaccggagcatggaagctcacgctcttcttaagagacaaggactcgacgttgcttcgtacgggactgggtcacatgtaaaactacctggaccatctctgagagagccaaacgtttacgactttggaactccttacaagcagatgttcgatgagctcaggcgcaaagatcctgaactatacaagcggaatggtattttgcagatgattaagaggaatttatccgtgaaacttgctcctcaaagatggcaagataatgctggtgatggtgtgtttgatgtggttatgacttttgaagaaaaggttttcgattcagtccttgaagatctcaacaacagagaacaatcacttacgaaaacaatacttgtgatgaacttggaggttaaagataaccacgaagaagcagctataggggggccgactttgcctttggaanccctgnccaagagatttgaaagggnattgaaacntggggaagattcgntccnttgncatttgttnccgggttttnnaaaaccaaccnaggnggnaaccggggctaagnnncccctttccccg

SEQ ID NO: 91396 - DNA, 373 bp, Arabidopsis thaliana columbia
caagcgtcaagctcacacaccattctccacctgacactattgcctccgactccgtccgtctcctttcccgtgaaactctccgaatcagcgcctctctcgcttctcctcccggtgatgatctccctcctcactctcctccacctccagattctcaatttcttcacgcgactctgagattgatctggtgcgaagaaatcgatggccggcggtttatgtatgtcgctgagagcgatggctctgggagattcaagaagaattcagcgcgcgctattagcttggagtctcctcagactccttgtgatgaagtggcctcgtctcttagatctcacgttgcacctgaagggtcatcctgggagtgttaatgagtctgatg

SEQ ID NO: 91397 - DNA, 449 bp, Arabidopsis thaliana columbia
  unsure (1)..(449): unsure at all n locations
aacaactggtttcgcttctccttctacagagcttccctcgtttcctccgccggagagacactccattaaaatcccttcttcatcgatccttcattagatttacaacaacaacaatgccaagcgtcaagctcacacaccattctccacctgacactattgcctccgactccgtccgtctcctttcccgtgaaactttccgaatcagcgcctctttcgcttctcctcccgttgatgatctccctcctcactctcctccacctccagattctcaattttttcattcggctctgagattgatctgtttgcgggggaaatcgcatggccgtcggtttaaagtatgtcggttgagagcgattggttctgggagattcaagaaggatttcaagttcggtggctaattaagntttgggaggnctcccnaagactcctttttgaanggaagnngggnt

SEQ ID NO: 91398 - DNA, 871 bp, Arabidopsis thaliana columbia
  unsure (1)..(871): unsure at all n locations
tattcgccaagctctaatcgactcactatagagaagctggtacgcctgcaggtccggtccggaattcccgggtcgacccacgcgtccgaagctctctctctgtttctgcattacaaaaagtgtttgttttcaaggtttctctctttcacttctctttgttttcttcatttcaatttctggattttgcttgtagctacatttggtctcactctattccatggctgacactggtgaggttcaatttatgaagcctttcatctcagaaaagtcatctaaatcattggaaatccccttgggattcaacgaatacttcccagcaccatttccaataactgtggacctcctggactatagtgggagatcttggacggttaggatgaagaaaagaggagagaaagtgtttcttacagttggttgggagaattttgtaaaagataacaatctcgaagatggcaagtatttgcagttcatctatgaccgcgacaggaccttttatgttatcatatatggtcataacatgtgtagcgaatatagagacttccctcaagtcgcagtagaggttgatgactatgaaaacggtgaagaagaagaagacggcgacgatcaagacaaacatcagtaactaaaatttgggtctactttaagttgctttaagtttaagtagtcagttttcatgttggatttatgtaaccagttgtttagtttaaatattacgaatactagtatttgctttctgctacattctttggaacatggtttaaaagatttactgtgtattgctatcaaaaaaaaaaaaaaggggcggcgctctnnnnnnnnnnnnnnnnnnnnnnnnnnnnnnnnnnnnnnnnnnnnnnnnnnnnnnnnnnnn

SEQ ID NO: 91399 - DNA, 596 bp, Arabidopsis thaliana columbia
gaattgttttaggtgccactatagaagagctatgacgtcgcatgcacgcgtacgtaagctcggaattcggctcgagctcttcttcaaatccagtagagagattcaagacgagtctcatcgaaagttcgaatctttcgtcatctgattagctttctcttagggtttatttcgatttcgatttagtgttctccatcaatggcgacacccatggttagttccgctggaggattactagcaatgctcaacgagcctcatcctgttttgaagcttcatgcgctctctaacctcaacaatttggttgaccaattctggcctgagatctccactagtgtccccatcattgagagtttatatgaagatgaagaattcgatctgcatcaaagacagcttgctgctttgctggtctctaaggttttctattacttgggcgagcttaatgattcgctgtcttatgccctaggagccggtcccttatttgatgtttcagaggattctgattatgttcatacgcttctggccaaagcaatagacgaatatgccagtctcagatcaaaggcagttgagtcaaatgagatggtggacattgatcccaggct

SEQ ID NO: 91400 - DNA, 657 bp, Arabidopsis thaliana columbia
  unsure (1)..(657): unsure at all n locations
nnnnnnnnnnnnnnnnnnnnnnnnnnnnnnnnnnnnnnnnnnnnnnnnnnnnnnnnnnnnnnnnnnnnnnnnnnnnccacgcgtccgagagcacaaagcagcaactcgtaccacggatgaaaaagctacccagcaagatgttcagatcctttgtccttgacaaagattttgacgtgtcacttgcttatgagtctgagggtattctaccaccaggaaccacctcccctgtgtttgcacagtattctgtctctggtttggcggatgcatctgagaaatattcttctcggaatctatcagcacctatcaaggcaaatctgcatttctctctaagtagaagtgggattctcagtctagatcgaggagatgctgtaattgaaatcacagaatgggtagacgttcctaagaagaacgtgactattgatagtaacacaactacatcaacaggcaatgccactgacgagaattcacaagaaaataaagaagacctgcaaaccgatgctgaaaacagcactgcttcaaatacaacagcagaagagccagctgttgcttctctgggcacagaaaaaaagctgaagaagcggacattcagatacctctgccaggtagttgagaaaactgttggnccctggngcaccnattttcggaaagagtctcttt

SEQ ID NO: 91401 - DNA, 561 bp, Arabidopsis thaliana columbia
  unsure (1)..(561): unsure at all n locations
ttttcccagggtaaccacctatgcccaagattaccccaggctctaaaaccactccctataggaaaaactggtacgcctgcaggtaccggtccggaattcccgggtcgacccacgcgtccgggccaaggtcgatgaggaagaaggtgaagagtgctcgcaggagtggttccaactcgtggcatcattcagatttctctaactcggaagttgatcctattttcgcaatctaagatgcgtaaaagaatcgtgtatatatattgttgtatttggtgaagagagctagactatttagtgtataaagccccctgaccatcaaaaggcaaacactattgtcaaccattaaaggtttacactgctcaactcatctgtaaaacagttaacaattgtcttcttcggaaagcaaagaaaagcaaaggttcctttgttaggaaagaataaaccaacggcggaacgctctagaggatccaagcttacgtacgcgtgnnnnnnnnnnnnnnnnnnnnnnnnnnnnnnnnnnnnnnnnnnnnnnnnnnnnnnnnnnnnnnnnnnnnnnnnnnnnnn

SEQ ID NO: 91402 - DNA, 410 bp, Arabidopsis thaliana columbia
gcctacgttgcatcacgataatgaagaataacttatagatccatccccttttgtctcctaattcttaattttttagaaagagatcattattgttctcggatggagatatttagaaaggcaacgattgtacgtctccgtagccacaacgacaaatacctaagtgccgatgaagatcaagaatccgttcatcaagatcgtcgcggcacaacaaaaaacactagatggacggttgagatcgtacctggatccaatgtgatccgtcttcaaagctgttacggcaaataccttaccgccactaatattcatttcctccttggagccaccggcgaaaaggtacttcaaactctacccgaaaagttggattcatctgcggagtgggagccgctatcagacgatggtgtacacgtacg

SEQ ID NO: 91403 - DNA, 460 bp, Arabidopsis thaliana columbia
gtccgcatcattgtagcattctgaaggtacacgaagcgctaggcggcagactaaatccaacaaaaaggttactgagccaccgccaaagccgttgaacttcgattttctgaatgtgccggagaaggttacttggactgggataaacggtttcagaagaagcttggttgcctttcattggggactacaagattcaagaatctgtcagccaagattgggacagagtattcactcttgtcacctcccaaaacgctggaaaaacgatgttctagaagattgctgcagaaactcacaaattgtaataacacgcgctgctagattatcatatctacttagtatttactgatcgttggttggaatgcaggttaattttttagtagtgatagttttagtaacactttgatttgagttgtaatgtactttcttaacattttcttagataatttgaaggcaatgtatgtct

SEQ ID NO: 91404 - DNA, 368 bp, Arabidopsis thaliana columbia
gttgctttgcctcaaactcaaattttgaagataatttttttggtttctctgctactgatttcgaatctttacgcttaatcaattattcatctggattttcaaatccaatccttttcctccctggtgaccaagtaattggggattaacaaagggactggggctttattaagctcgaaacaattgttcttcactctggccgcttctgcaaagtcgtgtgcttctcgcacctctgcgcaggtgtggggtggccttgaagtggtgacttcactctgtcttccaaggatttctctagcttctatcatttggaggctccgtcgtgtttctgagggtcttacccttgattacggctaacatttactacgcccact

SEQ ID NO: 91405 - DNA, 893 bp, Arabidopsis thaliana columbia
  unsure (1)..(893): unsure at all n locations
tatacaactcatatagggaaagctggtccgcctgcaggtaccggtccggaattcccgggtcgacccaggcgtccgcacatacaaggccatgtgcagagacagccgtattgttcccggggctgcagcgactgaaatagagttggctcaaaggttgaaggaatacgccaatgcagaaatagggttggacaaatatgccatcaccaaatacgctgagagttttgagtttgtacccaagacccttgcagataatgctggcctcaatgcgatggaaatcatagccgctctgtacactggacatggatctggaaacacaaaactaggcattgacttagaggaaggtgcttgtaaagatgtttcagagacaaaagtatgggatctttttgcaaccaagttatttgcccttaaatatgcttcaaatgctgcatgccctgtacttcgtgtagaccagattataatggcgaaaccagcaggtggaccaaggagagatgcagctcaagctgcaggtcctggtccggggaagccttaagccggggaccaaatcccccgtggtgaaaccctcttctttggaacccttctgtccctgaaagtctgagaaaatttgggtatgtctcagtttaagatttgtgatctttgtaacgcccccccaacttaagtgttttgccttctttttctgttttcccctgttttggctcgtctcaacactcagattttccggtttagctagtgaaattattactaggatttttggcttaactctggattaaagcccaattggtttttaaaanaaaaaaaaaaaaaaaaaaaaaaaaaaaaaaaaannaagggcggccgctttaaaggatcccaggtaagggtgcgggtgcagtcaaagtcatagctgttctataggaaag

SEQ ID NO: 91406 - DNA, 879 bp, Arabidopsis thaliana columbia
  unsure (1)..(879): unsure at all n locations
gaaacaggtagctggaaaattaaaattggaattggctcaattcgctgaattagaagccttttcccaattttnttctgatctcgataaagctactcagaatcaattggcaagaggtcaacgattgcgtgagttactgaaacaatcccaatcagcccccctcacagtggaagaacagataatgaccatttataccggaacaaatggttatctggatggattagaaattggacaagtaagaaaatttctcgttcaattacgnacttacttaaaaacggataaacctcagtttcaagnaatcataggctctaccanggccattaaccgctgnagcagaaagcttttttgaaagaagggtnttcaagggcaactnggaccggnttccnacttcangggggaaggttttaaaaccgggancggggttattcccttaaatttttggcattcctttgggcaatttttacccctttaattttaaattaaattttttaaggaaattcctgggataggaggccataagtcaagtatatataatagaaagaagtatctaactaatatctgtttaatattaaatcttaaagcattcagaatttctttcttattctatttatttcttatcttttttccatagggggattatatataatatatagaaatggaaataatagataaatatcaatatagatatatttatattgcgtccaataggatttgaacctataccaaaggtttagaagacctatgtcctatccattagacaatggacgcttttcgcttttttttactttcctattgttaaaaaccaagaatgtgcaaaatctttttaagcaatgatgtatttgagtgaattcaatacacaattgctattagacaattctaata

SEQ ID NO: 91407 - DNA, 894 bp, Arabidopsis thaliana columbia
ccggggatttctgtctcaagagttgtatccgcctgctcatttaaagctatgaaacaggtagctggaaaattaaaattggaattggctcaattcgctgaattagaagccttttcccaattttcttctgatctcgataaagctactcagaatcaattggcaagaggtcaacgattgcgtgagttactgaaacaatcccaatcagcccccctcacagtggaagaacagataatgaccatttataccggaacaaatggttatctggatggattagaaattggacaagtaagaaaatttctcgttcaattacgcacttacttaaaaacgaataaacctcagtttcaagaaatcatagcctctaccaagacattaaccgctgaagcagaaagctttttgaaagaaggtattcaagagcaactagaacgtttcctacttcaggagaaagtataaaaaacgaaacggattattcttaatttttgattctttagtcaattttactctttaattttaattaattttttaagaaattctagaaatagaagtctataagtcaagtatatataatagaaagaagtatctaactaatatctgtttaatattaaatcttaaagcattcagaatttctttcttattctatttatttcttatcttttttcgaaatagatattatatataatatataggaatgggaattatagattaatatccatatagatatatttatattgcgtccaataggatttgaacctaaacccaaggtttaaaagacctatgtcctatccattaagccaaggacgccttttggctttttttaccttcccaatggtaaaaaaaaaaaaaaaaggcggccggtttaaaagaatccaggctaaggaaggggggcatgcgaggtaaaag

SEQ ID NO: 91408 - DNA, 484 bp, Arabidopsis thaliana columbia
aggaaagaaccttctttctgagccagaaagtttagttcgccttgttctgtctgtgtttctgcctcttcccctgaaatcgaacgatttataaaatcgtcgtctggctttcgacgatctgctgacgaagaccatggcgccgattttcagatccacttcccttatcgctttttctctcttcttcttcttctttgcttccactcttccgatctcatctgggtctgaggatagttacacgatcacgggtagagtgagggttccagcaagcaccgtgattggtcatgcagctaaattctcaaatatcaaagttatactcaacggtggacagcatgttactttcctcaggccggatggatactttaccttccacaaagtgccagcggggactcatctgattgaagtttatgcactgggctacttcttctccccagtgcgagttgatgttagtgctcggcatcgtggcaaggttcaagcaacacttacagaa

SEQ ID NO: 91409 - DNA, 602 bp, Arabidopsis thaliana columbia
taatacgactcacttagggaaagctcgtacgcctgcaggtaccggtccggaattcccgggtcgacccacgcgtccggatttcagggtctttctagatgaatggaaacctgtaataatggaactctcaaatagagaacctgagttacttttgactctactcaaggaagtccttgatatgatccaaaataatgaacggagaagacatgaaaccgaaaagccagtggaagaggtttctcaagttgagcaggtccctttcttgtttgcatggcttgtgagtcttctcaatggatcaaagcattttcagagaaacagttctctagaagtgaaacctccaagcattttccttatggaacttatacgtagatgtcttgtcttgggagccttaggatatgagctggttttgaaatcagcatttctactcgcagagattgtgggaggccgtgtcttaaaggagaagctcataaaacttcctcttatgcataaaagctctgcaattgttccattgaaacagagttctactcttgtaacagctagtacaacgctccttgagcaagagaagaatctcggtaatgcaggcaagagacttgagttcgtcaaacttc

SEQ ID NO: 91410 - DNA, 425 bp, Arabidopsis thaliana columbia
cccaagcgtccggttgaagcaccagaaccaacacccgtcaatccatcatcagtaccatcatcttctccttccactgacacatctattccaccaccggaaaacaacgacgatgatgatgatggggatttcgtcctaccaccacacattggattccaatatgcatcgccaccaccaccaatgttccaaggatattaaaaccaatgtagtagtgacagtgttacccatttttaacatttctgtccattttttccatgtgaattatttgtatcaaacgacaaagatattacaaagatgaaaaacaacgacgatgatgatgatggggatttcgtcctaccaccacacattggattccaatatgcatcgccaccaccaccaatgttccaaggatattaaaaccaatgtagtagtgacagtgttacccattt

SEQ ID NO: 91411 - DNA, 629 bp, Arabidopsis thaliana columbia
  unsure (1)..(629): unsure at all n locations
gacgaatttaaacaagttgtgacttctgaccttcagcgactgttgggggttgaaggtgaacccgtgtctgtcaaccattactattggaggaaagcattcccgttgtatgacagcagctatgactcagtcatggaagcaattgacaagatggagaatgatctacctgggttcttctatgcaggtaatcatcgaggggggctctctgttgggaaatcaatagcatcaggttgcaaagcagctgaccttgtgatctcatacctggagtcttgctcaaatgacaagaaaccaaatgacagcttataacattgtcaaggttcgtccctttttatcacttactttgtaaacttgtaaaatgcaacaagccgccgtgcgattagccaacaactcagccaaacccagattctcataaggctcactaattccagaataaactatttatgtattgtttggtctgttttcttgttgcatcactggtatggtctgtctaggtagaagaatatgatagggtgagggattttaggattgaagaatctttaaaacaaaaaaaaaaaaaaaagnnnnnnnnnnnnnnnnnnnnnnnnnnnnnnnnnnnnnnnnnnnnnnnnnnnnnnnnnnnnnnnnnnnnnnnn

SEQ ID NO: 91412 - DNA, 765 bp, Arabidopsis thaliana columbia
acaatgatctttgatgaatgcaacgaccaaactgatatcggtcgggttatacgcgatggaagggaagtcattctccaagcatataattgggaatctcataaatatgattggtggagaaacttggatggtaaagttcctgacatcgcgaaatccggctttacttctgcatggttgccaccaccatctcagtctcttgcaccggaaggttatcttccacaggacctttattcactaaactcagcatatggctctgagcatctattgaaatccttactgcgcaagatgaaacaatacaaagttagagctatggctgatatagtcatcaatcatcgtgttgggacaactagaggacatggtggaatgtataaccgttatgatggaatttcattaccgtgggatgaacacgccgtgacttcttgtaccggaggactgggtaaccgaagcacaggggataatttcaatggagttccaaatgttgatcacactcagcattttgttaggaaagatataattggatggcttcgttggttacgcaacaccgtcgggtttcaagatttccgttttgactttgctaggggttactcagcagactatgcgaaggaatacattggcgcagcgaaaccattattctcggttggagaatgttgggattcttgcaattacaatggccatggtctagactataatcacgatagccatagacagcgtataatcagttggatcgatgcgacgggacagatctctgctgcatttgacttcacaact

SEQ ID NO: 91413 - DNA, 474 bp, Arabidopsis thaliana columbia
cagttttatgttttgcctctctcccacttctgtaaataatcttctcacatccccgcacgattatgctcgagccgatcaacgagacacagagacgctaatgtatttgactcgattcgaatcattagtcctctaatcacaccgattgatttccacccacagatttcttgtctgaaatttagggttagcgaaggtttggatcaatgatgcaaggtgaagtacaattgcagccaccggattcacagaaactaagtgattccgctcctttgttaggagatcacaccaattcttcttcggcgtctccttctgctgcgtctgtggtggcaggaaatagcgatgagataaaggctgaagaagatttagagaacgatgcttcttcagctccttgttgtcgtatttgtttggaggacgatagtgaattgttaggcgatgaattgatttcaccttgtatgtgtaaaggcactcaacaattcgtgc

SEQ ID NO: 91414 - DNA, 532 bp, Arabidopsis thaliana columbia
  unsure (1)..(532): unsure at all n locations
nnnnnnnnnnnnnnnnnnnnnnnnnnnnnnnnnnnnnnnnnnnnnnnnnnnnnnnnnnnnnnnnnncttttttttttttttttggtaaaaaatatagtttatttacatatacaatgcataagaattcatgttgtggtttaattacaaatttcacatttaattaagaaccttcaagattgacctccgatgtaattgtcgaagtcacttatatccaggaatctagccaccccactagcttcaagaaacctgatcaaccacacacataaattcaaagttatcatcaaatgttttactcataaccatatctttcacactgagaagtagatcgatcatatatatgaaatttactggtctctgaagactcttgtcatggagagacatccaccaggaagcattgattgcatattaagtgcgatgttagggttatgaatactctgcctcatatgcacccaaccatactcttccccactctcttcatcactcactcttgccctgtacttgtgactcttcaatagcagatggatgatcattt

SEQ ID NO: 91415 - DNA, 903 bp, Arabidopsis thaliana columbia
  unsure (1)..(903): unsure at all n locations
nnnnnnnnnnnnnnnnnnnnnnnnnnnnnnnnnnnnnnnnnnnnnnnnnnnnnnnnnnnnnnnnnnnnntcccttttttttttttttttaagactgaaacctggtaaaaaatatagtttatttacatatacaatgcatagcaattcatgttgtggtttaattacaaatttcacatttaattaagaaccttcaaagattgacctccgatgtaattgtcgaagtcacttatatccaggaatctagccaccccactagcttcaagaaactggtctctgaagactcttgtcatggagagacatccaccaggaagcattgattgcatattaagtgcgatgttagggttatgaatactctgcctcatatgcacccaaccatactcttccccactctcttcatcactcactcttgccctgtacatctgaggcatcaatggcagatggatgatcatttgagtccaccaagcaaccttcagtcacccaacaatccccacacgtgcctaattcccaccctttcagttctccttcctcaatgtattgcctgaaagtctcaatggcttcaatgccttttgctttggcatctcttggctctgataaaatattcaaccggagctcaaccgcttctaacggctcctcaagatcttcgatcaaactaccgataccttcgtttgatcccgcgagtctcattctcaccatttcaattatggtcttcgccaccatgtatgcaccatcatccaagaagtgattctccttaaccgcaccatgtcctgaagtttccatcatgagatgagtctcgatgccgtctttgttcagctctactcccttgtcaatcacgtttctataccctactctatacggacaatgccgccctcctcgttacgtttacacctacatagccccatactcg

SEQ ID NO: 91416 - DNA, 913 bp, Arabidopsis thaliana columbia
  unsure (1)..(913): unsure at all n locations
gaaagacgtctgctgttactgtttctagaatggcttctttggatgcggagatacagaaacaactggatgaaaaaatgcgaatcaagactaggctgggaaatatatcaagagagcgaggtagaaaagaaatctttgcagatatgaaggcattaatttcttcgttccccgaggaaatgagttccatgcgtagtcaattaaacaattataaagagactgctggaggtattcattctctgcgggctgatgtccagtccctctctggggttctatgtaggaagacaaaagcctcgcgtccgttgcaattgagatcagctgattatgcttctcagttaggtgacctgaatgctacggtttgtgatttgaagaacagtcatgaggagttaaagttgtttctggacatgtataaacgtgagtccactgatgcgagggacatagctgaagccaaggaacaggagtacagggcttgggctcatgttcagagtttgaaatcatcccttgatgagcaaaatctggagttgcgcgttaaggcagcaaatgaagctgaagccgtttcccaacaaatgttggctgctgcggaagcagagattgctgatttaaggcagaaaatggatgattgtaaaagggatgtcgccaagcattctgatatcttgaaatctaaacatgaagaacatggaacatatctttctgaaatacagacaattggaagtgcctatgaggacattgtaccgcaaaaccaacagcttttgcttcaagttccagagaggggtgactataccatcaagcttttctttnganggcatacttctaggcagntcaagtacnctgntttcgtaatncacatggttagggttccgcaggcggcntntncanttcctttcaggatctcagnttagnngttgggntncngcnnttc

SEQ ID NO: 91417 - DNA, 573 bp, Arabidopsis thaliana columbia
gtgtaatagacgctgaagcatctgttgcagtgcttgatactgctgccggtgtatggttggatagaaatgggcaagttacttctgcacgtggaagtaagggacaaatcgatcaagatccgtcttttgaacttatgcgacgctgtcgccatggcgcggcatcagttggtatccggatctatgtgcatggtggtctaagaagagatgtgttacttgacgattttctagttgctgaaaattcaacattccagtcagacatcagttctccttggctagcatcagatagaacccagcaaagttctactcccaggttttcttatgccgcacgacctccttcaggctctgaaccaagcttctccatgtctgagggactgagcttggatgaaaattcgttggagaaattgacggaggcttctgcagctgaagcagaggtagctagttctgtttggcgagctgcacaactaggagctggtactctggatgaagaaccctctacctctgatgccagctcgccaattgtagaatctactactgatggtaccgcaaatgaaggagatgtcaggctttatccgagag

SEQ ID NO: 91418 - DNA, 830 bp, Arabidopsis thaliana columbia
  unsure (1)..(830): unsure at all n locations
cacgaggagatctggtcaaaggtcttgttctattgaattgtgctggcggtatgaacaacaaagctgcatttgatgactggagaatcaagctactgatgcctgtactcttacttatcgacttattactcaagcaaagaggaattgcttctgcactcttcaaccgtgttaaagacagggaaaatctggagaacatcttgacaaatgtttacgggaacaaggacaatgtagatgacacccttgtagagatcattgctggaccagcaaataccgaaggtgcactagatgcttttgtttcaatcttaacgggtcctcctggaccaaatccgattaagctgataccggaaataaccaaaccggttcttgtcttatggggagatcaagatggactaacccctcttgatggtccagtaggtaagtacttcacttcccttccggatcagttacctaacttcaacctctatgttctacaaggcgttggacattgcccgcaagatgatcgtccggatcttgtccatgagcgtctccttccatggctggctcaactttcttccacctagtttcgatttgtttagccgtgtacacttgtttataaatgtaaaacaaatctatctaattggaaaaagacagattcaaaatgatatttctggacccattttgtggtgtctgaatgtaagttgtaaagaagtcatggtggtagtaacttggtaaaggagtttgtttttggnnnnnnnnnnnnnnnnnnnnnnnnnnnnnnnnnnnnnnnnnnnnnnnnnnnnnnnnnnnnnnnnnnnnnnnnnnnnnnnnnnnnnnnnnnnnnnnnnnnnnnnnnn

SEQ ID NO: 91419 - DNA, 1526 bp, Arabidopsis thaliana columbia
cagcatgaagagtgcataaaggaaggttctgaggttttgggatatgatgcaaggaatgtcaaagccctatacagaaggggtcaagcttacagagatttgggcttgtttgaagatgccgtctctgatctaagcaaggcccatgaagtttccccagaagatgagacaattgccgatgtgttaagagatgttaaggaaagattggctgtcgagggacctggcaaggcatcaagaggtgtggtgattgaagacataactgaagaaaataatgttacttcccccgtccgtaaaaaaccgtcaaaagaggctaatggtcatgctcagggcgtaaagactgatgttgatggattgcaagctctcagagataatccagaagcaatcagaactttccagaatttcatttcaaaaactgatcccgatacacttgctgctctaagcggaggcaaagctggagacatgtcaccggacatgttcaaaactgcgtcaagtatgataggcaaaatgtcacctgaagagattcaaaaaatggttcaaacagcctcttcgtttaaaggagataaccctttcgccccgactgcgccatctaccgaaaacggttttacacccacacctgacatgcttaaacttgcatctgatatgatgggtaagatgtcaccagaagagcgtgagaggatgtttaacatggcatcgtctttgaaagcaaacgctccagcttcaacatcatacggcaatgcagaagcatctgaaccccgggaaagtttaggagccagtgggagttcttcgggaaattcccttgtggctccaagaaggcggtttcgaaccaagcatcccttctgctccgcctgctgacttacaggaacagatgagaaaccaaatgaaagatccagcgatgcgacagatgttcacgtctatgataaagaacatgaaccctgagatgatggctagcatgagcgaacaatttggaatgaagctttctcaagaagacgctgcaaaagctcagcaagccatggcttctctttctcccgacgccttggagaaaatgatgcgatgggcggatcgggctcaaaccgggatggagaaagcgaagaaagcaaagaaagtggttgttcggaaaaggcggattgatctttgcaatattaatgctcgttttagcaatggtccttcaccgtctcggctatattggaaactagaggaaacaacggtatcttaaggcttaatccttcgtgaagataaaaccagtcttcggtgggttcgtttagtttgtaaaactgtaacatcgttttatcttctttttctttcctctaactctcagctttttgttagtccacttgtgtctaaatttctttacactttcttctgtagtgaattttaaattagagaaaatacgaatatttccttatattcgttattttataaacataattatgcttctggtaaaaaaaaaaaaaaaaaagggcgaccgctctagaggatccaagcttacgtacgcgtgcatgcgacgtcatagattttctagtagttgcacctaa

SEQ ID NO: 91420 - DNA, 502 bp, Arabidopsis thaliana columbia
caatttccttatttagacaaaatctgttacttccctctcttgaatcgtcgtcattctcgagtgtctagatctagccaaaacttttgccatctctaaaatgtatctccattgacattttgagatctatctagctctgtttttctttttagaacaaaatggtggcgaaaccaaggtcaagatgttgttgttgtagtgtgttcatcggcgttatcatcttaatcgctataatcatcgctgtcattttcacaatcagacatagatcaaaccactccgatgatgatggctccaatgttaaaaactacgctaatgctctcaagatcgctatgcaattcttcgatatccagaaatctggtaagcttgaaaacaacgagatatcatggagaggagattcaggtcttaaagatggaagcgaagcaagtatcgatctttcgaaaggtttgtacgatgctggagatcacatgaagtttggtttcccaatggctttcactgctacagttctctc

SEQ ID NO: 91421 - DNA, 452 bp, Arabidopsis thaliana columbia
ataaaacaatctcaatactaatggctactaccaagctcgtctacattctcctcatcctattcaccttcaccgtatctccggcgatctcaacggccccggaacattgtgatagcggctttgataacccgtgcatcaacaaagctaaggctttaccactcaaaatcgtagccattgttgccatacttacaacaagcttgataggcgtgacctctcctcttttcagccgttacatttcgttcctccgtcccgatggcaatggtttcatgatcgtcaaatgtttttcttctggaatcatccttggaaccggtttcatgcacgtcttgcctgactctttcgagatgttgtcatcgaaatgtcttagtgataatccgtggcataagttcccttttgcgggttttgtcgctatgatgtccggtctagtcaactctagccattgactccattaccaccag

SEQ ID NO: 91422 - DNA, 513 bp, Arabidopsis thaliana columbia
cgactcatctgggaggctgaccgcctgcggtaccggtccggaattcccgggttgacccacgcgtgcgatgctcaacccccatacgaatcagacaagacactccttccaatataccatacttcatcctttgattcaaataccaaaaaaatttaaaccctaaaattcatttgagtctcttcctagtcatcaatctcttgaaaccctgattccattggtttctagattggccattgatcttgtttttaaataatgggaagctttcatcgccggactttttcttatgataaacttccgaacgaacccattaggctctccgttctcaaactagatggctcttcctttgatgtttacgtattgacctcggccaccgttggggatctcaaggttgctatagaaactgccttcagccatgtccccaagaagggaccctccaagatctcatggtcacacgtatgggggcatttttgtttgtgtttcggaggtcagaagttaattaccgatacggattgcatc

SEQ ID NO: 91423 - DNA, 624 bp, Arabidopsis thaliana columbia
  unsure (1)..(624): unsure at all n locations
cccaagcgtccgcatcccttcgctcaatgtctctgctggtcttttgggtttcttctttgtcaagacatggactaagatgctccataggtctggtctcttgaaacagccatttactcgccaggagaatactgttattcagacctgtgttgttgcctcttctggcattgccttcagcggaggttttgggacatacctctttggcatgagtgaacgaattgcgacccaatcaggagatgtatcccgtggcgtcaaggacccttctttgggttggattatcggtttcctctttgtcgtcagctttcttggcctcttctcagttgtccccctgcgaaagataatggtaatagacttcaaactaacatacccaagtggtactgcaacagctcatcttatcaacagctttcacacccctcaaggcgccaagctagccaagaaacaaagtgaggggtgtgggggaaatttttcntctttaagctncttcctggngtttcttccaattggnttcttttaancggaaggaggaaaaanttgtggggttctccaactttccaacattttgggacttaaaagncttaccaggtcnaagttctaacttttgnattnttncaagcaaccantattgtt

SEQ ID NO: 91424 - DNA, 711 bp, Arabidopsis thaliana columbia
cgcctgcaggtaccggtccggaattcccggttcgacccacgcgtccagcccacgcgtccgtggagaacattcttgttattggacacagctgttgtggtggaataaagggactcatggccattagaagataatacagctcccactaagacgtattaatctcaaaggctaatttaatcaaccatgagtgtcttgcctcctgttctcgctaacttgatggaaatgcttgaaaagggtagcgagttcatagaaaactggatccagatctgtgcaccggccaagaacaggatcaagcaggattgtaaagacctaagctttgaagatcagtgcaccaactgtgagaaggaagccgtgaacgtgtccttggggaatcctttgtcttacccattcgggagagaaagagtggtgaagaacaagcttgccataagaggagctcgctatgatttcgtaaaaggaacgtttgatctttgggaacttgacttcaagactacccctgcctttgccttctcttaaaaaattactactactccaatattttctctatgttgtttcaaattatgttcttataatcttcttctgttgcttctgtaatgtcatctttgctacttctattccaatagaaatgaataaagctttccagagccaaaaataatatcaaagaaagagttttacacaccagggcagccgctctagaggatccaagcttacgtacgc

SEQ ID NO: 91425 - DNA, 302 bp, Arabidopsis thaliana columbia
  unsure (1)..(302): unsure at all n locations
aagtgtacatggatttcatggggagaaagcacgacatgctgagcttttggctgccggaggtgaggagatgagagaacgtgaaggtaaagaatcagcaggtggtgttggtggtcgtagcgtaaaagatacggtagccgagaaaggacagcaagctaaggaaagtgtangagaaggtgctcagaaagcgggcagtgctacgagtgagaaagctcagagagcttccgagtatgcaacagagaaaggaaaagaagctggaaatatgacagctgaacaggcggcgagagcaaaagactatgctctgc

SEQ ID NO: 91426 - DNA, 301 bp, Arabidopsis thaliana columbia
gatcaaaaatggtctcataattctctctatatcttttatcactttcgaagattcctcttctcgcccacaaatcaaaatcatttcttttgccgactaattgaatttcttagaattcaacatacgcaatgaaaatgttctcgtcacaaagattagactaatccgactgtgtttttaatcaatcatcattttatttaggggagagaagttgtaaagttttgatttttttttctgggttttttctgtgagacccagaagaagaacagagagaggaagaatgagaagagaaaaatatctctttctc

SEQ ID NO: 91427 - DNA, 453 bp, Arabidopsis thaliana columbia
cggaagcgtggggcaaaagcagaagcgagactattcgccgagagctctcactaactattgaattcatcgaagaagctcgtctcgttgtcgcagaatctcgtcttctccgttctagaacaatggggaatgctcttgtcaaaaaagaaccaccgcctccggtggtactcgttcctccgctctttgattaccctcctctctccgcccgcactaggatgttggaatcatcatataatttgttgtttgggaagcttgcattgagatgtctatttgaggattactttgaagaagctaatcgattcacgggcaagtttttgttgaagcctactgatgatcctcatgtggatttggttgcatctgtttcgggtgctgtagatggtagagtggaaaggggattttgttgggaattgcggagtttcgctggcaaagtgatgttgatgatcctcatacttttgt

SEQ ID NO: 91428 - DNA, 558 bp, Arabidopsis thaliana columbia
  unsure (1)..(558): unsure at all n locations
cagctcnnnnnnnnnnnnnnnnnnnnnnnnnnnnnnnnnnnnnnnnnnnnnnnnnnnnnnnnnnnnnnnnnnnccacgcgtccgcggacgcgtgggaacaggctatggctgtcacaagcttggctcctccatgggtcatcttgagactagctttccggtcagtagcagcttcttcctgtctccacacaaatcaaaaaaccctaatcacgaatctctccattcccacttcgtttcctctccgacagtcagctttgagaagatgttacagtgcagaagctataaaaggagatgtagattttctcctcaaaggagttggagaccaagctgttgccaaagaagtcaagcaaattcttgaaatggcaagacgtgcatcatcaaaaagagaagttcttcatacagattttctcacaccacctattgttaaggaatcagtttcactattggaaaaatttgctgatgttaagatagttgctcaaggaggttaccctgaggctgaacggtgtaggatctcgattggacattctttgtgtcctaactagtgatccagatatagttgct

SEQ ID NO: 91429 - DNA, 527 bp, Arabidopsis thaliana columbia
  unsure (1)..(527): unsure at all n locations
cgnnnnnnnnnnnnnnnnnnnnnnnnnnnnnnnnnnnnnnnnnnnnnnnnnnnnnnnnnnnnnnnnnnnnnnnccacgcgtccgcggacgcgtggggaagattctgcggtgttcttggtcactttgtggtttgtataatggcgtctgggacagtgggagggttgtctgaggtatatagtagtgcaaaaaggattctactaagagcgcggaatggtatcgagaagttggagaggttcgactctgatcctaccgacctcgcctcctccgtgaaacgagacattaccgaggttcaatctctttgttccaatatggacggtctctggcgttcgatccctgtcaaatcccagcgtgatctttggagaaggaagagtgaacaagtaggagaagaggctgagtatttgaaccaaagtctagagaagtacatgtggaggaatcagaggaagatgttggaagctaaagagagagcggttttgtaggtagagggagtggagaaggagctcacattttgcaaatatttgatgaggagg

SEQ ID NO: 91430 - DNA, 543 bp, Arabidopsis thaliana columbia
  unsure (1)..(543): unsure at all n locations
nnnnnnnnnnnnnnnnnnnnnnnnnnnnnnnnnnnnnnnnnnnnnnnnnnnnnnnnnnnnnnnnnnnnnnnnnnnnnnnnnnnccacgcgtccgcccacgcgtccgctaacacaactctcgccgttgttttctctgctccaccgtcaaaacctggtggttggatcgcttgggctattaaccctaaatccaccggcatggctggatctcaagccctcgttgcctctaaggaccctagcaccggcgttgcttccgtgacgacccttaacatcgtctcttacagctctctggttccctcgaaactgtcctttgacgtgtgggatgttaaggcggaggaggcggctaatgacggtggagctttacgaatctttgcgaaagtgaaggttccggcggatttagcggcgagtgggaaggttaaccaggtttggcaggttggtccgggagtgtctaatgggaggatacaggctcatgatttcagcggtcccaatcttaactcagtgggatcactcgatttaaccgggaccacccccggagtccctgtctcc

SEQ ID NO: 91431 - DNA, 435 bp, Arabidopsis thaliana columbia
cccacgcgtccgctctcttcttactctcaccatatctgctctctctctctctctgtttcaagcttttgctcccatttttcatttccttcgtattctcgctcgagcttagcggttgatgtaccaatgaccaaatcgatatttgaatcgccgcggctacctctctttgtcttctgatttctctatctctcgcttgatgctaccacttttagggtttctattattcccagggactttgggtttctttaagaagttcgattcgtctccggtttctttttagggttaacgaagtctggggtgttggatttcgatctttttttttttggtatcttccccattgactgttgcggtgataagagagtgacgcaatggtgtctaagaatgatcatatcgagactttattcaattcaatccaactagttaaagatgttgttcttc

SEQ ID NO: 91432 - DNA, 536 bp, Arabidopsis thaliana columbia
aggcagaattaaaatttattagatatgaatatcatgaagaacaaaagcaaagatgaaatgaaataaaacttggtagcttatataagaatctcattacaatttcaagtaatacgaaggtgaatgtgaagcttagtactcagtttttggagaaggtgagtatgatggtggtggtggagaactgtagacatatggtggtggaggagatttgtagtcaaccttagcgggaaggtgagtagtatggtggtggaggagatttgtagtcaaccttaggggaaggtgagtagtatggtggtggtggtgaactatagacgtatggtggtggtggagatttgtaatctaccttaggcgccaggtgagtagtatggtggtccgggtgagctgtagacatacggtggtgggggagatttgtagtctaccttcggggaaggtgagtagtatggtggtggtggtgagctatagacgtacggtggtggaggagatttgtagtctactttaggggaaggtgagtagtatggtggtggtggtgagctgtagac

SEQ ID NO: 91433 - DNA, 601 bp, Arabidopsis thaliana columbia
  unsure (1)..(601): unsure at all n locations
ttaatgtgtgcctttgggctaaactgtgatttctgcagtgaaaagctctagactgaggttgaagatctgaatggagtttttccatgaacagcttactgtttgacaaaaggcatgaagattatgtttgctttccttcaaaaaaaattttnntaggcagaattaaaatttattagatatgaatatcatgaagaacaaaagcaaagatgaaatgaaataaaccttggtagcttatataagaatctcattacaatttcaagtaatacgaaggtgaatgtgaagcttagtactcagtttttgaaaaaggtgagtatgatccggtggtggatttggagaactaaaggcattggtggtggaggaggtcttggaggaggttatgttggtggtggccatcactgatgagtggtgaggctcatgctcatgcattcgtaacgttgttatattatttaattaaatggaaaatgataaattaattattgcaataaaatgatacattagcaattgtgtatgtcgttatttttattttgagtcgcattgtatgctgattccatatgttcggctttggtcggtttcaagtgtggttaataaaatggttattttacta

SEQ ID NO: 91434 - DNA, 440 bp, Arabidopsis thaliana columbia
aggaggatttggtggaggagctgggagcggtggtggtcttggtgggggtggtggtgctggtggaggatttggcggtggggctggtggtggttcaggtggagggtttggaggaggagctggtgctgggggtggactcggaggaggaggtggagctggtggcggtggtgggtttggaggtccgggcggaagcggtattggtggtggtttcggtgggggagccggtgccggaggtggtttcggtggtggacatcattgatgagaagctataagatcttgacgttaaaccatggaatggaatgcatggcaatgggttttacgtaccaaagtcttatgaaaaaagattaatatattattcatctaaagtgattcggtccatgattttgtgttattatcggcctttgaggaaataaatgaatgaattagaaaaaataatcgagctc

SEQ ID NO: 91435 - DNA, 975 bp, Arabidopsis thaliana columbia
gctaaatagttagaagatttaggccatatatcagcttgttataggtgcgagtgaaggggacttcatgactatacggtaaaatagcgcctgaattttggacttaattaacaaacgtcattacgagagtttgtaggaagatttattagaaattgtgactcacggtatgatacacataggtgcagtaccgtttaccagtgtgtacttcatcgatattgtggtgagacgaggtgagcgagcgatcaatttatggcttttcagtgaaataatatgagcggatatgtcacgtggaggtaccgcggagccacatcatttagagatgtaaataaaaatacgacagttcttgtctattataagacgagatgatagtgagctcggcaagttactaacttgaaatgccgggcatacgtcaatgggtgttgtccccatactggggtgggggaataaccgatgaaggcagtacattaattttaggagattatatgaagtatgcaattttttgacgcattgatagataggattgcatctctagtgagagggagccctatctggtggaggatttttaggcagaattagcatttattagagaggagtatctagaagtacaaatgcaaagatcgaaatgaaataaaacttggtagcattatataagaatctcattacaatttcaagtaatacgaaggtgaatgtgaagcttagtactcagtttttggagaaggtgagtatgatggtggtggtggagaactgtagacatatggtggtggaggagatttgtagtcaaccttaggggaaggtgagtagtatggtggtggaggagatttgtagtcaaccttaggggaaggtgagtagtatggtggtggtggtgaactatagacgtatggtggtggtggagatttgtaatctaccttaggggcaggtgagtagtatggtcggacgcgtgggtcgacccgggaattccggaccggtacctgcagacgg

SEQ ID NO: 91436 - DNA, 557 bp, Arabidopsis thaliana columbia
  unsure (1)..(557): unsure at all n locations
aaaactagaagtcagtctcaggccgttcctgggtctagtaatgctcgtgcaataccaatggacacaagcaatcatcgaggaggaactaagatttcacatgaagcccaagtctctgaccgtgtcagaccggctaatgccagtggtccaagcccacagattaataccgctgtagggaggagtctgggttttgatcaagtccacaagaatatgaacatgccatcatccacttcattatctcctgcgggtacctcaaaaagaaatgtcagacccgaaacctcaaattctgggtttgggagcggggataaaaccggcggttggacttcacccattcatgtcancggggnaatgatgcaaaaaaaagttggagtatatcattcatctgattttctgagcaaggttatgtgtgcctttggggcctaactgtggtttctccagttaaaggctctggccttgggtttagggtcttaatggggtttttccatgacagcttactttttcaaaaaggtntaggtttnttnttcctaagttnccaatnctgntanctttnaatttnaccg

SEQ ID NO: 91437 - DNA, 743 bp, Arabidopsis thaliana columbia
gccagcactatacgactcatatagggaaagccggtacgcctgcaggtaccggtccggaattcccttgtcgacccacgcgtccggatcaccctgtccacaagaatatgaacatgccatccacttcattatctcctgcgggtacctcaaaaagaaatgtcggacccgaaacctcaaattctggatatgggagtgggaatagaactggttggacttcgtcattcatgtctccagagaaatgatgcaaagaaaatgtagctttttcctgaaatggtgagtgagatgatgcgctgttaatgtgactccgtgcccttaattcacctctgaaactacagcagaaatcagaacttggtgtcactaacacctttgtatctcctccacctttggctggaagaaagatgcaatggtttctatgtaaattctctgaagtgtgtgtggacaagaaggcgttggttgaagcatttgtgtttacacacacaagacatgaaagtgtatgtgtgcttttcattcaaagatttcccccaacctttgtataattcttacacccggatgtttaatcctggtatgtgattcatacatatcatttttagctactctctgctatgtgatcaatgaccttttgctgcagcttgatatatgtatacatgttaatggaaaaaaaaaaaaaaaaaaccaaagggcggcaactctagaggatccaagcttacgtacgcgtgcatgtgacgtcatagatcttctatagtgtc

SEQ ID NO: 91438 - DNA, 538 bp, Arabidopsis thaliana columbia
atgatttgccagctctatacgactcatatagggaaagctggtccgcctgcaggtaccggtccggaattcccgggtcgacccacgcgtccgctctttcatatacaccatataaaacgaaccagttaattatgggtttaatttccgggaaggtgtgtgtgtttatctttgtattcgctctagtcgctgaattttcgttcggaaatgttgaggttaacgacgacaaacactttttccacaaacctcgtccatttttacacaaacctcgtccattcctccacaagcatggcatttacaagaaaggtttcggtaagggtttgggcggtggaggcggtccggtgccggaggtggtttcggtggtggacatcattgatgagaagctataagatcttgacgttaaaccatggaatggaatgcatggcaatgggttttacgtaccaaagtcttatgaaaaaagattaatattatttttcatctaaagtgattcggtccatgattttgtgttattatcggcctttgaggaaataaatgaatgaattag

SEQ ID NO: 91439 - DNA, 530 bp, Arabidopsis thaliana columbia
  unsure (1)..(530): unsure at all n locations
caaaacacaaaaatcgacatggcttccaagtcactctttcttgttgccttacttgtcggctcttttgctttcacttcatttgccagtgtcgctaacaggaagctgaagagtggtctcgaggaccaaaagacattcttccaccatccaggcggaggtctcggtggaggaggcggtattggtggaggcagtggtcttggtggaggaggcggctttggtggaggaggcggtcttggcggaggagctggaggcggtggcggtttaggaggaggagctggtggtggagctggaggaggttttggtggaggagccggtgccggaggtggtttcggtggtggacatcattgatgagaagctataagatcttgacgttaaaccatggaatggaatgcatggcaatgggttttacgtaccaaagtcttatgaaaaaagattaatatattattcatctaaagtgattcggtccatgattttntgttattatcggcctttgaggaaataaatgaatgaattagaaaaaataatcgagctct

SEQ ID NO: 91440 - DNA, 547 bp, Arabidopsis thaliana columbia
  unsure (1)..(547): unsure at all n locations
gccnnnnnnnnnnnnnnnnnnnnnnnnnnnnnnnnnnnnnnnnnnnnnnnnnnnnnnnnnnnngtactctgcaccacgcgtactaaacacagaccaagaagaagaagaagacgagacgacgaatccagaaacagagagagagggagagagctttgaatatcttattgtacacaatcttcttcgcatggaagatttctgtttctcgtcactctgatatccaaaaatgtctggatctgattttgatttcgcggcgtttcgagttcaatgctaaaacatcgaagcggtttcgaatctctgagaatcgaaggaaaacgaagcgtgtaggttagggaacttaagattacgttgaagagaagcaagttctcttaaatcgcaactttggagaagtttcgttgttggtttttggtaaagcgatggagtcacgaatggatcagtacgagcttatggaacagatcgggagaggagcgtttggtgctgctattttagttcatcataaagctgagagaaagaagtatgttttgaagaagatcagattagctagacaaac

SEQ ID NO: 91441 - DNA, 2181 bp, Arabidopsis thaliana columbia
  unsure (1)..(2181): unsure at all n locations
atacgactcaccttagggaaagctgcgtacgcctgcaggtaccggtccggaattcccgggtcgacccacgcgtccgtagcctacccatttcctccttctttctctcttctatctgtgaacaaggcacattagaactcttcttttcaacttttttaggtgtatatagatgaatctagaaatagttttatagttggaaattaattgaagagagagagatattactacaccaatcttttcaagaggtcctaacgaattacccacaatccaggaaacccttattgaaattcaattcatttctttctttctgtgtttgtgattttcccgggaaatatttttgggtatatgtctctctgtttttgctttcctttttcataggagtcatgtgtttcttcttgtcttcctagcttcttctaataaagtccttctcttgtgaaaatctctcgaattttcatttttgttccattggagctatcttatagatcacaaccagagaaaaagatcaaatctttaccgttaatggaggaagtatctccggcgatcgcaggtcctttcaggccattctccgaaacccagatggatttcaccgggatcagattgggtaaaggttactgcaataaccaatactcaaatcaagattccgagaacggagatctaatggtttcgttaccggagacttcatcatgctctgtttctgggtcacatggttctgaatctaggaaagttttgatttctcggatcaattctcctaatttaaacatgaaggaatcagcagctgctgatatagtcgtcgttgatatctccgccggagatgagatcaacggctcagatattactagcgagaagaagatgatcagcagaacagagagtaggagtttgtttgaattcaagagtgtgcctttgtatggttttacttcgatttgtggaagaagacctgagatggaagatgctgtttcgactataccaagattccttcaatcttcctctggttcgatgttagatggtcggtttgatcctcaatccgccgctcatttcttcggtgtttacgacggccatggcggttctcaggtagcgaactattgtagagagaggatgcatttggctttggcggaggagatagctaaggagaaaccgatgctctgcgatggtgatacgtggctggagaagtggaagaaagctcttttcaactcgttcctgagagttgactcggagattgagtcagttgcgccggagacggttgggtcaacgtcggtggttgccgttgttttcccgtctcacatcttcgtcgctaactgcggtgactctagagccgttctttgccgcggcaaaactgcacttccattatccgttgaccataaaccggatagagaagatgaagctgcgaggattgaagccgcaggagggaaagtgattcagtggaatggagctcgtgttttcggtgttctcgccatgtcgagatccattggcgatagatacttgaaaccatccatcattcctgatccggaagtgacggctgtgaagagagtaaaagaagatgattgtctgattttggcgagtgacggggtttgggatgtaatgacggatgaagaagcgtgtgagatggcaaggaagcggattctcttgtggcacaagaaaaacgcggtggctggggatgcatcgttgctcgcggatgagcggagaaaggaagggaaagatcctgcggcgatgtccgcggctgagtatttgtcaaagctggcgatacagagaggaagcaaagacaacataagtgtggtggtggttgatttgaagcctcggaggaaactcaagagcaaacccttgaactgaggcagagagggtcctttttcttaatttttaaaatgaatatgggtctctccaagaaaaagtatttactattattaatttgtgcttatttttttaactaacaagttataaccatatggagataatgaagcttaatgtgttaagctcttttgtcttgactacattctaaaaagccccttgtatttttcttcccgggctaattgtaatatggttacaacatacattaagatgtagtattattgtttatgcaattactttcaaaactttnnnnnnnnnnnnnnnnnnnnnnnnnnnnnnnnnnnnnnnnnnnnnnnnnnnnnnnnnnnnnnnnnnnnnnnnnnnnnnnnnnnnnnnnnnnnnnnn

SEQ ID NO: 91442 - DNA, 537 bp, Arabidopsis thaliana columbia
  unsure (1)..(537): unsure at all n locations
nnnnnnnnnnnnnnnnnnnnnnnnnnnnnnnnnnnnnnnnnnnnnnnnnnnnnnnnnnnnnnnnnnnnnnnnnnnnccacgcgtccgcgagaccgagacgaagaaacacagagatcggtgatggcttcacagagatattcaacagagagattggtttctctcatccaatcaccatctctcgtcgaatctccgcttctgaggggagagtgaagaaactagatctttacgggaagttaaatggtcatgagggatgtgtgaatgcagtggagttcaattcgactggcgatgttcttgtttccgggtccgatgatcgacaaatcatgctctggaactggttgagtggaagcaggaagttgtcgtatccctctggccattgtgaaaatgtgtttcagactaagttcataccttttacggatgacaggacaatcataacatctggtgctgatggacaagtaagacttggtcagatcctagaaaatggttaagtggagacgaaaagactagggaggcatcacggtcgcgtgtacaagcttgctg

SEQ ID NO: 91443 - DNA, 560 bp, Arabidopsis thaliana columbia
ccagctctatacgactcactataggaaagctggtacgcctgcaggtaccggtccggaattcccggggtcgcccacgcgtccgagaaggggtatgttcagtttcgtagcaaagaacagataagagaagctttgaagcttctcgatctggaatctgttcactctttgttcgatgatttcattcaaagagcttctaattgcattgcttctccttcctctaacggctctgtttcgtctcgtcctccgctgcctccggcgactacgacggctgctcgttctgattctcagtcaagtttgaatttttctgagagagctcccgttcgccccaaggatatggtttcgcgagacgatagcttcgtcacaaagtctaagccttcttctctctacagtgatggttttgcagctcctcctcgaagaccacagattctcgattcaacacttaccaccggcaatgatggagagaagctgagtttgataaaacttgctagtttgattgaggtatcagctaagaaagctacacaagagataaatctacagaacaagttaacggaacaactcgagtg

SEQ ID NO: 91444 - DNA, 561 bp, Arabidopsis thaliana columbia
  unsure (1)..(561): unsure at all n locations
cgtaaaagatgatcgtctgattagatacgcactaaaacatcaaagagtcactctaaactcatctctctcgccgaattctccccaacaatttccgccggaaacaaattctcagattccggtaactctaaaactatgtcatcggatattccgtgctgcggaaccacgttctcgctctacgtcgtgataatcatagctcttgtagcgttcgctggcttgatggctggtttaactcttggtctcatgtctctcggtttagtcgacctcgaagttctcatcaaatctggccgtcctcaagatcgaatcaacgccggtaagatatttccagtagtgaagaatcagcatctgttgctatgtacactatttgatcggaaactctatggctatggagggctctacccaatattttttgggataaaatttgtgccntcctttgggtaagcttagttcttccttttaagtnnnctcntnatacttngtgtttngaggggtaaatnccccangcaagttttncctcggtncggggctttanggnttggngcggtaantnggctccnttttgtt

SEQ ID NO: 91445 - DNA, 528 bp, Arabidopsis thaliana columbia
  unsure (1)..(528): unsure at all n locations
nnnnnnnnnnnnnnnnnnnnnnnnnnnnnnnnnnnnnnnnnnnnnnnnnnnnnnnnnnnnnnnnnnnnnnnccacgcgtccggtggctaactaaggcagagagttcaccattagaagatccaacattgctccctgaagaaagaaagctaattgcagacaactgtgctagcaaagagccagtgaagtcgatcccgtggaggctgatattgtcgaaaccaccggtttgggctctcatcagttgccacttttgtcacaactggggaacattcattctcttaacatggatgccaacttattaccatcaagtgctgaagttcaaccttatggagtcaggacttctctctgtatttccatggatgacaatggcaatatctgcaaatgccggtggatggattgccgatacacttgtcagccgaggtttctctgtcacgaatgtccgcaagataatgcaaacaatagggtttcttggaccagcgttcttcctaacacagctgaaacacatagattctcctacaatggctgttttgt

SEQ ID NO: 91446 - DNA, 453 bp, Arabidopsis thaliana columbia
  unsure (1)..(453): unsure at all n locations
gagagaaagatgcaattgaacatncatcaagagaaagcgtggtgaaccaaatggaagaagggaaagctctactcacagcatcaagcagcgcaantcacatnaggcctttncgttgatcattgacgggaagtcgctaacctatgctcttgaagatgatttcaagaagaagtttcttgatttagctacaggatgttcctctgttatttgctgcagatcatcacctaaacaaaaggcattggctacgcggttggtcaaatctggtaccgggaagacaactttagcggattggagatggagcaaataatgttggaatncttcaagangcgggatattgggtgtttggaatcaccggttttgaaggattccaaagcggttatgttttagcggtntngccctttcncaattcccggttncttaggggggttttttntcgcccatnggcancnggtcnta

SEQ ID NO: 91447 - DNA, 662 bp, Arabidopsis thaliana columbia
  unsure (1)..(662): unsure at all n locations
cccgccccccngngatgccccncttctgttntccggncctncttgctcagcatntttccccgngggtccttggcaaggtccccctgcngcanccacngcnatctttccgctgagcctgtaatgggctatggcgtatccttggnactttcttggtgctgctatacttgttgcgtgaggaggaacctccggaagccactgaacatcacgggaggattccattgacgattttctatctccatgtaatgtgttgttgctgtgccccttgtacaagaactgagagaagttgagattcgtggggcatatggtacggagaagacgaaaataagccccgccttcgtcgcagttcatggaacattgaaatcttctattatacaaaaggtgaacaaaaacaacgatttgttgtaactctggatacgagacgagattcttcttcgtactactcacttaatattattgtgttaaatcgtggagtcgtatgtaaattagtttgggattctcatcttaatttcagcaatttgtgttgtgtgtatcacatatagactaactaattcttatttcaaccttttatcaaaaaaaaaaaaaaagnnnnnnnnnnnnnnnnnnnnnnnnnnnnnnnnnnnnnnnnnnnnnnnnnnnnnnnnnnnnnnnnnnnnnnnnnnnnn

SEQ ID NO: 91448 - DNA, 546 bp, Arabidopsis thaliana columbia
  unsure (1)..(546): unsure at all n locations
gatactccgacactatacgaactcatttagggaaagctggtacgcctgcaggtaccggtccggaattcccgggtcgacccacgcgtccgattcgtatgacgaagattctcccaagaaaagcagtactcgtgcagcttcgagatccacttctaatgtttcatctgggcatgatctgctttcacgaagagcatcacaggcacaacaccatgaagaatggcataccgacttactagcttgttgctcggaaccttctctttgcttcaagacattctttttcccgtgtggtactttggcaaagattgccactgcagcatccaacaggcacatctcttcagctgaagcatgtaatgagctaatggcgtattctttgatactttcttgttgctgctatacttgttgcgtgaggaggaaactccggaagacactgaacatcacgggaggattcattgacgattttctatctcatggtaatgtggtttgcttgcctgtgccccttgtacaaggaccctgaggaggaaggtttagtatgcgtgggggcaatnttgg

SEQ ID NO: 91449 - DNA, 946 bp, Arabidopsis thaliana columbia
  unsure (1)..(946): unsure at all n locations
acgcgcagcnnnnnnnnnnnnnnnnnnnnnnnnnnnnnnnnnnnnnnnnnnnnnnnnnnnnnnnnnnnnnnnnnnnnnccacgcgtccgcggacgcgtgggttgggtttaagaagcaggagaagaacactaaaagaaaacatttttatggtctggaattgaatccaatcctcctctgtttctctaacaaaaatggcttctctatgtcaagcttgctcttcgtcttcagctacaccattgctcctggcgaaaagggtgttctccttagcatcatctccgtttatcttcatgagggaacacaaaatccctcgccattgtaacagctttagagcatttaatgccgtttctgcgtcttcgtcagcgtctacctcagtttgtgtcgattttaaggatctgagaagcaatgatttggtggaattggagtatgcagaacttaacctcaatcataagatatctgaagaagtgggtcatgtaagaatcagacagcatgtgtattcctctcagttcctctttctctaaaccagctccagttcctgtttggaatgaagtttataaggntccatcacttcctctnatggtggatattggaagtggtagtggcagatttntcctatggcaagccaataagaatgttgaatcaagaaattacttggggctggaaatacgtcagaaactggtcaagcgcgccaacttttgggtgaatgagctcggactttcaaacgtacacttcatatttccaaacggcatggtttcttttgaacatcttatatcgggctatcctgggccattggngattgnntcaatcttngtgtcccggttcctcattttcaaggaacggcatcaaaaagaggcgngttgttcaaaaaggcntttngggggatttccattcttcaaaanccttaaancccgggtggggaaaatnttttgtngaaaccggtgtcntngnt

SEQ ID NO: 91450 - DNA, 731 bp, Arabidopsis thaliana columbia
  unsure (1)..(731): unsure at all n locations
nnnnnnnnnnnnnnnnnnnnnnnnnnnnnnnnnnnnnnnnnnnnnnnnnnnnnnnnnnnnnnnnnnnnnnnnnnnnccacgcgtccggatcaaatgagtttgctggtggaagttctgaagttcattatgcattacgtggaatatttgagggattgcttcagcagcttctctctttgaaatggaatgaaccagaacttatgaaagtgcatgtccactatctggatgcaatgggtccctttctcaagtattttccagatgcagttggaagtctcatcaataaattatttgagcttctcacctctcttccacacgttgtgaaggatccagctactagtacatctagagctgcaagattgcagatttgcacatctttcataagaatagccaaagctgcagaaaaaagtgttctgcctcacatgaagggtattgctgatacaatggggtacttggcaaaagaaggaactttactccgtggggagcataacattctgggtgaagcatttcttgttatggcttcctcagcaggagctccacagcagcaagaagttctggcttggttattggaaccattgagtcaacagtggatccaaccagagtggcagaacaattatctatcagacccgatgggtcttgttcgtttatgctccacacatccttcatgtgggccatataccacactgttactttctttgagaaagcactcagcaaagggatacagaaaaagcatttga

SEQ ID NO: 91451 - DNA, 530 bp, Arabidopsis thaliana columbia
  unsure (1)..(530): unsure at all n locations
tttcgntcccttccgggtttacccggctcccgatttgggatcttcccttggggaaggttggaggaggaaggggcagggttcaatgcccaggcccaagggacttgtccaccacacctcaagacttgcctcctcagcttctctttgttccaccaaggacaaaaagatctgaaggaacttcactggcacaaccagattccggggatgatcatctcaactgctggtgatggtttcaacatcttaatgccttacaacattcagaacacgcttccgtctgagctaccagcctgaaagacaaggtcttactctgaaaactcttgaagtattactcatagttttgtgttgtcctctctctgttctctttccttgtatcattgatggcaagttgcaagaattatacactctttcacaagtttcaagttttcatcaaaaaaaaaaaaaacacaaagnnnnnnnnnnnnnnnnnnnnnnnnnnnnnnnnnnnnnnnnnnnnnnnnnnnnnnnnnnnnnnnnnnnnnnnnnnnnnnnnnnng

SEQ ID NO: 91452 - DNA, 1000 bp, Arabidopsis thaliana columbia
  unsure (1)..(1000): unsure at all n locations
cagctcnnnnnnnnnnnnnnnnnnnnnnnnnnnnnnnnnnnnnnnnnnnnnnnnnnnnnnnnnnnnnnnnnnnccacgcgtccggtaaagatggaacttcaccggttcttaaccaagcacccttggttaacttttctggtcacaaagatgaaggctatgctatagactggagtcctgcaaccgctggaagacttctttccggggactgcaagagtatgattcacctgtgggagccagcttctggttcatgggctgttgatcctattccgttcgctggacacactgcaagtgttgaagatttacaatggagtccagccgaagaaaacgtgtttgcctcatgttctgtggatgggagtgttgcagtctgggatattcgacttgggaagtcccctgcactatctttcaaggcacataacgcagatgtgaatgtcatctcatggaacaggctggctagttgcatgttggcctcaggaagtgatgacgggacattctccatccgtgatcttagactgatcaaaggtggagatgctgtggtagcacattttgagtaccataagcatcctattacgtcaattgaatggagcgctcatgaagcttcgacacttgcagtcacttccggtgataaccagctcacgatatgggatctatccttagagaaggatgaagaagaagaggcagagttcaatgcacagaccaaggaactagtcaacacacctcaagacttgcctcctcagcttctctttgttcaccaaggacaaaaagatctgaaggaacttcactggcacaaccagattccggggatgatcatctcaactgctggtgatggtttcaacatcttaatgccttacaacattcagaacacgcttccgtctgagctaccagcctgaaagacaaggtcttactctgaaaactcttgaggtattactcatggttttgggtgccccccttgcccttttcttgaccttngtggaagttcaggntttccctttncagttaggtc

SEQ ID NO: 91453 - DNA, 791 bp, Arabidopsis thaliana columbia
  unsure (1)..(791): unsure at all n locations
cctttgcagtaccggtccggaattcccgggtcgacccacgcgtccgtgcattgttacttatgctttcggaaagatcaagatgaggacgtggaagtcgtgggaggaagagacaaagacaatagagtatcagtattccaacgatcctgagaggttcaggtttgcgagggacacatcttttgggagaagacatctcaatttctggagcaagacgagagtcacactatggattgtttgtttttttagacagttctttggatctgtcaccaaagttgattacttagcactaagacatggtttcatcatggcgcattttgctcccggtaacgaatcaagattcgatttccgcaagtatattcagagatcattagagaaagacttcaaaaccgttgttgaaatcagtccggttatctggtttgtcgctgtgctattcctcttgaccaattcatatggattacgttcttacctctggttaccattcattccactagtcgtaattctaatagttggaacaaagcttgaagtcataataacaaaattgggtctaagaatccaagagaaaggtgatgtggtgagaggcgccccagtggttcagcctggtgatgacctcttctggtttgggaagccacgcttcattcttttccttattcacttgggcctttttacgggtgcatttcaacttgcattctttgcctggaggtcggatgaattcaatccaaaaattttcccctgaagnctncaagtttgggcataggctttnggtgggnttttcagantttnagtttggcttnccc

SEQ ID NO: 91454 - DNA, 843 bp, Arabidopsis thaliana columbia
tctaatacgattcacttagggcaagctggtacgcctgcaggtaccggtccggtaattcccgggtcgacccacgcgtccgcccacgcgttcgcttgagaatggtgaagacggtctactatttgttggcgaatcagtagactctgatattctgcagaaactttttgctgtttcttcagctgctgaaattcctaaccagtttgtgctgcagcagtatgataatcagttatcaaagaaattcaatgatgcggtgaatgaaataaggaggcaaagatgttcttacctaagaataaaattgtgcaagaagggagaaccatcaggaatgttgtttctctcgtatatggtagaggacaggacagcaagcggcccgtcgtatgtggagtttctcgtgcaagtccatcgccaaatccagctaaaaatgaactgatcctctgttttctaggagtccttacagaagtttcctcccatctgcatctgtgtcatgttcggaatttgcggtagaaaagcatagcagaaggggaaagggcgtcggttttatggctgcttgagaagttttcttcttgtttgtaaggcaaacagggcctagactacttcggggtgagaagcttcccgccattttatggttgtgcttgcccccctgtatacaccgaagaatttgtctttttttttttttttgctataaagggttatacaaaagagtccttagctaatcatttttgtatggttatttttttgtgttatttgagtttcgagctaagaatttcctttccgttttcaccaatatcaaaaaaaaaggagttcccacgcatagggcaaccgctctagaggatccaagcttacgtcacg

SEQ ID NO: 91455 - DNA, 336 bp, Arabidopsis thaliana columbia
cccatgcgtccgtgatcaaacgcatacatacataactccgtcatcttcgtctttactccaaaattccagacatttgaagcttttaagcatctgggtatttgatcttctatccacagatcatagaaacccaagaggcaaaatgtctatttccctaaaaatttcccacatttcaagtttctccaacgatgggttcaatagtgtaaagcaatgcagagtgagtcaaaggtttgaaattagatcggtttgtttccgtagaagccctggtgttgaatctagacggatccatttaaattcggacttgtcttctcggaatttgagaaaccgatgtgtaggatc

SEQ ID NO: 91456 - DNA, 1133 bp, Arabidopsis thaliana columbia
agattaccatttcttaaatttctctccctaaatattccgagttcttgatttttgataacttcaggtcaaaatgggagtatactcgagagcggttgcgttttcggtctttgtgtcgtttctgctgtttttcactgcttattctaagagaaatgatggaacattcagagttggcctgaaaaaactgaagttggatcctaacaaccgactcgcaacacgctttggttccaagcaagaagaggccttgagatcttctttgcgttcgtacaacaacaatcttggtggtgattctggagatgctgatattgtcccgctcaagaattacttggatgctcagtactatggtgagattgctattggtactccaccgcagaagttcactgtcatttttgataccggaagctctaacctttgggtgccatcaggaaaatgttttttctcgctgtcttgttactttcatgctaagtacaagtcctcgcgatcaagcacatataagaagagtggaaaacgtgccgcaatccattacggctcaggatcaatctctggtttctttagttatgatgctgtcacggttggtgatttggttgtcaaagatcaggagtttattgagacaaccagtgagcctggtttaacattcctggtggctaagtttgatggtcttcttggtcttgggttccaagagatcgctgttggaaacgctactcctgtttggtacaatatgctcaagcaaggccttataaagaggccggtcttttcattttggcttaaccgtgatccaaagagtgaagaaggcggtgaaatcgtattcggaggtgttgatccaaagcattttagaggagaacatacatttgttcctgtgacacaaaggggttactggcagttcgacatgggtgaggttctcattgccggtgaatctactggatattgtggaagtggttgttctgcgatagcagattctggaacatcgttacttgcgggtccaacagctgtggttgccatgataaataaagctattggagcatctggagttgctagccagcaatgcaagactgttgttgaccagtatggacaaaccattttggatttacttttggctgagactcaaccaaagaagatttgctcacaaattggtcttt

SEQ ID NO: 91457 - DNA, 977 bp, Arabidopsis thaliana columbia
  unsure (1)..(977): unsure at all n locations
nnnnnnnnnnnnnnnnnnnnnnnnnnnnnnnnnnnnnnnnncgcctgcaggtaccggtccggaattcccgggttgacccacgcgtccgcccacgcgtccgtgaaaatattccagagttcattgagggtgtgaagaacaggaagaggaagatgtctggttttggacaccgtgtgtacaaaaactatgaccctcgagctaaagtcatcaagaacctggctgatgaagtattttccattgttggaaaggatcctctaattgaggttgctgttgcacttgagaaggcagctctctctgacgattactttgttaagagaaagctgtatccaaatgttgacttctactctggattaatatacagggcaatgggatttccaccggagttcttcacggtcttattcgcgattcctcgcatggctggatacttgtcacattggaaagagtcactggatgatcctgacaccaagatcatgagaccacaacaggtgtacacaggcgtgtggctgaggcattacacaccagtgagagagagaatagtgacggatgactcgaaagagtcagacaaattgggtcaagtcgcgacttcaaatgcatcaagaagacgtttggctggatcttcagtttagacgtaggcccttttagggtccatactatacatcaaaccacaccgcaaagaataaaagagattggtttctctagcctaaagctaagatacttgatcatactcgaaacttagatttctcattttgtaggcacaatatagacttgatctatatttgcttcaatccatcttctaagggtgtttgtccgccttgtttgtcttcttatcagaacgtgtttattgtataaaatgatttatggttatggattaaaaaaaaaaaaaaaaaaaagaaaaaaaaaaaaaaagnnnnnnnnnnnnnnnnnnnnnnnnnnnnnnnnnnnnnnnnnnnnnnnnnnnnnnnnnnnnnnnnnnnnnnnnn

SEQ ID NO: 91458 - DNA, 650 bp, Arabidopsis thaliana columbia
  unsure (1)..(650): unsure at all n locations
nnnnnnnnnnnnnnnnnnnnnnnnnnnnnnnnnnnnnnnnnnnnnnnnnnnnnnnnnnnnnnnccacgcgtccgcccacgcgtccgtacggctgcgagaagacagaagggtacggctgcgagaagacgacagaagggtacggctgcgagaagacgacagaaggatacggctgcgagaagacgacagaaggggacaacgaaggcatcttcttcatcaattgatctactctgctctgctcaagatcagaaatcgtcggtttagttctccggttaaaagtttcgtctctgcgggaattggaacttcaatggagggattaaagctctcagaagcggaattgatgatttttattcatccttcccagagcagaaacgtttttcaaggaatttgtcgcgagctcagttctcttctattccagtataatgaaacctttgatggagttctattggcttatgatgctactgtgaaaagcaaacaagctaaaatccttacaggacttcatccttactttggcgtcagagttaacactagactactcttatttgatcctaagcccaagagttttgtagaagggaaaattgtgaagatttctccagagtcaatccatgttattggtcttggtttctctgctgctgtcattacagacgttgatt

SEQ ID NO: 91459 - DNA, 541 bp, Arabidopsis thaliana columbia
  unsure (1)..(541): unsure at all n locations
cnnnnnnnnnnnnnnnnnnnnnnnnnnnnnnnnnnnnnnnnnnnnnnnnnnnnnnnnnnnnnnnnnggtcgaccacaggtccggttccctcttcgaccaccaccgtcaaatccggcgacccatcaaccttcagatgactaaaggtggacttggaatagccgcgatgtcatacgtggtaatcgattacatgcgttacgtgtcaccggtgtggcattctcgtcttatgccagttctttggtctgttcttgctatcgccgtcgtcactcgtgttctgttctataaacactggtctaaagagctacgagcagctattcctttccttggttctatcgtattccttctctgtgctcttctctttgaagctctttgtgttcgctctgttactgctgttcttggcttagattggcaccgggaaacacctccacttcctgatacaggccaatggttcttacttgcactaaacgagagccttcccgggacacttgtggaaatcctaagagcacatatcattggattgcatcattttcttatgttggttata

SEQ ID NO: 91460 - DNA, 511 bp, Arabidopsis thaliana columbia
cggacgcgtgggaaaaaaccaggtgtgtaggtcgtcaattaattttgcatgtgtgcaaaaacacaatgaagatgaattcgcgagctttaatagtttggtttctattgttgtcggctgttttcgccatcaaggttgttgcctccatcgatgacacaaaacaagttggtgaaaaccaagtggaggagtcaaagtcgacatgcaagtatggaaattgtgcacagtatggagagaatcattttgtagaaacagatgaagtccttgatggggaagaagaagaagaatccaaaaataaccaaggtggaattgggagaggccaaggaggacaaaaaggcggtggtggtggtggccaaggaggacaaaaaggcggtggcggtggtggccaaggaggacaaaagggtggcggtggtggccaaggaggacaaaagggcggtggcggtggtggccaatggggacaaaaaggcggtggcggttgtggacaaggtggacagataggtggtggtgggggcggtct

SEQ ID NO: 91461 - DNA, 427 bp, Arabidopsis thaliana columbia
ttttcgtccgcacgattcggtggggcccatcacgacgaggagaaaagggggtaagatactgggtaacatgggtctccgtggcttggttatctccacggaaagacaaaaagaatcaaaaaccccagaaaccgaagaggaaatggtcgtttgggaaacaaaagactagagaatcttttgatttccctctggaggagactccaccggttgacccttcaccttcttctggtcatcgtccatatccaccgcctcccccgttgccggattttgctcctcagccgttgttaccaccaccgtctccacctcctcctcctccggcatataccatcaatacaagaatctatggtgagtctaaagaatcaaagaatagacaagctttagctcttgcatcggctgttgcagccgaagcagctgtggtagctgcacatgc

SEQ ID NO: 91462 - DNA, 428 bp, Arabidopsis thaliana columbia
tctctctctctctatctctatctctcgatttgggggagttccgtcacggtggactagtacgtctcgttgccgttggtggcgtagtcggaattaatttcctcggcgttgagattcacatggtctagagttctagctaagtggttgttgttgttgttacgatttccgatttctcgagtttttctttttatatttagcttctgtttcgtttatccctcccggagacactccttggtcgaatctctcatgctgaggtgttttggacacttgttgtcaagaagaaaccagttttggttctgattaaatcgtttggttggaaaatatactcaattcccaggccatgccttcacttcaactattgcagttaactgagcggggtcggggtcttgtagcgtcaagacggaaatctatactgcttgcggctgggattg

SEQ ID NO: 91463 - DNA, 755 bp, Arabidopsis thaliana columbia
  unsure (1)..(755): unsure at all n locations
acgggactctaatcgacttatatagggaaagctggtacgcctgcaggtaccggtccggaattcccgggtcgacccacgcgtgcgcccacgcgtgcgcccacgcgtgcgcttgttgaggcacctttgataccaactgataaaaagtatcagggaaccaacagtacctttgttttcacaaataaatcaggacaacccacaatataccgtcccacaggcgcaaatcggttctacactttatgctccaaggaattcctagctctgggcggtggtggacggtttgctctctatctagacagtgagctgctaagcggatcgagcgcttactcagagacgtatgggaactcttgtctcgcagactctcaggactttgatgttaaggaagtggagctatggggatttgtgtatggctcaaagtatgatgagattctagctcacagcaaaacaatggagcctggtctttgcagatggtcatgatcattataaagaaaacccaaatgaattcaactgagattcgtctttttgttgttgttgttgttgttgttgtataaatctgtagtaaaagaaatcttgttgtcttgtaacttggctaaaatcacatatatgttactctctctcacttgtaatgatgattttgaaataacaaaaaaaaaaaaaaaaacaggctcaaaaaaaaaaaaaaaaaaagnnnnnnnnnnnnnnnnnnnnnnnnnnnnnnnnnnnnnnnnnnnnnnnnnnnnnnnnnnnnnnnnntcccc

SEQ ID NO: 91464 - DNA, 626 bp, Arabidopsis thaliana columbia
  unsure (1)..(626): unsure at all n locations
cnnnnnnnnnnnnnnnnnnnnnnnnnnnnnnnnnnnnnnnnnnnnnnnnnnnnnnnnnnnnnnnnnntcgaaccacgcgtgcgcggacgcgtgggcggacgcgtgggcggacgcgtgggcggacgcgtgggcaagtaaaaaaaaaatcctaatctttgcgtcaccgttcgtgtttcctcttctctctagggttctccttcaacagttttccagtaaacatgagtcgtcatcctgaagtgaagtgggctgagactaccgagaagattttcctcactgtagtattagctgatactaaggataccaaggttaacctagacccagaaggagtctttgatttctctgcgaaagttggtccagaaaaccacgtttatgagctcaaactggaacttgccgataaagtcaatgttgaggaaagcaaaatcaacattggagagagaagcatattctgcataattgagaaagcagagccggaaaggtggaataagctactccgtgtgaagaagcccccacactatgtcaaggttgattgggacaagtgggttgatgaggacgatgaaggcagtgctggtgccgcagatatggatatggcaggaatggaaggaatgggaggaatgggaggcatgggc

SEQ ID NO: 91465 - DNA, 516 bp, Arabidopsis thaliana columbia
actcacttagggaaagctcgtacgcctgcaggtaccggtccggaattcccgggtcgacccacgcgtccgtttacctagcaggccaggttcctagtgtgccaactactgctactattccagggatgttctcaaacatgtttccaatggtccctggtcagcaactaggtgcgcttcctggactgccagttcaggcaatgactcaacaggtacgatctatcaatctatcttattcttaggttcttcaccttttgtcacgattcccttcctaaaatatgtagtcgcaggcaactaggcatgctcggcgaagtctatgttggtggccttccaccaactgctaatgaacaggtttgttacttttgttttggttaaggttttgtgactttttgtttattattggctatttaaaccacatttcaatatccattgtatgcctactgagaatgggttttcatgtcctagtcggtgtcaacgttctttagcccagtgatgtcggccattgggggaaacactgctggg

SEQ ID NO: 91466 - DNA, 465 bp, Arabidopsis thaliana columbia
  unsure (1)..(465): unsure at all n locations
tgcaggtaccgggccggaattccctggtttacccacgggggcggggcgattgaggctaaaaattcgatacctcatgagaaaaccaagttccctgaggtgtacgtgaaagcaatgctcggaaaccagactctgtgaacacgtatttctcagaccgggaacattgaatccgatgtggaaggaagaaccgatgctcgttgggcgtgggccnnanaggagctcgattctcaaagaggaaacagggccacccataaagataaacttttggcgggtgcatcccgtgcaaacgccaaggagggtgacctaggccgttaactcgagggggcaacctggaaaaactttttggggggggggagcaaaagagataatttccaagcgaatcctctaggatctttttggaggggggccctgtcttgataataacccattcagcgggacctaggccaccccaaacggtttggacccggt

SEQ ID NO: 91467 - DNA, 965 bp, Arabidopsis thaliana columbia
  unsure (1)..(965): unsure at all n locations
acgcctgcaggtaccggtccggaattcccgggtctacccacgcgtcggagattacggcgatagtgtttgatcagtcatctatggaagcggtagaaaaacccgaagaaacaatcccagggaattcttcaagattagctggaaatcccaactggggaacagcaacttgttgttggagtatttgcaggattgctatatggagggagcaaagaagcttctgcttctgtgagcaaagatgcagaagtgatgttgaagatgggtagtacacaggataagcgtgaacaacacaggttgatgcgagatgcaatggagaaaaggttcatccgagtaactcgtggctccctcattggagggatgcgtcttggaatgttcactgcttccttctttagtctacaaaactttttagctgagacccgaggagtgcatgatgttttcaatgtggttggagctggttcagctactgctgccagtttttggcctaatcatgccggggtctcttgcttggcgtgcgcggaatgtgttgcttggttcagttcttggacccacagtgtgcttccctcttgggtgggcccaactgaagctcatgaagaaagcaaacgaaggcaataacgttgattcgaccggccacccacggtgaggtcacgagtggtgttggtgcagcccttgagaggctcgagctacaccccccaaaatagggaagggtccgcgcacagttttgtatgctaaattcgcttctctgaagcaaatgagaataagataccaaacagaaccagtgtgttcttgtgtaattgcaacaattttcgaatcacgcaaaaatatcaaaccattgatggttaaaaaaaaaacaaaagggcgaacgagctaaaggatcccagcttacgtacgcggcgggtctcncnctaaaacttcgagggcggtnacaaaaaagcccctcccccccaccctcctttatggccacgctttggtta

SEQ ID NO: 91468 - DNA, 584 bp, Arabidopsis thaliana columbia
tcgaatcctcctcactgtctctctatactccactcttcatcaagcgttgggtcatcgccgtcttgttccctttccttccctctctagcgtaaggcgggtacgatgggcttttctgatgaagaggctgagatcagcgagtcagagattgaggactattctgaaacaccctaccgccttttacgcggcgggacttactacaaggtgaaggtgaatggacagctcagatgcccgttttgtgcaggcaagaagaagcaagattacaagtacaaggagttgtatgcacatgctactggggtttccaaaggttctgccaccagaagtgctttacagaaggctaatcatcttgctttagctatgtttttagagaatgagcttgctggttatgcagaacctgttccacgccctccagttgttcctcctcagttagacgagactgaaccaaaccctcataacgtctatgtctggccatggatggggattgttgttaaccctttgaaagaagcggatgacaaggaacttctacttgattcagcatattggctgcagaccctttccaaattcaagcctattgaggtgaatgcctt

SEQ ID NO: 91469 - DNA, 503 bp, Arabidopsis thaliana columbia
aagaacgtacgcctgcaggtaccggtccggaattcccgggttgacccacgcgtccgcggacgcgtgggatatcttctccgtcgccgccgcctcttttattcacaatgtcgtgcttcaaatccaaattcgccgatgagctcatcgccaatgccgcttacataggaacaccagggaaaggtattctcgctgctgatgaatcctctggaacaagcggaaaacgtttcgtaagcattaacgttgagaacgttgaatcaaacagacgtgctcttcgtgagctcttgttcaccactcctggagctctccaatacatcagtggtatcattctcttcgaagaaacactctaccagaaaactgcttcagggaaactatttgtggatgtaatgaaggaagctggagtgcttccaggtattaaagtcgataaaggaaccgttgagctcgctgggacaaatggggaaaccacaaccactggtctcgacggacttggtgaccgttgcaagaagtac

SEQ ID NO: 91470 - DNA, 468 bp, Arabidopsis thaliana columbia
  unsure (1)..(468): unsure at all n locations
ccggnccggaattccctggttcgacccacgcggtcagacgtgaaggcttgaattgcttagttccacctcctaaaggttaccgtcagccgattccatggcctaaaagccgtgacgaggtatggtttagcaatgttcctcatactcggcttgttgaagacaaaggaggtcagaactggatttcacgagacaggagcggggtcaagtttcctggagggggtacacagtttattcacggggctgatcagtacttggaccacatgtctaagatggtttctgatattacgtttggcaagcatattagggttgctatggatgttgggttggggggtggccagttttggggctctatctattgtctcgggatgtcatgacaatgtgctgtggccccaaaagatgtccatgagaacccaattcacatttgctcttgagcgggggggggcctgctattggcggcaacatttgcgacag

SEQ ID NO: 91471 - DNA, 652 bp, Arabidopsis thaliana columbia
  unsure (1)..(652): unsure at all n locations
ctccgccttgtgcaactctctctgcttcgatccaaaagggacgatggaagacgctcgccgccggattctccgttactcctcttcccgccgttaacttcagtctccggcgatcgattcctcggattcttgcttccgctagttcctcctcctctcctgcgtcttcgtctctcgaagctggtgagaacaatgagctaaatgctgtttcagcttttagtgagattgttcctgatactgtcgttttcgatgactttgagaggtttccgccgactgcagctactgttagctctgctcttcttctgggtatctgtggtctacctgataccattttccgcaatgctgtggacatggctttggcggattcttcttgtgcagggcttgaaaccacagaatctcgactctcttgctttttcaataaggctattgtcaacgtaggtggcgatcttgtcaaactcgttccaggtcgagtttctactgaagtggatgcacgtcttgcttatgacacaaatggcattatccgcaaggttcatgatctgctgagactatacaatgaaatcgatgtaccacacgaccggctcctattcaaaatccctgcaacttggcaaggtattgaagtcaagttgttggaaangggntccaacgatatnccttnttt

SEQ ID NO: 91472 - DNA, 413 bp, Arabidopsis thaliana columbia
acattctgtttttaattcccctaaaaacccattttaaaatattttatctctcttctcttaaaaaaaactcttccctgtttttgtttgtgtgttactaaatggaatcgtcgtcgtcgggaacaacttcgtcgacgattcaaacgtcgtcaggatcggaggagagtctcatggagcagaggaaacgtaaacggatgctctcaaaccgtgaatctgcaaggagatcaagaatgaagaaacaaaagctcctagacgatctaacggctcaggttaatcatctgaaaaaagagaacacggaggtcgtgacaagtgtcagcatcacaacgctacactacctaaccgttgaagcagagaactctgttctcagagctcagcttgatgaacttaaccacaggctccaatctctcaacgacatc

SEQ ID NO: 91473 - DNA, 2036 bp, Arabidopsis thaliana columbia
ccgccatcatcatgacttctttctctctcactttcacatctcctctcctcccttcctcctccaccaaacccaaaagatccgtccttgtcgccgccgctcagaccacagctccggccgaatccaccgcctctgttgacgcagatcgtctcgagccaagagttgagttgaaagatggtttttttattctcaaggagaagtttcgaaaagggatcaatcctcaggagaaggttaagatcgagagagagcccatgaagttgtttatggagaatggtattgaagagcttgctaagaaatctatggaagagcttgatagtgaaaagtcttctaaagatgatattgatgttagactcaagtggcttggtctctttcaccgtagaaagcatcagtatgggaagtttatgatgaggttgaagttaccaaatggtgtgactacaagtgcacagactcggtatttagcgagtgtgattaggaagtatggtgaagatgggtgtgctgatgtgactactagacagaattggcagatccgtggtgttgtgttgcctgatgtgcctgagatcttgaaaggtcttgcttctgttggtttaacgagtcttcaaagtggtatggataacgtgaggaacccggttgggaatcctatagctgggattgatccggaggagattgttgacacgaggccttacacgaatctcctttcgcagtttatcaccgctaattcacaaggaaaccccgatttcaccaacttgccaagaaagtggaatgtgtgtgtggtggggactcatgatctctatgagcatccacatatcaatgatttggcctacatgcctgctaataaagatggacggtttggattcaatttgcttgtgggaggattctttagtcccaaaagatgtgaagaagcgattcctcttgatgcttgggtccctgctgatgacgttcttccactctgcaaagctgttctagaggcttacagagatcttggaactcgaggaaaccgacagaagacaagaatgatgtggcttatcgacgaacttggtgttgaaggatttagaactgaggtagagaagagaatgccaaatgggaaactcgagagaggatcttcagaggatcttgtgaacaaacagtgggagaggagagactatttcggagtcaaccctcagaaacaagaaggtcttagcttcgtggggcttcacgttccggttggtaggctacaagctgatgacatggatgagcttgctcggttagctgatacctacgggtcaggtgagctaagactcacagtagagcaaaacatcatcatcccaaatgtagaaacctcgaaaaccgaagctttgcttcaagagccgtttctcaagaaccgtttctcccctgaaccatctatcctaatgaaaggcttagttgcttgtaccggtagccagttctgcggacaagcgataatcgagactaagctaagagctttaaaagtgacagaagaagtagagagacttgtatctgtgccaagaccgataaggatgcattggacaggatgtcccaacacttgcggacaagtccaagtagcagatatcggattcatgggatgcttaacacgaggcgaggaaggaaagccagtcgagggtgctgacgtgtacgtcgggggacgaataggaagtgactcgcatatcggagagatctataagaaaggtgttcgtgtcacggagttggttccattggtggctgagattctgatcaaagaatttggtgctgtgcctagagaaagagaagagaatgaagattgattcaaaagctattggattcttaataagtcaagagacctatgaatggttctctctctggtttcagactttgatacttgatacttgtatttgtattgtgcccataattttgggttttgtagctctctcctttgttgtaacctgtaactttgtccttggttgttttgtaatatcttgttttttagtaatagtagtataatctgattttttgtcatatattttgtcttgatttctctgtgatatttataagaaataaacatttgtttc

SEQ ID NO: 91474 - DNA, 508 bp, Arabidopsis thaliana columbia
gctactacgcctgcaggtaccggtccggaattaccgggtctacccacgcgtgcgcccacgcgtccgcggacgcgtgggctctttaagtatgcaggattggacaccgagaatcttcagaactttgagtgttgtctctttgtacctttcccgtatttttcatacatgcttgcagaaggtggtggtctctcccgcattgtttctatactctgcacaggaattgtcctcgccgagttcattgtagcttttacatcttagttgatggtaatatcttggaaagacatatctaaggctgcctaatataagtgctacctgtagggtatggaagcgctacactttcctcaaatctctcacaaagcttcacagagttttcggatcttctttttttcacttggtatcttcgcttgccgaaagctttcacgttcatttacatgggatttgatattgccatgggccagcatagctggtcccacggtggggtttatccctttctctattggaccccattact

SEQ ID NO: 91475 - DNA, 543 bp, Arabidopsis thaliana columbia
  unsure (1)..(543): unsure at all n locations
nnnnnnnnnnnnnnnnnnnnnnnnnnnnnnnnnnnnnnnnnnnnnnnnnnnnnnnnnnnnnnnnccacgcgtccgggcggcgataaaaaatgcctcgagtcatccctccggagaatctcggttgcccaccattccgtgctttaacttttgactctctcggcttaataaaagtgactgaagctcgtggtcaagagagagggattccgactgtagtgaacacatggggagagatgaatgcatctagaagtgttcttgctgcttccattgatgaccggttaaggaatccgcttttggctgttgcaagaaaagatggcaatgttgaggttattaacccttgtaatggtgatcttcacttctcatactctgtatttggtgatgatggttgttcccctgaggataacgaaatttctgccctgcacttattcaggaaaaagatagatgatcagacagaaagatcttgcacattgcttacatgtacgaaaaagggagatgtgagtctcagatcagttaaatntccagatgcacatggtaattccacggatg

SEQ ID NO: 91476 - DNA, 443 bp, Arabidopsis thaliana columbia
ccgatcgacacaatgatgcgggaaaaaactgatcacgagcaaagagccatcaacgcggaggagaacctgaggaaaacagggtggaataacgctataactgcggagcggcttcaagagaaacgcaagaggctttctctagaaatggaatcgaagctgagcgagcatgagaatctgacgaaaaaaacattggctgaagccaacaaccttcgtctgcaaaacaaaactcttgaggaaatgcaagagaaaacacataccgtgattacacaagaggaagaacaaaggaagcacgtggaagagaagaacaaagctgtgtcaatgaaagtccagatgctttgaaagtgaggtcctgaagctcccaaagccgtgagatgagtcgagtgcagcagctactgaaaccgagaagataatacaggagtggaggaaagaaagagatgaatttgaga

SEQ ID NO: 91477 - DNA, 934 bp, Arabidopsis thaliana columbia
  unsure (1)..(934): unsure at all n locations
nnnnnnnnnnnnnnnnnnnnnnnnnnnnnnnnnnnnnnnnnnnnnnnnnnnnnnnnnnnnnnnnnnnnnnnnnnnnnnnnnnnccacgcgtccgtgaatagcttattagaggaggctaagaagcttgaagagcataaaggaatggattctggaaacaatgagatagatacgctaaagcaacagatcgaagatttagattgggagttagactcttacaagaaaaagaacgaagaacaagagatactattagatgagcttactcaggaatatgagtccttgaaagaggaaaattacaaaaacgtttcctcaaaattagagcagcaagaatgctcaaatgcagaagacgaatacttggattccaaggatattatagacgaattgaaatctcagatagagatattggaaggcaaactgaagcagcaatcgttggagtattctgagtgcttgattacagttaatgaacttgagagtcaggtgaaagagttaaagaaagaactggaggatcaggcacaggcttatgatgaagatatcgacacaatgatgcgggaaaaaactgaacaagagcaaagagccatcaaagcagaggagaacctgaggaaaacaagatggaataacgctataactgcagagcggcttcaagagaaatgcaagaggctttctctagaaatggaatcgaagctgagcgaagcatgagaatctgacgaaaaaacattggctgaagccaacaaccttcgtctgcaaacaaaactcttgaggaatgcaagagaaacacttccgagattacacagagaagaacaagggagccgtggagagaagacaagctttgcaataaagtcaatgcttgaagtgagcctgagctacaactgaagatgattaggcacactctgaacgaaaatatcagagggagaagagagagattggaaaattcttggta

SEQ ID NO: 91478 - DNA, 424 bp, Arabidopsis thaliana columbia
acgagagagacagagcaagtacagatttcaactagctcaagatgatcatccctgttcgttgctttacttgtggaaaggtgattggaaacaaatgggatcagtatcttgatcgtctccagctcgactacactgaaggggacgcacttgatgcactccagctagtcagatactgctgcaggcgtatgctaatgactcatgttgatctgattgagaagcttctcaactacaacactctggagaaatcagacaacagttagaagaggatgcaaatctgctgaaaaagttttcctctttagaggcttaaatattagtatgtatgaaaacatttggtgtatgtggtgtagacccttcaactccatctaaaattatatatgtgtgtcagttactttctcgtgtgattcaatctcatgatttcctgaccttg

SEQ ID NO: 91479 - DNA, 579 bp, Arabidopsis thaliana columbia
  unsure (1)..(579): unsure at all n locations
gcannnnnnnnnnnnnnnnnnnnnnnnnnnnnnnnnnnnnnnnnnnnnnnnnnnnnnnnnnnnnnnnnnnccacgcgtccgcccacgcgtccgtcccgtcttcgatcttctcttctctctctcttcatcgcacgctgtgcccagccagctcaaaacactgcacttccgctttttatcaagatcaatctctaccaatacttagaaaagttctttcctttttgtcaaattctttcaatttctctcttcaattccctacgaattactcacttcggatccaatcagctctttatagcctctgcgtttgggagtcaatctttctctcttcgacaattaagggtttcgtataaagattgctgttttacgacaggattctgaataaggagaagaagggttggtttcatttggatggaaagtatatggtaggtctacacattaatatggaagcgcagattcatatacttgagcaggaagcttattctgctgtattaagagcttttcaagcacaggctgatgaattttcttgggataaagcaaccgtgatgacaaacctacgtaaagaattgaggatatctgatgatg

SEQ ID NO: 91480 - DNA, 531 bp, Arabidopsis thaliana columbia
  unsure (1)..(531): unsure at all n locations
atgaactccaggtccnnnnnnnnnnnnnnnnnnnnnnnnnnnnnnnnnnnnnnnnnnnnnnnnnnnnnnnnnnnnnnnnccacgcgtgcgcggacgcgtgggttttgcctttaacacttcagtctacatcgatccctgagtccgccggccggtacggggacattgccgggaatgagtcacaggtgacgagagggttatcggaaggagggcgaaaccattctacccgaggaatctactacggctgcggtggtggcttgtttttgagggatccgccgggttaatgaatggtttcacgacgttgacaaacaccaagaaacacgcctatggtcaagccttcaatgacgagccattccctttcaagaattcggtcaacggtaacatgacttcgttttcatttaccttcttctttgctatcgtccctgagcatatagacaaaggttctcacggtatagcctttgtgatctctcccacgagaggcattcctggtgcatccgctgatcagtaccttggtatcttcaacgatacaaatga

SEQ ID NO: 91481 - DNA, 838 bp, Arabidopsis thaliana columbia
cggacgcgtgggtttgagcgcatcgcaaactcgaaggcgcgactgtgagagagaagaatggcgtcgtcatcatcgagaggagagatggagaagatgggaatcgatcagctaggagcgttgaaggagcaagcagatctggaagtgaatcttcttcaagatagtctcaacaacatccgtacagctaccgttcgtctcgatgccgccgccgcagctctcaacgatctctctcttcgacctcaaggtaagaagatgcttgtaccactgactgcttctctatacgtgcctgggacacttgatgaagctgataaggttttagttgatattggcactggttacttcattgagaaaacaatggatgatggaaaagattattgtcagaggaagatcaacttgctcaaatccaactttgatcagactttttgaggtcccagcgaaaaagaaaagcgtggcagatgaagctggaatggtcttgcaggccaaagttaaacagttaacagctgcacccccgtcgtgaaaattatcccttctctagggctttttgctattgagactattttgagattgcaaatgattttgtctgctcagttatgttttgactcttttgatctcaatcggcttgtgtttagtgtgctcccccaaaatgagcggtcctttttagtaatcagtagtgactatgagaaagaaaagacgtgttaactagttatttctcataaaacgtgagaaaagagccaaaagcgatgatgtttttggaggcccaaaaaaaaaaaaaaaaaaaaaaaaaaaaaaccaaaaacccaaagggcggccgctctagaggatccaagcttacgtacgcgtg

SEQ ID NO: 91482 - DNA, 335 bp, Arabidopsis thaliana columbia
aatagttctagatcgcgattagggttttgagcaaaaaggagtgatgagagctaagtggaagaagaagcgtatgaggagattgaagaggaagagacgaaagatgagacagcgatctaagtagaccaaatctactccacaagtctttcgcttttcccctctgcattttgtgtttcatttgcttcagtttgttcccagaatttgtcttagtttccagatattgctgttgttggattaatggattttcagtttgatcttcctttgtctattaagttacgatttaatatttgtctctaagcttatattatctcatcgtagctactagttgatcttaacgc

SEQ ID NO: 91483 - DNA, 427 bp, Arabidopsis thaliana columbia
agctctctttcccagcatcaccatctcttgtaccagtttctgattagattcaacaatgaacggcgcattaggtaactcctccgcctccgttagtggcggagaaggagccggaggaccagcgcctttcttggtgaaaacctacgagatggtcgacgattcatcaacggaccagatcgtatcgtggagcgctaacaacaacagcttcatcgtttggaatcatgccgaattttcacgcctccttcttccaacctacttcaaacacaataacttctcttccttcattcgtcagctcaatacctatgggtttagggaggttgctccagagagtgtgggagtttttgtgatggagattttaatgagcatcagcagcatcttctcgagaatcttcgtaggaggcctctactcagccgcagatcagttcatcctc

SEQ ID NO: 91484 - DNA, 672 bp, Arabidopsis thaliana columbia
  unsure (1)..(672): unsure at all n locations
nnnnnnnnnnnnnnnnnnnnnnnnnnnnnnnnnnnnnnnnnnnnnnnnnnnnnnnnnnnnnnnnnnnnnnnccacgcgtccggaaagcagactctcagattcttttcaagctgggggtaattactcacagtgtcgatctgctgcactaacaatcttgcaagatggaaatgagaaatgctcgtatcagcattgttctattggatcaactttcacgcctaagcttcgaggaagatttttagcgacagaaaacttcttttacacctctaagttctttgggttgggagaaaaagcgtggctatctaatatgatttcagccggagagagattctgtggagaagattggtcaaagttgagagtaaaagacccatcactccatgaagaggatcttcttcggtattgtttctcatctgcatatattgtgtcattgcttcacgatacccttggcattcctcttgatgatgaaagaatcggatatgcgaatcaagcaggagacataccgctcgattgggctttaggtgcattcattcaacagactgcaacagagacctctcaacatgcagcctctggtaatctccattggttccatgctcttttcagtaatcacccgaagacgcttcactatctcatcgggataccgatccttatgacagttttggtatatttggtaactaa

SEQ ID NO: 91485 - DNA, 625 bp, Arabidopsis thaliana columbia
  unsure (1)..(625): unsure at all n locations
aaaaaagaaaatcaaagaagatagttttgggattgttttctataaaaagtgcagatattttctttgtcctagagaaagaggtgataggaaaaatgggtctccaagagcttgacccgttagcccaattgagcttaccgccgggttttcggttttatccgactgacgaagagctgatggttgaatatctctgtagaaaagccgccggtcacgacttctctctccagctcatagctgaaatcgatctctacaagtttgatccatgggttttaccaagtaaggcgttattcggtgaaaaagaatggtattttttcagcccgagggataggaagtatccaaacgggtcaagacctaatcgggttgccgggtcgggttattggaaagccaccggtacggataaagttatctcgacggagggaagaagagttggtatcaagaaagctttngtgttttacattgganaagctccaaaaggaccaaaaccaattggattatncatgagtaccgtctcatcgaaccctntcggncgaaatgggagcaccaagcttnatgattgggttttaatntcggattttcaaaaagnaaacaagcggacaaaaacaaagctttccaantaatctaaatgccg

SEQ ID NO: 91486 - DNA, 552 bp, Arabidopsis thaliana columbia
  unsure (1)..(552): unsure at all n locations
nnnnnnnnnnnnnnnnnnnnnnnnnnnnnnnnnnnnnnnnnnnnnnnnnnnnnnnnnnnnnnnnnnnnnnccacgcgtccgcggacgcgtgggctcttcttcctcgatcccacccagcttctacttcgttttccaattctgggtttcgattcttccaatctaaccatctcttctcttcacagtctggttcactcatggaagtgtttaaagcagctttttcagaagcgtctaattcttgtgataggattgcgattaaagccgatggaaagagttactcttatggccagctaacatcgtctgctttgaggatatctaaattgttctttaaagatgatacgacaaatggaggtcaagaaactaagaagtatgaagggtttggtagtctaaaaggagctagaatcggaattgtggcaaaaccttcacctgagtttgttgcaggagtcctggggacattgtttagcggtggtgtagccgttccccttgcactcagctatcctgaggcctgactctnacatgtcatgaatgattccgatatatctctgtatttgagcc

SEQ ID NO: 91487 - DNA, 511 bp, Arabidopsis thaliana columbia
agctgcacgcctgcagtaccggtccggaatcccgggtctaccacgcgtgcgccacgcgtccgcccacgcgtccgcggacgcgtgggcaagaattggctgatgaaattgagagtgagtgcgctgaaaagtcgtgggaaggaatcttgaggaggatatggcctaaggctaaatatgttgaggtgattgtgactggttcgatggctcaatacattccgacactagagttttatagcggaggtttaccgttggtttcaacgatgtatgcttcctctgagtgttactttggtatcaaccttaatccgttgtgtgatcctgccgatgtttcctacacgctttttcctaacatggcttacttcgagttcttgcccgtcgacgacaaatcccacgaagagattcactttgcaactcactccaccaccgatgatgatgatgatgctctcagggagatctcatcgtcaatcttgttaatgtcgaagtcgggccattctacgaaatcgtcatcactacattc

SEQ ID NO: 91488 - DNA, 510 bp, Arabidopsis thaliana columbia
  unsure (1)..(510): unsure at all n locations
aacgactcacttagagaaagcacgnacgcctgcaggtaccggtccggaattcccggttcgacccacgcgtacggccgagaggcttaccagccacagccggttcatccacattatgagcttgtgaatcagtacaagtctgcactggctgagctcactttcaactcgaagccgataataacgaaccttacaataattgcggggagagaatgttcatgctgcctaatgccggcggagaccgccatttgcaacaacatcctcgaggtaccaactgatcagaagctgccaacactgtacctgttagacagcattgggaagaacatcggaagggattacattaagtactttggtgccaggctgcctgaggtttttgttaaggcttacaggcaagttgaccctcccatgcattctaacatgcggcgatctttttggaacctggaaagggagtctttcatccgcaaacacttcaaggttattgaagaaaaaacttgggtttaatggctaaaagaggaa

SEQ ID NO: 91489 - DNA, 730 bp, Arabidopsis thaliana columbia
  unsure (1)..(730): unsure at all n locations
cggacgcgtgggctcgaaacacaggttaatgatctaaaaggtgagcattcatcacttcttaaacaactgagcaacatgaatcacaagtatgacgaggctgctgttggcaatagaatactaaaggctgacattgagacattaagagctaaggtgaaaatggcggaagaaaccgtgaagagagtaacaggaatgaatccgatgcttctcggaagatcaagtggacataacaacaacaacagaatgccaataactggtaacaacaggatggattcttctagcattattccagcttatcaaccacactcaaacctaaaccatatgtcaaaccaaaacatcgggatcccaaccattctacctccaagactcggaaacaatttcgctgctcctccatcccaaaccagctctcccttgcagagaattagaaatgggcaaaatcaccatgttactccaagcgccaacccgtatggctggaataccgaacctcagaacgattcagcatggccgaaaaaatgcgtggactgatcaaacaagaagcgggtttcgcactatattaatgtctatgcatctgtaatttgtaagtgttattaagttacgaatcatgagaaaacatcttgtgaaaatacagtctcatggcttatatatatatataagctctgtcttataacattacaagattcttatttaagatccgcataaaatatttatagctaatnnnnnnnnnnnnnnnnnn

SEQ ID NO: 91490 - DNA, 556 bp, Arabidopsis thaliana columbia
  unsure (1)..(556): unsure at all n locations
tgatactccnnnnnnnnnnnnnnnnnnnnnnnnnnnnnnnnnnnnnnnnnnnnnnnnnnnnnnnnnnnnnnnnnnnngacccacgcgtgcgagcacatgcacactaattctactcgccaaataaagtgaaaagagatggctgatggaggaaaggtggtctgcgtaaccggagcttccggttacatagcgtcttggatcgtcaagcttttgctcttccgtggctacaccatcaatgccaccgttcgagacccaaaagatcgaaagaaaacagatcaccttctagcacttgacggcgcaaaagaaagactcaaattattcaaagcagatcttctagatgaaggttcttttgagctcgcaattgatggatgcgagactgtcttccacactgcttcaccggttgcaatcactgtcaagactgatcctcaggttgagctgatcaatccagccgtcaatggtactattaacgtcctaagaacttgcactaaagtgtcttctgtcaagagggtcatcttaacatcgtccatggccgcagttcttgcgcctgagaccaagttgg

SEQ ID NO: 91491 - DNA, 404 bp, Arabidopsis thaliana columbia
cgactcttcagttccttatttaatcatctcatcttctggaaattcgaggtttttatagggttgtggtcttagcaatggaaggaatgttgtcgtccggtgaccaacagagattagtctcttctttccttgaaatcgccgtcggacagaccgccgaaactgctcgacagttcttacaggcgacaagctggaaacttgaggaagctattcagctcttttacattggaaatgaaggtggtatgcttcagtctggtacacacactcagccagcgtccaacgatgatgcggctgcacagtcttggggggcggctacaggcacaggtaatgaaatgatactgcccaacgatgtcgatgaagtccgtgctcctttacctgttgtgagggagactctttatggtgaatcaatg

SEQ ID NO: 91492 - DNA, 601 bp, Arabidopsis thaliana columbia
gccggcactatacgactcttatagggaaagctggtacgcctgcaggtaccggtccggaattcccgggtcgacccacgcgtgcgcccacgcgtccgtaccaaactagaatctttgacaaaaaacgaacctttaaaactcagattttatctctcttcagtctccacgctgcttgaaactgaagcagagaagcaaagagatgtcttttgaggagtttacgccgttaaacgagaagtctcttgtagactacatcaagtcaacacctgctctctcttccaagatcggagccgacaagtccgatgatgatttggttatcaaagaagttggagatggcaatctcaatttcgttttcatcgttgttggatcctctggttctcttgtcatcaaacaggctcttccatatattcgctgtatcggtgaatcatggccaatgacgaaagaaagagcttattttgaagcaacaactttgagaaagcatggaaatttatcacctgatcatgttcctgaagtctaccattttgacagaacaatggcgttgattggaatgagataccttgagcctcctcatatcattctccgcaaaggactcattgctgggattgag

SEQ ID NO: 91493 - DNA, 541 bp, Arabidopsis thaliana columbia
actcaccttagggaaagctcgtacgcctgcaggtaccggtccggaattcccgggtcgacccacgcgtccgcttcaaaatagagcagtgggtcagagccaaagaggggcggctaatggaatagctatgcctgcgatgtctctttttaacacagttggaccagctggtgctggcatcttattttcttggagtgagaggcgactaaccgctgcttttctaccaggatcgcatatggtattcttcgtcttgaatgtgatagtagtggtcggaggagctctgacattcaagccatttctagcgacgtagtcgaagatgaaattcatttgtattggtcacccccggaatgtatggaacacgttgtttcttttcatttcagatacgaaagaaaccggtaataaaatttcactaaccttaggatttcagctccttctattacttgtccttttgttttgctttgtctgattattatacaccaaaaccgctttcataaaaaaaaaaccagggcgcccgcgctctagaggatccaagcttacgtacgcgtgc

SEQ ID NO: 91494 - DNA, 566 bp, Arabidopsis thaliana columbia
  unsure (1)..(566): unsure at all n locations
gtaanttgcccnnccccnaaaggcntaggnngnccncattaccngcctttgcccttcaaaatggggcagtggatcggagccaaaggggggcggctaatgggaatagctatgactgcgatgtctctatttaagacagttggaccagctggtgctggcatcttattttcttggagtgagaggcgactaaacgctgcatttctaccaggatcgcatatggtattcttcgtcttgaatgtgatagtagtggtcggagtagctctgacattcaagccatttctaccgacgggtcgaagatgaaattcatttgaattggtaagatagggaatgtatggacaagtcgattcttttcatttcagataccccagaaaccggtaataaaatttcgctaaccttaggatttcagctccttctattacttgtccttttgttttgctttgtctgattattatacaccaaaaccgctttcataatcgtggatcccatccaaaagtgatgtattaatcggttaacaaatcgtatggtcagtcaatacggcagtaaggaaattagaagatgagattgagagg

SEQ ID NO: 91495 - DNA, 559 bp, Arabidopsis thaliana columbia
tacgactcactattaggaaagctggtacgcctgcaggtaccggtcccgaattcccggggtcgaccacgcgtccggccacgcgtccgatacgtagagagatccaaaatacccaacctcgcagagtaaaagcaaaaagaagaagaaatcagagagaatgtcgtggcaagcatacgttgatgagcatttgatgtgtgatgtcggcgacggccaaggtcaccaccttaccgccgccgctatcatcggccatgatggtagcgtttgggctcagagcgctaattttcctcagttcaaacctcaagagatcacagacattatgaaggatttcgatgagcctggtcacctcgctcccacgggtatgttcctcgcagggctaaagtatatggtcatccaaggcgagcctaatgctgtcatccgtggcaagaagggagctgggggaatcacgatcaagaaaacaggacaatcaatggtgtttggtctgtacgaagagccagtgactccaggacaatgcaacatggttgtcgagaggttgggtgattacttgatcgaacagggtctttga

SEQ ID NO: 91496 - DNA, 1174 bp, Arabidopsis thaliana columbia
atggacggtgccacctaccaaagattcccaacggtcaagatccgtgagcttaaagatgactacgccaagttcgagcttcgtgaaaccgacgtttctatggccaacgctctccgtcgcgtaatgatctccgaagtccccaccgtcgcaatccatctcgtcgaaatcgaggttaattcctctgttctcaacgacgagttcattgctcatcgacttaggtctcatccctctcactagcgagcgtgctatgagcatgcggttctctcgagattgtgatgcttgtgatggagatggacattgcgagttctgctctgttgagtttccccttagtgctaagtgtgttactgaccaaaccctagatgttactagtagggatctctacagtgctgatcctactgttactcctgtggatttcactagtgactcgtctgcttctgattcaagcgagcacaagggaattatcattgcgaaactgcgccggggacaagagttgaagcttagagcgttagcgaggaaagggattgggaaagatcatgcgaaatggtctcctgcagctactgttacgtttatgtatgagcctgacattattatcaatgaagagatgatggacactttgtcagacgaggaaaagatcgacttgattgagagcagtcctaccaaagtgtttggcatggatccagtcaccagacaggttgtagtggttgatcctgaagcatacacttacgatgaagaagtgatcaagaaagctgaagcaatggggaaaccgggactcattgagatcagtccgaaagatgacagttttatattcactgttgagtccacaggtgcagtgaaggcttcccaactggtactaaatgccattgatcttctgaagcagaagcttgatgcagtccgtctctcagatgacaccgtagaagcggatgatcagtttggtgaactcggtgcccatatgcgtggaggatgaactcaagtgattaattcgagctctttgttatacctgtttgtttcaggttttgagtttcttctggagcagactgatattaaccgtagtggcactggcttgctttgataacatgtgaagtggcagtcttctatttgttctggacctctgatccctctgttcctgaatcttgttaagtttggttgttgttagttgttaaactcgctcgtaacgttt

SEQ ID NO: 91497 - DNA, 885 bp, Arabidopsis thaliana columbia
gatcgttgatctctaaatctccttacgatctctcctctcacgagtctccaagtcgtccaagctcataaagattcatcgagaagaaagataaaatcctaagtctggtgcaagtctcgagtagaataacatcatttctaggacatggcaaactcattacggctgtatctagcatgcataaaaaatacactcgaggctgccatgtgcttacagaattttccttgtcaagaagttgaaaggcataataaaccagaggttgaattaaagacgagcccagaacttttgctaaatcctgttttaatatgccgaaatgaggctgaaaagtgtttaatagaaacatctattaattcactccgggttaagcctcaaggtcaagcaagcggatgaacttgaaaacatactaaccaaaaaatttctcagattcttgtccatgagggcagaagcttttcaagtactgaggaggaagccagtccagggctatgacataagctttcttataccaaactacccctgcgaagagatgcagaaacagaagctaattgatttcattattcagtttatggaggatatagagaaacaaataagggacttgaaggagtcagtgaattcaagaggaagactcgttgctacggagttcttgaaacagttcatgtaaagcagctcttgaagtagtataaccccccccttccttgtacccctccctcgttatttggttaaaatccatctactcttcattttgctactttctctgttattctaacccaaccaaagtaccgagccatcggcttggtaattgtagtgtatgtaatgcgatacttaaaaaaaaaaaaaaaaccaaaccccaaagggcggcagctctagaggatccaagcttacgtacgcgtgcag

SEQ ID NO: 91498 - DNA, 744 bp, Arabidopsis thaliana columbia
  unsure (1)..(744): unsure at all n locations
aacgactcactgagagagaagaacgtacgcctgcaggtaccggtccggaattcccggttcgacccacgcgtccagcacatctaatcttaatgctcttcagtctggttgttgtaagccgtccaatgactgtaacttcacctatgtgaacccgactacttggacaaagactcctggtccatacaaaaacgaggactgtaatgtgtgggacaacaaaccaggaactctctgctacgactgtgaagcctgcaaggctggtctgcttgacaacatcaagaactcatggaaaaaggtggctaaggtcaacattgtcttcctcatattcctcattatcgtctactctgttggttgttgtgcgttcaggaacaacaggaaacgcagttggtaatagattctaatgcgttgaaaccaagactaaggccagagaagatatctgaagtgtcatcatcttactgtcaagtaagttaaagcagcatttaagacaactcgttgatcgcttgtcttgtgtgtgggggattgcaatttcaatgtattttctctcttaaatttgcaacataatgagttacaaaagcacttgcttgtgcttctatttcgactcttttgtgtgttgagtagcttatacatctgttgagacgagtgagatttgtaaaagaagttccctttccaaaaaaaaaaaaaaaaaaaggatcacacccnaagggcgaccgctctagaggatccaagcttacgtacgcgtgcgtgcgacgt

SEQ ID NO: 91499 - DNA, 420 bp, Arabidopsis thaliana columbia
cccactcgccggattttcgatcttatccttatcttcttccttgttctatttctcttctaactaatctcttctcttctcttaaaatcaaacgtaatcataaataaagatcttcttgttgaatttctcttgatcctcgcaaaatcacagattcttgaaattcttttttcttgtcttgaaattcttgagttcttgagttatgaaaagacaatggacagagttatgaaatgataaatctcaaccaattccttgtttatcattctatatcagttgtgattcttcattggttttacgttatctcttgaacaaaaaaacatggcaaacgcagagaagacaagttcaggttccgacatagatgagaagaaaagaaaacgcaagttgtcaaaccgcgaatctgcaaggaggtcgcgtttgaagaaacag

SEQ ID NO: 91500 - DNA, 821 bp, Arabidopsis thaliana columbia
  unsure (1)..(821): unsure at all n locations
nnnnnnnnnnnnnnnnnnnnnnnnnnnnnnnnnnnnnnnnnnnnnnnnnnnnnnnnnnnnnnnnnnnnnccacgcgtccggtttcgtgcatagattaggaatctcgaaaccctaattctgttttctacacgaaacccatcaaaatcgaattttgatcgtttctaatttctgccatttgattctcttcatcagtcacatttaggggaaacgagaagccctaatctttgattctttaatcgccatggctaatagctctttcaagttggaacacccactagagaggagacaaattgaatcttctcgcatcagggagaagtatccagacagaattccagtgatcgtagagagagctgaaagaagtgatgttcccaatatcgacaagaagaagtaccttgttccagctgatctaactgttgggcaatttgtgtatgttgtccgtaaaagaatcaagctgagtgccgaaaaggctatcttcgtctttgtgaagaacacattgcctccaactgctgcaatgatgtctgcaatctatgatgagaacaaagacgaagatgggtttctctacatgacttacagtggagagaacacctttggtttggtttaaatgtgtgccttccaatgcttttgtgctgatgtgtatattatatgctcttttataacactatgaatatgcaaaagttatttctactactattaatgtaaatgttgctttgaatttaagttgttagtttgggttttaaaaaaaaaaaaaaagnnnnnnnnnnnnnnnnnnnnnnnnnnnnnnnnnnnnnnnnnnnnnnnnnnnnnnnnnnnnnnnnnnnngc

SEQ ID NO: 91501 - DNA, 551 bp, Arabidopsis thaliana columbia
  unsure (1)..(551): unsure at all n locations
ttttaaatatgttatttcagattctctgatcggtgtgaatattggtactgaagtgacaaacatgccaagtccaacacaagtagtagcactcctcaaatcacagaacatcaaccgcgtccgcctctatgacgcagaccgctcaatgcttctcgcgtttgctcacaccggggttcaagttataatctcagtacctaacgaccagcttctcggtatcagccaatcaaatgcaaccgcagccaattgggtgactagaaatgtagctgcatattaccctgcgaccaacattaccacaattgctgtcggatcagaagtcctaaccagcctaacaaacgcagcttctgtccttgtctcagccctcaaatacattcaagctggctctcgtcacgggccaatctcgaccgtcagatcaaagtatcgacaccgnaatcttcaaccatcattcttggattctttccctccttcggaagctttctttnaaaagacttggggntccagtaattgncctctcncaaatcctanagncaaggttgcatggtggnaacgttaccgat

SEQ ID NO: 91502 - DNA, 847 bp, Arabidopsis thaliana columbia
  unsure (1)..(847): unsure at all n locations
gtgatgtgaacaatctcactctctttctctatctctctttcgagtttctttggagtattatataacaaatcagtccaagacacctcttttctcacaccaatctcgctctcaccacaaaacagagaatctcagatcgaagaagcaaagaaagagagaatgggtttcacttcccgaggaaacccttcttttctcttcttcttcttcttcttcctctgtctctccacagtctctgcttacatcaacagcacaagcagcaataatgatgaagtaagaagagagctagcttctgggagatgtaattggtttagagggaattgggtttatgatgtaaagtacccactttatgatccttactaatgtccattcatagatccacagtttaactgtaagaagtatggtcgtcctgacaatgcttaccttaagtatcgatggcaaccatcttcttgctctctccccagattcaatgggttgtatttcttgaggaggatgagagggaagaagataatgttcgttggagattcactaagcacaaacatgtggcaatctcttgcttgtctaattcactcttggggtcctaacactcgttacactcttattcggccaaaagggtctaggcttcactttacctttgaggaatacggagtgacgttgttgctatacagaacacagttctttgtagatttgaatgtngagaaagtttgggagagtgcttnaagcttgattnccattaagcaaagggaatattttgggagaggcattggncgggttttnantttcaaacncggtgggcatttngttggccacaaanccggncancatttangcccttgggggttncaatngnaat

SEQ ID NO: 91503 - DNA, 531 bp, Arabidopsis thaliana columbia
agctactacgcctgcaggtaccggtccggaattcccgggtcgacccacgcgtgcgcgtccttggaggggacgacgacggatctgtctttctgtctactgaaaatccaaatttcatcctctccatttatttaactttttcagatttagttttgtcaagaaaacacaaaatgtcttttcttgcgccttgtcaaattttggagctgaatattatttcggcccaagaattggcgcccgtggcacggtgtatgaagacatatgcaatcgcttggattgatccagagcgtaaattgacgactcgggtcgacaatacgggcggaacaagccctacatggaacgacaagtttgtgtttcgtctagatgaggaagcactctacgatgccacatcaatagttgttatagagatctatgcattgcattggttcaaagacattcatgttggaacggtacaagccttaataagtgaccttgtaagcccttcttcggctatgagattcgttaccctagaggttcttcgtgcctcgggccgccccc

SEQ ID NO: 91504 - DNA, 890 bp, Arabidopsis thaliana columbia
actcactttagggaaagctgctacgcctgcaggtaccggtccggaattcccgggtcgacccacgcgtccgactttttgttgttgttatgtttcttgtcttacaagaaatgtgagttttgtttcaacaaaaccctaggttccaatctctgcctactatccagataacctctctttatcagcatggatgtgtttattcggaacaatacaatgtgcagtcgtctctttcttccttgagaaagacccaaacgcttggattctccattcctactccgagtttgccacatgtctctatgcaggaattggggcgtcagcactttcttttacggtccaagcttgggctacttgcaaagagaggtcctgtgttttctgcactgtttaatcctctttgtacagtcattgtcacaatcttggctgctttgttcttccatgaagagatttacactggaagtttaatcggaggattgggcgtgatattgggactttacactgtgctctggggtaaagcaaaagatgtcatgatgaatcaagatcagagagacaatgatcagaagtcagaagtgaagattcatatagaagattcttcaaacacaacaatctgtaataaagatctgaagaatcctctgttgtcccaacccaaatcaacagaagaaatcccaacccatccacaactatactaattcaatattcttccattctactgtttcttaaattttgaaagctgttttgttctaatcataaatgtaatatgatgtattaatgaaaaatcaaagtctagcttggtaaaaaaaaaaaaaaaaaaaaaaaaaaaaaaaaaaaaaaaaaaaaaaagggcggccgctctagaggatccaagcttacgtacgcgtgcatgcgacgtcatagtcttctat

SEQ ID NO: 91505 - DNA, 529 bp, Arabidopsis thaliana columbia
  unsure (1)..(529): unsure at all n locations
aaccgactnattgtggagaagctaccacgcctgcaggtaccggtccggaattcccgggctgacccacgcgtccgaggccgcgtggggttaggatactcctatccttgtttccaaacgggattacggttaacgacggcgatggcgccggaaattcacctgaaaccgaagaaccctagaattttatgccttcatggattcagaactagtggtcggattctccaagccggtataggtaaatggccggacacaattctccgagatctcgacctcgatttccttgacgctccttttccggccaccgggaaatcggacgtcgagcgtttctttgacccaccgtattacgagtggtaccaggctaacaaggggtttaaggaatataggaattttgaagagtgtttggcttatatagaggactacatgataaagaatggaccttttgatggtgcttcttggctttttctcagggagcctttcttaccagcagctattcctgaaatgcaagatccagggtgcggttcttactaaaggg

SEQ ID NO: 91506 - DNA, 637 bp, Arabidopsis thaliana columbia
ccgggccgagccacgcgtccgggcggtctcagctttccgtggcacgcggttaccgtttttttaccattctcagtttcccgtcgcgggaactgtgtcaggaacgtcgaagaagatgatcggagccaggaatttcaagggttttgttcttacagcccagtattcgcaaactcaggaccttttcacttctcgtcttcaaagccagatagagaaattgcccaaattggttgaggatatagttcagacatcgataaacacaggtccacgaggtgtgacacgccttgtccaaggtgttcaagcctttgtacgggttggaggagagtggctaaatgatttatctaagtctacaagcgcgtctggtggattaccaagtgaattgcagcttggtctactgtctcctctatatttgaggaaaactctttgaacgcatgggagctacttacattaagctgggccagtttatagcatctgcgccaactttgttcccaccagaatatgtcaaagaatttcagaactgctttgacaaagctcctcctgtgccatttgaagaaattcgtaaaatcttgcaagaggagcttgggagaaccattgaaagtgtatacgaatatgttgaccctacgccaattgcatcagcctcaat

SEQ ID NO: 91507 - DNA, 893 bp, Arabidopsis thaliana columbia
tgggacgcctgcaggtaccggtccggaatcccgggtgggccacgcgtccgccaagaatttcaagggttttgttcttacagcccattattcgcaaactcaggaccttttcacttctcgtcttcaaagccagatagagaaattgcccaaatgggttgaggatatagttcagaacatctttttcacagggggggggaggtgggacacgccttgtccaaggagaacaacctttgtagggggtggaggagagtgcctaatgatttatctaagctacaagcgcggctgggggataccaaggaattggcacttgggctacgggctcctctatattggaggaaacccttagacgcatgggagctcctaccttaagcgggcccagttataactctgcccaactttggtccaccaaatagggaaaaaaattcaaactgcttgacaaaccccccgggcccttagaaaaatccgaaatcctgaagaggagcggggaacccatggagggggtacaatttgtgcccctacgccatgggacagcctcaatggcacaaccctggggcaggcgttaaggcctccaaaaggggcgtgggataaagcctggaggccgggaaaaaatttcctaaggggagattgaccttttcgcgggtcccgcgatttgagggcctaagcccaggaaacccccccccgggggattggaaaaacttccgagccagctcgaaaaagaaatccagaggggcccaccttggggcttgagaaatcttggacgcgggggaagggcatgccccggcaaagaataaggcggggtgggcgggtcccacagaaagaggtgggggctcggcggccgaataataacctattcacggcaaaagcattcccacatgggttgtgagacactgtgaaaa

SEQ ID NO: 91508 - DNA, 417 bp, Arabidopsis thaliana columbia
cgaccacgcgtccgctttatgttaaatctcttcttaatctcctccttcatctctacttctcttgccgtcgaacctccgcctgaaacaatctaccaaaactttctccaatgtttcacaaaccaaacaaaagctcctcctaactcattagccgacgtcgttttaccaaaaaccgctgccgctttcacccccgtcttacgcgcttacatccgtaacgcgcgtttcaacaccacagcgactccgaaacccgcgatcgtaatcgcggcgcgttccgagagtcacgtccaagctgccgtcatctgcacgaaatcgctaaacatccaactgaaaactcgaagcggtggtcatgactacgaaggtgtttcctacatctctcacgttcctttcttcgtcctcgacatgtcaaatctccgtaacatc

SEQ ID NO: 91509 - DNA, 372 bp, Arabidopsis thaliana columbia
agtaaacaaaactaccaaaaaaaaaaacagaaaaaaacctttcaggtctcaactagcaatggagatgaagaagattgcctgcggagtcgttttcgctgctgcttccatgaccgccgtcatggctgcagaggtcggagcacctgcaccaggacccgccgcaagtggagcctccgtagctgttccggctcttggctctttggttggagcttcccttgtgtctctcttcgcctactacttgaactaagcttttctatttaaagcaaaaaaagaagaaatatcgatgtctctgtcaatttctatgatgtccaattttgtgtgtgttgtttagacaggcaaagtgaataaaacgaaaaataatttggattacgggcc

SEQ ID NO: 91510 - DNA, 591 bp, Arabidopsis thaliana columbia
  unsure (1)..(591): unsure at all n locations
cccctcgatgncgacggtatcgataagcttgatatcgaatccaggctcgctgacgagttctcaatagtaacctctccggcgcttatcgtgaaaaaccctatgttccagacttctcttacgctttccttgcaaaatctgcctcaattttggattgaagacaagagcttgaggctttttctccaatcttaattgaaactttggggtttttctcacggggattttgcgaattagggtttcggattggggattttgttacatcgaaaggactttggagattcagcgttgggctcggtaattgaagaatgcagaattcataaacaccgctctggaattttactttttaggataacaaaggagggtcattttatctgttaattgatgggtgaagagatatctagcactgtgaacctggatttgaatctggggtcctgatccctgagttaggtctcggagcccagcgaccaattatgccccggcctgattgggggaaatggacctggctgccaagggaacccgaatccccgagaagggtaaaaaccggaccgggcacgtcnaaccgggttnaatcctccgggcctgctnnaanaaanc

SEQ ID NO: 91511 - DNA, 436 bp, Arabidopsis thaliana columbia
cgcaaacacaagaacgtgtatatatacacaatatgtaggcgtttccggggatctatcgggcacacgatgtctatcaatccgtatgtgacaatcttcctcctcctcgccgctacctcaagccaagcgttgagtatttctctagctgacccctgcacggtgtcggattttcctgcattgtgcagaagtaccattaagggtcaaactaatgtgaatgcagcgacggatgtggccataaaagagttgatgaagcggacgaggcaagccaagaaaatcgcggagaaagagctgaaacgcgatggaggagtcgcgacttgtttgtccaacttcaatagcgcgtttgataatttggaaaaggctcttacaaacattaaggaaaatgatggttttagccttaacattaaccttagcgccgccttgacggattacgatacttgca

SEQ ID NO: 91512 - DNA, 495 bp, Arabidopsis thaliana columbia
acgcctgcaggtaccggtccggaattcccggttcgacccacgcgtgcggctccgcgtaaacactacgcgccgccgtaagcttgactatctagttcaagtcttccgtcatgtctacgacttcctccgtgcgtgttcgactagctttcgttgcgttactctcagcgacgacttttgactggatccataaatatccctcgcttgaggcgtctgaaaaacctctcggtaaaccctagctctacattgaaagccagcagaggaaagatcttcttcatctcccaaactggtacagctaaagccttagctcaacggcttcacgagctatgcgcatctaacgacatagcatttgatatcgtcgatccacatagctacgaacctgaagatctccctaaagaaaccctagttttattcatcgcgtcgacttgggatggggggaagccgcctaagaacggggagtttctttgtgaactggctcggggagagccctggagatttccg

SEQ ID NO: 91513 - DNA, 917 bp, Arabidopsis thaliana columbia
  unsure (1)..(917): unsure at all n locations
nnnnnnnnnnnnnnnnnnnnnnnnnnnnnnnnnnnnnnnnnnnnnnnnnnnnnnnnnnnnnnnnnngaccacgcgtccgaaaggtttcaacatttgtctcttgaaatcgatcgccgtttttctccatcctccgttcataattccggcaccgtttatccaaaatctacacttggctgaaaacatgagtcgtaatccggaggttctttgggctcaggggggtgtaaagtttacctaactgtcgccttacctgatgcgaaggacatttcggtgaagtgtgagcctcagggtctattcagtttctctgctcttggtgcccaaggcgagcgctttgaattcagcttggagttatatgggaagattatgacagaatatcggaagaatgtaggactaaggaacatcatattttcaattcagaaagaagagagaagctgggggacacgactggctgaaatcggaagagaaacctgccccttacatcaaagtccactgggaataatggggtaatgaggatgaggaggtcaacttctgaacagcctctgatgatgagagtgcattttgttattaaaataggggaagcagcgatgaccatggattggtctatcttcccggatctggaaaggcaaaaaacaagtagctaaacgggacaacaacccacccaccaatgtgggagatgaagaaaaagtaaagactagaagcctgaacattggcttaaggtgatccggtttgtttgacctacttaaccgccccttttgcttcgggtacctaggttccctcatttaaggtccgagggaaaacataggggcctgaggagtgggctttttttgttggggggcacaggggggtgggtggatctccgagggggatttaaggtggagggggcctcatacataccggggagtgttttttaaaaaaaaaag

SEQ ID NO: 91514 - DNA, 915 bp, Arabidopsis thaliana columbia
  unsure (1)..(915): unsure at all n locations
nnnnaataccactcacatagggaaagctcgtacgcctgcaggtaccggtccggaattcccgggtcgacccacgcgtccgtcagggcaacgtgaacagagtctagagatggctaattcctcctccttctccccctctaccaccgtaacagatttaatctccaccgtccatgacgacatcatagagtctcacatcttgacacgtctcgacggcgcaaccttagcatccgtctcttgcgcctcctcacatcttcatcatctcgcttccaatgagatcctctggtccaaaatctgccgatccacgtggccttcttgctccggtggttctcgttctttcttctccgacgcttattctatggtggaaaccggcggtacagtctctgatctcgaccgggccgtttcggaattgatctccgccgtggatcttcactacagagggaagttgatttttagtagagtcgggaaaacgggaactacgacggcgtgggtttaagttttcaccgcttgaggattgatccggtggataccaagggatacggggggacgcccattaaaaaaagacagaggcgggaaacacgggtgggaacctaaaaaaggattgactctgacctgatccggattaacccgccgggaacgaccggcaaatatttcaggcccgggccgggtggggcaaagaatcggatagcggagatgggggcgccattcccacggggggggggcgggggtgggggacccggggcacctcgggaggaagaaccccggaggaagggctcaaggggaaaagggggacccttaaacgagggcacttgtttttaaggggttgggggaagggttggaggggggggtcgatcaaaaaaacaagggtgggaaaaagataaggaaaaaggggacgggtcctttctgggcttgcgggggggg

SEQ ID NO: 91515 - DNA, 739 bp, Arabidopsis thaliana columbia
  unsure (1)..(739): unsure at all n locations
nnnnnnnnnnnnnnnnnnnnnnnnnnnnnnnnnnnnnnnnnnnnnnnnnnnnnnnnnnngaattcgtgccacgccgtcggggaattttctgaaagcgtcagactcgctgagacctaactatggagaacacacggccaaacgaagaagaaggaagaataagtgaaccaaattggagcgaacgagtggaggatctcgtggtagccggcgacgtcacggcggcgatctcctttctcgagtctttggagaccaatcttcaatcgcggttaggttcttcctcctccggcgagagaacggagtttgggcttcaattatccgccgctcttacgcagttggcggatctctactcttctgagggactttcccttaaatccgatgagcttcgaactcgctcttccctcattaagcaacgagcgttggattgtgatcttgcctcttcaagaagttccggcaatgtagagaatcaatctgttgcttccagtggactcaagtctgacccaaatgtctcaagctttgatgctgatgggaaaacggaggattccaaagtatctagcagtaattcagctgctcatgattcttcagatgatgattgggaagctcttgcagatgttgaaccgagtaagttactccccgtagaagagttgcctgaaatatcaaagctatcggttgaagaacctaaagttcaaggacctaggagacgtggaaggggaacgtttacttataggaggatgcaatgtcagtg

SEQ ID NO: 91516 - DNA, 547 bp, Arabidopsis thaliana columbia
  unsure (1)..(547): unsure at all n locations
atgatttgccggcactatacgactcacttagggaaagctggtacgcctgcaggtaccggtccggaattcccgggtcgacccacgcgtccgattaagggaaaacggaggattccaaagtatctagcagtaattcagctgctcatgattcttcagatgatgattgggaagctcttgcagatgttgaaccgagtaagttactccccgtagaagagttgcctgaaatatcaaagctttcggttgaagaacctaaagttcaaggacctaagagacgtggaaggggaacgtttacttataagagtgatgcaatgtacagtgatcgagatttctctgagtcgaggtttgatgatgattcagaagataacgatttatctcgtgagtcagagaagactgatgaatcactgaaatccaagtatggcacacgccatgtcctcgtacttgctggttttctccaagtttgagaactactgaattggagaagctatttaaagacttcanagatagtggatttatcattcgttgggtcaatgatacaacagcacttgcagtc

SEQ ID NO: 91517 - DNA, 423 bp, Arabidopsis thaliana columbia
cccacgcgtccgatctttatcaatattattaaggatcttaccagtgttgaacaactgaaagacagagatacgacccaaacaaatctgacacttctcaccagttttgctcggcaaggaagaatttttctggggcttcctatctctggacaagacgaagattttttcaagggtctcgacgtcactgcagatcagaaaaagagttttaagaaagctttcaacacatattatgatgctcttgcagatctccttcagtctgagcacaagttacttctccaaatggagaaagaaaatgcaaagctggtaaatgctaaaggagagcttagtgaagacagtgcatcttcttatgaaaagctgaggaaatcatacgaccatctctatcgaaatatctcatctttggccgaagcacttgatatgcaacctcct

SEQ ID NO: 91518 - DNA, 498 bp, Arabidopsis thaliana columbia
cgcctgcaggtaccggtccggaattcccggcttgacccacgcggtgcgagccctttaaaaaaatcctttgtgtaagatgtacatagaaattgcttcatcttcttcactttctcttccattattacccttaaccagacctcatatctacacttcgatacccttctccaccattcctgaagctagacaacgcaatctcatcttcacagtctctgcttcttcttcttcagaatccacacaaaacaaaaaggtatggagaaaacaaccggagaagaacactacgtcgtcgtttcaggccttaaggaaacatcggaggtatcaaagatctgcttttctcgaccacaacgtcgatatgggacgagccttttagccttcaattcacgcagacccagaacggaaaaagagcgtttttttcttgtgctttcaaacttacaaaggacagacaatgtatctatacggggcctgggcgcccttctttctcgagagaatgattggcagaga

SEQ ID NO: 91519 - DNA, 603 bp, Arabidopsis thaliana columbia
  unsure (1)..(603): unsure at all n locations
nnnnnnnnnnnnnnnnnnnnnnnnnnnnnnnnnnnnnnnnnnnnnnnnnnnnnnnnnnnnnnnnnnnnnccacgcgtccgggaaatcgtgaatccaaccaacaagacatttctctgactctcttcttccttcttctcctccaatttagggttccttcaaattctctctgatttcgtttgaaattgggggctcctcttcgaagatgacgatccctaattccgatttcatgttagaaaacggagtctgtgatttgccttttactcctgaggaagagaaacggattgtatcggagcttactagcgaatcggaggataatttgaaacaaggcaacttgtattttgtcatctctaaaaggtggtatacaagctggcaggaatatgttgagaattcggctaatgaatgttcaactggagagtcttcggaagctccgaggcctggaccgattgataaccatgatattatcgaaagtgatagcgacattaatgatccacaacttcctaaattgctggtggaaggagaagactaccttttaattcctaacaagtttggaaaaaacttggtgaatggtatagccgaggtccttcgatagaaaggaattgatct

SEQ ID NO: 91520 - DNA, 633 bp, Arabidopsis thaliana columbia
  unsure (1)..(633): unsure at all n locations
aggtctcatacgactcactctatggaaagctggtacgcctgcaagtaccggtccggaattcccgggtcgacccacgcgtccgctaaaaaggaggaggatgtcgtgacggtatctgataattctttgactgtccatgagcccagagtgaaggttgatttgactgcttatgtggaaaagcatgagttctgctttgatgctgttctagatgaggatgtttcaaatgacgaggtgtatcgggccacaattgagccaataattcccattattttccagagaactaaagctacatgctttgcatatggccaaacaggtagtggtaagacatttacaatgaaaccattacctatacgagcagttgaagatcttatgaggttgttgcgtcaaccagtatacagcaatcagaggtttaaattgtggctcagctattttgagatatatggtggaaagctgttcgatcttctcagtgagagaaagaaactttgcatgcgagaagatggtagacagcaagtttgccttgattggcctgcaagaatatgaagtttcagatgtacaaattgtaaanggatttatcgagaaaggaaatgccgaaaggagcacaggttcaactggagcaaatgaggaatcttctagatc

SEQ ID NO: 91521 - DNA, 540 bp, Arabidopsis thaliana columbia
  unsure (1)..(540): unsure at all n locations
nnnnnnnnnnnnnnnnnnnnnnnnnnnnnnnnnnnnnnnnnnnnnnnnnnnnnnnnnnnnnnnnnnnnccacgcgtccggattttatcggatgtgtcgtaatgaaaggggtaaaacacgtggcagtcaaccaggctgtcagttgttggtgaaagcagacaagcgcgtgattttaatataatctctctttacccgcgccaacaacactttaccaagacagatctctcatggcggtgctctgatgcttcagcctttgattttttccttttttgacctttttaatctctaattataataatcagtacaaaatcactgttgtttaccattaatttaaggaattaatcctaatctgattttaaggaattaatctctatttgccaaagaagaggcgcaaaggctccgtcttttttcttcttcttggttctgggttaccgatctgggctctgtcttcttcttcttcttcttcttcttcttcttcttctcctccttcttcgtttacgtctctgtgaaatgctcaagctgattangggttatcaacttt

SEQ ID NO: 91522 - DNA, 592 bp, Arabidopsis thaliana columbia
aatatctctctttctccgccgaacttcttcgaatcaagtttccgtttatcactctaatattgttaaagtttccactgataccaccgctctagtcatggctgaagctgaagatcagcaaaatttcgttgcacacaatggagatcaggtaccagatcaagggtcagatgagttgcataatgggttaccgtaccaggttcatgatgagacccttgttcaccaaccatacgaggttgaagatccgattcttgaacctcagcagtacgaggtaccagatccgactcttgaaccacagcagtacgaggtaccagatcagactcttgaacctcagcagtacgaggttgatgatcagttagagtatcatcaataccagttgcaggaccaggctaatgaagatgtccaagatcattcgcaagatgacctacaatatcagccacaaaatcaggagcatgtttcaagttttcaagacgggggctcaatggtccaggctcagtatcaggcgcaaggtgatgtacaagatcacaatggtgatgaagtgcaagataaagtagaagatgaggaaggaattcctgagcatcttgagtctctacagaaa

SEQ ID NO: 91523 - DNA, 710 bp, Arabidopsis thaliana columbia
tacgactcactatagggagagctggtacgcctgcaggtaccggtccggaattcccgggtcgacccacgcgtgcgcaaaaacaaaaagagttgataaactacagtaatggaaaatgagggttcatgatcaacggctgagatttgatgtcacacccaagccgatgggtttgaacgggagttctttgatcacggcaagatccgtcgcacttcttctctttctctctctgcttcttctgattctgccaccgttcctgccgccgcttccaccgcctccggcgacactcctcctccttcctctactcctcatgattctcctcattttcttggctttttctccttctaatgagcccagcctcgccgttgaacctctcgacccctgatgtcggcgacttgcgttgcgaaccgtccgtacatacataatatgcattacacaaatatgtctaattgtgtctctatgtgtatgttattcaggagccaggttaaggccttttaggtttagtttcgtgcaagtaagatcatgtcatgtgatagatctccgagtttttcttttcaaggatttcgtgtaaatttagtttttaattactttctatgagcaattttatttttcaattcaattcgttttttctattcttgttttgtagaagaattttgttttatcagcgtcacattatgaattgtagaagaataattttaaaatgcagtagaagcctt

SEQ ID NO: 91524 - DNA, 529 bp, Arabidopsis thaliana columbia
  unsure (1)..(529): unsure at all n locations
nnnnnnnnnnnnnnnnnnnnnnnnnnnnnnnnnnnnnnnnnnnnnnnnnnnnnnnnnnnnnnnnnnnnnnnnnnnnnnnnnnnccacgcgtccggccacgcgtccgaaattatacatcttcctcctcttcctctgccaacttataatcccgtcaaagatctttccttttttcttcttctggtttctttgtggtttcctggaggctctcagcatcttcgagtcgttgcgaggatgcgttagaagagagtctcctctcaatcttcgaatctccaagactgtattgactggccatggctgctgataccacagcttcaagttactggttgaattggagggtcctcctctgtgcattaatcctcttagctccaatagtattagcagctgttctcatttggaaatatgaaggcaagagaagaagacaacgcgagagccagcgagaattaccagggacattgttccaagatgaagcttggaccacatgttttaaaagaatccaccctctttggttgcttgcctttaaaggggaatt

SEQ ID NO: 91525 - DNA, 655 bp, Arabidopsis thaliana columbia
  unsure (1)..(655): unsure at all n locations
ccggaatnccggncgaccaggcgtccggtggtttcctggaggctctcagcatcttcgagtcgttgcgaggatgcgttagaagagagtgtgctgtcaatcttcgaatctgcaaagacagtgtgagaatgggtgaccaatatgtttcttagtggtgatgttctcttttgctttgttggtggaatcttaggactgtattgactggccatggctgctgataccacagcttcaagttactggttgaattggagggtcctcctctgtgcattaatcctcttagctccaatagtattagcagctgttctcatttggaaatatgaaggcaagagaagaagacagcgcgagagccagcgagaattaccagggacattgttccaagatgaagcttggaccacatgttttaaaagaatccaccctctttggctgcttgcctttaggggattctcgtttgttgcaatgttgactttactcatttccaatgttgtgcgcgatggagctggcatattctacttctatactcagtggacatttactcttgtcacactctactttgggtatgcttcggtgttatctgtttatggatgctgcatctataataaagaagctagtggaaacatggagagttatacaagtataggtgatacggaacaagggcact

SEQ ID NO: 91526 - DNA, 1163 bp, Arabidopsis thaliana columbia
  unsure (1)..(1163): unsure at all n locations
tccagctctctacgactcactatagggaaagctggcacgcctgcaggtaccggtccggaattcccgggtcgacccacgcgtccgcactacttcactcagtggcaccgttcaggtcgaatctgagggattcatggcgaaatggattgggtttaagaacactgctggtccattgggacaccaagcggtcgcactccgtgtgaacggagaccgtgcggtcatattcaactgtagattcgacggttaccaagacacactctacgtcaacaacggacgtcaattctacaggaacattgttgtatccggtacagtggatttcatcttcggaaaatccgcaactgtgatccaaaactctctcatcctcgtccgaaagggaagccccggacaatccaactacgttacggctgacggtaatgaaaagggtgcagcgatgaagatcggtatcgtcctccataactgccgtatcataccggacaaggagctcgaagctgacaagctaaccatcaaatcgtacctaggaaggccgtggaagaagtttgccacgactgtgattattggaactgagattggtgatttgattaaaccagaaggatggaccgaatggcaatgagaacaagaccacaagactgctaaatacattgagttcaataaccgtggcccgggagctgccactactcagaggcctccttgggttaaggtggctaagtctgcggctgaggttgaaacttacaccgtggctaactgggttggtccagctaactggatccaagaagccaacgtgcccgtccaactaggattgtaagaggacaacacaaaaaagttaagaataaaacagtatgtgataatgttaaggtaacgatacgacgtcgtctctggggatcagaactcttttttggatactatatacaaagatagggttctagacgtgttgagatgatgtttgtataagattgctttcgtttcacgtgcaaaagaggaaaaaaaattgttttgttattttttttgtagtacaaataattaatttttttttatcacatgttgtatccttaagaaaattgatacacaaaatattttaaataccatcatttgctaaaagaaaaaaaaaaaaaaggccggccgctctagaggatcccagctcacgcacgcgtgcacgccnnnnnnnnnnn

SEQ ID NO: 91527 - DNA, 410 bp, Arabidopsis thaliana columbia
cgaaatctgaatcaagagattaaacaaaaattgaacggacttgctttgacacagcagaccgtaaatcgggatgggggctcctaagcagaattggactcaagaagaagaggcacgctttaaggtctggagttataaagcatggacctggtaaatggcgcacaattctcaaagatcctgaattcagcggagtcttgtacctgcgttccaatgtccatcttaaggacaaatggagaaacatgactgtcatggcgaatggctggggatcgcgcgaaaagtctaggttagctgttaaaaggacgttctcccttcctaaacaggaagagaactcactagccctaaccaattctttgcaaagtgatgaagaaaatgtggatgcgacctctggactccaagtttcttctaatcctcct

SEQ ID NO: 91528 - DNA, 415 bp, Arabidopsis thaliana columbia
  unsure (1)..(415): unsure at all n locations
agactggtgtttccttcacgctaaagnngattggggaagacctaaatcctgttctgagcttgtgtcctgcagactggagcattgacagagaagcaggaggagggcgatctgaaacaaaccagaaaaagtctcttccaatagaacctagcacatgtaaaaaaatcaggaaagacgtgaacatcaaagatgacaacagcaaagagaaaaatgacaaagaagagagcaaatcagtggatggagagaggaaatatctgagagggacatatttaactccatcaagccaaaaacactttgtgacattaacaattacaccttcctctataaaaaaagatagacttattctttccccacaatttgcaaggaagaacaatattgacaagcctggaatgatatatctgctggatacagatggtac

SEQ ID NO: 91529 - DNA, 481 bp, Arabidopsis thaliana columbia
cggtcgcgtgggtttttttctcccgaacatgatctttcaatctcaacgacgatttctcagtgactaatactacatttgtatacattcttcatcatcatcatcatcatcatctgtgtttttgttcatattcatttttcagttatcgctttcaatttttaaaacttttttcttgggtttcacaaaatttgtcgttaatcgatgaatttgattgttttcaagatcacccatctctcgaattcacgaaatctctcagcttttccgtgattcttggtaaaaattcacaaaatcgaaattggagaaagaaagaaaaaattagggtttgaggaaaagcttcgatttttcacacgatgagtcatcaccggcgagattccggcggagatgtagttcacgtgattcccacaaacaatcctccgccggataattggtttccgaatctcggcgatagtgctgtttgggcgacggaagatgattacaatagagc

SEQ ID NO: 91530 - DNA, 456 bp, Arabidopsis thaliana columbia
caagaaacgaattgtctctaaaaagaagaagatggcgaaaaatagctgtttggccaaaatcactgccggagttgccgttggcggcgctcttggcggcgcagtaggtgctgtctatggaacttacgaggcgattagagtcaaggttccggggcttcataaggttagattcattgggcaaactaccctcagcagcgcagcaattttcgggctttttctaggtgcgggcagtttgattcactgtggaaaaggctactgattcccttacattggtttagctctacaagctttaagtttgtatctctcttagtctcttggtgaaagattggattctttttttttcgagtggtattgagctttttgttgaaataactattggatgaatcgtttttatacgtttctgctactctttgtgtgataaaatcgtctctcttgggtatggtcagaaagcttcttatt

SEQ ID NO: 91531 - DNA, 695 bp, Arabidopsis thaliana columbia
  unsure (1)..(695): unsure at all n locations
ggtgnnnnnnnnnnnnnnnnnnnnnnnnnnnnnnnnnnnnnnnnnnnnnnnnnnnnnnnnnnnnnnnnnncttttttttttttttaacacaagattaatttttgtaaactggattaaaaatacaaaacaacaccgctcattaaatggagagaataataaaattcaccaattataaaagaagatcaaaaccgctcctcagttctctacatcaaatctatgaaaaaaaatgacagacatttccagtctctttagaaaccgaagtcgcaaggaccaacttgactatggtttaactgtgatagttatatcaactctttgttggtgtctttggctctacgccaaatgcaaacggcggtctccaccgttgccgccgggaccttggggccttcccattatcggaaaccttccattcctccaaccggagcttcacacctacttccaagggctggctaaaaagcacggtcccattttcaaactctggctcggggccaagctcacaatcgtggtcacctcttctgaagtagcgcaagagattctcaaaacgaatgacatcatcttcgcgaaccacgatgtccctgctgtgggccctgttaacacgtatggtggtacggagatcatttggtcgccgtatggaccaaagtggcggatgctgaggaagctatgtgttaataggatactgagaaacgccatgttggatt

SEQ ID NO: 91532 - DNA, 499 bp, Arabidopsis thaliana columbia
  unsure (1)..(499): unsure at all n locations
nnnnnnnnnnnnnnnnnnnnnnnnnnnnnnnnnnnnnnnnnnnnnnnnnnnnnnnnnnnnnnnccacgcgtgcgcccacgcgtccgatggattcttcttttttactcgaaactgttgctgctgcaacaggcttcttcacacttttgggtacaatactttttatggtttacagaaaattcaaagaccatcgagaaaacaaagaaaatgattcttcttcttcaacacaaccgtctccttcaccacctctgtcgtctttatctctcacgcgaaaatacgatgtctttccaagcttccgcggggaagatgtccgcaaagacttcctcagtcacattcagaaggagtttcaaagacaaggaatcacaccatttgttgataacaatatcaagagaggagaatctatcggtccagaactcattcgggcgattagagggtccaagatcgcaatcatcttgctctccaagaactacgcttcttcaagctggtgcttagacgaattggt

SEQ ID NO: 91533 - DNA, 405 bp, Arabidopsis thaliana columbia
agatattgaagtaaaacataaaagaaaataaaccctaagaatatatcgaaaatgatcaaagggctcttgttggtttttttctttttaatcactgcaaagacttctgtttcacgtccgtttgcatggtcgagaggtaacatgccaggcgaaagtgggtcgggccgtgggccgaattgggagtacaattggggttggggctctgctccaggatctggatggggttacggggcaggctcaggtagatcaccaacaggatggggaagaggatccggatacggttatggatctggatcgggatcaggtaccgggtatggatatggttctggaggtggtggagcacgtggtggtggatatggttacggaaagcgggaaatggtcggtcttggtggcggtggtggtggtggt

SEQ ID NO: 91534 - DNA, 503 bp, Arabidopsis thaliana columbia
gaatcaaacagtggcttaaacccaaaaaaggaacatggatgttagtatgagtttttcacaagatatggataatgagtatgagaagctgataagaagaatgaatccaccaagggttgtgattgataatgactcttgcaagaaggcaactgtgataagggtggatagtgcaaatgaatatgggattcttcttgaagttgtacaaatccttactgatcttaaccttactatcactaaggcgtacatatcttctgatggtggttggtttatggatgtatttaatgtcactgatcaagatggtaacaaagtcactgatgaagttgttctagactatatccaaaagtctcttgggcctgaagcttgtttctccacttccatgagatcagttggtgtcataccatcaacagacagcacggttattgagttaactggatgtgacagaccaggtctgctgtctgaactgtcagctgttttgacccatctcaaatgcagtgtcctcaacgctg

SEQ ID NO: 91535 - DNA, 656 bp, Arabidopsis thaliana columbia
ccttttcagatttcgcttcttcaattcatgaaatcctcgtgattctactttaatgcttctcttttttacttttccaagtctctgaatattcaaagtatatatcttttgttttcaaacttttgcagaattgtcttcaagcttccaaatttcagttaaaggtctcaactttgcagaattttcctctaaaggttcagactttggggtaaaggtgtcaacgttggcgatgggtcttgacggaaacaatggtggaggggtttggttaaacggtggtggtggtgttagggaagagaacgaggaaggttcatggggaaggaatcaagaagatggttcttctcagtttaagcctatgcttgaaggtgattggtttagtagtaaccaaccacatccacaagatcttcagatgttacagaatcagccagatttcagatactttggtggttttccttttaaccctaatgataatcttcttcttcaacactctattgattcttcttcttcttgttctccttctcaagcttttagtcttgacccttctcagcaaaatcagttcttgtcaactaacaacaacaagggttgtcttctcaatgttccttcttctgcaaacccttttgataatgcttttgagtttggctctgaatctggttttcttaaccaaa

SEQ ID NO: 91536 - DNA, 514 bp, Arabidopsis thaliana columbia
ctaatacgactttatatagggaacgctggtacgcctgcaggtaccggtccggaattcccgggtcgacccacgcgtccgcccacgcgtgcgcacttattcacattctctcaccagacacaaactccagattcatccgacaatggaaactttcagaacattccatctttttctcttcttcttcttcttcacattcactactaccctgacgtcaccatctcagatcgcagactgtacaatgtgcacttcttgtgacaacccttgtcaaccaaacccttctcctcctcctccaccgtcaaatccatctcctcctcctccatctcccaccaccaccgcctgtcctccacctcctagctccagtggtggtggtccttactactactaccctcctgcttctcaatctggctcttaccgtccaccaccttcttcctccagtggtggctactactatccacctcctaaaagtggaggaaactacccttatacaccgcctacaaaccctatcgttccatatttt

SEQ ID NO: 91537 - DNA, 627 bp, Arabidopsis thaliana columbia
  unsure (1)..(627): unsure at all n locations
nnnnnnnnnnnnnnnnnnnnnnnnnnnnnnnnnnnnnnnnnnnnnnnnnnnnnnnnnnnnnnnnnnnnnnnnnnnnccacgcgtccgctccatttctatgttggagatgcttatgactctggcagcaagattgacgacaatcatattttaaggaagcttaaacccaaggaaatctggcatctgactgtgcttggttcgattgcaaccacacaaagggaatatgttgctttgcatgcgttttcccagcttaacccacagatgcaaaatgcaattctcaagcctagcccagagcagtttcctaattacggggagcagactcctacagtgcccgattgtttcactccgagctttgctggccatttacacagaagctttaatgctcctcagttggcagcaattcactgggccgcaatgcatactgcagctggtacgagcagtggggtaaagaggcaagatccatggccatttactcttgttcagggccctccaggaacaggcaagacacacacagtttggggaatgttgaatgttatccatttggttcagtatcagcagtattacacttccttgctgaagaaattagctcctgaaagtataaacaagttaatgagagcagtcagaaatatt

SEQ ID NO: 91538 - DNA, 497 bp, Arabidopsis thaliana columbia
ccagctctattcgactcacttagggaaagctggtccgcctgcaggtaccggtccggaattcccgggtcgacccacgcgttcggagacagttgagttcgacacattatcagggattctaacagctaaacatctcaaaaatgatgatgatggagaagaatcaagtatcgaattggatttccctgttgttccaacatatgaagtcaactacattgatgatgatctctctttgttctccggagccttgaatggagctaccattcttgatgtcaaagccacacagaaagacctcctcgttgtgctttcatcttgggaagctgttattgattcgaagccaagattagatgagatatcgaaatgcccttgtgaaggaatgatggtgactgccgctgcttctgatggatctacttatgatggctggagtcgctactctgccccgagattcggaatcattgaggaccctgttactggaagtgctcattgtgcttgacctattactg

SEQ ID NO: 91539 - DNA, 647 bp, Arabidopsis thaliana columbia
  unsure (1)..(647): unsure at all n locations
cccttttcccncattggagccncncatggggggccccctttttccccaacccttgaatggnctcccatnttggtgtcaaccccccaaggaagcccnccncgttnngcttncatctgggaacctgttatggatttgaagccaaggattaggtgagatatcgaaatgcccttgtgaaggaatgatggtgactgccgctgcttctgatggatctacttatgatttctgtagtcgctactttgccccgagattcggaatcaatgaggaccctgttactggaagtgctcattgtgctttagctcattactggagcctcaggatgaacaagtgtgatttcttcgcctaccaggcttcaagcagaggaggaacgttgaaggtgcacctggacaaagagaagcagagggttctactgagaggcaaagcagtcactgttatggaaggttatgtcttagtgtgattttggctatgatgaaaattcaggctcttgtaaacgatgaaattaataaaagattccatatattctcggatatatataattgtatccattaataaatactcgttttttaagtaaaaaaaaaaacaaagggcggccgctctagaggatccaagcttacgtacgcgtgcatgcgacgtcaagactcttctatagt

SEQ ID NO: 91540 - DNA, 1049 bp, Arabidopsis thaliana columbia
ctggtttattgttggtggcggtgataacattagtgggtcatcggagagtgttgtactaaacatgtcggctcttgcatggtcggtcgttgcttcagttcaaggacgtgtacctcttgctagcgagggattaagtttagtggtgagttcatacaatggtgaagatgtactagtcgcttttggtggatacaatggacgttacaataacgaaattaatcttcttaaaccaagccacaaatcaacattgcaaacaaagactctggaagcgcctttgccaggtagtctttctgctgttaataatgccacaaccagagacattgagtctgaggttgaggtgagccaagaaggcagggtacgggaaattgtcatggacaatgttaaccctggatcaaaggttgaaggaaacagcgaacgcattattgcgactattaaatctgagaaggaagagctggaggcatcactgaacaaagagaggatgcagactctccaactaaggcaagagttaggagaagcagaattacgaaacacagatttgtacaaggaacttcaatctgttcgtggccaacttgcagccgaacaatcaaggtgtttcaaactggaggttgatgttgcagagctaagacaaaagcttcaaacattggaaacactacagaaggaactcgaactcctgcaacgtcaaaaggctgcctcagaacaagctgcaatgaacgctaaacgacagggctcgggtggcgtatggggctggctcgctggaagccctcaggaaaaagatgatgattcgccttgatcatttttggtccggtaatgccattttcctccggacgatatttgctttcagtaaagaaatatatatagttttttttgtctgagtctctcgcattgtttcttcttccaataagatatttttttagcgagctttgattactaccgatgtttagctttgttctctgttatacaagtgattcaccagaatattcgttaacttttttgaaatatttgttttgggagtgtctgacaaaattatgaaaactaaatcagtttacgatcagcac

SEQ ID NO: 91541 - DNA, 501 bp, Arabidopsis thaliana columbia
ttttccgatttagcgaagccagcaaggatctgtttcagagggaaaaaaaagaggttccgactttttgttagctagcggctcactctactttgtctcccccaaaaaagccgttagggtttatcatatccaccgccttgctttactctcgccggagtcgtacggcgaagcacggttgttcggcgttgtctcagctttagattcttctcttcatagctagaattcgcgaaagctgactttagctgaaacgaatttctcctaattttcgagatatggcggaggtatcgatgggaagcagcagtagcagcacggatctgtctcccgaggaagagcgagttttcatcagagacattgctattgctgctgaggctaatagtaaagaaggcgatacattttatctcatcactcagagatggtggcaagaatggattgagtatgtgaatcaagaccaaccatgtaacacaaatgatgggtcttcactgtcagagcattgcgactctcctg

SEQ ID NO: 91542 - DNA, 434 bp, Arabidopsis thaliana columbia
ttggtcgcgtgggtgattttttcaaataaaataaaataacggaagctggtttaaagaacaccgttgaattctattttcccataagctgaaaaaaaaactaaatttttgtgttgcccaccaaaaggtttgaaattttgatccgacgatacttgagctgatttacgttattagtgctatttcgatttcctcaaagatttcgttttttttttcttctaaatttcttagttaacctcttgcgtgtgcaattggtgcacttagcaattcctcttctgggccggtgatttgggttgcgattgtttttttttttttagggtttgattggatcgtggccctgatttagaacctaattgcggtcaaaagagtctgtgggaggattgaattggaataaagtgttatctttttttgattggcggaattcacattcaatcggaaag

SEQ ID NO: 91543 - DNA, 486 bp, Arabidopsis thaliana columbia
  unsure (1)..(486): unsure at all n locations
ttattacctgagcaaaaactgaaagaaaaaaaaaaggaaaaaaaaaaagacttctcctcaaaaatggcgtttacactaggtggaagagctcgtcgtctagtctctgcaacatcagttcatcaaaatggttgcttacacaaactgcaacaaattggatcggatcggtttcagcttggtgaagcaaaagcaataagattactacccaggagaacaaacatggttcaagaattaggaatcagggaagaatttatggatctaaacagagaaacagagacaagttatgattttctggatgaaatgagacacagatttctgaaattcaagagacaaaagtatctaccggagatagaaaagtttaaagctttggccatagctcaatcaccaaaggtaatggtgataggatgtgcagattcaagggtatgtccatcttatgtactaggatttcaacctggtgaagctttttcactttccgnaaatgtcgncant

SEQ ID NO: 91544 - DNA, 1168 bp, Arabidopsis thaliana columbia
  unsure (1)..(1168): unsure at all n locations
ggaaagaaaaaaaaaaaaaaagacttctccccaaaaatggcgtttacactaggtggaagagctcgtcgtctagtctctgcaacatcagttcatcaaaatggttgcttacacaaactgcaacaaattggatcggatcggtttcagcttggtgaagcaaaagcaataagattactacccaggtgataagataaagtttggtctttatagttctttaaaaaaaaaagtgaatcaaagaataaagacagagattactctgtttttttgtatcataggagaacaaacatggttcaagaattaggaatcagggaagaatttatggatctaaacagagaaacagagacaagttatgattttctggatgaaatgagacacagatttctgaaattcaagagacaaaagtatctaccggagatagaaaagtttaaagctttggccatagctcaatcaccaaaggtaatggtgataggatgtgcagattcaagggtatgtccatcttatgtactaggatttcaacctggtgaagcttttactatccgaaatgtcgccaatctcgttaccccggttcagaatggaccaacagaaaccaactcggctcttgagtttgcggtcaccactcttcaggttgagaacattatagttatgggtcatagcaattgtggaggaattgcagcacttatgagtcatcaaaaccaccaagggcaacactctagtttagtagaaaggtgggttatgaatgggaaagccgctaagttaagaacacaattagcttcatcacatttatcctttgatgaacaatgcagaaactgtgagaaggaatctataaaggattctgtgatgaatttgataacttattcatggataagagatagagtaaagagaggtgaagtcaagattcatggatgttattacaatttgtcagattgtagtcttgagaagtggagattaagttcagacaagactaactatggattctatatttcagacagagagatatggagttgagtaaatattgaacaatcctcagttctaatattcagatgtatctttgtacatacgaaatgatatttacacaattggaaaaaaaaaaaaaaagnnnnnnnnnnnnnnnnnnnnnnnnnnnnnnnnnnnnnnnnnnnnnnnnnnnnnnnnnnnnnnnnnnnnngaaatc

SEQ ID NO: 91545 - DNA, 451 bp, Arabidopsis thaliana columbia
agagtaaacttttcagacagatttgtttcgagaaaagatcgcttgcttggcttttcaggataatctgagatctatctgtagaagaagcagatacagaattcagaaacgatgaccgacgtcgatgaatccgttagacgccgtacagccgccgtttccgagtaccggaaaaagctcctccaacataaggaactcgaatcccgtgttcgaacagctagggagaacttaagaggagctaaaaaggaattcaacaaaaccgaggatgatctcaagtctcttcaaagtgttgggcagattattggagaagtgcttcgacccctggataatgaaagattgattgtgaaagcgagcagtggtccacgttatgtggtgggttgccgaagcaaagtggataaggaaaagctaacctccggaactcgagttgttctcgatatgacaacactaacaattatgc

SEQ ID NO: 91546 - DNA, 481 bp, Arabidopsis thaliana columbia
cggtcgcgtgggcggacgcgtgggcggacgcgtgggctcagatatcgtgattcttgacgataactttgcttctgttgcaacggttttgaaatggggaagatgcgtgtacaacaaatattcagaagtttattcagtttcagctcactgtcaatgtagctgctctagtgatcaacttcgtggctgcagtttcagctggagacgttcctttgacagcggttcagttactgtgggttaatctgatcatggacacactcggtgcattggctttagctacagagaagccaacaaacgatcttatgaagaagaaaccgatagggagagtggcgccattgatcacaaacatcatgtggaggaatctactagctcaagcgttttaccaaatctctgtgctcttggtgcttcagtttagaggaagatcgattttcaacgtgactgagaaagtgaagaacactttgatctttaatacatttgtgctttgtca

SEQ ID NO: 91547 - DNA, 511 bp, Arabidopsis thaliana columbia
ttcttcgcgtccgcttcacacacctttgatcagactggacacacctataacattacccgtatcctcaatgagaagaatttcgatatcaatctagacgcttacaacggttacagcaagctctatttgagtgtgatgttcgcgttgctctatggactcagctttggttctctttgcgctaccatctctcatgttgccctctatgatggaaagtttatatggggaatgtggaagaaggcaaagacagcaacaaaggacaagtacggtgacgtgcattcgagattgatgaagaagaattatcaatcagtacctcaatggtggttcatcgcagttctagttatttcctttgctttcgcactctatgcttgcgagggctttgacaaacagcttcagctcccatggtggggacttatactcgcttgcgccatcgctttgttcttcacattacctatcggagttatccaaagcactactaaccagcaaatgggtcttaacgttataacagaactgatca

SEQ ID NO: 91548 - DNA, 438 bp, Arabidopsis thaliana columbia
tgctttcgcgtccgctttaaactacaaatcaaggcaggggcctctctattctctgcagttctcttgtctctttgtttactctcttcactttttctctcaaatgcaaacgctaagccaaaactaggcttcaccgcggatctaatccaccgtgattctcctaaatcgccgttctataacccgatggaaacctcttcccagcgtctacgaaacgcgatccaccgatccgttaaccgtgttttccatttcactgaaaaggataacacaccacaaccacagattgacctcacctcaaatagcggtgaatatctcatgaacgtatccattggaacacctcctttcccgatcatggccatcgccgacaccggaagtgatctcctctggacgcagtgcgcaccatgcgatgattgttacactcaagttgattctctctttgaccct

SEQ ID NO: 91549 - DNA, 647 bp, Arabidopsis thaliana columbia
acttaatcagaattacacaaatgggaactaataagattcccgaaaccctcaacgggaaccttgttcttatacttatcatcaccataatgatggtgactcactcccatggatttcaactggagatcaggaacgagctatcaggaaggtacaggaagcttgtgtacaaatgctggtcccgcgataacgatttcgggtggcgacagaactggccaggccagtacaaggactggtccttcgccatttcactattccacacctacttctactgccacttccgtacagcgtatggacgcgtggataagcagctagtagcgtcatgggagttaaaacaagagtgtggggacaggagaaaatgcacttgggtcgttaagaaggacggactctacttgagacaatggaagaccaaattttttagtaacaagtatggtaacgaaaggtggaatgtgtatattgaacatgatgtcctcaagaaaagttggagctaattaacaatttcacggtgttgattgtcatgaagatcgcgaggaccggatatcgtgattttcgtctctgtatgtgttattcatggtaataaaatcatacaatgtgtaactatatacccatggtgaaaatgagaaagaccgcctctatatatataatatgttgtt

SEQ ID NO: 91550 - DNA, 1027 bp, Arabidopsis thaliana columbia
  unsure (1)..(1027): unsure at all n locations
cacgagatacaaatcggagttgtccgtatattatattttgtagcgatcaagagagactaaggcagacatgtgagaggggagaggatcctataaacaatttaaatctaagatctctgcttcctccttctcatatatatattgcatatttacacatagttcctctatacagaaactgatcgagaaaactcacgaaacaagaggctaatcaaaagcatagaagaagaatggtttcaagggaacagaagagaggttctttgcaagagaagtttcaattgcttcgttcaatcactaattcacatgctgaaaacgatacatcgatcataatggatgcatcaaaatatatccaaaagcttaagcagaaagtcgaaagattcaaccaagaccctactgcagagcaatcttcaagcgagcccacggatccaaaaacaccaatggtaacagtggaaaccctagacaagggttttatgataaacgtgttctcaggaaagaatcagccagggatgcttgtttcggttttagaagccttcgaggatattgggcttaacgttcttgaagctagggcttcatgtaccgactcttttagcttgcatgccatgggactcgagaatgaagatggagaaaatatggatgctgaagcagtgaaacaggcagtgactgatgcaatcaggagctggggtgaaatcaatgatccacagaactagattgacccacttttcattttttttttatatataatttatttcttattatacaaaatataaggaaataacacagtttctatagtatttctgcttcttcttttttctttttcttctgtccattttgtagtccagaatttccccgtgaaaagggataatgaagaaaaatcaattgtatgtttatttatttcacgtaagcaatagaaaatacgttcttaaggtacatcacctaccaaaaaaaaaaaaaaaaaaaaaagnnnnnnnnnnnnnnnnnnnnnnnnnnnnnnnnnnnnnnnnnnnnnnnnnnnnnnnnnnnnnnnnnnnaacga

SEQ ID NO: 91551 - DNA, 444 bp, Arabidopsis thaliana columbia
caataccattgtctgagaaatcagattcaggagcaaatgttgctgtaaatgagaacaatcaagagaatgaaagagctctaggtccatccatctatctaaagggtttacccctttgatgcaacacctgccttgcttgagaatgagttccagaaatttggacttattaggaccaatggaattcaagtgagaagccagaagggattctgttttggttttgttgagtttgaatccgcaagttccatgcaaagcgctatcgaggcatcacctgtcatgctcaatggacacaaagttgttgtggaggaaaagcgatctaccgcaagagggaactatagaggacgttccacgtttggtgtaaacacaggctacagaaacgaaggaggaaggggtcgtgggagctttggaggtggaagaggaggatatggccggaccgatttcaacggatat

SEQ ID NO: 91552 - DNA, 381 bp, Arabidopsis thaliana columbia
tgttttaaccttctagggcttaagccttctccgttagatttagctttgatgtttaaaaatcttttcaaagttgtaacctttcgaatcttctgaagaaacccatgtccatgaatggtcagagaagctcttcaatttctttctcgcctgagaaaatcctcgaatctcccagacccattcacctgcaacaagcatattcatcagctaatcaattccaattgcggcattctatctctcaaattcttagcttacttagtctccagaggttacactcctcatcgttcttcattcaattcggccgtatcgtttgtttgtaaactagggcaagttaaattcgctgaagatatcgttcactcgatgcctagattcgggtgtgaaccagat

SEQ ID NO: 91553 - DNA, 400 bp, Arabidopsis thaliana columbia
  unsure (1)..(400): unsure at all n locations
agaaagtgaggccacatgttcttcttggtttatctggagttggtggtatctttaatgaagaagttctcaaggcgatgcgagaatctgactcatgcaagcctgccatttttgccatgtcgaatcccactttgaatgccgagtgcactgctgctgatgctttcaaacacgccggaggaaacattgtctttgcaagtggaagtccatttgagaacgttgaacttggatcgggctagggactcttctctctggtgcacgtatcgtaactgatggaatgctacaagcagcttctgaatgccttgcgtcctacatgaccgatgaagaagnncaaaaaggcatcctttacccttcaatcaacaacatccgncacataacagctgaagtcggggcagctgttctacgg

SEQ ID NO: 91554 - DNA, 906 bp, Arabidopsis thaliana columbia
  unsure (1)..(906): unsure at all n locations
gaaaaagttctcaaggcgatgcgagaatctgactcatgcaagcctgccatttttgccatgtcgaatcccactttgaatgccgagtgcactgctgctgatgctttcaaacacgccggaggaaacattgtctttgcaagtggaagtccatttgagaacgttgaacttgagaatggtaaagtaggacatgtgaatcaggctaacaacatgtatttattcccggggatcgggctagggactcttctctctggtgcacgtatcgtaactgatggaatgctacaagcagcttctgaatgccttgcgtcctacatgaccgatgaagaagtccaaaaaggcatcctttacccttcaatcaacaacatccgacacataacagctgaagtcggggcagctgttctacgagctgcggtgactgatgacattgcagaaggacatggtgatgttggtcccaaagatctcagccacatgtctaaggaggatacagtgaattacattacacgcaacatgtggttccctgtttacagccctctcgttcacgagaaatagacaacaactctatataactcttctcaggtttcatagaaagccaaaaggcaaaaaatcttcgcttcatcttttatttgtgatcaacattctttttttcttcaaaatgtgatatgttttaagaaaaacaatgccaaaaagagggcttaagaacaagaacagggttagttctaggtcaacctgtacttttcctttttttttttggacatttttccaacttcttacgattatttctgatgataatgattacaactttatatcctgttttggcaatannnnnnnnnnnnnnnnnnnnnnnnnnnnnnnnnnnnnnnnnnnnnnnnnnnnnnnnnnnnnnnnnnnnnnnnnnnnnnnnnnnnnnnnnnn

SEQ ID NO: 91555 - DNA, 679 bp, Arabidopsis thaliana columbia
cccaagcgaccggaaaaagatatcaatgcctgcacatttaatgtatgatggccaagatgataacctgtttgagcacttctcaaccgttgcccagaggctcggtgtctacactgccaaggactatgctgatattctggagtttcttgttgaacggtggaatgtggagactttgacagacctttctagtgaaggacacagggcccaggactttgtctgcggactacctgcaagaatccgtaaaattgaagagagagctcaaggaagagccaaagaagctgccaaaaacataccattcagctggatatttggtcgaaatatcagggcttaagaagtttactacacaattctctttccaattatcccaagtaagtcataaaggtcttcaccaaccatttcaccaatgaaggaccagtttttaagaccacgaaagttcatttgaatgtgttttgttttatacggaacattgtagataaagttatgtggttaggttatgtttcttgtttgaatcagtcaagaccaaagaaaatgtgtttgagtgttcttagatattgtatggtttaccaagaacaagacttaagattttcctttaaaaaaaaaaaaaaaaagggcgcccgctctagaggatccaagcttacgtacgcgtgcatgcgacgtcaagctattctatagttgacctaaa

SEQ ID NO: 91556 - DNA, 729 bp, Arabidopsis thaliana columbia
  unsure (1)..(729): unsure at all n locations
nnnnnnnnnnnnnnnnnnnnnnnnnnnnnnnnnnnnnnnnnnnnnnnnnnnnnnnnnnnnnnnnnnnnnnnnnnnngacccacgcgtccgggtggaaaggagcatctgggttctctgctcgttccacagctgaagaagtcactcatggaatcgatggtactggtctcactgctatcgtcacaggagcatcaagtggtattggggaagagactactcgtgttcttgctcttcgtggtgttcatgttgtaatggcggtaaggaatacagattctggtaatcaagtcagagataagatacttaaggaaatacctcaggctaagattgatgtaatgaagttggatcttagctctatggcttctgtcaggagctttgcatcagagtatcagtctttggaccttcccttgaatcttctcatcaataatgcggggattatggcatgtcccttcttgctttctagcgacaacattgaattacagtttgcaaccaatcatgtgggtcattttctggtgacaaaccttcttttggaaaggatgaaaaaccgcttgtgaaagcatagaaaagggngaattgtatttgctcataaaagggatcgtttgcttaccggaagggggtcatttgacaaaataatgagaagcaaggccatactttgcaacctatggcatcaaagctcggacatttgccccctctgactcgttagctttaaagaacagggggattcatgctattcct

SEQ ID NO: 91557 - DNA, 473 bp, Arabidopsis thaliana columbia
  unsure (1)..(473): unsure at all n locations
acgcctgcaggtaccggtccggaattcccggtttcgacccacgcgtccgggcggaagaacaatgcagaagactctacacgcttaccgtcttcagaatcttccagaacgagctcgtccaatcttacaattatctctgtttaaagacttatgaagaaggagcaatcagtaggttcttggtgaggaaatgtgggaacgagagtgagaaacacgccgtgactttcagtgcgtcgaatctcaattcgagttgcagctgtcaaatgtttgagcacgaaggacttctgtgtcgacatatcttaaaagtgtttaatctgctggacataagagagctcccgtctcggtatatactgcaccgatggaccaagaacgcagagtttgggtttgtgcgtgatatggaatcaggcgtgagtgctcaggatctcaaggccttnatggtttggagttttagggaagctgcttctaagtacatagagttt

SEQ ID NO: 91558 - DNA, 889 bp, Arabidopsis thaliana columbia
  unsure (1)..(889): unsure at all n locations
nnnnnnnnnnnnnnnnnnnnnnnnnnnnnnnnnnnnnnnnnnnnnnnnnnnnnnnnnnnnnnnnnnnnccacgcgtccgatttcaaatcttgaaaaggactctggtttattcagaaacccaagaaacaacaaggcgtgggaagtttcttacattatccgagttcttgtttcttccaaaccgttacagctctctcttaagcctcttgatagaaggggagggtgcagcttatttagggggacatcaaagaattagcgtggtcgatgcggtactagatgaattgaagagagctactactcaacaaaacaagacaggtgcaagaacaatactgatccagtctactgataaggctgtcttgatgaagtcaaggagaagaacaaaatgaatcatgacgacgctgtcttagagtcgacacaacatgcgtgaggtacaaattcgggatcaaaacatcaagaattgccaggctcgatggcatcaaaaaaaaatcattctttcctacaagggtattcatcctgaaaaggagacaatattgttcaaactaaaacaaacggcttcggtttacgttaaagaattacaccggggggaacccatgctttgactttacataatcaacgtaaaataacctttttggcggaggtccaatgaggggtattactgacttccagcaccctggaaaccaaaaaaacagggttcggaatttgggtctacacaccgggagccataatttcgaaaccatgcttttcaccggtgaaccatattccccttcttgctagatggggggcccctttgctaaaaaaaaaccccccttttttcctaaaaggaaggaaacaaaaaagccctgaatttagcagattctggggttttttaaagaaggagggggacccccccggg

SEQ ID NO: 91559 - DNA, 4780 bp, Arabidopsis thaliana columbia
tcctttgtacgctcttcttcttcttcttcttcttcttcttcttcttcttcttcttcttcttctcctctctgtactttcgcgaaaaccctaattttctagatctgtttctctataatcgcctctctcactttgtagatccttcagatctactctccagtttctctctcagaaacacccaaccatggctaccaaacttccccttcaaaacagcaatgccgccaatgttgcgaaagctccggctaaatctcgagctgccgccggcgggaagacgatcgaggaaatgtatcagaagaaatcgcagcttgaacacattcttctccgtcctgatacatacatcggatctatcgagaaacacacccaaacactttgggtttatgagaaagatgagatggttcaacgtcctgttacctatgtacctggattgtataagatctttgatgagattctcgtaaacgccgctgataacaaacagagagatgcgaagatggattccgttcaagttgtgattgatgttgagcagaatctgattagtgtttgtaacagtggagctggagttcctgtagagattcatcaggaagaaggaatttatgtaccggagatgatatttggtcatttgttgacgagtagtaactacgatgataatgtgaagaagaccactggtggaagaaacggatatggtgctaagcttactaatatcttctctactgaattcatcatcgagactgcagatgggaagagactcaagaagtataagcaggtctttgagaacaacatggggaagaaatctgaaccggttataaccaagtgtaataagagtgagaactggacgaaggttacattcaaaccagatttgaagaagtttaacatgactgaattagaagacgatgtggttgctctaatgagtaagcgagtgtttgatattgctggatgtttggggaagtctgtcaaagttgagctgaatgggaaacaaataccagtgaagtcattcactgattatgttgacctatacctaagtgcagctaataaatcgaggacggaggatcctctcccaaggttgactgagaaagttaatgatagatgggaggtttgtgtgagcttaagtgaaggacaatttcagcaggtcagctttgtcaactccatagcaacaatcaagggtggtacacatgttgactatgtgacgagtcagattacaaaccatattgtggctgctgtgaacaaaaagaataaaaacgcaaatgttaaggcccataatgtgaaaaaccatctgtgggtctttgtcaatgcattgattgacaatcctgcttttgattctcaaacaaaagaaacactgactcttcgacagagcagttttgggtcgaaatgtgaactttcagaagattttctgaagaaagttggaaaatctggcgtagtggagaatttgctttcatgggcagatttcaagcagaacaaagatctaaagaaaagtgatggagccaaaacagggagggttctagttgagaagttagacgatgccgccgaagctggagggaagaactctcgactctgtacgttaattttgactgaaggagactcagcaaaatctctcgctttggcggggaggtctgtcttgggtaataactactgcggtgtgtttccgcttcgaggaaagctattgaatgtcagggaagccagcaccactcagattacaaacaataaggaaattgagaacctcaagaagatccttggactaaagcaaaatatgaagtacgagaatgttaactcattaagatatggccagatgatgatcatgactgatcaagatcatgatggttctcatataaagggtctcttaatcaattttatccactctttttggccgtcgttactccaggttccatcattcctggttgagtttataacacccattgtgaaggctacgcgtaagggtacaaaaaaagttctgtcattctactcaatgcctgaatacgaagaatggaaagaaagtctgaagggtaatgcaaccgggtgggatatcaaatactacaaggggttgggtacaagtacggctgaggagggcaaagagtactttagtaatcttggtcttcacaaaaaggattttgtttgggaggatgaacaagatggagaagccattgaacttgctttcagtaaaaagaagatcgaagcccggaaaaattggctttcgagctatgtgcctggcaatcatcttgatcagagacaaccgaaagttacgtacagtgacttcgtgaacaaagaactgatcttgttctccatggcggatcttcaacggtcaattccctcaatggttgatgggctcaaaccgggtcagagaaagatacttttcgttgcattcaagaaaatcgctcgtaaagaaatgaaggttgcccagctcgttggttatgtatcattgctgtcagcttatcatcatggcgagcagagtcttgccagtgctatcataggcatggcgcaggattacgtgggcagcaacaatatcaacttacttctaccaaatggtcaatttggtacacgaacttcgggtggaaaagattcagctagtgcaagatacattttcactaagctctctccagtaacaaggatcttgtttcccaaggatgatgatctccttcttgattacttgaatgaagacgggcaaaggatagagccaacttggtacatgcccatcattccaactgtacttgtcaatggcgctgaaggcattggaactgggtggagcacgttcataccaaactataaccctagagagatcgttgctaatgtaaggcgtttacttaacggtgaaagtatggtgcctatggatccttggtatagaggttttaaaggaacaattgagaaaactgcgtccaaagaaggtggttgtacttacacaatcactggtctatatgaggaggtggatgaaacaactattcgaatcacggagttgccaatcagaaggtggaatgatgattacaaaaatttcttgcagtcattgaagacagataatggtgcaccttttttccaggatgtcaaggcttacaatgacgagaaatctgttgattttgaccttattttgagtgaagagaacatgctggcggctcggcaagagggctttctgaagaaattcaaactcaccacgacaatcgctacaagtaatatgcatctctttgataaaaaaggtgtgataaagaaatatgtgaccccagaacaaatccttgaagagttctttgacctcaggtttgaatactatgagaagagaaaggaaaccgtggtgaagaatatggaaattgagctgttgaaactagaaaacaaagcgaggtttattcttgcagttctcagtggagaaatcatagtgaacaagaggaagaaagccgatattgttgaggacttaagacagaaagggttcacaccatttccgaggaaggccgagtctgtcgaagctgcaattgctggagcagttgatgatgatgcagctgaagaacctgaagaaatcttagtggatccggagtcaagctccagttatatacccggctcggaatatgactacctattggcaatggctatagcttcgttgactatagagaaagttgaggagttattagcagacagagataaaatgattattgcagttgcagacatgaagaaaaccacaccgaaatccctctggctcagtgacctagagtctcttgacaaggaactagaaaaacttgatctgaaagatgctcaagtccaacaggctatagaggcagcacagaaaaaaatcagggccaaatctggagcagcagtaaaggttaaaaggcaggcaccaaagaaaccagcaccaaagaagaccacaaagaaagccagtgaatctgagacaacagaggcttcctattcagcaatggacacagataacaacgtagcagaagtggtgaagccaaaagctagacaaggagcaaagaagaaagccagtgaatctgaaacaacagaggcttcccattcagcaatggacacagataacaacgtagcagaagtggtgaagccaaaaggtagacaaggagcaaagaagaaggctccagcagctgcgaaggaggttgaggaggatgaaatgttggatctagcacaacggcttgctcaatacaatttcggctcagcacctgcggattcaagcaaaacagctgaaacatcgaaagcaattgctgtggatgacgatgatgatgacgtggtagttgaggttgcaccagtaaagaaaggaggaaggaaaccggcggcgactaaagctgcaaaaccaccagcagctccgaggaaacgagggaagcagacagttgcttcaacagaggttctggcaattggtgtgtccccggagaagaaagtgaggaagatgagatcatctccgttcaacaagaagagtagttcagtgatgagcaggttggctgataataaggaagaggagagcagcgagaatgtggctggaaactcatcgtctgagaaatctggaggagatgtttctgcgatatcgaggcctcaaagagctaataggaggaaaatgacctatgtgttgagtgattccgagagtgaatctgcgaatgattctgagtttgatgacattgaagacgatgaagatgatgagtagagagagcgagaactgactcggttcttaatatgatttagtttcaaacttgtagtttctccctctggtcttctttggatttggtattactctgtagaaagacatatttctctaacgttggtcacaaaactcttacattgtttaagcgtttaagcgtttagtgactttttggtcagtcaa

SEQ ID NO: 91560 - DNA, 572 bp, Arabidopsis thaliana columbia
  unsure (1)..(572): unsure at all n locations
cnnnnnnnnnnnnnnnnnnnnnnnnnnnnnnnnnnnnnnnnnnnnnnnnnnnnnnnnnnnnnnnnnnnnnnccacgcgtgcgctcacgcgtgcggccacgcgtccgcaagacacacagtgcaaaatgacaaagagcccttcatcgatttcgaatcttctctctgagtaaatcaatttcacaaattcgaggtttttggtttttagcttactacactactccaagaagaaaatctcaagttaaagtcatttcctatcaaatctcttttcatggcggctgctattctcgtttctcctgttcgctaaattgcgtcattttcattgaagcttattataaaagcggcgtagatctgtgattctactcattgcatttccgcgtttgtgaggagaaagaggagaagatgttgtgtgcttgttcaggcgaacaattccggttcgaggatcagcccggttcgccggaatccctagctacaagagatttctcagctagtgggccttcttctcgaaacggaggaggcgattgggattccaaattggaagatattcaagtcgatgaagctgaatcgactttaaag

SEQ ID NO: 91561 - DNA, 678 bp, Arabidopsis thaliana columbia
  unsure (1)..(678): unsure at all n locations
agcttttctagcagatgatttcaggcttttgcttataatggatcctcagcttaaaggtcggtttccggcaaaagcggctaggagcatagcagatatagcacagaaatgtctgcaggtggagccttcagagcgtccaaccatgagaaacatcgtggatcaactcaagatcatacaggacatgaagtactcgtgtaggttcccattgagagaacccgcaccggtcgtggcaaggaaacatatgggaagatcaagcagtctcaacacgattatttggaccccggcatcagtgccaccaaggtcgagtttttcaccgtcacctccaccacgacgaccgtctgtctcacccacaaggggacggacgctcgtgtttcccccagtgtttccgccgcgagcgtgttcatctttggaggaaatggctcgggaagaggttcgaaagatcgtcttcagccagtggtaggagaactagcctcgaaggggttttgatttgttcatatctctcttccttcttctttttccctatntgtttttaattttggccgttgatttgtttttggaattccaaaatatanaaaaattgtttttttcttaanaaaaaaaaaaaaaaaggcgcnnnnnnnnnnnnnnnnnnnnnnnnnnnnnnnnnnnnnnnnnnnnnnnnnnnnnnnnnnnnnnnnnnnn

SEQ ID NO: 91562 - DNA, 591 bp, Arabidopsis thaliana columbia
  unsure (1)..(591): unsure at all n locations
anacgggncaccaagccntcgggcataanaccggtaggcccatgnaaacccncncgnctggaaggaacatngggaantcagcagctcaacncgattattggaccccggcatcagtcccaccaaggtcgagttttcccccgtcacctccaccacgacgaccgtctgtctcacccacaaggggacggacgctcgtgttcccccccagtgtttccgccgcgagcgtgttcatctttggaggaaatggctcgggaagaggttcgaagatcgtcttcagccagtggtaggagaactagcctcgaaggggttttgatttgttcatatctctcttctttcttctttttcctatttgtttttaatttttggcgttgatttgttttttggattccaaatataaaaaattgtttttttctttttcttttgttgtttatgaatccggacgtcgatagagagggtttgtgatgttttgtacataataatcaacatttcttctttcacattaaaaagagatccaaagtattgtgtaaaaaaaaaaaaaaaaaaagggcggccgctctagaggatccaagcttacgtacgcgtgcatgcgacgtc

SEQ ID NO: 91563 - DNA, 557 bp, Arabidopsis thaliana columbia
gtctttcaaaggtgagcttgggaaataatggcgtagctctactagctcaagtttgagctctcccataatgagtacatcaagcttgtcctccatctcctgcctcctctggagatctctctcatgatgacttcgaaggtatgagaaactacagagataatgttaaactgcaacaaggttttagaacaccgggcagcccttagcgacgatccctttctctgttgggcaatttgccaaagggcaatggtctgtgttctcattcccccaccaatctggtaagcttatgttattgttctgtaacgcaaagtagatcaacactcccataaccgcagtgcctgcatcaagagctgcagagaggatgtagttatgccttgcccaccatcccttgtacctcctgaagatatagtagttgaacacgatcccaacagcgaaccacgaccagtaatgcacagccttggccattggcatcacattagcccctgagaagatcaagggaatatgaatctgatgtatccacttcttctccgggaatttccttgcaaagaaccagaccgggacag

SEQ ID NO: 91564 - DNA, 613 bp, Arabidopsis thaliana columbia
accacgcgtccacgtaaaatggcgactggtaaaaccgtgaaagatgtttctcctcacgatttcgtgaaggcttacgcttctcacctcaagcgatctggaaagattgagcttcctctatggacagacattgtgaagactggtcgtttgaaggagcttgctccatatgaccctgattggtactacattagagctgcttctatggccagaaagatttacttgagaggaggtcttggtgttggtgctttcagaagaatttatggaggtagcaaaagaaatggaagtcgaccaccacatttctgtaagagcagtggtggtattgctcgccatattctccaacagttggagacaatgagcattgtcgagcttgacactaaaggagggagaagaatcccttcgagcggtcaacgggatttggatcaggttgctgggcgtattgcagctgaatcatgaagagctgttgttctccttatgcttgctttggaggagcctcaagaatgttatagatctttttagcttttgtgattttagatctccactctcttctgctctgttcattttggcgaactaatttgatatttgatgaagctattaaagatttgttccttacagtgaa

SEQ ID NO: 91565 - DNA, 531 bp, Arabidopsis thaliana columbia
  unsure (1)..(531): unsure at all n locations
atgatctnnnnnnnnnnnnnnnnnnnnnnnnnnnnnnnnnnnnnnnnnnnnnnnnnnnnnnnnnnnnnnnnnnnnnnnnnnnnccacgcgtccgcccacgcgtccggctcgctctcttctttgttcttgctccttgttctagttcggatttttcttttgaagtgaaatggttaacgctacagttgcgagaaacattgccggcatttgtggaaatgtcatctccttgttcttgttcttatctcccatacctacgttcataaccatatacaagaagaaaaaggtggaggagtacaaagctgacccatacttagccacggttctaaattgcgcactatgggtcttttatggcttaccaatggttcaaccagatagtctccttgtgatcaccataaatggtaccggtttagccattgagctggtgtatctcgctatcttcttcttcttttctccaactagtcgcaaggtgaaagtggggctatggttaataggagagatggtgtttgtaggaatagtagccacatgcacattgct

SEQ ID NO: 91566 - DNA, 1094 bp, Arabidopsis thaliana columbia
  unsure (1)..(1094): unsure at all n locations
ttttaggtgcacactatagaagagctatgacgtcgcatgcacgcgtacgtaagctcggaattcggctcgagggttaacgctacagttgcgagaaacattgccggcatttgtggaaatgtcatctccttgttcttgttcttatctcccatacctacgtgcataaccatatacaagaagaaaaaggtggaggagtacaaagctgacccatacttagccacggttctaaattgcgcactatgggtcttttatggcttaccaatggttcaaccagatagtctccttgtgatcaccataaatggtaccggtttagccattgagctggtgtatctcgctatcttcttcttcttttctccaactagtcgcaaggtgaaagtggggctatggttaataggagagatggtgtttgtaggaatagtagccacatgcacattgctattgttccacacacataaccagagatcttcttttgttggaatcttttgtgtcatttttgttagtctcatgtatattgctcctctcaccatcatgagtaaggtgatcaagaccaaaagtgtgaagtacatgccattctctctctcacttgccaatttcctcaatggtgtcgtttgggttatttatgcacttattaagttcgcccctttcattttgaattggaaatggacttggaccggtatcaggagcagtcccactttttctcctaggcttgctattacaagccaccccccaaagatgatgaagatgaagaagatgaggagactctttctaaggttaactctcagttacaacttagtggcaacagtggacaagctaaacgagtttcagcttgattatatgtttggattcatgagatatgaatttagttttatgtttttttttaagcttttggctgatttaactttaagtaactctattattttcgcgtttcctttttgtaaaatgcaaactctttttcttctatgaaagatattaactattattatatgcgacaaaaaaaaacccaaagnnnnnnnnnnnnnnnnnnnnnnnnnnnnnnnnnnnnnnnnnnnnnnnnnnnnnnnnnnnnnnnnnntgtacctaannnnnnnnnnnnnnnn

SEQ ID NO: 91567 - DNA, 404 bp, Arabidopsis thaliana columbia
tgctgtgttttaccaacaactgcaggagtttgagcaggggatattcggatctgagatgatgtcggcgatgaatattaatgatgctccaacgtttgggtttggtttccctaagattgataatcaagcacaagctcctgtgttcaacaatgctcctacttcttctatattttcatctcctgcttcaagtatccctcctcaggagttcacttttggagcaactccaccaaagccaacaactggtggtgatattgcaatggatggctcttagaaccagataatcatatactcttgcaagaattttcatcaacaaatatactgttgtgagaatgtttctttttcttttttgtacatggagattggtgcattgcttgagagagtttggggtttgagaacatgagattgga

SEQ ID NO: 91568 - DNA, 519 bp, Arabidopsis thaliana columbia
  unsure (1)..(519): unsure at all n locations
aacctctatgcgctatgataaacaacaaccttcgctgctacgaccttgccatggagttaagtaatagcactttagaagctcttccacaaaattatgcagagcaggtgaattttgaagacacttgcaaaggtttcttggaggtggctaaggaagcagtgcatcaaacagttcgcgttatctttgaggatccaggagttcaggaattacttgtcaagctttaccagaaagaatggtgcgagggacaggttaccgagtacctcgtggcaactttcggtgattatttcacagatgtgaaaatgtatgtcgaagaaagatcatttagaagatttgtcgaagcatgtttggaagaaacagtcgttgtctatgttgaccatctcctaactcagaaaaactacatcaaggggaggaaccttttataccggnttgagggctagatgaagggggttctccatgggatttcctttngggggggtntttaagnnccatcttaaantngggggccggnttcagattnattng

SEQ ID NO: 91569 - DNA, 478 bp, Arabidopsis thaliana columbia
ccacgcgtccatctacttccaaaatggtggcgaaaggatctggtttccaagcttccttcaaaccgttggttgtccactcattttcttccctcttctcttatctttcctccgccgtcgtcgttgccttgaagaacaagaaacgactccatttttcctcatgaaacctcctctctttatcgccgctatcgttgttggtttgctcgtgggatttgacaattacctctactcttacgggttagcttatatccctgtttctactgcgtctttgatcatctccgcgcaattaggcttcactgctctctttgcattttttatggtgaagcaaaagttcacacctttcactataaacgctatcgttttgctcactggtggtgccgtagtccttgcccttaactctgatagtgacaagcttgcatacgagacacacaaggaatatgttgttgggttcatcatgactcttggtgcagctcttctctat

SEQ ID NO: 91570 - DNA, 529 bp, Arabidopsis thaliana columbia
  unsure (1)..(529): unsure at all n locations
ccnnnnnnnnnnnnnnnnnnnnnnnnnnnnnnnnnnnnnnnnnnnnnnnnnnnnnnnnnnnnnnnnnnnnnccacgcgtccgagagaatcatctcaaatctaggatgacttgtacggacaacaacaacatctgttttcgggcagcgagaggcggattctgacagtggaggaagtaccgtgacgatggactcgacgttgcagatgatgggtctagggttttcctcaaattgttcttcagattggaaccaaaccattttacaagaagacttaaactcaagcttcataaggagctcacaagatcaagatcatggccaaggattcttatccacaactacttcaccttatatacttaatccagcttgttcttcatctccatcaacttcttcggcctcaagcttgatacgaaccttttacgatccccaaccaagtccatacaccttttgtctccaccacaagtgggttcaatcaacgatccctcaactttcttgggctaataagacaaatcctcatcatcaagtagcttatggac

SEQ ID NO: 91571 - DNA, 545 bp, Arabidopsis thaliana columbia
  unsure (1)..(545): unsure at all n locations
agctacnnnnnnnnnnnnnnnnnnnnnnnnnnnnnnnnnnnnnnnnnnnnnnnnnnnnnnnnnnnnnnnnccacgcgtccgcccacgcgtccgcacatgtagatgcatcgctttcttttaatgctcttatttccctttagcgacaaccgtcccatgatgttcttcagatcattcatcgttttcttctttcttatctttttcgcatcaaatgtttcttcccgtaaacaaacctacgtgatccacactgtcacaaccagtaccaaacacatcgtaacttcactttttaattcactccaaacagagaatatcaacgacgatgatttttctctcccggagattcactatatttacgagaatgccatgtctggtttctccgcgactctcaccgacgaccagcttgatacggtgaagaacacaaaagggtttatctctgcttatccagacgagctcttatctctacacacgacatattctcacgagtttcttggtctcgaattcgggatcggtctttggaacgagacgagcctatcttcggacgtcatcat

SEQ ID NO: 91572 - DNA, 409 bp, Arabidopsis thaliana columbia
tcgcattcccatcctaggcctaagcttgtctttggcctttgagaatttcgagaccaacactagagtacactttataacctctcaagttcctggttataaacttaaatttccaggatttgggacacttaagtaactcagtcacttcgcacataccattcaagcggatataatctggatttattggcttctcatagtcccaaccatgcatctctaactcaatccctgtctttttgatataggaaactaggcattgatatatggttagatacgtggcaatacatgagtggagacagtagctgtgagacgtggcaagagaagattggtcgatgggagtgttagaggaagaatcgagatgcagagatatatagctaatgaagatcatttgcagaagataagaagattttggatt

SEQ ID NO: 91573 - DNA, 463 bp, Arabidopsis thaliana columbia
tgtttctttgcttcgtacggatttgaaggctttacctcaccggagcttccaagtagaagacgacactgagtcactgacacagggatacaaattatggcgccttttggcgggaaatctttagcggacgttgtttctggcatcggagggaatggtgttggcggggctctggctgcggtggccgccgctctgttggtccgcctcttcgctggacctggcatcgctctcttacctgaagacgaagctgaagatgattacgctgagacggaagacggtggtggtgattcaattcgtccggtgacaatccgttggaggaacatcacctgctcgctctccgataagtcctccaaatcggtgaggtttttgttgaaaaatgtatccggagaagcaaaacctgggaggttgctagcgattatgggtccttctggttctgggaaaacaacattgctcaaatgtttagcaggac

SEQ ID NO: 91574 - DNA, 502 bp, Arabidopsis thaliana columbia
  unsure (1)..(502): unsure at all n locations
gatcttggaatctgttggtgctgaaatcgatgaaacgaagatagatctgttgttttctctcatcaaggatcatgatgtgacggagcttattgctgctgggagagaaaagatgtctgctttgtcttctggtggtccagctgttgctatggtggctgaaggtggtggtggtggtgctgcttcggcggctgagccggttgctgaatctaagaagaaggttgaagaagtgaaggatgaatcttctgacgatgcaggcatgatgggtctctttgattgatcatttggttagaagtttcgtttaaaggtcaagactttatgtttctgatgttggttttattgatggatctttgtttaatgttgaggcctgtgtgtctctggttggtttaatgatctttggtggtgatgactcaaaaaaaaaaaaaaaaaaaagnnnnnnnnnnnnnnnnnnnnnnnnnnnnnnnnnnnnnnnnnnnnnnnnnnnnnnnnnnnnnnnnnnnnnnnnnnn

SEQ ID NO: 91575 - DNA, 613 bp, Arabidopsis thaliana columbia
ctgggggacctatcattattaggaaactgtccctcagtccggccggattccggtcgacccagcgtcggatcttcatccctttcgcaaaccctagcagtcgaaagatcgaaatcgaaaacccctaaaacgatgaaggtgattgctgcatttctcctcgcgaaactcggtggaaacgagaatccaacctcaaatgatctgaagaagatcttggaatctgttggtgctgaaatcgatgaaacgaagatagatctgttgttttctctcatcaaggatcatgatgtgacggagcttattgctgctgggagagaaaagatgtctgctttgtcttctggtggtccagctgttgctatgggggctagaaggggggggtgttgttccttcttcggcggctgacccgttttctaatctataaagaagggtgaaaaagggaaggttattttctgacaagcaggcttgaaggtcctttttatgaacatttggaaaaaatgtccctaagaggcaaaaccttttgtttctgagggggttttatggagggatctttgtttaagggaaaacttggtttttgaagtgggttaagagtcgtgggggggaaaaccaaaaaaaaaaaaaaaaa

SEQ ID NO: 91576 - DNA, 977 bp, Arabidopsis thaliana columbia
gtccgacaatcttaaaagatgatatgcgcaagaatccgaccgctaatttcgtcaccactagctttcactatctcaacaaccaaacactccagaatcaatctccgattactccctcgccgctccttctccgtcatgtcttcttcaaccccacagagtcagatcatagaacacatcgtcttattcaaaaccaaagacgacgctgactccaccaaaatcacctccatgatcaacaacctcaacgctcttgcatatctcgatcaagtgcttcacatctccacctctcctctccaccgtatctcctccgctaccgccttcactcacgtactccatagccgttacgaatctaaagaagatctagcctcctacgctgcacatccagatcacgttcgtgttgttaaggaatctgtgttaccgatctgtgatgatatcatggctgttgattggatcgctgatcgaatccccggaaccgtagcgccgcttcctggttcggttgctaaactcacattgctcaaattgaaagaggatgtagcagatgaggcgaaatcggagattacgggagtgattaagggactaagtgagaaatttccagggattgatcagattactgttggagaaaacttttctcctgctagagctaaaggtttctctattgcttcgattgcgtatttcaaggatttgagtgaaatggaagctgtggatgctcagaaagagttggtgaattcgcaaaaggataaggttcgtgattatgtggattctaccattgttgttgagttcgttgtgccgtcttcttcacagtcttctagtctgtagaaagtttcaatttcaatcccttgaaagctttgggacctgtttgttatttgagaataaagaaacttgagtgtggtgatatatgcttctgtttcattatcttcttatctctcggtgaggaactctgttggaataagaatttttaagcactaaaaaaaaaaaaaaaaaaa

SEQ ID NO: 91577 - DNA, 678 bp, Arabidopsis thaliana columbia
gagtatgcaaacgtggagggggctttccatgagaaaggagcatcgtacatcaagtgggcaggtcaaatggcggtcgggctgtaagaccggagtgccatggatcatgtgcaagtcgcccgacgctcctgatcccgtgatcaatacctgcaacgggatgaaatgcggcgagacttttcctggaccaaactcacccaataagccgaaaatgtggactgaggattggacttcattctttcaggtttatggaaaagagccttatattagatctgctgaggatattgctttccatgccgctcttttcgttgcaaaaaatggaagttacatcaactattacatgtaccatggtggaacaaactttggaaggacttcatcttcgtatttcattacaggatactatgatcaagctcctctcgacgaatacggtcttttaagacagcctaagtacggtcatttgaaggagcttcacgctgcgataaaatcctctgcaaatcctctgcttcaaggaaagcaaacgattctctccttgggaccaatgcaacaagcttatgtctttgaagacgcgaacaatggatgcgttgcgtatctggtaaacaatgacgctaaagccagtcaaatacaattcagaaacaatgcgtatagcttgagtcccaagtcaattggtattcttcagaactgcaa

SEQ ID NO: 91578 - DNA, 485 bp, Arabidopsis thaliana columbia
cccacgcgtccgctctcacattattttctgtttggaatcttggatctttctttctgagatcattcgtcttttgtactgattttgagagatttcatttttgtttgtttaccgatccgccgccgtggatttttgttttccgatgacgatcaaagatgagtcggagagttgcggtagcagagccgtcgttgcttcgccgtcacaagaaaaccctagacattaccggatgaaacttgatgtctatagtgaggttttacagcgacttcaagaatctaattacgaagaagccactcttcctgatttcgaggatcaactttggctccatttcaatcgtcttcctgctcgatatgctcttgatgttaaagtcgagagagcggaagatgttctcacacatcagagattgctaaaattggctgcagatcctgctactaggcctgtctttgaagttcgaagtgtacaggtttctcccagaatctctgctgactctg

SEQ ID NO: 91579 - DNA, 551 bp, Arabidopsis thaliana columbia
  unsure (1)..(551): unsure at all n locations
ggccgctggncgcctgcagtaccggtccggtttcccgggtcgccctcgcgtccgccttcttcactctctctctttctcgtgaaagcaaaacagatctcaaatctcgggagcaacaatggagtttctggtaacagttgcggaattcagcctctggctgctgctgatcgtcttattcggatttctatccgttgttgtttttgaagcttggagaaggagacacagtaacgtctctgtcgagaccgtgactacactcgacgatccgaaatctataaaaccgattccttgccctcatattaccgaccctgccgagaagtatttgtctttaatagttccagcgtataatgaagaactgagacttcctgctgctcttgaggaaacaatggattaccttcaagatcgtgcatcacgggacaagagtttttcttttgaggtggtgattgttgatgatggaagtgttgatggaacaaaaagagtagcttttgatttcattagaaagtacacaattgacaacataaggggttacccctcggggggttatnaaanggggggtt

SEQ ID NO: 91580 - DNA, 606 bp, Arabidopsis thaliana columbia
  unsure (1)..(606): unsure at all n locations
aacgagcattagctgcttccttggaggataacaacatgaaagagtcttcagatgatcaatcaacaataatacctgaagaagtagcagttgaagcagttacatccgcggtcctgccaacattcccaccactgccggaagaaccaaagggaggcgatcgcagcctacaatgcagagttgggatccgtttacctaacggacaaagactccagaggaatttcctcaaaacagacacaattcagcttctctggtcattctgctattcccagcttgaggaatcagagaggaagaagccattgaagctaacacaagcgattccaggtgaatcaaagacattggagtatgaatctaacttaaccttggagcagtctggtgttgccaattccatgatctctgctacgtgggaatgaaatatcctcataacgagaaaattatctattatggtgtgtttgtttcttaaggtttatcagattagttgtttaattgtttttaaactcgacttttttttatgaaaagaagaacacattatggtatttgatttgcaatgaaatggaaaaatcgtctattaagattaaacacacaggcaaaccgctctagaggatccnagct

SEQ ID NO: 91581 - DNA, 466 bp, Arabidopsis thaliana columbia
agcaaattttgaccaagcacatgttcagttgtttaaaagctttcatggtagcttttcacatcaagtaatggttcgtgatctccactacattgaaggttctaaagccatgccaaaggttttgccaacgttggatcaaaatgaaggtgtgctaaagcattctgctagcgttcaaagaggaagagaatttggaactaatctttggtttgatcttgttgataaaccgaatgaatggtgtgattaccgtgaaatgaaacagaatggatcggttaatcctaaacaccctgatttcaagaagaaagacgggagtcaagcgctttggcttaacaatgctcctacagagatattgtccgagctcaaagacgtgaagtttgatattccaaaatacgcaaaacatccaaaggccggagaggaatcatggaaggacttggtagataacatgaataagtggtgggacaatagagtggac

SEQ ID NO: 91582 - DNA, 1004 bp, Arabidopsis thaliana columbia
  unsure (1)..(1004): unsure at all n locations
tgcaaacgtgctgaacttggttacaactacggtgtcatactgattccagaaggtctgatcgactttattcctgaggtccaagagctcattgctgaactgaatgaaattctggcaaatgaggttgtcgatgaaaatggtttgtggaagaagaagctcaccgagcaatccctgaagctgtttgatcttctgcctgaagcaattcaggaacagctgatgcttgagagagacccacacggaaatgtccaggttgctaagattgagactgagaagatgcttattcaaatggttgaaactgaattggagaaaagaaagcaagctggtgcatacaagggacaattcatgggacagtcacatttcttcgggtatgaaggaagatgcggcttgcccacaaattttgatgccacatactgttatgcacttggttatggcgctggagtactcctcaacagtgggaagaccggactaatttcttcggttgggaacttggctgctcctgtggaagaatggactgtaggtgggactgctctcacagccttgatggatgtcgagaggagacacggtaagttcaagcctgtgatcaagaaagcaatggtggaacttgaaggtgcaccatttaagaaattcgcatcactgcgtgaagaatgggcattgaagaaccgatacatcagcccaggtccgatccaattcactggacctggttcagactctctcagccacactctacttcttgaactcggggctcaatagtctctcgactaaccaccattcctttgcttttctgccttccttggaatttcgcatcagtcttgttttatcttgaatattacgtgtccgtaacatttcgattaagttgattcctctcgtgtttcttcaacatataagataattataatattatttctctcgtgtttcttccacnnnnnnnnnnnnnnnnnnnnnnnnnnnnnnnnnnnnnnnnnnnnnnnnnnnnnnnnnnnnnnnnnnnnnnnnnnnnnnnnnnnnnn

SEQ ID NO: 91583 - DNA, 447 bp, Arabidopsis thaliana columbia
  unsure (1)..(447): unsure at all n locations
aatttccttctctctatctctcaccntattcgcgattaaaaactctcaacttttctctcaaatttctgatcctttgatccaacagttagaagaagattcatctgatcatggccctcgaagcgatgaacactccaacttcttctttcaccagaatcgaaacgaaagaagatttgatgaacgacgccgttttcattgatccgtggcttaaacgcaaacgctccaaacgtcagcgttctcacagcccttcttcgtcttcttcctcaccgcctcgatctcgacccaaatcccagaatcaagatcttacggaagaagggtatcttcgccctttgtcttcctcatggttcgcttaaaggttcaacccgtcggaaaacgggggttttcatcaaaccaggggggaattcggttaaacggcnggcggcacagttcaaanaacctccccggaaaagg

SEQ ID NO: 91584 - DNA, 462 bp, Arabidopsis thaliana columbia
cgacccacgcgtcagattaattgtttttctctcttgattgagagaaaaacaaaggaaaaaatttgaaaaataattttttctttgtaactgatctttccatacttttgattctctgtttcgcttcggcggaatcagagaatcgtttcaagttacaaattcgcaacaaaaacgtgttgtgatatcgagtatttattcgtttacggggaagaaacatttcaagtggtataagcatttcctgattgtttgaaactttgaatcgtttaataaatttaaaaataagaaaaaaggatttgtagagaaatgggagtgtctcaaaccgacggaagaatggaaggttggctttataccatccgacacaaccgatttggccttcaattttcccgtaaacgatacttcgttcttcacgagaacaaccttacaagttttaaatctgtaccatctgatcacaatgaggaacctgag

SEQ ID NO: 91585 - DNA, 481 bp, Arabidopsis thaliana columbia
tcgagaaaatcaaaaaaaaaatttgaaaaataattttttctttgtaactgatctttccatacttttgattctctgtttcgcttcggcggaatcagagaatcgtttcaagttacaaattcgcaacaaaaacgtgttgtgatatcgagtatttattcgtttacggggaagaaacatttcaagtgagaaatgggagtgtctcaaaccgacggaagaatggaaggttggctttataccatccgacacaaccgatttggccttcaattttcccgtaaacgatacttcgttcttcacgagaacaaccttacaagttttaaatctgtaccatctgatcacaatgaggaacctgagagaagagcatctctagattgttgtattcgcgttaccgacaatggtagagagagcctccatagaaagattcttttcatattcacgctttacaacacttcgaaccatttggatcaactaaagttgggagcaagta

SEQ ID NO: 91586 - DNA, 379 bp, Arabidopsis thaliana columbia
cccacgcttctttgagcctcttgcagaagggtctaggaggcggtgatgacttgatggaaaaccaattgtcaaacgacgactactccatcggattcatggctgcagaagaccagaacatgtccctggttgaggagcagttcaggctgaatattgatgagcttctagaagagaatttggatttctggttaaggttcagcacagcatttggacagatacagagctacgacacttcaatcgaagatctacaagccgagatatcaaagctcgagcagagaagaaagcaagatggaagcagcacagccaaatatgccctgagatcagatgttcgaccactgtatgtacacttaagggaaataaacacagacctgtggctctggct

SEQ ID NO: 91587 - DNA, 452 bp, Arabidopsis thaliana columbia
gaacatcttgctgccgttgagattatgcaacttaagcatatcatcatccttcagaacaagattgatcgtattcaagagaatgttgccattaatcagcacgaggcaattcagaaatttataatgaacactgttgctgatgctgctccgatcgtccctgtctcagcacaactgaaatacaacattgatgtggtgtgcgagtacattgtcaagaagatcccaatccctgagaggaattttgtgtcacccccaaatatgatagtgattcggtcttttgatgtcaacaaacctggttatgaggttgatgagatcaaaggtggagttccaggtggaagtatcctacggggtgttttgagagtcaaccaatttaatcgaattccgacctggtatcggtaccaaagacgagcgtggcatctcaaaatgcactccaatttactcttgatttatttactttt

SEQ ID NO: 91588 - DNA, 447 bp, Arabidopsis thaliana columbia
  unsure (1)..(447): unsure at all n locations
ggcgcctgaggaccggnccggtttccggggggctcatcctccgggccgatctctcatttcagtaatgagtcgtctctaaaattggttttcgttccccgaggaggtttcttccctagtagaccataagatcgctgagaatatgtcgtggctgcgaacggccgtgaatcaggctgtggaggtcggaaaccgcaaaaacatcacacgaaccgtcaaaaactatgccgactccgtcgtccagcacgctggccaagccgtcgctgaaggagccaaattgttccaagaccgcattggtgttggggcttataagagtgttcatcagacaattcagagattggaagaagctgcagtctcatatagaggtcaagaaagggcattgctgattactagatggctaagtgtgcttaacgagattgatagagctactgacagttctctaaaggataaaca

SEQ ID NO: 91589 - DNA, 462 bp, Arabidopsis thaliana columbia
aattcaggttaccttcaagttacaaattgagacaatcttgttctttgtttgttagattaccttctattcttgattgtgttttccgaagattttttagaaccaatccacttgtttttcctaatacaggggtggtgttttcgtggtggtaaaaggataaaatttcttgagaatgcctgcatacatttctgaggagaagttgttcttcaacaagaaacctttcggatccaaaatctcagacagcaacgaaattgaagaacttgatcaagagaatttggttgtgacaagacaagaagttaatgatgattccaaagtggcaccgagagatgtagtagctacatcaacaagtgtctctaagaaggctttaaccttgggagatattttatcattggaggattcccaaagcccacccaacaaaaacaacactaatggacctgaagaaaacatggtccatcataacccaca

SEQ ID NO: 91590 - DNA, 393 bp, Arabidopsis thaliana columbia
  unsure (1)..(393): unsure at all n locations
cggtgaatagtcaccaccgattacgatgacgtttctaaatgataatgattgtatcagtcaccaaacgacgcagcgcccaaagctgatagaagacaagtgattggtgtgaaagagtgtggtgaaacttatgttctggcagagtataagcctatatatgttcatcagctcgtccttgtccttgcaactgctatacagctgggattgtgtatgacattgaaggatgttgaatatgaaggaagattagatggaatctttgtgatgttttgaatcttgtttgtagcttcatataaaattatgattatgtaaagtcttatgtgtaatcaaatgtttaactttttcctttattcaacaaaggatttgtatcgataaatataaaataataaaagagcnaaa

SEQ ID NO: 91591 - DNA, 414 bp, Arabidopsis thaliana columbia
  unsure (1)..(414): unsure at all n locations
gacccacgcctccgcggaagcgtgaggttggcggtgttgggtgtaacgagcgtttgcaggaaatgatgaggactatgtgctcagaacgtgatggtaagctgtttgcaacagatgaccgttactgcatcgataatggagctatgatcgcttacacaggtctactcgcgtttgttaatggtattgaaacaccgatcgaagactctacctttacacaacgatttcgcacagacgaggttcatgcggtgtggcgagagaaagaagctgtactacttggggataagaaagttgcagcgaattgagtctgtccccatttttgttcatttttcatcaaatttgagattgaatctctctctactcgataaattggtttttgctaagtagttcgggctatataatanaaaatnnnnggncgaa

SEQ ID NO: 91592 - DNA, 955 bp, Arabidopsis thaliana columbia
  unsure (1)..(955): unsure at all n locations
nnnnnnnnnnnnnnnnnnnnnnnnnnnnnnnnnnnnnnnnnnnnnnnnnnnnnnnnnnnnnnnctcagcaaaatcgccacgcgtccgagaaaaagcctccgtctcctcctctctctctattcatcagcctcaacctctctttcgtcgtcgactcagtttccgatttagggttacccaatcttcgccatgtatcgcacggcagcttcacgagccagggctcttaagggagttcttactcgtagtttgagaccagcgcgttatgctagttctagtgctgttgcggagacgagttcgtcaacgccggcttacttgagctggttgagtggtgggtctcgtgctgcgcttacttcattggatatgcctctacaaggtgtttctcttcctccgccgcttgctgataaagtcgagccgagcaaacttcagatcactactcttccaaatggtcttaagatagcctcagagacgactccgaatccggcagcttcgattgggttatatgttgattgcggttctatttatgaggcgccttatttccatggagctacacatttgcttgaaagaatggctttcaagagcacgttgaacagaactcattttcgtcttgtgagggaaattgaggctattggaggcaacacatccgcttctgcgtctcgagagcaaatgagttacactattgatgctcttaagacctatgtccctgaaatggttgaagttcttattgacagtgttagaaaccctgctttcttggactgggaagtgaatgaagagctacggaagatgaaggtagagatagcggaacttgcaaagaaccctatgggtttcctcttggaggccattcattctgctggttactctggtccattggcaagtcctctgtacgcaccggagtctgctttagatagattgaatgttgagctcttggaagagtccatgactgagaatttcactgctgcac

SEQ ID NO: 91593 - DNA, 459 bp, Arabidopsis thaliana columbia
aactttattgtctctcttcctttccattgcccaaaaagaaacagaaacttttctccgagaatcctcatttctccgttgaaaaaaggaccttgagaggaaatgtttcactgtttctagggttcttataatccacttcctcatcattagagaatggaaaatctcctcttctctttgatatttcttcggatttcgcttatgtcctgaatctcttgaagacccaattgaaaaaatctcaactttttttctcccggcgtttccggcgatatacaatgcggattctcgtgaatctcattctcttctccttgattcctctggcgttctccaatgaaaactccagctcgtatctcattgcgcgaccattgatcttcgaaacccagctcaagaacataaacgacaatgtcaatctacattgcacgagctggagattcgcggcggagacaaacaatctcgctccatgga

SEQ ID NO: 91594 - DNA, 733 bp, Arabidopsis thaliana columbia
  unsure (1)..(733): unsure at all n locations
ttccaagcgtcagtgaaaaccaaaaaaaaagaagaagatcaaaaaaaaaaggatgtcagaagaagaagtggtggtgttgaacttctggccaagcatgttcggagcaagagtgatcatggcattagaggagaaagagatcaagttcgagtacaaggaagaagatgtgtttggtcagaagaccgatctattgctccaaagcaacccggttaacaagaaaattccggttctcatccacaacggtaaaccggtatgcgagtccaatatcatagtcgaatacatcgatgaggtctggaaagacgataagactctccgtctactaccttctgatccttatcagaagtcacagtgtagattttgggctgatttgattgacaaaaaggtttttgacgctggaagaagaacgtggacaaagaggggcaaagaacaagaagaagcgaaacaagagttcatagagatattgaaagtgttagaaagagagcttggagataaggtctacttcggaggaaacgacaacgtttcgatggtggacttggttctcatctcctactacccttggttccacacatgggagactattggtggttttagtgtcgaggaccacaacttccaagctaatggnctggatccgtaaatncttaacccggcccggttttctngaaatntttacctgnccccttaagntttttnatccggncccttagtncaaaaaggnccngggttttntntggtnttt

SEQ ID NO: 91595 - DNA, 470 bp, Arabidopsis thaliana columbia
ttagatattgactaaaagtcaaacagtcgttaccggaatcaatggccgggattaaaacttctccggcgacgattaagctcttcaccgttctattcctcattctcacaatctcatctccatcacccaaattcgtaaacgccttcactttcccattttccttcacacaatacaaaaccctaatctcaatctcacgatcactcctcctccgcgtcgcaaacctacgcgcttcacgtggagacgcattgggttcgtctcgtgtacgagcaatggctgatgaaatcgatcgtggattagggttagggtttataagcagagcttggtctgttggttgggattatatgtggaattacgcttggagaaagggagggattgactacggtgagatgtatggtgcgattggtgatctcaatgagcttatgggtttagtgactgagtttaatagagctgaatctaatgctgataaagctagc

SEQ ID NO: 91596 - DNA, 1213 bp, Arabidopsis thaliana columbia
agaaggtttctcttgtcctccatacacttagcacaactgataaatcttttgaggtaaaatcagctttagatcaaggtttttctagtcatctctactcataaagatcaaagcttttgctattctcattttctaccaagagacaatatcatgatgatgggtaaagaggatttgggtttaagtcttagcttgggatttgcacaaaaccatcctctccagctaaatcttaaacccacttcttcaccaatgtccaatctccagatgtttccatggaaccaaacccttgtttcttcctcagatcaacaaaagcaacagtttcttaggaaaatcgacgtgaacagcttgccaacaacggtggatttggaagaggagacaggagtttcgtctccaaacagtacgatctcgagcacagtgagtggaaagaggaggagtactgaaagagaaggtacctccggtggtggttgcggagatgaccttgacatcactctagatagatcttcctcacgtggaacctccgatgaagaggaagattacggaggtgagacttgtaggaagaagcttagactatccaaagatcaatccgcagttctcgaagacactttcaaagagcacaatactctcaatcccaaacagaagctggctttggctaagaagctaggtttaacagcaagacaagtggaagtgtggttccaaaacagaagagcaaggacaaagttaaagcagaccgaagtggattgcgagtatttgaaaagatgtgttgagaaattaacggaagagaatcggcggctcgagaaagaggcagcggaactaagagcattaaagctttcaccgcggttgtatggtcagatgagtccaccgaccacacttttgatgtgtccatcgtgtgaacgtgtggccggaccatcctcatctaaccacaaccagcgatctgtctcattgagtccatggctccaaatggcccatgggtcaacctttgatgtgatgcgtcctaggtcttaactttaatgctgcttctatgggttgtgtgtgggtcattgtactttttagattattgactctcagctaatgtatccttaaaagcctttttctacttttaaatttactttaatctaattaaattagttgtccatgtcttcttgataacaaaaaaatttataattataaaaaaaaaaaacaggataaaaaaaaaaaaaaaaaaaaaaaagctacgtcaggg

SEQ ID NO: 91597 - DNA, 640 bp, Arabidopsis thaliana columbia
ggtcgaccacgcgtcagtacaaatacactttctgtctcactcaataaaataggagatctaaaatattatgacgaagatctacaagctgcaaggtcgtattatgatagagctttaaatgtcagacgtgatgcaatgaagcaccacccaaatgctccttcacaaattctggatgtggctgtttccttagccaaagttgcggatatagacaggactctacaaaatgaagttgcagcgacagatgggttcaaggaaggcatgagactgctggaatctttgaaactggactctgaagattctgctctcgagcaacggcggctctctgtactggagttccttaagaagcaagtagaaaccgatgctgaaactgcactctaaaccgatgcaggcttaagtacgtatatagaaattatacctaagttctcgtctgtggcattttgctgaataaagaaagcaaaaatgttgtatttgcgctcaagggacaaagaaacagagttgtctgtatgttgtgaattgtgatggttttcaactttcaatgcactaatcttgcaatgttaaattgttaagcatgattgtactctatgcacttgtgaaatttaaaaattaagatatcttaagcggctacagctgtgaactgctttct

SEQ ID NO: 91598 - DNA, 714 bp, Arabidopsis thaliana columbia
tcgacccaggcctccgtttaaattaaagatgggtaaagacgaccaccacgagcaagacaaaagattcttctcacatcatactcatcacggccatgggtatccgccaggagcttatcctcctccaccgcagggagcttatcctccaccgggaggttaccctccgcaaggttatcctccaccacctcacggctatccaccggccgcttacccacctccacccggtgcttatcctcccgccgggtatcccggaccatccggtcctcgtccagggtttggaggaggagttgggggattgatagcaggagcggcaacagcggcagcggctgcaatgggaggtcaccatgcgggtcatcacggaggctacgggcaccacggccacgcaaaatgcaaaagagggtttttcggaggaggaaagtacaagcgaggaaagcatagtatgtttggtggagggaagtacaagcgtggcaagcacggtatgttcggaggcaaaagaagcaagcatggcatgttcggagggaaacgaggcaaaggcatgttcggacgaaagaagtggaaatgatccattagcatcctctctacatatattatcgtaacaatttaacattaagcttaatataaaaatgtggatgtataatttgttttatatgatgtatatatagctatatgtatctatgaagagaatttaacatggttgaaatatttttcttactgatt

SEQ ID NO: 91599 - DNA, 811 bp, Arabidopsis thaliana columbia
cgcctgcaggtaccggtccggaattcccggttcgacccacgcgtccgtacggctgcgagaagacgacagaaggggaaggcaaaaaggatttgcttttacgaacagagagcgagccagagagagtgagtaagagagaatgacgagcgtgagtgggtgtggttcagtgagtctgataactaaccgcagtgcgttcttgggaaacggacttcaacaccgtgccgttttccttaaaccatggtcgtcttcttcgcttcagtctcggtccatggttgtcgaagccaaaaccaaaaccagcagcgaagacagaatcgcccgccactctcgtatccgtaagaaggttaatggtacaacggagaggccaaggctatgtgttttccgatcaaacaagcatctttatgttcaagtgattgatgataccaagatgcacaccttagcttcagcttccactaagcagaaaccaatctctgaagagttcgactacacctctggaccaaccattgaggtagcgaagaaagttggggaagtgatagcaaaatcttgcttggagaaaggtatcacaaaggtagcctttgaccgtggtggttacccttaccatggacgtattgaggctcttgctgctgcagcacgtgaacacggtcttcagttttaaccgtcgttttctttccttgtttctttccgatgaacagcagtgtatgaatgtagagaacccattttccccaattgaaatgttgagatttttttaaaaaaaaaaaaaaaaaggaataacaaagaacagcggacgctctagaggatccaagcttacgtacgcgtg

SEQ ID NO: 91600 - DNA, 442 bp, Arabidopsis thaliana columbia
cagagagatagattttttttctgggggagaatctagcagaagaagcctactagggtttggtttcttgagtcacatagatcttcttctctatctgtctctcttggattcttcaatgttcactttcagtcattggaaaaaaagggactatgtaatctaactctttttgtacttgagagaagaagctgaagtacatttgttcatcatttggttttatagtattaataactgccaaactccagagctttaagatgtatgactctcaagttttgaaatctaaatacaacccatttctcagacgttcgcattctggaaagaaatttcagggcacagttaccatgtcagagggcagagaaacttgcgaagaatctacgagtggtgaatcttttccatatagatttcaacttgaagaggatgtaaaaagattgcaactgcaactccaaca

SEQ ID NO: 91601 - DNA, 959 bp, Arabidopsis thaliana columbia
  unsure (1)..(959): unsure at all n locations
tgcttttccttcaatggagtgagcaccaaaagaaacttagcaattttataaggttattttttatttcggtccaaaaagtgtgcatattgacaattttatagaggcaaagataagtttccattcacgtgcatacaaaggcaatgtttggtgctataggtagaaattggtagctgatataaaggtttctgtcaaaacttatttaatttgatttgcatgtggacgggtgtttcaggactaaagcagagccacggatatactatgcaccagtgaagcctttggaagaagatacaagtgaggtagaacaacagaaagagcggacattcttagaatggaaggcagcaaggagacaagaagtgagtgagtatcaaaaggagatagaagagcagtgtctgggtaatgttgagaaagagctggagaggtggcaaaacgcaaggaaggcaaggaaagcaaacaacgagggtatgaatttgcaggaaacgatggacaaggaattagagactcataggatggagcatgggccaaagaagagaaagatacctggaggaggagtaggagatgaagatgaagaagatgaagtagaggatatcaatggtggagaggatgaaatgataatggatgatttactggaggagggaggagatggaaccatcaaggaggaagtggcaactgatacagttaaagcagaagcagtggaggaagatattaaacatgaggttctctaagtcatatagtttgtttgttcttgaaatttggtggagtttgcgagttagaaaactggtcaaatctattttggagcgttgtaacgtgaattatggtaatttctaggaaagatttgcctttgtgctatataatttgttttgtttnnnnnnnnnnnnnnnnnnnnnnnnnnnnnnnnnnnnnnnnnnnnnnnnnnnnnnnnnnnnnnnnnnnnnnnnnnnnnnnnnnnnnnnnnnnnnnnn

SEQ ID NO: 91602 - DNA, 713 bp, Arabidopsis thaliana columbia
gctttcgctttctccatgttcaaacaaagaaagctcgtgaagaggcacgcagctgagatcttcacatctgtgatagtttcaacggtattctcgctctactccactgctcttgttggacgtttagtcggtttagaaccttctttaacggtttcaatcctacctcgctgcatcacggttgcattggcccttagcattgtatcactctttgaagggaccaattcgtctcttacagcagctgtagtcgttgtgactggtctgattggagctaactttgtacaagttgttcttgacaaactgcgtttacgtgatccaattgctcggggaattgcaactgcttcaagtgctcatggacttggaacagcagctttgtcggctaaggagccagaggctcttcccttttgtgcaatagcttatgctcttaccggaatcttcggatcgttactgtgttctgttcctgccgtccgacagagtttgctagcggtcgtcggctgaggattgatgatgtggcgaaacacgattgatggtctcaaagctggcgagttacttaaaatatgagagcagtttgctttggatgccaaataagcttgtattaatgaaaaagatgatggaaaatgtttatttattttattttatatatgtaaatgttgtgagatttgtacaacatacataaattttatataggagtaggatgtcccagctttccaaaaaaaaaa

SEQ ID NO: 91603 - DNA, 511 bp, Arabidopsis thaliana columbia
aggcgattctcttcaaaggctacaccggaggcgatttggagtttaatcggaaccactcggacgagtctccgatgtagaaacgaggaagattacttcaattgagattaagaggcatagagagagagatttgtgtattcgatcgaatcaagcttgggtttgttagtaatggcgagaatagctatagttttagatctactgaagaaatctcaatccaagcacagtcttcactcatcttccttctcttccgccgccactgctccctttgcgtctaggtttctattcggttctttcgagcctcgagtttcgtatcgtggtgttgctgctggaatagacgatgattaccttggtgctatacggaaaatgtctgcggatggaaacttctaaagggtaacatcatctttaatatgatttcatttaaagaaaatgtcatgctttatttattaattacactactaaatgatataatttagtgattatgtagaatgcttaatttcttggtgatatataagaa

SEQ ID NO: 91604 - DNA, 581 bp, Arabidopsis thaliana columbia
  unsure (1)..(581): unsure at all n locations
nnnnnnnnnnnnnnnnnnnnnnnnnnnnnnnnnnnnnnnnnnnnnnnnnnnnnnnnnnnnnnnnnnnnnccacgcgtccgttcatcaaatgttgtacgagagaatacaaacagcaaagaaacattcagaaaagaaatggaaggctgcagataacacgactcctgattcttatcccaggttcatggatgcactctataatttacttgacggttctattgacaatacaaagtttgaagatgagtgccgagctatttttggagcacagtcatatgttcttttcacattggacaagctagttcagaagtttgttaagcatctccattcggttgcatctgatgaaacagacaccaagcttctgcaactacatgcgtatgagaactacagaaaacctggaaaattctttgatctagtgtatcatgagaatgcatgtgccctcctccatgaggcaaacatatcccggatcagatattcatcagaaggaacacgtctctcgattcagcttatgaacagtgggaacaatcagcttgaagtaatgggtgtagcgatggagccggcatttgcagattatctacaaaataaat

SEQ ID NO: 91605 - DNA, 439 bp, Arabidopsis thaliana columbia
  unsure (1)..(439): unsure at all n locations
gggctgcgaacccaattctcgtcgtcttcaaactcagttttccgaaaccccaagcaccacaaggattgcatggcctgaagaaccacttaatcgagaattgtgctggaattcgcaaattttccctcgcgtttttctttcacactctcggaatcggaaatttccaccaagctccgtcaagcgatagattctgacaattcctcgcgtgcgcgcagtgaatatgaagaaagatgaaaacattggtttgacggggagaaccatttacaccagatccctagcagcttcaattcctgcctcagttgaccaagaaacccctggtttgaggaggtcaagccggggacaccatctacgaaggtaataactccagcttctgctactagnaagtcagagagactggctccctcacctgcttcagtttcaaaaaagtccggtggatcgtcaa

SEQ ID NO: 91606 - DNA, 583 bp, Arabidopsis thaliana columbia
tatacgactcctataggggacgctggtacgcctgcaggtaccggtccggattcccgggtcgacccacgcgtccgtctctctctctctctctctctctctctctctctctctctctctctctctctctttttacttcttcttcttcactttctctctgaatctgccgtcacgcggaagcttccgattcaaaacactctctacatgcattgttggtgtacaactacaacactatacgacgagtcttcaagcttccgcgtcttcttcctcttttgagaatcgcttcttctttcctccatcgttggttcacgattctctctgcaatgagtgatttcttcgatgaggggaagcagcaattcgcaagtgttgctgatgggaatgcaccacttaagtatccaagcttcaagctacctaagtcgactttcgagagatcctggcaaacataccgccaatggtagaagctaaataaggaggatgctcttctaaatcaagggttcatgaaccaaaggaaattcatggctaaggaagaaacgggacctgccgtcttttggaatgcaaaaggtttccccacttcctggaaaggagg

SEQ ID NO: 91607 - DNA, 905 bp, Arabidopsis thaliana columbia
  unsure (1)..(905): unsure at all n locations
nnatgatatnnnnncannnnnnnnnnnnnnnnnnnnnnnnnnnnnnnnnnnnnnnnnnnnnnnnnnnnnnnnnnnnnnnnnnnccacgcgtccgcggacgcgtgggtttccggagatttttctctttgcctttgttatttgctgcttttgctgcagctacagtagaatcttgtgtttttgtggtggggaggtgagatttcttatgacggggaagcgatcaaagactaattgcagatctgcttctcacaagctcttcaaggataaggctaagaaccgtgttgatgatttgcaaggcatgcttttggatcttcagtttgcgaggaaagagagtaggcctactgatgttactcttcttgaggagcaagtgaatcagatgcttcgtgagtggaaatctgagctcaatgagccttctccagcttcatccttgcaacaaggtggtactctggggtctttctcatcagatatttgtcggctgctgcagctctgtgatgaggaagatgatgctaccagcaaattagctgcccccaagcccgagcctgctgatcagaatctcgaagctggcaaagctgctgtcttccaaaggggatacaatctggttcaggggaagtcagaacatggattaccattggttgataattgcaaagatttgtccttagcagctggtaacaatttcgatggaacggctcctttggagtatcatcagcagtatgatctgcaacaagagtttgaaccaaacttcatggtggtttcacaattgtccagttatggtgagtagagggcctatcctatctctatttatccnactatttgcctcacctctgattcttggtcaaatgtgctcttggatgcctangcactaggattgattggtcagattctgagagcttccctgactgcttataagg

SEQ ID NO: 91608 - DNA, 482 bp, Arabidopsis thaliana columbia
gaaaacccgggccgagccacgcgtccgcttcctttcttcttcgcaatctcaaaatccaaaattttctgcaacccgaatcagaaacctccaacatcgtcatgggtttaattcctcaaccacaagaatcgatccaagaatctcattactacacacataaactcttcctcactgcaaactacgtcctcctcggtgcatcgtcaagctgcatcttcctcactctctctctccgtctaatcccttcactctgcggtttcttcctcatcctccttcacgccaccacgatcgcagccgccgtctcaggctgtgcagccgcatcttatggtaagaaccggtggtacgcagctcacatgatcgcaactgtccttaccgccattttccaaggctcagtctctgttctcatctttaccaacacttcgaatttcctcgagagccttaactcttacgtccgtgagaaagaagcgtctatgatcttgaaactagct

SEQ ID NO: 91609 - DNA, 670 bp, Arabidopsis thaliana columbia
  unsure (1)..(670): unsure at all n locations
cgcccccgtgctcgtaagtgcnctccnacttctctccctcnnccctcacttgcgttctcctctcctcctcacgccaccacatcgcnccgccgtctcagctgtncaccgctctatggtaagacccgtggtaccngctcactgatcgcaacgtcctaccgccttttccaggctcgtctctgttctcatctttcccaacacttcgaatttcctcgagagccttaactcttacgtccgtgagaaagaagcgtctatgatcttgaaactagctggtgggctctgtgttgtaatcttttgccttgagtggatcgttcttgttctcgcctttttcttgaagtactacgcttatgtcgatggtgataacaatggagttgctatgaaaaggactggtaaggttcagagtgaagagactctcaaaaattccccatgggcgttccaagtttgaagaaaaattcacttcttgtaatgattttgtttaagagaagagaggttgtatcaaatgttagtttgatctgtgtttcagggtttggtttatatgtattgaagaattgaattggttgattactttgttgatgaaaaaaaaaaaaaaaaagggcggccgctctagaggatccaagcttacgtacgcgtgcatgcgacgtcaagactcttctataggtcacctatagaatcg

SEQ ID NO: 91610 - DNA, 462 bp, Arabidopsis thaliana columbia
gggcgacccgcgcgtgcggcgaaattctctgatctctcttcattttattttccctctacatctctcccaacgatttccaaatctcacttcactttggctcctccacctgaatccatggatattgcttcgtcatctctctcacaagctcacaaagtcgttctcacgcgtcaaccttcttcccgggtcaacacctgctcccttggctcggtctccgctatcggattctctcttccgcagattagctctccagctttaggtaaatgtcgccggaaacaaagctcttctgggttcgtgaaagcttgtgttgctgttgaacagaaaacccgaactgctatcatcagaattggcacaaggggaagtcctctagcacttgctcaagcatacgagacgcgagaaaagctcaagaagaaacaccctgaactcgttgaagatggagctattcatatcgagatcattaaaacg

SEQ ID NO: 91611 - DNA, 482 bp, Arabidopsis thaliana columbia
caggtctcatcgactcacttatggaaagctggtacgcctgcaggtaccggtccggaattaccgggtcgacccacgcgttctgccacgcgttctgtgagtttgaggttggacggatgacacttggacggttgctagctttaggctataatgttgttgtgagttacaagagagcttcaactgctgtcagttatgggaatttatccctatcacgtgaaacgattgatactcttggagagactttccatggttctgagagggacagataggaagagtgtgggagctgaagctctgagaatgggcatcactgggccctggatcaccaaatcatacctcgaactgatccttgaaagcaaaggtgtaccacccttgaatacaccttcactgttgcaaacctgtactggtatcactaaccaagagaagcaaattgtttctccaaaaactatccgaactaccccaaacatcgttacccggcttgaggattt

SEQ ID NO: 91612 - DNA, 423 bp, Arabidopsis thaliana columbia
tctctttcttcttcaatggcgacgaaactcatactcaagaaaacgacaaaatccatcagccgtcaccaacgtaactacctccgccgtcaccggaaatctcagatcggatgctcaccgtctccggccacaaccaccgtaatcgccaccatcaacaaatcgatctacagatgtcatcgaacttttctctgtttgttttcgcgtcacgcaacaaaaggattcaaaatcctcaaacctcgcgaagattttcagaattctccgtattcattgtttcacgaaagatctggtaaatcattcgacgagacgaacaagacgatcgtgttagatctagacgaaactcttgttcattcatcaatggagaaaccagaagtaccgtatgatttcgtcgtgaatcccaaaatcgacggccagaccttaacgtttttc

SEQ ID NO: 91613 - DNA, 339 bp, Arabidopsis thaliana columbia
  unsure (1)..(339): unsure at all n locations
ggttgatgtatggtcaggtaaccatccgttttacctcgggaatcgttcggctttgatggttgatgctgatcaagttgagaagtttcgtaagaggttcgctgggctttctgagattatggagattcctgtgcttaaaggagaaatcattatgcctactaagaaaagtaaaggtcccaaagggaagaagaaatgatgagtcttttctggtaaagcttatgtctttgaatttgttgtcttttcaattgaagtcgagatactgcttaggctgttaaaaattgtatgtgaaatttccttctgaaatgctattggttatgctttcctttaaggaaaaaaccatnt

SEQ ID NO: 91614 - DNA, 648 bp, Arabidopsis thaliana columbia
  unsure (1)..(648): unsure at all n locations
accacgcgtccggaagaagatagctcctgaagacaaaaatggcggtttctctcccgaactcgtttcttcagattagcccatgtgttccttctctgcaattaagaaagccggtgatggcggcagtgaaaggaggaaaacaatcggtgagaagaagcagcaatacggtggttcagataacgtgtcgtaagaaggaattgcatcctgaattccacgaagacgcaaaggtttactgcaatggagagctggtgatgactacaggaggaacaaagaaagagtatgtggttgatgtatggtcaggtaaccatccgttttacctcgggaatcgttcggctttgatggttgatgctgatcaagttgagaagtttcgtaagaggttcgctgggctttctgagattatggagattcctgtgctttaaagggagaaatccattatgcctactaagaaaagtaaagggcccaaagggnagaagaaatgnatgaggccttttcctggtaaaccctatgnctttgnaattggtggccttccaattgaagccgngaactgcttagcncggcccgaattcccngcttccattacaacnaatgccgaccaagaaccccttaaaaaaagnttnaccaaggggaaacaancccccccctttttgnngc

SEQ ID NO: 91615 - DNA, 871 bp, Arabidopsis thaliana columbia
  unsure (1)..(871): unsure at all n locations
gcaggactatgagtctgatttgacaaaactcttcacttggacgtgcgaaagatgcaatggtttgacaaaggatttcgaagtaatagaggtcatatttgacgttgaacactgcttacaggcgtatgttggggtggctaaggatttgaatgctatcattattgcatttcggggaactcaagaacacaggttttattctagtcattgtaatctaaaagctactccttcgcataaacttggttaatgcttaatcaatccaaaacttgtgcaccatacaaaattgggtctcagacttgttctggaaacagctcgatctgaattaccctgacatgccagatgcaatggtgcaccatggcttttacagtgcttatcacaatacaactttacggcctgcggttttggatgcaataacacgagtgagaaaagtctacggggcgaacatcaacatcatagtgaccggtcattcaatgggaggagccatggcttccttttgtggtctagacctagttgtaaatgaaggtgaagaaaacgtacaggttatgacatttgggcaacctcgtgttgggaatgccgcttttgcatcttattacagtttgcttgtgcccaataccttccggatcacgcatgaccgtgatatggttcctcatctgcctccttactattaccatttccctcaaaaaacataccaccacttcccaacagaggtgtgggtgaaagatttcagtttttcgaattttgttctttttggtttggagaaagtttgtgacaacactggtgaagatcctacttgcagcaggtaactatcaatccctctgaaacaacttactgatataatttctctccactacattagcaaggncaaacttccaagtcg

SEQ ID NO: 91616 - DNA, 387 bp, Arabidopsis thaliana columbia
ggtagaagtctggagaacatagtcaaaagtaacgctatagctctactcgccgaaacgtccagcagttgatgtggctgaggtctttctttggcttatggctgtcggtaccattttatgtgcttcttactggtctgcgtggaccgtcagggaagaagctattgagcaagacaagctgctaaaggacggctcacatgaactttttgcagttagcaaccaccagctctagaggtgttgttgaggtcaccgtgatatcagcaactttgtcttgtagcggcggcttctggtgtccctgatcaatgctctacaacgcttatgtcagtctggtttatatacgtgttggtggtactcttttgcatacgtggcgtacatgggctgcaaacttgtttg

SEQ ID NO: 91617 - DNA, 446 bp, Arabidopsis thaliana columbia
cggtcgcgtgggcgcaaaggaatgggtgaagaggggagacttaggacacacgaaagtgtatctacacatcaaaccaatgtttggaggcactttcactgacattgtcgtgtggatattctaccctttcaacggtaacgcccgcctcaagtttttattcttcaagagcctgtcgctgggggatatcggcgaacatattggagactgggaacatgttacgttgcgcatcagcaacttcaacggagagttatggcgagcatacttctctgagcacagtgggggaactctagtggaggcatgcgatcttgagtttcaaggtggaaacaaacttgtgagctactcgtctcttcacggacacgcaatgttttcaaaaccaggacttgtgttgcaaggcgatgacggaaacggcataaggaacgacatggcaagaagtaacaaattctttgacg

SEQ ID NO: 91618 - DNA, 485 bp, Arabidopsis thaliana columbia
catcaccgtcgttattacactaaccaatcggctttcatcgccggagaactgattaacatataagaaaatggcgtttgctagagcagtgagaagaccaattggagtcttttattatagtgttagtagtagatttagttctggaaatgagtattctactgtggcaagcaaattcgaaactttgtctcagtacaaaagctctgtaccgtctggttacacaagccttgttcgtggttttgggaatttcatacggagttttagttcggaagctcctcctgctgtatctgaccaaatgagtcttattaagcaacttagggaaagaactagtgctcctattaaagatgttaaggcttctttagttgaatgcaattgggatcttgaggctgctcagaaggatttgagaaagagagggaaagttttggcttcgaaaaagtcgtcacggactgctgcagaaggaatgcttgccgctgctcaaaatgaagggaaag

SEQ ID NO: 91619 - DNA, 495 bp, Arabidopsis thaliana columbia
gttttctagatttaagcactatctaagaaaaacaaaatcaaactcataaagaataatgggagaaacagaagagaaagtgaagaaccatgataacaaagaagaggaacacaacaaggctgagaaagctgagaagaaggacaagaagaaggataaagataacaaggataagaacgaggacgataaaaatggtggaggagaagaaggggaagatcaagagaagaagagcaagaagaaagataagaaagcgaagaaagagaagaaccctgaagataagaaagatccagagaagttgaagatgaagcttcagaagattgacgaaaagattcaagctatggtcttaaagaaagatgagattgtgaagcttattcatgatgctgaacaagctaagcctagtactgctgcagtagatgcaccaccaccaactaactaattcagatacacaaattatatactacaataagttaactaatatatttgtcaataacagatgctgct

SEQ ID NO: 91620 - DNA, 442 bp, Arabidopsis thaliana columbia
tgtggtatctaaatgtcgaacaccgtcgaagatgacgacgacgacttccagatccctccttcctcacagctttcgattcgaaaacctcttcacccaaccaacgctaacaacatctctcaccgccctcctaacaaaaagcccagactctgccgttacccgggtaaagaaaatgtgactccgcctccttctccggatccggatctcttctgctcctcttctactcctcactgtatcttagattgtatcccatctagtgttgattgctctctaggagatttcaatggtccaatttcttctcttggtgaagaagataaagaggataaggacgactgtataaaggtgaatcgtgaaggttatttgtgtaattcgatggaggctaggttattgaaatcgagaatttgtctcgggtttgatagtggaatccatgaggatgatgaaggtt

SEQ ID NO: 91621 - DNA, 437 bp, Arabidopsis thaliana columbia
tggataattaaagaacaccaacaacaacaaaaacagaggaagaaaataaaaaccaaatttttcttgttgcaatcatttgaaattaaattcaattcttcgattcttccgagctggttctcgaattgggtttgctgcaaattgtgaatccaataaaatttgttcgtgttgttgtgttgatggtgatttgttagggttgatccgatcaaaatttcaattttgtatcgtaaaacgatgaggtttctaagcctcgtcggaaactcattcggttgttctgcgtccggcgaacgcttagtatcagcggccagagacggtgatttacaggaagctaaagctctcttagattacaatccaagactcgctcgttactctacttttggcgttcggaactctcctcttcattactccgccgctcaaggccaccacgagatagtttctct

SEQ ID NO: 91622 - DNA, 590 bp, Arabidopsis thaliana columbia
  unsure (1)..(590): unsure at all n locations
ctgcaacaactctcaattcctccattttcacacaatccaaaacccatggattcttcaatacccgacccgtttaccgaaaacccttcaccaccatcacctccgctttaatccccgcttcaaaccgtcaagctccaccaaaacaacaactctatcaaccattccgtccaccaccatcaccaatccctccaaagttccgatcactcgacaccgccggaaaaatcgaagtcctcgctgatcgtctcggtctctggttcgaatacgntccactcatttcctccttatacactgaaggattcactcctccatcaatcgaggaacttcaccggaatctccggtgtcgnaccaggaccagtttcatcggtcggccgggcaagttcgggccctctttaggtcaaatccgggtgccaaaccggngcttttatagcttgggtttgacaaaattggggccggggttttttttngggggttnggttttttaaacaaaatttaaaggggtaggtgcttgctggataaattgttgatcaagggtttggtncgaaggnntggngtttttngggggttaaggtttccgnattgngngggggtggttt

SEQ ID NO: 91623 - DNA, 979 bp, Arabidopsis thaliana columbia
  unsure (1)..(979): unsure at all n locations
ctgcggtaccggtccggaattcccgggtccaccctcgcgcccgctgcaacaactctcaattcctccattttcacacaatccaaaacccatggattcttcaatacccgacccgtttaccgaaaacccttcaccaccatcacctccgctttaatccccgcttcaaaccgtcaagctccaccaaaacaacaactctatcaaccattccgtccaccaccatcaccaatccctccaaagttccgatcactcgacaccgccggaaaaatcgaagtcctcgctgatcgtctcggtctctggttcgaatacgctccactcatttcctccttatacactgaaggattcactcctccatcaatcgaagaactcaccggaatctccggtgtcgaacagaacagtctcatcgtcggcgcgcaagttcgagactctttagttcaatccggtgccaaaccggagcttatagctgcgtttgacacaaatggagccgagcttctctacgagattcgtcttttaaacacaactcaacgtgtagctgctgctgaatacattgttgatcacggtttcgatacgaaaggagctggagatcttgcgagagcgattaaagattttccgcatcgtcgtggcgacgttggtttgggagactttgattataacttacctggagatggttggctttttatgctttataggaaaagtagagagcatcggagtccgtccggagattcgaactacatttactcgaacaagctcttgaaaccgcggtaacagagaaggcgaaaaaggcggtgttgagggagttacatggagagagtgaagaagagagagttaaagangaggagataaaaatcattcgtgttcctgtagtgagattaaggtttngngaagtagcgggacnaagttcngttgttnttttacccggtttntaaagcagaaganggagaagagaagctnctttnaagnaccaatggagtttttaaaantngag

SEQ ID NO: 91624 - DNA, 1459 bp, Arabidopsis thaliana columbia
  unsure (1)..(1459): unsure at all n locations
agctctcnnnnnnnnnnnnnnnnncnnnnnnnnnnnnnnnnnnnnnnnnnnnnnnnnnnnnnnnnnnnnnccacgcgtgcggcgtgccataatcttccaaacttcaccagaagaaattcttaacaaacaattttcttcataatattaattctcaagatcttaaagattatattaatacgaagagaaaattcaaatgggtcttgatgattcatgcaacacaggtcttgttcttggtttaggcctctcaccaacgcctaataattacaatcatgccatcaagaaatcttcctccactgtggaccatcgtttcatcaggctcgatccgtcgttgactctaagcctatccggtgagagctacaagatcaagactggtgccggcgccggcgaccaaatttgccggcagacctcgtcccacagcggcatctcatctttctcgagcggaagggtaaagagagaaagagaaatctccggcggcgatggagaagaagaggcggaggagacgacggagagagtggtgtgttcgagagtgagtgatgatcatgacgatgaagaaggtgttagtgctcgtaaaaagcttagactcactaaacaacaatctgctcttctcgaagataacttcaaacttcatagcacccttaatcccaagcaaaaacaagctcttgcgagacagctgaatctaaggcctagacaagttgaagtgtggttccaaaacaggagagctagaacaaaactaaagcaaacagaagtggattgtgagtttttgaagaaatgttgcgagactttaacggatgagaatagaaggcttcaaaaagagcttcaagaccttaaggctttaaaattgtctcaaccgttttacatgcacatgccggcggcgactttgactatgtgcccttcttgtgagagactcggcggtggtggtgtcggaggagatacgacggcggttgatgaagaaacggcgaaaggagctttctccatcgtcacaaagcctcgtttctataaccctttcactaatccttctgcagcatgttagttacttattagttatttaatttctttttgttggttttttttttgtttcttaaatcaaattaggaattagttagaagataaatcccagggaaaaaatattacgttgaaattggggggaaatggggtatagtctttatagataagactcttcaacgattccactttatttttcggtgggattgttggttgatgaagaaaaaaaaatagtttgtaattacaggtttaaatatgtagagaaaaaatgacgaatatgtattatcttgtttttttttccttcgaatatgtattacggtaatataaatttgcttgtaaaaataataaatatattatttgataaaaaaacaaaaaaaggannnnnnnnnnnnnnnnnnnnnnnnnnnnngtacctaannnnnnnnnnnnnnnnnnnnnnnnnnnnnnnnnnnnnnnn

SEQ ID NO: 91625 - DNA, 657 bp, Arabidopsis thaliana columbia
  unsure (1)..(657): unsure at all n locations
gnaagntccngctcataacgatgcgtntccactactcattcctctgtttttcattttcccancaccaaaacaaaaccaagannccaccaatactcgtttccancttttcgtctcatcttactttacatctctcttggtgttcttgttgctgctcacagcaaattgttnncacttgggaaattatacgcaaactttggcgtcttcacgctgatttccgcgactcagttgatatttaccgctattttcgcagccattattaaccgttttaagttcaccagatggattatcttatcgataatcggcagcattttgatttatgttttcggtagtcctgaatttggaggagagcctgatgaaaacgaagaattctacagcatccaagcttggttaactttcgctgcttcagttgctttcgcattatctctctgtttattccaactttgtttcgagaaagtgttggtaaagacaaagagatatggtaacaagaaagtgtttagaatggtcatagagatgcaaatttgtgtctcttttgtcgcaacggttgtttgtctcgtgggtttgtttgcgagtggcgagaataaggaactgcaaggcgatagccacagggttttaagaaaggggaaaccgtattacgttttgagtttgatcgggttggca

SEQ ID NO: 91626 - DNA, 541 bp, Arabidopsis thaliana columbia
caaaaataagggagagggcaaaagcgtaaataacaaaagtcgatgacgagggccaaagccccaatggaaggtgttaagctaaactctcttcttgtctgatatttcttctactctcaagtctcaaccacataaccaataaaaaatgctactaatcccaatttcttcttcttcgtcttcgtctattagccctcctcctaattcatatccatcgaatcatcactctctgtttttctccaatctcacattcccaattcaacatggaagtagaaagttgaagactttgcgactcagagccaatttctgggagtcaatccgatctgggtttgtgaagaataataagtagtacggcaacttgtggaaccaccttctatagtcaatgatgaagaagaagagactgagccattgttacctgcggaatttactttagttgagagaaatcttgaagatggtttagttgaagagatcatattttcttctggtggcgagattgatgcttatgatcttcaaggtctttgtgataaggtgggatggccaaggagac

SEQ ID NO: 91627 - DNA, 509 bp, Arabidopsis thaliana columbia
tggtcttttcgaatgtgatttttggttgatgatgatgaggctagttcaagtgtcttccagtgaatccatttcttctatttgccctcccgccccccggaatggtggagttctctacttgaagcgtggttctgtctgtgtatgtagagtcttgaagccgaataaagttgctctcaacagtatgattctttcagctatgaggacttgctcaatctctgggttccatactcatcttccgaagtcaagcggttcagtttcttcgagaaagaggttttcttctactgctttatcactcatcactcaaaccatttcaccatttgctcatccccgttcatcagtaattgtgtcaagccttctctccccatctgatatccctcagaaatctgaagaatggtttgctttaaggaaagacaagttaaccacaagtgcattcagtacagcgctggggttttggaaaggaaaccggcgtgccgagctctggcatgaaaaggtttatgattcagatgcacgag

SEQ ID NO: 91628 - DNA, 590 bp, Arabidopsis thaliana columbia
tggttcgcgtggggcagatggaagcgtttcgagctgcgttgggtttgcctgatcagcaacaggtggctgaggagggtattattgatgatgagccgatgagggagggttttgaaggtagattgaaagagaggcgggaacattcttttttggacagagatagtgggaggaagaaggtagatgaggatgtggatgagaaagatgctaaggtaaaggaatgcaagaagcagcgaggtggtgatgatgatgatgtggatgtagtgaagcgtcataagaaaaaagagagcttgaagagaagacatgatgattcatctgaatctgatgagcatggtcgtgaccgtagaaggcgctctaagaagaaggctaaggggcgtaaacaagaaagtgaaagtgactctagcagctcggattctgaatctgactctgacagtgatgatggaaagaagagaggaaggaagaagcctacatagactacaaagaaacgcagcagaaggaaaagaagtgtctcttctgaatctgaagaagttgagagtgatgatagcatgaaacttaggaagtcacacataaagagccttcccttcaaccgatctggt

SEQ ID NO: 91629 - DNA, 662 bp, Arabidopsis thaliana columbia
gagctctcgtaagcctctgaattcgatttgacctgacaaccatacaaaaaattctcccgagaaaatctctctctcaacgaacgaatttcgaatcaccaagaagaaattctgagatttgtttgcgtttcatcggaataatggaagtgaaagtagcaacaacgacgtcgtttcattggtcaggacgacacacagcgattcctcaatgtccgtcattttcgcaaaccctaacttcatctaaacgccgtcgttctcgtggaatagccggtgatgtttccgtcggaggaggatctttgagattaaaaccttcgacgtttctcggaacacaatctgggaaacttcaccgatctaaatcatgtgagctttggcaattttctaattccaccacgaagaagattagaactgatgtgaagaagaaacataatcctttgagaagagtttgtagtgcgagctccggtttcttctcctccgacgaagcattctctgtgaaaatgcacgaattagcttcacaattcagaaacgcacgcgatgaagaagaagaagagaacaaacagaaatcagaagcagtagataaccgatacgatagcaataatcatagatttggttctttgaagctattacaagagtctgttccacgtttagcttctttggaagcttcatgggca

SEQ ID NO: 91630 - DNA, 1500 bp, Arabidopsis thaliana columbia
  unsure (1)..(1500): unsure at all n locations
agacaatcgagtctcgagtctgtgaaaccaattctcgcgagtgggagattgtagccatggcaggagtatcgctcaagtgtggcgattgtgggacgctgctgaagtccgtggaggaggctcaggagcacgctgagctcacctctcactccaatttcgccgagtccactgaggccgtgctcaatctcgtttgtactacttgcaccaagccttgtcgctcaaaaatcgaaagcgatttgcacacgaaaagaacagggcatactgagtttgtagataagacattggagacaatcaaacccatcagcttggaagctcctaaggttgccatggagattgatgataatgctagtggtagtggagaggctgcagaagagatggttgttccagacgttgacaataacattctcgaggaacttgaagcgatgggcttccctaaagctcgtgctacccgagcactccattactctggtaatgccagtcttgaggctgcagttaattgggtggtggagcatgagaatgatcctgacgtagatgaaatnccaaaggtgccttccaactccaatgttgggcctgccaaacctgctcttacgccagangaagtgaagctaaatccgcaagaattaagggaacgtgcacggaagaagaaagaagaggaagaaaaacggatggaacgtgaaagagagaaggagcgaattaggattggcaaggaactcttagaagcaaagcggatggaagaagtaaacgaaagaaaacgtcttatgtttttgcgtaaagctgagaaagaagaagaaaaacgggctagggaaaagatccgtcaaaagcttgaagaagacaaggctgaaagaaggcgaaaactcggattgcctccggaagatcctgcaactgcagctgcaaaaccctcagtgccagttgtggaggagaagaaggttacattgccaattagaccggccacaaagactgaacaaatgagagaatgcttgaggtcccttaagcaagcccacaaggaggatgatgctaaagtgaagagagcgttccagactctgctgacttacatgggaaatgtcgctaagaatccagatgaggaaaaattccggaaaattagactcaccaaccaaacatttcaggaaagggttggttcgctaagagggggcatagagttcatggagctatgtggatttgagaaaattgaaggaggagagttcttgttcttacctagagacaagatcgattcagccatcataaactcagctggaacagaactcaactccgccatcaacaaccctttctttggagttctttaaatccatgcctcttcttatgaaactaaaaaaaaattcggatatctctatgaataatactggctagtgacattctttttgttttgcttaaataagtggaaaatttggagagcagaactaaaagcttccattactgtttaacccgtcttgttgtttgcattctaccttttaaggtaaaaaaaatgacatttccataaaaaaaaaa

SEQ ID NO: 91631 - DNA, 469 bp, Arabidopsis thaliana columbia
tgggctttgtgaacagtaaaactcccaaatttgcaaatgactcatcttcttcacctggagagaatctagggttccagatttactcttcgtcttcctctcttcgcttcttccccactgggattttccttttcttctccttttttctctacccatcgatctacacatcctgatcttcttagaagccccaatccttatacattccgggaacaaaaaacctagctttttttttattccggcttaaccagttttcgaaaaaccctagcttccatggcgaaaactcgacctggtgtcgcctccaaaattaagacgggaaggaaggagctggactcttataccatcaagggcaccaacaaagttgtgagagcgggagattgtgtgttgatgcgcccatcagatgctggtaaaccaccatatgtggcccgtgttgagaagattgaagctgatgcgaggaacaatgtgaaggtgcact

SEQ ID NO: 91632 - DNA, 688 bp, Arabidopsis thaliana columbia
  unsure (1)..(688): unsure at all n locations
agacccacccgtctcgagctgaactcagactgcaaacaatgcaccttagcgcacaattttangtaattatgcaccagcgcgcttagagccaatcatattggtggcgatgctgcacaacggacctcacctattctaaatccagatcataaaaacgctaactttcaatttctttctttctgagaaattggttctcaccgcgcgtcccgaaaaatgggacgaatcggtttagtagtgactgatctggtattgccgttcatgtggatatgggcaggagttctggtcaacattttagtccatggagttcttggatttagccggaccgatccttccggtgagatcgttcgttatctcttctctatcatctccatgttcatcttcgcctaccttcaacaagccaccaaaggcgggctttataatcctttgaccgctttggctgctggagtctccggtggcttcagcagtttcatcttctccgtcttcgttcgaatccccgtcgaggtaataggatcaattcttgcggttaagcatatcattcacgtattccctgagattgggaaaggacctaaactaaatgtagcaattcaccacggtgctttaacagaagggatactaacattcttcattgtactgctctcaatgggactaacaagaaaaatcccgggaagtttctcatgaaacctggatcggt

SEQ ID NO: 91633 - DNA, 846 bp, Arabidopsis thaliana columbia
  unsure (1)..(846): unsure at all n locations
aattcccgggtcgacccacgcgtccgagctgacaaagactcaaccaacgtctatagcgtgtatttttttttaaatgcaccacccgcttacagccaatcatgtaagtggcgattatgttcaacgggcactcaattatcctaaatacagatcataaaaacgctaacttttaatttctctctttctgagaaaccggttctcatcgcgggaatcgaaaaatgggacgaatcggtttagtagcgactgagctggaattgacgatcgtgtcgatatgggcaggagttctggacaacattgtactccatggagactttggatgtagccggaccgatccttccggcgagatcggtcggtaaatgttctctatcatctccatgttcatcgtggcctaccttgaacaagccaccaaaggcgggctttataatcctttgaccgctatggctgctggagtaccccggtgggttcagccgaggcatcttctccgtccttggaacccgaatacccccatcgcgaagggaaaataacggaaatccacaatttccttttaggcgtggatatataagacacattattacaatgtttccaacccggtaatttttccccctttgcaacaatcttgtcgggaaaaaaggggacccatataaaccctcataaatgggttgcgcccaatttcttcaccacaacgggggtggctttttctaaaaccacagatatgggggatctttcctttaaacacaatttccttgtcaaatttggtnaacctgggtttacctcaagaatgggcgggaactttagagccaaaggcaatctttatttcccctcgggggaaaagtgtattcccttttcatt

SEQ ID NO: 91634 - DNA, 391 bp, Arabidopsis thaliana columbia
tttgttcgcgtgggcggacgcgtgggtgaaccttcgtatttggacattggtgatggtgtcatctacaaaatccccccaagttatgacaagctggtggcatcattaaacttaccgagcttttcagacattcatgtggaagaattttacttgaaaggaactctggatctgagatcattagcagaactgatggcaagtgataaaaggtctggagtaagaagccgtaatggaatgggtgagcctcgacctcaatatgaatctcttcaagctagaatgaaggccctgtcaccttcaaactccaccccaaattttagcctcaaggtgtcagaagctgcaatgaattctgccattccagaaggatctgctggaagtactgcacggacaattctgtctg

SEQ ID NO: 91635 - DNA, 570 bp, Arabidopsis thaliana columbia
  unsure (1)..(570): unsure at all n locations
gcggcgggcgtgaggggaggngaggggggcccccccggtagtattcgccgggacctatacgactcacttagggaaagctggtacgcctgcaggtaccggtccggaattcccgggtcgacccacgcgtccgggaaaaatggagatatggttacttatcttgggctctctcttcctctctctccttctcaatctcctcttctttcgcctccgtgactcctcctctcttccgttaccacctgaccctaactatttccctttcattggaaccatccaatggctccggcggggcttaggtggactcaacaactatctccgctccgtccaccaccgtctcggtcccatcatcacccttcgcatcacttcccgcccctctatattcggccgccgatcgttctcttgctcaccaggctctcgttttgaacggtgccggtttcccccatcgtccaccggcagctccgatcagtaagattatttcgagtaaccaacataacatcagctcttgtttatatggagccacgtggcgtcttcttcgccggaatctcacttctgagattcttcaaccctcgcgcg

SEQ ID NO: 91636 - DNA, 402 bp, Arabidopsis thaliana columbia
gtttctcactgtactgttttaaaaaccctcgaattctctttactcttccgtcggaatcacctctctttgttttgggttctgataaatgttcaccggcgacgagacggccgagtagaaagactcgtgggtttgtcgtgacgtacgcgcactctaatccgaagataatcaatccgaagaagaagtcgaggtatgggcaaacgttatctccatatgacagtgatgaagatgatgatgatgatgatgatgatgatgatgatgactggttacttaatgatgatttcgctgaggttacagagtatgagaagaagaagcctaagtcacataagcaaaccattgctaagaaaagtgtgaagaaagggattgtcaagcctgaagaaagcgagactgatgaagatgatcttg

SEQ ID NO: 91637 - DNA, 455 bp, Arabidopsis thaliana columbia
  unsure (1)..(455): unsure at all n locations
tcgcttttctaacatttcttcttccacaagaaacaacaacgaagccatatattcttttgtgtcttagttgctactctcacattacattatctgggatcaaatatggctcatgtggatgggcaagttggatatagcgaggaattcatcgagaattcgcggggaatgcaactcttaacatgcaaatggtttccagtcaatcaagaaccaagagctctcatcttcttttgccatggctatgcaattgattgcagcaccacctttaaagatatagcacctaagtttgcaaaagaaggctttgctgcgcatggaattgaatatgaagggcatgggagatcaagcggtctctctgtctacattgataacttcgatcttctcatcgatgatgtctcttcacatttctccaaaatatctgagatgggagataacacanagaagaagaggtttttgatgggaga

SEQ ID NO: 91638 - DNA, 479 bp, Arabidopsis thaliana columbia
tctgcttttcattaacttaaacctcgtacgtttgtgtaatgatttgattaggaggttgaacaacaactcattatctgggccctttcctgcttctctgtctcaaatccctcacctctctttcttagacttgtcttataacaatctcagaggtcctgttcctaaatttcctgcaaggacattcaatgttgctgggaaccctttgatttgtaaaaacagcctaccggagatttgttcaggatcaatcagtgcaagccctctttctgtctctttacgttcttcatcaggacgttgaacccaccttattagcagtggcactgggggcaagcctggccttggctgttagtgcaatcctctctctcgggttcatttggtatcgaaagaaacaaagacggttaacgatgcttcgcattagtgacaagcaagaggaagggttacttgggttgggaaatctaagaagcttcacattcagggaacttcat

SEQ ID NO: 91639 - DNA, 610 bp, Arabidopsis thaliana columbia
ggttaaagaagaagagttgagaattacaaaatggaggagacgacgattcctttcaagagcttacatagcagagaagatcaaggtcataagaagaaggtacattcagtagcttggaattcgaatggaacaaagcttgcttcgggttctgttgatcaaacggctcgcatttggaatatcgaaccacacggtcatagcaaggctaaggaccttgagctaaagggtcatactgatagtgtggatcagctatgttgggatcccaaacattcagatcttgttgctactgcctctggtgataaaagcgttcgtctttgggatgctcgcagtggaaaatgcacacagcaggcagaacttagtggagagaatataaacatcacctacaaacctgacgggacacatgtagctgttggtaatacggatgatgagcttacaattctggatgtccgtaagtttaaacctcctacaccaggcggcaaattcaattttggggttaatgagattccttggaacaatcccctgggggattttttcttccttgactactggacttggcactgttgaagttctttcatatccatctcttaaaccacttgacactctcacagcccacaca

SEQ ID NO: 91640 - DNA, 528 bp, Arabidopsis thaliana columbia
  unsure (1)..(528): unsure at all n locations
tgatatnnnnnnnnnnnnnnnnnnnnnnnnnnnnnnnnnnnnnnnnnnnnnnnnnnnnnnnnnnnnnnnnnnnnnnnnnnnnccacgcgtccggcactttagaaagaaaccctagtccgacgacctctccttcgccgctgaatcctcatcgctggtcagatttctatctatctcgctcttctatgtttccctatctcgttgattcttggcggctttctttttgatgaaattggattacgatggctggatatcctactaatggatcagtctacgtttcaaatctccccttaggaactgacgagaatatgttggctgactattttgggaccattgggttgcttaagagagacaaacgaactggtactcctaaggtatggctgtaccgggataaagaaactgatgagcccaagggagatgctactgttacctatgaggatccgcatgctgctttggctgctgttgaatggttcaataacanagattttcatggaaacaccattggagtttttatggccgagtcgaagaata

SEQ ID NO: 91641 - DNA, 510 bp, Arabidopsis thaliana columbia
cggcactaattcgactcatatagggaaagccggcacgcctgcaggtaccggtccggaattcccgggtcgacccacgcgttcgtacagagctctatggctttctccattgcgatttattgtgagctcggcgccgtcaaagttaacgccttacgtatctcgaggacgaggactaagtggaattgatactggggctggttgttcttgttctcgtagtgtcacgactttgattggtggggagttcattcgatgccaagatgactcaaagatcttacagttgcagattggcgatgcccttcgttcacgagagaggcaaggagcgtcagcattgctttttaagttaatccaggggaattattcacttattgctgatgagtttcatgatattctatattattgtgctcgatcaccggatccctgtgtaagtatgatctatgacagagtctcccttcggctgtcctaaatcttcggttatctctcacaagttatattgcactgaaattttggcagggt

SEQ ID NO: 91642 - DNA, 511 bp, Arabidopsis thaliana columbia
  unsure (1)..(511): unsure at all n locations
angngcntatcttcccggcttccgggcctgnattcagccngaatagtttttnccatctgaaagcaaatagtttcccgttgtcccggtgtttaccccggtgaactctgtgatgatgatgattcccttgttctggcctgcgatggaatttgggtttgcatgacaagccaacaactcgttgatttcatacatgaacaattgaattcagagaccaaactctcggtggtatgtgaaaaagttctcgatagatgtctggctccaaacacttcaggtggtgaaggctgtgataacatgaccatgatattggttcgattcaagaaccctactccatcagagaccgaactaaaaccagaagcaagccaggcagaaggaaaccacgatgagccgagctcatcaaactaggcccatcctcagagtcacggaagatccctctagatctagtattttggttcagattgtaaatcattttgaaagacagttatatatctcaacctgacgttgatttcagtatatc

SEQ ID NO: 91643 - DNA, 1016 bp, Arabidopsis thaliana columbia
cactaatcgactcacttagggaaagccggtacgcctgcaggtaccggtccggaattcccgggtcgacccacgcgtgcgggcttataatctttctagagatcacaaaccagatcttgaagctgagaaagaaaggatattgaaagctggtggctttatacatgcagggcgagtcaatggaagcttaaatctatcacgagctatcggtgacatggaattcaagcagaataagtttttgccatctgaaaagcatatagttaccgctagtccagatgttaacactgttgaactctgtgatgatgatgatttccttgttcttgcctgcgatggaatttgggattgcatgacaagccaacaactcgttgatttcatacctgaacaattgaattcagtaagctaacttgatttttcttcctttggattacagttttttttccagtctatccttttctggatgctacagtttccttctttcgattggtaacattcaggagaccaaactctcggtggtatgtgaaaaagttctcgatagatgtctggctccaaacacttcaggtggtgaaggctgtgataacatgaccatgatattggttcgattcaagaaccctactccatcagagaccgaactaaaaccagaagcaagccaggcagaaggaaaccacgatgagccgagctcatcaaactaggcccatcctcagagtcacggaagatccctctagatctagtattttggttcagattgtaaatcattttgaaagacagttatatatctcaacctgacgttgatttcagtatatcaccatttcctccgtgtgcagacttttgtctcatgagctcccataatgtagaaaggaataattggtgtaaaaatgttgttggccttaaaagaacatatcatcatgtaaataaacaaaacaataagacatttacacaaaaaaaaaaaaaaaaaaaaaaagggcggccgctctagaggatccaagcttacgtacgcgtgcatgcgacgtcaagctcttctatag

SEQ ID NO: 91644 - DNA, 873 bp, Arabidopsis thaliana columbia
ctgaaagtggcatgacctgcaacactattcatcagcaagctatgaacttatccatgctctaatactactctttcaaaactataatttggtaagatcataaaacaggaatcatgagctcaagcaataactctaactactccacaagattatgttaccaaaccaaacaaacctattatcagatcatctataccggttccttcaagatctcatctttctcgatttctcttctaacttgtgcataattcgtaacaatcgaacactaaagataaagcattgagaagcaaaccaaccgaatactgcaacagaaagccagcgaagagctccttgggcatcgataaagcgccacgaagatcatcaagggtcaaagtcattcccattccaagcatagtgatcgtaagacctaccatggtccaatttggagtaacccaattgaaagtacttggtctcatcagtcccaacaagcatcccagagaaacccatatcggaaacgccgtcgaaaccgcctctcccacaaactcaacccactccccaaagctcttctttttctcagtaggcaaatcgttcgacgaaatgccgcaacgaggaacgaagtcaaacctactacgcctacacgaaataggaacagtagattgagttttgagagaaatttcgcgactcgagggagagtaagatagtctagaacaagagatagttcgaagatgaagtggagtgagtctagatttgtggagcgaattcgatttcaaaggcgttgctccgtttaagagagaaagagaaatcgccgacgccattttcggacgcgtgggtcgacccgggaattccggaccggtacctgcaggcggccaggctttccctatatgagtcgaatagtgccgg

SEQ ID NO: 91645 - DNA, 825 bp, Arabidopsis thaliana columbia
  unsure (1)..(825): unsure at all n locations
agctctcnnnnnnnnnnnnnnnnnnnnnnnnnnnnnnnnnnnnnnnnnnnnnnnnnnnnnnnnnnnnnnnccacgcgtgcgcccacgcgtccgcggacgcgtggggtgtttagtaagctcttgtttggtacaatgcatatcaaatcctatgattgggtccctgattctccccagccgagttcagatactcgtttggcgaaagtgaaagtagattcggactttaccgcaccttgtgatacttctatactgtacccggctgatggagggaatatgcattgcttcaccgcgaaaacggcttgcgcggttcttgatgttattggtcctccatactctgatcccgcaggacgtcattgtacttactatttcgattatccgttctctagtttctcggtcgatggagtcgtggttgccgaggaggagaaggaaggctatgcatggttgaaggagagggaagagaagccagaggatttaacggttactgcattgatgtatagtggaccaaccatcaaagaatgaatgtggaagcatagcagaaaaaaaaaaccctttctttttctttgttctgttagagtattttcttgatttctggttgcatataaaaagaggtttttggaagtacatagaagaacaaatctagtatttattattttatttagataacagagaacaacaagtacacctttgtcggaatgctgtagtctgtgttttggtcaaagatccttacaagttttgtcttaaaaaaaaacaaaaaaagnnnnnnnnnnnnnnnnnnnnnnnnnnnnnnnnnnnnnnnnnnnnnnnnnnnnnnnnnnnnnnnnnnnnnnn

SEQ ID NO: 91646 - DNA, 458 bp, Arabidopsis thaliana columbia
tctgtttttgtgatcaatgtagagccgagttcagatactcgtttggcgaaagtgaaagtagattcggactttaccgcaccttgtgatacttctatactgtacccggctgatggagggaatatgcattgcttcaccgcgaaaacggcttgcgcggttcttgatgttattggtcctccatactctgatcccgcaggacgtcattgtacttactatttcgattatccgttctctagtttctcgggtatagttttcgaaactttttctatgatttgtgttagaatctagctactagtagtactgtagtagggttgaacataaacaccgagctgattttcataataacctgaatagggaaaaagagtttgataacaaataaaccacaccaaccagctgaatgaccttgtatatatggaagaaatactttcaaaatatgaatcaatgttgatattatttatatt

SEQ ID NO: 91647 - DNA, 578 bp, Arabidopsis thaliana columbia
tacgactcactttagggaaagctcgtacgcctgcaggtaccggtccggaattcccgggtcgacccacgcgtccggcagcagtaccctgatgtcgaattgtctgcactaggaatggctattgcccctgttgttccggtcgctgagatattgaagaccaatggctttgctgtggaaaggaagatcatgacatcggctgtggatatcaagggatgattcaaggggtcgtccggggcggaaagctaggattgagatcacgcttgccaagtctgagaagtttgatgacctaatggctgcagctaatgaagagaaggaggctgcagaagcccaagagcaaaactagattgtttctagttttttctgttcaacgttcttatttcctcggtccctatctctatctgcttaattttaagacacttctatttcggtaatttttggttcacttttttatttcaccttggattgtgtcctctgtacctctgagcatttttatttaaagatcgtaggaagtataaaaaagatgggttcgttgcaggtttttaacccccagggcaaccgctctagaggatcccagcttacgg

SEQ ID NO: 91648 - DNA, 499 bp, Arabidopsis thaliana columbia
  unsure (1)..(499): unsure at all n locations
gtcgtcgtcccttaactcgagaaaaattagggttacggattccgattagcaagcatggaagagatcaccgatggagtgaacaacatgaacttagccaccgattcgcagaagaaaaaccggattcaggtttccaacactaagaaaccattgttcttctatgtcaatctcgccaagaggtatatgcagcagtacaatgatgttgaattgtctgcccttggcatggccattgcaactgttgttactgttactgaaatactgaagaacaatggttttgctgttgagaagaagatcatgacttcaactgttgatattaaggatgatgcaagaggacgtcctgtgcagaaagctaagattgagattacgcttgtgaagtcagagaagtttgatgaactaatggctgcagccaatgaaggaaaagaagatgcagaagctcaggtgcagaactgaaaatggcttttaaccattttgggggccccgggggttttttccaaaanngggg

SEQ ID NO: 91649 - DNA, 831 bp, Arabidopsis thaliana columbia
  unsure (1)..(831): unsure at all n locations
cgggaacnnnnnnnnnnnnnnnnnnnnnnnnnnnnnnnnnnnnnnnnnnnnnnnnnnnnnnnnnnnnnnggtctctccacgcgtccgatttcattcgttttctgagataaaagtgagagagaaatctaaattcgagaggagaagttttaatttttctgagttagattcaatggaagagatcacggaaggagttaacaacatgaacttggctgttgatacccagaagaagaatcggattcaagtttccaacactaagaaaccattgttcttctacgtcaatctcgccaagaggtacatgcagcagtacactgatgtcgaattgtctgcactaggaatggctattgccactgttgttacggtcgctgagatattgaagaacaatggctttgctgttgaaaagaagatcatgacatcgactgtggatatcaaggatgattcaaggggtcgtcctgtgcagaaagctaagattgagatcacgcttgccaagtctgagaagtttgatgaactaatggctgcagctaatgaagagaaggaggctgcagaagcccaagagcaaaactagattgtttcaagttttttctgttcaacgatcttatttcttcgttccctatctctatctgcttaattttaagacacttctatttcgttaatttttggttcacttttttatttcaccttggattgtgtcctctgtacctctgagcatttttatttaaagatcgtaggaagtataaaaaagatggctaggagaaaaaaaaaaaaaggaagggcgaccgctctagaggatccaagcttacgtacgcgtgcgttcgacgtcataatcttcgatag

SEQ ID NO: 91650 - DNA, 525 bp, Arabidopsis thaliana columbia
ccgagttcgtcgcctatggttcacccaagtttgagcttgcttcatgctggtggcagtactctcacatctgactatggcagtgatactgcttatgaaacatctgaggttggatccacgcgtccgcggacgcgtgggatttctgaaattggtacggaagatctaactctggatgaagatttaactttaacaaatccaatagagaagctcgttaactttagcatgtccaacattgacgaggggctttcaatgagcgaaacaattctagagcaacttgaagactttcccaaacataaagtccgctcaagatatgtcaataatatcctagggaaggatgtgtataatggaaatgcttcaaaaggcgtatttcttgctaacaatggttcacgacttctctctgaaccagaaccatcaactcactcagtaatgcatgacagaaatgatagtgctgaaaggtttgctttacacaccggtcagacatcaacatctggtctcttaatttcaagcagggatagccacctggatcta

SEQ ID NO: 91651 - DNA, 547 bp, Arabidopsis thaliana columbia
  unsure (1)..(547): unsure at all n locations
ggccccccccgcggcactccccccccgcgtagtatcgccnnnnnnnnnnnnnnnnnnnnnnnnnnnnnnnnnnnnnnnnnnnnnnnnnnnnnnnnnnnnnnnnnnnnnccacgcgtccgctctctctacacactttttcagattccatcatcacttgttcttttcacacccaataaaaacttgcatctttcttctaaattgttgatgatcgcttctcatatttgaccctagagacaacatcatttctaccgacaaagatttgatatcgaatccaacaagtgaaagatgggtctatcaagtcttcctggtccatcagaaggaatgttatgtgtgatattagttaatacagcattatcgatctccattgtcaaaggcattgtaagatcattccttggcatagtaggaatcagtctctcgccgtcttcatcctcgccttcttcggtgacggtatcttcagagaattcatcaacttcagagtcatttgatttccgggtctgccaaccagagagttaccttgaggagttcaggaaccggactccgatactgg

SEQ ID NO: 91652 - DNA, 426 bp, Arabidopsis thaliana columbia
gggggggacggacggagaaagcaaaatcaaagttgtgatgaaatctctattgatgagaaccggttcgatgccggttcttcaaaaccggttaatttcaggtggttcatcgcggaagatgacgcctatctccaggaccaactccgtcgaatcattatccagctacggcgagagattcgccggcgggaagatttcgatcgaggttaaggctaatgtagggatgcggagggtgttatcggaaagtgatgtgattagatctgagagaatgttgaaaagagttggatctaagccttcgccggcgagaatcccggaggatgatgaagcgggggaggaagaaattaggtttgcagatggttgggggtctatgatctccggtggtttacctgtggaggagaaatgtttcacgggtggcggtgttggtggtggatc

SEQ ID NO: 91653 - DNA, 1055 bp, Arabidopsis thaliana columbia
aataaaaagaagcatcttctagagagagacatattgagaaagagagagaaagctttagggtttcaaaaaaaaaaaactgagaccctttagaaatctcctaacaggaatttttttctcaatcgctatagaaaatgggagtcatgatcaatcaccatttcctcgcttttatcttcggcatcttaggaaacgtgatatccttccttgtattcctcgctccagtgccaactttttatagaatatacaagagaaaatcgacggagagtttccagtcgctaccgtaccaagtgtcgctatttagctgcatgctatggctctactacgcattgattaagaaagacgcttttctcctaattaccatcaactcctttggctgcgtcgtggagactctctacatagccatgttcttcgcttacgccaccagggagaaaaggatatcggctatgaagttgttcatagcaatgaacgttgccttcttctcgttgattctaatggtaacacatttcgtggttaaaactcctcccctccaagtctctgtactcggctggatttgtgttgccatttctgtttctgttttcgctgcccctctaatgatcgtggctcgtgtgataaagacaaagagtgtggagtacatgcccttcacgctttctttcttcctcactataagcgccgttatgtggttcgcttatggtttattcctcaatgacatatgcatagcgattccaaacgtggtgggattcgtactagggctgttgcaaatggttttgtacttggtttacaggaactcaaatgagaaaccagagaagattaattcgtcagaacaacaacttaagagtattgtcgtgatgagtccgttaggtgtgtcggaagtgcacccagttgtgacggaatcggtggacccgctctctgaagccgttcatcatgaggatctgtccaaagttactaaagtggaggagccgtcaattgaaaacggcaagtgctacgtggaggctactcgtcctgaaaccgtttgaagtgtcaatatgtgaagctcaaaatatagctctctctctctctct

SEQ ID NO: 91654 - DNA, 409 bp, Arabidopsis thaliana columbia
aacgtttcggtcgttgtttcttgaaattccactgttattagactcttgactctgttttgtttcccgccgatctcgtgatgatggccaccaccaccaccaccaccaccgctagattctctgattcatacgagttcagcaacacaagcggcaatagcttcttcgccgccgagtcatctcttgattatccgacggaatttctcacgccaccggaggtatcagctcttaaacttctgtctaactgcctcgagtctgctttcgactcgccggagacgttctacagcgatgctaagctagttctcgccggcggccgggaagtttcttttcaccgttgtattctttccgcgagaattcctggcttcaaaagcgctttagccaccgtgaaggaacaaaaatcctccaccaccgtgaa

SEQ ID NO: 91655 - DNA, 460 bp, Arabidopsis thaliana columbia
  unsure (1)..(460): unsure at all n locations
tnncncnantananttnncntgtctcaataaaatatccaccttttgtaatttctcgaaacaaaccaaaagagattatgtctgaatgaacatcacatctgaatttgttacaaatcccattctcagatttgtttatttcttaagaacccaacaaaaaaaaggaaaaaaagacagaaatggaaatcaaacaatcttcaggaaccagttattgagcggcttaattactcttcagcagctacaacactgatctcacctctctcaagcaagtcatagaaagttctggttttcctctgttcgttccaatggtgcatcttccaaagaccaccagcagctaaaccgagtgccaaaccgataaataactccttgacaacgctaggccctttcaatgtcgcatgtgcaaccttgtgtcctgccatctcttctttcttcttctcaaccaagtcggagtgtggaggtgtagac

SEQ ID NO: 91656 - DNA, 863 bp, Arabidopsis thaliana columbia
cccacgcgtccgatctggggcttacaacagaacactcacgccctttggtttccagaacgaggaccgaactctgtgggaagccactaacgtctatgtagagatgagcccattcatgtctgctaataaaatcaagaagccaatcttacttattcatggtgaagaagacaataacccaggaactctaacaatgcagtcagaccgattcttcaatgcactaaaaggccacggcgctctttgccgtcttgttgttcgtcctcacgagagccacgggtactcagcacgggaaagcattatgcacgttctctgggaaactgaccgttggcttcaaaaatactgtgttccaaaccacatcagatgcagatacaagtcccgaccagtccaaagaagggtcagattctgcagacaaagtatccacaggcacaggtggtggtaatccggagtttggtgagcatgaagttcactccaagctcaggagatcacttctctgagttcccaaaagtggttcactagccacatgcagcatgcgagtgcacttgcagaaacagagagcacaaaaaaaggcagatgcaacacaaacttatttttcatacaaaacattgattcataataatatgaaaaaaagtttttgaattacttgaaatgctggaaacactctttcaagtgcaaaacttcgatcaataagtttcataaatattcaccttttgtaatttctcgaaacaaaacaaaagagattatgtctgaatgaacatcacatctgaatttgttacaaatcccaaaaaacaaaaacaaaagggaggccgctctagaggatccaagcttacgtacgcgtgcatgcgacgtcaaagtcttgtatagtgcacata

SEQ ID NO: 91657 - DNA, 1412 bp, Arabidopsis thaliana columbia
ccacaaccccatatctctttgtctgaaaaatctcttttgcatatataaataaatataagccatatcttttgaaactgtactgctgcacaagtgtagaggcagtggcacaacatctttaagaaagagagagagaaagagtcatttattcatttcctcgcttaaaaatcttgagcacccagacagaattcttctttcttctttctggggttgagaaaaatgagtgaaagagatgatggattggggctaagtttgagcttgagtttaggttttaatcaaaaggacccgtcttcgaggttaaatccaatgcctctggcttcttatgcatcttcatcacacatgcagcatatgcagcagagcaattataaccatcctcaaaagattcagaacacttggattaacatgtttcagtcatcagagagaaactcggacatgagatcgtttctccggggaatagacgtgaacagagctccatcgacggtggtggttgacgtggaggatgaaggcgccggagtttcgtctccgaacagcaccgtctcaagcgtgatgagcgggaagaagagcgagcgagagctaatggctgcggcaggtgcagttggaggaggtagagtagaagataatgagattgagagagcttcttgctcgctcggcggtggtagcgacgatgaagacggtagcgggaacggagatgacagttcgaggaagaaactccgattgtctaaagaacaagctttggttcttgaagaaacttttaaagaacatagtacactcaatccgaagcaaaagatggctttggctaagcagttgaatctgaggacgagacaagttgaagtgtggttccaaaaccgaaggcaaaggacgaagctgaagcaaacggaagtagactgtgaatatcttaagagatgttgcgagaatctaacggatgagaatcggagattgcaaaaggaagtgagtgagcttagggctttaaagctttctccacacttatacatgcacatgaaacctcccactactctcacaatgtgtccttcttgcgagcgagtcgctgttacgtcatctccgtcatcggtggctcctcctgtgatgaattcatcgtctccgatgggtccgatgagtccgtgggctgccatgcctctacggcaacgacctgctgctggttctcattagagtttaattagtctaaagataataggtttggtgatttgtttttattatattgttgaacggacttggaagttcttttcaagagttggtcccatgctcttctttcctttgttttattcagtttctatttatagctgaattcaggataatggaaaatctactaatattattgtccaattattagtttggggccctgacgtagcttctataattctttaaaaaaaaaaaaaaaaaaaaaaaaagggcggccg

SEQ ID NO: 91658 - DNA, 407 bp, Arabidopsis thaliana columbia
accacgcgtccgctcgacggaatacttaatctctttgataatctttctctctggtgacgttttgtgaatggtggaaactaatctgattggtgataatcataggctcaccctttcaactaaaagggcgagctttctcatcatccctctctctcaagactctgttttctcattcggttcttgcaaagaaggctggtacttccgttgcattggccttgacccgtgaaccaatcaatcatcatctccgatcatattttcaataataatttctgtgttttgattttttgagaattttgaaaaaaagatgttgctttacaagaaaaagaatcagattgttaaaggaaacagaatcttgatcagcgtaacgtttcttggtagtgctggtccgatccggttcgttgctaatgaag

SEQ ID NO: 91659 - DNA, 479 bp, Arabidopsis thaliana columbia
gcagggcgtgttgttgaattcagcgtcgatcagcatggcagccggtttattcaacagaagttggagcactgctccgatgaggagaaggcatctgttttcagtgaggttcttccacaagcttcaaaattgatgactgacgtttttggaaattatgtcatccaaaaattcatagaacatggaactccggcacagagagaagaacttgtgaagcaacttgctggtcagatggtttcactaagcttacaaatgtatggatgccgtgtgatacaaaaggcccttgaagtgatagatgttgaccaaaagacagaactaattcgtgagctcgatgggaatgtgctgaagtgtgttagagatcaaaacggaaatcatgttatccaaaaatgtatcgagagtatgcctgctggtaggattggattcgtaattgctgctttccgtggtcaagtcgccactctttctactcatccttatggatgccgagt

SEQ ID NO: 91660 - DNA, 922 bp, Arabidopsis thaliana columbia
  unsure (1)..(922): unsure at all n locations
nnnnnnnnnnnnnnnnnnnnnnnnnnnnnnnnnnnnnnnnnnnnnnnnnnnnnnnnnnnnnnnnnnnnnnnnnnnnnnacgaccacgcgtccgctcgttttctctgccgtctctctcattcgcgcgacgcaaacgatcttcagccatggccaccgccgcagatgttgacgctgagattcagcaggcgctcactaacgaagtcaagctcttcaaccgctggacctatgacgacgttacggtcacagacatcagtcttgttgactacattggagttcaggcagctaaacatgctacctttgttccccacaccgctggaagatactctgtgaagagattcaggaaggctcagtgccccattgttgagaggctcaccaactctctcatgatgcacgggaggaacaacggtaagaaattgatggctgtcaggatcgtcaagcacgccatggagattatccacctcttgtctgacttgaacccaattcaggtcatcattgacgccattgtcaacagtggtccacgtgaagatgctaccagaattggatctgctggtgttgttaggagacaagctgttgatatctctcctctaagacgtgttaaccaggctatcttcttgattaccactggtgctcgtgaagctgctttcagaaacatcaagactatagctgagtgccttgctgatgaattgatcaacgcagccaagggctcttccaacagctatgccatcaagaagaaggatgagattgaaagagttgccaaggctaatcgttaaggattttccctttgccctgtgcgttacaatctcgtatcaatgagtttaatgttttatcttcatttagattgaaatatgtatctcagatgtttgctctnttggtttatgaagtttatttcgtctgaactactttgaatagataaaattttgatg

SEQ ID NO: 91661 - DNA, 1104 bp, Arabidopsis thaliana columbia
tatacgactcactaagggaaagctggtacgcctgcaggtaccggtccggaattcccgggtcgacccacgcgtccgcccacgcgaccgcccacgcgtccgcttctcttcttcttcttcaagccgcggctaaagatccctacttctctcgacacttatagagtttcagtcatggccgcctccgcagaaatcgacgctgagattcaacagcagcttaccaatgaggttaagctcttcaaccgttggagctttgatgacgtttcggttacggatattagtcttgtggactacattggtgttcagccatcgaagcacgcaacttttgttccccatactgctggacgatactctgtgaagaggttcagaaaggcgcagtgcccaattgttgagaggctcactaactctctcatgatgcacggaaggaacaatggtaagaagttgatggctgtcaggatcgtcaagcacgccatggagattatccacctcttgtctgacttgaacccgattcaagtcatcattgacgccattgttaacagtggtccacgtgaagatgctaccaggattggatctgctggtgtggttaggaggcaggctgttgatatctctcctctaagacgtgtgaaccaagcgatcttcttgcttacaactggtgcacgtgaagctgcctttagaaacatcaagacaatcgctgagtgccttgctgatgaactcatcaatgctgcaaagggatcttccaacagctatgccatcaagaagaaagatgagattgagagagttgctaaggccaatcgttaagggatctccctttcctctaagtttgcattatatcaaagagtttttgtgttgtttccattagctttggatatgtttcagatgatctctctatctttaatgaaattttgacgcttataatcgacttgggatcttgatcatcaaacggtttcatatttaaaattatttcatctatatatttttcagtttaaagtgcttaaaaaaaaaaaaaaaaaaaaaaaaaaaaaaaaaaacaaagggcggccgctctagaggatccaagcttacgtacgcgtgcatgcgacgtcatagtaattctatagttgtcctaaatag

SEQ ID NO: 91662 - DNA, 590 bp, Arabidopsis thaliana columbia
cccaagcgtccgttctatctctctcttctccattctctctctctatagagacacacaaaagtagaaagacgaagaagaagagagaacgggtttgtagttggtggttgcgtttctttctcgtttatattcttctttcttttttgttttcatctttcaattcctcggccgcttttttgtttataatctaatcgacgcacgaacagagcaatctcaagctcttcttcttccccacaattgaatctgattctgagatcctcttaccttctgtttgatctctctgtttcctgacgaaggagatattgtagagaaagaaaggggttctcatgattctcgtgttttgagtctctttccagtatagattaaaacttacacttgtctttctttgtctttttgggtggaaatctacgtagatctgttccttttttctcataaaacttttgggtttaaatttctgtacaaataaaatatttgtaagaagaaaaaaacgtttttttaaacaagactcgaaaagggtcagacccagaagtctcatcttttaccttttttcttggtcagctttgaaaggcttcatcttttttttattccgtttt

SEQ ID NO: 91663 - DNA, 459 bp, Arabidopsis thaliana columbia
agcccgcatactttggcaacatagatcgtggatggacagagaagctactgctttcaccatctccaattgatggagaatggctaccaaaaagtgccatcgatgctttggtccatcttatggttgtcatatcgggacgtccaaagggactctttaaagagtgttcaaaacgtatcgagtctggactgcagatcattcaagatgaactgatcaagcttggaattactgacgaagttagagaggctgatttgcggcacacagctatctggatgtctagggtttttcttatgctacagatgcagtttcttgagaatagagtggctttggaacttacaaggtctgattatgtcgaagctgaagaggctttggttgatatgaaaaattggtttacacgatttccaacgattttacaagcttctgagtgtatgattgagatgctcagggggcaatattctcattctg

SEQ ID NO: 91664 - DNA, 731 bp, Arabidopsis thaliana columbia
  unsure (1)..(731): unsure at all n locations
nnnnnnnnnnnnnnnnnnnnnnnnnnnnnnnnnnnnnnnnnnnnnnnnnnnnnnnnnnnnnnnnnnnnnnccacgcgtgcgcgaagaggcatttcgtcgaacacttggcgagcatagagcgcgatgatgaaaggaagcaaggcgaatctctctgccttagcggagaaatgcaaaactgtaatcgtttcgaactggcaagggtacctaaataccgtcaaacctgaagataaagctagtataatacatacttcaaagattaagtatgtgatgagaagaggaaagccatatctctgggtaccagaaagtgaaccacacaatgtcaacataatgtttgatgaacgtggatccttttctattgcccatccgtatcctggtccccttgcagctttattcaagtctataggaaagcttccagaaagggttgcttttactggagagattgttcctgttaaagagaaaagggttgatgcggtgaagaaatatgtcgaggaagctatacagtcagagatgaaagcgattagcgataccccaaattctgtccgtagtattttgaattcttccgatcagatgtatgcctcccggtgtgacagtcttagagccctgatcaatgatgcaaaggaaaaatacgttatctataagttcgttccaagctcatgtatgtttattgacccaaatggtacgaaagaaatagacttgaaggttttggactgtcaaaaccagatccattaggg

SEQ ID NO: 91665 - DNA, 1306 bp, Arabidopsis thaliana columbia
  unsure (1)..(1306): unsure at all n locations
nnnnnnnnnnnnnnnnnnnnnnnnnnnnnnnnnnnnnnnnnnnnnnnnnnnnnnnnnnnnnnnnnnnnnnnnnnnnnnnnnnnccacgcgtccgcggacgcgtgggcttgacttccagtattcacctttctcagctcaacagtctatgcaatcaagaactagcaacaatgcctcatcacttggtggccaaagcatttcaatgccagaggcgctccgaggcagtggaattccggcaacacagccaacccagcaaacactacctggtgctaatatcgctactggacctgctcttcctcagcagcttccaatgcattactctcaacccacattacctctaacacactatgcaaacatgatcggttatcctctaatgcctcagaattatccatacatgccatctgctttccagcaaacatttgctggtaatagtgcataccaccagcaactagctgcattgcttccgcagtacaaaaccaatgtctctcccggtaatttgcctcagtctgcaacagcgcctgcctctgcttatggatttggaaactcgaccaatgtcggatctgccggaacttccctctaaccaacagtctgctactaccggtacaacgcttgggtatgacgatgttcttagttctcaatacaaagagaatcatctgttggcacttcagcagcagcagcaacaacagcaacatcaacaacagaacgaaactcggcgatgtggcatcagggtcatggttccagaaccatgtcaggtgtcccgactaacacctattacaacctccaagcacaacaacaactgcaactacatcaccagcaacaacaacagcaggctcagcaagcagcgggagggtatcggccagctcagcaccaacagcattatggatctcatggatacccaaattattatcagtctcagaccgaaatgtcactcgagcgccagcagcaaaaccctagggatggtgctgggtctcaggctggtcaaccgtcgaatcaatctcagcagcagctctggcaaaactcttactaaataaagaaagagagtggtttttttcagcttctttctctcgcttatagaggtttgtgtggcgagtctgaagaggaaatatggttgtgttctaaaatgtaacttatcatcatcttttgtctcctctgttaacttagggaacatgcaactctgatttcatcaatgcaacttcagaaatgaaactttttttttttaaaaaaaaaaaaaaaagattattttannnnnnnnnnnnnnnnnnnnnnnnnnnnnnnnnnnnnnnnnnnnnnnnnnnnnnnnnnnnnnnnn

SEQ ID NO: 91666 - DNA, 510 bp, Arabidopsis thaliana columbia
  unsure (1)..(510): unsure at all n locations
nnnnnnnnnnnnnnnnnnnnnnnnnnnnnnnnnnnnnnnnnnnnnnnnnnnnnnnnnnnnnnnnnnnnnccacagctccgcggacgcgtgggtgggtatctgctggtggccaagagttggcacaagaatcccctcggatttactggctgtctattgtctttcttggtttcgatgtgttctttgttgtcttctgtgttgcgttggcctgcgttattggaattgcggtttgctggtgcctgccatgcatcattgcagttttgtacgctgttgctgatcaggaaggggcttcaaaagaagacattgagcagctcaccaaattcaagtttcgcaaactaggtgatgccaacaaacacactaatgatgaagcccaaggaactaccgagggaataatgactgagtgtggtacagattcacccattgaacatactcttttgcaagaagatgcagaatgttgcatctgtctctctgcatatgaagacggaacagagctaagggaactaccttgtggac

SEQ ID NO: 91667 - DNA, 562 bp, Arabidopsis thaliana columbia
cgcctgcaggtaccggtccgcttttcccgggtcgacccacgcgttcgcccacgcgtccgctttgcaatgcgtgttgcatatggtttgtgtctgtgttgagtatcggaggaggaacaggaggagaaccaataggacgacgacgacgactcctccacggtcacgttcttcttcttcctcttcatcttcttcttccttggaggaagaagctttgggttccaggaggaattcaggtgtgcaggacttgtcgcttggccacttggataccgaaagcagcagtgttgctaagcatctggaatctgccaatacgatgttttcttttatatggtggatcattggattctactgggtatctgctggtggccaagagttggcacaagaatcccctcggatttactggctgtctattgtctttcttggtttcgatgtgttctttgttgtcttctgtgttgcgttggcctgcgttattggaattgcggtttgctgttgcctgccatgcatcattgcactgatcaacctttgtaatcttctatccctgccgtttaaagttgtcctttcttccttt

SEQ ID NO: 91668 - DNA, 564 bp, Arabidopsis thaliana columbia
gggggggggggggtagtatcgccggcactatacgactcatatagggaaagctggtacgcctgcaggtaccggtccggaattcccgggtcgacccacgcgtgcgcctctccctctccctctccctctttatctttctcttcctcctttgctaataaacttttctttgaaccttacacgccttgttgatattactctcttaaatatatattttcgtacattaacacagacatatataaagctaaagatttcttcacgtaatgggtttgaaagatattgggtccaaattgccaccggggtttcgatttcatccaagtgatgaagagttggtttgtcattatctttgcaacaagattagggccaaatctgatcatggtgatgttgatgatgatgatgatgatgttgatgaagctttgaagggttctactgatcttgtggagattgacttgcatatctgtgagccatgggagcttcctgatgtggcaaagttaaacgcaaaggaatggtacttcttcagtttccgtgatcgaaagtatgctactggatatcgcacgaacagagcgacag

SEQ ID NO: 91669 - DNA, 470 bp, Arabidopsis thaliana columbia
gtttgatccatcggagaatgtagtgtatgactatataggaggagttgaagatttaaggaattctaaagttagaacagtatccgcagcgaatctttcatttgtcgaggatacagctcgcattttacgtgcaattaggattgcagcaaggttaggattcagcttgactaaagacgttgctatttctgtgaaggagctttcttcttcattactgagacttgacccttcaaggattcggatggaaatcaattatatgctggcatatgggtccgcagaagcttctttacggttattatggagatttggcctcatggaaattcttctacctatccaggcatcttatcttgtttcccaagggttccggaggcgtgatggaaggtccaacatgcttctgtcgctatttcgcaaccttgaccgacttgtagcacctgatcgaccatgcagcgagttcctctggattgggatcttagcat

SEQ ID NO: 91670 - DNA, 441 bp, Arabidopsis thaliana columbia
aagaagatatcacacagattgtctccacaaatttgattggatcaattctatgtacacgaggggctatggatgtgatgagcagacagcacagtggtggacacatctttaacatggatggtgctggctctggaggttcaagtactcctctcactgccgtatatggttcaacaaaatgtggacttaggcagtttcatgggtctatagtgaaagaaagccaaaaaacaaacgttggccttcacactgcatcccctggcatggttctgacagaacttcttctcagtggttcgagcattaaaaacaagcagatgtttaacataatctgtgagcttcctgagacagtagctagaactttggtaccacgaatgcgagttgtgaaaggttcgggaaaagccgtcaattacctaactcctcctcggatattgttagctattgtcacttcct

SEQ ID NO: 91671 - DNA, 368 bp, Arabidopsis thaliana columbia
cggccaagaggctctccaacttctcaattgcgtcgcggagtctaatttcgatcaagagaaatgcgtccgatttttgcaatctctcagagaatgcgttctatcaaagaaagtaaagaagttctcgataccgagtcaagatcacgactctgagggagcagcttcagctacaaagagaccttcataacgttctttgttccgattttcttttatcgtttgagttgtaatcatgtaattgattttaatgtcatgccttggattcataagctgggtcatgccttgtttcccctttgttgtcttgtatgttgaatattgcaaactctaaagagcatatttataagaagaaataaaagtttctacatttgactttc

SEQ ID NO: 91672 - DNA, 524 bp, Arabidopsis thaliana columbia
  unsure (1)..(524): unsure at all n locations
ccgggacgcctgcagggaccggncctgctttcccgggnggatcattccgnccgcggacgcgtgggggaatcccttttctcgaagcacatggtgtgtactacatacaatgtcgaaaccaatcatcgtgatgttgtatttattaagactgtcaatgaccaaccaagtgcctacattaagggaataaaacatggcaaagctctcattcgggtttccattggtgataatctcaggaaatcagattacgttctggtttcagttggggcgcatatctttcctcaaaacccggtcattcacactggaaatttgttaaatttcagcataacaggggctgataatgaagtcactggtcaatggtttacatcaaacagaagtgtcatatccgtcaatgtggcatctggccaagctaaagcgatcagccaaggctcaactcacgttacatttaaaggtcatggtttgaaactgcaaacaaaagtcacagtgctatttggaaacaccatatgtcgactctccaggagaaacactga

SEQ ID NO: 91673 - DNA, 1028 bp, Arabidopsis thaliana columbia
  unsure (1)..(1028): unsure at all n locations
agctggtacgcctgcaggtaccggtccgtgtttcccgggtcgacccacgcgtccgatctaagtttaggattataatcttcatcatcattatttgttattattaatctccatattcagaaaattcgattaataaaaaaagaagcttacaagagagtgcccatataattggaatatctccctctcctatcttgcgtcggaatctctcaaaaatttcgccattgttgttgctctgaaatctgttaactttggtgatttgattgcatttgcctttgagagttttaatcttcaatttttggctacatcgagatttggttctgaattttggcatctctattagtagtgaggccatttcctgatttggatcataaagagtggagaaaaatcttgcctttgtctccttaggattgtggcttgatcaggtaatgagactatgtgcttcaaaattgagacttgtttggtgaaagaagcggatgaaaaagtttctgtgtacagcgagaggaattagtggtttctgcttacgaatgatatgagaggttcttggtacaagagtgtttcctctgtttttggtctcagaccacggatcagagggttgttattcttcattgttggtgttgtggctctagttactattttagcaccattgacatctaattcgtatgattcttcgtcaagttcgacacttgtgccgaacatttatagtaactataggaggataaaggagcaagctgctgttgattatcttgatctgaggtctctttctttaggggctagtttaaaagagtttcctttttgtggtaaagaaagagaaagttatgtgccttgttataacataactggggaatttgcttgctgggcttcaagagggtgaggagttagatcgacattgcgagtttgaaagagagaaggaaagatgtgtagtccgtcctccgagagattttaaatacccttaggtggccacttggagnggntnaattgggtggacctgaggttccnaagncccttttttntcaggccttgcacggggtnnt

SEQ ID NO: 91674 - DNA, 691 bp, Arabidopsis thaliana columbia
aggtgttcctggggaaacaaaccaactccatcaggcacagcctcaaacccacttcccccaccagccccggcatcagtcccttctctgtctgcaatggacctcttagcctacgagaggcaactggctctagccaagatgcatcctcaggctcaacattctctgaggcaagcaggtcttggagtcaatgttgctggaggaactgcagctatgtatgatggtggctatcagaatgtagctgcggcccatcagcagctcatgtactatcagtaataaaccctcttcactggctctgagatacccttttctgtttctttctttttcttcttcttaattttataactttcttgctttttctagaccttccttgttcaagagtctttatgtatgtgtctctttcatttaaagccgttggttttatttatgtatgcagagctttatgctcagtttgtaacctataggtcttacttggattgtaagccaagcaataagacaacatcaaataaaaggggatttggttttctggggtttatgttgtttgtggttctgtaatgataggtttgaaacaaagtaatttgtcttttataaaagttttatagtttccaaaaaaaaaaaaaaaaaaaaagggcggccgctctagaggatccaagcttacgtacgcgtgcatgcgacgtcatagctcaactgtagtgtc

SEQ ID NO: 91675 - DNA, 946 bp, Arabidopsis thaliana columbia
gaagagcgatgtatacagttttggagtagttttacttgaaatattaaccggacgaagatctgtggataaaagtcggccgaacggggaacagaacttggtagaatgggtgagacctcatctcttagacaagaaaaggttttaccggcttattagatcctcggttagagggtcactactcgatcaaggtgctcagaaagccacacaagtagcggcgcaatgccttaaccgagactccaaagcagacccgaaaatgagtgaagttgtggaagccttaaagccattaccaaatcttaaagactttgctagctcttcttcttctttccaaacaatgcagcctgttgctaagaacggagtcagaacacaaggaggagggtttgtgtcgagaaatggaccgccaatgaggagtttgtctagcttaaacttgcctcaagcatccccttatcgttatgcccgtcaatcaccaaagcctaaaggaaaagagccatgactccaaaatagatattaatttagttcttcatgtctgaccaaggtttactgatttgagctgtatgttcagctttctgtttcatcgatcctttccgactcaagacgggggctgcagccttttactcagatcaaaaagatggtctgtgggaaactgaagcctggcaagtttggaacgtttcggatcctggtttgtgttctttgagttgaaaaaatatctttggtcctgaaggtcttatgattttgatcttatgatgattttaatgtgtagaagatgtaaagtttgagagtgtaaagtttccataaatgataaaaaccagttgtctgtaaaaccttatgtaatatatgttctgatatgtattgatttttcatcaaaaaaaaaaaaaaaaaaaaagggcggccgctctagaggatccaagcttacgtacgcgtgcatgcgacgtcatagctttaactatagtgt

SEQ ID NO: 91676 - DNA, 903 bp, Arabidopsis thaliana columbia
  unsure (1)..(903): unsure at all n locations
cgattaaannnnnnnnnnnnnnnnnnnnnnnnnnnnnnnnnnnnnnnnnnnnnnnnnnnnnnnnnnnnnnnnnnnnnnnnnnctttttttttttttttgtaagaacagatcataactcaaatcaacaatcacaaaacaaacctctaaaaataagcaatacagttttccagttcctcctatacatccaatgagaagaaaacaaaatcatttatgtgctaaaaagataacaaaaatagaagatgataaaggaaaagatcaacaagtagttgagccgaagaacctaagaagtagaaaagcttcaaacttagaagacctttttttcactaagatagtttaaaacactaataatcagctcgtagaaatttctcgtactcagtcccattcaaagtcttgtttatatcttcccaattctttatatgatctgacaaatctcctctatgtattttcacctgtctgcttgacaaatccttcactggaatgttcaaaaactcttgaacttgtttcaatgtcgtttgatttgttatgagatcttcgtagaagacaacaatatgacgagtggtattgaaatattctaaagcctttgcagctgaattctctgtttcttgtaaatcgtggatcaacgatgtcgagttgattaccggcttatatctagaaagtgcatctgcctctgcaggagaatgaacatgagacttatgagttccattcaaaagcttagcataacggtcataagaatttgccaacacagaaaccattcttcttaaaggattccttctaaacagaaatatcgcagagacgcctcttcggttaatgttctgctgctcggacgcgtggnnnnnnnnnnnnnnnnnnnnnnnnnnnnnnnnnnnnnnnnnnnnnnnnnnnnnnnnnnnnnnnnggagagct

SEQ ID NO: 91677 - DNA, 484 bp, Arabidopsis thaliana columbia
  unsure (1)..(484): unsure at all n locations
gccggctctattcgacttttatagggaaagctggtacgcctgcaggtaccgggccggaattcccgggtcgacccacgcgtgcggtttaaacgctgccgtgttccgccggatcgccaccgttgaagtcaagatgccgtcgcacaagtcgttcagtgatcaaaaagaagctagggaagaagatgagacagaccagaccgatccctaattggatccgtctccgtactgataacaaaatcaggtccaacgctaagcgtaggccctggccccgtaccaagctaggattctagagcactctcacccggactcagattcgtccgagtttcttaattgctttcttgtatcggaattgtggtctttgacccctaaaagttttagttttttgttaaggattttgtggcttatagctatgtttaaatcttagaccttgaagaagagtgcatgattatgaattataatagttgaaccctttcccctnnngngnnng

SEQ ID NO: 91678 - DNA, 875 bp, Arabidopsis thaliana columbia
ttgttgagagggttgccaacatgcttaactacttcttgctacaactcgtgggtccacagcgtaaatctttaagcctgaaagatcctgagaaatatgaattccgtccaaaacagttacttaaacagatcgttcgcatatatgttaatctcgcaagaggagacacagtaaacatattccctggtgccatctccagtgatggccgatcatataatgaacagctattcaatgcaggagcagatgtgcttaggagaataggtgaagagggaagaatcattcaagagtttatggagttaggcacaaaagccaaagctgctgcttctgaagctctggatgctgaagctgcacttggggaaataccagacgagttccttgacccaattcagtacacgctaatgagagatccagtaatacttccaagctcaagaatcacagttgatcgtcccatcattcaacgtcatcttctcagcgacaatcatgatccatttaaccgagcacatttgacatcggatatgttgataccggacatcgagttgaaggcgaaaatcgatgagtttgtgaagtcgcatcagtctaagaaacggacaagtggagaagatagcagcaacaaggaaaggatacagactacaaacagtgatatgttaattgattaattatgtgttccaaaagtaacaaaataataacaattattcaggactttttttttttacttttgctaggctttcttttctattaggatttatctatctattttagggcttgctttccacttatttgatgccacgggaaaaaaacttataaatatcatgtctagaactgtttctatcataagttcgatgtgttcacgagtttctatgcatttcgacgtttgttcatgg

SEQ ID NO: 91679 - DNA, 709 bp, Arabidopsis thaliana columbia
  unsure (1)..(709): unsure at all n locations
acggacgcgtggggtttttctttttgcagccattcaaaatattggtggcttcaaattcacctcttacacttgtagcttgtgcttcatccaattctttgcagcgattaaaacacacaaaaagtttgcatatgaattgctgactctgaatttctcaaaaagataagggcattgcttcattgatatggttaagaaatgttagttgcgtatcctgcgggaactatcaacaaattccaaatccctattagctgctatgccgctttgcgcagattcaagacctcgccttttggtcctctgattagttgttctgtctccccaagatcaatagttccttgtagcaatgtagagtgttatcattcatctttttctacaatatatcatattcagcctcgaaggagatggatgttttgtaactcacgcatcaactcgatttcatcggatgatgagtaccgttcatcacccaacatagctataagtcttttaagacgttacaggactgtnattggacgcggtgaaggcgaaaccttaaaagaattcatatccgctggtgtgaatncatatgcnctcggctgcacagatgaagntttnaggaaagacctaatggctatgaaanttcgggntngnggtttaanagattggggaattntgggcggaggccacagcctaatccaaaanttcgtngcctngggangtnaatccaatttttggctta

SEQ ID NO: 91680 - DNA, 1023 bp, Arabidopsis thaliana columbia
  unsure (1)..(1023): unsure at all n locations
agatactccnnnnnnnnnnnnnnnnnnnnnnnnnnnnnnnnnnnnnnnnnnnnnnnnnnnnnnnnnnnnnnnnnnnnnnnccacgcgtgcgcccacgcgtccgcccacgcgtccggttatcattcatctttttctacaaaatatcaaattcagcctcgaaggagatggatgttttgtaactcacgcaacaactcgatttcatcggatgatgagtaccgttcatcacccaacatagctataagtcttttaagacgttacaggaccgtgattggacgcggtgaaggcgaaaccttaaaagaattcatatccgctggtgtgaatgcatatgcgctcggctgcacagatgaagatttgagaaaagaactaatggctatgaaagattcgggtttagagattgagagaatggagaattacggcggaagcacacagactaaatccaaaattacgctgtctgaggtagatgaatgcatattgtggcttaggattgtattcatcacgatcttgtgtacgccgcaaccaacagtcataagatggtcatcgactccttcggtttctgatgaaattctaagcaaatggagaggcttttgcgcggttatagcaaatgcatactatattagaggaatggcttggctgcctgtgaagactcttcagttggagcagatggcggtgacaggacaatcagaggagccgtccgttgtggccagccgaatgagactggtgtttagcactctcgaggtagtgagtcctcaatggccacgggtttaactatgatgttctgcagattgaaatatacgagttctaaggtatctttgttttgttctttgaatcttcaaaatgtttttatcgtcttgttaatcccattttgtaaatggttgtagaactactgtaattcaataggtcactgttttaatccccgaagaaaaaaaaaaaaaaaagagagggcggccgctctaaaggatccacagctcacgcacgacgtgnnnnnnnnnnnnnnnnnnnnnnnnnnnnnnnnnnngtaaatcg

SEQ ID NO: 91681 - DNA, 472 bp, Arabidopsis thaliana columbia
ctctttctctgttctaagaaagggaagctctttgtctttgtttgggtccttgccaagatccaatttttacgatcaaaatcgacccggtggaattcagacacgtcttttagatagagatatgtcttgttcatcttcttccggatcagaaggagaagaagagggtttcgatgcttaccgtaaaggtggttatcacgccgtcaggatcggcgatcctttttccggtggtcgttacatcgctcagagaaagcttggttggggtcaattctccaccgtttggcttgcctacgatacgctcacctctacttatgttgctttgaagattcagaagagtgcacaacaatttgctcaagctgcacttcacgaaatcgaatttctttcagctgctgctgatggggatctcgacaagacgaaaatgtgttgtcgtcttattgaccatttcaagcatagtgggccaaatgggcagcatttattc

SEQ ID NO: 91682 - DNA, 522 bp, Arabidopsis thaliana columbia
  unsure (1)..(522): unsure at all n locations
nnnnnnnnnnnnnnnnnnnnnnnnnnnnnnnnnnnnnnnnnnnnnnnnnnnnnnnnnnnnnnnnnnnnnnnccacgcgtgcgcccacgcgtccgcttttcgtccgtaacctgccttacactgcaacagaagaagagcttatggaacattttagcacattcggtaagatatcagaagtccatcttgttcttgacaaggagacaaaaaggtccaggggaattgcctacatcctttacctgattccggaatgtgcggcaagggcaatggaggaattagataactcaagttttcagggccggttgttgcatattttgccagctaagcaccgtgaaacatctgataaacaagtgaatgacacttctaacctgccaaaaacattcaagcagaagagagaggaacaaagaaaggcatctgaagctggtggagatacaaaggcttggaatagtttattcatgcgacccgatactattctagaaaacatagtcagggtgtttggtgtaagcaagagtgagttacttgaccg

SEQ ID NO: 91683 - DNA, 531 bp, Arabidopsis thaliana columbia
  unsure (1)..(531): unsure at all n locations
nnnnnnnnnnnnnnnnnnnnnnnnnnnnnnnnnnnnnnnnnnnnnnnnnnnnnnnnnnnnnnnnnccacgcgtccgagaagcaacagacattactctgttttcatatgaacactcttcatcctcacaagcagcaacaagaacaagcacaacaacaagaagaagctagatacgaatgggatctttctctctccaccgtcgtatcttcctcctcctcctccgcctccgacgttatcggagctattgaattcgatcccactgataacatcgtcgctaccgccgggatttcaagaaagattcgtttttacggcctcccttctcttttacgtaacaacgctgtctccggtaccggagtttccttcgtcgatcaagccaccgcctgcgaatattacatctgtactccggcgaaacttagtagtctccggtggagacccgggtcgggcggtcgggttattgggtcgggagattacgacggcgtagtgatggagtacgatcttgagaagaggacgccggtattcgaaagggacgagcac

SEQ ID NO: 91684 - DNA, 582 bp, Arabidopsis thaliana columbia
tgcttacgcgtccggtctatcatggtctatggtttggatctgatgtggctgtaaaggtgttttccaaacaagaatattcagaagagatcataacatctttcaaacaagaggtatcattgatgaaaaggcttagacatccaaacgttctgctgtctatgggagctgcggcatcacctcagcgtctttgtatagtgacagagtttctaccacgaggaacatgtcaaaactagatttgaggcgacgtatccatatggcatcagacattgctcgtggcatgaattatcttcaccactgtagtcctcccatcattcaccgtgatctgaagtcgtcaaatctactggttgatcggaactggactgtgaaggttgctgattttggtctttctcgcatcaagcatgagacgtacctcactacaaacggaaggggaacgcgtcaatggatggcaccagaagttcttcgaaatgaggctgctgatgaaaagtctgacgtttacagttttggagtagtactatgggagcttgtgacagagaagatcccatgggaaaatctaaaagctattccaggggatggaagccggggggt

SEQ ID NO: 91685 - DNA, 417 bp, Arabidopsis thaliana columbia
cccacgcgtccgcccacgcgtccgtaattgtttggagctttctctccctaactatctcgagccgtagaaattaaagtaaaagaacaaaaactttattatacatttttctcttcctctttaatatatatacattattacaagtttagatttcataaaagaaagtcaagaagaagaaagagctgagacgagaattgaagtgagaaagcatgaggaagcgtcaggtggtgttgaggagagcctcgccagaggaaccttctacaagctcgtcgacggcttcgtctctgacagtgagaactgtgaggtacggagaatgtcagaagaaccacgctgcggcggtgggaggttacgctgttgacggctgccgtgagttcatggcaagccgaggagaggaaggtaccgtggcagcgctaacgtgcg

SEQ ID NO: 91686 - DNA, 441 bp, Arabidopsis thaliana columbia
gcgtgacgatgttgaatctcggaaaaccgcatccgaaagtaacgtaccaccacacgccctcgtcgatgacggaagatgaaatggtagatcttattggaggagagaactctgtggatttgataacggtggctaccgccgtacactggttcgatctcccgagattctacgcgatcgcgaatcgtctcctccgtaaaccaggaggaatcatcgccgtgtggagctacaacactgacatggtggtgaatcccgagttcgactcggtgatgactcggttcatcgctgaaacgttgccgtattgtaaattcccagagagtcagtattttttggacggatataagacgttgccgtttccgtttgagagcgtgggtttgggctcagagggaaagcccatggaactggagatgaagaaaacggtgtcgtttgaaggattcttgcggatgc

SEQ ID NO: 91687 - DNA, 1213 bp, Arabidopsis thaliana columbia
  unsure (1)..(1213): unsure at all n locations
acaaagatagataaattttaaaggcatatttttttcatttcgactcagatgggttttgatgatacatgcaacacaggtcttgttcttggattaggtccctcaccaatttcaaataattacaatagtaccatcagacaatcctccgtttacaagctcgagccgtcgttgactctatgcctctcgggcgatccctcggttaccgtggtgaccggagctgaccagctatgccgtcagacgtcatctcacagcggagtctcttctttctcaagcgggagggtggtgaaaagagagagagacggtggcgaagagtcgccggaggaggaagagatgacggagagagttataagtgattaccatgaagatgaagaaggtattagtgctagaaaaaaacttaggcttacgaaacaacaatctgctcttcttgaggaaagcttcaaggatcatagcacccttaatcccaaacaaaagcaagttctggctagacagctgaatctaaggcctagacaagttgaagtatggtttcaaaatagaagagccaggacaaagctgaagcaaacagaagtagattgtgagtttttgaagaagtgttgtgaaacattagcagatgagaacataagacttcagaaagagattcaagaactcaaaaccctaaaattgactcagcccttttacatgcacatgcctgcatcgactctaacgaagtgtccttcttgtgagagaatcggcggcggcggcgggggtaatggaggaggaggtggcggcagcggggctaccgcggtgattgtagatggaagtacggccaaaggagctttctctatctcctcaaagcctcacttcttcaacccttttactaacccatctgcagcttgttgaatagtagtaattcgtttaattttattacttaaaatattaattttctttttttttttgggtggcattttaactagtaggaagaacacaaaaactatgttagaaagggtaagatgcgtatagatggtctcttctacaattcccactttgtttttcagtgggattgctggtttgagaaaaagaatagtttgtaattattattttatttgtagaaaaaggtaaaatagtcttccctttaatttataaaaaaaaaaaaaaaaaaaagnnnnnnnnnnnnnnnnnnnnnnnnnnnnnnnnnnnnnnnnnnnnnnnnnnnnnnnnnnnnnnnnnnnnnnnnnttcat

SEQ ID NO: 91688 - DNA, 390 bp, Arabidopsis thaliana columbia
tttttctaaccatagtgtatctctgaactgagagtagcaggttgcaattaaaaactaaagattgtgtcagacagacttatgtattaccacaaccagcaccaaggaaagagcatcctctcttcatcgagaatgcccatttcttctgaaaggcatccgttcctcagaggaaatggcacaggagattctggactcattctctccactgatgcaaagccacgactaaaatggactccagatcttcacgagagatttgttgaagcggtcaaccagcttggaggaggagataaggctactcctaagacaatcatgaaagtcatgggcattccaggccttaccttataccatctcaagagtcatctttagaaatataggctaagcaagaatcttaat

SEQ ID NO: 91689 - DNA, 597 bp, Arabidopsis thaliana columbia
cgcctgcaggtaccggtccggccttcccggggcgatccatccgtccgcccacgcgtccgggctgtaccctcaacttctcttgagagtggcaaggtagcaattatttccgaatcaaagaagagaaagaaacataagcctagcaaagaatcccggtacaattcattgtttgatgaattagttcctccctgtatttccttggaggaagatgatagcagcagcgatgactggctttttggaacaagtcggaaagaaaatgtttcttctgccaagtcttcttataagactgatgaagacacgatcatgagcttgcagacgtcaagagattgttcctctttgcctagagctatgttattgtctgaagttggaattttttcattaccatatactgtcccgttttaggtcccatattgttttgttctttctcagcttagccttaggccttagctttgtacagttatcattgtaacaatcacagtgatctatgatacttgaacgatctctgtatttttgacactaatcaaaaatcatggtttccacttaaaaaaaaaaaaaaagggcggccgctctaaaggatccaagcttacgtacgcgtgcatg

SEQ ID NO: 91690 - DNA, 519 bp, Arabidopsis thaliana columbia
gccgttagtatcgccggcactatacgactcatatagggaaagctggtacgcctgcaggtaccggtccggaattcccgggtcgacccacgcgtccggtacttttgctgctattgtgagtgataatatcaagcttctctacttgagaaagagcttagtccaggaactgctcaagtctcctgatacctttgagggtaaaatgttgggaagttttgtgaggatcaagtctgaccctaatgattatcttcgggggtgcccttatcagcttgttcaggtgacaggcgtgaagaaggaacatgggactgatgattttcttcttcaggttacaaattatgtgaaagatgtttctatatctgtgctatctgatgataatttctcccaggaggaatgtgaagatttacatcagagaataaagaacggacttcttaagaagcctactattgtggagatggaagaaaaagctaaaaaattacatagagaacaaacaaaccactggcttggaagagaaattgaattgttaaa

SEQ ID NO: 91691 - DNA, 463 bp, Arabidopsis thaliana columbia
gcgaaacaaaaactcgtggaggagatatgcaattgctgacgctaaatccggcggccatttccaggacgccgccgcaagccatagacccttcctcatcctcgagtcttcttcttccttttcctcagattttgagctcccaacgcgctcttggtcttgtagctaggccttgtaatccacttcgacgaggattatctaggtttttatcaagtcgacagcttttccgacgatccaaagttgtcaaggcagtagcaaccccagaccccatcttggaagtacctttaactgaggaaaatgtagaaagcgttttggatgaaatccgaccttaccttatgtctgatggtggtaatgtggcattacatgagatcgatggaaatattgtgcgggttaagctgcagggagcatgcggatcatgtccaagttctactatgacaataaagatgggtattttagcggcgtctaattg

SEQ ID NO: 91692 - DNA, 894 bp, Arabidopsis thaliana columbia
  unsure (1)..(894): unsure at all n locations
cggttctgaattcccggagccgaccctcccgtatctccactagtcacacctaaatccattttctttttccaagccaacccactatatcaaggaaactttcctcatcctcgagtctgtcttcttccttttcctcanattttgagctcccaacgcgctcttggtcttgtagctaggccttgtaatccacttcgacgaggattatctaggtttttatcaagtcgacagcttttccgacgatccaaagttgtcaaggcagtagcaaccccagaccccatcttggaagtacctttaactgaggaaaatgtagaaagcgttttggatgaaatccgaccttaccttatgtctgatggtggtaatgtggcattacatgagatcgatggaaatattgtgcgggttaagctgcagggagcatgcggatcatgtccaagttctactatgacaatgaagatgggtattgagcgtcgtctaatggaaaagatccctgaaatagtggctgtagaagctcttccagatgaagagactggccttgaactgaatgaggaaaacattgaaaaggtgctggaagaaatcaggccttacttaatcggaacagcagatggatcgcttgatctagtggagattgaagatccaatcgtgaagataagaatcacaggacctgcagctggagtcatgacaggttcgtgtagcagtcactcagaaactaagagagaaaattcccatcaatcgcagctgttcaacttatatagaaacaacaactcttcttgtatgctttgtattagctcccttgtatagtattgttgtgcatagattatgtgttttgttgacatttgctatttgtcctcaaataagttttcaacatttttgttttaaatagaaaaaaagtccttattattt

SEQ ID NO: 91693 - DNA, 482 bp, Arabidopsis thaliana columbia
cgtgcgctttgaaagaagagagagcaaacacagtttttaaattcaacacaccaacaaaagctttggagtctgagccagcttcagctcctgcatcatcatcctcagctgcgactgggcctgtgactgaagatgaaatccgcgctgttctgatggaaaagaagcaagtcactacacaggatcttgtttccaggtttaaggcaagacttaagaccaaagaggacaagaatgcctttgccaatattctgaggaagatctcaaagatacagaagaacgctggttctcaaaacttcgtcgttttgagagaaaagtgaggacttcctgttttcacagctaactcttttcaaaaagatttcaagatatctcatgagctagttaaaataagaatgtttttctcatttcttgatttcagatgtttaaagttggacctatttttttcccatgacactattagtaattgaaaatcttcaaatgttttattcgag

SEQ ID NO: 91694 - DNA, 567 bp, Arabidopsis thaliana columbia
ccagctacatacgactcaccttagggaaagctcgtacgcctgcaggtaccggtccggaattcccggttcggaaacctttctctatttatctctctatacacaacaatggcggtcttcgttttatctctactcatactctcttccttctcagccattccattcacttatgcagattctggaatgatcggagttaactacggccgtatagcagacaatcttccggcaccggagaaagtagttgagctactgaaaacacaaggaatcaaccgcatcaagctttacgacaccgagacaactgtactaaccgcactcgcgaactccggaatcaaagtcgttgtctctctccccaacgaaaacctcgcttccgccgccgcagatcagagctacaccgacacttgggttcaggacaacataaagaagtacattccagcgacggatatcgaagcaatcgccgttgggaacgaagtgttcgtcgatccgaggaacacgacgacgtatctcgttccagctatgaagaatgttcaaagctctctcgtcaagttcaatctcgacaaatccattaagatc

SEQ ID NO: 91695 - DNA, 382 bp, Arabidopsis thaliana columbia
gtgttcatgtcttcatatctctaaccataagataaaactcaagatttctgaagaggacagctctggaattcatatacgttttgcctctccatctgattctcagcttatggaattggagcaaatctgcattttgaaacccgatgatgaggaagaaatggagtcaccatcaccatcgaaaacagaggaaaatttaggcgtggttcctctgtcttgcgcgtttacgagacaagaacattgcgtttccgagacgaaagaacgcgaagaatcgactagaagactaagcagccttatttttctttacctcatcgttatgtccgtacagattgtgggaggttttaaggcgaatagtcttgcggttatgacagatgctgcgcatttgttg

SEQ ID NO: 91696 - DNA, 565 bp, Arabidopsis thaliana columbia
tacgactcactatagggaaagctggcccgcctgcaggtaccggtccggaattcccgggtctacccacgcgtccgatggtgttgacagtggaggtgatccaaaagatattcctaatctgacatttgaggaattcaaggagttccaccgtcaatattatcacccaagcaacgccaggatctggttctatggagatgatgatcccgttcaccgcctccgtgtcttgagtgaatacttggatatgtttgaagcaagtccatctcccaatagttcaaagattaaatttcaaaagctattctctgagcctgtcagactggttgagaaatatcctgctggtcgagatggtgaccttaaaaagaagcatatgttgtgcgttaactggctattgtctgagaagcccttggacttgcaaactcaacttgcacttggcttcttggatcatcttatgctggggactcctgcttcaccactaagaaagatcttattggaaagcgggtttaggagaacctcttgtcagtagtgggttgtcagacgaactcttgcagccccagttcggtattggtttgaa

SEQ ID NO: 91697 - DNA, 475 bp, Arabidopsis thaliana columbia
ctctcgttcaaaatacaaatgaaccgcagaaagtgaatgggtttttgctggtggcctctactgctggatatgcatatagcgataaagatagagcctggattggagctatggctgagaaattcagaggatgacatgagctgttcatgatgatgttatctttgactggtgaaacacttcagttcctacagaaatttctcgaggccataaaccagattctggaaaaccaaagagaataatggcaagtgattagataacagtaagagattaatggatggagaattcttgcttgtttccatgttaccttgaggcgtaccacctttctgattgctaggagtaggccgggcattagggaccttacgtcaattatgtcatgtttaacagtgtaaacctgtggacagcattttgtatcagaagaattttaatgagctatgtagcctaaattttaaaatagagtatccaattttcagtttgaaaa

SEQ ID NO: 91698 - DNA, 1088 bp, Arabidopsis thaliana columbia
agatcgacgatcgaataagtctcgcgctgaaatctatctttgtgcaagcaaactctcgaagaaccttagattgaagatggtactgatcgaatcaagtgagagtgaagacgagatcctcatcaaaaacgaaccaaagccagcgtcttcatcctcaccgcaacccacggagacgaaacaagtcgacggagatgattccgatgggttcgaaactgccagcgaacgtgaaattagcgatgaagaaggagaggaagatggtaccaaaaatgacgccgtcacgagtcaggaggaaccacagcactcggagaagaaggaagagcagattgagctaatgagtgaaggagaagccatagtcgacgacggatcaaacaaggagaaagctttggcagaagcaaatgaggctaaagcggaaggaaataaactgttcgttaatggcctttatgaagaagcattgtcaaagtatgcttttgctttagagcttggtcaggagttacctgagtctatagagcttcgatccatatgctatttaaacagaggtgtatgtttcctcaaattgggtaaatgtgaagaaacaatcaaggaatgcacaaaagccttagagctaaatcctgcctacaataaggccttggttcgaagggctgaagcacacgagaaacttgaacacttcgaagatgctgtcacggacctgaagaagatcttagaacttgatccttcaaatgatcaagctaggaaagggattcgacgtcttgaacctcttgctgctgagaagcgagaaaagatgaaagaagaagctataactaagctgaaggagatgggaaactcgattttgggtcgatttggaatgagtgtggacaactttaaggcggttaaagatcccaacactggctcctactctctttctttccaaaactagtttaatatcgtagttgctcttgatgtattgcttctaccacttaaatgtttagcaacaatctggttaatattgcaatgtgttattgttcttgatgcatacatgaaaaaaaaaagggcggccgctctagaggatccaagcttacgtacgcgtgcatgcgacgtcatagctcgtctgtagt

SEQ ID NO: 91699 - DNA, 488 bp, Arabidopsis thaliana columbia
gagggaaagataaacagtgaattagaaagagaaggaagtttcaatggaatcgctaacatctatttctccttccataattcttcctccggccaccactactacgatccccgtttcaacttcacgatcagtgttgattcgtcttccttcacgccgttcttcttaccttttcggcttgtccagctccgggagacggatttcgatttctagaagaagacacttcgttagctgtaaatcgaccggcggcggaggaggaggatcagataagcttggtggcgatgaagaagagagcgaggaagttgagaaggcgcttcacttggatggtacgatccctgggacttccgatgagtttgtaaggcaagtttcgtcgcgtgcttacgacatgcgtcggaaactcgagcagaccgttgattccactagctatgacgtgttggagtccaacccatggagaggagattcgaagcctgtatatgtattaacacatagagaaa

SEQ ID NO: 91700 - DNA, 522 bp, Arabidopsis thaliana columbia
atgatttaaaaagttgaggaagaagaagatgtagaacattttgaggatgtgatagagggagatgatgttgatcccaataagaccgcgcggccggacgagaatgttgttgaagttgatcatgatggtgtcgaaaagtcaagtagagatggtgattcttcttcagatgacgaagaggctttggcaatcaggctatctgatgaagaagatgataatgcttctgatgattctgaagagctaattagaaacgaaactccccagcttgaagaagtcatggaggtttctaatgatatggaaaaaagaagccaaccgccaatgagaccgagttctcttcctggaggatatgatcctcgtcatagagaaccttcttactgtaacgcagaccgtgcaagttggtgggaattgggggttctttcaaaacatgctcacccctcggttgctacaatggctggaacccttctctcaggaacaaatattgtttacaacggaaacccgctgaacgatttatctctaactgctttcttg

SEQ ID NO: 91701 - DNA, 502 bp, Arabidopsis thaliana columbia
  unsure (1)..(502): unsure at all n locations
atgatactccagctacnnnnnnnnnnnnnnnnnnnnnnnnnnnnnnnnnnnnnnnnnnnnnnnnnnnnnnnnnnnnnnnnccacgcgtgcgcgatattcgcagtacagagtcaaactgtgtgacagacctaccatatgttctgatgaattctctcaattccatcgagaagggttcatactctccctgactttggaggatggaagcattggctatggagaggttgcacctctgaacagtaatgtagagaacttaatggatgttgaggggcagcttcagttagttcttcacctcatgaatgaagctaaatttagttacatgcttcctttgttaaatggctcgatttcttcctggatttggagtgaacttggaattactgcatcatcgattttccctagtgtcagatgtggtctggaaatggctcttctaaacgcaatgggcagtaagacatgattcttctttctgataatgaagtatccccaacaaactagaatcatgtcttac

SEQ ID NO: 91702 - DNA, 681 bp, Arabidopsis thaliana columbia
gattgatttaggtgacctatagaagactatgacgtcgcatgcacgcgtacgtaagctcggaattcggctcgagctcgagcccgtcttcattcgcttgaacttaccgaattggaccaagttatctggaaccactttccaaccgaatgctttcctccggaagtaaaacccaccgggcttccggcgggggttgcttcattggaagaatgaataccggagccaataaacctgatccattctgccttaaccacctggaaattaaccttggggttaccatttaatggattttggtcctcggttcaccgcttctggttaccgaattgtccgcttctgggatcgccgccgcgtttttgctttggtactttaacttggaggagcttatggctctgctggtttcctcttaggtcgctgcttacttcgtcataggaacagcggcaacgaaggttaaaatgacgcataaggaagcacaaggtgtggccgaaaagagaaagggttgaagaggaccacgcagtgtgattggttcaagtgctgctggttgtgtctgtgcttttctttcaatatatcaagtgggaggagcagttttttcccagcttttccggcttggttttgtttccagtttctggactaaagtttcttacactgtcttgagcgagatatgcaatgcttattgaaaaacatcgtatt

SEQ ID NO: 91703 - DNA, 566 bp, Arabidopsis thaliana columbia
  unsure (1)..(566): unsure at all n locations
aggtcttcttcggaagcaagctaagtcatggcaacgatttcgtcaactctactcttaaattcttctagatcagctttaccactaagattcccaaaattctcgggattttcttcttcctctccattcgctagatcttacagatttggacgacgtaatctggaaccactttccaacggaatgctttcgtcgggaagtagagccgacggtgctacggcggcggctgcatcgatggaaggagtgatgacggaggcgatgaaactgattcaatcggcgtcaccaacttggaaatcagctgtggctaacaatttattgatttttgttctcggttcaccgcttcttgttaccggattgtccgcttctgggatcgccgccgcgtttttgcttggtactttaacttggagagcttatggctctcctggtttccccttagtcgctgcttacttcgtcataggaacagcgggaacgaaggttaaaatgacggaaaaggagccaaggtttgnccnaaangaaggttnannggccccagtganttgttaaggcccctggtgggctgncttntttaaaaa

SEQ ID NO: 91704 - DNA, 428 bp, Arabidopsis thaliana columbia
ttttatcgccgccgatattctcacgccggtatgattcgaacaacattcgcgaccgccatcgctcatttccacacgcattctcatggaggagctcaagctcgtcctctacagaacaacacacgagaagtaatccattgtcctgaagcttggttagtcaaaatcgtatctactttgttcgtgtacagagttccagattcagatctctgtttctgttacttaagcaagaatctaaatccgtttatctcctttgaggttgtgaagaaattggataacaatcctcacatagggtttcgattttgggagtttagtagattcaaattgaacattcgtcattcgttttggacttataatttgctaacgagatctctttgtaaagccggcttgcacgatttagccggtcagatgtttgagtgtatgaagagcgatgg

SEQ ID NO: 91705 - DNA, 553 bp, Arabidopsis thaliana columbia
  unsure (1)..(553): unsure at all n locations
cnnnnnnnnnnnnnnnnnnnnnnnnnnnnnnnnnnnnnnnnnnnnnnnnnnnnnnnnnnnnnnnnnnctagtccacgcgtccgcccacgcgtacgcagcttttttcccatcttcttcttcgcatcacatattcttcattactaatatatctcctactccagtcttcctccatgaattcctgtagcttaggagctcctaaagttagaatttttgcaacaaatttcagtagattaagatgtggaaacttgctgataccgaacaatcaaagactatttgttgaccaaagccctatgaagtatctgagtctgagaacgactctgcgatctgtgaaagctatccaattgtctactgtcccacctgcagaaacagaagctattgcagacgtaaaagattctgacgagaccaaatcaactgttgtgaatactcacctcatgcccaagtcctccgaggtggaagcactcatcagcgaaatcaccgattcctcatccattgcagagtttgaactcaaactgggaggtttccgcctgtatgtagcaaggaaattaactgacga

SEQ ID NO: 91706 - DNA, 776 bp, Arabidopsis thaliana columbia
  unsure (1)..(776): unsure at all n locations
ccnggcccttggtgggccccattgggggggncccaggntttncnccgngttccaaaaggttgggggtagcnttccccatcnccaggtcttcctaaaanaaggggatgggtccccaattttataccaatancctaattttgntccccattaaaanaaaggttccaggaagttatttgtaattaagntcatagtcgaatcttccatattcaaacagatttgcataccaacatctagatatttttttggtgaacttgaatctaattaggttctttcatttagggaaaagaggataaaatttaggaaatagaaatgatccagatttagtatggctaccaaaaaaattaaatgtttgaattgagagttcgttcatacgtcaagattttttggatcttttgaattgttggaaaaatcaaaatcgtgaatttgtttaagacagtattaagaattttatcgaaaacttacagcggcttgccaaacaaaggctaagagaagaaagaaaagaggtattacgggcataacatctacgattggattcaaaaaggcgtaggcctctggcaatttggcgactaaaaaagtgcttgaaaaaagggtagaattaaaaaaaatacagatcaaattaaatatattaagcataacaaaaattggtgttcttgtggataatttaattttgattgagtttttaatatattttttatataaggaaaaaataaagaaagatagtctaaaaagactttgttgaacttactcaatcaaaaatccttttattctcttatgag

SEQ ID NO: 91707 - DNA, 573 bp, Arabidopsis thaliana columbia
  unsure (1)..(573): unsure at all n locations
nnnnnnnnnnnnnnnnnnnnnnnnnnnnnnnnnnnnnnnnnnnnnnnnnnnnnnnnnnnnnnnnnnnnnnnnnnnccacgcgtccggttggtggacctgctccgggaatgatgcagcctcagatctctcgtccaccacagctttcagctcctccgattattcgacctccgggacagatgttgccaccgcctccttttggtggtcaaggtcctcctatgggaagaggtcctccaccgccttatggtatgaggccaccgccacagcagttttctggaccaccaccgcctcagtatgggcaaaggccaatgattcctcctcctggtggtatgatgagaggacctcctcctccacctcatggaatgcaaggacctcctccgcctcgccctggaatgcctcctgctcctggtggttttgctccaccgcgtcctggcatgccaccacataatcagcagcagtgattaggttagcagtgaatgaacaggactcttgtctcggctttttactgtttttgtcgctgttttcttgagattatgaaggctctaagatgtttgattgaacttcctcaggtttacg

SEQ ID NO: 91708 - DNA, 458 bp, Arabidopsis thaliana columbia
atccgccctagggttttcttccatacacaatcagactcaacgataagtaccaatcggagaagagatcacaagtggatgatgagttacgaaggcaacggagatggtgtcgctatctccaccgaaaaccacaacgagaactacatatctctagagagctcgccttttcatgaagactccaagtctcgagaatctcatgatcttaaaaaggattcttcgaaaatcagtgagaaagacaatgaaaatggacgtgataaagacggaaacaaagatcgtgatcgtgagaaggatcgtgatagggagaagagcagagacagagatagggagaaaagcagagatagagatagggatagggagagaagtaaggataggcaacgagaccgtcatcatagagatcgtcatagggaccgtagcagagaacgtagtgagaaaagagatgatttggatgatgatcatcatcg

SEQ ID NO: 91709 - DNA, 373 bp, Arabidopsis thaliana columbia
  unsure (1)..(373): unsure at all n locations
tgatttaagattgcatcaatgaagaagaagaggtcaagcacggaggttgatggtgcttcaacagctgctgcaaaggaagcagctgcgaggaaggcaaagttggccgcagcgaagaaaaaagaaaagaaaaactacaatcagcaacctgtgaggtgaagaaatcaatccacccaccgttgtgatatgaacataggttttgttcatatgagacttacttgccttgaacaaatcttttgatggggaatgtggttgggtcgtgttttagagttatgataactttggatcttttaatcctatcacaatgggacatgacaagaagaaactctgtatgaatttttccttttacatacattctttgctcatatntattgag

SEQ ID NO: 91710 - DNA, 519 bp, Arabidopsis thaliana columbia
  unsure (1)..(519): unsure at all n locations
attcaccttcttcctcaaaattntctctttctctctncttcgaaattcttcctcctctttttctgcagaaactatccaaaaatctcttcgttttcacaatttctcattattaaaaaaaaaactttaaattcttcttcttcaagaaaaaatggcggtggatcttttatcggaaaattctaatatgagtccaagaatctcattttcacgtgacttttgtcaatcagacgcaataccaatcgagaaacgtcccttaagatcatcaaactcgaaaccatcaagcctcaattcaagcatagatttcgatttctgcattcccggcggcgtaaattccggcgaaagcttcgatcaaggttcttggtccgccgatgaactcttctctaacggcaaaatcttaccaacggaaatcaagaaaaaaccagaaccgggtaaaaaagaaccagaaccaaaaccggttaaatctaaaccggattcaagaaaacagaggaaacaaccaaacgaagaacaacaagaagacgacgt

SEQ ID NO: 91711 - DNA, 506 bp, Arabidopsis thaliana columbia
tcgcaaatgatgaatcacacgatgatatacatgtacaagaaggctggcaactatgagaaagctcgaaaagtattttcttcaatggttgggaaaggagttccccagtctacagtcacttacaatagccttatgtctttcgaaactagttataaagaagtttctaagatctatgaccagatgcaaagatctgatattcaacccgacgttgtaagttatgctttacttatcaaagcatatggaagagccagaagagaggaagaagctctatctgtttttgaagagatgcttgatgctggtgtaagttatttgtctttttatctttcaggccaacacataaagcttataacattttgctggatgcatttgctatttctgggatggtggagcaagcaaagactgtctttaagagcatgcggcgggacagaattttcccggacctctggtcgtacacaactatgttatcagcatatgtgaatgcatctgacatggagggtgctgagaaattc

SEQ ID NO: 91712 - DNA, 572 bp, Arabidopsis thaliana columbia
  unsure (1)..(572): unsure at all n locations
tcgcnnnnnnnnnnnnnnnnnnnnnnnnnnnnnnnnnnnnnnnnnnnnnnnnnnnnnnnnnnnnnnnnnnnnnnnnccacgcgtccggaaagagcttcgtcttcttcatctccatcattatctccattgacattgttctcaattgcgaataataatcataattattcacacaaccaaagcattcatctctcagattctcttaaaaaaatggagaaatcagatcctccaccagtcccaaagcccggcgccactattatcccctcctccgatccaattcctaatgccgatccgattccatcttcttccttccaccgccgatctcgctccgacgatatgtccatgttcatgttcatggatcccctctcctccgccgcaccaccttcctccgacgaccttccctccgacgacgatctcttctcttctttcatcgatgtcgatagcctcacctctaatcccaatccctttcaaaatccttccctctcctccaactccgtttccggcgctgctaatcctcctcctcctccttcctctcgtgctcgccaccgtcacagcaattccgttgacgctggatg

SEQ ID NO: 91713 - DNA, 313 bp, Arabidopsis thaliana columbia
tcaaacagagaggaagaagatgaagcggacggtgagggactacgcgattcgatcatcggtggtggcgttgggatcattggcctttggttacttgtcactggagctgggttacaagcctttccttgaaaaggctgaacaatacgaaagatctcttcagtcttctcaacaacatcaacaacaagatgaacaagaagaagcgaggtgggacaatagcaatgtcgaggggtgggaggagaaaaggtagtcttataatcggtttcaatacagacatatcaaagtgtgtaaggaagaagaaccttatcaaaattttctt

SEQ ID NO: 91714 - DNA, 353 bp, Arabidopsis thaliana columbia
ctctatttgctcatctccctcgatttcgaacccctaatcttgagatggcgggcggagaagaagctctcgaaccctatgagggatattaaggtccagaagctagttcttaacatctctgttggtgagagtggtgatcgtctcactcgtgcctccaaggttcgttctttctttccccttaagagtactcactatatggcttaggaaatttatttgagactttacgtcttagctactctgaaatgggttggttaggtacatagttcataggtgctgtatcgagagttttggttattgtaggtgttggaacagctcagtggtcaaacccctgtcttctctaagggtatgtgaatatc

SEQ ID NO: 91715 - DNA, 499 bp, Arabidopsis thaliana columbia
  unsure (1)..(499): unsure at all n locations
tgagaaggcaatgcagcttcttgagagtggtttgaaagttaaggagtatgagcttcttaggaggaacttcagtgacactggttgctttggatttggtatccaagagcacattgatcttggaatcaagtacgatccttcccactcggtatctacggaatggacttttacgttgtccttgaacgcccaggatatcgtgtggctcgccgccgtagatgcaagactcgtgttggtattcaacacagagtaaccaaggatgatgcaatgaaatggttccaggtcaagtatgaaggagttatcctcaacaagtctcagaacatcactggttaaaaagtgttttgatctttaaagatttttgttgattctagcttattttaagttgttatctttggatgttaaagaatttnttgttgtagtaaatcttntgacancagtttggtagaatctaaatcctctttctccgngcntgcggccgcgaattcgatgatattagtttatngtt

SEQ ID NO: 91716 - DNA, 632 bp, Arabidopsis thaliana columbia
  unsure (1)..(632): unsure at all n locations
gccggcacgcctgcaggtaccggtccggttttcccggggggacccacgcgcccgtacggcggcggaagacgacagaagggggggctttgcaaactctacactgcttcgtctcttagctcgacattgatctccttaaaatggcgtcggagaagaagctctcgaaccccatgagggacattaaggttcagaaacttgttctcaacatttccgttggtgagagtggtgatcgtctcactcgtgcctccaaggtgttggagcagctcagtggacaaacccctgtcttctctaaggcgaggtacactgtgaggtcttttggtatcaggcgtaatgagaagattgcgtgttatgtgactgtgagaggtgagaaggcaatgcagcttcttgagagtggtttgaaagttaaggagtatgagcttcttaagaggaacttcagtgacactggttgctttggatttggtatccaagagcacattgatcttggaatcaagtacgatccttccactggtatctacggaatggactttctacggtgtccttaacgtccaggganccgtntgcccgngccgtagntnaagcttgcgnggatccacaagggttccaagntnatcntaagnggncagtaagattaggtc

SEQ ID NO: 91717 - DNA, 761 bp, Arabidopsis thaliana columbia
  unsure (1)..(761): unsure at all n locations
aaatttgttgaagccgggattaaccaatttttccccaacagggaaacccaggcttatggcccatggaatttcggccaaagcttttaatacgacctcactataaggaaaagtgggtagccctgcaggtcccggtccggaattcccggggtcgacccacgcgtccgaagttaaggagtatgagcttcttaggaggaacttcagtgacactggttgctttggatttggtatccaagagcacattgatcttggaatcaagtacgatccttccactggtatctacggaatggacttttacgttgtccttgaacgcccaggatatcgtgtggctcgccgccgtagatgcaagactcgtgttggtattcaacacagagtaaccaaggatgatgcaatgaaatggttccaggtcaagtatgaaggagttatcctcaacaagtctcagaacatcactggttaaaaagtgttttgatctttaaagatttttgttgattctagcttattttaagttgttatctttggatgttaaagaatttcttgttgtagtaaatcttttgacatcagtttggtagaatctaaatcttccaagaaccttggagatatgtttcttattttattcaatgtcatcatcaaaactaaaatcaatcaaaagcagctcctttgatttccnnnnnnnnnnnnnnnnnnnnnnnnnnnnnnnnnnnnnnnnnnnnnnnnnnnnnnnnnnnnnnnnnnnnnnnnnnnnnnnnnnnnnnnnnnnnnnnnnn

SEQ ID NO: 91718 - DNA, 792 bp, Arabidopsis thaliana columbia
tgcggcactgcgcgtccgcccacgcgtccgcccacgcgtccgatttgctcatctccttcgatttcgaacccctaatcttgagatggcatcggagaagaagctctcgaaccctatgagggatattaaggtccagaagctagttcttaacatctctgttggtgagagtggtgatcgtctcactcgtgcctccaaggtgttggaacagctcagtggtcaaactcctgtcttctctaaggcgaggtacactgtgaggtctttcggtatcaggcgtaatgaaaagattgcgtgctatgtcaccgtgagaggtgagaaggcaatgcagcttcttgagagtggcttgaaagtgaaggaatacgagctgttgaggaggaacttcagtgacactggctgcttcggattcggtatccaggagcacattgatcttggaatcaagtatgatccttctaccggtatctacggtatggatttctacgttgttcttgaacgtccaggataccgtgtggcccgtcgccgtagatgcaagactcgcgttggtattcaacatagagttaccaaggatgatgccatgaagtggttccaagttaagtatgaaggagttatcctcaacaagtctcagaacatcactggttgaagagcttttttttgtcattttgttttggttcaagttcttatatttaagattctggatagtaaggatttcgtgttttgggaacccttttgacttaagttggttaaagaatcttcaaggaccccccaaaaatgaacccatttttgggggtaaaaaaaaaaaaa

SEQ ID NO: 91719 - DNA, 447 bp, Arabidopsis thaliana columbia
tttctttcgcgtgggcggacgcgtgggcggacgcgtgggcggacgcgtgggcggacgcgtgggatagagagagagaacagagtcaatgtcaatggcgtctatagcttcttcttcttccaccaccctactctcttcctctagggttcttcttccctccaagtcttctcttttatctcctaccgtctctttccccagaatcataccctcttcctcggcatcatcctcttctctctgttccgggttctccagtctcggttccctcaccaccaaccgctccgcctcacgccggaacttcgccgtcaaggctcaggctgatgatttaccactggtcggtaataaggcgcctgattttgaagctgaggcagattttgatcaagagttcataaaggtgaagctctctgagtacattggcaaaaagtatgatattctattcttctaccctttgga

SEQ ID NO: 91720 - DNA, 765 bp, Arabidopsis thaliana columbia
gatggcgtcgttggccgcaccggacctgaattcccgggtcgacccacgcgtccgtgtctgaaaaatctagaaacagcagcaatttggtttctctatccgattcgtctctctcacgccctcacgtttctccacctcatcctcaaactaaccacaagacctcttttttagagtaaccaatcacagagagatagagagagagaacagagtcaatgtcaatggcgtctatagcttcttcttcttccaccaccctactctcttcctctagggttcttcttccctccaagtcttctcttttatctcctaccgtctctgtccccagaaccctaccctcttcctcggcatcatcctcttctctctgttccgggttctccagtctcggttccctcaccaccaaccgctccgcctcacgccggaacttcgccgtcaaggctcaggctgatgatttaccactggtcggtaataaggcgcctgattttgaagctgaggcagtttttgatcaagagttcataaaggtgaagctctctgagtacattggcaaaaagtatgttattctattcttctaccctttggacttcacttttgtctgccccactgagattactgccttcagtgaccgttatgaagaatttgagaagctaaacaccgaagtattaggggtctctgtcgacagtgtgttctcgcatctcgcgtgggtccaaacagacagaaagtcgggagggctcggtgatctgaattatcctcttgttcggatatcactaaatccat

SEQ ID NO: 91721 - DNA, 552 bp, Arabidopsis thaliana columbia
  unsure (1)..(552): unsure at all n locations
cccacttatcatattagaatgtcctcagtccgtccgattccggcggcagctccatattataacttttttgaaattcgaccataaaaccgtcatccacaagattcttcacacagaggaagcaggatccgaatcagaacctgaatcagagattttgagcagagggaaggagtcttgtaaagaggagatggagaattttcttcggcggccataccaattagggagttgcaagaggatatcaagaaaggattagcctcaaccgcgcctgttcatcaccgtttacagatcgagtttcattacaccacaaacgcagagattaccagtctataaaagcctaggcagagttgctaacggtttgttgagtttcttgtaagttgtgtacctaattgggaaaggggatttaaagttaaccagtttgatctaactatccaaggaatttacttttttgcctcttcaaaaaaaaaaaaaccatactaaaaattaganaggggggggcggccgcttttaaagatccaaacttacttacgcgtgctcgcaanttataatttttttttg

SEQ ID NO: 91722 - DNA, 559 bp, Arabidopsis thaliana columbia
  unsure (1)..(559): unsure at all n locations
accacgcgtccgatttcaaccactctctgtctctcttcctctttgtagtttctcaaatattttcttcagagttggcacgacctcattaataataatcttctctacacctatcaataagagatatattttagagtttcactttggtgcacaaacaaagctcgtacaacattcttcgtatatggctcttcgtcgctgcttacctcaatattcaacaacttcatcttatctctccaagatctggggatttcgtatgcatgggaccaaggcagcagcttctgttgtagaagaacatgtctcgggggcagaacgtgaggatgaagaatatgctgatgtagattgggacaaccttggattcagtcttgtacggacagatttcatgttcgncaccaaaagttncagagacgggaacttntgaacaggggttaccttagccgttacggnnaacatcgngcttaanccctgcttgctgggaatnttcaactnttgggccaggggctnattagaggggggtnaaagcggtncagaggngnagncggttngggttntttttttccgtcca

SEQ ID NO: 91723 - DNA, 671 bp, Arabidopsis thaliana columbia
  unsure (1)..(671): unsure at all n locations
gccnnnnnnnnnnnnnnnnnnnnnnnnnnnnnnnnnnnnnnnnnnnnnnnnnnnnnnnnnnnnnnnnnnnnnnnccacgcgtccgcccacgcgtccgatcttatctctccaagatctggggatttcgtatgcatgggaccaaggcagcagcttctgttgtagaagaacatgtctcgggggcagaacgtgaggatgaagaatatgctgatgtagattgggacaaccttggattcagtcttgtacggacagatttcatgttcgccaccaaaagttgcagagacggaaacttcgaacagggttaccttagccgttacggcaacatcgagctcaaccctgctgctggaattctcaactatggccagggactaatagaggggatgaaagcgtacagaggagaagacggtagggttcttctcttccgtccagagctaaacgcgatgcgtatgaagataggagctgagagaatgtgtatgcattctcccttctggttcatcaagtttatttgaaggngttaagcagaccgtttttgcaaacaggngttnggtccccctccngggaaaggctcnttgntcncaaacccnttttttcggaantgggcnaacttgggnttgcttcaaaatnaagggacacggtttttnnntttggccccccntnaaacttnttttgggggc

SEQ ID NO: 91724 - DNA, 567 bp, Arabidopsis thaliana columbia
tctattcgacttacttagggaaagctggtacgcctgcaggtaccggtccggaattcccgggtggagccgcgcgtgcgcccacacgttcgcccacgcgtccgatttagtttcacaaaatcctttattgctgaatggttatgttgttacatagtgtgggactaattccatgttcaaaccaacaaaagtcttttctcttccatagttattaccgttacagatgcatagtttgttcatctgaaacaggtttgtccataagaagacaagctttggagcaagttgattctaagttgtctagtggagacgaaagagctgcattgtctcttgtcaaagatctccaaggaaaacctgatggccttcgatgttttggcgctgcaaggcaggtgcctcagagactctacacgttggaggaactgaaactgaatggtattaacgcagcttcacttctctcgccaacagatacaacgcttggctccatcgaaagaaaccttcagatcgcagctgtctcagggggaatagttgcttggaaagcctttgacttgagttctcaacagcttttctttcttactc

SEQ ID NO: 91725 - DNA, 795 bp, Arabidopsis thaliana columbia
taccgctccgaaattcccgggtcgacccacgccgtccgaccataaaactaggtttcacactttctctctaaacactgtctcttttctccgatacatatcccgccgcttcccctgtgtttttcttcgccgtccgtcgttcttttcaactccttagctgcgatattaaagtctagacacaatgagaggaaggagctacacgccatcaccaccaaggggttatggaaggaggggccggagccctagccctcggggccggtttggtgggagtcgtgacagtgatctcccaaccagtctcttggttcgcaacttacgtcatgattgcaggcaagaagacctcaggaggccatttgagcagtttggtcccgtcaaggacatctaccttcctagggattactatactggagatccaaggggggtttggattcattcagtttatggatccccctgatgctgctgaggctaaacatcaaatggatggttatcttcttcttggtcgtgagttgactgtcgtatttgctgaagaaaaccggaagaagccaactgatatgagaacaagggatcgaggtggcaggagccacagattccaggacagaagacgttctcctccttgggactcttcggctccatctcgtcggggtcgtagatcatgatcacctcgctggggatttaatttatcctcccctaaaagaaaataatatagggctgtgctaccttacgcttaaacaatttgagaaggagaaggcattactttttgtttaacccccccaataagggtttcagggtttcccaaccgga

SEQ ID NO: 91726 - DNA, 450 bp, Arabidopsis thaliana columbia
aaaaaaaaataagataataaaaggacgaggcaaacacgaagagctcacaacgagattcatgctttcagatttcaactgtcaccggaagttggaagttcgtttgtgataggatctaaacaagtatcaaagtctacaaattctggattaagcaagttaaagacttgtgattcccctgtatcttcaacaacctcgtcttccaaaactttatccaaagacatctgtggatagccatagcaagccgcagttacattatacaggaaaggtaccacttaaggctttgcattccaaagaaaatgtcacagtcgctttgtttgatatgtttggtctgtggattgttaacattccataaagtcgatatggatcttgcataggcttgcttactcttttgatccagctgcaaagatcttccaagtgaaaaagggtagtgagttctctgattcatacatggaa

SEQ ID NO: 91727 - DNA, 451 bp, Arabidopsis thaliana columbia
ggagtagtgaatctcggaattgttgaagaagacggtacaccggaatcaattgcgattttcatttatgggcggacgcgtgggatctgtagcgacggcgaaatcttcgacggcggtgatgagctccattccgccttttctgagcaaaacgtacgatatggttgacgatccattgacggacgacgtggtgtcttggagcagcggaaacaacagcttcgtggtttggaacgtgcctgagttcgccaaacagcttctaccaaagtatttcaagcacaacaatttctccagcttcgtcagacagctcaatacttatggttttagaaaagttgatccagaccgctgggagtttgcaaacgagggctttttaagaggccaaaagcaaatactaaagagtattgtccggcgaaaacctgcacaagtgcagcctccacaacaaccttaagttcagcactca

SEQ ID NO: 91728 - DNA, 529 bp, Arabidopsis thaliana columbia
gccggcacgcctgcaggtaccggtccggaattcccggggcgacccacgcgtccggcttgtttagcttgccgggtctcgatgtcttcaacattggaaccattggatgcaaaaccgaaggcaatgcctcaaccatcgtcgaaggcataaagaacacattgatcaaccatccacgcttctctagcatactggtgactggtcatggtgagcacaaaggaaaagctagatggattccaacgaaaataaacgtagaagagcatgtcattgttccggatatagatcccaacattgagaatcctgatgagtttcttgaagattatacatcaaacatggctctttctccaatggatatgtccaaacctttatgggagtttcatttattgaaacttaaaacatcacatgcggaagctgtgaccgcggctaggttccatcattctttgggcgacggaaggcccttatgtctcttttactcgcttggactcggaaaacatgtgatcccgaagcaccccccacttttggggctccgaaaaaa

SEQ ID NO: 91729 - DNA, 666 bp, Arabidopsis thaliana columbia
  unsure (1)..(666): unsure at all n locations
nnnnnnnnnnnnnnnnnnnnnnnnnnnnnnnnnnnnnnnnnnnnnnnnnnnnnnnnnnnnnnnnnnnnnnnnnngagccaggcgtccggcttgaaaggcatataatgagcagtggtggaacagcagctagtcactggccttggtttaagaagatggaagatattgtgggcaattcattagccttgaaaggcgcgtctgatgaagatagaagcggaagctcaatggggaatactgtgaagccagctagaaggtatcctctggtaacatataacccaggagttcagattaataacgtcaaatcaaaggctacatcaaaccctagatggcgaagagtggttctaaaaatcagtggtgcagctcttgcctgcaccggtcctaataacattgatccaaaggtaatcaatctgattgcaagagaagttgcaatggcttgtcgtcttggtgtagaggtagcgatagttgttgggagtcggaactttttttgtggcagcacatgggtaactgccactggtttggatagaaccactgcatattatataagtatgagtggcgtctgtgatgaactctgctttacttcaatcctccctggagaaataggggtgcaggcacggttccaactgcaatatcggttaagggtgtcggggagccttacaatccgtaacgagc

SEQ ID NO: 91730 - DNA, 632 bp, Arabidopsis thaliana columbia
  unsure (1)..(632): unsure at all n locations
nnnnnnnnnnnnnnnnnnnnnnnnnnnnnnnnnnnnnnnnnnnnnnnnnnnnnnnnnnnnnnnnnnngccacgcgttcgtccatgcgtacgcccacgcgtccggagaaatcaaacccggcgaattggactatcgttgtcggagtttgtcagtggatgaattgccatggctaaatctaaccaaaacttttctccgtatgaagagacccagccgattgattctaatccaccttcttcttctgattctggcgaggataaagatagcttgcttggggattgtgacacacaacctgttgatgacaatgctttgattaatgatcagtatatggagactcaggtcatggatactgaatgtgataatgaagaatttcttctttgtaatgaaactcaagcagttgatttgggatttgaaaccggagaagaagtacttgtagaggggaaacaggtacttgaagcttctgatggtttggctactcagggttgggatctttgtgatgatgaagttgttgtggatagtgatgatgaccgtactgttgtgttggagggcatcagcgatctctctgatagtggtgactcgggttgcaaagcggaacctgtcgtttctaggaagagataggccggtgctaatgaaagg

SEQ ID NO: 91731 - DNA, 745 bp, Arabidopsis thaliana columbia
tctaattcgacttactatagggaaagctggcacgcctgcaggtaccggtccggaattcccgggtcgacccacgcgtccggaaactgaagaaagccctaagaataaaaagcctgttgtgggaatggaacaagctgcagagaggagttcaaccattgttgcatccacctctgaagggtcggattttgatccgatatctcgattgaggaagctcttgttccgccaaatgcttgtgggaatcaaagacggcagattcttccttggaaatttccattgcattgacaaacaaggaaacatcattctccaagacactgtggagtatcgtagcatacgaagatcatctccttcgcctactgaacagcgttgtcttggtatgatcctaatcccttcctcttgcaggacatcttgccatgttgattgctctatcgatgaacagctttcgttgattcagctgaaagagtagagcttcttttaagacttcatgagagaatctttccaagtttcatcaatgttgtaaccaataataggtcttgtcatggatttagtctcttcatcatggccaaaatcaaaattttattccatgtctttgtatggtcaatgattcacatgtttttgtgaagatatatgtatacattggaaactgtttttgaactttttgtatttacaaaaaaaaaaaaaaagcgcggccgctctagaggatccaagcttacgtacgcgtgcatgcgacgtcatagtaaatctatagtgc

SEQ ID NO: 91732 - DNA, 650 bp, Arabidopsis thaliana columbia
  unsure (1)..(650): unsure at all n locations
nnnnnnnnnnnnnnnnnnnnnnnnnnnnnnnnnnnnnnnnnnnnnnnnnnnnnnnnnnnnnnnnnnnnnnnngcgcccgcgcgtccggtttaatcacaagtattcatctcgacgagctgttcgtcgactaggtacacgcgcgatcagatcagcgtcgctttcggcgatggctatggtaaccagatatacgcaccaaggcttgatgatccatctacaaaaacgtttgagcaatgttcatcagatacatttcagataaacggaccatgtacataccagatatgctatgtatatctctacaggtctggtccagatggttggatcccaaacactgtaaagatatatagccatggctctaaagcggtcaccttcccatataacacatatgttcctgagagtgtatggtatggtttcaattactgcaacagcgcctcagattctaatgtccttgccattggtctcagaaggagcgtgatcatactcctaggttttgttgtcagccggaccacattgctcttgtaagcctgttatgttccggttttgtataaacatattaggacttgtgaagaataaatgtgtaccgttttggggaaatgggtctcagaactgtattaagtattaaccataaatctatgatgaagttacttactcct

SEQ ID NO: 91733 - DNA, 581 bp, Arabidopsis thaliana columbia
cggaagcgtgaggccttcaccaccaaatcggtgcctccttgaatagtcgccgccgtcgtctatcatcgccgcttgtgactccgatgagaagctaggttattgaatcagagattatggctgcttcaatttcaagaaggatttttcgcacttttggatccttttcagctctaggacgttcctcttcaccaaatttgtctgcgaatacatctggaaatggtttagcttctcttactaatgatctaaagtatggaatggctttactttccaaccgaaagctctccacttctattttgactcctgatgattcatttccttctgatttacttaccaaaaagactgtgcttacaccagaccgaaccataggacaatatcaagacttggtcattccagtgactaattttcagaacgaggaaaagggtttcatggttctagcaggcgatgtctttgatgttccaataaggaaagatatcattcacaatgtcgtgcgatggcagcttgcgaaacgccagcaagggaactcattcgaccaaaacgttagtgaggttagtggaactggtagaagccatggaatcagaaggtac

SEQ ID NO: 91734 - DNA, 407 bp, Arabidopsis thaliana columbia
  unsure (1)..(407): unsure at all n locations
taccggaatgatcttcttattgagcttagtaggcatcacaccattagctgaacgtctcggatatgccaccgagcaattagcttgttacactggttcaactgttggaggtctcctaaacgctacatttggaaacgtgacagagctgatcatatcgattttcgctcttaaaagtggaatgatacgtgttgtacagctgacattgctcggctcgatactttctaacatgttacttgtacttggctgcgccttcttttgtggcgggcttgtattttcccagaaagagcaagtctttgacaaaggtaatgctgttgtgaattcgggattgcttttgatggctgtcatgggactactcttccccgcagttcttcattacacgcacagtgaggntcatgctgggtcatcagagc

SEQ ID NO: 91735 - DNA, 527 bp, Arabidopsis thaliana columbia
gcggacgcctgcaggtaccggtcccttatcccggggctaaccagcgtccgctctcctctcctttgcctattttctaaaatcttctccggccacccaccggccaccttatgatctttttggtggcggcgattacaccatcaatttgttagtttatttatatattaatatgggttgcggtggctcgaggcttggaggtgtggcgacgacaagggcggaagaaggcggggttgtgccacttccagcgggaatacgtccccttctccggcgaaggttagaggagatgaagaaacggagccatgcaggcgtcttgaaagggagccagacgttgtctaagaaagagcttcttaggcataactcttccgaggacggagaagatacggaggagaacgacggtagcttgaaggcgtccgctaaggttgctccggcgcctgatcataatgtagaagagaagaaagaggttatttatgaaaagattccatccaaagatgatgttaaagaggtgaaggaagaagaagttggaacaaaca

SEQ ID NO: 91736 - DNA, 455 bp, Arabidopsis thaliana columbia
tcgcagtaaccacacagagaaattaagaaccctaatttaaaacagaagaatggtacattcgaagaagttccgaggtgtccgccagcgtcagtggggttcttgggtttctgagattcgtcatcctctcttgaagagaagagtgtggctaggaacattcgacacggcggaaacagcggctagagcctacgaccaagccgcggttctaatgaacggccagagcgcgaagactaacttccccgtcatcaaatcgaacggttcaaattccttggagattaactctgcgttaaggtctcccaaatcattatcggaactattgaacgctaagctaaggaagaactgtaaagaccagacaccgtatctgacgtgtctccgcctcgacaacgacagctcacacatcggcgtctggcagaaacgcgccgggtcaaaaacgagtccaaactgggtcaagcttgttg

SEQ ID NO: 91737 - DNA, 532 bp, Arabidopsis thaliana columbia
  unsure (1)..(532): unsure at all n locations
nnnnnnnnnnnnnnnnnnnnnnnnnnnnnnnnnnnnnnnnnnnnnnnnnnnnnnnnnnnnnnnnnccacgcgtgcgcccacgcgtccgcaaagctcagtgtttaataattgtatagcttttttggtgaacgaagagtcagatcggcgagcctgagatgggttggggttcggtgttgctattactggcggtggctcttctttgtcagagggcaagttcaatcggagctaactggggcacacaggcgtcgcacccacttccaccggacatagttgtgcggatgctaagagagaatggtattcagaaagtaaagctctttgacgccgaatacgacactctcagagctttgggcaaatccggaatcgaagtcatggttggtattcccaatgagatgcttgcgactctcgcctctagcctgaaagctgctgagaaatgggttgctaaaaatgtctctactcacatctccaccgaccacgtcaacatcagatatgtgggctggtggggaatgaacctttcttgcctacttataatggg

SEQ ID NO: 91738 - DNA, 484 bp, Arabidopsis thaliana columbia
gaacgcatcagccgtctcgctgaacagcagaaggaaacggctgtgtcacaaccggaagaagaagctgaaccaacacatccagaatccaccacagaagctgcagatacttaaagattgtctttgttttggatcctcgggtcatctctttcacgtacgtatgtttattattctcactttttgtttgtgctactcatcctccctcgaggtaggattcacggtagacgcggaagagggaaatggcctccttctccgatctacttttaactttatggtgatatctttgtgtggacagagcaatctggtccacaggagagaaaagcaaatatgcatacatacacgtcaacttgtatcattgtaacactatgtttgtaatcatttccacgagcttttttttgttttcaatacaagatctctctgttcgctttcttaatagcattgagatactaattgaatataatgcagattcccatttttcataattaat

SEQ ID NO: 91739 - DNA, 1164 bp, Arabidopsis thaliana columbia
  unsure (1)..(1164): unsure at all n locations
atacctcttctcgtaggtctcctctcaactcctttttctcgtattcaagaacattcggtaacagctcttctaaacctctccatatgtgagatctaacattaggagccattgtttcagctggagcgattcctggtatagttcaagggcttaagaaaggaagcatggaggccagagagaatgcggcggctacacttttcagtctatcagtgatcgatgaaaataaagtgactatcggtgccttaggagcaattccgccactcgttgtattacttaatgaaggtacacaaagaggcaagaaagatgctgctactgcactctttaacctctgtatataccaaggaaacaaaggaaaagctatacgtgcaggagtgattcccacgttgactagactcttgacagagcccggaagcggaatggtcgatgaggcactcgcgattttggcgattctctctagccaccccgaaggaaaagcaatcataggatcctctgatgcagtcccaagtttggttgagtttatcagaactggctcgcctagaaacagagaaaacgcagctgctgttctagtccacctctgttctggagacccacaacatcttgtcgaagcgcagaaactcggccttatgggtccattgatagatttagctggaaatgggacggatagagggaaacgaaaagcagcgcagttgcttgaacgcatcaagccgtctcgctgaacagcagaaggaaacggctgtgtcacaaccggaagaagaagctgaaccaacacatccagaatccaccacagaagctgcagatacttaaagattgtctttgttttggatcctcgggtcatctctttcacagtacgtatgtttattattctcactttttgtttgtgctactcatcctccctcgaggtaggattcacggtagacgcggaagagggaaatggcctccttctccgatctacttttaactttatggtgatatctttgtgtggacagagcaatctggtccacaggagagaaaagcaaatatgcatacatacacgtcaacttgtatcattgtaacactatgtttgtaatcatttccacgaaaaaaaaaaaaaaagggcggccgctctagaggatccaagcttacgtacgcgtgcatgcgacgtcatagnnnnnnnnnnngtaacgaaat

SEQ ID NO: 91740 - DNA, 574 bp, Arabidopsis thaliana columbia
  unsure (1)..(574): unsure at all n locations
tttccgacatgatcaagatatcttaactttagccattaattcaaagtttttttttctttctaatactcgaaatggctttcttaaggagttttttcgctaccaagcatatcattcgccggtcttttactacggaatcattatcaacgcctaaagggttctttgctgtgtatgttggagaaaatctgaagaagaagagatatcttgttccggtttgttacttgaacaagccatctttccaagctttgcttaggaaagcagaagaagagttcggttttaatcatccaacgggcggtttgagtttaccatgcgacgaagctttcttcttcactgtcacttctcagattcgttaatcccatacaataattaaagtcttttttacattctcttatttatagaagaaaatacacattgtacatactatacttttatatacatcctgatgagaagaataattccccgaccatcttttgcttaaaaaaaaaaaaaaaacaaaccccaagnnnnnnnnnnnnnnnnnnnnnnnnnnnnnnnnnnnnnnnnnnnnnnnnnnnnnnnnnnnnnnnnnnngtcccaa

SEQ ID NO: 91741 - DNA, 644 bp, Arabidopsis thaliana columbia
  unsure (1)..(644): unsure at all n locations
agaatggaaacggaaattctgaggaaggtgagaaaactttcagcattttgttagagggaggagaaacaggaaacaaacactgagaatgccaatcagtttgcttaaccggccttatgattctcaaccgttcaagcttggctatagcagagttatcagagacagcgaggctccaaagtctgtagcttgaaacactctccaaagattgagctaattcgatgaaatgcaaactcacacacacatctctgatatttgctgtttcatagggacaatataaaggtagtttcattcacagtcatgggaaactgaggcttgtgatagcctcgaaatgaagttacaatgttttggattttgaccggaaaggttgtgcagaggtgagaaaaagccaagccattcttttgtttaccaagtgaggtgatataacatttttctggggtttttcttttaattcagccaataaaacgtaggaaattttggacataattttttcttttatggttcttcatgtttaaacattagttttcacgtaatttacttgcgtatttctcatcgaaaaaaaaaaaaaaaaaagannnnnnnnnnnnnnnnnnnnnnnnnnnnnnnnnnnnnnnnnnnnnnnnnnnnnnnnnnnnnnnnnnngtcctaaa

SEQ ID NO: 91742 - DNA, 416 bp, Arabidopsis thaliana columbia
taccgcactgtgagagtgaaaaagactatgatttgctgccaaaggtggttgagttttctgaggaaaatggttatagaagtgcagaagagaagtcttctaaagtagagaccctcgatggcatgaacatgaaacttgaggaggacaccgagaagaaggaaaagaaagaacgttctccagaggatgagacagttgaagttgaattcaaaatgtgggaaagttgtcagattgagaagaaagaagtttttcataaagagtctgcaaaagaagaagaggaagacttaaatgtggtggaccaaagccagaaaacctcgccagtaaatggattaaccggagaagatgagctgttgaaagagaaagagaagaagaagaagaagacattgtttggtaaagttgggaatcttctcaagaagaaagga

SEQ ID NO: 91743 - DNA, 570 bp, Arabidopsis thaliana columbia
  unsure (1)..(570): unsure at all n locations
gaggcgaagcgcaccggaggaaccataagtcgataaacccaaagcttagatgaacggtgagttgacttctttccgattttgacccaatcatctatcgccacgtcataggttactgcgtcctctgcaatccataccctgaaccggcaccttctctgtctctcccccaaatcgaaaacctaattcgatcgtcgtctccgacctacatctgccggaaaatatcttttgaccatggatttcaggattgataatggagtagctgctgggatgatgatggggattcctgttgagcttgaggttaccacggttgagaatcataatgaaatgggtgaaagctctggtcaagcaatgattgagcaagatgatgacaaccataatgaactcggtgaaaattctggtgagcaagatgagaaggtggatcttgattctattcctctggctgttgcagatatgacagaggctcaaggagatgagccttacgttggccaggagttcgaatctgaagcagcggctcatggtttttataatgcgtatgctactaaagtanggttcgtcatccgtgttagtaaactg

SEQ ID NO: 91744 - DNA, 501 bp, Arabidopsis thaliana columbia
  unsure (1)..(501): unsure at all n locations
cgcctgcaggnaccggnccggctttcccggggcgatccacccgnccgccgactttcaacgaaaactcagtgcctcgtccctctctttcaaaaaggtttttggttatggcgacgaagaaagtgatagctatatgtcagtcaggaggagagtttgtaactaataaagatggctcattagcttattctggtggtgatgcttatgccatagacatcgatcaggacacttgtatgagcgatttcaaatccgaattagctgaaaatttcgggtttagttgggagaatatgacactcaagtacttcctccctggaaacaagagaaccttaattactatctctaaggataaagatttccaacgcatggttagcttttccgcagacgcaccaaatgtcgaaatcttcgtcttacccgaagaagccgaagcaaggaatgtctccaacatgccagctagtagatcaagtaggacaactgcatcagaagcagtggtacctgtagtgtctgcag

SEQ ID NO: 91745 - DNA, 848 bp, Arabidopsis thaliana columbia
atgatataccaagcaactatactgactcactttagggaaagctggtacgcctgcaggtaccggtccggaattcccgggtcgacccacgcgtatggaagagggcaaaatcgttcgcagaagaagcgggtaagaagtctcagacgataacacaatcatcctccgcgaccttcgtcaatctcgtcaccgagactgctaagaaatccaaggaactcgctctcgaagcttcgaagaaagctgatcaattcaatgccgccgatttcgttgctgaaacggctaagaaatccaaagaattcgctgctgaagcttcaaagaaggcggatcagttcaaagtcgccgcgctgaaacaagctgatcagatccagaacatcaaatcgatcgctgatataatcgggaccgggaccgggtcaggatccggttcagaagcggagcttctcgaattcggtgtaacggatgatttgagagagttcgctgaaggcttgacctctgctacattccaagcttttcctgatcaagatcaaggggatgaagtttccgatgtgataacaaatgcttcgaatgttcgaaaggatctctcggattggcaagagagacatgccactctggttctaacctctgtcaagcaaatctccaagttaagatacgaactttgccctcgtttcatgaaagaaaggaggttctggaggatttatttcacactagtgagcactcatgtttctccatatgagaggaagtacatggaggaacttaagaccaaaggagagcatggaaatgaagaagctaagaaggctccagcgactggagagacagaaacagtcgaaaagaatgttgcaatccgtagaacatctact

SEQ ID NO: 91746 - DNA, 952 bp, Arabidopsis thaliana columbia
  unsure (1)..(952): unsure at all n locations
aaaaaaccctaatcttctcgggcttgtcatctccaaaattcagggttcaatttcttcaccatagaagatatagcgttatctccggcgtctaaggggactttagggacattcttgtggtggagaaatgggagacgaccagctagatttcgagctcccagaagaggttttgtcggtgattccgatggacccttttgagcagctggatctcgcgaggaagattacatcaatggcgatagcttcaagggtgtcgaatctggactctgaggtggttgaattgagacagaagcttctgggtaaggaaagtgttgtccgtgagcttgaggagaaagcgtctcgcctggagagagactgccgcgaggctgattcgagattgaaggtcgttctcgaagataatatgaacctgacaaaggagaaggattcactggcaatgactgtaacgaaactcacccgtgatttggctaagctggagacattcaagcggcagttaatcaaatccctgagcgatgagagtggtccgcaaacagaacctgttgatattaggacatgcgaccagccaggntcatatccaggcaaagatggaaggntcaatgcacactcaattaaacaagcttacagtggatctacagacacgaacaatccagttgttgaagcttcaaaatacactggaaacaaattttcaatgacatcatacatatctccacgtcttaccccaaccgcaacaccaaagntcatctccacaagtgtgtctcctcgaggctattctgcagcagggttcttcctaaaaggaccatcaggtgcagttnttccncaaangggaacactntggtcccgtnnagtnagcattatnggttgggnttttctcctngaaccgaaattccagnttgncncggggtggtngaaaggttttccggaagccgggcggtttctttgnaatngtcctttgtaatangtt

SEQ ID NO: 91747 - DNA, 433 bp, Arabidopsis thaliana columbia
ttcattttctctgcatcagagattccggtgtccttcttcctttcactcgcgtataacctcttttccttgacgttgtctccgtgagctctctgtgctttgactgcaaccatgtcgactattatgcagaagatcaaagaaattgaagatgagatggctaaaacacagaagaataaagctacttctcatcatctgggtttgttaaaggccaagcttgctaagcttcggagggaccttcttgcaccgcctaccaaaggtggcggtggtggtgctggagaaggttttgatgtgactaaaagtggagattctagagttggactggtcggatttccttcggttggaaaatctacgctattaaacaagctgactgggacattttccgaggttgcttcttatgagttcacgactttgacatgcattcctggtgttatcacat

SEQ ID NO: 91748 - DNA, 469 bp, Arabidopsis thaliana columbia
ttaagcacgttaccagttgaagactctgctgaggtctggaaaagattcattcagtttgagcaaacatatggagatcttgctagtattctaaaggttgagcagagaatgaaagaagcactttctggaaaaggggaagaggggtcttctcctccagagagttcacttcaagatgttgtttctcggtacagttacatggatctttggccatgcacttctaacgaccttgatcatttagccagacaagagttgcttgtgaagaatctgaataaggaagcaggggaaacaaatctacctcatgttccctgcggctatagggagtgtagcttcttcggcaaaaagttgttttatcccaggttcatctcagatcgggttgtccaagacccgacaaagaaatcagagtttgctagttctgcaaacccagtggcagcttctgcttcgaacaccttcccaagtactgtgactgcaactg

SEQ ID NO: 91749 - DNA, 966 bp, Arabidopsis thaliana columbia
  unsure (1)..(966): unsure at all n locations
tgtgttcgcgtgggcggacgcgtggggttccagtgatgcagcccatgtatcaacaacaccagctctctatgtctgggccacatggacatccttcaatgatgatgagtcgaccaccacaaatgcaacctgttatgcgtgtgccgcctccaccgggatctcagttttctcatatgcaagttcctcaaccttatggtcagcttccaccgctttcgatggggatgatgcaaccaccacctatggctgagatgcctcctcctccaccacccggggaggcaccaccgcctcttcctgaggagccagagccaaaaagacagaagctcgatgagtcagcccttgttccagaagaccagtttcttgctcagcatccgggtccggctacaatcagggtttctaagccaaacgagaatgatggacaagtcatggagatcacagtgcagtcgttatccgaaaacgtgggaagtttgaaggagaaaatagctggggagattcaaatcccagcaaacaaacagaagttgagtggaaaagcagggttcttaaaggacaacatgtcgcttgcacattacaatgtcggagcaggagaaatcctaacattgtctttgagggaacgtggtgggagaaagagatagagagacagctggtctacgcagggaaatgctttttgatctcttattcttctctagatgtttaaattgatggccaaaactatatgtactactctctcgttcacacatctttactcttggctcatcatatctctgctatctatggagttttagaaaaagtagagtgattattactgacttaagcttgttttggatttgcagctgaggcaacatttcgctctgtaatcttaaaaaaagaatgtgatactttcctttgtcaaaaaaaaaaaaaaaagnnnnnnnnnnnnnnnnnnnnnnnnnnnnnnnnnnnnnnnnnnnnnnnnnnnnnnnnnnnnnnnnnnnn

SEQ ID NO: 91750 - DNA, 619 bp, Arabidopsis thaliana columbia
  unsure (1)..(619): unsure at all n locations
tttntgncaccacagtgccccaaggttnttntcccnagggggtgccntggcnccagaccnggcttncccaggtggnggccngggattctaaagggtttttgccccgtgggtcttcccagaaccaaaagaggtcgtcgaggtgctcgaagaggtggtggtggctatcagaatgggcgaggaggaccaggtggtggtggtggctaccagaatgggcggtgcgaatcttatgatcaatctggtggaaccggttatcaaaggaactcctacaacaacagaggaaggggacgtggtggtggtggtggtggaggaaatggccattcatacaacaactaccaagaccccaatgttgctgttgcgtcttagcttttgtgcctctgtcttttgggtgcgtctctttcattatcttgcgtttatgctataacgcatataagcctaatctcgtgtttgaaacgtttgacaatggctcggttattgctatgaacttttttttttttaaaaaaaaaaaaaaaaaaaaaaaaggnnnnnnnnnnnnnnnnnnnnnnnnnnnnnnnnnnnnnnnnnnnnnnnnnnnnnnnnnnnnnnnnnnnnnnnnnnnnnnnnnnnnnnnnnnnnntagctg

SEQ ID NO: 91751 - DNA, 926 bp, Arabidopsis thaliana columbia
  unsure (1)..(926): unsure at all n locations
ccgggcggagccgacgcgtacggatttggattctatttctcagctttggagtctgttggtttctcgtccggtggattcaagggtatctcacaagaacgcttgggagcnttatnttgagcacgctaagctatggttagctaattccgagcagccaatcgaatcaaactgcaatacttcatatgctgcattgagagagaagttgaagaagattatggcgtctgactatttcaccactactccggaaatgaaagctccggttgatgtggcggctgcagctggtaactatacttcttaccaggtgcctgtggacgtggaggcttcagggcattaccagcaaaaggaagaagatgcatcaaattccaaagaagtagaatcagttgttaatgatcaatctcaacaagatgagcatcaaaaggttgagttagtgaccgaaggagaggtggtccatggacagcaagaacagggctatactcaggtgggaggagcagagaatgctaaaagagactatgtgccacgtgggtcttaccagaaccaaacgaggtcgtcgaggtgctccaagaagtggtggtggctatcagaatgggcgaagaagaccaagtggtggtggtggctacccaaaatggggcggtaccaatccttatgattcaatctggttggaaaacggttatccaaaggaactaccttcccaccacataaggaaagggatctttgttgtttgttggtggttgaagaaaattggcccattcccattcaacccactacccagaaacccccaatgttgctgttgcgtcttagcttttgtgcctctgtcttttgggtgcgtctctttcattatcttgcgtttatgctataacgcatataagcctaatctcgtgtttgaaacgtttgacaatggctcggttattgctatgaactttttttttttt

SEQ ID NO: 91752 - DNA, 672 bp, Arabidopsis thaliana columbia
  unsure (1)..(672): unsure at all n locations
cccccccactcaaggtgcttcnttggaaattgggtgaggttggccactccccggggaccaagttcaaggggggccttaaaggacttgagctacgatgatcaatgcaacaagtgtgagaaggaagctgtgaacgtatcgcttggaaacttgctttcgtacccattcgtgagagctgaggtggtgaagaacacacttgcaataagaggaggtcactacaatttcgtcaaaggaacgtttgatctctgggagctcgatttcaagaccactcctgcttttgccttctcttaagaaagaaagctaccgggacatataaaactcttttgagataaaaaaagacactttgactcatctttcttcattctctcatgttgatgattcctctccaacttctttgatttctttttgttaattcaaaacttcaactttgctgcttctatttcaaaagctcaaacaataaagctgtaaccaacgtttgaaacttctatatttgtctaattgatgtttgaacgaagatttgaactttccttcttaatctctttttccaggttatatgtgtatgttaattgttaaaacttcttggcaaaaaaaaaaaaaaagnnnnnnnnnnnnnnnnnnnnnnnnnnnnnnnnnnnnnnnnnnnnnnnnnnnnnnnnnnnnnnnnnnnnnnnnnnn

SEQ ID NO: 91753 - DNA, 393 bp, Arabidopsis thaliana columbia
ttcttgacttcaacatactccattctctatatacaacctttttaagaaaactttgattaatcagatcaaatatttataaattaaaacacacacacactttctcaacaatgagattctctctttctcccgtacgtccgcatagtgtagtagtaccttcactaccaaaacaggacgtcgtttcttatataagtggtacgacgtcgaatcgtcaatgtcgatgtgtacttacacttccttctccttcagtttccacttcccgaccaccggttttacccaaaccggaaacctgggagagtttgctgctaaaccatgatcaaattccaggcgaattctcacccactggttcgagtatcccggttaagcttggccggagatggatggagtatcaggggc

SEQ ID NO: 91754 - DNA, 806 bp, Arabidopsis thaliana columbia
cggacgcgtgggtttatacatccccatttatatgtttggtaacgccgactctgtgaagcggtttgcagcactcctttcctttcccccacaaactaaacaaaaaaccattcacaaaaaaaatagagagaatcatctgagagagtagtagtgatgatatgatcgcttcttctcctacaatctcagaaacctccgatcacggttttagatatcttctacaacggatacaatggagagcaccgattcttccggtggtccaccaccgccacaacctaaccttcctccaggcttccggtttcaccctaccgacgaagagcttgttgttcactacctcaaacgcaaagcagcctctgctcctttacctgtcgccatcatcgccgaagtcgatctctataaatttgatccatgggaacttcccgctaaagcatcgtttggagaacaagaatggtacttctttagtccacgagatcggaagtgtccaaacggagcaagaccaaacagagcggcgacttcaggttattggaaagcgaccggtacagataaaccggtacttgcttccgacggtaaccaaaaggtgggcgtgaagaaggcactagtcttctacagtggtaaaccaccaaaaggcgttaaaagtgattggatcatgcatgagtatcgtctcatcgaaaacaaaccaaacaatcgacctcctggctgtgatttcggcaacaaaaaaaactcactcagacttgatgattgggtgttatgtagaatctacaagaagaacaacgcaagtcgacatgttgataacgataaggatcatgatatga

SEQ ID NO: 91755 - DNA, 838 bp, Arabidopsis thaliana columbia
  unsure (1)..(838): unsure at all n locations
atgatattgccagcannnnnnnnnnnnnnnnnnnnnnnnnnnnnnnnnggaaaagctgagtaaaaccgtgcagccctgaacttcccacgcgtccgctcttcaaccaatccgttgaacgtcgtcgtaataagcttcatcttcatcaatcatcatcactttcttctttctcccacagatccttccttttctccttcatcttccccttcttccttttccctcatcgcccaggaacacatccgatctgcaccctcttcgttcgattctcacaattaatatctagggtttgcgaggaccccccctctctattcaaaaagagagagcagattttctctataatcccctttggtttcaagtggtgtaattggatcgtgtagctgcttttataatgacctctagcacgacaggagatcgaagatggggtactacaagaagaagtggcatgactatattgggaaaggttgctgtccaaaaccgattaactgaccaagccataggttagagaaccaaggccttgacccatatgtagatattgttccaaagggaacacttagttggggcagtaaatcatcactgaatgcttgggggacatcatccttgtcaccacgaactgaaagtggccctggttcaccaagccacctcagtgatcgaccttcttctgggggaagtgcactcgaccttcaactgccgatagaacaaagcacatgactcttcttcttctgttgcatggggattcgaactcgcggcttcatcagcatcatggggtgtntacatctaatcagccatcagttgcactacaggcgtcacatagtgcagacacaagaccaggaagttcccagta

SEQ ID NO: 91756 - DNA, 389 bp, Arabidopsis thaliana columbia
cggacgcgtgggcggacgcgtgggttaatatgaaaggtttggatggattacaagggcctatatacgtgggaaccgggtgtgtttttaggagacaagcactttatggatttgatgcgccaaaaaagaagaagactaagcgtatgacttgcaattgctggcctaagtggtgtttgttttgttgtggtcgaagaaagaatcgtaagtcaaagacaacggataagaaaaagaagaacagggaagcctcaaagcagatacacgcgctagaaaatatcgaagagggcaccaaaggcactaatgatgcggcgaaatcaccagaggcggcacaattgaagttggagaagaagtttggacagtctcctgtttttgttgcgtctgctggtatggagaat

SEQ ID NO: 91757 - DNA, 469 bp, Arabidopsis thaliana columbia
  unsure (1)..(469): unsure at all n locations
atccatactcatcataacttcaacctcagcncctaactactaaaaccctnttactataaatggtacgtacacgtaccacttctgctcctcaaattcatcaaacccatttctattccaactcccaaaaatggcgattcgtcttcctctgatctgtcttcttggttcattcatggtagtggcgattgcggctgatttaacaccggagcgttattggagcactgctttaccaaacactcccattcccaactctctccataatcttttgactttcggttaaaatattttactttgccattcccaactctctcacttatttttgttcttaatgttagaaatacatgtttgttctgaatttatattatgaatttatattatggttttcactagtgttagaaatacatgtttgccattccattcccaactctctccataattaactgttttttttctttcttttctttaaaacaca

SEQ ID NO: 91758 - DNA, 1513 bp, Arabidopsis thaliana columbia
ataaattctacgtacacgtaccacttcttctcctcaaattcatcaaacccatttctattccaactcccaaaaatggcgattcgtcttcctctgatctgtcttcttggttcattcatggtagtggcgattgcggctgatttaacaccggagcgttattggagcactgctttaccaaacactcccattcccaactctctccataatcttttgactttcgattttaccgacgagaaaagtaccaacgtccaagtaggtaaaggcggagtaaacgttaacacccataaaggtaaaaccggtagcggaaccgccgtgaacgttggaaagggaggtgtacgcgtggacacaggcaagggcaagcccggaggagggacacacgtgagcgttggcagcggaaaaggtcacggaggtggcgtcgcagtccacacgggtaaacccggtaaaagaaccgacgtaggagtcggtaaaggcggtgtgacggtgcacacgcgccacaagggaagaccgatttacgttggtgtgaaaccaggagcaaaccctttcgtgtataactatgcagcgaaggagactcagctccacgacgatcctaacgcggctctcttcttcttggagaaggacttggttcgcgggaaagaaatgaatgtccggtttaacgctgaggatggttacggaggcaaaactgcgttcttgccacgtggagaggctgaaacggtgccttttggatcggagaagttttcggagacgttgaaacgtttctcggtggaagctggttcggaagaagcggagatgatgaagaagaccattgaggagtgtgaagccagaaaagttagtggagaggagaagtattgtgcgacgtctttggagtcgatggtcgactttagtgtttcgaaacttggtaaatatcacgtcagggctgtttccactgaggtggctaagaagaacgcaccgatgcagaagtacaaaatcgcggcggctggggtaaagaagttgtctgacgataaatctgtggtgtgtcacaaacagaagtacccattcgcggtgttctactgccacaaggcgatgatgacgaccgtctacgcggttccgctcgagggagagaacgggatgcgagctaaagcagttgcggtatgccacaagaacacctcagcttggaacccaaaccacttggccttcaaagtcttaaaggtgaagccagggaccgttccggtctgccacttcctcccggagactcatgttgtgtggttcagctactagatagatctgttttctatcttattgtgggttatgtataattacgtttcagataatctatcttttgggatgttttggttatgaatatacatacatatacatatagtaatgcgtggtttccatataagagtgaaggcatctatatgtttttttttttttattaacctacgtagctgtcttttgtggtctgtatcttgtggttttgcaaaaacctataataaaattagagctgaaatgttaccaaatctaaaaaaaaagggcggcc

SEQ ID NO: 91759 - DNA, 567 bp, Arabidopsis thaliana columbia
  unsure (1)..(567): unsure at all n locations
cagctctccacgactcactatggggaggctggcccgcctgcaggtaccggtcccggattcccgggtcgacccacgcgtccgcaaattccttgatagaaacaaaatggaagacaataaaagaaaagtattagatgaagaagcgaaagcttctctagacatatggaagtatgtctttgggtttgcagatatagcagctgcaaagtgtgccattgatcttaaaataccagaagccattgaaaaccatccttcttcacagcccgtaacactagccgaactctcctccgccgtctccgcctctccctcgcatctccgccgtataatgaggtttcttgtacaccaaggaatctttaaagaaatccccacaaaagatggtttagctacaggctacgttaatacgccactctctcgccgtttgatgatcacaagacgtgatggaaaatcgctggctccttttgttctcttcgaaacaactcccgagatgctcgctccatggttgagacttagctcagtcgtttcttcgccggtcaacggttcaactccaccaccgtttgatgcagtgcacnnnnn

SEQ ID NO: 91760 - DNA, 699 bp, Arabidopsis thaliana columbia
  unsure (1)..(699): unsure at all n locations
acccacgcgtccgcccacgcgtccgcgacgaaaggcgtcccgatattgaggttcgttacgccggcgaagattttcatcggaaacttatctgatcgtttacgccggcgaagatttccatcggaaacttaatctgatcggaaggaagaaggctcgatgaagagcagattgaagagctacaggaggaagaagctagggttagccacagttatcgtcttctgttctctctgtttcctcttcggtttctatggctccactctactttctcagaatgtgcctcgtgttaaacccaggttgagaatgttggatatggttgagaatggggaagaagaagctagctcgatgcctcatggtgttactggagaagaatctattggatcgattccttttcaggtacttagttggagacctagggctatatatttcccgaattttgcaactgcagaacaatgccaagctattattgagagagcaaaggttaatctgaaaccttctgctttggctctccggaaaggagaaacnnctgagaacactaagggcactagaacaagctcaggaactttnatcagtgcttcagaagagagtactgggtgctctggatttttttnaaaggnaaatcggaagngctancgntgntnccaaggtccccatgggggggcaattaatattttnncgggtttgaccttggccaaaagttttntt

SEQ ID NO: 91761 - DNA, 574 bp, Arabidopsis thaliana columbia
  unsure (1)..(574): unsure at all n locations
gatgctggaacgtatgtaatagcaaagataaagaaggaaaatnatgaaggcacttatgtattactgaacggaagtggggctacaccacaagggaatgtgcccttccttgacttgtttgacataaatacaggcaacaaagaacgaatctgggagagcgacaaggaaaagtatttcgagacagttgttgccttgatgtctgaccaaaaagaaggggatttaaaaatggaggagctgaaaattctgacatcaaaggagtctaaaacagaaaacacccaatattctctccaactttggcctgataggaaagtgcaacagattacaaactttcctcatccgtatccgcaattggcttcgttacagaaagagatgatcaggtatcaacggaaagacggggttcaacttactgcaacactatacctaccaccaggctatgatccatcaaaagacggtcctcttccttgtctgttttggtcttatcctggtgaattcaagagtaaagatgctgctggtcaagtccgtggctcgccaaatgaatttgcaggcattggatcaacttctgcccttctttggcttt

SEQ ID NO: 91762 - DNA, 628 bp, Arabidopsis thaliana columbia
  unsure (1)..(628): unsure at all n locations
nnnnnnnnnnnnnnnnnnnnnnnnnnnnnnnnnnnnnnnnnnnnnnnnnnnnnnnnnnnnnnnnnnnnnnnnnnnccacgcgtccgctaacctcgcaaagaaaaaaccatcttactttctttttttttctctgaaaaacctcttttgattaggtttaaagatggcatcaaaaaaagcaagaaaaccaaaccgagccgaaaagaaactcacaagaagctgtttcaagaaacaagttcctcaacacaacaacatcaacacaagtataactctcgatcaaacatctacatctactattgtctctacatgttcttcttcatcaacgactttgtcttctcctctagacacaatctactctgttccctctccatccccagcagcggtgctgacgtcaccaggcggttgttgtaccccgaaagccaagaagtctaggataccggagatgctgacgtgtccaccggcgccgaagaagcaaagggtctcgaaaaactgtgtgttacgacggagacagatcgttttctttgctccgccggagatagagctcttcttcgtcaacgcacacgatcgatgaacgtacttttagttaattattagtatcttttttttttttgatataggatcaatacagaaa

SEQ ID NO: 91763 - DNA, 666 bp, Arabidopsis thaliana columbia
caaaattcatgtggtgtaaattgtctaaagtctgtatttttttttattgacatccattttttttgtgtcgaaagtctatatatgaagtcaaattcatgaacaaatgcttctaggctaaaaacgttatcgtaatctttaatcttcaggcttcttttctaaaattccgactggttaccgagggctagaaaatccggtcaccgtcgccggagacaacctcggtttctaaacgaaaccatcgtgaaggacggaaaaaaggagcttgaagacaaaacaatgacgagcgttttcgacgaacataaaccctccgatgactctcacgagtccaagatcgtcatcaatggagaagaagaggtgttggaggaggagaatgataatccgattgaagaagtccggttaacggtaccgataaccgacgatccaacactaccggtgctaacgtttcgaacatggactcttggacttttctcttgcatattgcttgccttcgtgaaccagttctttggtttccggtcgaaccagctttgggtatcttcagttgcggcacagatcgtgacccttccgctagggaaactcatggcaaagacgctaccgacaaagaaatttgggtttcccgggacgaattggtcgtggtcttttaaccctggtccgttcaatatgaaggaacat

SEQ ID NO: 91764 - DNA, 344 bp, Arabidopsis thaliana columbia
  unsure (1)..(344): unsure at all n locations
gagatttgatcaatttctaaagaaaaccccttcctctactagtcctcctcctatatatacaaaatcttaagaaatctctctacttgtttcctctgttatcataatctcttctctctatatctcttctcttcttcttttaccctgttttttttttcattccacagagaccaggttgatcgattttgttattcagagatatggggagaggaaggattgagattaagaagattgagaatatcaacagtcgtcaagtcactttctctaagagacggaacggtttgatcaagaaggctaaaagagctttcgattctctgtggacgncgaggttgctcttatcatcttct

SEQ ID NO: 91765 - DNA, 577 bp, Arabidopsis thaliana columbia
  unsure (1)..(577): unsure at all n locations
ccagcactattctactcatctagggaaagctgtgccgcctgcaggtgccggtcccctataccccggtcgacccacgcgtgcggtcctcctcctatatatacaaaatcttaagaaatctctctacttgtttcctctgttatcataatctcttctctctatatctcttctcttcttcttttaccctgttttttttttcattccacagagcccaggttgattgattttgttattcagagatatggggagaggaaggattgagattaagaagattgagaatatcaacagtcgtcaagtcactttctctaagagacgaaacggtttgatcaagaaggctaaagagctttcgattctctgtgacgccgaggttgctcttatcatcttctccagcaccggcaagatttacgatttctccagcgtctgtatggagcaaattctttctagatatggatacactactgcgtccactgagcataaacaacaaagagaacaccaacttctaatttgtgcttcacaatggaaatgnaagctgtgttgcggaatnnngnttctntgaaggggggaccttgaaagattacag

SEQ ID NO: 91766 - DNA, 447 bp, Arabidopsis thaliana columbia
cgacccacgcctccgctggctccatcacaaagtgcttcgttctggtacagcgaccatggcagtttttgttcttgtgatgattttgttggccatggctggtcactcaagtgggacatggtgtgtatgcaaagaagggttaagcgaggcaatgctgcagaagacattggactacgcatgtggtgcaggagctgattgtggacccattcaccagaccgggccttgctttaaccctaacaccgtcaagtctcactgctcctacgccgtcaacagcttctttcagaagaaaggtcagtctctgggcacttgtgactttgctggcacagccaccttctcagcctctgatcccagctacactacttgtcctttccctgcaagtgccagtggaagtgggacaacgactccagtgacgacaacaccttcgacaagagtccctacaacaactaatac

SEQ ID NO: 91767 - DNA, 692 bp, Arabidopsis thaliana columbia
ccttcgccttcgcccacgcgtccggttctctcagtggagaagaagactcgagtcatctgcagaaaagattcccgatcggattggatcatataagattttagggatttggaaaaaatcttgagctatggaggcgaatgcggcggtggacggaacggggaatccgatccctacgtcggcggttttaacagcttcggcgaagcatataggaatcaggtgtatgccggaaaacatggcgttcctgaaatgtaagaagaatgatcctaacccagagaaatgcctcgagaagggacgtgacgtcactcgctgtgttcttggcctgctgaaggatcttcaccagagatgcccaaaggagatggatgcttacgttggatgcatgtattactacaccaacgagtttgagttgtgtcggaaagagcaagaagcttttgagaaagtgtgtccgttgaaatgagaaagtcaagtttttatctgtctcctaataagcaaatgttcattttgactctggagcgttactctaatcactcttccatcgctgcctgcttcttttccttttctggtaatggaagacctttaaaccatgtaatattgtcgtgtttcctttgtccagttctcccgagggaaacgattttggttacttgtgcaattgactctcaagtacagagcttaattagtcgtaaacaaggttttctatt

SEQ ID NO: 91768 - DNA, 767 bp, Arabidopsis thaliana columbia
gttgaagatttaaacggaaacgctaaagaatacaatcttattgatggtggagttgcagctaacaacccggctttgttggccattggggaagtaacaaatgagatctcaggaggaagcagtgactttttcccaataagaccaaatgattacggaaggtttcttgtgctttcgcttggaaccggaaatcataaagccgaagagaaattcaatgcaaaagaagtagctggttggggactattgaattggttaacacacgacaactctacacctatcattgatgctttctcgcaagctagctccgacatggttgatttccatctctctgccgtttttcgagctcttcattccgaagccaactatattcgcatccaggatgacacattaactggggatgctgcttctgttgatatcgctaccgtcgagaatctggacattcttgccaagacaggagatgaactacttaaaaaacctgttgcaagagtcaacctagactcgggttgtaacgaaaatgcttatgaaacgactgatgaacatgctcttataaagttagcaggaatactttcaaaagaaaagaagatccgagacattcgttcacctcatgcaaaagctccaattaggatctaaagagatcaattattgtatcttgtatattgttgatgattcgtttgtttcactaatgcacgtttggatttatattaataaaaaggttgcaccacattgtggtcacttgtacgtttgaataaagtcaataaatatttaatggatgc

SEQ ID NO: 91769 - DNA, 1150 bp, Arabidopsis thaliana columbia
  unsure (1)..(1150): unsure at all n locations
gatacttcagctctatacgacttaattttgggaaggttggtccccttgcaggtcccggtccggatttccgggttcgaccaagccgtccgtccggttgcaaaagacaacaggaggggttgaagatttaaacggaaacgctaaagaatacaatcttattgatggtggagttgcagctaacaacccggctttgttggccattggggaagtaacaaatgagatctcaggaggaagcagtgactttttcccaataagaccaaatgattacggaaggtttcttgtgctttcgcttggaaccggaaatcataaagccgaagagaaattcaatgcaaaagaagtagctggttggggactattaaattggttaacaccggacaactctacacctatcattgatgctttctcgcaagctagctccgacatggttgatttccatctctctgccgtttttcgagctcttcattccgaagccaactatattcgcatccaggtatcaaaatcagctagcgcactaaccatttctttttctttgtctccacaattcctaagatttgggtattaattatataggatgacacattaactggggatgctgcttctgttgatatcgctaccgtcgagaatctggacattcttgccaagacaggagatgaactacttaaaaaacctgttgcaagagtcaacctagactcgggttgtaacgaaaatgcttatgaaacgactaatgaacatgctcttataaagtaagtggcccaatttttgcattttatagctttattctttcatacttaaggtgattaaaagtattttgctaatatatttaaattttggttgtgaaggttagcaggaatactttcaaaagaaaagaagatccgagacattcgttcacctcatgcaaaagctccaattaggatctaaagagatcaattattgtatcttgtatattgttgatgattcgtttgtttcactaatgcacgtttggatttatattaataaaaaggttgcaccacattgtggtcacttgtacgtttgaataaagtcaataaatatttaatggaaaaaaaaaaaaaaagnnnnnnnnnnnnnnnnnnnnnnnnnnnnnnnnnnnnnnnnnnnnnnnnnnnnnnnnnnnnnnnnnnnaacgaaagtcaac

SEQ ID NO: 91770 - DNA, 725 bp, Arabidopsis thaliana columbia
  unsure (1)..(725): unsure at all n locations
atctggatactctatcactttttccttcaatcccaatccattttttgaagatggaaaactgacaaagacttttacctttctcgaagaagggacaaccaaaatcacagccacgcctatcaaatggaaagagggcaaaggcctggcgaatggagtgaatcatgagaagaatggaaacaaacgtgcactacctgaagagagcttctttacctggtttagtgatgctcaacacaaggaggatgttgaggatgagatgcaagacgagcaggttgcagatatcatcaaggaagatttgtggcccaaccctctcacctacttcaacaatgacgctgatgaagaggactttgatggagacgatgatggagatgaagaggagaaagaaggtgactctgatgaagatgatgacgaagaagacgaagttggtgaggaatgatggcagggatacccagaaaccacatttgcttacatgtcttctctataacagagtgtgtaaagttttgtgtgttgaaaggtttttaattttaagcaaaagtggattatgacgacaacagacaagcttttaattttattttaccgtaatagttatatcttgttgtaagaaaccattttcagccttttgttggaaaatcctgcttaataaaaacaacaaaaaaaaataaannnnnnnnnnnnnnnnnnnnnnnnnnnnnnnnnnnnnnnnnnnnnnnnnnnnnnnnnnnnnnnnnnnn

SEQ ID NO: 91771 - DNA, 528 bp, Arabidopsis thaliana columbia
tatacgactcacttagggaaagccggtacgcctgcaggtaccggtccggaattcccgggtcgacccacgggtgcgggagaaccatggcgggtaagcagatcggcggagacggaggtttaccggcaaatctcgccggaatgactaaaagtcagctctatgatattatgtctcaaatgaagacgttgattgatcaaaaccatcaacaagcgagggagattctgattcggaaccctcttttgacgaaggctcttttccaggttcttcttcacttcgctaatcttttccatcttctaaatctgcaatccgtgtggtcttataagcaatgaggaattctgatttggagcttcttacttgagtaaattgattggactagtttgggtttagtattgttgaagaagcaggcacaaatcatgctcggaatggttcagcctcctcaagtgactccgaaaggtgagccacaagctgtacaacaacctcaacaatctcatcaatctatcccgccaaagccaaacgttcaagctcatatgt

SEQ ID NO: 91772 - DNA, 485 bp, Arabidopsis thaliana columbia
tcgaccacgcgtccgcccacacgtccgcatttctgaaatctctcaacttcatcatcaagtgggttcctatgagaggggcgactctttgattgcttcgccacatcttttatttttatccttctaagtcatttctctatctatccatatagataaaaaccttctaatagatctctgtgtcattttattcgtaagaatgagatctagtgtagaagataacaaaggatggataggaccagcgacaccggagatatcgaacggttttgagtttcagaaaggttcgaaccggacaccaaaccatcaccggtctactatggggaagccagcgccgtcaaaatgggacgatgctcagaaatggctttctggtgtagggtttgctcgtggaggtggtggaggtggtgacaagagtagtcatcactcaagaagtaataagccgagaaactcgcacgcggatgatgctagacttatagctttagcttcacagagag

SEQ ID NO: 91773 - DNA, 486 bp, Arabidopsis thaliana columbia
aggtggctcagttcagcagccctaacctcaatgtagcttacaaaatgggagtccgtgagtaccaagacctcactccttatgcaaatgccctggaagaaaactgggggaaacctccggggaaccttaactcagatggagagaaccttcttgtctatggaaaagcgtacggtaatgttttcatcggagtgcaaccaacatttgggtatgaaggtgatcccatgaggctgcttttctccaagtcagcaagtcctcatcacggttttgctgcttactactcttatggagaaaagatcttcaaagctgatgctgttcttcattttggaacacatggttctctcgagtttatgcccgggaagcaagtgggaatgagtgatgcttgttttcccgacagtcttatcgggaacattcccaatgtctactattatgcagctaacaatccctctgaagctaccattgcaaagaggagaagttatgcccacaccatca

SEQ ID NO: 91774 - DNA, 446 bp, Arabidopsis thaliana columbia
cgccgacgctcctcctccttccattcttggtcttcgtatccataattcttccctcaagctgccatggcgaatgggaaatcctcacggagcaaaacttctcttctcagatccgtctccaccctcacgtcctcctctttgtcaccactccatggtgtggtgagtccagatctcttaagtatgaaattactcagatggttcagagaagagaagagtttggcttgttgaagttaatggttgtatacagaaactcagaaaaggtgttagcacaagccattggtgctgctgtcaatgggataacaattttgtactatcacaatagtgtgccttacaactatctagggaaactccgagcctcgaatatattgtcatctattcatccttatctgacatctacgcctgaagaactccctctaaacatttgaagtctccaaagagtttgaaagatt

SEQ ID NO: 91775 - DNA, 451 bp, Arabidopsis thaliana columbia
  unsure (1)..(451): unsure at all n locations
tcgaccacgcgtccgatcggagcattgagcaacacaatggaggaggaaccggagagaaggaaagctatcgctctcttcatggctttcggtaccaaaggcgatgtctaccctctcgctgccattgccgcagttttcgctcgtgttcaacaacactacactgtggttttgatgtcacatttggctcatgagaacctaagctcccatttgagtaaagcaaaagtttcatattttcctatcaattctcctcctgctctgtctaatgaacctcagggtactcaaaacgtcacagactcgctgaggaaaatgtttttggaggaaaaagaaaggataaaaagggaacacagacaagagtgtcattctgcattcagaaccattttcggaaaggatccttgtatggagggtgatttcgntgtcataaatttctttgcattggaaggatggagcctagcag

SEQ ID NO: 91776 - DNA, 868 bp, Arabidopsis thaliana columbia
ctaattcgattaacttagggaaggctggtacgcctgcaggtaccggtccggaatcccggggggggcgggcgtccggtgatttctctgtgatgcctcttgttgttgctcatgtgacaagatttgcatggggaggttactcaattggaatcgggacaagccactctctattggagggaatctcagctgacaaattcattcaacgcttgggggcgaagtctcacattcacggcaaatccaacaaaaagattactaataaaagggaagatgtgggcataaaccgggtcatgatcgacgatatctactggttaaccgggattgtcccggaaaccatgctggaaccctttgtgatctggaccagttgatcaaacgggggataataacctatcaggagccaaaaccggaacttaaagttaccagactctgggttttgggatcaaaacggtcgagcttaatgggcatgcaatggaaaggattaaaaaaaatccctgggaggggggcatgggctcctcctttaaggttcctggcggcaattgggggaagggaaaaccaggggctttagggtgagggagaacgcctggggtggatacatttccaggggacataaggaaaaacggggaccccgggcgcaaagggtttccgggacggatcggtgttgcctgggggcttcaccccggaaaatcttagagagctcccctcgttaaaagcaaaagacgggaagccaaaaacattggccaggtactaactttacggaaaccccggggggatggcgaaactctcctttaagggtaccctactcgggggaaaagcctttaaaggggtttggacgggggccaggaattggcctggtcccgggcaaaggttttataaa

SEQ ID NO: 91777 - DNA, 518 bp, Arabidopsis thaliana columbia
cttcgatactcgtctgggcatggcgtttttgctcaacaacgcttcaatttcatctcatttacgctcgtcttcttcacagacgggtgatgctttatcaatatcgcgtcgtggattccacattgagccaggaactcgagagaaagctctcttggctgaagattctgctttgaagagattcaagtctcataagaaaagtgtgcacaaactgaagaggattggtgatgtgctcactgttgttgttgttgcaggatgttgctatgaaatctatgtcaaagctgtgatgaaaaaagaagctctggctgcagggaaaagctcatgagtgttcttgtctttgtatgcctttttgttttatcctttatacagtgtctctttctaataatctcacaataatgtttgtttactcaatgaaaatggcatctaataaagtagactaaaagaaaaagacattgtccagggaaaccaaactctggttttttctgacgttgtgatggaatacacgctttttcttcttttttcac

SEQ ID NO: 91778 - DNA, 476 bp, Arabidopsis thaliana columbia
cactataagtttcaaacttttggcaaattaagcggtttttgttaggttttaattattttttccgatgatgaagcggcgatgagtgtcgtcgtcggagatagatcggagagtactctgatgcggagtgactataaagctcctccgagtcaagctattcccaaagctcgattacaagtttggttctttagagtttgttcttgcattttggtttggacttgtttgattcagctcttttggcattcccaaatcttcactggtttaaccaatcacatttctagattctctctcccggttcagtcagttccattacctcctcctcttcctccaaggaattacacaagtaatggaattttactagtgtcctgtaatggcggtttgaagcagatgcgtgcagcgatttgtgatatggtgactgttgctaggctattgaatttgactcttgttgttcctgagcttgataaaaaatcattctgggc

SEQ ID NO: 91779 - DNA, 214 bp, Arabidopsis thaliana columbia
gcccggcggagtcagcacgaagggatcaggcaaaaactagaaaaaacatgcagcttgctttaggtagtgaaaggaagaagaaataaggatgtactttagcatcttgatcatgtttaggagtttgtaatggcattagttttaatggaataagaacctttctacaaaaaaaaataaagaattggtcctatgtcttttattggtttcaaaaaaaaaa

SEQ ID NO: 91780 - DNA, 459 bp, Arabidopsis thaliana columbia
cccacgcgtccgcccacgcgtccgcgcatctttccaaatggtgttggacatataaatgaagccggaatcgatcactacgacaaacgcataaatgctttacttgctaaagggatcgagccgtacgtgacactgtaccactgggatcttccacatgcacttcatgatcgatacctcggttggctaaacccacaaatcataaatgattttgcagcgtatgcggaggtttgtttccagagatttggagatagagtgaagcactggatcacgttcaacgagccacacacgttcgcgatacaaggctatgatgttggcctacaagctccaggccgttgcactattctttttaagctcacttgtcgcgaaggaaactcatcgaccgagccttacattgttggtcacaatgttattttaactcacgccacagtatccgatatctataggaaaaagtataaggcaaag

SEQ ID NO: 91781 - DNA, 600 bp, Arabidopsis thaliana columbia
  unsure (1)..(600): unsure at all n locations
cggtacgcgtgggctcttggtaagcattcgagagacgaagacgagacggtgaagcaaaaacagaggaatggatctgtattggttccaaagactttgagaattgatgatcctaatgaagctgcaaagagttcgatatggacaacacttgggatcaagaacgaagttatgttcaatgggtttggttcgaagaaagaggttaagctcagtaacaaagaagaaacagagacctcacttgttctttgtgcaaaccctgctgcgttatcaagatcaatcaatttccatgagcagatgtgattgtatacatatgatatatacgtgtatgtatgtatagatgtggtggaagattaagttagatccatcaaaatctgacttttttgttctttcgttgtggcttacatgaagctttataatagcttttgtaccatatactttttagtcttttaagtttgatttttgttgtaagattaaatacgatgaaataaaagttctttttgaccaaaaaaaaaaaaaaaaaaaaaanaaagggcggccgctctagaggatccaagcttacgtacgcgtgcatgggacgtcatagcaattctatagtgcgtcctaaat

SEQ ID NO: 91782 - DNA, 1245 bp, Arabidopsis thaliana columbia
  unsure (1)..(1245): unsure at all n locations
aaaaaaaacaatacatctttccattgaactagaataaaacattttcactgtccttttgaatcagaagaagaaagagaaaaaaaagagatggagagaaacacgccggtgagaaaccctcacacttccaccgccgatctgctttcttggtcggaaactcctcctcctcctcaccactcaaccccttccgccgctcgttctcaccagccgtccgatggaatcagcaagattctaggcggtggtcagatcacagatgaagaagcccagtcgcttaataagctaaagaattgttcagggtacaagttaaaagagatgactggtagtggcatatttactgataagggaaaagttggatctgaatccgatgctactactgatccaaagactggactccgttactatcagcagactctgaatggaatgagtcagatatctttcagtgctgacggtaatgtttccccgaagaaaccaaccactttaaccgaggttgcaaagcaaagagagctgagcgggaacttgctaaccgaggcggatttaaagagcaacaagcagatatcaagtgctaagattgaagagatcagcggtcatgacatctttgcacctccatctgagattcagcctcgatctttggttgctgcacagcaagaagctagaggtaacagagacatgggagagcctgcaccaaggaacttacgcacttctgttaaagtttccaaccctgcaggaggacaaagcaacatactattcagtgaagaacctgttgtgaagacatcaaagaagatacataaccagaagtttcaggaactcccaggcaacggcattttcaaaggcgatgaatcacctggtagtgcggataagcagttaagctcagctaaactccgtcaaatgagcggaagcaccattttcgcagacggaaagtcagagtcccgagactactttggcggcgtgaggaaacctcccggaggtgaaagcagcatttcattggtctaataagtaagactcggggctgtatggtattatccgcgcatatgctcaactctcacatttcagcttctttagaatttagtttcttagagtctgaagagagctcattgtacggatcctttaaaaccttttggtgttgtctctaatacttgaagtttcttacctgtttctcaaaaaaaaaaaaaaaaagnnnnnnnnnnnnnnnnnnnnnnnnnnnnnnnnnnnnnnnnnnnnnnnnnnnnnnnnnnnnnnnnnnnnnnnnnn

SEQ ID NO: 91783 - DNA, 557 bp, Arabidopsis thaliana columbia
  unsure (1)..(557): unsure at all n locations
caaaagtcaactgagaaaagcgttgagaatatgaaaggtgtcagatgtaaaagggtgtcaagatctattggctctgtaggtctttatgtgcctggtggaacagctgttttnccatcaacggctttgatgcttgcnattcctgctcaaattgctggatgtaaaacagttgttcttgcaactccaccaagtaaggatggaagcatttgtaaggaggttctgtattgcgccaagagggctggtgttactcacatactcaaagctggtggagcgcaggctatagctgccatggcctgggggacagattcttgtccaaaggttgagaagatttttggtcctggggaccagtatgtcacagctgctaagatgattcttcagaaccagcgaggcaatggtctcaatcgatatgcctgctgggnccttcagaaggcctaggttttnctnacggaccatgctagtccagtttacaattncagcaancttncctttttnagggggggattggccccgatagncaanttgtcttgtagttntgggggntantttagncttncgncacc

SEQ ID NO: 91784 - DNA, 437 bp, Arabidopsis thaliana columbia
tcgctcttctacccactttattcacctacagaccaaaatgggaaggtggtcagtatgaaggtgatgaaaatgagagacgggatgtgcttcgtctggccatggagttgggagctgattatattgatgttgaacttcaggtggcaagtgagttcatcaaatctattgacggaaagaagcctggaaagttcaaagtaattgtttcatcgcacaactatcagaataccccttctgttgaggaccttgatggccttgttgcaagaatacaacagactggagccgacattgttaagattgctactactgctgtggacattgcagatgttgctcgcatgttccatataacctcaaaagctcaagttcccacaattggacttgttatgggtgaaagaggtttgatgtctcggattctttgttcgaaatttggtggttatttgacc

SEQ ID NO: 91785 - DNA, 505 bp, Arabidopsis thaliana columbia
agtacacaaagctcacattcactccaacccaagcagaccgttttgttctagcattcagaaactggctcagacggcatggcaagagtcagcctgaatggttcggctccaacccgtctaatcaacctctcccttccactgtcttaaccaagcgccagatgctagatagatttgatcagcatacacaagtatgctcttcctgcaaaggagcttacaacagtttccaaatcctcaagaagtttctcgttggcgccacggttttctgggccgccagcgctggtgttccgtctgatgttcagattcgactggttcttgctggtttatcactgatatcagctgcttctgcatatgctttacatggcgtccggaagaactttgtgtttagagattatgtacattctgaaatcgagtagatttgttgtgtatatgtataatcatcatacaaagtacaaacattgtaaatcaaaatccagaggaacttttagacctaaaaaaaaaaaaaaaagga

SEQ ID NO: 91786 - DNA, 528 bp, Arabidopsis thaliana columbia
  unsure (1)..(528): unsure at all n locations
gccggcacgcctgcaggtaccggtccggttttcccgggncgtccatcgcgtccgcggacgcgtccgcccacgcgtccgaacttttctgataacatcggagtaaaaggaaagtaagtcggagtttaatcatcttaagatttgattgaatggctacgctcactgaaatagcaacccttgaggagaagtatatcgaattgtgcaagatgcatggaatcctacccaacactgccattttatctgctttctttgaggcggaggttaaaaagtcaaggaatcaaagatgcattatgaacctttacgtggatagagtgaagtacgatgactatctcccgcttctcgagttatgcaatgagatcaacacatctgaggtacaaggaatagatctatttgtgagatccgcttgttcgttagaagatcattatgcattgcccttaatccgttccgtcaatcaaaaactccgagttgttcatctacatgactctttcgggaaaaacttctggcaggacgttttctttcaaggtttgagct

SEQ ID NO: 91787 - DNA, 552 bp, Arabidopsis thaliana columbia
  unsure (1)..(552): unsure at all n locations
acgcggcgggtcgggcgcacccggggcccgcggccggtagtatcgccgnnnnnnnnnnnnnnnnnnnnnnnnnnnnnnnnnnnnnnnnnnnnnnnnnnnnnnnnnnnnnnnnnnnnccacgcgtgcgagttcggctcccacaggggaaacaaagcgaccgttttgctcatcattatttatagccgccggcgaattgatcggtaaaaaaaaaaacttccgacgtttctacaaagttgcgaatcatgatctacctctctagacgctcactctcttctcttctccgatccggtttcaatctccgcggcgatcttacagcagcagctgtctcttgttcctctctcttctccgacgcggacggtgggattaagaagttacactcgcgagctgggaatgcagtgttatggagaaatagtcagctatgtagttctcaaggaagcttttttggacgaggaggacaagtctcaggttctgtgtttcgatgtttctgcagggggagtgatacttctcctcctagcttgggatcgggagtttttggctcacctatgggttgcc

SEQ ID NO: 91788 - DNA, 710 bp, Arabidopsis thaliana columbia
ctcataacaacaaaaaaacaaaaaaaaaacctaattagttttttctttctgcagagattatggaggtaccggtgattaatagaataagagatttcgaagttggtataaactcgattaatgatccttcgtttctttctcgatctgttgctgtttccggaatcggaaagctacaccaagcttatggtttttggaaatggggagctttgattatcgcatttctagcttatttcaccaactttgttagtaaactcaacagtctagttgttaggttaagaaaaatagatgtctctgtttcctctccaactctttttgatgattacgatagcgattccgatgtttcttgttcctctaccgtctcctctgacgatgaaaaagacgaagaagatgaggctgatgatgaagatgaggatgttgactcgatctttaatcgaagacgagtcaacggaggtttccgcgttagaggatctgattattacgatgatgatgatgatcagggagacaatggtaattgcacatggatggggaggcgatatagtggtagttttggagatttgttctcatggcctgatcttggtgggattggttcgagtggagtcgtgaagctttgggatcatttagatatcgatggcgatgatcatgagaatgttgtggcaacgtttctcaagaactataactcaacctcgtcaccgtttttttgggcggcggagaaa

SEQ ID NO: 91789 - DNA, 450 bp, Arabidopsis thaliana columbia
ggcccgcggacgcgtgggtcttcttcgtcttctttttttttcgtaaaaattcttcttcttcttcttcttctccgagctccgtccgagcagagaagaagagtaaggtaagttttagagtgcacttgtgtggcactctcatttcttatcctgcgcctcttacgatttcttatggtgcgcttctccgactagtttcggtgtctaatggactcttcctcttcttctctatctctccaagaaaaaatctcttctggttatttctagggtttcgttggttcttttttcgaaatgctttggataacgagatttgctggattattctccgccgcgatggcagtgatcgtgttatctccgtcgcttcagtcatttcctccggcggcggcaatccgttcttctccatcaccgatcttcagaaaagctccagcggtgttcaacaacggcgacgaatgtctc

SEQ ID NO: 91790 - DNA, 421 bp, Arabidopsis thaliana columbia
atgttggatggagaacccgtgggtttttgcgcggttggcagttccagaataccttatttaacaacatcaagttcatgattctctgctgcttcgtgaccattctcatcctacttggcacaatccgtgttgggaaccttggaagctccaacgccgactctgttaatcagagtttcatcaaggaaaccattccgattctcgcggagatcccctctgattcgcattcgacggacttggctgagcctcctaaagctgatgttagtcccaatgcaacgtatactctagagccaagaatcgcggagatcccatctgatgtgcattcaacggacttggttgagctgcctaaagctgatattagtcccaatgcaacgtatactctaggccccagaatcgcggagatcccatctgattcgcatttgacaga

SEQ ID NO: 91791 - DNA, 555 bp, Arabidopsis thaliana columbia
  unsure (1)..(555): unsure at all n locations
ccgaaactttcgtgctttcacggacctacaagagcgtcactatattctaccaatgctcctctgtgcttcctaacctttctagctatacatgtcctgagataggtcccatctcagtgtctgaaagccctgaaaaatatcctgagagctgtcgttccagtttcaccgtgaaggttcccacgagtttcgatacaaaagagaaagagttgaatgtgaccaatttggaaagtgttttaagaaaaggatttgaggtgacggcggtgatcaatgagaatacatgtcaggaatgtttatcctctcttggaagatgtcatgtcttcaacgaaaacttaacaccaggagttaaatgtcgtccaccaagtgactctgagggttcttgtggatataatcagacctcaagtacgttcctctgctattgtaaggatcccgtattggcctatcatgcagttcgggcaaatctaattattagatggttaataggtggtgtnttgancttnnatncncatnggtctcagggttttatggttncctgggtgtntctttnccctattttcccgg

SEQ ID NO: 91792 - DNA, 520 bp, Arabidopsis thaliana columbia
  unsure (1)..(520): unsure at all n locations
atgattgccnnnnnnnnnnnnnnnnnnnnnnnnnnnnnnnnnnnnnnnnnnnnnnnnnnnnnnnnnnnnnnnnnnnnnccacgcgtccggttttgccatattggttcccgtcaaatctcattggaccggagtagtatagatttcttcaaggccaatatcgtttcttcagagagaatcgaacggaagatcggaacaagatgatgtccggcgggaactacacgactatagacagccagaaagtctctggatctgtaccttctgttccagatccaggccataccaccgtcaaattcgcagagtcaaatctacaaacttttcctccatctgctactcagggcaagatctctggtggtagtaatccccctcgtgatgctgacgattcattttctgggcatggtaatggtagtacagatgaacctcagtctggtggctggcttcataaattcactgttggtgcttacaagcccttctttgatgtcgacacttccgatgtagttgagagactcaaagaatccctttt

SEQ ID NO: 91793 - DNA, 611 bp, Arabidopsis thaliana columbia
atttaatgcatgatgagagaaagcatgggataaagtcttcttgttacttatttatatttctttccatctatcatggggataatgtatacatatttgcctacctacatagtatatatgcatgtatgtgagtatatataagttaagtctttctcactttgcacaacatctctatgtgctaaggcatctctttctctccctttctcaccaaatactctctcaatttctctctgccactctctttctctagagattttcataatgaaaggtaccaagaagaagacgccatgcaacaaaaagcttggaggatacttgaaagagcaaaagggaaggctttacatcatcagaagatgtgtggtcatgctcatttgttggcatgactaatttacaacttatatgtgttatatatacatgcatatgcacatgcatattatagacaatatctacgttgtactacaacggtttgattgaagaaagggatcggatcttcgtggttgtggcgatttgtgatgtgagcggagttcgcaagatagagatataagggcttccaaccattcatatcatgtatatgagtttttactcgtatatgagttaagataataatttttgagtta

SEQ ID NO: 91794 - DNA, 433 bp, Arabidopsis thaliana columbia
gatttaagtacagttcccgcattgttcagattctctaagattcattcatcaatctgacttttcccgggaaaattcactgtctctgagtccaaacccgaatccagcgatgatgtcgaacttggtagagccatcgtggcgccttctggcagcgagcggcggagatacggttaagcttttcgacgtttctgccgattccggcgatccctgcgttttgagctatactccgtcacctggttgtgctgtcaactccgtcaagtggaatcatacgaatttagtggtggccagtacgggagaagataagaagatatccctgtggcggaaaaatgggcagagtttaggaacagttccagttactgggaaggacggtggtgatagtgctgaggaatgtttatcggctattagcttcagcaaaaaaggctccaggtacatttgt

SEQ ID NO: 91795 - DNA, 1387 bp, Arabidopsis thaliana columbia
  unsure (1)..(1387): unsure at all n locations
gccatcctttgtccagactcatcccaaagcatgtacacgcagatgctttgtggtctccttatgcgtcacgaagtcctccgtctcggcgccgtcttcgcttctggtctcctccgtgccattggattccttcaaaccaattggaaagaactcgccgacgatatctccaccggtacctttaagttcaagaatctctgacccggccattaaagagagcatgtccaagatcttgaccaaaccggaccaagaactggctgatttcataacttcggtatgtggtcaagacaatagttgggaaggtattattactaagatttggcctaacactaagtaccttgacgtcatcgacgcgtgggccatggctcagtatatcccgatgcttgagtactatagcggcgggttaccgatggcttgcacgatgtatgcatcgtccgagagttactttgggatcaacttgaaaccaatgtgtaaaccttctgaggtttcttataccattatgccaaacatggcatacttcgagtttctccctcatcatgaagtcccaaccgaaaaatccgaacttgtggagctagctgatgccgaggtcgggaaagagtacgagcttgtgatcacaacctatgctgggcttaaccgttatagagttggtgatattcttcaggtgactggattctacaattccgctccacagttcaagtttgtgcggtggaagaacgttttgcttagcattgagtcggataaaaccgatgaagctgagctccaaagcgcggttgagaacgcatcgctcttacttggagagcaaggaactcgtgttatcgagtacacgagctatgcagagacgaagactatacctggccattatgtcatttactgggagcttctagtgaaggatcaaaccaatcctccaaatgacgaagtcatggctcggtgctgcttggaaatggaggagtcgttgaactctgtgtatagacaaagtcgggttgcggataagtcgataggaccactcgagatacgtgttgtgaagaatggaacgttccaggagctcatggactatgccatctccagaggcgcatcgatcaatcagtacaaggtgccgaggtgtgtgagtttcacgccaataatggagcttcttgactcaagggttgtatctacacacttcagcccagctttgccacattggtcaccagaacgtcgtcgttgagaagattttggtttgtgttaggatttgtgagtcgtacaataagttcggtgtacggatgtttaccccatcaatgttttttccactctgtccctcctttgtctgatttctaattaataaacaatttaagttnnnnnnnnnnnnnnnnnnnnnnnnnnnnnnnnnnnnnnnnnnnnnnnnnnnnnnnnnnnnnnn

SEQ ID NO: 91796 - DNA, 448 bp, Arabidopsis thaliana columbia
tcttcatttagtaatccttcgccggatcggatcatcgtttctcagattcctctttttaagtttcttccttcagaatgggtaagtaccaggtcatgaaacgtgcaagtgaggttgatctttctacggtcaaatataaagctgaaaccatgaaagctcctcatttgactggcctttccttcaagttgttcgttaatttgcttgaagcaccacttataggctctttgattgttgattatttgaagaaagacaatggcatgacaaagatttttcgcaacacagttataccagaagagcccatgtttagaccggagttcccatctcaagaaccggagcatgatgttgtcattgttggcgaagatgaaagtcctatagacagattggaaacagccttgaaatgtcttcctcagtatgatccttctcgtagcttgcatgcagatccagtgtcatc

SEQ ID NO: 91797 - DNA, 388 bp, Arabidopsis thaliana columbia
ctcggatctttctctaatcgccgatcggaatccgccatgggagtaccggcgttctacagatggctcgctgaccgatacccgaagtcaattagtgacgtcgttgaagaagaacctaccgatggaggtcgtggtgaccttattcctgttgatatcaccagacctaaccctaacggcttcgaatttgataatttgtatctcgatatgaatggtatcattcatccttgtttccatcctgaaggaaagcctgcacctgccacgtacgatgatgtatttaaatcaatgtttgagtacattgaccatctttttactttagtgcgtccgaggaagattctttatttggctatagatggagttgcgccgagagcaaagatgaatcagcagcgttctc

SEQ ID NO: 91798 - DNA, 419 bp, Arabidopsis thaliana columbia
cccacgctgtccgaaagatatcagaagaagagagaagtctcctcccaaaaaaaccaaggaaaaaaaaaaaaaaaagagaaagaaaagaactcgagtgcaaaaagcttctctcttccttcccatggggtgcatttgaactaatctcctccttgaaatcgcttgattgattgttataaatcgattaatcgattcaaaccgttggatattattccaaaacaacccaaaaagagaatcccatgggaagttgtgtttcgtcgccattgaaaggctctccttttggaaagagaccggtaagaaggcgacacagtagtaatagcagaacatcctctgttcctcgtttcgattcttcaactaatctttcccggagattgattttccagccaccaagccgcgttctccccgagcctatcggtgatgga

SEQ ID NO: 91799 - DNA, 1425 bp, Arabidopsis thaliana columbia
aatagttaattgatacgatctagtagtttagtgaatttgtatgcatgcgctattttatttgagcccgcttagctcagaggttagagcatcgcatttgtaatgcgatggtcatcggttcgattccgagagccggcttttccatattttttcgtttttttttacatgatttttaatgtactttcaaaatcaaagaagatggaaaagacttctttgacctttttccaagagttaccactccatttatattatgtcatataaacttccatattaggaatatatattgggtaaaagagtttgatctttgcaaaattaatcaagaaaataaaggaaaatttttgtgatttagttgatttatatatattgtatatacaataaaaaaaatctgtatattgagagaatatatcttcttactctttgtattccaatagtggagtgtatttcacgtcatttatcattatcatttagttcagttttaattttatttagttttgtacaatttcaatcaaaaaaggagtctttatgtcacgttaccgagggcctcgttttaaaaaaatacgccgtctgggggctttaccgggactaactagtaaaaggcctaaggcaggaagcgatcttagaaaccaatcacgctccgtaaaaaaatctcaatatcgtattcgtttagaagaaaaacaaaaattgcgttttcattatggtcttacagaacaccaattacttaaatatgtgcgtatagccggaaaagccaaggggtcaacaggtcaagttttactacaattacttgaaatgcgtttggataacatcctttttcgattgggtatggctttgactattcctcaagcgcgccaattagttaatcatggacatattttagttaatggtcgtatagttgatataccaagttatcgctgcaaaccccgagatattattacagtgaaggatgaacaaaactctagaactttggttcaaaatcttcttgattcatctgcccctgaggaattgccaaaccatctgactcttcacacattccaatatgaagggttagtcaatcaaataatagataggaaatgcgtcggtttgaaaataaatgaattgcttgtcgtagaatattactctcgacagacttaataaacctaacttaagtaaaaaaaaaaattactaaaaacaagagttcggacaactccccttttccattaaaaataaaaaggcacaaggtaagggattttgtcaaagaatatttttcctattcatgtatcatagattggtagggagattgggatcccttgtttgctcttcccagcattttccatatggaaggaaatttggggtagagaatctatttcaaaatcaaaacaaggtagatcttatatcgattcttttttattggatttgatacattgtggtcaatcacgtaagattggtgaattt

SEQ ID NO: 91800 - DNA, 796 bp, Arabidopsis thaliana columbia
  unsure (1)..(796): unsure at all n locations
cgnnnnnnnnnnnnnnnnnnnnnnnnnnnnnnnnnnnnnnnnnnnnnnnnnnnnnnnnnnnnnnnnnnnnnnnnnnnnnnnnnctttttttttttttttactttcatgaaaagaaatttattattattattattgaaacttagaattctacaatgtgcaatggaaaaaaattataagtctacttcgtaaatttgaaattctaataattctatactattctatgactatatagatatatatatagaattaaggttatgttttatttatttaatgatgaatgatagtcactatttatgtgagctatattctgttctagaatatatagaatatcattaattctaactagataaggaaaaatattaatagaatagttaattgatacgatctagtagtttagtgaatttgtatgcatgcgctattttatttgagcccgcttagctcagaggttagagcatcgcatttgtaatgcgatggtcatcggttcgattccgatagccggcttttccatattttttcgtttttttttacatgatttttaatgtactttcaaaatcaaagaagattgaaaagacttctttgacctttttccaagagttaccactccatttatattatgtcatataaacttccatattaggaatatatattgggtaaaagagtttgatctttgcaaaattaatcaagaaaataaaggaaaatttttcggacgcgtgggtcgtcccgggaattccggaccggtacctgcaggcgtgccagctttccaaatagtgagtcgtatgtgagctggaagaatcat

SEQ ID NO: 91801 - DNA, 455 bp, Arabidopsis thaliana columbia
aatcactcaaccattaaaccccattttgatctctagttttttaaaagcaggagattttccttttcccagaaaagaaatttcccaaatcaaagtttcgagctttcacttctcgacttgcaaattctcgtcctttttactgaattcgatctgggtttttgtttttgattagtaaaataacaaaaaaaaaaaaaaggatttatcagaaatggctgcgagcgatgaagttaatcttattgagagcagaacagtggttcctctcaatacatgggttttaatatccaacttcaaagtagcctacaatatccttcgtcgccctgatggaacctttaaccgacacttagctgagtatctagaccgtaaagtcactgcaaacgccaatccggttgatggggttttctcgttcgatgtcttgattgatcgcaggatcaatcttctaagcagagtctatagaccag

SEQ ID NO: 91802 - DNA, 537 bp, Arabidopsis thaliana columbia
acgcctgcaggtaccggtccggttttcccggggggacccacgcgtccggagccttttaaagttttttttttaccttctcttcatggacttgtctgtacttgataggcttaagtggctgcaacagcaacaaatggtttcacctgagtttcttcagatacttggctcagatgggagagaagagctcaaaagagttgagagttacttgggaaacaacaatgatgagctgcagagtttcagacattttcccgaattcggaccggattatgatactactgatggctgcatttctaggacaaggagcctccatacggagccagggaagaataatggacacagcagagcccttaccctgcagaacaagagaaacccagagggtaggaccgaaaggagagagaagaagaagatccaagccgaggatgaaacagagcccagcttgaaagggaaaccaacctgaggacccagagactccttcagaaatcacgaacccgaatcacatctggtaggccaaacgaggggaacccccgccagaaaagctaa

SEQ ID NO: 91803 - DNA, 577 bp, Arabidopsis thaliana columbia
attttctttcattctgagtttgttccatcgctccaactttcaaacacaagtgcttttgtcttaagaccttttctcttcgggttcgtgagttaagggttcttcttcttcttcttcttttttctctaaactggaaaataaagaagaaaagaacatggatttgcattcttgtctaaactcatactttcttttgctcctcctctgtcttcttaatattaccaccattaactcaacgaagccattagaacaagaaacagtgctttttggcggcaactttccggctttttatgttattggagattcattggttgattcaggaaacaataatcatcttacaacgatggtcaaatcgaattttccaccttatggttcggactttgaaggtggcaaagccaccggccgtttcagcaatggcaaaacaattgctgattacattgctatctactatggtcttcctttggttcctgcttatttgggattatctcaagaagaaaagaatagtatctcaactggtattaactatgcttctgctggctgtgggattcttcctcagacaggaaggcaaataggaacatgtctc

SEQ ID NO: 91804 - DNA, 730 bp, Arabidopsis thaliana columbia
ggtattcccggtcccgacccacagcgtccgcgtttcgtttacgcgtaggaccctcacaatttctctctctaacgtttctaaaacatcctctctctctctctctcataacatggctgaaacatctgatgtatcgccattgaagcgttacagagaacaagaaaccctagtcgaggaagaaacgaacaaacgacaaaagccaacttcgtcatcatcctctgcctcttacaaccaaattctctgtcttctcaacgattcagacgaacaaaaccaacacaacaatgacctaacttccttcataaacgctcttcagcaagaaatatcatcggatgaccaatacgccgtcgtttcagaaacctccaacgtcgaagactcgttttcttcatgtgtttcctcaaaggaagaagaagtggaagatgacagcaaggagaaagtgatgcagcatcttttggaagcttccgatgacgaacttgggatccctaacacagattttggcgagagtaattatgaaaaggctaatgacggttacgtttatggagatagtttgttagatgggtttggtgatgcgttttgggagcttgaagacgaagcttctaattatttcacgtttctgcagtctgagctgttcatgtataaattatcctaatggttgggaaataacttctattaaaacgtaaattttaaagaatagccaatttcaatacaaatcttatatattcggttcttttttttt

SEQ ID NO: 91805 - DNA, 609 bp, Arabidopsis thaliana columbia
  unsure (1)..(609): unsure at all n locations
cccntccnntttnacccaatttccntttttcnaccggttnggcggcaannccacccaccangccntncttccttnaaaccgtttncggcaggaatttcancgggtgcccaatccccgccgtttcnggaccctccaaccgtcgaggcccggtttctccatggggtcccccaaaggangangaagtggangttgcccancaaggggaaagtgatcgcagccatcttttggaagcttccgatgaccgaacttgggatccctaacacagattttgggcgagagtaattatgaaaaggctaatggcggttacgtttatggagatagtttgttagatgggtttggtgatgcgttttgggagcttgaagtcgaagctgctaattattacacgttgctgcagtctgagctgttcatgtagaaattatcctaatggttgggaaataacttcttttaaaacgtaaatctggaagaataggccaataacaaaacaaaacataaaagactgtgtcttttttttttagtatggaagttcatttcatttttttaaggcacatttcttttgtttttgtggagcttacaaaagatcattttaattgattgagtaatttgtagcaa

SEQ ID NO: 91806 - DNA, 457 bp, Arabidopsis thaliana columbia
aaatacaacaaacagaagaaaagtgaaattgctttcgaacaaaaggaggaaactttaaaggcgaactctttagtattcgatccgccattgaagctcctctgactctctctcaaagtacttctctgattcgtcattcctctgcttcgtttagtttaaagggtacggaactgacctgagaggtttgatttgaatctaaaaaggtttagttttttgttaagtttgatggggacagggaattctaaagaaaactggagacagtcatcgtttaggtcaacttctgcttcatcagcatcaccatcttcatcttcatgggcttctcaacaaagttatcctcagtatggtgcagaaagctataattaccctcctccaccttcttatgcccaacctcctgagtatacgcaacctactcctcctttatatagtactcagccttactctgctccgtcttattctgcac

SEQ ID NO: 91807 - DNA, 469 bp, Arabidopsis thaliana columbia
ttggcgtttttcgcagagattcagcttggcatgaggatgaacatgttggatttggttctcgaaggtggttctccggttggtactgataacggcaaaactccaaggcttggagtgattcctaagtacgccggagatgagtcggagatgaaatggttcgaagttcctggattcaatatcattcacgctattaatgcttgggatgaagatgatggaaacagcgtcgttttgattgcaccgaatattatgtcgattgaacatactttagagaggatggatctggttcatgctttggtggacaaggtgaagatcgatctcgtcaccgggattgtgagacgtcatccgatctcagcgaggaatctcgatttcgctgtgattaatccggcgtttctcgggagatgtagcaggtacgtttacgcggcgattggagatccgatgccgaagatctccggtgtggtgaaacttgatgtgt

SEQ ID NO: 91808 - DNA, 645 bp, Arabidopsis thaliana columbia
tgcagtaccggtccggaattcccgggtcgacccacgcgtccgggggctcggaagaattgtgtctgcgtctccgaaccaattctcttcttcttcgctcgagccgatccgtgttctacttcgctcaatttcgaaccaagtggatcgcatctttcgggggcgaggacgaggaacaagaatttttgctccgggataattgcctcatctgatttatatcgggaaaaaggtcgcttgccggataggacacgatccgctttcataaaggagagatctttacagattcggtggacgccatggatgtgcctagctcttgggatgctttaccgaaacaggctagaaagattgaagctcagctttgacgggcagatgcattcatgtcgtagacttgtttcaacataggcttcatcaaaaacagatggttctgagagtgatgttgaagctggaattgacttactttttaagcaactgcatcaagttaatgctcagatgcaagcatgggcttcttctggtggatcagaagtggcctcccatactttaactcgggattgatgagatccttccagatctaacacaggagttttatcgacgtcgctcccgtcttagagcagaaaaagagcatgcctcacttcgtgaggactttagagaatt

SEQ ID NO: 91809 - DNA, 749 bp, Arabidopsis thaliana columbia
  unsure (1)..(749): unsure at all n locations
nnnnnnnnnnnnnnnnnnnnnnnnnnnnnnnnnnnnnnnnnnnnnnnnnnnnnnnnnnnnnnnnnnnnnnnnnnnnccacgcgttcgtccacgcgtccgggggtacgcagaaattctgtctgcgtctccgaaccaactctatccttctctcaatccgatccgttccgttcactacttgtctcaatttcgaaccaattggatcgcatcttttaggggctcaaacctttggtgacgaggacgaggaagaagattgtcgcatctgatttatatcggaaaaaggtctcttgccggaaaggacacgatccgctttcataaaggagagattttgacagattcagtagacgccatggatgtgcctagctcttgggatgctttacggaaacaggctagaaagattgaagctcagcttgacgagcagatgcattcatatccgtacacttgtttccacaaaggctttatcaaaatcagatggtaatgagagtgatcttgaagctgggattgacttacttcttaggcaactgcaacaagttaatgctcatatgcaagcttgggtatcttctggggggcagaaatggtctccatactttaactcgacatcaagagatccttcaagatctgacacagggagtttatccacaccgctccagtcttagagcaaaacagagcatgcttcacttcttgagggacttagagaatttgatcggacaaaatagatcacaaagatggtttgggcttgaacaggcccggtc

SEQ ID NO: 91810 - DNA, 395 bp, Arabidopsis thaliana columbia
tcgcgggacgcgtgggcggacgcgtggggcgaagaaaaaacacttcttcttcttcttcaacaacaacaaaacccaatttcgcggctaaatcaatcgcttcttctactggtcttggaattgagagaagagaccagtttcgctggatctttgaatgaagctggatttggattaagttcaggtgtaaatttgttggaagatggggtcagatcaatgtttttcgagattgaattcacttgagattaaagccctaatttatcagaaaattgggcatcagagagctgacacttacttcgaccagctcggaaaattccttacctcgaggataagcaagtccgagttcgataagctatgtagcaagacggttggtagagagaacatttctctacacaaccgtc

SEQ ID NO: 91811 - DNA, 3699 bp, Arabidopsis thaliana columbia
caacttacaagttcctctctcagcttctctcccaccactaaggaggaacgttccaaagatccctttctcagagaattcccagaaaaatcttcaacaattgaaaccctaatggagaatcattcggatccttgaatcctttggtttgtctctcacctccatttctgaaatttcattgctttgtgattcttctgcagattcgttttgaagagaagaaagaaatgtcatcgaacacttcacgaagctgttctactagatctagacaaaactctcgagtttcttcacaagttctcgtcgacgcaaagctacacggaaacttcgaagaatctgagcgtttatttgactattcagcttcaataaacttgaacatgccaagttcttcctgtgagattccttcttcagctgtctcaacgtacttacagaagattcagagagggatgttgattcaaccctttggttgtttaatcgttgttgatgagaaaaaccttaaagtcattgcctttagtgaaaacactcaagagatgttgggtttgattccacatacagtaccaagtatggagcagcgtgaagctttgactataggaactgatgtgaaatcattgtttctgtctccaggttgttctgctttgcagaaagctgttgactttggtgagattagtattttgaatcctatcacgcttcattgtaggtcttcaagtaagcctttttatgcgattctgcatcggattgaggaaggtcttgttattgatttggagcctgtgagtccggatgaggtgcctgtgactgctgccggggctttaagatcgtataagcttgcggcgaaatcgatttcgaggttgcaggcattgcctagtgggaatatgttgttgttgtgtgatgctttggttaaggaagttagtgaattaactggttatgatagggtgatggtgtataagttccatgaggatgggcatggggaagtgattgctgaatgctgccgggaagatatggaaccttatcttgggttgcattactccgctactgatataccgcaagcttcgagatttctgtttatgagaaacaaggttaggatgatttgtgattgttcagcggttccggttaaagtcgttcaagataagagtctctcacagccaataagtctttctggatctactttgagagctcctcatggttgtcacgcacagtatatgagtaatatgggatcagtggcgtctcttgtcatgtctgtaactatcaatggtagtgatagtgatgagatgaacagagatttacagactggcagacacttatggggcttggtggtttgtcatcacgcaagtcctagatttgttccgtttccgttacgatatgcttgtgaattcttgactcaagtatttggcgtgcagatcaacaaagaagcggaatcagctgttctgttgaaagagaagcgtattctgcaaactcagagtgtgctatgtgacatgcttttccgcaatgcaccaataggtatagtcactcaatcaccaaatataatggatcttgttaaatgtgatggagcagccctttattacagagacaacctctggtctctaggagttactcccacagagacacaaattagagatctaatcgactgggttctcaaaagtcatggaggcaacactggctttaccactgaaagtctaatggagtctggctatccggatgcttctgttcttggggagtcaatctgtggaatggctgccgtatatatttccgaaaaagatttccttttctggttccggtctagcactgcaaaacagatcaagtggggcggtgcacgacacgatcctaatgacagagatggtaagaggatgcatcccagatcctcattcaaggcttttatggaaatagtcaggtggaaaagtgtgccctgggatgacatggaaatggatgcaattaattctctgcagctaataataaaaggctcattgcaagaggagcattcaaagactgttgtggatgtcccacttgtggataatagggttcagaaggtagatgaattgtgtgttatcgtgaatgaaatggtgcggttgattgatacagcagctgttcccatctttgcggttgatgcctctggtgttataaatggttggaattctaaagcggctgaggtaacaggattggcagttgaacaagcaataggcaaacctgtatcagatctcgttgaggacgattctgtagaaaccgtgaagaacatgttagccttggctctcgaaggtagtgaagaacgtggtgctgagatcaggatcagagcatttggtcctaaaaggaaaagcagtccggttgagttagttgtcaacacttgttgtagcagagatatgacgaataatgttcttggtgtatgcttcattggacaagatgttacaggccagaaaacgcttactgaaaactatagccgcgtgcaaggagattatgcccgaatcatgtggagcccttccacactcattccaccaatttttataaccaatgaaaatggggtatgctcagagtggaacaacgcaatgcagaagctctctgggataaagagagaagaagttgtcaataaaattcttctcggggaggtttttaccacagatgattatggttgctgccttaaagaccatgacactttaacgaagctgagaataggtttcaatgctgtgatttctggccaaaagaacatagagaagcttttatttggcttttaccatcgtgatggtagcttcatcgaggcattgctttctgcaaacaaaaggactgatattgagggaaaggttaccggggttttatgctttttgcaagtacctagtccagaactccaatatgctctacaggttcagcaaatatcagagcatgcaattgcctgtgccctcaacaaattggcatatctccgccatgaagtgaaggaccccgaaaaggcaatatccttccttcaagatttgctccattcatctggattaagtgaagaccaaaagcggctcctgaggacaagcgttttatgcagggagcagttagccaaagtcataagcgactcagacatagagggaatcgaagaaggctatgtggaactggattgcagcgaattcggcctgcaggaatccctggaagcagttgtaaaacaagtgatggagctgagcatagaacgtaaagtacaaatcagctgcgattatcctcaagaagtttcatcaatgagactgtatggagacaacttaaggcttcagcaaatcctctcagagacactattaagcagcatacgcttcacgcctgcgtggagaggattgtgtgtctcattcaaggtaattgcacggatagaagctataggaaaaagaatgaaaagagtcgaacttgagttcaggataatacacccggcaccaggactgcctgaggatctggtaagagagatgtttcagcctttgagaaagggaacatcaagggaaggtttgggattacacattacccagaagctggtgaaactcatggagagaggaacattgagatacctcagagagtctgaaatgtcagcctttgtgatcctcacagaatttcccttgatttgaagctgaagacctgtctacaagatttacattttattgaataagtgtggtgtttttgaaagtcttcatttttttttctcacatatataaatgtatgtttagttaccgtaacttaattacatatatatatataggaaagttaaatttg

SEQ ID NO: 91812 - DNA, 1112 bp, Arabidopsis thaliana columbia
  unsure (1)..(1112): unsure at all n locations
cagcgcacttccatggacaggcgtctgagccgccatggttcaagctttcaagttccagctggatcattcggtatgttcacaatcatagctctagccctatgggtcattctatatgaccgtgcggttatcccattagcttccaagatccgaggcagaccttttagacttagcgttaagctaagaatgggattaggattattcatgtcattcttagcaatggcaatttccgcaatggttgaaagcttcagaaggaaaaaagctataagccaaggatatgcaaacaattctaatgctgtggtagacatctcagcaatgtggcttgtgccccaatatgttctacatgggttagcagaggctcttcccgcaataggacagactgagtttttctacaccgagtttcctaaaagtatgtctagcatcgcggccttctctcttcggtttaggaatggctgtggctagtctattggcaagcgtggtcctcaatgcggtcaatgaactaacttctagaaatggtaaagagagttgggtttcagacaacattaacaagggtcactacaactattactattgggtactcgcgataatgagcttcatcaatgtgatctactacgtgatatgtagctggtcgtatggtcctttggtcgaccaggtaaggaatggtagggttaatggtgtgagagaggaagaggagttgattgacattgttggcaaaggattcgagaaggaagatctaagtccagttgttaaaaccaattaaggaacaataggtcttgcaagcttgtattttgtttataaagggagcgataaactataggaaatgatattttattgcattggtgtgtggtgttattaagtgttaattaaagtctatatagatttgtaattagattgaattatgtgtttgggttttcattagggtttttgatgaaaaggtaatggtttttggttgtatccaagccaaagtgtttgttgtatttttttttttcgtgttattgcaattcaaggagtcttgtgtaaaaaaaaaaaaaaaaagnnnnnnnnnnnnnnnnnnnnnnnnnnnnnnnnnnnnnnnnnnnnnnnnnnnnnnnnnnnnnnnnnnnnnnnnnngtcat

SEQ ID NO: 91813 - DNA, 618 bp, Arabidopsis thaliana columbia
  unsure (1)..(618): unsure at all n locations
nnnnnnnnnnnnnnnnnnnnnnnnnnnnnnnnnnnnnnnnnnnnnnnnnnnnnnnnnnnnnnnnnnnnnnnnnnnnnccacgcgtccgcccatgcgtccgacataatataatatcatcagagaaaaacaaaatggataattcaaatttcgaaacacttcctgaagatctacaaaaggagattttgttatggttgtctccaaaatccttggtgaaattcaccctcgtctcaaagaaatgtgcatctattatccgtggggaagaattcaaagctctttacatgcgccgatcaatgacaaggcctcgtgtgttgatcgttgccaatgaaagcacaggtgagaagtcattggtgtttcacactttgtatcatgaggaggaaccattgttgtcatcttgccatcaacaacctatgcgtatcaccaacaatgcaccacgttttattgcttctcaaccattcctaggttcgatctgtcttccaaatggtagggagggtgtcattcacaatccgggtacaacaatattcagactttaccgaagatcaaagctccatcattaaagtttaaaaaaacttgtttcggatacaatggagctacggaagttttaaggtggtatgtataaca

SEQ ID NO: 91814 - DNA, 583 bp, Arabidopsis thaliana columbia
cggggattactgaaatacctccctttctagctttaaatgtcacttaaatagccttcgcttgtaaaataaaagtttgaatatttaaaccagaaagctaagtagagaggttgtgatgggtctgcaaacatggatatgcttcacactattctcaattttcttcttcctcctcttactatcagttttctcgtcctattttacccattttatctttttaccaaacttatgagttgtcttaagcaccttcactttgaaaacgttactgggaaagtagttctaatcaccggagcttcctccggcatcggagaggttagctagtattggatgttatgtttaatttgtttgttttggttggtcttatctataatttttagcaacaaataaaaacaatgatgcagaaagttttttttaaaaattatgaatgatatgtaattggtacataatcacgtttggaaaacgaaaacttgaattcaaagtcaaatattgttttggacgttctatcatcatacatatgtacgaccaattgatcctttatatttgacgattgctcgagtagactatcatccgtgaacagtaaaattgttat

SEQ ID NO: 91815 - DNA, 863 bp, Arabidopsis thaliana columbia
ggcttccattagtagcttacacagatgggcatctaatcaacactctcgtcttcctcgaatcacttctatttctgaggctgaccaatctcgacccattaaccaagtcgtcgccttttcggttcctatatccagaagagacgcgagtattattcttctcagctcgattccattgacaagcttcttcgttctaacaccgagctcttccgaagctagagagagacgtagcagaaaagttatccctctcgaggaatattccactggccctgaagggttgaaattctatgacattgaggaaggcaaaggtccagtagcaacagagggatcaactgctcaggtgcattttgattgccgttacagaagcatcactgcaatttctacccgagaatccaagcttttagctggaaaccgtagtattgctcagccttacgagttcaaggtgggatctacgccaggaaaggaaaggaagcgtgaattcgttgataatccaaatgggttattctctgcacaggctgcaccaaaacctcctccagcaatgtatttcattaccgaaggaatgaaagtcggaggcaagagaacggtgattgttcctcctgaagctggttatggtcagaaaggaatgaatgagataccgcctggagctacttttgagttaaacatagagctgcttcgggtgactcctccaccagaagagaagtgaacgctaataagagaagtttgaagcttcaagcattgtcccaacatttgtgtaaagatgacaaaggagaaaagagagaaagatgtaaattttggagtttttagtttgtgtctggttggttatacaccaaactctggtacagttaaataaccggtatatttgttggact

SEQ ID NO: 91816 - DNA, 494 bp, Arabidopsis thaliana columbia
  unsure (1)..(494): unsure at all n locations
nnnnnnnnnnnnnnnnnnnnnnnnnnnnnnnnnnnnnnnnnnnnnnnnnnnnnnnnnnnnnnnnnnccacgcgtccgctcgattcagaaatttggaaagactagcttttttttctctcgggtttcactttttaaaggtcgtgaaaatttgggaatcactgatcaattttgttaatatgatttcctgatttagggtttctctgcatgcctctagaatcagcaagtgtaaagcaattaccatggtgactccgaagcagatcgatttctcttcctgtggtggtggtgataactccgacgataccctctcccatcgagaatctccacggaatccttcctcaaagcgtgctgctgcttccttcgcagcagaagcaggcgaagagactatgaagaaganaaagaagaagaagaagaagaatttgggtccgccgttgatcgtccggatctggaacgaggaagatgagctctctatcttaaagggattagttgattacagag

SEQ ID NO: 91817 - DNA, 572 bp, Arabidopsis thaliana columbia
  unsure (1)..(572): unsure at all n locations
nnnnnnnnnnnnnnnnnnnnnnnnnnnnnnnnnnnnnnnnnnnnnnnnnnnnnnnnnnnnnnnnnnnnnnnnnnnnnnnnnnnccacgcgtccggttgagagagggttttccattctctgtggccgtcaccgtcgccgtgaaatagctctcctctctctatctccgattatataactgcaagctcaaaggaattgtttgttgttaaaatgtttcttacgcgatttgtcgggaggagattcttggcggctgcatcggcgcgatcggagtccactacagcagcagcagctgcctcgacgattcggacgccaacaaatccactcgaagagttctttgagttcgacagaagccaagacgaagataaacctgttgtctatggtcgaggttggaaagcttcagagctgcgtctcaagtcatgggatgatcttcagaagctgtggtacgttcttctcaaagagaaaaacatgttgatgactcagcgtcagatgcttcaggctcagaacatgcagtttcctaaccctgaacgcattccaaaggtgaggagatcaatgtgccgcattaagcatgtgctgac

SEQ ID NO: 91818 - DNA, 934 bp, Arabidopsis thaliana columbia
  unsure (1)..(934): unsure at all n locations
atgatctcgccggcannnnnnnnnnnnnnnnnnnnnnnnnnnnnnnnnnnnnnnnnnnnnnnnnnnnnnnnnnnnnnnnnnnccacgcgtccgcccacgcgtccgtgcagttcccatcgaatttgatattgtaaaagatgagaagtcaccagttttggataggacggaggaagatgaactgaaaactgcagagaccagtgacaaagccgaagcccttaaatgtgcagatgtgaaggtaagctctgagaatggtaatgttggttctgataacacaaagcaaagtgaaaaacgagcattgctgcctgcaaatattgacaaacaagatgatgggcttacccttagcggacggaaaatccccagctacatggccccgactgcatctgcaaaggccagagtcaaaggagaagcctctccgaggtttgcccaagcgaagactgagataaatggggcattacggcgccattcactgccttctccagccaatggtaagctgagtactactactatgtctccaagggctcaaaaacttctcttagcctctgccaaaggatctatgaacggcgacaaatcttttacttcttccaaggacataactcacaagtcaaccagaaccgactggaaacggtgaaggctcaggcaaaagagagtgtcatctactcatcttacatggtcgaattcaattacttagtgtgtttcctctgcattttggtttggtttggtgagtttagagagtgtttggtcagtgttcatgtctagtctattacatcattttcatatcttgcttcaatttactctgatatgtttgaagacgcaaaaaagatgaagtaaatagttaatctctgtataaaaaagaaaaaaaaaaaggcagaccgctctagaggatccaagcttacgtacgcgtgcaggcgacgtcatagctcttctatagtgtgtc

SEQ ID NO: 91819 - DNA, 894 bp, Arabidopsis thaliana columbia
  unsure (1)..(894): unsure at all n locations
taggaccngacncnctttcagccatccccaaccnttttatccccccgggcggnttnttccccggnggcccncaacgggaaccttaccccngttggataacctgaagcccccganccggcttatggggaccccngnccgggnccgaaatggattggcccnggnatttaggatttcccggcggcgancggcgaccggtgttggctttgcccgtntcgtcatttggttatggtgtacagaatgcgacggctccgtgagaatttgtcccgctttgccttagcacgaagaattccaagcgtggaggttttctattcttgatgggccattctataatgggcttatcaggcccaatcaaatggaatttaataataataataaaaatataaattaaatttatcatttatataaactatatatgtagtatactgttgagctcattattgaatagcttgagaggtttgatgtacatagccaccacatgcagtgagcttcttctttttttggtctttaggaattcttttgatttcgtaataaatcaaccttgattgtttaatttttaattactttacatatatagcatttgatacgatatgatttatttatgatgttttagtagaggatgagacatgatttagtattattttcaaatgttttgtattgttataatatttgtattctaattaagaatattctagggtttttgtgtttttaaatatctatttgtataaagcatgttcattatttcttgtttttggttgagctcaatgtatttttatggaattttaaactaagcgaacaattatcttaaaaaaaaaaaaaaagggcggccgctnnnnnnnnnnnnnnnnnnnnnnnnnnnnnnnnnnnnnnnnnnnnnnnnnnnnnnnnnnnnnnnnn

SEQ ID NO: 91820 - DNA, 484 bp, Arabidopsis thaliana columbia
attgaaaacgggaatcttgtttacaagatggaggttttcttgaactctagtgttttgagaagctggaaagactccattatagttctccagacgacgagatcattttatccgtggtctgaagatgtgaaactcgatgtacggtgtttggagtcaatcgctttgaaagctgctatggatcctgcaagagttgattggtcttatacttataaccgaagaaagcttcttccccccgagatgaacaacaatagcgtaccgagagattggtgggtcgaggatctcgctgagctcagcattgatttatttaaaagagtggtttcgactattagacgaaaaggcggtgttttgcctgaggttatcggagaagctcttgaggtatatgcagcaaagagaatccctggtttcatgattcaaaacgatgataatgatgatgaagaagatgtgatgggacaaagatctttgttggagacattggtttcgatgttgc

SEQ ID NO: 91821 - DNA, 546 bp, Arabidopsis thaliana columbia
agctcactctctctgttcttcatcacaccgagaattcgaaaattccgatgaacaagaaacttctcaaccctcttgaagatccaccaaccgcttcttcaagcgaagacgtcgacgaagagatttcatcaggagaagatgaaaaagaacatatctccaattcttcttcttctgaagaagaaaacgaactcaaagatctctccactcaaaccctaaattctccttccaccgaggctccaactctcgattctggatctgagacaaattccgactcagataagccaatcgtcttaaccagtcagaagaagaaagaaggtactgattcatcagggacgaagcgagctagtgaaggaactagctcaaaggacatcaaaagagctaagaaagtttcaggagatgacggtaacaaaaaggctcagtgtctatggactaaagaagatgagatctctctgttacaaggtatgattgatttcaaagctgagacaggtacaagtgctcatgatgatatgaatgggttttttgatattgctaagagatacataagctttg

SEQ ID NO: 91822 - DNA, 558 bp, Arabidopsis thaliana columbia
  unsure (1)..(558): unsure at all n locations
ggcaaatgggtcgcatggaactgatactctatccctcaagggtgaacttgcgaaagaacagagcagagcggaatcattatctgctcaagtcctccaactctcagctcaactccagcaagcaacacaagcatacaatgggcttatgcgcatctataaacctgtgcttagaaacatagagagtagcttaatcaagctgaagcaagatggatcggttacagtggcacagtgaatcaggaaccaagggcacacttctgagtattgaatatatttttatacaacaaaacatctatttagaaccaaggggacaagtgaatctaacacttttttctttattgaacaatttggttcgttgtgttgtaactgttgttcattgaaagcttcggttcgttttcctcaagtttgattttggaaggtttggagtttggttatagaagtgagactaaaccgaatttttgagnnnnnnnnnnnnnnnnnnnnnnnnnnnnnnnnnnnnnnnnnnnnnnnnnnnnnnnnnnnnnnnnnnnnnnnnnnnnnnnnnnnnnnnnnnnnnnnnnnnnn

SEQ ID NO: 91823 - DNA, 509 bp, Arabidopsis thaliana columbia
cggtcgcgtgggatttcaagctcgtcactccgccggaatcttcccgcgccgataagccaggagctacgaaggcctccgacgcattccaggagaagaaatctgtgtctgtgaactacgaccgtggtgagcatgaggtctcggtcaacatcggcgggctcaggaaagctgatattccgagacgttaccgaattcgggttgagaacgaccggtttcagaaggattggagtgtatcggaggttgtggaccggcttatggctctcaatcgttgggaagaagttgatggcgttcttaattcctgggtcggccggtttgctaggaagaatttcccggttcttatcagggagcttagtagaagagggtgtattgagctttgtgtgaatgttttcaagtggatgaagattcagaagaactactgtgcaaggaatgatatatacaatatgatgattaggcttcatgctaggcataattgggttgatcaggctcgtggtctcttctttgaaatgcagaaa

SEQ ID NO: 91824 - DNA, 971 bp, Arabidopsis thaliana columbia
  unsure (1)..(971): unsure at all n locations
gcacttccattgcacttcgcatgtaggatatctgagtgtgcaaatctacaattcacagagcgttagcacataccatggagatcagtggatgtcccatgaggactacgatatgcattgattcacaagtctgtagaaggtggattgcaagagagcgagtagtcactcagctaatagttacagcatctgcaacagttgcagcattgtttctggaacgtgaaacgattctcaggtcgccactcagcgcatctcacgacgagtttctagaaatataaaagagaagactctaacaaacaatgtcttaagaatcaaaaggttctgcttgtggcagacaacgttactaaggttaaacagttagaagctcttgcaggggatttcagcagttttggtcctgggagtgttgttattatcactacagacaacaaggggtttttgaattcttatggtataacagatgtctacgaagttgagcatttgaagttttgtggaatcttacgatcattgggctttaaaaagagagctgctgcgttccagcgggctttgtgtagagcaaagagttttgccacggaatgtttttgttgtcaaagtagtagtatatctggttatgggaaagtgacagatttagtttaattaagttgaatcccttattagtcatatgcattaagttaagtaaacttaataagttgtgtggcttagaaataatattgttttgtctatttttggagtgggttgctcttggggtgtagaaaaatgtcactcttcattggattaagtaatatacatttttttgttccttagtttttaagacatttttttacatctggatgtgccagnnttgtttgtaatatactgttctttccttatagaaataaatattcacaattttttaaaaaaaaaaaaaaagnnnnnnnnnnnnnnnnnnnnnnnnnnnnnnnnnnnnnnnnnnnnnnnnnnnnnnnnnnnnnnnnnnngtc

SEQ ID NO: 91825 - DNA, 685 bp, Arabidopsis thaliana columbia
ggtgagtgagtgagagaagaatcagagaaaatgccgccgaaattggatccatctcaaatcgtcgacgtctacgtccgagtcaccggaggtgaggtcggagcagcgtcttcactcgctccaaagatcggtccactcggtctggcaccaaagaagatcggagaagacatcgccaaagagacagcgaaagaatggaaaggtcttcgagtcaccgtgaagcttacggtacagaatcgtcaagctaaggtcacagtggttccatccgcagcggctctagtcatcaaagccctcaaggagccagagagagataggaagaaagtgaagaacatcaaacataatggcaacatttcgtttgatgatgtgattgagattgctaagataatgcgtcctagatctatcgctaaggaattgagtggaacagtgaaggagattttaggaacttgtgtctcttttggttgcactgttgatggtaaagaccctaaggatcttcaggaaaattaacagtggtgacattgatattcctaacgagtgataaaggtttttacttttgagttctctatcgttttattttttgtatttgattttgaggatttggtattagtaatactatatttcggaagttgagaattgttggcttttgcccatttgaatcctttcttgggattaatcaaaatgttcaattttctcc

SEQ ID NO: 91826 - DNA, 501 bp, Arabidopsis thaliana columbia
  unsure (1)..(501): unsure at all n locations
gnnnnnnnnnnnnnnnnnnnnnnnnnnnnnnnnnnnnnnnnnnnnnnnnnnnnnnnnnnnnnnnnnnnnnnnccacgcgtccgcggacgcgtggggcacaataagatacagtcaaccaagaaagtcgagccaactgcagtgttggacaccaaagataaaacgagtaggcctaaatctacatctgtcgagaagaaatctgttgcagagaatggattgcctgggaatttggtcaaagtctctgttaatggtaaaagattagcggcggccaatatccaatggagttcactccctccatctctttcgaggatgggacaggaagtattgaggcatagagaagctgctcaagtagtcgcaatagaggccctgcaagaagcctctgcttccgagagcttacttcagtgcctcattatgtactccgatcttttgtcaacggcgaaggaagatgatccattgccagtcgttgagcagttcttgaagctccattccggtttgaaaaacgtc

SEQ ID NO: 91827 - DNA, 717 bp, Arabidopsis thaliana columbia
  unsure (1)..(717): unsure at all n locations
atgatttnnnnnnnnnnnnnnnnnnnnnnnnnnnnnnnnnnnnnnnnnnnnnnnnnnnnnnnnnnnnnnnnnnnnnnnnnnccacgcgtccgtgagaaacaaaaatcaaaatacagttatccctggcttagggtttaaagcccgttgctgagtcttttgtaatctgacacacatcacaacaatttctctttacgttcttttggtacgatgcttttgtgttttcagtttatcttaactttgttttatttctcaattttacgattcatggttctgtaaatccatattgggcagtcttttcataaacaaaacgaggtgtgatgctaaatttcattgggacaacgctatattgtagaagacggtgaagattgttatacgttttgcaaggcagggatttatgatgacactctccggtcgttttgcttccttgatgcaattgtttttccaatttaggttttgaattattactcactattttatcagggtagcaacattacctgaaagtgtctctgagctatcacaaagattgaaagaagtttatgtgatcaaaactttccttttaactttattgttttcagtattagctatcttatgttatgtatatcaatgaatgtttttaacgattaaaaaaaaaaaaaaaaaaagnnnnnnnnnnnnnnnnnnnnnnnnnnnnnnnnnnnnnnnnnnnnnnnnnnnnnnnnnnnnnnnnnntgtacctaa

SEQ ID NO: 91828 - DNA, 330 bp, Arabidopsis thaliana columbia
atgaaaattcgatctgatcactgagaaactacggcgacgacgaagaatacggtggaggaggaagtacaatgagaatattaagctacggaatcgttattctctctttactcgttttctctttcattgaatttggcgttcacgctcgtcccgtcgttctcgtcctctcaaatgacgatctcaatagcggcggcgatgataacggagtcggagagtcctctgacttcgatgagtttggagaatccgaacctaagtccgaagaggagcttgatcccggttcatggcgatcgatcttcgagccagatgactcaacagtccaatcagcctcgccgc

SEQ ID NO: 91829 - DNA, 696 bp, Arabidopsis thaliana columbia
  unsure (1)..(696): unsure at all n locations
atgatcctnnnnnnnnnnnnnnnnnnnnnnnnnnnnnnnnnnnnnnnnnnnnnnnnnnnnnnnnnnnnnnnnnnnnnnnnnnnnccacgcgtccgtttcttttttctttcttccgtttcaaagtttcttccttttgggcgggttttaaggaaattttggaatttctctctttttggagacgtttctttaatttctgggcttcttctagttgtgggttttgttttctacttgtagctactgtgtcacgcttttctctagcgaatactttgatgcttcttcatgactctttaacaagattattctgagcttttcctctggccttctaattattaaagtcttcctttttatctattgttaaggtttggcttcgttgtctcttcctcttacctctgctttttggttcagagtatttgaattttggggaatattaaaaattgcctgatactgaaatcaatctcttgctgtctagtgatggctactgaagagaagcctcttaattctcttgatttaagccatgatgattcttcccctgcttcaaatcaggctgaaggatcatctgctataactgaaggcactttctgcgaatgttcaacattggaggcgaaagaatctctctttacagataccctctagagcagctggtctctctcctgaagattcggttgttatcaaaatgcctccaacgcctagtccaac

SEQ ID NO: 91830 - DNA, 654 bp, Arabidopsis thaliana columbia
  unsure (1)..(654): unsure at all n locations
acgccatgagaggagctctcttgagaaatgcatctctctgcgctcgcagaatcattctttctcctcgtataacccatcagatctcccccaatgttccctttctcgctccaatcgccgctcctgctgctcccaagttcagatttttctcctccgaatccggtgagaactcgactacggcccctgagtcttcgccgactgattcacccgagaagaaagatctcgttgtagaagatgtaagcaacaaagagcttaaaagccgtatagagaagtatttcaatgagggtaatgaagatgctttacccggagttattgaagcacttctacagagaagacttgtagacaaacacgcagagactgatgatgaattgttggaaaaaatcgagtctctacctttcaaagatgatgtcaaggatgaagattttgaatccgatttcgaggaagcacattctactgacgaagaacttgaggatttgtacaattctcccgagtatgtagctgaaaagatgaggaagaatgagtttttcaacatggatgataagaagtgggatcacatggttagagaaggtatccaccatgggnggcttactgntaccttaangantncgnnggnggtnctttnggggttttccccaaatngggcccccnttttttccc

SEQ ID NO: 91831 - DNA, 698 bp, Arabidopsis thaliana columbia
  unsure (1)..(698): unsure at all n locations
cagcatctatacngactcaccttagggaaagctcgtacgcctgcaggtaccggtccggaattcccgggtcgacccacgcgtccgacagcaaccgccatttctttccaaattcccccaattcccattccaactttaccttctgaagtagaagaagaagccatagaaatgctttgaagtttctgtaaagagaaagatctacaattgttttgaatatgccgaggcagaatcaaagcgtagagaatctacttctacttggcaaaatcaggaaacgtggttgttcttcgccgacatcgtcgacttcttcgattctccgtgaaggttatagattcaaaagagcgatagttgttggtaaaagaggaggatccactactcctgtacctacatggagacttatgggtcgatctccttctccacgagcttccggtgctttacacgctgctgcttctccgtcgtctcactgcgggagcaaaaccggtaaagtatcagctcctgctcctgtttcagctaggaagttagctgcgacgcttttgggagatgaacgggatgcctttcacctagagttgtggaggaggcctgcgccaatgattaggaagcagttgaaaggaggagattcgcgccgctttctccgccgagatcatcggttcattctggttctctaccgcctcatctttctgatcccgtcgatagtccagtctctg

SEQ ID NO: 91832 - DNA, 664 bp, Arabidopsis thaliana columbia
  unsure (1)..(664): unsure at all n locations
gcactaatacgactcattaagggaaagccggtacgcctgcaggtaccggtccggaattcccgggtcgacccacgcgtccgcccacgcgtccgcccacgcgtccgtgaagctaatcctcgttggttgattctctaccggaagcctaatcaaaccctaactaagaagaagaagaagaaagaggattcaagtgttcatcttttggctccaattccaattctcaattctccaactgtggaatggtcaagtctagtcgctgttggttcttatctgtacgccattaccgcagacatcaaagattctccatgctctaacgtttggtaccttgactgtcgaacgcacacttggcttgattctccaagattgcgactggctcacatcaatagtgactttaatgggaggacgtatttcccaggaagctctgaaaagccagattctttgaactgtgttgaagtgtacaacacaaatactcagacttggaatcccgtgcctccccaaaaacgaaaactcaaattcggaaatatggaagganagatttacatacccccttgtcaagagaatcataggaaggctgtggctctaaacccaaaggttttgacatgggaagcggtaggattgggtacgaatttggataggggttctttttgtatgatagggaacatagcct

SEQ ID NO: 91833 - DNA, 614 bp, Arabidopsis thaliana columbia
  unsure (1)..(614): unsure at all n locations
nnnnnnnnnnnnnnnnnnnnnnnnnnnnnnnnnnnnnnnnnnnnnnagccgttnagggaccgggccagaattcccggggcagcccactgcgtccgcaaacccagaacctccgtccgaccaattccggtgcagctaagaaccagagatagagagatagagatgcggaggatcaattcactgtacggaagaattggtctcctaaaacgagtacccgagaaatctacgaagcaagctcatacatttctcgcatctctctccttctctacggaaggtgcttatggcggtgacggtgagtttcagcagaacagctccaaagtcaagatctttgaccgagacctcaagcgaatacatcgtgatcgagcggcgtggctttctcgccaaaaaaaacgattcttttgttgacgctgttgcagataatctacttgatcgcttagaggattgtaagaagagttttcccactgcattttgtttgggaggatctcttggtgctgttaagagattactacgtcgtcgcggtgggattgagaagcttatcatgatggatacttcatatgacatgattaagtcatgtagagatgctcaagacgattcactcgataactccattgaaacct

SEQ ID NO: 91834 - DNA, 409 bp, Arabidopsis thaliana columbia
  unsure (1)..(409): unsure at all n locations
ccggnncggaaancccggggcggcccaacccgtccgtttttgggtttgccttgaaagtgtttgtgtttttgcctctgagaaaaaatctttgccgactggtaggttcgggactatccgtgaatgggtttatgacgctatctctgctcaacgcaatgagctcctctctcttttctccagatatgtagcccagggaaaggggatattgcagtcccaccagctgattgatgagttccttaagactgtgaaagttgatggaacattagaagatcttaacaaaagtccattcatgaaagttctgcagtctgcagaggaagccatagttttgcctccatttgttgctttggctatacgtcccagacctggtgttagggaatatgtccgtgtgaatgtgtatgagctgagcgtagat

SEQ ID NO: 91835 - DNA, 779 bp, Arabidopsis thaliana columbia
  unsure (1)..(779): unsure at all n locations
nnnnnnnnnnnnnnnnnnnnnnnnnnnnnnnnnnnnnnnnnnnnnnnnnnnnnnnnnnnnnnnnnnnnnnnnnnnnnnnnnnnccacgcgtccggtcgtccaatagatggacatcaagttggcaggaaggcgtcatttgccttgttataattgcatgcagtggttttggtgctggcgtattttaccgtttcagtgcttcagttatatttattctcctctcagttggtgtggcagttgttgcttcagcagttcttcattatcgccaagcttatgctctgcctctaggttctgggtttagctgtcctggtgtacccattgtgccatccgtttgcattttcttcaacatcttcttatttgctcagttgcattatgaagcatggataagatttgttgttgtcagtgtgcttgcaactgccgtttatgccttgtatgggcagtaccacgcagatccgagcatgttggattatcagagggcacctgaaactgaaagcgacgcttagtaatgctacattatagttgtgttacttaaagccatttgtagagttgatagcaagtttctgcgtttcgtgagagacatactgtatgtcacatacatattcaggtcgagtttaaggattggatgggataaggcagttaaacattattgttgtaaagaagttaataaaagtatgcttgtgcatttcaaaaaaaaaaaaaaaaaaaagnnnnnnnnnnnnnnnnnnnnnnnnnnnnnnnnnnnnnnnnnnnnnnnnnnnnnnnnnnnnnnnnnnnnnnnnnnn

SEQ ID NO: 91836 - DNA, 577 bp, Arabidopsis thaliana columbia
  unsure (1)..(577): unsure at all n locations
nnnnnnnnnnnnnnnnnnnnnnnnnnnnnnnnnnnnnnnnnnnnnnnnnnnnnnnnnnnnnnnnnnnnnnnnnnnnnnnnnnnccacgcgtccggccacaaagaagaagaaaaccttcttcaacgtttaaagtctcttctctctctctctcttaacttctcccattttctttgaactaaagatcaatggctcacaaccattctaatgaagacggctctattggaacctccttgcatggagtcacggcaagggagcaagtcttctccttctccgtccaagaagatgtcccttcatctcaagccgtccgaacaaacgatccaacggctaagtttgccctaccagtggactccgaacatagggcaaaagtgttcaaaccactatcattcgctaaaccacatatgagagccttccacttaggatggatctctttcttcacttgcttcatctccaccttcgcagccgcacctctagtccccgtcattcgcgacaatctcgacctgaccaaaaccgacatcggaaatgctggagttgcatcagtttccggcgccattttctcgagactcgctatgggtgctgt

SEQ ID NO: 91837 - DNA, 387 bp, Arabidopsis thaliana columbia
ctttagcggttttgtcatcttctctactcttctttctcttttctgagaaacccaaaagacaaaaacgaagaagaagattaggaaatcatcttgagaaacaggaggtagcaggagaatatgggggacaaggaagaagtccttgaggctgttttgaaagaaactgtggatctggagaatgtacctattgaagaagtttttgagagtctgagatgtagcagagaaggtctcactacagaagctgctgatgaaaggctggctctttttgggcataacaagctcgaagagaagaaggaaagcaaattcctgaaatttcttggtttcatgtggaaccctctttcttgggttatggaagctgctgctatcatggctattgctcttgctaatgga

SEQ ID NO: 91838 - DNA, 1233 bp, Arabidopsis thaliana columbia
  unsure (1)..(1233): unsure at all n locations
ggtctcacaaactcttctttcagtcatcacagaaaacaaaaaaaacaatggcggataagctcactgacgatcagattacagaatacagggaatctttcaggttattcgacaagaatggtgatggttccattacgaaaaaggagctcggtaccatgatgcgttcaatcggtgaaaaaccgacaaaagctgatcttcaggacttgatgaacgaagcggatttagatggtgatggaaccatcgatttccctgagttcttgtgcgtaatggctaagaatcaaggtcatgatcaagcgccgcgtcacactaaaaaaacaatggcggataagctcactgacgatcagattacagagtacagggaatctttcaggttattcgacaagaatggtgatggttccattacgaaaaaggagctccgtaccgtgatgttttccctcggtaaaaaccggacaaaagctgatcttcaggacatgatgaacgaagtggatttagatggtgatggaaccatcgatttccctgagttcttgtacctaatggctaagaatcaaggtcatgatcaagcgccgcgtcacactaaaaaaacaatggtggattatcagctcactgacgatcagatcttagaattcagggaagccttccgcgtattcgacaagaatggtgatggttacattaccgtgaatgagctccgtactactatgcgctcccttggtgaaaccaaacaaaagcttgagctccaggacatgatcaacgaagcggatgcagatggtgacggaaccatcagtttctctgagtttgtgtgtgtaatgactggtaaaatgattgacactcagtctaagaaagaaacgtacagagttgtgaatcaaggtcagggtcaagtgcagcgtcacactagaaatgacagagctggtggcaccaattgggagagggacatagcggtcggggttgccagcaatatcatcgcttcgccaatttccgacttcatgaaagataggtttaaagatttgttcgaagcgctgttatcttgaaatgacccggcagtaactttttgcccatagggtctgacaattatgttagatctctctcaaaaggngtttcatctaatgncaataatttcctatgtaaataaatttattgcatgtgttaggtgtgttaccatcttccagttgtgtgcaattttattaaaatgaggtttgtaatatgggtttcagtatcgnatataattggggnattaattgt

SEQ ID NO: 91839 - DNA, 575 bp, Arabidopsis thaliana columbia
atgatacttcagctctctacgactcactatttggaaagctggtccgcctgcaggtaagctttcggaaatccaaaaatgggatctcttccaccgccatcgctagatttctcatcaatcgatcacaattccctcaaaaatggcggatccagccaccaagagatctctcatgataatctcctcaacctcttcaaatcccagcaagatcttctcaatcacttcttcaaacatctcgatctctctcaaaccctagatttctcacgcattctcctttccaccaccggtaccgttttcttcaccggcgtcggtaaatccgctttcgtagctaacaaggtttcacagacgctcgtttccttaagcttccgttcctctttcctctcccctctcgatgcgcttcatggtgacattggcgctctttcgccacgcgatgttctcgttttcttcagcaaatctggcgccaccgaggagcttctccgtcttgtcccttgcgctagagctaaaggagcctttctggtgtctcttacctctgtttctgggaatccactcgctggtgtttgtgatatgaatgtgcatttacc

SEQ ID NO: 91840 - DNA, 413 bp, Arabidopsis thaliana columbia
cccagagtagcagaatctgatccatcccacctttttcaattctcaggcaaagtgtttgatctcatattcagataagtcaaacttgaaaaaatggaagggactgtgttcacgccttgtttggaaggaatgaagcatgtcaaatctgatcaaggcgagatgcttactaagccatttttagagctttgcaagaccatcttgcctgttatagataaatttggagctgctatgactctcgtgaaatctgacattggtggcaacataacgaggttggagaagaactacttatctgatcccgacaagttcaagtacttgtacacctttgttcaagtcgaaattgagtctaagatagcaaaaggatcgtctagctgtacaaacggtcttctctggttaaccagagcaatggatttcttagt

SEQ ID NO: 91841 - DNA, 966 bp, Arabidopsis thaliana columbia
ccggggccacccacgcgtccgcacacgcgtccgcccagagtagcagaatctgatccatcccacctttttcaattctcaggcaaagataagtcaaacttgaaaaaatggaagggactgtgttcacgccttgtttggaaggaatgaagcatgtcaaatctgatcaaggcgagatgcttactaagccatttttagagctttgcaagaccatcttgcctgttatagataaatttggagctgctatgactctcgtgaaatctgacattggtggcaacataacgaggttggagaagaactacttatctgatcccgacaagttcaagtacttgtacacctttgttcaagtcgaaattgagtctaagatagcaaaaggatcgtctagctgtacaaacggtcttctctggttaaccagagcaatggatttcttagtggagctgttccgaaacttggtagcacatcaagactggtcaatgccacaagcttgtgctgactcataccaaaaaacactcaagaaatggcacggatggctcgccagctctaccttctctatggctttaaagctagctccggacaggaagaagttcatgcatgtcatatctggttctggtaacatccaagccgacatggaaaggttttgtgctgagtttggtccgtttcttcatgataatcataagtttctggctagcgtcggtatggatgacatgaaagcttcttaagtcatcatatgattatcgccggtatcaaatcttctttgccggaatctttgtctgttttaacttttctccttccaattatagaacctccaaaaagaaacagaataatgtggttggtttctatctgaatgttcactttatattacaagttataacatacgaatcaatcttatcaactctcctggttaatggttggtatgaaacctggaacctttctttcaaaactcaaagaaatttattccaaaaaaaaaaaagc

SEQ ID NO: 91842 - DNA, 585 bp, Arabidopsis thaliana columbia
  unsure (1)..(585): unsure at all n locations
atgatctnnnnnnnnnnnnnnnnnnnnnnnnnnnnnnnnnnnnnnnnnnnnnnnnnnnnnnnnnnnnnnnnnnnnnnnnnnnccacgcgtccgcccacgcgtccgcgcctcctcctccactactactaccaccaccacctttggtttccgtttctctgtatattcattcctcgaaaccctccaaaaacccatttcaatcaatttctcgcttttgccctctacgtttctcgtcctgggtttctcaaatccagctcagtttattccccaattcaataatcaaaactctgtcttttggtgggtcttcgtcaaagctctctcctttacggtccttttctccagcgcatgaaataataaaggacacctgtatttattaaaatcactacattttccgtaacaaaaaaaatcaaactttgttttctcaatggacggtgccggagaatcacgactcggtggtgatggtggtggtgatggctctgttggagttcagatccgacaaacacggatgctaccggattttctccagagcgtgaatctcaagtatgtgaaattaggttaccattacttaatctcaaatctcttgactct

SEQ ID NO: 91843 - DNA, 759 bp, Arabidopsis thaliana columbia
  unsure (1)..(759): unsure at all n locations
nnnnnnnnnnnnnnnnnnnnnnnnnnnnnnnnnnnnnnnnnnnnnnnnnnnnnnnnnnnnnnnnnnnnnnnnnnnnnnnnnnnnccacgcgtccgcggcaaatctatctttctttattttaataaacggaaaaacgaaaagtgaagaaaaatgggagtagtactgatcgatggatcaacggtacgatcttttgtagacgacgaagagcaattcaaaaaaagcgtcgacgagaggttcgcagctctggatctgaacaaagacggcgttttatcgcgatcggagctacgaaaagcgtttgaatcgatgaggctacttgaatcgcactttggcgttgatgtggtgactcctcaggacgagctgacgaacctctacgattcgatcttcgagaaattcgatacggatcaaagcggttctgtggatctggaggagtttagatcggagatgaagaagatcgtgcttgcgattgctgatgggcttggatcttgtccgattacgatggtgttagatgatgatgatgataatttcttgaaaaaagctgcggatttggaagcttccaagcttgagaaagcttcttcgtaatggtgatggatggttttgggatctttttgaaactgttttcgttttgttgttgttcatgttttgatgtaagtgagagtttgaataaataaaactttgtgagaaaaaaaaaaaaaaaaagggcggccgctctagaggatccaagcttacgtacgcgtgcatgcgacgtcaaagctcttctat

SEQ ID NO: 91844 - DNA, 514 bp, Arabidopsis thaliana columbia
  unsure (1)..(514): unsure at all n locations
nnnnnnnnnnnnnnnnnnnnnnnnnnnnnnnnnnnnnnnnnnnnnnnnnnnnnnnnnnnnnnnnnnnnnnnnnnnnnnnnnnnccacgcgtccgctccttcatcatcatcggtttcttcttttgattccacaatgaagcgtttgctgctgcttgttgtcctctgcagcctttctctatcaaggtgtgaatcaaaagtcgtgccgtatgattattctgcaaccatcgagtgtctagagatacctttaaaaccacagtacaatggaggaatcatcgtcagccctgacgtacgagatggcaccctaggctggacaccattcggaaacgcgaaagtcgatttcagaaaaattggaaaccataatttttttgttgcacgagacaggaaacaaccttttgatagtgtctcacagaaggtttatttggaaaagggacttctctacactttctctgcttggttacaagtaagtaaaggaaaggctcctgtgaaagcagttttcaagaagaatggtgaatata

SEQ ID NO: 91845 - DNA, 458 bp, Arabidopsis thaliana columbia
aagaaatggaatgagcacaacaaagcgttatagatgattcgagacattctcatgtatatggataggacttatattgagagcaccaaaaagactcatgttcatccgatggggcttaacttgtggagggataatgttgtgcatttcactaagatacatacaaggcttctaaacactcttcttgatctagtgcagaaggaacggataggtgaagttattgatagggggtcgatgaggaatgtcattaagatgtttatggatctgggtgaatctgtgtatcaggaggattttgagaagccgtttttggatgcgtcttctgagttttataaggttgagtctcaggagtttattgaatcttgtgattgtggggactatctgaagaaatcagagaaacgccttactgaagagatagagagggtagcgcactacttagatgccaagagcgaagagaagattactag

SEQ ID NO: 91846 - DNA, 530 bp, Arabidopsis thaliana columbia
  unsure (1)..(530): unsure at all n locations
atgatcctgccnnnnnnnnnnnnnnnnnnnnnnnnnnnnnnnnnnnnnnnnnnnnnnnnnnnnnnnnnnnnnnnnnnnnnnnccacgcgtccgaagaaaaaaagaaagacaaaactttgttaataaaccgacccagaatcgtggtcttcataatctgtctttaccattttcgttggatttcttcagacagtaatcagaatcatttactttcgtatacagattcattttcttcaaaacgttttatttgttaaggaaaaaagtacaaaactttcgacttttgttttccgggttttgtcaataatggattccgattcatggagtgatcgtctcgcttcagctacgaggagataccagctagcttttccatcacgatctgatacattcttagggtttgaagagatagatggagaagaagagttcagggaagagtttgcttgccctttctgttctgactattttgatattgtctctctctgctgccacatagatgaagatcatcctatggaagccaaaaatggggtatgtccagt

SEQ ID NO: 91847 - DNA, 580 bp, Arabidopsis thaliana columbia
  unsure (1)..(580): unsure at all n locations
nnnnnnnnnnnnnnnnnnnnnnnnnnnnnnnnnnnnnnnnnnnnnnnnnnnnnnnnnnnnnnnnnnnnnnnccacgcgtccgcccacgcgtccgcccacgcgtccgctctctctctcgcctatcatctttttccagttcgctatcagacatatttgaaaccccataactcataaagcttcactcttttccacaatctcttactccaaagttttcttctttccccccaaaaaattataatggtcgacgttgatcggagaatgaccggtctcagaccagctcacgccgctggtctccgtcgtctctctgctcgcgccgccgcaccaacaacaccaacggttagaaacagtctcgtctctttctcttctctcgccgatcaagtaatctcacacttacacacttcaaggatccaagtccaaccgggtctaaccgactccgaattcgctagagcagaagcagagtttgcattcgcttttccaccggacctccgtgctgttctcaccgccggtttaccagtcggcgccggatttccagactggcgttctcccggagctcgtcttcatctcagagctatgatcgatc

SEQ ID NO: 91848 - DNA, 354 bp, Arabidopsis thaliana columbia
aacacgcgtccgcggacaacctttggatctaagtctacagatgaagggtgaagatagacccatatcctttgtgcgtgaggaggatagagatgacaaaagaagaagagcggagttcattttgagacagtgcatggagaacccagtagccctcaatcagttgtaaaataagtgattcattacagtctgtggagcgtactattaatcttgtgatttgtaacctttctttacacaggcctatgttatgattatgattttgtgactgaaagaatgagaatttctaacctatcttttaggcaattgatatgatgtctttctcatgagattcttgttacataacttaatgttagtttcaaa

SEQ ID NO: 91849 - DNA, 484 bp, Arabidopsis thaliana columbia
aacacgcgtccgattgattttgagtctctgttttatccggaagtcgaaattggatggtgataaacggaatgcgtgttggtaagtacgagcttgggaggacactcggagagggaaattccgcacaagttaaatttgctatagatacacttaccggcgaatcattcgccatcaaaatcatcgagaagtcgtgtatcacacgtcttaacgtctcttttcagattaagagagagattcgaacactcaaagttttgaagcatccaaacattgtccgattacatgaggtcttggctagcaaaaccaagatttacatggttctggaatgtgtcactggaggagacttatttgacagaattgtctcgaaaggaaagctttcggaaacacaaggacgaaaaatgtttcagcagttgattgatggagtcagctattgtcataacaaggtcgtttttcacagggatctcaagctagagaatgttcttcttgatgc

SEQ ID NO: 91850 - DNA, 955 bp, Arabidopsis thaliana columbia
  unsure (1)..(955): unsure at all n locations
cacctagtcgcttaactaacgcaagaacactttgtgtatctgatcaaaattatgggaagaaatctcttggacatgatcgttttagatcagctccttccaaaacttttaggcagatcaattgcagaacttttcaatctggtgtgggtttgcttccaagacctaagagaacttcttcaacacctttaaccaaaggagctctttctcaagttcagtctcctcgttctcctaagtccgttttaccggtttttcatcatccatctgttgacagtggtagaaccagtcccattccaattgctaattgcagaggttctcagatccgtaggtgttctagtgagtttgttgacaaaaggagaagcctttcttattctgagctatgggcaggacctacttactctaactcacctccacctgcttctgtgccgattcctaagttttctctccagcaaaagaggacggtatctttgacctttcctgctcctgactctgctgttgatattcgtgaagttgctaagtctgcaccagtttctccaacctcatctggtgacaatccttttcgtagtactgtctctgccactatgacactgcgtcgcatgctcaatcttgagcttgagaactgcagatgaatgaagatcaggagcctttaagggggaacggggtagttttagtttaatgcacatagaaataaagggggtaaggcaccaaagccnggtttnagtttggttcctaagctttaaaatgggggatggggaaaaggnataccggaagcaaggcctttnccccggggggtttgccancaagtaaccnggngcccccctgggnggaaaattngggggggnataaggngggggaaaaanctgggtnanacgggggtgnaacatccaangaaatggggggggggaannaannggggngaaacccggggananggggggggaacaancctggggcgnannca

SEQ ID NO: 91851 - DNA, 1583 bp, Arabidopsis thaliana columbia
  unsure (1)..(1583): unsure at all n locations
tnnnnnnnnnnnnnnnnnnnnnnnnnnnnnnnnnnnnnnnnnnnnnnnnnnnnnnnnnnnnnnnnccacgcgtccgcccacgcgtccgcccacgcgtccgcccacgcgtccgctcagactaagacagagtcagaaacaatggcgaaatctccagaaacagagcatccgaacaaagtctttggttggggtgctagagacaaatccggtgttctctctccttttcacttctctagaagagacaatggtgaaaatgatgtgacagtgaagatcttgttctgtggagtttgccacactgatttacacaccatcaaaaacgactggggatactcgtattacccagtagttccagggcatgaaatcgttgggatcgctacaaaagttggtaagaacgtgactaaattcaaagaaggagatcgtgtcggagtaggagtgatcagtggctcgtgccaatcttgcgaatcttgtgaccaagatcttgaaaactactgtcctcaaatgtctttcacatacaatgcgattggatccgatggaaccaagaattacggtggctattcggagaacattgtggttgatcaacggtttgttttgcggtttccggagaatttaccgagcgattcgggtgcgccgttgctgtgtgctggaatcactgtgtatagtccaatgaagtattatggtatgactgaggcagggaagcatttaggggttgctggacttggtgggcttggtcatgttgctgttaagattggtaaagcttttggtttgaaagttactgtcattagttcttcttctacgaaagcagaggaagccattaatcatcttggtgctgattcgtttcttgtcacaactgatcctcagaaaatgaaggctgcaattggaacaatggactacattatcgatacgatatcagcagtacatgctctgtatccgttgctcggtttactcaaagtcaacggaaagctcattgctttaggcttacctgagaagcctctcgagctaccaatgttccctcttgttctcggaaggaaaatggttggaggaagtgacgtgggagggatgaaggagacacaagagatgcttgatttctgcgctaagcacaacattacagctgatattgaattgattaagatggatgagattaacactgcgatggagaggcttgctaagtctgatgttaggtacaggttcgtgatcgacgtggctaactccttgagccctccatgaatgatccggatctaagaattgagcattgaggaggctttaaatctatgtcataatcttggtgtttgtttgtgtctctcgagttatcttcgttttctgctttcggtttgagaatcggtttcttctcagacaagttaccttatttcgttgttttcttctcatgttctgtttcctgagagaaactctttctgattccagataagactttgatccattttcagtttgctaataatataaagatgggtctaaaacctaaacagctttaaactnnnnnnnnnnnnnnnnnnnnnnnnnnnnnnnnnnnnnnnnnnnnnnnnnnnnnnnnnnnnnnnnnnnnnnnnnnnnnnnnnnnnnnnnnnnnnnnn

SEQ ID NO: 91852 - DNA, 861 bp, Arabidopsis thaliana columbia
  unsure (1)..(861): unsure at all n locations
gcttctgctttctttgtgactcagactttgcgtgctttatcacgagatggaaggacggtgatagcatcgatccaccaaccgagcagtgaggtttttgagttgtttgatcggttgtatctgctttctggaggcaaaactgtttactttggtcaagcttcagatgcatatgagttctttgcacaagctgggtttccatgtcctgcgttaaggaacccttctgatcatttcctgagatgcataaactcagactttgacaaagttagagccactttgaaaggttctatgaagctaaggtttgaagcaagcgatgatccgttggaaaagatttccgcggccgcggcggttagactattggttgactattaccacacttctgattactactacacagcaaaggctaaggttgaggagatatcccaatttaaagggactattcttgactccggaggcagccaggctagtttccttctgcagacctacactttaacaaagcgatcattcatcaacatgtcaagggactttggttattactggctcagacttctaatttacatcttggtcacagtctgcattggaaccatctatctgaacgttgggactagctacagcgccattctggcacggggctcatgtgcgtctttcgtctttggctttgtaacattcatgtcaattggtggatttccttcgttcgttgaagacatgaaggtcttccaaagagagagactaaacgggcactatggagtagctncgtttgtgatagccaacacattatctgcaacaccattcctgatcangataactttcatctccgggacantctnttacttcatggnngggtctgcatccaggnttcantcacta

SEQ ID NO: 91853 - DNA, 398 bp, Arabidopsis thaliana columbia
agttatgtttcccaatctgataattatccgtatcgatggccgtgagttttccagattttctcaagttcacaagtttgaaaagcctaatgatgagacatctctaagtttggggaattcatgtgcatcttcggttttagtagagtatcctgatatagtctttgcatatggatatagtgacgagtacagctttgtattcaagaaagcatcaagattctaccagagacgagccagtaagattctgtctttggtagcctcattttttgctgcggtctatgtaacgaaatggaaagagttctttcctcatacaagaattagaatatgctccttcatttgcttcaaaagttgtaagttgtgcatcggtagaggttcttcaagcttaccttgcgtggagacaacat

SEQ ID NO: 91854 - DNA, 506 bp, Arabidopsis thaliana columbia
gccggcactaatacgactcatatagggaaagccggtacgcctgcaggtaccggtccggaattcccgtgtcgacccacgcgtccggagcattgacaccaagtggttcaagatcttgggcaatttttctcttcatcaccacctgggttttcttcttcatagcacaagtgtgtttacttgctggctctgtacgaaacgcttaccatacaaagtaccgtgtctactttggtaacacttccccttcttgtcgatcactgaggaaaggcgtgtttggggctggagcagcattcatagtgctcacggggattgtctccgagctttactatgtgaccctttcgagggccaaagactttcaaccttcaagagatcccggtatccgaatgagtagcctgtagaacttacacctgctttgtagatttaaaatagttatgttcattgttggtatcatcttactatcttaggtcattgttggtatgattttaatagtatggaggaaactaacattattt

SEQ ID NO: 91855 - DNA, 575 bp, Arabidopsis thaliana columbia
taatacgactcacttagggaaagccggtacgcctgcaggtaccggtccggaattcccgtttcgacccacgcgtccgctccttcctcaagtcactttttgagtcgcagcaatttggcgtttggtatctctcaatctgctgcttctccttctcagtcatggtcatggatatcgatttcaacgagtacaagctcaggtgcgagcttcatggccacgatgatgatgttcgtgggatttgtgtgtgtaatgatgagaatatagctacttcatcaagagataggaccataagggtttggtcactggatccatctgataagcgcaagtatacctccgagaaaattctgctgggtcatactagctttgttgggccacttgcatggatcccaccaactgatgaataccctgaaggaagacttgtctctgggagtatggatacttccgtttttgtttggaatctgatgaatggagagaatattcagacattgaagggtcatcagatgcaagtcactggtgttgctattgataatgaggacatagtttcatcttcagttgatcaaaccctgaaacgatggagaaac

SEQ ID NO: 91856 - DNA, 482 bp, Arabidopsis thaliana columbia
atgatatgccgagcactaatacgactcacttagggaaagccggtacgcctgcaggtaccggtccggaattcccggttcgacccacgcgtccggacagaatgtgggcgaggcttttgtcttcgacgaaccaaccgagtttcatgaagcaagctgacaagatccactcaaaccagttggttggtgaaccagggaccatgaaatggtgatcaacactgtctacaaaaacattcgtttgtgttttgacttgaggacatctttgtttgggaagtaaggtttcttaatttaatagaaagcttttcaaaaattgttttataatattcttcaagcaaagagaagagagagagataactcttgtgagaataatgtaacaactcttggttccaactacaactttgcttctgtatatatcccacgctgagtctttgaggctcatgcacctttattctaatttacatcactagcgaatgggacttgaatgaggg

SEQ ID NO: 91857 - DNA, 659 bp, Arabidopsis thaliana columbia
  unsure (1)..(659): unsure at all n locations
ctcattatagggaaagctggtacgcctgcaggtaccggtccggaattcccgggtcgacccacgcgtccgcaaaatttgaggtgtcttctacagatcaatattgatctccaacactctctggttcccagatcttcttcaaccttataccctagtttcgcaatttcattctcattttctccgctcttcatctctttcgatcaaccaatttacgacatggatgaggttgttgttgaagtggagaagacgaagagagaatgggaagaagcgtacgagaagacgattggacatattatctcgattcaacagtacggtaaatcaaggaggggagatggaggagaagagaagttttcgttacagaggctcaacggattggctcaggatggtctctctcttctcaattcccttcaattcaatttggatctgctcgcacctcagcttccttctgatgatcagggttcaatccactcagtcactccttgaaacgtggaagaatcaatatcacagtttgagggtaaacttgagaagtgctaatttgcaagctaaggataacatgaggaaagcagctcaagaagagagagagcttctcctcggtggtggaacagagtctacagttctcagacgtaaacgacaagcanatgctggcgtgacatccgatgctg

SEQ ID NO: 91858 - DNA, 667 bp, Arabidopsis thaliana columbia
  unsure (1)..(667): unsure at all n locations
atgatatgccagcactatcgactcacttagggaaagctggtacgcctgcaggtaccggtccggaattccggtcgacccacgcgtcgccaccgtcggatcttttccccaagtttcagacaaacataaagcagcagagaaaattttcaagtttcaaagagcttttccctcaccaagcaaaatttggatatttgtcagcaaaatctgcagctaaattgggacttgtcttgttagttcaaagattgaaacttttttggttaattgtttggcggaagaagatttacaatgggagaggagcatccgagaaagcggtctagacaacattttgaagcggaggcgagaaacgtatcgttgtttgaatcccctcaatgcgaaacctccaagtggtatttcagcagggaagagattgagcgtttctctccatccagaaaagatgggattgatcttgtgaaggagtcgtttttacggtcttcgtattgcaccttcctgcaaagacttggcatgaagctttcatgtgtcccaggttacaatatcatgtgcaatggtgatgtgccacaggttntacatgcgccaatctcatgcaaaaaatgactggcagacaatagcgacttccagtctgttcctcgcttgcaaagctgaagatgaagccatgtcaactgtccagtgtcgt

SEQ ID NO: 91859 - DNA, 1178 bp, Arabidopsis thaliana columbia
atactgactattcatatgggaaacgctggctacgcctgcaggtacctggtcctggaattccctgggtcgacccacgcgtccgcaaatctacctcatcttcctcctccaccgcagttgcaaccgcccgaaacgccatcatgggaaacaccatcgtctgtatggtatactccaagaaccacacgcatggagaacaccacagagcacacaatccacaccagttggcctaatggtcttaacaaagccagcaacggttagattcaacggtcttgatgcagagccgaggaaagatagggtgattctccgtcagccaaggagtagcaggaccagtctctggatatggtgtgttgccggtttctgttttgtgttcagccttttgcttatcttttttgcgattgccactttgatagtgtttcttgcgattagaccaagaatacctgttttcgacatcccaaacgcatacctacacacgatctacttcgacacgccggagtttttcaacggcgatttgtccatgctggtgaatgtcactaaccctaataagaagatagaagtgaagtttgagaagcttcggattgagctcttcttcttcaatagattgattgcagcgcaagtggtccagccattcttgcagaaaaagcatgagacgagggtggaaccaatccgtctgatctctagtttggtaggcttgcctgtaaaccacgcggtggaactcaggagacagctggaaaacaacaagatagaatatgagattagaggtaccttcaaagtcaaagctcattttggaatgattcattactcttatcagctgcacgggaggtgccaacttcagatgaccggtccaccaaccggaatcctgatttctcgtaattgcacgacgaagaaatgaaaaagaatacggtacagttctctgagtcagtagtcatcttcaaagtctttagctttggcatgtttattcaaatatatttctatttgcttacccacaacttgtataaaagaaaaagacctagtgaactctatccaagaaccgagatcggagtttgtactatttccaagataaagaaactggaaagatattatctttctatgaagcataaaaaaaaaaaaaaaaaaagggcggcagctctagaggatccaagcttacgtacgcgtgcatgtgacgtcatagatcttctatagtg

SEQ ID NO: 91860 - DNA, 532 bp, Arabidopsis thaliana columbia
ccctctctttcgcgaatttattcgctccgccgcttctcacagctaacggttttccccatccgaaatcattgtcgtacattgggaatctcggcgagctccccatcgtgatcgaagctccatctggatttccgagaggaaacagcctcggatcgctttcccaagcggcgattccacggcggaccgtcgcgtcgtcgtgcgccaccacgttcctgtgtaactgttcggcggaccacctgagatctttgcttagcagatctcccgcagacgccaacgtcggtatgctctgtatcgcgtttccgaagtagtacggatccatcttcggctcaagccggtgccggcaattaaccgccattcgaaacgtcgtcgtcttgctcggatcgagattcctcgctcgtgtaacggatcgccatagctgagcgctgagagattggaacgatgaaatctcagccgtccgatcataactcttcttattattcaaaaaactatccaaaacgtttggtaatcgcctctctgctgaaatgaaaaattctct

SEQ ID NO: 91861 - DNA, 985 bp, Arabidopsis thaliana columbia
ctcactatagggaaagctggtacgcctgcaggtaccggtccggaattcccgggtcgacccacgcgtccgttcgaaaaaccctaattcagctaaaggttgatcgttgatctaaaagctcgagtgatgaagggaaattggtcgatcgtacgaaaggttcttcatcgccagttctccactctccgttcctcgacaccatcgtcgcgattatctacttccatccgaccgcttgttctggccccaaactcgatatcgtcgctaatcgctagaaactcgttgttcactgcctccaacattggtccatccatcgattttaacttctccaacacttcgcttcctcatcggagaagcctctgttcggaagctggaggtgaaaatggtgttgttctagtgaaatcagaggaagagttcatcaatgcaatgagcaaagctcaagatggatctttaccatcggtcttctatttcactgccgcctggtgtggaccatgcaggtttatctctcctgtaatcgtggagcttagtaaacaatatcccgatgtaactacgtataaagtcgacattgatgagggcgggatttcgaacactatcagcaagttgaatatcacggctgtgccaacactgcatttcttcaaaggaggctcgaagaaaggggaggttgtgggtgcagatgtcacgaagctgaagaatctcatggaacagctctacaagtgaagacctaatccgttctagtaaagaacgtgttgaatagctgctagttaagactgtccaatcaaatcaaggttaaaaaattcttgcttcctttttcaacaataaggctttatgtagttttctccaaataatgatgagatgtttcatatgatttaaccgatgaattgaagttgggtatgcaaaagacattcctctgaaaaaaaaaaaaaaaaagggcggcagctctagaggatccaagcttacgtacgcgtgcatgtgacgtcatagtaacttctatagt

SEQ ID NO: 91862 - DNA, 973 bp, Arabidopsis thaliana columbia
  unsure (1)..(973): unsure at all n locations
taatcgactcactatagggaaagccggtacgcctgcaggtaccggtccggaattcccgtgtcgactccacgcgtccggagatggaggcacttaaggtatggagtctaacggcgacgccactgaaacaattactccgtctatcctcttcttctacacgtctcgccaccacaatatatggacgaagatcctaccacttatcacctgcgctacgatgtgcctccgcagcttcttcttcttcttccagtgccacgacggctgaaacttctaaaccctccggccgcaatcgccggtctgcgtcatcttccaattccacctctgatcgtgaagctatccgctccattcgccttaaaaaggttgaagaattgagaggccaaggtcttgaaccttatgcttataagtgggaaaaatcccacagtgcaaatcagcttcaagagatatataagcatttagctaacggtgaagaatcagacaatgagattgattgtgtttctatagctggtcgagtcgttgctcgtagagcctttggaaaacttgcattcttgactctcagggatgactctggaactattcagctttactgtgagaaggaaagactttcagatgatcagtttgaacagttgaagcaatttatcgacattggtgatattttgggtgctagtggctcgatgaagaggactgagaaaggtgagcttgactaagatgattatactcgatggagaatcttttttttggggtttgttttgtaactgtttgttctctaattttccaggggagctttctatatgtgtgaattctttttcaattctcacaaagtctctccttccacttccagacaaatatcatggtctaactgatattgatanacgtacccgcacacagatgagctccaccttctgtntatgtaaatccctgtttctaattattaaagaaagatcataagttttcgcacgcgtcgcccgccccgggnattccg

SEQ ID NO: 91863 - DNA, 1113 bp, Arabidopsis thaliana columbia
  unsure (1)..(1113): unsure at all n locations
nnnnnnnnnnnnnnnnactcactatagggaaagctggtacgcctgcaggtaccggtccggaattcccgggtcgacccacgcgtccgcaaaacttcctaagaaaaaaaaacagagagattttttttctctttctaaagcttttttatagagtaaagatgttttcagagcacttaccttcttcttcatctcaagttttccaagaacacttcatcgacagtttcgtctccagaaaattgcttcagcagatcccatttgcccacaacgctcaacaagctcatgtacctgataagaacaacttgagcggcaatgttctcatgctgctctctatccttttgtgcggtatcatctgctccctcgggttgcattacataatacgttgtgcatttatacgttctcgaagtttcatgatctctgatcccatctctatcccatccacaccaagagattcatcagtaaacaaagggatcaagaagaaagctctcaagatgttaccagttgtgaattactcacctgaaattaacctgccaggggtcggtgaagagtgtgtcatctgcttgtctgattttgttgctggagaacagctacgtgtacttcccaagtgcaaccatggattccaccttcgctgcatcgacaaatggcttacgcaacatatgacttgtccgaaaagcagaccctgtttggttgatacatgccaaaaagttttaagtgactgcgatgcagctgatcaagtggcagcgccagcaccggaaggcatagaaatcagaatttttcctttaaaacctgaagcaaaagtagccccttttaaaaaaagcagctaaagtatgccccccaaacaatcataatttcaaattttggctctccagcaagattaaagtttttttatgtccctaaccataggatgtcaaaatcaaacccagcaaagttttttttttgccttttgtttttttcaaaaaggcaagaacaaaaaccttaagctttttgtggccnnnnnnnnnnnnnnnnnnnnnnnnnnnnnnnnnnnnnnnnnnnnnnnnnnnnnnnnnnnnnnnnnnnnnnnnnnnnnnnnnnnnnnnnnnnnnnnnnnnnnnnnnnnnnnnnnnnnnnnnnnnnnnn

SEQ ID NO: 91864 - DNA, 797 bp, Arabidopsis thaliana columbia
  unsure (1)..(797): unsure at all n locations
gtcccgctccggatttcccgggtcgacccacgcgtccggtttttggatcggaaaagagttctagatgatgatgaagaccaagaagaagaagaagaagaagaagaagggggaataatggcattgcaatggctgattctgtcgtatgtggttgccgccgaggtagcgatcgccgtcatcttgactctcccttacccaatgctcctgaagaaacgcatcgtatcacttatctcgctcatactcaatcctgccgcttccatcgtcgccttcgctggatttcaactcctcgatatttactggaagaatgagcataggctattgtgctcatctgaagtttgcactactacagagcgggatcgtcacgagaaatccgtctataaggctcagaggaatggggttctgtgtgcggctgggatccttctctactggtgcatcttccgcatctgcaagtaccacaaagaccttgagcgtttggagcaattagagaagagatacaaggacgagtagaaatcttcccaactgagagtctggtactactgttatagtatcactcggcgtgtgagtagtcccaaaaactgaatgagagcatgatttgatcttgagaaaatttttacacagacccttttgtgttaattccttctgcaacttttggtttactttttggaggaacaacaggctctgtttttcacgtcaaaaaaaaaaaaaaaaaaaaaaaaagnnnnnnnnnnnnnnnnnnnnnnnnnnnnnnnnnnnnnnnnnnnnnnnnnnnnnnnnnnnnnnnnnnnnnnnnnnnncgattc

SEQ ID NO: 91865 - DNA, 550 bp, Arabidopsis thaliana columbia
ctttttctcacttctcataaaaaaggtcattttaaaaaaaaatcagaaaccgtcaaaaagccaccgttgatatttcttccttgttgcttcttcaatggcgtcgttcgacgaagcacctcccggaaaccccaaagccggtgaaaagatcttcagaaccaagtgcgctcagtgtcacaccgtcgagaaaggtgccggtcacaaacaaggaccgaatttgaatggattgtttggaagacaatctggaacaactccaggatattcttactctgctgctaacaaaagcatggctgtgaattgggaggagaagactctttacgattacttgttgaatcctaagaagtacatccctggaacaaaaatggtgtttcctggactgaaaaaaccgcaagatcgtgccgatctcatcgcttatttgaaggaaggtactgcttagacaggctcgtccagatatatgaagctggcatttttttttctcacagctaaataaaatcagaccaaaaatattatggtcatgaactgctttttgtatgggcttttattctttctttct

SEQ ID NO: 91866 - DNA, 530 bp, Arabidopsis thaliana columbia
  unsure (1)..(530): unsure at all n locations
atgattttcgccnnnnnnnnnnnnnnnnnnnnnnnnnnnnnnnnnnnnnnnnnnnnnnnnnnnnnnnnnnnnnnnnnnnnnnnccacgcgtccgtttctccaccgcgcacgttagcctcctctctttcccactccgagatggagacgacgccggagactcagtcgaagactcaccgtctaccggcgggaagagaggattggtggagcgaagacgctacggcgacattgatcgaagcttggggagatcgttacgtcaatctcaaccggggaaatctccggcaaaacgattggaaagaagtcgccgacgccgtcaattcaagccacgggaatggccggccaaagaccgatgtacagtgcaaaaaccggatcgatacgttgaagaagaagtacaaaactgaaaaggcgaaacctttatcgaattggtgcttctttgatagactcgatttcttaatcggtccggttatgaagaaatcgtccggtgctgttgttaaatcggcgttgatgaaccctaatttgaatcctactggatc

SEQ ID NO: 91867 - DNA, 737 bp, Arabidopsis thaliana columbia
  unsure (1)..(737): unsure at all n locations
nnnnnnnnnnnnnnnnnnnnnnnnnnnnnnnnnnnnnnnnnnnnnnnnnnnnnnnnnnnnnnnnnnnnnnnnnnnnnnnnnnnccacgcgtccgaagtccagcctcgattacaatgcccttggcatttctgtgtggatttgataaagcaaaaggaccatttgcgacgttcattgttcagaaggggactttgaaaagaggggatgttgttgtttgcggagaagctttcggaaaggtacgagctttatttgatcacagtggggaacgagttgatgaagctggaccctccatacctgtacaggtgattggtttaaataatgtccccattgctggtgatgaatttgagatcgtctcttcccttgatgtggcgcgggagatggcagaggcacgtgcggtatcactacgagatgaaagaatatctgcaaaggctggggatggaaaggtcacgctttcctccttagcttctgctgtatcagcgaaaaagatgtcaggcttagatttgcatcagcttaatatcatcttgaaggtcgatgtacagggatccattgaagctgtaagacaagcccttcaagtcctccctcaggagaatntcaccttgaaatttttgctacaagcgacaggggatgtnagcaacagtgatgttgatctagcatcagcgagtgaagctatcgtttttgggtttaatgtncaaagcggcctggttncnttnaanaaagcttccagnaaaacaaaaggtgtt

SEQ ID NO: 91868 - DNA, 800 bp, Arabidopsis thaliana columbia
actcactatacggtaagctggtacgcctgcaggtaccggtccggaattcccgggtcgacccacccgtccgacctcctgtcataacgataatgggccatgtggaccatggaaagaccactcttctggactatatcagaaaaagcaaggttgctgcgtcagaagcaggaggaattacacaaggaattggtgcatataaggtgtcagtgcctgttgatggaaagttgcagtcctgcgttttccttgatactcctggacatgaggcatttggtgcaatgagagctcgcggagcacgagtcactgacattgcaatcattgtggttgctgctgatgatggaattcgtcctcaaacaaatgaagcaatagctcacgcaaaggctgctgctgtaccaatagttatagctataaataagatagataaagaaggagctagtccagatagagtgaggcaagagctttcttcaattggtttgatgcctgaagattggggtggtgatgttccaatggttcagatcagtgctttgaaaggggaaaatgtcgatgatctgttggaaactgtcatgcttgttgcagagcttcaagagttgaaagcaaatccacacagaaatgccaagggcattgtaatcgaggctggacttgataaagcaaaaggaccatttgcgacgttcattgttcagaaggggacttttgaaaagaggggatgttggtggtttgcggagaagctttccgaaaaggtccgaagcctttatttggaacaccaggggggggaaacggagtttgaaggaagctttggtaccccttcc

SEQ ID NO: 91869 - DNA, 400 bp, Arabidopsis thaliana columbia
ctaaagaagaaaccaaaaacctaaaagaacagacagaggaagaaaagatctttaatattttttttatttctcttcctggttgagaacttttacttcctctccccttaattgcaacaatgggaaattgttgctctcatggaagagattcagatgataacaaagaagaaccgaggccggaaaatggaggcggcggtgttggtgccgctgaagcctctgttagagcttctaaacacccgccagcatctcctcctcctgcaaccaaacaaggaccaataggacctgtcttagggcgaccaatggaagatgtaaagagctcatatacattgggtaaggagctaggtcgtggacagtttggggtgactcatctctgcacgcaaaaggccacggggctgcaattcgc

SEQ ID NO: 91870 - DNA, 884 bp, Arabidopsis thaliana columbia
  unsure (1)..(884): unsure at all n locations
ttggagaaggcttgagatcgagcatgaccgggacgatgttatgagcacgattaggtcgacaatgcctggtacagtggtgtatggtgattacgtaattgaaaggaacaatgccaacggttcanattcagacgagggtggtgatgatgatgggatcgatgctgcatttggcaggaatcttgtgaatgttttccttctgtnacatgcctttggggcatcaggtaatcagatcagacgctctgattcaaattcgaatgactcgacancaatcaacccgaggaacaagtgagcctnaatttntnttnangaaggangaggnaagaggaaggaggaggagagccatagtaccagtaactctttggcaagtcgaatgaggcgacaaggacgcgttctgctgggacgttcaggtaggagacgtagagatagagaagctaaccagaacacaggtcctcctcctagatgagagagaatcacacgaattcaaaagaaaacccctgtctgattttgggtttcaggtaagctttatggtatggttaggtacaaatgtagtttcgacaagtttaaaacaaaacaaaaaaaggcttttggcctttctgctatcaccattggagaatttgggaatttgactcgaaattctttcatatgctagagaagcaggcttgcaatctcatgttttatttactgtattctgatgtaactttctgggtggaaaattcacaaatatctatccttgtgaataagcatgatcagtgatgatgaccaatgaagtcttttagcgaattatgaaattgtgtttccttgtgtttatagattccatgtgcgcttagagacttacctatgaatcgttgtagagtcttctaagagacttagaccacacacactcacaa

SEQ ID NO: 91871 - DNA, 669 bp, Arabidopsis thaliana columbia
  unsure (1)..(669): unsure at all n locations
cccccctagacttcgacggtatcgataagcttgatatcgaattcgcggccgctaggtcgacatgcctggtacagtggtgtatggtgattacgtaattgaaaggaacaatgccaacggttcagattcagacgagggtggtgatgatgatgggatcgatgctgcatttggtaggaatcttgtgaatgttttccttctgttacatgcttttggggcatcaggtaatcagatcagacgctctgattcagattcgaatgactcgacaacaatcaaccgaggaacaagtgagctgaatttctctgaagaagaagaggaagaggaggaggaggagaggcatagtaacagtaactctttggcaagtcgaatgaggcgacaaggacgcgttctgctgggacgttcaggtaggagacgtagagatagagaagctaaccagaacaccagggcctcctccctagatgagagagaatcacaccggattcaaaagaaaaccctgtctgattttggggttccagggaagctttatgggatgggtagggccaatgtagttccgccaagtttaaacccaaccaaaaaagggtttngccttctggaannccattgngaattttggnattnncccnatcntcaatnctgnaacagggtnanccncggttattccgnacccgggnnnnc

SEQ ID NO: 91872 - DNA, 551 bp, Arabidopsis thaliana columbia
  unsure (1)..(551): unsure at all n locations
nnnnnnnnnnnnnnnnnnnnnnnnnnnnnnnnnnnnnnnnnnnnnnnnnnnnnnnnnnnnnnnnnnnnnnnnnnnnnnnnnnccacaggtgcgtgagaaaagtgtactgcatcaacaaatccttggccaaattaccacttagtgtggaggatgctgctcggagtgaagcagatatcgaagcatctcttcagactccatctccagctgctcgtgtcaatcaggatacacgtttgaactatagggtgctcgacctcagaacaccggctaatcaagccatcttccagcttcagtacgaagtcgaatatgccttcagagaaaaattacgatttaagaattttgttggaatccacacaccaaaactgatggctggtagtagtgaaggaggttctgctgtatttaggttggaatacaaagggcaacctgcttgtctagctcagtctcctcagctccacaagcaaatggcaatatgtggtgacttgcgacgtgtctttgaggtaggtcctgttttcagggccgaagactccttcactcatagacacctgtgtgaattc

SEQ ID NO: 91873 - DNA, 574 bp, Arabidopsis thaliana columbia
  unsure (1)..(574): unsure at all n locations
nnnnnnnnnnnnnnnnnnnnnnnnnnnnnnnnnnnnnnnnnnnnnnnnnnnnnnnnnnnnnnnnnnnnnnnnnnnnnnnnnnnccacgcgtccgcacgaacttccattaatcaccgactcgcagaacctttctctcattaaatcttgtggaaacctcggaaattgaatctgcgtgagtttcaatcgcttgatcgatccatcaaaccctagagatggtgaggaaaaaggtaccggaatggcttaatagcaccatgtggtctactcctcctccgccatcttcttacgacgatggtctcctccgtcattcccccgtcactaagatgaaggaagaggcagaatcgatttccgttgctcccaggcttaattctgctcctccgccttcttccaacacttcggttccatcgccgtcgcatagaccgaggaacggtaacagtatctctggcggtagtggcgaatatggacattccgttggtccttccgccgaagacttttcccgccaggctcatgtctcagcggagttgtcgaagaaggtgatcaatatgaaggaattgaggagtctagctttacaaagttt

SEQ ID NO: 91874 - DNA, 727 bp, Arabidopsis thaliana columbia
  unsure (1)..(727): unsure at all n locations
cccacgcatccaagaaaagaaaagaactgtcttttctgtatacttatgtttactttccccggttccgttgcgtctgcgggctttacgcaggtgatcggatcatctagatatcccttcaacacaacataggtcgtcgaaaggatctcggagacccgccaaagcacgaaagccataatctttcagaaaatgaattcctattcgaagagtgcataaccgcatggataagctcacactaacccgtcaatttgggatccaattcgggattttccttgagggatattggtaaggaattggaatgtaataatatcgattcataatggattcatatcgatacagaagaaaaggttctctatcgattcaacaagtgctgtacttatgggaaagcgatagagaaagagaaaaaaaaaaacgaagatttcacatagtgatttttttttttttttttgatcaaaaataaatctgattgaatttatttcgtaccccttcgctcaatgagaaaatgggtcagattctataggatcaaacttatgggacttaagaatgatggaagggaataaaatcaaaaaagaaatcaaataaagaaaagagagagaaaataaagaaaaaataagtaattcaaaaaaaaaaaaaaaggnnnnnnnnnnnnnnnnnnnnnnnnnnnnnnnnnnnnnnnnnnnnnnnnnnnnnnnnnnnnnnnnnnnnnnnnnnnnnnnnnnnnnnnnnnnnn

SEQ ID NO: 91875 - DNA, 748 bp, Arabidopsis thaliana columbia
  unsure (1)..(748): unsure at all n locations
atgatctannncnnnnnnnnnnnnnnnnnnnnnnnnnnnnnnnnnnnnnnnnnnnnnnnnnnnnnnnnnnnnnnnnnnnnnnnccacgcgtccgcttcagtttcaatttgtttgttccatacactgtacctcaatacgtaatctctggtctcataatgtttgttgctgctgaagtactcgaaggtgtgaatctatcgttgttatcgcgggtaatgtcatcaaggctatcgaaaggaacgtacaacggaggattgctctcaacagaagctggaacgttggctcgtgttgtggcagatgcaaccataacattgggaggatatttgggaagaggccatctcctgaatgccactcttctaccatcacttgtcatctgcattggctccatcgttgctacttgttgtacttataactcactctattgattttggagttttgctaccaaattttacaaaatagaataaaacagtgtgtatgatcgatcctctctttgatttgattatttttgttgttctaattcatatgggtgtatatgtgttttataatacatataggatgtatattcgtatatatacggtgaatatcaaatcccccccttgttggaaattccagttttgtgagattctttttctgaagtattgtaataaattctcataaaaaattataagtttttatttggtnnnnnnnnnnnnnnnnnnnnnnnnnnnnnnnnnnnnnnnnnnnnnnnnnnnnnnnnnnnnnnnnnnnnnnn

SEQ ID NO: 91876 - DNA, 534 bp, Arabidopsis thaliana columbia
  unsure (1)..(534): unsure at all n locations
atgatctnnnnnnnnnnnnnnnnnnnnnnnnnnnnnnnnnnnnnnnnnnnnnnnnnnnnnnnnnnnnnnnnnnnnnnnnnnnccacgcgtccgcccacgcgtccgaagagagagatgggagggagggtttgtggcagataaactgatagaaaactttcgaacctctcttctttaacttttactactctctattcgtttttctcttccttttgtggtgccgcctccaactgaaagtcttctaatatatattctcaattattctagctctccgggagaagtcttatctcacgccaatctctcatttcccactatgaggcatgaggagaattacttagacctcaacaatcttccagatgatttttctaaagatggcaataagcaagccctcgaggaaggttcttcctctggtcaaagaaagaagaaagggagtaaagaagggaaagatgagagtgggaaagtgtacgaatggtcgatttgttcactcaagttctgcaaatcccaagctctttggtggccacatgaatcgccaccgac

SEQ ID NO: 91877 - DNA, 720 bp, Arabidopsis thaliana columbia
  unsure (1)..(720): unsure at all n locations
atgatctgccagctannaatacgactcactttagggaaagctcgtacgcctgcaggtaccggtccggaattcccgggtcgacccacgcgtccgcggacgcgtggggggagacaaattaattggttgggggacttttttgtcctacgatttcccagaaacctcgtcggcgaaattcaaacaaatcaaaagtcttaaatttaaggataatccaaaatattcgtttgttgaatatttttgcatcagtttgttttgcattgggctcttaaaccaattctatcactcagaattattgttttgtaataatcgtgagaagaaactttagggtttcactgtttcagagttttgattggtgaattataaaagatgcagcaatctccacagatgattccgatggttcttccttcatttccgcccaccaataatatcaccaccgaacagatccaaaagtatcttgatgagaacaagaagctgataatggcgatcttggaaaatcagaacctcggtaaacttgcagaatgtgctcagtatcaagctcttctccagaagaatttgatgtatctggctgcaattgcggatgctcaacctcagccaccagcagctacactaacatcaggagccatgaccccccatgcattggctcctaatccgtcatcaatgcagccaccaccaagctacttcatgcagcaacatcaagctgtgggaatggctcaacaaatacct

SEQ ID NO: 91878 - DNA, 521 bp, Arabidopsis thaliana columbia
  unsure (1)..(521): unsure at all n locations
nnnnnnnnnnnnnnnnnnnnnnnnnnnnnnnnnnnnnnnnnnnnnnnnnnnnnnnnnnnnnnnnnnnnnnnnnnccacgcggtccgcccaccagtgcgttgcgtaaggactagtcgtatggtctattctatggctcattccaagctcacattttgaaccctcgatttcccattcttctcatttctctccactctactcctcagatcaaccaaaagctccctcacagctctctctttatccctccgattcttaatcacagcctcacttacggcagccggcgtatcctcacccctagcaaccacttccgctacctccttcataacatcgccgttaagatcaccttactcatacctcaagtaattcctgactaaaaacttggccgaggaactcgtgcagttacgcatgtgcatatgcacattcattcttccacctggaaccaacgcatgatcaagcttctcaatgagctccgaagtgctctcaataattctataggtcccacgtctagaccagagaccatccgt

SEQ ID NO: 91879 - DNA, 527 bp, Arabidopsis thaliana columbia
  unsure (1)..(527): unsure at all n locations
nnnnnnnnnnnnnnnnnnnnnnnnnnnnnnnnnnnnnnnnnnnnnnnnnnnnnnnnnnnnnnnnnnnnnnnnnnnnnnnnnnccacgcgtccgcccacgcgtccgcggacgcgtggggctttctaaatggatccctgtctcagagagaagcagatcgcttgcactggtctatagtggcatgtatcttggttccgtcacaggattggcattctctcctatgctaatcaccaagttcggatggccatctgttttctactcgtttggctccctcggaagtatatggtttttgctatggctaaaatttgcatatagctctcccaaggatgacccggacctaagtgaagaagaaaaaaaggttatactgggaggtagcaaaccaagggaacctgttacagtgattccatggaagctaatactgtctaaacccccagtctgggctctcataatttcccacttctgccataattggggaactttcatactattgacatggatgcccacatattacaatcaggtcttgaagttca

SEQ ID NO: 91880 - DNA, 3219 bp, Arabidopsis thaliana columbia
atcttaaccaatctagctgctacaaacttgatggtgtaaatgatgcagaggagtatcttgctactagaagggctatggatgtagttggaataagtgaaaaagaacaggatgcaattttcagagttgtggcttccattctccatcttggaaatattgaattttcgaagggagaagatgctgattcatcatcagtaaaagatgaacagtcaatgtttcatctccaaatgacatcagaactgctcatgtgtgatccccattccttagaagatgctttgtgtaagcgtatgatggtcaccccagaagaagttatcaagagaagtcttgatcctcttggtgctgccgttagcagggatggtttggcaaagacaatatactctagactctttgattggttggtgaacaaaataaatatctctattgggcaagattctcactctaggcgcttgattggagtccttgacatctatggttttgagagctttaaaaccaacagttttgagcaattctgtattaattacacgaatgaaaagctgcaacagcatttcaatcagcatgtattcaaaatggaacaaggtgaatatcagaaagaagaaatagattggagctatgtggagtttgttgataataaagatgtcgtggatctgattgaaaagaaaccgggtggtattattgctctgctggatgaagcatgcatgctaccaaaatcaactcctgaaacattttctgagaagctgtatcacacattcaaggatcataagcgcttcatgaaaccaaaattgactcgatcagattttacattagttcattatgcaggggatgtccaataccagtccgatcaatttttagacaaaaacaaagactatgttgtcgccgagcatcaggatttgttaaatgcttccaaatgttcttttgtgtcaggcctctttcctcctcttcctaaagaaagtagcaaatccaagttttcttcaattggcgctcgtttcaagctacaattgcaacagctgatggagacattgaactctacggaaccccactacatcagatgtgttaagccaaacaatttgttgcaaccaacagtgtttgacaatgccaatgtcttgcatcagttacgctctgggggtgttcttgaggccatcagagtgaaatgcgctggatatccaacaaatagaactttcattgaatttttaaatcgatttctcattcttgcaccggaaattctgaaaggagagtatgtatcagttctccccgttaagcttggacctttcttccactcttgtatgataaattgctccttgagtctgtttatcacagttttcttaccttacactaatcaggtacgaagcagaagttgcatgcaaatggattttggagaaaaaagggcttacaggttaccagattggaaaaagtaaggttttcctgagagctggtcagatggctgagttagatgcacacagaacaagggtgctcggcgaatcagcgaggatgattcaggggcaagttagaactcgtctgacaagagaacgatttgttctcatgcggagggcttcagttaatatacaagctaattggagaggaaatattgcacgaaagatatctaaggaaatgagaagggaggaagctgccatcaaaatccagaaaaacttacgtagacagattgcaaagaaagattacgggaagaccaaatcttccgcactcaccttgcaaagtggagtccgcacaatggctgcacgtcatgaattccgttataaattaaccactagggcagcaactgtgattcaggcgtattggcgtggttacagtgctatatctgactacaagaaactgaaaagagtttctcttctttgtaaagtaatctcagaggaagaattgccagaaacagttgggacagtcaagcaggctgacagaaaagaagagacagaaaaggaacgcaaggtggaactttccaatagagcagaagaggcagttgatatgtcctttgtactgcattcagagcaaagtgatgatgcagagagtggacatggacgaaaggcaaaactttctattgaatcagaagatggacttgataagtcctctgtattgcattcagaacaaagtgatgatgaagagttgggacatgaaagaaagacaaaactttccatcgaatcagaagatgggcattcagatcagagtgatgatgaagagatagaacatgaaagaaagacaaaacattgcatccaagcagaagatggaattgagaagtcctatgtaatgcattcagatcaaagtgatgatgaagagataggacataaaagaaagacaaaacattccatccaagcagaagatggaattgagaagtcctttgtagtgcattcagatcaaagtgatgatgatgaagagataggacatgaaagaaagaccaaacatgccatccaagtagaagatggaattcagaagtcctttgttgcctgttcagagaagccttacaacacgttttctgttgttagtcaaataacgagtcctattcgtgatacagaaattgaatccctcactgcagaagttgagatgctgaaggccttattgcaagttgagaaacaaagagctgacatttccgaaagaaaatgtgctgaagcccgagaacttggggagagaagacgtaaaagattagaagaaacagaaagaagagtttaccagttacaagactctttgaacaggttgttatattctatgttcggaccaattctcgcaactgaagtccatcttgagatctccttctatgtcagcttcaacaatggcctcagcgcagttgtgcgagatgatcttgctgacagctctgagaactctgaagcttcatcaagtgattccgatttcacttttcctgctccatctccttcctcagacaatttttcgacttttaacccgaatcagctgcaagtcattgttcaggatctatcaaccacagaagccaaaggaactgagagctacgacagtgataaggaagggggcttcgaagattacttttgatcatgaagtgcagacttgatctcttcacttgatttttggagttctgacaatctctttactccattgttgtgccacagggcaaatgttatagtgtttacacttagttccaactgcaatttgtattttcctcaggaatagatgctgcaataactatgtagggtcattaagatatgtcaagttccatgttgttaattgcatacgcaagccatgtttgttact

SEQ ID NO: 91881 - DNA, 490 bp, Arabidopsis thaliana columbia
ctatttttgtgattcaccaagcagaagaaaattgagaaaaaaaaaagctttaagatggagaaaaatctacaaaagcaggaatttctagctgagacctcagagatgaagaacaccaaaaacaacgacgactgttctgtacaacaacaacaacgatttgtgtggccatgggttggtctagtagccaacataccaacggaggtggaaccatcgggtcggagagtaggcaaaagcggttcaacgttacgtgatgagttcactatgaaagggtttaatccaacaagagtccaacccatttgggatttcaagggtcattctggttttgctttggttgaattcgctaaagactttgaaggattcgaaagcgccatgaaatttcgaaaggagttttaatttagaccgtcatgggaagagagattgggaaaaaggtcatcgcttgagagacaataagctctatggatgggttgccagagaggatgattattatcgaagt

SEQ ID NO: 91882 - DNA, 528 bp, Arabidopsis thaliana columbia
  unsure (1)..(528): unsure at all n locations
ccgnnnnnnnnnnnnnnnnnnnnnnnnnnnnnnnnnnnnnnnnnnnnnnnnnnnnnnnnnnnnnnnnnnnnnnnccacgcgtccgactttcccgccattgttagtaccagaactctctgggccgccgcgtctccgtcgtcgtggctatctacagatggcggataagaagaagcgaaagcgatcaaaagatgacgaggcggaggaacttcctttcaaaagcattctggaatcagacgacgttatcacggagcttctcaaatcgtatatttcctcttctatcaaagccgccgccggagccggcggtgcctcctcctcttcatcgaaacctctaaccctagctgacctctctctatcatcttcctgtcgtgaagtcgcagatctctcactctcctccgtgcagacagagatagagacagtcatcgtccagatcgcccgttctattctcgccggtgatggcttctccttcagtggtccttcacgcgccgcctcgaatcagctgtatgttcctgagctcgaccgtatagtgct

SEQ ID NO: 91883 - DNA, 534 bp, Arabidopsis thaliana columbia
  unsure (1)..(534): unsure at all n locations
nnnnnnnnnnnnnnnnnnnnnnnnnnnnnnnnnnnnnnnnnnnnnnnnnnnnnnnnnnnnnnnnnnnnnnnnnnnnnnnnnnnccacgcgtccgcggacgcgtgggcttctttattgcttatagcttctgagcatcaatggatccaaatcataataatcttctcatctttgtagccttttttgttctctgcttagccaccaatggtgtaaccggatatgccacggtcacaggctcggtgttttgtgaccaatgcaaggatggagagagatctttgtttgattttcctgtctctggaatcaagattagtgtcacatgtgctgatgaaaatggacaggtctatatgtcaagagaagagactactaattggcttggaggatatgtaatgagatttgatgggacaccggatctaagtaactgttatgctcaagtttcagacaatggagttcaacaagacccaagtagctgcagcattgcttcaggtcctgcacagaaacttaaactaatgttcagcttttttgggattgaaacgtttg

SEQ ID NO: 91884 - DNA, 617 bp, Arabidopsis thaliana columbia
  unsure (1)..(617): unsure at all n locations
aatacgactcactttagggaaagccggtacgcctgcaggtaccggtccggaattcccgtgtcgacccacgcgtccgctgtaggattaacaagtcatcctaacacctctaattggtcgccaatctcacatctttccgtctgcacagggcaaagttcatctgatcagcaatcaaatttgaaggctactccaagaaacgatgatgttgacatatatattgcaatttctgatgatgattaaagatatgatgcgaagagaagcaagtagacaaatgttgtatattataaactcaaggctacttggtgaaaagtaaagctttgtatcttttgttttgtggttcccttagtcctttatgttgtatgtattgctagctaatgtttatgcctagtggaaactgacctaattttgattcgtttgtggaatcaatgttagatggaatccgtttatgtattttggtgcatattacgctttcggtatataatcttttgtatcatataagttcataaccataaactggttttatgtggcaaaaaaaaaaaaaaaaagnnnnnnnnnnnnnnnnnnnnnnnnnnnnnnnnnnnnnnnnnnnnnnnnnnnnnnnnnnnnnnnnnntgtcctaa

SEQ ID NO: 91885 - DNA, 532 bp, Arabidopsis thaliana columbia
  unsure (1)..(532): unsure at all n locations
nnnnnnnnnnnnnnnnnnnnnnnnnnnnnnnnnnnnnnnnnnnnnnnnnnnnnnnnnnnnnnnnnnnnnnnnnnnnnnnnnnnccacgcgtccgcccacgcgtccgtcctaaccaaagcagcttccaagcatctagagaaaacagaatctacaatacttgtccttagtaagcaaaaatgtgtgcattagtacctccattgtttccaaactttgggtggccatcaacgggagagtacgacagctactacctcgccggagatatcctcaacaacggcgggtttcttgattttccggtaccggaggagacttatggagctgttacagcggtgactcaacatcagaatagctttggtgtttctgtttcgtcggagggaaatgaaatagacaacaatccggtggtcgtcaagaagcttaatcacaatgctagtgagcgtgaccgtcgcaggaaaattaactctttgttctcatctctccgttcatgtcttcctgcctctggccaatcgaagaagctaagcattcctgcgacggtttc

SEQ ID NO: 91886 - DNA, 786 bp, Arabidopsis thaliana columbia
  unsure (1)..(786): unsure at all n locations
tgattacctccaggtcatcnnnnnnnnnnnnnnnnnnnnnnntgcaccnaccggtctttaattcccgggtcgacccacgcgtccccaacctcatcatatatctcccgctaatctttttttctttgatcttttttttttttttgcttattatttttttgactttgatctcccatcagttcatcttcttcttcttcttctgatcaaccatggctgctgctataagtgctgcagtctctttaccttcctccaagtcatcctctctcctcaccaaaatctcctctgtatcccctcaaaggattttcctcaagaagagcacagtgtgttacagaagagttgtgtcagtgaaggctcaggtgacaacagatactaccgaggcaccaccagttaaagtagtcaaggagtctaagaaacaggaagaagggattgttgtcaacaaattcaaacctaagaacccttacactggtcgctgccttttgaacaccaagatcaccggtgatgacgctcccggtgagacttggcacattgtcttcaccaccgaaggtggggttccgtatagagaaggacaatcgataggagtgattccagagggaatagacaagaacgggaagccgcacaagctcaggctttactctatcgcgagtagtgccattggtgactttggagactccaagaccgtttctttctgtgtcaaaggattagtttacacacatttgggccgataaattgttaacggggtccgctcccacttcttagggtacataaaaccgggtgaagaagctcaaaaca

SEQ ID NO: 91887 - DNA, 511 bp, Arabidopsis thaliana columbia
aatacgactcaccttatggagaagcacgcacgcctgcaggtaccggtccggaattcccgggtcgacccacgcgttcgcacaaccactaagtggaactgacattgatgcagttatctctggatttttgtcgcctctgcacaaggtccatgccccatctaagattcataacggaagtgataatggccaccttgctgatgctactgttgaccaagcatccggaattttatcatccccagataccgagatagacaatgcatctgatagagagttatccttcaggatattcttgacagatgaacgtggtttgaacattaaaccactgcagtctgaatcttctataagcccgggtaccgttacaagagttttagtcgagtggaatgagggtgagcatgaaagatatgattccagctacttgagtgatcttccagaggttcataaaacaagtttctctgcaaagaagacaaggcatgaatcgatatccctgttgtcgtgtttggaggcttacttagca

SEQ ID NO: 91888 - DNA, 533 bp, Arabidopsis thaliana columbia
  unsure (1)..(533): unsure at all n locations
tcagtgacacatcgagtcgaagaagaacatacatttctactgaatcagatctgatctgctttgtcagtttttaaactgttctgatctaattgagatttctcaattccactcaaaatcctttaaagcttgtctctttttggtatctctgaatcaatttggggaaatcaagaggagaagtgacaatggatgcgtttagaagacaagcgagtaagcttagagaccaagtcgcaaagcagcaactggctgtgataaagcaattcagtgggactggttatgaaagctcagatgtaatggtgattgatgagcttgaaatgcaaaggcatcatcaactcggtaaactttaccgctctactcgttctgcaaaggagttccagagagatattgttaaagcagctgaggcatttaccacgatcgggctcagacacattgaagcaggaaccaagttgtctgaagactgttgtagggtttgggaccggaaataggccagaccatttgtggggtttncctggcccagnttcagcttttccgggnnc

SEQ ID NO: 91889 - DNA, 820 bp, Arabidopsis thaliana columbia
  unsure (1)..(820): unsure at all n locations
nnnnnnnnnnnnnnnnnnnnnnnnnnnnnnnnnnnnnnnnnnnnnnnnnnnnnnnnnnnnnnnnnnnccacgcgtccggcctgaaatttgttctcttcttttggttgcaatttctcgatctcgaattttctgagagaatacaaaacttaatttctcaaaccccagcagattcgaatttagggtttcttacacccattagatttcgcgtcgatggcgtccaatcgcggtgcgggtggttctctatacggcggagctgatccgtatagatctagagaagggctaagcactagaaatgcttcaggttcagaggaaattcagctgaggattgatcctatgcactctgacctggatgatgagattctaggtctccatggccaagtcaggcaattgaaaaatattgctcaagaaattgggtcagaagcaaagtctcagagggacttcttagatgaactgcaaatgacattgatcagagcgcaagcaggggtgaagaacaacataaggaaactgaacctaagcataatccgtagtggtaacaaccacataatgcacgtagttcttttcgcgctcctcctcttctttatcctctacatgtggtccaagatgttcaaaagatagatagagagactcatggcatacttgtgttaccccccaaaaaaaaacccttgatgaatgttggataagttgtagaaaatatcctctagattacaaacattttgtggttcttctcgttaaaaaaaaaaaaaaaagnnnnnnnnnnnnnnnnnnnnnnnnnnnnnnnnnnnnnnnnnnnnnnnnnnnnnnnnnnnnnnnnntgtcctaa

SEQ ID NO: 91890 - DNA, 464 bp, Arabidopsis thaliana columbia
  unsure (1)..(464): unsure at all n locations
cnttcttccaaccgcgtcatcaatttatatttagacaacaacaaaaaaaaaaagccagagcctctccggtaatttttcattttcccgagcgatcgtccatggcggacatcgacatcggaaccgcagcaacaacaggaggaaacgaaggaagaggaggcacacgagaacgtctaataaaccgagaaaacaagttcacacgtagcgtatctcacgcacaagacgagctccacagtttccggaaatatctccgatggatgtgcgtagatcagtcgagtccttggacggcggttctatcatggtctatgttcgttgttttcacgctcgttgttcctgccacgtctcacttcatgctcgcttgctctgactgcgatagccatcactctaggccgtacgattccgttgttcagctttctcttagcagtttcgctgctctttcgtttctttgtctctccagattcgttagc

SEQ ID NO: 91891 - DNA, 398 bp, Arabidopsis thaliana columbia
ggacgccaaccacgttttccagctcttgttctttcgattctcagagaagacttttaagaacattactactgatttgaaagtttgcactgattctacttttctgatcaccgctaccgttgatgaggctgcacccggactgaggtcaatcttcagcttcaaggttcctgaccaaaattctggcaaggttgagctgcaatacttgcatgagtacgccggtatcagcacaagcatgggattgactcagaacccaactgtcaacttctctggtgtgattggctccaatgtcttggctgttggtactgatgtttcatttgacaccaagtctggaaatttcaccaagatcaatgctggtttaagcttcaccaaggaggacttaattgcctcccttactgtgaacg

SEQ ID NO: 91892 - DNA, 631 bp, Arabidopsis thaliana columbia
  unsure (1)..(631): unsure at all n locations
agaccggtnccggnaattacccgggtcgaacccacgcgtccgagaacttcctccaactttctcagataagcaacaatggtgaaaggtcccggtctctacaccgaaatcggcaaaaaggccagagatcttctgtacaaagaccacaacagtgaccagaaattcagtatcaccactttctctcctgccggtgttgccatcacctcaaccggaactaagaaaggtgacttattgttgggagatgtcgcttttcagtcgaggcgaaagaacattactactgatttgaaagtttgcactgattctacttttctgatcaccgctaccgttgatgaggctgcacccggactgaggtcaatcttcagctttcaaggttcctgaccaaaattctgggcaaaggttgagcttgcaatacttgcaatgagtacggccggtattcagcaccaagcatngggntttactnagnacccaactgtcaaacttctctgggngtgattggtnccaatggctttggctgttgganctnntggttnaatttgcaccaaggcttggaattttnccaggtcaatnctggntaaggttnccangggggttattncncctntttncnaaaggggttttntganttttttcatgc

SEQ ID NO: 91893 - DNA, 1209 bp, Arabidopsis thaliana columbia
cccacgcttccgaaaacattttagggttttcctcagtctctctctcttatagacgccaaccacgttttccagctcttgttctttcgattctcagagaagacttttcagaacatcctccaactttctcagataagcaacaatggtgaaaggtcccggtctctacaccgaaatcggcaaaaaggccagagatcttctgtacaaagaccacaacagtgaccagaaattcagtatcaccactttctctcctgccggtgttgccatcacctcaaccggaactaagaaaggtgacttattgttgggagatgtcgcttttcagtcgaggcgaaagaacattactactgatttgaaagtttgcactgattctacttttctgatcaccgctaccgttgatgaggctgcacccggactgaggtcaatcttcagcttcaaggttcctgaccaaaattctggcaaggttgagctgcaatacttgcatgagtacgccggtatcagcacaagcatgggattgactcagaacccaactgtcaacttctctggtgtgattggctccaatgtcttggctgctggtactgatgtttaatttgacaccaagtctggaaatttcaccaagatcaatgcttgtttaagcttcaccaaggaggacttaattcgcctcccttactgtgaacgacaagggcgatctattgaatgcatcttactatcacattgtgaacccgctgttcaacactgcggttggagccgaagtgagccacaagttatctagcaaggacagcaccataactgttggaacacagcactcgcttgacccccttgccctctgtgaaggctcgtgtcaatagtgcgggtattgcaagtgctctcattcaacacgagtggaaacccaagtcattcttcacaatctctggagaagtcgacacaaagtcaattgacaagagtgctaaagttggattgggtctcgcactcaagccttgaaactgagatggaagaagaagttgcaatagtttttttaaactagtttctttctacgtactctgttttttctctgcttggttcatggtttgagtgggcaactactgatctttcccattttcctgccggatttgtagaagaataaaaaggttgaaaatgatcatcttgagatggtgatgaaactctttaaaaaaagaaaataaaaaaaaaaaaaaagggcggccgctcgcgatctagaac

SEQ ID NO: 91894 - DNA, 799 bp, Arabidopsis thaliana columbia
  unsure (1)..(799): unsure at all n locations
cggatggtattttgttaaggtctgcaaattgcgaggttacccaactgcatagtcccggtagccagctggatccctaaccccctgcccttttgtggatggcccaattcgcgcttggcctagtttcaatccccaagttgaaatttccagataatgtggttacgtctcaaggagnattatcctccctcctgtacgcaagggcgtctatgaagcattttcatcccattggaccccctgtcaacctcgggtggagccgaagtacccccaagtatttagcaaggcagccccatcctgttgacccaagcactcggtngaccaccccttgacctctgtgaaggctcgtgtcaatagtgcgggtattgcaagtgctctcattcaacacgagtggaaacccaagtcattcttcccaatctctggagaagtcgacacaaagtcaattgccaagagtgctaaagttggattggctctcgcactcaagccttgaaactgagatggaagaagaagttgcaatagtttttttaaactagtttctttctacgtactctgttttttctctgcttggttcatggtttgagtgggcaactactgatctttcccattttcctgccggatttgtagaagaataaaaaggttgaaaatgatcatcttgagatggtgatggcctcctaaaaaaaaaaaaaaataaaaaaaaaaaataaaataaaacccgcacgccgtggnnnnnnnnnnnnnnnnnnnnnnnnnnnnnnnnnnnnnnnnnnnnnnnnnnnnnnnnnnnnnnnnnnnntgctggcaggatcat

SEQ ID NO: 91895 - DNA, 438 bp, Arabidopsis thaliana columbia
ttatcttttaacacttaattacaaaatctttagaatcgaaaaccaaaaggaaaagaaaaaaatgaaagttcaaattttcatcctccttttgataatctcatggcttacaccgaagattacttctcttcctcctgaatctcaagtccttgatcgaagtagttttcctgatgatttcgttttcggaaccgctatatcggcctttcagagcgaaggtgcaacaagcgaaggtggaaaatcgccaactatttgggattacttcagccacacctttccagaaagaaccaatatgcagaatgcagatgtagccgtcgatttttaccatcgttataaggatgacatcaaattgatagaagagctaaatgtggacgctttcagattttcgatttcgtgggccagattaatacccagtggaaaggtaaaggatggagtaaacaaaga

SEQ ID NO: 91896 - DNA, 659 bp, Arabidopsis thaliana columbia
  unsure (1)..(659): unsure at all n locations
atgatcttnnnnnnnnnnnntctgactacctaatgggaagacacgcacgcctgcaggtgccggtccggaattcccgggtcgacccacgcgtccacccacgcgtccgatttcaatagaagacgaagaacgtttcagaatcatcaaccaaattcagaaaatttcagccatgacaggatcacaagaagaccaacctaagatcatcattgatcaagagcaacccaaaactctagaaacagagcaccaaccagaaccttcttcatcgtctccggatcagaagaaatggggtactcacgtgatgggagctccggcagctccagttgctcatcccgataaccaacaggcggcggcgtgggtcgctggagataaccagcagacgcagtaccaaccgtacgtcatctactctcctgtcgaacatccaacaactaacaaccctctcgagccagtcatcggaatgttccatacctggagtcgcaaggcagaaaccgtcgcacgtaacctctggcacaatctgaagacaggaccgtctatgtcggaaacggcgtgggggaaggttaatttgacggccaaagcgataacaaaaggaggattcgagtcgcttttcagacagattttcggaacagagccaaacgagacgctgaagaaaactttcgcttgttatc

SEQ ID NO: 91897 - DNA, 546 bp, Arabidopsis thaliana columbia
  unsure (1)..(546): unsure at all n locations
nnnnnnnnnnnnnnnnnnnnnnnnnnnnnnnnnnnnnnnnnnnnnnnnnnnnnnnnnnnnnnnnnnnnnnnnccacgcgtccggttgaatttccgtgataaacaagggtggactgctcttcattgggcagcatactacggaagggagaaaatggtggctgctcttctctctgctggggcaagaccgaacctggtgacagactcgacgaaggataatcttggtggatgcatggcagctgatttggcacagcaaaacggatatgacggtttagctgcttatcttgctgagaaatgtttggttgctcagtttagagacatgaaaattgctggaaacatcactggcgatctggaggcttgcaaggcagagatgttgaaccaaggcactctaccggaagatgagcagagtctcaaggatgctcttgcagcatacagaacagctgcagaagcagcggctcggattcaaggtgcgtttagggaaaaagcgctaaaggcagcacggtcaagcgtgattcagtttgctaacaaagaagaagaggccaagagcata

SEQ ID NO: 91898 - DNA, 837 bp, Arabidopsis thaliana columbia
  unsure (1)..(837): unsure at all n locations
atgattctccaggtctactacgactcactattgggaaagctggaccgcctgcaggtaccggtccggaattcccgggtcgatccacgcgtccgaagaaagcaagaagtcggttattcgacttgttgacatggaatctgcgtatctaaccgctgagttcttccggaaacttcctcaagaaatagaaagaccagtaaccaacagcaaaaaccaaaccgcttctccttcgtctgcaacattagaccagtatggagacggacatttcagaaggatagcatcaaatgtatctgcgtatgttaatatggtttcggacacacttcgtaacaccattccaaaagcttgtgtgtactgtcaggttagacaagccaagctcgcattgctcaattacttctactctcagatcagcaagagagaggggaaacagttgggacagttactagatgaagatccggcattgatggaccggagactagagtgcgcgaagaggctagagttatacaagaaagcaagagatgagattgatgctgttgcttgggtaagatgataaaacctaaaagtgtgtttctggtgatggttttagagaactataaattcgtctgttgtttaagttcgttgactatgtctttgtatgtatgtatatgatcatcagaccctattgagagagacttgagacgttttgtaataaacttatcattactatttaaaaacgccatagcgtgtaaaaaaaaaaaaaaaagaagggcggccgctctagaggatccaagcttacgtacgcggtgccatgcgacgtcatagctcttctannnnnnnnnnnnnnnnnnnnnnnnnnnnnnnnnnnnn

SEQ ID NO: 91899 - DNA, 549 bp, Arabidopsis thaliana columbia
agctcactacgactcactatttggaaagctggcacgcctgcaggtaccggtccggaattcccgggtcgacccacgcgtccgcccacgcgtccgcctaactaaacccaacgccggcctctctttctctctctccccgcttctctcgtcgatcgctgaccatggccaaggacaaactcaagcctcttctctcctctgatgctgcaggtgatatcgctgatactcctctccgagagaagaagcataagaagaagagcaagaagcgagctgaacctgaacctgatataccctctacacgagattccggtcttgatgaagatagagatggagtattggtagatgatactctaaatgagccaacgataggtgataaacttgagagtcttgacttattaaatggcgaaaaggttaacagtgaggagagtaatagagattctgctcctggcgatgataagcctcctactgctgcttctgttaacgttcttctgagacaagcattgcatgccgatgatcgttctcttctactcgactgcttgtacaaccgagatgagc

SEQ ID NO: 91900 - DNA, 513 bp, Arabidopsis thaliana columbia
  unsure (1)..(513): unsure at all n locations
nnnnnnnnnnnnnnnnnnnnnnnnnnnnnnnnnnnnnnnnnnnnnnnnnnnnnnnnnnnnnnnnccacaggtccggcgtcacgaccaagtagcattagttccatacgcaagagtcgacgaattcatcatcggagaatgctcaaacgcagagtgccctacacgattccacatcgaaagaggaagaaaacgctctcgaggcagtctcaaagagtacaagagcgacgagtatttggaatatagactgtattggtgttcatttggtcctgagaactatggagaaggtggtggtgtgttacccagtaggaaatatcgtctcaacactagaaatcgagctgcgagacctcaatctatgagaggatgtacatgtcattttgcgggtaaacgactctatgctcgtccttcacttgcgcttcttatgtacaatgagagacgacctgtcaacaaagctgggtgcgtttgtcatggaccccttgatagagatgcgattggggcctggggctaaaaagattcctt

SEQ ID NO: 91901 - DNA, 403 bp, Arabidopsis thaliana columbia
accacgcgtccgcaacatcaacgacttattcgagagaaaatgaatcggaatcttagaaacgccattgtcgcatttcttgctccacttccttctatcgtattctacctcacctttctcagtaattactcttcatcttccgattcagagctctcttctattcaatcatggtgtttgaatcatcctcttctattagcaaaccttctcttcttcttaaacgtcaatgtgctcttctgggtcatcggtttactccaatctagccactggatgatcgatgtgtattggacagtgatacctgtaatgctggttcattacttcgcttcgcatccattgtcacaggacaataagctgagatccatgattggcataactctgacatggatttggagcattaggttgactcata

SEQ ID NO: 91902 - DNA, 591 bp, Arabidopsis thaliana columbia
  unsure (1)..(591): unsure at all n locations
aaacgtttancngttcccccnttttgggnccggantctggggggccccntaanggnaaaagttttttnccccnanaancggcncttatggntccntccgggnngggttacnaagtccccggggccgggncctttgggggggaagtttgacccattctttttctcctacgcccccccggggacagctttccgacagggtttggtccgcaatgtggagaactgcagcagctgcaagaaagctccccaaatatctcaatgcgcttaggaggtgatcttacaaatcgcatccgttgctatgatcggagtcatggcggtgttgaagcaaacgacaatgtcgaatgtggctagaattgcagtgcttgtggcggctgttttaagttttgcagcttcaaagtggctatcacacttcatctacaagacattccattaccatgactacaaccatgctgttgtttgaaatgtatattggtgtttgtacttcgtatatatactcatcggatgtattcagtccacatggtgttgtacataacagttatacagaaactaattcttgaatctataccgcttaaaaaaaaaaaaaaaagggcgaaca

SEQ ID NO: 91903 - DNA, 565 bp, Arabidopsis thaliana columbia
  unsure (1)..(565): unsure at all n locations
atgatacgtcagctctcnnnnnnnnnnnnnnnnnnnnnnnnnnnnnnnnnnnnnnnnnnnnnnnnnnnnnnnnnnnnnnnccacgcgtccgcactcgtgaaagaaagaccagagagttttctcctgatccacacaacaacaacaacacagagatcccaaatccggaagatatcttcttctctcataactcagtttactcagattcactgaaacatacaattaagttaaccgtcagtctctcacctgcagcaaaattcactcttctgctaataatgttctccacagagattcatctattgatcattttgactttttcaggtaaagtaaatttttatttctcttttcggtctagtaaagttttactcaaacatagaaagttacgattttttttttgttttgttttccatggaaaaattctcggcatgcaaaaacttttttttttttttttcctaaaaaagtatttaccttttcctttttttctccaactctttttcttaaagtgttaattttttttcttcttgtaagcacgcgagcgagaagaaaacaaaaaaatgaatagagtagt

SEQ ID NO: 91904 - DNA, 783 bp, Arabidopsis thaliana columbia
  unsure (1)..(783): unsure at all n locations
atgatcctgccagctannnnnnnnnnnnnnnnnnnnnnnnnnnnnnnnnnnnnnnnnnnnnnnnnnnnnnnnnnnnnnnnnnnccacgcgtccgaccaagctcacattaagcctagctcatacaccactgcttggcctcagagttacaggcagtcgattgatctttatagtagtgtaccgtctcccggtatcggttttcttgggaataattcgatgacgagattcggaagctctttcttgtcttctggtttgataagaagacatactccggaatcattacctactgttacaaaacctttgttagaagaacaagcagatgaacaagcactaccaaaacatagacttagctctcagggcttactctctcctattccttcgaggaggggttcgatgcgaaaggatgagaaatcatccatggtgtctcatgagattccaatgtctcgtaatagctcatacggacaagctgtactaaatggtcagttcatcttaatgcttgagttaaaatatcgtgtcttctcttcgttaaaagtggttaaatagttttaagagattctctgatgcttggcttgatgagagtagtaacgatggtagagctaattgctgctttcctagaactatagagctgcaatattgattgcaattgtgttcattcaccgttaaatactaatgaaaatatgtcacctttnnnnnnnnnnnnnnnnnnnnnnnnnnnnnnnnnnnnnnnnnnnnnnnnnnnnnnnnnnnnnnnnnnnnnnnnnnnnnnnnnnnnnnnnnnnnnnnnnn

SEQ ID NO: 91905 - DNA, 610 bp, Arabidopsis thaliana columbia
  unsure (1)..(610): unsure at all n locations
cccacgcatccattttctctcattttattgactttccgaatctccaaaaatctaacccaaaaaataaacaatagttttttttttctccgcaaaggaaaaatcttttcttcaccaaataatttgtctctttcgcaaatctcagctctctctcgaagtgcctttcaacgataaatttgtgggctttattcatttatagtgttgttttgatgatgacagattctattaccagaaattgatcaaagagaaaaacgttgctctctcttgatttcttttctgttttttttttttatataattaatttgttccggtgaatgatcgtcgtcttatggaaggttgtagctaatttctaatctatagagagagagagatgggaggttgcgtgtcgacgccgaagagctgtgttggagcaaaactgaggtcaagtaaacgaaggaagagtcgtgccgacgaaaaattcaaaggaagagagccgccgtctcttctcgtcactctgacggatctttcgacaatctcggtcatcaatcatcgcaacttctctaatccccgttttgggcaacctggcganncnnaatggttagcccatttccgggtttaaanaagcntnngtttc

SEQ ID NO: 91906 - DNA, 1061 bp, Arabidopsis thaliana columbia
  unsure (1)..(1061): unsure at all n locations
atgatacttcaggtctctacgactcactatatggaaagctggtcacgcctgcaggtaccggtccggaattcccggtgaagaagaaggtgtgtggtgataatgacaactttgttgtcataaatcagaagggtattgacccaccatcattggatcttcttgctagagaagggattattggtcttagaagagcaaagaggaggaacatggaacgtttagttttggcctgtggtggagaagctgtgaattctgttgacgacttgacccctgagtctcttggatgggctggacttgtctatgagcacgttcttggggaggaaaagtacacctttgtggagcaagtgaagaatcctaattcatgtaccatcctcataaaagggcctaatgatcacactattgcccaaattaaggacgctgttcgtgatggtctgagatcggtcaagaacaccatagaagacgagtgtgttgtgttaggagcaggagcttttgaagttgcagcaaggcaacacttactcaatgaagtcaagaaaaccgttcaagggcgtgcccaacttggcgttgaagcttttgctaatgcccttctcgtggtgcctaagacacttgcagaaaatgcaggtcttgatacccaagatgtgatcatttctcttacgagcgagcatgacaaagggaacgttgtgggactgaaccttcaggacggtgaacctattgacccgcagcttgctggtatttttgataattactcagtgaaacgccaacttatcaattcagggccagtgattgcgtcgcaattacttttggtggacgaagtgattcgtgcaggcagaaatatgaggaagcctactgcttgaagtcctttgcttttaacttggtttctaatttgtaagcacctcaaattttgtttcttggtgtaaatcctgaatattgtgaaacatatgttttttttttctttttggcaatgaaaaacatatttgaatctgaaaaaaaaaaaaaaaagnnnnnnnnnnnnnnnnnnnnnnnnnnnnnnnnnnnnnnnnnnnnnnnnnnnnnnnnnnnnnnnnntcccc

SEQ ID NO: 91907 - DNA, 500 bp, Arabidopsis thaliana columbia
  unsure (1)..(500): unsure at all n locations
tnnnnnnnnnnnnnnnnnnnnnnnnnnnnnnnnnnnnnnnnnnnnnnnnnnnnnnnnnnnnnnnnccacgcgtccgctctttttttttttttttttctttcgcgtgtgattattaactcgaggtaatttctctaatcccagttaatatcacacgcggaatatcaaagatctgattttttgtaaacattgtaccaaaatcatcagaagattataagtggagtctttcgaagaagaacaaatttgtaacacgcgtctccatcaatcttctagctggcaatgagatccattctttagcttctttcttctctgttttttcttttttgaagaaaaaaaaaatggcaccaaagtttgaatggtgggctaaaggaaacaacaacaacactcgtaaaggaacaccagtcgttgtcaaaatggaaaaccctaataactgggcaatggtggaacttgaatcaccttctcatgacgatttcctcgtaagaactcatgagaaatctcgtaac

SEQ ID NO: 91908 - DNA, 555 bp, Arabidopsis thaliana columbia
atcaattaaataaaaagaaaaaaattattattatcccttcttcttcttcttcgtccgtgggtttgattctcctgattcatgtcgcttaaatttttagcgatcttcgaatcccattttccttcgggaatctgacattttttctcgggaaatttttttatccaaatcggagtaaagtatcgaatctagagaatccgctatggatgagacctattttgatctattgaatttctttaagaatccctcttttacagagacatttgtcgacatcttactatgcgcagttccgatttggctcgccgttatgatcgggttattaatcggatggtcttggcgtccaagatggaccggtttgatctatttagggtttcgttctaagcttcggtttttatggaccgcaccgcctgggtttggtgctcgtcggctttggcttgctttcaccgctctctctgctttctccgtttgccgaaccatcttggtcaaaggaatgacaccagacgctaataaaatcggcggaccgggttcagcttcgtcgcagacgcctgttgaggataatga

SEQ ID NO: 91909 - DNA, 572 bp, Arabidopsis thaliana columbia
atgattctccagctctctacgactcactatatggaaagctggtcacgcctgcaggtaccggtccggaattcccgggtcgacccacgcgtccggtcggaggataaaaagcctcaagatccaaatcccagatttgcttgcgaaggttgcagcgttctgctcgacatcaacgatggtgaccgtctcgtcttcgctcgtttatctagtggcgctatattaaaaattgggaataagaattattctttaaagccattgatcggagctccgtttggatctctgttccaagtcgaaaccggagaagatggttctttcctctctcgcattcttcccattaaacaagaaagtaacagtaataatgttatggacgattcgagagataatcgagaaatcgtcgacaataatgaagctcagaatcttactggtgaagaaattgaagctatgcggagagagggtgcaaaaggggatgaaattattgaagctctaattgcaaacagcaaaacttttgataagaagtttcagttgtctcaggaaaaatataagcttaaaaagcagaagaaatatgcaccaaagctgct

SEQ ID NO: 91910 - DNA, 883 bp, Arabidopsis thaliana columbia
aggtctctacgactcactattgggaaagctggtccgcctgcaggtaccggtccggaattcccgggtcgatccacgcgtccgcgacgctatcattacccagtataatccagttgagggtcgtcatgctttagtttatgacattgcaacaccttctgagacatgggaatgggttagactctcagagatatctcctggggatatagagtggataggagaggatcctgggcttggtaatcgatataatggacaaggtcatggactgaatagaactaccggacccaactgtgttccacaacgaggaagcggtttggagaagaacactatcagaaagggtttcagaacatcacagaatggaactggaaaaaagaaacatctcgatatacgaatccgccaaacagatgtcctaatcagagaggtggagagagttcttcgttcacacaatccagatccttacgaagttgaaagggctaagagagttttggaggagcacgagcatgcacttgtgggcgcaattgcaaagcttggagatatttccgatggagaaaacgaaggtgcatttcgtcggtagcttatgtttgaatcaagcaattttgccaaggcacagtgcaatgtgtggtccatgaggagtcagtgaagaagagatcgaaggtcagagtctcaacttctttgatgttacccttttcttgggtatctgactgtaatttttgctgacactagagattagctcaacctggatctccgttttgttggatatatatgttcaatggaatagtttgggtaaaaaaaaaaaaaaaaaaaaaaaagaaaaaaaaaaaaaaaaggacggccgctctagaggatccaagcttacgtacgcggtcatgcgacgtcaaagctcttctat

SEQ ID NO: 91911 - DNA, 1334 bp, Arabidopsis thaliana columbia
tcgactcactctagggaaagccggtacgcctgcaggtaccggtccggaattcccgggtcgacccacgcgtccgaggaagttaaaaaggcttaagcgggcaaggagaatttcaacacatatcagtcagaacgatcagaggcagagcaaattcaatttcgaaacagtgactattacgagaagcgaaatggatacgtcgcttcttcttccgatcatcgatctttcttcgccgggaaaaatctccactgctcaattgattcgtcaggcatgtcttgaacatggattcttctatgtcaagaatcatggaatctcggaagaattaatggaaggggtttttaaggagagcaaaggcttctttaatctcccattagaggaaaagatggctttactccgccgtgatttgctcggttatactccgttgtatgctgagaaacttgacccgtccttgagctccataggtgattccaaggaaagcttctattttggctctttggaaggtgttctagctcaacgttacccaaatcaatggccttctgaaggtatcttgccatcatggaggcaaaccatggaaacttactacaagaatgtcctgtccgtgggtagaaaattgcttggcttgattgccttagcattggatttagatgaggacttcttcgaaaaagttggagccttgaatgatcctacagcaggttgttcgcctcttacgctatccaggtgaagtgatttcgtcagatgttgaaacgtatggtgcctcagctcactcagattatggaatggtcactcttcttttgactgatggagttccaggacttcaggtttgtagagaccaatcgaaacaaccccacatttgggaagatgtccctggaattaaaggggcgtttatcgtcaacattggtgatatgatggagagatggaccaatggattgttccggtctacattgcccagagtgatgccggtgggaaaagaacgttactcggtggtgttcttcttagatccccatccagattgtaatgtgaaatgcttggagagttgttgcagcgaaacttgtccccctagattcccgcctatcctcgccggcgactatatcaaggagcgtttcaggctaacatacgccccttcctagtcttatgtttgtgccgaaatgtaagaaaataatagtgttcaaacttctacgtaccataatgtttaattagtgaaacttatggaacttgaaaaaaaaaaaaaaaaaaaaaaaaaaaaaaaaataaaaaaaaaaaaaaagggcggccgctctagaggatccaagcttacgtacgcgtgcaggcgacgtcatagactcttctatagttgttcctaa

SEQ ID NO: 91912 - DNA, 792 bp, Arabidopsis thaliana columbia
  unsure (1)..(792): unsure at all n locations
atgannnnnnnnnnnnnnnnnnnnnnnnnnnnnnnnnnnnnnnnnnnnnnnnnnnnnnnnnnnnnnnnnnnnnnnnnnnnnnccacgcgtccgtgaagataggagaagggaacggagatgatccctacttattcactactaacaacttcgccggacgacaaacatgggagtttgatcctgacggaggctcgccggaggaaagacactccgtcgttgaggctcgccggattttctacgacaatcgttttcatgttaaagcaagcagcgatctcttgtggcgcatgcagtttctgagggagaaaaagtttgagcaacggatagctccggtgaaagttgaagactccgagaaggtaacctttgaaacggcgacgagtgcattacggagaggtattcatttcttctcggcgttgcaggccagcgacggtcactggccggcggaaaatgccggccctttgtttttccttccgccactggtgttttgtctttacataacgggacatcttgatgaagtgttcacttcagaacatcgaanagagattcttcgatacatctactgtcaccagaaggaagatggtgggtggngattacacattgaaggtcatagcacaatgttctgtaccacgttgaattacatatgtatgcgtatacttggagaaagtcctgatggaggtcatgataatggcgtgtggacgagcccgggaatggatccttagtcatggtggtggcacctacataccttcttggagtaaaacttggctttcgatacttggtgtatttgactggtctggaagc

SEQ ID NO: 91913 - DNA, 661 bp, Arabidopsis thaliana columbia
  unsure (1)..(661): unsure at all n locations
tgnccgnncggattccgggngnccanggnccgttaaccactattcggagctttccgaagcaactacaaagcatggtgctaggttcgctccactcgccgtcggtggcgacatggactccatcgccgttcaagaattcagcagaacactcttcaatatgcgtcccgacatagctctctccgtcggccagaccattttccaaagtgacatgagacagatcttaccttttgtcactgttccgtgtcacattctccaaagtgttaaggacttagctgtaccagtcgttgtctccgagtatcttcacgccaatcttggctgtgaatccgtcgtggaggttattccttctgatggtcatcttcctcagcttagctcaccggattctgttattcccgttatcctccgtcacattcgtaatgacattgctatgtgattataagagatttaattagttaactattaaacgatgtaagaaaaaatgaaaataaatatctgatgtgatatgtctgtctagtctattgagaacattatttcgttgtcgtttggttctgattcgtttatcttgagtaaaaaaaaaaaaaaaaaaaaaaaacaaagggcggccgctctagaggatccaagcttacgtacgcgtgcaggcgacgtcatagactcttctatagttgtc

SEQ ID NO: 91914 - DNA, 507 bp, Arabidopsis thaliana columbia
  unsure (1)..(507): unsure at all n locations
nnnnnnnnnnnnnnnnnnnnnnnnnnnnnnnnnnnnnnnnnnnnnnnnnnnnnnnnnnnnnnnnnnnnnnnnnnnccacgcgtccgcccacgcgtccgggtaagcgaacggagctccaaggagaagaagagaagcagagctcggagcgaagattcttcatcttccgattacgaagagaaagttaagaggcatcgaggaacagagaaagatgatgaaaggagaagtaggagaagtgataagaaggataagaaatctcacaagcaccacaaatccagtacatcaaagaagtccaaggatgataagccgaaaaagaaacatacggaaagcgaccacaagctaaaagagggaattccagagctatcaatggaagactacttctcgaaaaacaacgagtttgctacatggctgaaagaagaaaaacgtacttactttaatgatctcacgaccgaagctgcacgaggactgttctcacgatttgtcaagagatggaacagaggaaaactcgag

SEQ ID NO: 91915 - DNA, 831 bp, Arabidopsis thaliana columbia
  unsure (1)..(831): unsure at all n locations
ccggcannnnnnnnnnnnnnnnnnnnnnnnnnnnnnnnnnnnnnnnnnnnnnnnnnnnnnnnnnnnnnnnnnccacgcgtccgtgacgttgtagaagaatttgagaaggataagcaagaagttctaaatcaggaagttcctgaaccggaaaagccggttctagttcctggttggggacaatggaccaatgtccaaaagaagagaggtttaccttcatggatggttagagaacatgaagatgcaaataaaaagagaaagctagatctcaaaacaaggaaagactatcgtctcagaaatgttatcatatcagagaaagtcgataaaaaggctgacaaacttcatacaacgactctacctttcccatatacatctaaggaagttttcgaacacagcatgcgcatgcctataggacccgagtttaatcctgcgactattgttggagctctcaaccgacccgaggttgtgaagaaagctggtgtgataattaaaccggtcaaatttgaggaagtgaatccaaacgagaaagcagatgacgaaaaccctcgaagccatcaaaaacaaagacccaaaaagggtagtaaaaccagtaaaggtcaaggcaaaaacaagtacaagctaaagaccaaagcttagctctcaagatttctgtattctcaaaacttgtttagacacaaattttgatccaaaagaaaacagttttgctttgtaatttgtcttatttataaaagaaacattttgtttgcttcaaaaaaaaaaaaaaaaagnnnnnnnnnnnnnnnnnnnnnnnnnnnnnnnnnnnnnnnnnnnnnnnnnnnnnnnnnnnnnnnnnnn

SEQ ID NO: 91916 - DNA, 559 bp, Arabidopsis thaliana columbia
agctctctacgactcactatatggaaagctggcacgcctgcaggtaccggtccggaattcccgggtcgacccacgcgtgcgcggacgcgtccgcccacgcgtccgctctttctctctgctttcttggtatggctgctgacgtcagctctctcgtacggatactgagtaggttcaaggatgatcggacggttgtaaaagattccaccggaccaagatccacggtggcgctcatgacacgcgatctcctcggaatcggcggttgtgtgggtggaggaggaggaggagactaacagtcgctggagcttgaccttgacgtccaagtccctaacggatgggaaaaacgtctcgacttaaagtcagggaaagtgtatctgccacaacaatgctgttccacgagctcggcatcatcgtctcatcatcatcatcatcatcacgaagaccagaccaagcagacagttccaagatttcaagatccgaatgagccaccgattaccgataagtttgcggcgacaccattgttatgcctcttagacgatgacgacgacacaagcctcgaact

SEQ ID NO: 91917 - DNA, 680 bp, Arabidopsis thaliana columbia
  unsure (1)..(680): unsure at all n locations
nnnnnnnnnnnnnnnnnnnnnnnnnnnnnnnnnnnnnnnnnnnnnnnnnnnnnnnnnnnnnnnnnnccacgcgtccgcgatcttcttcttcgatcttcttcctctcgtcaggtttcgtgtggttcgttctaatcgcgttgtattctttctccaaggaagatggctctaaaggaacagctagataaattcaacaaacagcaagtgaaatgccaatctactctttcgagcattgcttcttccagagaaagaacgagttcttcgaggcagaatgtgcctttgcctgcggcaatcacgcagaagaagcctgatgcagctcctgtcaagttttcaagcgataccgagcgacttcagaacattaacaacattagaaaagctcctgttggagctcaaatcaagcgtgtcattgatcttctctatgagagaaggctagccttgacgccagagcaaataaatgaatggtgtcatgtagatatgcatgctaataaggctgttttttataggtttagggaggatcccgaaagcgcatttttgattggaggagggtccctttctaagggttcggncggtgtttatggttaggccccccttttttcgttgggtggaaaaccccttatcgggttcggggggttgccctaagcggttccntangnatgggggnttaagggcctnggcctnagnga

SEQ ID NO: 91918 - DNA, 398 bp, Arabidopsis thaliana columbia
cttcttctgatcctcctcttagcccctgttttgatttcgcattccttctgtgatttgcgcggctagtagatctgtaattgcaggactatcaaattcacaatgcggatctgagatttcgtggataattctagtaacagattcgataatgggaggaggatttagagttttgcatttggtgaggccattcttggcttttcttccagaagtgcaaagtgctgacaggaagattccatttagaggggaaagtgatcctacactgtcatctccctcttcattttccttggttgtagtcagcttcctctctatgggatccattctaccaccggtgctgatccgttctattggatgcgtgtcattctcgcatcgaatcgtggaacggtgatggagcttggtattac

SEQ ID NO: 91919 - DNA, 392 bp, Arabidopsis thaliana columbia
  unsure (1)..(392): unsure at all n locations
aacaaaaacactagagttaagttacatatagagtaaggaagagatggcagttaggtgtttagccgtgttcctcgttgctctcatggtgtctcaagcagtcaccgcaacaagaccggctccaaccaagaatgtcggagctggtcttgacgaccaaaagaactttgtagcgttcgctggtgtcggtggagctgctggaattggtggagccggtggtgttggagctggtcttggtggtgtcgccggtggagttggtggtgttgccggagttttgcctgttggcggtgtaggcggcggaattggtggtctaggcggtggtgtaagtggtctttggcggtctacggtgggcctaggttggtggttcaagacttttggaaatagngtaaggtgggant

SEQ ID NO: 91920 - DNA, 448 bp, Arabidopsis thaliana columbia
  unsure (1)..(448): unsure at all n locations
nnnnnnnnnaaaaaaacaaaaaaaaaactttgaatccgtttgttgcttcttcgcaacgttctctctcaaactcgcagagtaacagattcgataatgggaggaggatttagagttttgcatttggtgaggccattcttggcttttcttccagaagtgcaaagtgctgacaggaagattccatttagagagaaagtgatctacactgtcatctccctcttcattttccttgtttgtagtcagcttcctctctatgggatccattctaccaccggtgctgatccgttctattggatgcgtgtcattctcgcatcgaatcgtggaacggtgatggagcttggtattactcctattgtcacatctggattagtgatgcaactcttagcagggtcaaagattattgaggttgacaacaatgttcgtgaggatcgtgctctcttgaatggtgctc

SEQ ID NO: 91921 - DNA, 475 bp, Arabidopsis thaliana columbia
gggcaaaaacactagagttaagttacatatagagtaaggaagagatggcagttaggtgtttagccgtgttcctcgttgctctcatggtgtctcaagcagtcaccgcaacaagaccggctccaaccaagaatgtcggagctggtcttgacgaccaaaagaactttgtagcgttcgctggtgtcggtggagctgctggaattggtggagcccgtggtgttggagctggtcttggtggtgtcgccggtggagtccgtgctgttgccgatgcgtgtcattcttgcgtccaaccggggaactgtcatggagctcggtattactcctattgttacatctggacttgtgatgcaactcttggctggttccaagattattgaggttgacaacaatgttcgtgaggatcgtgccctcttgaatggtgctcagaagcttctaggtattctgattgccattggtgaggctgttgcatatgttcttt

SEQ ID NO: 91922 - DNA, 511 bp, Arabidopsis thaliana columbia
  unsure (1)..(511): unsure at all n locations
agctannnnnnnnnnnnnnnnnnnnnnnnnnnnnnnnnnnnnnnnnnnnnnnnnnnnnnnnnnnnnnnnnnnccacgcgtccgcggacgcgtgggcggacgcgtgggcggacgcgtgggcggacgcgtgggcggacgcgtgggctacaacgctctttctccgtaggaaaggggaagcaaataaattatcgaagcccactggtttcggagctgatcggtctctatttctctcttcatacatatctcaagcagataaagttgatcggatactagaatgggaggaggatttagagttttgcatttggtgaggccattcttggcttttctgcctgaggttcagagtgctgataggaaggttccattcagagagaaggttatctacactgtcatctctctcttcatctttcttgtctgcagtcagcttcctctttatggaatccattccaccaccggtgcggatccattctattggatgcgtgtcattcttgcgtccaaccgtggaactgtcatgg

SEQ ID NO: 91923 - DNA, 752 bp, Arabidopsis thaliana columbia
  unsure (1)..(752): unsure at all n locations
aatnngacntnatcgaaacccgnttccanctttngtaataccattcccnaccgtttcatccggcnaatcgattttaccnttcccaccnttgttcanccganttttttgganaaanggganttgagaaaggganttcttcgnttcccggaagttctccngttgataaccgaaggcttnttgccggaggaagccntnaccgggggnagaaagctcgggagttgatcccgatgatgaagtgtcgttgatgagagtaccggaattcacgagtcagaatctcgtccatgaaagttagagacggtggtcggtgaaggagaacaaccggaggctctgaagattccgcccggacgcgtgggtcgacaatgtcaacaaccttttgagcagagtcatcaacaccttcatcctcaccaccttcttcagcagatggattggcaccaatgttaacatctacagctcccacagtaacccactttccttctacttcccagaggattccattctcaatctccttgtaagggaaagagtcagacagaagctcatcaccggtgagaagatcttggtacaccaacatggtcgcttattgattgcggacgcgtgggtcgacccacggtcgancntttatctcccaaaacacaaanaaaaaaaaataggcttccacngctctctcaagcgccatcgtcgggaacttcatttcatccgtcgttncccaagctccaannnagtctcnggttccctnccntncggcnancacanca

SEQ ID NO: 91924 - DNA, 846 bp, Arabidopsis thaliana columbia
  unsure (1)..(846): unsure at all n locations
gaagagctttgacgtcgcctgcacgcgtacgtaagcttggatcctctagaggggtangtgaggtggggtgaccactattataaagntttttgtggaacgaataacaaccgactctggcaacaccgaaaacaacaagagagaaacctaaacttggcaggggggattcaaatactggggggggggacgagtcacaggaaatataaagaaacatattcttagagaggggctgcgaccgaccacaggaacccaacaagagcttctctctaagaacttgacctgcttcaaaccatgagcgaagtacaaaaatgttgggttatgttgaaccctccttgcagtaagcaaagaccaaagtgcggtcttcgatgcgggccctccccaaccaaagaattggaagtcactgaggccgggggaggcaaaaacttggaggctccctcaatacccttcttgaagacagcttgatcttcttcgctgagcttgggtgtcaaaagcttaatgtatttcttaatgtaagcgatgaatcccttctggtcataagttggttgctcctgaagtctgaaggtgtcgccaatgtcaccacccttttgagtagagtcatcaacactttcatcctcaccaccttcttcaacaataggattggcaccaatgttaacatctccagctcccccagtaacccactttccttctacttcccagaggattccattctcaatctccttgtaagggaaagagtcagacagaagctcatcaccggtgagaagatcttggtacaccaacatggtcgcttattgattgttttcgcggccgcgaattcgatatcaagcttagttatnccgtcgaaccgagggg

SEQ ID NO: 91925 - DNA, 627 bp, Arabidopsis thaliana columbia
acatcgttgttctctgctaacgagagaatgtcagagtaaaaccggtatggactactctgtttctgactccttgaattgtaagagataacacagccaaatgattcaagtcttttagcaacaaatgatccaatgctccccaatccaactatcccaactctcttcccacttaccttggaccctaattgaaaatccccaaatttcgcccaattaccagcccggacgtaacgatcggcggcaggaatacgacggagaacgctaataagcaaaccgacggcacaatcagcaacgtcatcggaaaacgcgttgccagcgttggtgataacgatgccgcgacgcttgcatgcggcgagatcgatgtgatcgatgccgacgctagtgcagacgagtatctggagagaagggagatgagaaaggagttcttcggttaccggaagtctgccgctgataacgaaggctctggcggaggaggcgtgacgggggaggaagctcgggagtgattccgatgaggaagtgtcggtgatgagagtacggaattcacgagtcagaatctcgtccatgaaagttagagacggtggtcggtgaaggagagcacaaccggaggctctgaagattccgccattgtttttt

SEQ ID NO: 91926 - DNA, 964 bp, Arabidopsis thaliana columbia
gccccccttccttagcctggattcttttaaaccggccgcccttttttttttttttttaaaaaggcaagcttgagaagtttccccccaaataccccaaaaggtaccgcccaaactccacctaatggaaaatgataacccgttttttgcggaataaaaaactggagattcttccaccccagaaaacaggaaaagatttttttttccgggcaggaaattttattaggggacgacgacaaaccacaggacattttaaagaacctttaaccttaggagagtccatcttggcgaacccggaccccacaggtaaaccacaacgggaagaggcttcttcttttcaggcactgtgagcctccttgcaaacccatggagcgaaagtccataaattgttgggttaggttgaaccctccttgcggtaagcaaagaccaaagtgctgtcatcatgcataccctcccccaacaaagaatggggaagtcactgagcctggggagcaaaaacttggtagctccctcaatacccttcttgaagacagcttgatcttcttcgctgagcttgggtgtcaaaagcttaatgtatttcttaatgtaagcgatgaatcccttcttgtcataagttggatgctcctgaagtctgaaggtgtcgacaatgtcaacaaccttttgagtagagtcatcaacaccttcatcctcaccaccttcttcagcagatggattggcaccaatgttaacatctacagctcccacagtaacccactttccttctacttcccagaggattccattctcaatctccttgtaagggaaagagtcagacagaagctcatcaccggtgagaagatcttggtacaccaacatggtcgcttattgattgttttctctctccgatggatgcgaagcggcaaagaataaaatgcagcccgggggatccactagttatagagcgcccgcccccgcgggggggccagct

SEQ ID NO: 91927 - DNA, 625 bp, Arabidopsis thaliana columbia
  unsure (1)..(625): unsure at all n locations
ncgcaggacgcccgggggaggaagaaataataaccattttgggagaagtgttcttcgctaatccttcaaggtgtgacctgagaatcacaacacaaaacaatctcactcgaaattcctttgactcatcatcatcaccatgtggagaagaatcgtctcctctcagctcaaaaccctagccgccgatgtcgtcgctgcttctcctcgtcgatcgatagccgccaccaccagacctgtcggtttctatctcgccgccaatcgatcagccatttccgcatcttctttcgttatccctcgtcgtttcagctccgattcagtagagactcctgcgacgaagaaggtggaggatgtaatgcccattgcgactggacacgagaaggaagagcttgaagctgaacttgagggaaggaggctggatgatattgacttccctgaaggtccttttggaactaaggaagctcctgctattgtgaaggcctctttgcaagggaatttttgggtttccctgggtggttaaaggggaggccgggcangattttttnttggtttctggctttgggaaaggaagcccttttaatccccggtttactagaatttagntgaagggttgcctggggcccgatntngc

SEQ ID NO: 91928 - DNA, 1330 bp, Arabidopsis thaliana columbia
  unsure (1)..(1330): unsure at all n locations
taggacaactatagaagacnatgacgtcgcctgcacgcgtacgtaagcttggatcctctagagcggccgcccttttgttttgtttttgtaaatgataaaccgttttttgcggaataaataacttgagaatcttccaacacagaaaacaagaagagagaaaagtaaactggcaggtaattttaataggggacgacgacgaaacacaggacaatataaagaaacataaacttagagaggggctgcgaccgaccacagtaacccaacgagagcttctctctcagcacttgacctccttcaaaccatgagcgaagtacaaaaatgttgggttagttgaaccctccttgtagtaagcaaagaccaaagtgctgtcatcatgcataccctccccaacaaagaattggaagtcactgagcctggggagcaaaaacttggtagctccctcaatacccttccttgaagacagcttgatcttcttcgctgagcttgggtgtcaaaagcttaatgtatttcttaatgtaagcgatgaatcccttcttgtcataagttggttgctcctgaagtctgaaggtgtcgacaatgtcaacaaccttttgagtagagtcatcaacaccttcatcctcaccaccttcttcagcagatggattggcaccaatgttaacatctacagctcccggctcgagctcgaccccctttcccggacgcgtgggtcgacccacgcatccgctccgattcagtagagactcctgcgacgaagaaggtggaggatgtaatgcccattgcgactggacacgagaaggaagagcttgaagctgaacttgagggaaggaggctggatgatattgacttccctgaaggtccttttggaactaaggaagctcctgctattgtgaagtcctactatgacaagcgaattgtgggctgccctggtggtgaaggcgaggacgagcacgatgttgtctggttctggctggagaaaggaaagtcctttgaatgcccggtttgcactcagtactttagctggaagtggttggtcctggtggtcctccggatggtcacggtgacgaagacgatgagcaccaccactgattccggcctctcccttgccgcaaattttcttttttttaatttgacaatttccataccctttaaaatttttatgaatgggataaaccaaaatatcttcccgttttgggaaacacagttgaaaatgttttggcccttttgccaacccggatcaagtcccagcccaaatcttgccgtgtgtttttggaccctgaccaccactctttttcccttattttaaaaaaaaaangggccctttngccncttg

SEQ ID NO: 91929 - DNA, 1049 bp, Arabidopsis thaliana columbia
gaaaaaaaatttggccaagatttaagggtggttttaaaaccggttgtttcccttcgttggggttctccaaaggggggttcctcaaaccaagtttctccggcatccaaagaccgggttccccaacccaaaaaatgttcgaaagctggtcttttccgacccaaaagaacttttggagcgttccgctggtgtcggtgaagctcctgaatttgttggagccggtggtgttgaagctggtcttggtggtgtcgccggtggagttggtggtgttgccggagttttgcctgttggcggtgtaggcggcgaaattggtggtatagacggtggtgtaggtggtcttggcggtctaggtggtataggtggtggttcaggtcttggtcatgtagtaggtggaattggtggtgaccctggtattggtagtggtatcggtggactcggcggtgcaggtggtttagacggtataggcggtgttggtggtttgggtggaattgtcggtggaaacgattgcggtggcgtaattcctcaccattgatgttaaacgtttttttttttcgtttttttgctctctataaaccaaagatcggtcgaaaggttcataattattatgttttaagttcttttatcgatgtttatgttttaagtcgtttgttttctatatatgtttcttgttttgtttgttatgctgtttgttattaattacttgtgagaaacttgtgttatcaataaatagtgtttttttttgtttaaaaaaaaaaaaaaaagattcaactaattgtaaatgataaaccgttttttgcggaataaataacttgagaatcttccaacacagaaaacaagaagagagaaaagtaaactggcaggtaattttaataggggacgacgacgaaacacaggacaatataaagaaacataaacttagagagtcgctgcgaccgaccacagtaacccaacgagagcttctctctcagcacttgacctccttcaaaccatgagaaaagtaaactggcaggtaattttaataggggacgaccggacgcgtgggcggacgcgtg

SEQ ID NO: 91930 - DNA, 924 bp, Arabidopsis thaliana columbia
  unsure (1)..(924): unsure at all n locations
taaaaatcgaaaatggattataaggtgaccttcgtctttggttgaccatcaaaaactacaacgctctttctccgtaggaaaggggaagcaaataaattatcgaagcccactggtttcggagctgatcggtctctatttctctcttcatacatatctcaagcagataaagttgatcggatactagaatgggaggaggatttagagttttgcatttggtgaggccattcttggcttttctgcctgaggttcagagtgctgataggaaggttccattcagagagaaggttatctacactgtcatctctctcttcatctttcttgtctgcagtcagcttcctctttatggaatccattccaccaccggtgcggatccattctattggatgcgtgtcattcttgcgtccaaccgtggaactgtcatggagctcggtattactcctattgttacatctggacttgtgatgcaactcttggctggttccaagattattgaggttgacaacaatgttcgtgaggatcgtgccctcttgaatggtgctcagaagcttctaggtattctgattgccattggtgaggctgttgcatatgttctttctggaatgtatggtcccgttggacagcttggtgttggaaatgccattctgatcatccttcagcttttctttgctggaatcattgttatctgccttgatgtactccttcagaagggatatggtctcggatcaggaatctccctttttaattgccaccaacattttntgaaaaggcattatcttggaaaggcaatttaagcccaaactaccattaaaaaccgggcgtggagctgagttttaaagggcgcntgtnaattgcactgnncccanatgcngataanccaagncccaaaaaagnttgggggttnntcccgcaaaggtttttttccgg

SEQ ID NO: 91931 - DNA, 698 bp, Arabidopsis thaliana columbia
  unsure (1)..(698): unsure at all n locations
aaaccggncccggnaattacccgggatcgtacccacgncgtccgctcccgattcagtagagactcctgcgacgaagaaggtggaggatgtaatgcccattgcgactggacacgggaaggaagagcttgaagctgaacttgagggaaggaggctggatgatattgacttccctgaaggtccttttggaactaaggaagctcctgctattgtaaagtcctactatgacaagcgaattgtgggctgccctggtggtgaaggcgaggacgagcacgatgttgtctggttctggctggagaaaggaaagtcctttgaatgccccggtttgcactcagtactttcaagctggaagtggttggtcctggtggtcctccggattggtcacggtgacggagacggtttnagcaccaccactgcattccggccccttccctttgccgcaaaatttttcctttttttaatttgcacattttcaaaaaccttaaaaatttntatgnatggntaaaccaaaattttttcccgtttggtgaaacaaagttgaaaatgtttttccacctttttacaagctnggataangttccaggccaaacttttccntggtttttttganacccttnnnnnnnanaaattttccttttgttttaaaaaaaaaaggggcccttngggcncnttggcgggatacnggaagtttntggcccaat

SEQ ID NO: 91932 - DNA, 779 bp, Arabidopsis thaliana columbia
  unsure (1)..(779): unsure at all n locations
cnnnnnnnnnnnnnnnnnnnnnnnnnnnnnnnnnnnnnnaaccggacccggtaattacccgcgcgtccacccacgcgtccgctccgattcagtagagactcctgcgacgaagaaggtggaggatgtaatgcccattgcgactggacacgagaaggaagagcttgaagctgaacttgagggaaggaggctggatgatattgacttccctgaaggtccttttggaactaaggaagctcctgctattgtgaagtcctactatgacaagcgaattgtgggctgccctggtggtgaaggcgaggacgagcacgatgttgtctggttctggctggagaaaggaaagtcctttgaatgcccggtttgcactcagtactttgagctggaagtggttggtcctggtggtcctccggatggtcacggtgacgaagacgatgagcaccaccactgattccggcctcttccccttgccgcaaatttttctttttttaatttgcacattttcatatcttaaaaaattttatgaatggaataaaccaaaatatctcccgttttggtgaaacacagttgaaaatgttttttgaccttttttaacaagactcggatcagagttcccaaggccaaaactcttataccgttgtttttatttttgaacactcttgaatcagaatcaaaatcattcttgccttttgcttattaaaaaaaaaaaaaaaaaaaggctnnnnnnnnnnnnnnnnnnnnnnnnnnnnnnnnnnnnnnnnnnnnnnnnnnnnnnnnnnnnnggt

SEQ ID NO: 91933 - DNA, 1458 bp, Arabidopsis thaliana columbia
  unsure (1)..(1458): unsure at all n locations
gcccgnnnnnnnntatacgactcactattagggaagctggcacgcctgcaggtaccggtccgaattattcccggtcgcgagctactagtcggcgggcggccttttttttttttttttgtttaacgaccaaaattcaactaattgtaaatgataaaccgttttttgcggaataaataacttgagaatcttccaacacagaaaacaagaagagagaaaagtaaactggcaggtaattttaataggggacgacgacgaaacacaggacaatataaagaaacataaacttagagagtcgctgcgaccgaccacagtaacccaacgagagcttctctctcagcacttgacctccttcaaaccatgagcgaagtacaaaaatgttgggttagttgaaccctccttgtagtaagcaaagaccaaagtgctgtcatcatgcataccctccccaacaaagaattggaagtcactgagcctggggagcaaaaacttggtagctccctcaatacccttcttgaagacagcttgatcttcttcgctgagcttgggtgtcaaaagcttaatgtatttcttaatgtaagcgatgaatcccttcttgtcataagttggttgctcctgaagtctgaaggtgtcgacaatgtcaacaaccttttgagtagagtcatcaacaccttcatcctcaccaccttcttcagcagatggattggcaccaatgttaacatctacagctcccacagtaacccactttccttctacttcccagaggattccattctcaatctccttgtaagggaaagagtcagacagaagctcatcaccggtgagaagatcttggtacaccaacatggtcgcttattgattgttttctctctccgatggatgcgaataaacgaaaatcgaaggttgcgggagagagacgcccacgcgtccgcccacgcgtccgcccacgcgtccgcccaagcgtcagcccgatgttgtctggttctggctggagaaaggaaagtcctttgaatgcccggtttgcactcagtactttgagctggaagtggttggtcctggtggtcctccggatggtcacggtgacgaagacgatgagcaccaccactgattccggcctctcccttgccgcaaatttttctttttttatttgcacattttcatatctttaaaaattttatgaatggaataaaacaaaatatctcccgttttggtgaaacacagttgaaaatgttttttgatctttttagaacaagactcggcatcagagtttcccaagtgccaaaactcttatgaccgttgtttttatttttgtaacactcttgaatcagaatcagaatcattcttggcttttgcttattatatgattcaccttttattaaaaaaaaaaaaaaagnnnnnnnnnnnnnnnnnnnnnnnnnnnnnnnnnnnnnnnnnnnnnnnnnnnnnnnnnnnnnnnnnnnnnnn

SEQ ID NO: 91934 - DNA, 941 bp, Arabidopsis thaliana columbia
  unsure (1)..(941): unsure at all n locations
ctatacgactactatgggtaagctggtacgcctgcaggtaccggtccggaattcccgggtcgacccacgcgtccgggaagtagaagaagatgggtaaggaagatgaccgaggagaagagtacctgttcaagattgtcctaatcggcgattccgctgtcggaaaatcgaacttgctgtctcgattttcgcgggatgagttcgacacgaactcaaaagcgacaatcggagtggaatttcagacgcagctggttgaaatcgaagggaaagaagtgaaagctcagatctgggacactgctggtcaagagaggtttagagctgtcacttctgcttattacagaggtgcttttggtgctctcatcgtttatgacatcactcgaggtgacactttcgaaagcgttaaacgttggctccaggaactcaacactcattgtgacacggcagtggcacaaatgctagttgggaataaatgcgatttggaggatataagagcggtgagtgtggaggaagggaaagctcttgcggaggaagaaggattgttctttatggaaacatcggctctggacgccacaaatgtagacaaagcctttgagatcgttatcagagagatcttcaacaatgtcagccgcaaacttctcaactctgatgcttacaaagcagagctttccggtaaccgggtcagccttgtcaacaaccaagatggctccgagagctcttggcggaatccgtcttggtgctcccgatgatttcaatcaatcttgtttttaccagagaaagctttataaggttataattatcatttatgaagtcagacttataataagatacttgcaatcnnnnnnnnnnnnnnnnnnnnnnnnnnnnnnnnnnnnnnnnnnnnnnnnnnnnnnnnnnnnnnnnnnnnnnnnnnnnnnnnnnnnnnnnnnnnnnnnnnnnnnnnnnnn

SEQ ID NO: 91935 - DNA, 724 bp, Arabidopsis thaliana columbia
agacaagtacacaagatcggacaagagtggagttacattcattagcagtggagctcttacgcattcggtgaaagcactagacaatatctctgaagatcgatacagagttggctctcgaggtgggaagaaggaccaaacgagcatagagaacatcgtcttcctcgtatacttactttctttttattttccgggaaacatgtaatcaataaggtgagaggcaaacgaatgaatctgcctataaaatgactgtttcttctacaatgtaataatagtaaaactcttgagtacaatagagtggagacatggatgaatatctgaataagctttctctcaaactttctgcgttttttatgtacatagaatttgcagaaacgttgggaagcattctctaatacatatgtttattggttcaagctacagtgatctcgctccctcctcctctttccgccatgaaactcactcgtttcaaacgggatttgactcctcttgtggcggtggtggtggcggtggcggtggccgtggtggcgggctcgtcctgtcgtgtgttctgatatgcctcctcttgcctctgtttggccataaagagagcagcgatcttctgcgtagcttcggcttcggtggctccttctttaacgagcttttcaagctcagctttgggaatcctcaccttcaccctcctcaccgctccttcttcttcctccgtcgtccatcctcctggtggttt

SEQ ID NO: 91936 - DNA, 536 bp, Arabidopsis thaliana columbia
  unsure (1)..(536): unsure at all n locations
nnnnnnnnnnnnnnnnnnnnnnnnnnnnnnnnnnnnnnnnnnnnnnnnnnnnnnnnnnnnnnnnnnnnnnnnnnnnnnnnnnnccacgcgtccggtggagacatggatgaatatctgaataagctttctcgtatacttactttctttttattttccgggaaacatgtaatcaataaggtgagaggcaaacgaatgaatctgcctataaaatgactgtttcttctacaatgtaataatagtaaaactcttgagtacaatagagtggagacatggatgaatatctgaataagctttctctcaaaaaaaaaaaaaaaaaaaaaaaaaaaaaaaaaaaaaaaaaaaaaaaaaaaaaaaaaaaaaaaagggcggccgctctaaaggaaccaagcttacatacccataacataaggggccgtaggcttttaaggatccaaatttacttcccttcactggccggggtttaacatttttttgattggaaaaaaccaaataataccgcccttagtggcccagcgttaaaaccggaaaaccccgga

SEQ ID NO: 91937 - DNA, 1038 bp, Arabidopsis thaliana columbia
  unsure (1)..(1038): unsure at all n locations
atgatactccagctctcnnnnnnnnnnnnnnnnnnnnnnnnnnnnnnnnnnnnnnnnnnnnnnnnnnnnnnnnnnnnnnnccacgcgtccgcatgaattgaagcacatcaatatcttggtcgaaagattccccctttcaggagcaaaaactctgattttggagtatccttagtgttgttctcttcccatattgtaaaaacgacttcgtttaattgaaggaaaaagcttctttttggtttaaagtctctctgctcaacctaagagatgaaaatgtataatccatctttcattatgtttttgttcgatttccttctctgtttttgtagtcaaaatttggtgtggttatttgcagaatgaaggcaaatgcaggagcacttaccaatttcgagttgcttgacttcttaaactcaagaggtgcttcaaaagatactacaagagttattgctccaattgctagatcagaatacaaggtctatgattatttggtggagactgctgcttccactcaaacacgagagagcgttaacaaatccgcagacaagtgtaaagatttcaaactcgctaaagctgagattctcaatatcatcaatctctggccttcttctatagtcgaactgttaccgatcatagagaaccttgatgatcgagaaatcgacacagatgggatattagagcttgtgaaggatttgctacctcctctgcctacagctgaaagtcctaaagataatgatgaagaagaagaaacagagaatggtgaacagtcgtgacttgcaacaattttccccttaaatcgttattttttgtatcggtgcgattttaccgttttggcggaaaaaggcaagtctccgatttttacaatttttgcagaaaaatgtaatttctcaatttttcttaaaaattatgatttatgatttatcaataataacaataataaaatgggctgaccaaaaaaaaaaaaaaaaaaaagnnnnnnnnnnnnnnnnnnnnnnnnnnnnnnnnnnnnnnnnnnnnnnnnnnnnnnnnnnnnnnnnnnnnnnn

SEQ ID NO: 91938 - DNA, 411 bp, Arabidopsis thaliana columbia
  unsure (1)..(411): unsure at all n locations
cttaaagatatcaagtggtgcaagattgangaaccaaagggattcaaacttganttttnntncgaccagaatccttacttcaaaaacaccctattaacaaaggcgtatcatatgattgatgaagatgagcctctgcttgagaaggctattgggacagagattgattggtatcctggaaaatgcttaactcagaagattcttaagaagaagcctaagaaaggtgcaaagaatgccaagccaattaccaaaactgaagattgtgaaagctttcttcaacttcttcaatcctccccaagttcctgattgatgatgaagacattgacgaacaaagagccgaggaacttcagaatctgatggaacaagattatgacattggttctacaatccgggagaagatcatacctcatgctg

SEQ ID NO: 91939 - DNA, 393 bp, Arabidopsis thaliana columbia
cgcactgcgccgccaaaaaacccttctttaaaccctttcctcctcgcgccgtcatgcaagccaccatcttctctccacgcgccactctcttcccctgtaaacctctcctcccttcccacaatgtcaactctcgccgtccctcaatcatctcctgctccgcccaatccgtaaccgctgatccttcaccacctatcactgacaccaataagctcaacaaatacagctcaagaatcactgaacccaaatcccaaggtgggtctcaagcaattcttcacggtgttggtttatcagacgacgatttgctaaaaccccagattggtatctcgtcggtttggtatgaagggaacacttgtaacatgcatttgctgaaattgtctgaggctgtgaaagaag

SEQ ID NO: 91940 - DNA, 525 bp, Arabidopsis thaliana columbia
  unsure (1)..(525): unsure at all n locations
nnnnnnnnnnnnnnnnnnnnnnnnnnnnnnnnnnnnnnnnnnnnnnnnnnnnnnnnnnnnnnnnnnnnnnnnnnccacgcgtccgcccacgcgtccgcccacgcgtccgcccacgcgtccgaaattatttcaactattccaggcaacagcatcgcaactgctacagccccgacctctgaacggacaactgaccatagccaagtcctacagcatggttcctcatttcatttgtcttcaaatcaagctccacttcatccacctcttgaacactttgtttcaggtcttggttataatatccaggagcaagaactgcctaaaaattctatgaatctcaatcctctttttgctcagcaactacttccagttcctcatgacacatcattacctcctggttctcacgtccctcgaccaccggattcgttcccttttagcctttccaacacaccaaggacctattctgtgactttgcctccatattctggcagtcagatacaaccaataggaccacgttctactgtgaggccg

SEQ ID NO: 91941 - DNA, 782 bp, Arabidopsis thaliana columbia
  unsure (1)..(782): unsure at all n locations
atgatctannnnnnnnnnnnnnnnnnnnnnnnnnnnnnnnnnnnnnnnnnnnnnnnnnnnnnnnnnnnnnnnnnnnnnnnnnccacgcgtccgattcaaatggcgcttagaggagtttggcagctcaagaaactcgttgtgagctactgtaattggggtggtagcagtagaggcatcagagcctttatggaatcagaattgcctgctctaaaggagaaaaacccgcagctcgaagtaattaccgagctttcacggggacaacatccttatttgaagggcatttacaggaatagaaatgaaagggtagtgtgtgtgaagaacatggatcctgaagaagtgcttttgaatgcaacgaggctgaggaactcgcttggacggaaagtggttaaactgaggaccagacatgtcaccaaacaccccagtgttcaaggcacctggacaactgctgtcaaattctgagactttcctgctaaattgtttgcaggttttcatcttctagctgttaaatcgaatgttgcaagtatcaggattggtcgtttatctgtattgcaaccccaagttgtttgtaccgtctgtgacttgggacaaagatgtagtcttcaaatgttttgcagtttttgcaatgtttgaattttgtcttgtccttctggttgagtctataataagattacacaagggtttaaggttaaaaaaaaaaaaaaaaccaaagnnnnnnnnnnnnnnnnnnnnnnnnnnnnnnnnnnnnnnnnnnnnnnnnnnnnnnnnnnnnnnnnnnnnnnnnn

SEQ ID NO: 91942 - DNA, 716 bp, Arabidopsis thaliana columbia
  unsure (1)..(716): unsure at all n locations
nnnnnnnnnnnnnnnnnnnnnnnnnnnnnnnnnnnnnnnnnnnnnnnnnnnnnnnnnnnnnnnnnnnnnnnnnnnnnnnnnnnccacgcgtccgcaactggttaccatgaagaagctccggggaggatgagtgctatttacacggcggggcttttggctcgtaaccgtgaagatggtgaaactgacgtttttgttcacgacgttaaccgtccggtggaagatgagttctcggcgactttcttgtgtaaaggttatatgagggagcaaaatgggagacttagacattttactattcctagtcatcgggctcgtgctggacgacctttttgtccggtggaagttgatcgccgccgttaattttgtggtgggagatttatttagttcaccgtcgttggtcggtcaacggactcagggctggtaaattgttttacctagtggacattgaaggacttgcttagctggcattttgtatttgttttgttttgtttttgcttgatttaaatacgtttttcaagattttagtgcatttactgaaatcgatacatactagtattcgcatgattatttgtgatttcattatcccttttgattaatgaataccaataaggtatttatctgaaaaaaaaaaaaaaagnnnnnnnnnnnnnnnnnnnnnnnnnnnnnnnnnnnnnnnnnnnnnnnnnnnnnnnnnnnnnnnnnnnnnnnnnnnngaatcg

SEQ ID NO: 91943 - DNA, 521 bp, Arabidopsis thaliana columbia
  unsure (1)..(521): unsure at all n locations
nnnnnnnnnnnnnnnnnnnnnnnnnnnnnnnnnnnnnnnnnnnnnnnnnnnnnnnnnnnnnnnnnnnnnnnnnnnnnnnnnnnnccacgcgtccggttcaacgtgacgatgaagaaagagaagaagccgacccgtcgttcaaatcatccttcgttcctcaacaacattaaccccaaacctaaggttagggttttacctttatctcttcaatttcttcattcctctcatcgattcgcgacaacatgtctctaccggattctctcccatcttcttcttcttctccgcctgtgacccgtgaagaaaccggctttcatcgctttgaacatcacggcaacgattccggttttgatcatcgtgatcgtccaccgtggaatcgttctgagtacgattatcgccatggaagcgttgttgcatctgagaacgtcaggaacaattccacttctgaagacccttggtcttgcgttgtcgtcgttgctaccttctgtatctttgtgtcgatgactttgattctggggctttat

SEQ ID NO: 91944 - DNA, 673 bp, Arabidopsis thaliana columbia
tgactcagcccaccccgacgagctagatgaagaggttgacacttttccttcttcccggccatctgacatagtcaggatgaggtatgacaggttgaggagtaatgctggtaggaatcagaccagtggtaggtgatctagcaactcaaggagaaaggcttcagtttctgttaagctggcgtgatccgcgtgcaacagcgcccttcgtcttgttctgcttgattgccgcagtcattctctatgtgacacctttccaggttgtggctctttgtattggaatctatgctctgagacatccgaggttcagatacaaactaccatccgttcctctcaatttcttcagaaggcttcctgcaagaactgattgcatgctctgacctgcaaaaactgcttccaataccgaagaaaacttctataagacttgtagtttgttcttgttaaaaatatcatgatgactctttttagtttgttcattgttaaaaatgtcatgatgactcttttcttggtgatggtgatgatgtatccgtctgtcttttaacattattaagacttttgtttgaaagtagtaaagaagtatcttgtgtggttgaaaaaaaaaaaaaaagggcgaccgctctagaggatccaagcttacgtacgcgtgcgtgcgacgtcatagtcttctatagtgctccta

SEQ ID NO: 91945 - DNA, 1146 bp, Arabidopsis thaliana columbia
  unsure (1)..(1146): unsure at all n locations
nnnnnnnnnnnnnnnnnnnnnnnnnctcactttagggaaagcacgtacgcctgcaggtaccggtccggaattcccgggtcgacccacgcgtccgcttgataacttgaggcatcaagcgactcagattgtatcgatgaggctgacccgagcagaaccacctctaaggaaagaagtagttgagtatatgcttgatgtgggttctcacatgtggagtatgcggagaagcaaagcaaactttttcaggattatgggagttttgagtgggttaatcgcagtaggaaaatggtttgaacaaatctgcaactggaagaatccaatcacaacagtcttgatccatctcttgttcatcatccttgtgctctatcccgaactaatcttgcccaccatcttcctctacctcttcctcatcggtatctggtactaccgttggagaccgaggcatcctcctcacatggacacacgtctctctcacgctgactcagcccaccccgacgagctagatgaagagttcgacacttttcctacttcccgaccatctgacatagtcaggatgaggtatgacaggttgaggagtattgctggtaggattcagacagtggtaggtgatctagcaactcaaggagaaaggcttcagtctctgctaagctggcgtgatccgcgtgcaacagcgctcttcgtcttgttctgcttgattgccgcagtcattctctatgtgacacctttccaggttgtggctctctgtattggatctatgctctgagacatccgagggtagatacaactaccatccgttcctctcatttcttcagaaggctcctgcagaaactgatgatgctctgacctgcaaactgcttcaatacgaaaaactctatagacatgagttggtttggaaacttgttaaaaatatcatgatgactctttttagtttgttcattgttaaaaatgtcatgatgactcttttcttggtgatggtgatgatgtatccgtctgtcttttaacattattaagacttttgtttgaaagtagtaaagaagtatcttgtgtggtagaaaaaaaaaaaaaaagnnnnnnnnnnnnnnnnnnnnnnnnnnnnnnnnnnnnnnnnnnnnnnnnnnnnnnnnnnnnnnnnnnnnnnnnnnnacaatc

SEQ ID NO: 91946 - DNA, 627 bp, Arabidopsis thaliana columbia
cagctacaattctactcacatttatggaaagctggtacgcctgcaggtaccggtccggaattcacgggtcgacccacgcgttcgaaaaaaatgagagagaggtggcaaagatgaagtggaggtgagagacggaaagcaaaaacaatagtcacgagaatcaacaccaactcttaaaccaagatagaccaagaaaccaaacagagtaaataaatggtggccttgacaacattgaaatccccaaaaatctcaactttttagggttttcgagctctgaaatctctctatctttcttcttcagatttctcacttttttcttcttcataagatcctcgtgattccactttataacgtacgcctcctttcaagaaaaatctctctctatattatctacgtttgctctcgccttgtctccttttgaggttccatttctacttctctccaaaattcgaaacttttcccactctctctctctctctactagtttgacatgaacagcgaccgtggttggcttgacggctccggtgaatctccggaagttaataacggtgaagctgcgtcttgggtcagaaacccagatgaagactggttcaataacccaccaccaccacaacacactaatcaaaacga

SEQ ID NO: 91947 - DNA, 625 bp, Arabidopsis thaliana columbia
  unsure (1)..(625): unsure at all n locations
gatctgccagcactaatacgactcacataagggaaagctcgtcgcctgcaggtaccggtccggattcccgggtcgacccaccgtcgtggttacaaccaaggaggacctaggaattacaatccacagggagctggaaactttggtcctgcatctggagctggaaacttaggtcctgcacctggagctggaaatcctggctatggtcaggggtattctggaccaggacaagagcagaatcagacattcccacaggcagatcagaggaatcgagactggaacaacaataatccagcaggccagcccgggtctgaccaatttccacagggaagaaggtactagacagagagcatgctgcagtgaattgagctgaataaggagagaagtgtcaaaggccttttattaagttttacagtaaatagtatttagtcatctttctactttgtaagacaatagttagtccttttttctcttaagttgagcttgttaacgttgttggttgcgcttgtgaaattgaaacactctttctagacaaaaaaaaaaaaaaaacaaaagggcgacaannnnnnnnnnnnnnnnnnnnnnnnnnnnnnnnnnnnnnnnnnnnnnnnnnnnnnnnnnnnnnnnn

SEQ ID NO: 91948 - DNA, 988 bp, Arabidopsis thaliana columbia
  unsure (1)..(988): unsure at all n locations
atgattctccggcactaatacgactcatttagggaaagctcggcacgcctgcaggtaccggtccggaattcccgggtcgacccacgcgtccgcggacgcgtgggcggacgcgtgggcggacgcgtgggcggacgcgtgggctccgtttcttctttccgattcgtgttttcccgtcggccggagatatatcgcaaccctaatccgaaatggcgtcggagaagaagctatcgaacccaatgagggacattaaagtgcagaagctggttctcaacatctccgttggtgagagtggagatcgtctcaccagagcctccaaggtgttggaacaattgagtggtcagactcctgttttctccaaggctcgatacactgttcgttcttttggtataagacgtaatgagaagattgcttgctatgtgactgtcaggggagagaaggcaatgcagctccttgagagtggattgaaagttaaagaatacgaactcttgagaaggaacttcagcgacactggttgctttggttttggtattcaagagcacattgatttgggtatcaagtatgatccatcgactggaatctacggcatggacttctatgttgttcttgagcgaccaggttaccgtgttgcgcgccgcagaagatgcaagactcgtgttggaatccagcatagagtgacgaaagatgatgccatgaaatggttccaggtgaaatatgaaggagtcattctcaacaagtctcagaacatcactggttaaacaaatgtgtcaaacaaatagctatcatctgttttgttttttttgggttcaaatcgtattttctcagttttgttttgcttctctgttcttcagacattttgattttcctttatatattttgcgtatctactactccgacaaaaaaaaaaaaaaagggcggccgctctagaggatccaagcttacgtacgcgtgcaggcgacgtcannnnnnnnnnnnnnnnnnnnnnnnnnnn

SEQ ID NO: 91949 - DNA, 522 bp, Arabidopsis thaliana columbia
  unsure (1)..(522): unsure at all n locations
atgatcctgccnnnnnnnnnnnnnnnnnnnnnnnnnnnnnnnnnnnnnnnnnnnnnnnnnnnnnnnnnnnnnnnnnnnnnnnccacgcgtccgcccacgcgtccgcccaaattctccacttgttcacttaatctttctcactacctgatcgtggaaatggcgattggaccatcaagtgtgatcattattgttgggataatcttggcgttgacttatcagtcaatcttgaaacctcctccaccgaatctatgtggctcccccggtggtccaccgatcacagcaccgcgtataaagctgcgagacgggagacatttggcatacaaggagtatggacttccaagagagaaagctaaacacaaaatagtcttcatccatggatccgatagttgtagacacgacgccgttttcgccactcttctttctccggtacgttcttaccaactcttggaactaaggttcataataatttcttgatctgttttcactttataggatttagttcaagaacgaggcgtgtatatg

SEQ ID NO: 91950 - DNA, 645 bp, Arabidopsis thaliana columbia
  unsure (1)..(645): unsure at all n locations
atggngggnttncnccagcaccttgtgccaacccccttgggcttcactttgctcccccagacccggttcatggccaattgtaaggccctacgccctccggcacaatctatccctcaaatgggaaaaaattcccccaaagattagctttggatcaaggtgtatcccccctatatatggagttcccagatgatgcagaaagaaactttttgctaatgctttggctccattcactgacccaagcaatggtgaagaagggagaggaaatagcaatcgtacagaccggtacacagccaatctggcgatcttcaatcgccccataccatccaagtccgcaaggtttaaagcttcttttaagatgggatgtctttcccccccacaacctcgtttttggttataattttcgtggcatgtctctcttctcttgcactattcacacttgttgtttgctgtatcttcttcttcagtttgctttgctacgattgtggtttttggagacattatagctcattaactgtttgtgagcccaaacccaaaacccaaagggcggccgctctagaggatccaagcttacgtacgcgtgcatgcgacgtcaagatnttgtagaggtcaccacaagccccccccntcttttacccccccccagcc

SEQ ID NO: 91951 - DNA, 735 bp, Arabidopsis thaliana columbia
aaaagttcccattgaaagctgctggagtgatgcacactgttgcattgcgaacagaagcaaccattactagcggtgaaatgccacctaatcttggtcaagccttcaagaaccatatgagtgagatgtttgcataccatgcaaccatgatgtcaaacacccttggaacttaaactgttgtcttcacaagacccggtttcatggccatattgttaagtcactatcgtccttccggcacaatctatgccttcacaaatgagaaaaaaatacaacaaagattagctttgtatcaaggtgtatgccccatatatatggagttcacagatgatgcagaagaaacttttgctaatgctttggctacattactgaaacaaggaatggtgaagaagggagaggaaatagcaatcgtacagagcggtacacagccaatctggcgatctcaatcgacacataacatccaagtccgcaaggtttaaagcttcttttaagatgggatgtctttaatatgtagaacctcgtttttggttataattttcgttgcatgtctctcttctcttgtactattcacacttgttgtttgctgtatcttcttcttcagtttgctttgctacgattgtggtttttggagacattatagctcattaactgtttgtgaaaaaaaaaaaaaaaagggcggccgctctagaggatccaagcttacgtacgcgtgcatgcgacgtcatagtgtaatatagtgca

SEQ ID NO: 91952 - DNA, 745 bp, Arabidopsis thaliana columbia
  unsure (1)..(745): unsure at all n locations
tacggtaatgtttcagcagaaactgctcagggaaagttcccattgaaaaccgctgcagtgatgcacattgttgccttgcgaacagaagcaaccattactagcggtgaaatgccacctaatcttggtcaagccttcaagaaccatatgagtgagatgtttgcataccatgcaaccatgatgtcaaacacccttggaacttcaactgttgtcttcaccagaaccggtttcatggccatattgttaagtcactatcgtccttccggcacaatctatgccttcacaaatgagaaaaaaatacaacaaagattagctttgtatcaaggtgtatgccccatatatatggagttcacagatgatgcagaagaaacttttgctaatgctttggctacattactgaaacaaggaatggtgaagaagggagaggaaatagcaatcgtacagagcggtacacagccaatctggcgatctcaatcgacacataacatccaagtccgcaaggtttaaagcttcttttaagatgggatgtctttaatatgtagaccctcgtttttggttataattttcgttgcatgtctctcttctcttgtactattcacacttgttgtttgctgcatcttcttcttcagtttgctttgcttaaaaaaaaaaaaaaaaaaaaaaaaaaagnnnnnnnnnnnnnnnnnnnnnnnnnnnnnnnnnnnnnnnnnnnnnnnnnnnnnnnnnnnnnnnnnnnacacgaaatcca

SEQ ID NO: 91953 - DNA, 847 bp, Arabidopsis thaliana columbia
  unsure (1)..(847): unsure at all n locations
taggtgcactatagaagagctatgacgtcgcatgcacgcgtacgtaagctcggaattcggctcgagcgagagctggtgttgaaggagagaggcattgatgagcccgagcatcacaaattggatcaaccgacagataggatggtcctcaaaccgattgaaagagttccagagcatgcaagtcaaaggccagtgagttctccacgtgacatgagaacgaggaaattcgaccaaaaggatgggcgaaatgtaagcgacattgccagatccgaaactcagaggagaaactggcgtgaaaatgaaaacaagagcgcaagacagcaacagcagactcaggagaagacaagacatccatcaccagagacatggcgaaagccggttccccagaaactggattcaccaaatggaacagggattcgtcacggaaaagcagcttctgctcttgagctagctcaagcctattctcctttctctgaccctaaatctggaattggaagcagcaacagttttaacaaaagccgcaacaaccaaacgcagcagcaacccttctctcggttggtaggatcgacaacaacaggaagacagattaatgggtactgagtcatcgttcgtttgttctctcgaattggttttagtcccgattaattggatcttaataacacatcttatgtggtttgggatcgttattggagatttgaatgtgatatgttcccttaagaacggggtcgggttacataagccagatatgattacactgtgttcttcaaaaaaaaaaaagaaaaaaatatagggcggccgctctagaggatccaagcttacgtacgcgtgcattcnacgtcagtgctnnnnn

SEQ ID NO: 91954 - DNA, 580 bp, Arabidopsis thaliana columbia
  unsure (1)..(580): unsure at all n locations
gtgcaaaaaaagacacttcttaagcttcaacaagaaagaaatagtattcgcatagtattagaagatggattttttcaatcaagctaaagccgtaaggatgcgtaacgtccatgataagtatctaacagcggatgaggacgaggaaacggtgactcaagacaggaatggttccgacaagagagctagatggattgtcgagccggttcgtggttcctttgaagtgatccgtttaaggagctgctacggtaactacctcaccgcttcgaatgagcggttcttgctcggagccactggacgtaaagtggtcttgtctaaaccggctcgactcgactcctccgtagagtgggaaccggtgagagaaggttccaaaatgaagctcaagactagatacggaaacttgcttcgagccaacggtggacttcctccatggcgtaactctgtcacgcatgacacttctcatgtattggattcttccttgtgggatgttgatgtggttnaaattttgggtggacgacggttccggtgcaagtccantncgggcaaatnctcgcaaanngggccgtgnnnggtttccggtttg

SEQ ID NO: 91955 - DNA, 879 bp, Arabidopsis thaliana columbia
  unsure (1)..(879): unsure at all n locations
nnnnnnnnnnnnnnnnnnnnnnnnnnnnnnnnnnnnnnnnnnnnnnnnnnnnnnnnnnnnnnnnnnnnnnnnnnnnnnnnnnnccacgcgtccggcagggttttgggcggtcccttctgaagcgaaagttgccatggttggacgatggaaggtaggacctggaaagtcattatttgatgccatttccaaaggcgttgggaagatcaaaatcatagctgaagatttgggagttattactaaagatgtagttgagctgaggaaatctatcggagcacctggaatggccgtcctccaatttgcttttggaggaggcgccgataacccacatttacctcacaatcatgaagtaaaccaagttgtatactctggaactcatgacaacgacactattcgaggctggtgggacactctggaccaagaagaaaagtctaaggcaatgaaatacctgtcgatagctggagaagacgatatatcatggtcagtcatccaagctgcattctcttcaaccgctcaaaccgcaatcataccgatgcaagacattctaggacttggaagttctgccaggatgaacactccagccactgaggtggggaattggggttggaggattccaagttcaacgagctttgataatcttgaaactgaatctgacagactcagagatcttttgtcattgtacggacggctttgaggaaaacatttgacgtggaaaagaagaagaatctttggttttcttatcttttttgtaactttgctaatggtaaaagcaataaagtaagcagaagccggaaaaaaaaaaaaacaaaacanaaagnnnnnnnnnnnnnnnnnnnnnnnnnnnnnnnnnnnnnnnnnnnnnnnnnnnnnnnnnnnnnnnng

SEQ ID NO: 91956 - DNA, 509 bp, Arabidopsis thaliana columbia
actcgactcactttatggcaaagctcggccgcctgcaggtgccgggccgctctacccgggtcgacccacgcgtccgaattccttgaacttcttcttctgagagttttaggaaaaaatgtcgtctttgagcagagagttagttttcttaattctccagttcttagatgaggagaagttcaaggaatctgttcacaagctagagcaagaatctggcttcttctttaacattaagtactttgaagagaaagctcttgctggagagtgggatgaagtggagaagtctctttctgggttcactaaaggcgacgataatcgttactctatgaaaatcttctttgagactaggaagcaaaagtatctcgaagctctagatcgaaatgacagaccaaaagctgttgagacattagccaaagacttgaaagttgtcgctacattgaacgaggagctttacaaggagactactcagctgcttactctggagaattttacggaaaatgagcaactgtcta

SEQ ID NO: 91957 - DNA, 491 bp, Arabidopsis thaliana columbia
  unsure (1)..(491): unsure at all n locations
gcttcaaagagataagatggcctctcttctctctcccgccacccccaccgccacctccgccgcatttcattcctgctccaccgccggattctccactcccactcacatttcatcccagaacagcagcctgtccctcctcagccgccggggttgtatgatgagatgcagtttttctccgcaggacattcctgttgattccctctctcatctccctcctttccttgactttcagaactccctcgccacattttcggatacccagaaatgggggttctttgtctccgccggaatcgtctggttttacctcacggcgaggcctggtgttctcatcggcgccattgacgcctaccttctcgctcccctccagcttggcctcgacactctgattggaaggaggttgaagaggtccgatttcttggtcacttagaaactcggggaaggctttttttgggggggcggtttttccgggggccaattcccaanatttatac

SEQ ID NO: 91958 - DNA, 504 bp, Arabidopsis thaliana columbia
  unsure (1)..(504): unsure at all n locations
nnnnnnnnnnnnnnnnnnnnnnnnnnnnnnnnnnnnnnnnnnnnnnnnnnnnnnnnnnnnnnnnnccacgcgtccggggggaaaaaacacaaggaaaaaaatggctcaattggctgctttgtcgggaaagcaagctgatgagtacttgaacgcaaggccgaaatatcctacaatatggtacaaagtgttggctggtcgaaccagcaaccataaggtggcttgggatgttgggaccggcaacggtcaggctgctattggggtcgctgagtactaccagaaagtggtggcaactgatataaatgaatcacaactccaacgtgcaatgaagcacccaaaagtcacttactatcacactccatcatcaatgtccgacgacgatctagtgactctactcgggggagaaaactccatagatatcataatagccgctcaagctcttcactacttcgacctaaagagattctaccccatagtgaaacgtgttcttcgtaaacaaggcggtat

SEQ ID NO: 91959 - DNA, 554 bp, Arabidopsis thaliana columbia
cagaggatagcgaatgagactgttgagttacaagaccttgttgagattgttcctgagccagttgataagtggcaagatgttggacctgaccatttcaatatattggatgctttctactctgagcctcagaggtatgcttatactttccagaactatgtgtttgtcactcggctgatgcaggagaaagagtctgcttctggggttaaacctctcaggttgatggaaaggagtgtcttcagtgaccgaatggtgtttgtgcgtgcggttcatgaagcgaaatggatgaatgagatggagatcagcatttacgactcttggtttgatccggttgtctcttctttacctggacttgttcctgatgggtttatatacttaagggcgagtccagacacttgccacaagcgaatgatgctcaggaaacgagcagaagaaggcggagtctctctgaaatacctccaagatttgcacgagaagcacgagagctggctgcttccctttgagagcggaaaccatggtgtattgtctgttagtagaccatctttacacatggacaa

SEQ ID NO: 91960 - DNA, 466 bp, Arabidopsis thaliana columbia
gcgaaaaggagtctggtgatggaaaggggtatgcatttgtaacattcagaagtaaggacttagctgctgaagcaattgatactctaaataacactgacttcagaggtaaaaggataaaatgttcgactacccaagcaaagcatcgtctctttcttggtaatgtccctagaaattgcatggagtcagacattaagaaagccgcaaatagaattggtccaggcgttcaaattgtcgaactcccaaaggaaccacaaaatatgggccggaatcgcggatttgctttcatcgagtattacaaccatgcatgtgctgaatactcgaaacaaaaaatgtcaaatccgagttttaagcttgatgataatgccccaactgtaagctgggctgaatcaaagaatggaggaggaggaaattcttcagctttccaggtcaaggcattgtacatcaagaacttacctagagatataac

SEQ ID NO: 91961 - DNA, 947 bp, Arabidopsis thaliana columbia
tgttgctggagttgatgaagcaaagcaagatttcatggaagtggtggagtttttgaagaaacctgagagattcactgcggttggtgccaagatcccgaaaggtgttcttcttattggtcctcctggtaccgggaaaacccttttggcaaaagccattgctggtgaagctggtgtgcctttcttctccatctctggttctgagtttgttgagatgtttgtcggtgttggtgcctcgagagtccgtgatcttttcaagaaagccaaggagaacgctccttgcattgtctttgtagatgaaatagatgctgttggtaggcaaagaggaaccggaattggtggaggtaatgatgaaagagaacagaccctcaatcagctcctaactgagatggatggttttgaaggtaacactggtgttatcgtagttgctgcaaccaatagagcagacattcttgactctgctttgttgaggccaggacggtttgaccggcaggtaagtgttgacgttcctgacgttaaggggagaacagatattctcaaggttcatgccggcaataagaagttcgacaatgatgtttcacttgaaataatagcaatgagaacacctggatttagcggagcagatctcgctaacctcttgaatgaggctgctatattggccggaaggcgagcacggacatcgatatcatctaaagagattgatgactccattgatagaatcgttgctggcatggaaggaacagtgatgaccgatggcaagagcaaaagcttggtagcttaccatgaagttggtcatgcagtgtgtggaacattgactccaggacatgatgctgtgcaaaaggtaacgttgataccaagaggccaagcaagaggtctgacttggttcattccatcagatgacccgacactcatctccaagcagcaactctttgcaagaattgttggtggac

SEQ ID NO: 91962 - DNA, 392 bp, Arabidopsis thaliana columbia
catcttcttcctttcctgaataagttttctctacgcgttcgctggtgatattcttctaaacgcgtctctgatttgtttgaatcgatcatcgttccttcttctggattttccatcgatatttgatttttctagggtttgcttctaaattgcatcgatggctttttatgttcatgcgatttacttttccctctgttattctagattgttgttcgatgatttgatcgttcagggatggatttgatggatcttatgttttcacggggcttctctatgctgctacgtcttcagggggtgttcttcttccttacgcgtctctgatttttgttttcttctctacgcttcttagtcgtctcgactcgcagtttttttggaagctaattatgatccgatca

SEQ ID NO: 91963 - DNA, 641 bp, Arabidopsis thaliana columbia
ggaaaacaggaagagaaagctggtcatcatttccgaattgtgcttaaaagctctgcaactactgatccttctgtcctcggaggaagagatgttccacacaatgaggctaataaggaggaggagagacaaggcacaatagctgatgcccccgcggccgatgcagctgattcttctgaaagttcccagaagccttctcttggttccatggttggtaaaacacgagaaggtgaagagaaaaattgtgatgatgttagtaggaaaatcagtacgaggaagaacaaattccaaaaagaaacagctgatactggtgccagtggagctctaggcctgcagactctagaccatatggattctaaagtgtcagggagctctgcgtctcagatctctggaggttctgaacttaacaaaatgacaccgagcagttcacttcctgatgatcacaaaccgcagtctgttgaaatggtatcagagggaataagtagtggcaatagagacagagctatcgaattaaaacgagaactggtggtttcagaaactgaaaaagatattcaggaaacaaagcctggatctgttttatttcaagagccatcaaagccttgcagacctattccgcatacggtttcaggaaatggtaggcctaa

SEQ ID NO: 91964 - DNA, 557 bp, Arabidopsis thaliana columbia
  unsure (1)..(557): unsure at all n locations
cagctcccnnnnnnnnnnnnnnnnnnnnnnnnnnnnnnnnnnnnnnnnnnnnnnnnnnnnnnnnnnnnnnnccacgccgtccgaaacccaaaacctcaaactttttgaatccgaaacgagaaaacaaactatgttacagtccattcatcttcgtttttcctccacaccatcaccttctaaaagagaatctctcataattccatcggttatttgctcatttcctttcacctcttcttcgttccgtccaaagcaaacccagaaactgaagcgtctggttcaattttgcgctccttacgaggtcggaggtggatacaccgatgaagaattgttcgaaagatacggaactcagcaaaatcaaactaatgtcaaagataaattagatccagctgagtatgaagctttgcttaaaggaggcgaacaagtgacttccgttcttgaagaaatgattaccctcttggaagatatgaagatgaatgaagcatctgagaatgttgctgtagaattggctgcccaaggggcttttggggaaaagggttgatgaaatggaatcagggttt

SEQ ID NO: 91965 - DNA, 415 bp, Arabidopsis thaliana columbia
accacgcgtccgtcttctctctctctcgcttctcttcattgtttgtgtgtgattacagcgaagaagagagaatccttggagcattccatggattcgcttcgatttctccggattcttcttctatcatcttcgattttactcttatctctccgttctacagtcaccgccggtgatattgttcatcaagacaatttagctccgaagaaaccaggttgcgagaatgacttcgttttggtgaaagttcaaacgtggattgatggtgttgagaatgaggagtttgtgggggttggcgctagatttgggaagcggatagtttccaaggagaagaatgcaaaccagactcaccttgtttttgcaaatcctcgtgattcttgtacaccgctcaagaacaagctttctggagatgttgttattg

SEQ ID NO: 91966 - DNA, 501 bp, Arabidopsis thaliana columbia
caaaatcagagatctggtctgactaaaccagacgaagaaccaatttcaacctcctcgccggcaaaaatggcggaaggaaaagaagctacgacgagttcgctgagtcaaggactcactcctcaccaagaccccgacgatgctcccaagtctcctcccaactctccaaattcttctactcgcaaggcttgttatggggttctacagagttgggtgtctaagaagtttatgactggatttgtcgtactctttcctgtagctgttacattcctcatcacttggtggtttatccagttcgttgatggtttcttcagtccgatatacgagaaccttggtgttgacatatttggacttgggttcattacatctgtacttttcactttctttgtcggaatatttgcttcgtcgtggttgggttctacagttttctggccttggggagccagtttataaggcgaatgccctttgtcaagcacatatattcagcttctaagcaaattagca

SEQ ID NO: 91967 - DNA, 411 bp, Arabidopsis thaliana columbia
acgaagaaaaagccttttcttctctctcgttttcgcgacaaccttttcttcgaagaagaagaagaacgaggttttctctcagagctgccaaccatcgttgcccggagatttaaaaaacctgtgataaatcgtaactgagtgagagatatatacacatatatatacacagagggacaaggaaagagattgggatatgcgagtgcgcatcggttctgtcggaacggctaactcgcttgacctagggtttcgtcttccttgtgcttcgtggagtttttcgaatgggagaaagaacctttttgctttctaaccgtgttctatatttttggagttgtcataagtaaagcagtatgacgcttgaagatttctttaccctaacagaaataaaagatggactcacggtcacttctcgtg

SEQ ID NO: 91968 - DNA, 445 bp, Arabidopsis thaliana columbia
cggacgcgtgggtgggatttagggtttaagaaatcttccgagaaaacagagagacagaaaaatggtgatgatgaagaagatgaagggaagccaaagctttagacaaagacttcttctttcaacactttcttcaacacctatctcgattgatgagattcgtgccgacgaaacgattcctggtctccgacctcacgaggttaatcttctccgcctcttagaaattgtcaccgacgacgccgtcgttgatattaacgagaccgggactcgattaaagtacaagcctggaactatagtgggagggaagaacttggttcacagctgctcgctgagtcgatccattggctattatcttgagccattgcttttgttgggattgtttggaaagaagcctctttcgattaggctcaaaggaattacaaatgatccagagacggtagcgttgaca

SEQ ID NO: 91969 - DNA, 463 bp, Arabidopsis thaliana columbia
cccacgctcgtccattactcacctttcagtttcagatgcccaagcaaaaagctccaaggaagcagctcaagtcctataaactcaaacacatcaacaagagtattcaagagggagatgctgtgttgatgcggtcgtcggagcctggaaaaccgtcgtacgtagcgagggtagaggcgatcgagacggacgcgcgtggatcgcacgcgaaagttcgtgtgaggtggtattatcgccctgaggaatctatcggagggaggagacaattccatggagccaaggaggtttttctctctgaccacttcgattttcaaagcgccgatacgattgaaggaaagtgtaaggttcacagtttcagtagctacaccaaacttgactctgtttggaaacggccggcttcttctgtcggtttcgagtacaaattccactaccggcgcgttttatcccttcagagtgcacctgtgtt

SEQ ID NO: 91970 - DNA, 739 bp, Arabidopsis thaliana columbia
  unsure (1)..(739): unsure at all n locations
cggtcgaccacgcgtccgcggaaagcggtagatcgctngtggattttttgaatgctctcacggacggagctaagacgacaggagcgaagctttatgcactgtagtatgcatctaatccatgcgagcaattgctcagttagatgcttccagacttcatcgatctgtctggacatcaatctttcgctcttcgggaaatcctgaaagttcgtgagtgatcaaaatcatgaatttccaacgttcgggaatgagatcatgtcggatccgaccaattagctttgagtttcgacatgggggcttggatccgagccacaggtagtacctctggaatggtcacgaagagccaaacatctatcttattcgagctcgaattcgcagccgagacctgcgtggcagcctggtaagccggcgtggacgcatcaacctgcaccgaagcagagtgcgatccgttctgagatcgggagtggaccgacttcaatggggggtgatattcatggtaagacgtgggggtcagcttcgggatcgggttcgggtattgggattgtgaataaggatcctagtttgtttggagatttggttggttctgcgataggtcaaggtaaatctagtagaaacgtgccgttgaagaatgcaccgcctgtttcggcttcaggttcgagtaagagtccttattctatggggaatttgggtgattcgttgcctaaatctggtaattcgatgaaaactggtggtggtatgggtt

SEQ ID NO: 91971 - DNA, 567 bp, Arabidopsis thaliana columbia
cggacgcgtccgcccacgcgtccgcccacgcgtccgtgcaagtagtgaatcatcctccactaaatctggatctgtttccagtagcggaagtgtttctaccaagtcgaaagaatcgagtagtagtggaagttctgccagtggaagtgttgctaccaaatccaaagaatccagcggtggaagtgctgctaccaaatccaaagaatctagcggtggaagtgctgctaccaaatccaaagaatctagtggtggaagtgctactacaggtaaaacttcgggcagtccgagcggaagtcctaaggccagcccatctggttcagttagtggcaaatcatcttcaaaaggaagcgcaagtgctcaaggaagtgcaagtgctcaaagaagagaaagtggggcaatggctatgtccaagagcagagaaacaaagacatcgagccaaagacaatccaaatcatcgagtgaaagttcatcttctagcacaaccaccacaacagtgaaacaagtcgagagtgagacttccaaagaagtaatgtcattcataatgcaactcgagaagaagtatgcaggaaa

SEQ ID NO: 91972 - DNA, 544 bp, Arabidopsis thaliana columbia
gctctatacgactcactatatggaagctggtacgcctgcaggtaccggtccggaattcccgggtcgacccacgcgtccggttctattgtcggtggagcttgcaagtagtgaatcatcctccactaaatctggatctgtttccagtagcggaagtgtttctaccaagtcgaaagaatcgagtagtagtggaagttctgccagtggaagtgttgctaccaaatccaaaggatccagcggtggaagtgctgctaccaaatccaaagaatctagcggtggaagtgctgctaccaaatccaaagaatctagtggtggaagtgctactacaggtaaaacttcgggcagtccgagcggaagtcctaaggccagcccatctggttcagttagtggcaaatcatcttcaaaaggaagcgcaagtgctcagggaagcgcaagtgctcaaggaagtgcaagtgctcaagggagcgcaagtgctcaaggaagtgcaagtgctcaaagaagagaaagtggggcaatggctatgtccaagagcagagaaacaaagaca

SEQ ID NO: 91973 - DNA, 802 bp, Arabidopsis thaliana columbia
agttctagatcgcgagccggccgcccttatatctttcccagcagcactaacaaagacttctttacagacatgggcgcgtatattatctccactgggaactcttcatcattcgtgtttgatgctgttccatggggtctggaaggtgttcttcagcatataaagcatcgctataacaatcctccaatctacattcttgaaaatggttcaccgatgaaacacgattcgatgctacaagacacaccaagagttgaatacattcaagcttacattggtgctgtcctcaacgctatcaagagtggatcggacacgagaggttacttcgtatggtcgctgatagatttgtttgaggtacaggttggatataaaagcagcttcggaatgtactatgtcaattttagcgatcctggtcgcaagaggtctccaaagctctctgcttcttggtacactggtttcctcaatggtactattgatgttgcttctcaagatactattcagttgcagagaaaatgctcaggctcttcgtccttgtaatctatttaactaaatcatcctagttttgtttggttttcatttcatctatcgtatgaaaaaaaactcagtggtttgataagatttggatatgaataatgaaactgtcttgtgatttttgtcggtcatcataagatttggatatgaatattgttttgttattttccgaaatttgtttttaaactacaaccgaaccattatgatgtgttacctatattggcaatttggcatgtaggtacagtcagtacatggcaaggattactcacttcaacag

SEQ ID NO: 91974 - DNA, 513 bp, Arabidopsis thaliana columbia
atgatactccagctccctacgactcacttagggaaagctgctacgcctgcaggtaccggtccggaattcccgggtcgacccacgcgtccggtggattgttttcatcggcgataagtctcttctcctctgggattgaggttggtggtgtgaggtaaagcttcggtagttagagatgaatgcgtccggcttaactgttactccgcccagatttcactttcgatggcgttctgatcgttttggtacatctcagagaagctctcaagcttttactgttcttagcaaattgaataatcgaaattccgcttggcctgttcttaaaagttctcgtttggcgcttcctacacaaagaagaaatgctatgatcactcgtgccatgagtgcttcctttggtgatatggcagacgattcagctgctatcttccctcggatcaatgtcaaagacccatataaacggcttgggataagccggatggcctcagaggatgagattcaaggagcgaggaactttctcat

SEQ ID NO: 91975 - DNA, 468 bp, Arabidopsis thaliana columbia
ctgagttcatggcaccagaattatatgaggagaactataatgaactcattgacgtatattcctttggtatgtgctttttggagatgatcacctctgagttcccgtatagtgagtgcaaccatccggcacagatttacaagaaagttgttgggggaaagctaccaggagcattttacagagttggagacatcgaggcacagaggttcatcgggaaatgcctcgtgtctgcctcaaagagagtatcagcaaaagaactattgcaagatccaccttcttgcctccgatgagtcctggatggtatacacgagcggctgctgcggaatccaaagcccttcttgaacgagaatgaaatggacacactgaagttggaagatgatgagttaaggaccgagatgtccatcgctgggaagctgggcgctgaagataacaaaatcgatctggaagtacaaatcgcatatgataatggtc

SEQ ID NO: 91976 - DNA, 619 bp, Arabidopsis thaliana columbia
  unsure (1)..(619): unsure at all n locations
cctcatcccattcgaccctctctttctctaatggttcttaatctgttttagcattttgatcatctaaaactttcaatttctctcttgatcctcacttgaattttttgttgtttctctcaaatctttgatcctttcctttgtttttcatttgacctcttacaaaaaaatctggtgtgccattaaatctttattaatggcacaacttcctccgaaaatcccaaccatgacgacgccaaattggcctgacttctcctcccagaaactcccttccatagccgcaacggcgcagncangcaaccgctggacctcaacaacaaaacccttcatggatggatgagtttctcgacttcttagcgactcgccgtgggactgaccgtcgttctataagcggctccatttggttttccttgaaccaccttccttccggngtcggaaacaccacttcggtaggtttgacggcgggcaattcatgtccatgttaacggcggcggtcaaaacaatancccaattatnataatnatnaaagnattaacgggaatttgggccacggnttaatcttcaaaactttanggggccgtnaaattggctttgggnggggaanananggggccncgcnttc

SEQ ID NO: 91977 - DNA, 825 bp, Arabidopsis thaliana columbia
  unsure (1)..(825): unsure at all n locations
nnnnnnnnnnnnnnnnnnnnnnnnnnnnnnnnnnnnnnnnnnnnnnnnnnnnnnnngggtcgagcaccacgcgtccggaagattatccatcgccatgggacaagtctttaacaagctccgaggtaaagagtggagacataagcaggtacaagcgatatgtgatcgtgttttcgatcggttcaagatgcaaaccggaagagccaatcttacgtttgaagagttatacatcgctgttcttctcgtttacaatgacataaacaagagattgcctggtcctcatttcgatccaccttctaaggatctagtcaatagcattatgacggactgtgatatcaacttggatggagaacttgatagggaagagtttgtgaagtttattgagcagattacggctgagacgtttaacgtggttagtcagggtttgatcatagctttgattgttgctcccactgtggctattgcgacgaagaaagccacggaaggtgtccctggagttggcaaagttgtgcagaagctgcctacttcaatctatgcttctcttgtgactcttgcaggttatgtgggtgaattctgattaaagttaagcttctcatattgtcaccataataaatgtgtttataactcaactgctacgaaaatatagaaaccaacgcacggattggttgaacggttggataataactattttttctgagtaaaaaaaaaaaaaaaaagggggccgttttaaagatcagcttactaccgtgctgggaagattagtttttttatgggccctaatttatatcctggcgcgcgttaacaggggggatggaaaaccccggttcc

SEQ ID NO: 91978 - DNA, 517 bp, Arabidopsis thaliana columbia
  unsure (1)..(517): unsure at all n locations
tgatcctnnnnnnnnnnnnnnnnnnnnnnnnnnnnnnnnnnnnnnnnnnnnnnnnnnnnnnnnnnnnnnnnnnnnnnnnnnccacgcgtccggggacacgccacgagtctctctcacttcctcatcctctcttcctccaggttctctcgtctcgggtctctcactagattactctccaaacccacctctctctccggctctttttcttccatttcggtcaccggacaagggttccgatgctgttgctccgtcgccacagatgacacttctccttctgtaaagaaacgtgtggtctctggtgtccagcctacaggttcagttcacttaggcaactatctcggggctatcaaaaactgggtcgctcttcaggatacatatgaaacactctttatcatcgtagaccatcacgcgataacacttccatatgatacacgtcaactaggaaaggcaacaacggataccgcagcactttatctagcatgtggtatagacgtctctaaggcttcagtatttgtgc

SEQ ID NO: 91979 - DNA, 788 bp, Arabidopsis thaliana columbia
  unsure (1)..(788): unsure at all n locations
atgatcttnnnnnnnnnnnnnnnnnnnnnnnnnnnnnnnnnnnnnnnnnnnnnnnnnnnnnnnnnnnnnnnnnnnnnnnnnnnccacgcgtccgctatcaggtgcttcgagccaatgaagcggagtttgaagttatttctcatgaaggaaacaacattgtggatatcaggaaccggtgttgtctctgtcggggttggcagttatatggtttaccttgtgcacacgccgtggcagctcttctttcttgtagacagaatgttcatagattcactgagagctgttttactgtggctacttataggaagacatactctcagacgattcatccgattccagataaaagtcattggagagagctttctgaaggagatccaaacgtgaataaagctgctcttgatgctattataaaccctccaaagtctctgagacctcctggtaggccgaggaaaagacgggttagagctgaagatagaggacgagtgaagcgggttgtgcattgtagccggtgtaaccagaccggacatttcagaaccacttgtgctgcacctatttgatttgcaacggcagcatgctctctttatgtttcaccagnacaatacttgcggnctcaactgagttatcggaaagaagccaaaaactctgctcagtgnctataaaactttgatcttncttgatcaattctagattcagnaattcctgggnccattttcaatgcctgttgtgnaccttcctactattaantccnagttggnagtcngtaacnttnntntntccgaacagttttttnt

SEQ ID NO: 91980 - DNA, 534 bp, Arabidopsis thaliana columbia
  unsure (1)..(534): unsure at all n locations
atgatcctgcaagcatcnnnnnnnnnnnnnnnnnnnnnnnnnnnnnnnnnnnnnnnnnnnnnnnnnnnnnncttctttagtcccacgcgtccagtttaggaaagctctgaaattagggtttttcgtctgcgatcacgatccttcaattactttgcgataatggagaagataagacaaccaacacatgcaggctcttggtataccgataatcctacaaaattgtcatctgatcttgaagaatggcttaatgcaactggtttgaccaaatctcctgatgtacgaggcgtcattgcaccacacgcaggttattcgtactccggtcgtgcagctgcttatgcttttgcaaacatagatcctactaacatttcacggatatttcttcttggtccatctcaccacttttatactccaaaatgtgccctttcgactgcaacagtttataaaacccccattggaaatctacctgttgatgtggagatgattaaggagatacgagctatgggaaaatttggaatgatggatctacgggtcgat

SEQ ID NO: 91981 - DNA, 456 bp, Arabidopsis thaliana columbia
cggacgcgtgggctcttgtcctcttctccttcttcttcttcaacaacaaacttccattgttcttaatacctagctagctcttccccggtttgagattatcccaaaataacaccggttctcgggtaaccggtcggtttttccggagcaaccaacccttttacttctctttatcattgtctcagatcttctgttcttcaaaggcaaaaatgggcataaaccaaagatcattgtgaattagggtttcactgtgtctccaaaatggaagatatacttggagaagaaaatcaaatcacgaaaatatattgatcagtgccttgaaggaaaccaaagttgacaactccaaaaatccatttcgttattaatatctaactgagtgatcatagtcaatcatccataacaatgtaccatccaaacatgtttgagagccatcatatgttcgatatgaccccaaagagt

SEQ ID NO: 91982 - DNA, 649 bp, Arabidopsis thaliana columbia
  unsure (1)..(649): unsure at all n locations
tcnccccgcncaaggccccttagacccccctntttngttcctggaacccctggttaagtcggtgccggcccttctcccccggncagttaagcttggttgatcccgccttttccccgttcatggaagggttccaaactgtactcaatggatttctttaagtgcgacattactgccgaacgtccccaaactatcagcatggattgaggaaattaacaagagcgatggctatgcacagacgaaaatggatcctaaggagattgtggaggttttcaagaaaaaattcatgtaactgtaagcaagcacgaagcagtaaagtgtatgagaccaaaccaccttgtacgaacaggtggtctttggatatgaagaaataagatgtgtacttgaacctgatgatgcaataagatttgtactttaagcagcaacagcttaatctgtattctagtgttgatcaaattatcaaccattgacattgttaatatattactgtatgatagtaatactatcaaaatctcacacattaagaaccagatgatgcaataaggataaggtgtatagttaacttgcnnnnnnnnnnnnnnnnnnnnnnnnnnnnnnnnnnnnnnnnnnnnnnnnnnnnnnnnnnnnnnnnnnnnnnnnnnnnnnnnnnnnn

SEQ ID NO: 91983 - DNA, 538 bp, Arabidopsis thaliana columbia
  unsure (1)..(538): unsure at all n locations
nnnnnnnnnnnnnnnnnnnnnnnnnnnnnnnnnnnnnnnnnnnnnnnnnnnnnnnnnnnnnnnnnnnnnnnnnnnnnnnnnnnccacgcgtccgcccacgcgtccggagtaatccagattctgcattgttgatcgaagtacacaatggcaatgttccaaatatatctgatttgtcatacaaaagcgttcctgtgcacagcgtagaagttggatcctatgttttggttggaactggtgagattgtgcctgtagattgcgaagtctatcaaggtagtgctacaattacaattgagcacttgactggggaagtcaagccgttggaggcaaaagctggagatagagtgcctggtggtgcaagaaatttggatggcagaatgattgtaaaggctacaaaggcatggaatgattcgacgcttaacaagattgtacagctgaccgaggaagcacattctaataaacccaaacttcagagatggctggatgagtttggcgagaattacagcaaggttgtcgttgttttgtcacttgcaattgcctt

SEQ ID NO: 91984 - DNA, 396 bp, Arabidopsis thaliana columbia
tcctttggcctcttttgaggcaatcatctaccctggttaatgatgtcaggggtgatggtttctatgagggtggtgacaatggagatgcactcgaggcacacgaatggaaatgtgttcgttcaatcaatggtgtttggatttttgaagatgttgctaacttcaaggctggtcgaggagttcttgtgaaagccgttgctgtagttgaagcaagtgcggataccgtgttcgaagtacttttgaacattgacaaacatcaaagatacgagtgggatgcagtaacaggtgattcggaaaagatagactcatacgagggtcactatgatgtcatttattgcatatacgatcctaaatatctttcgcgatggcagtcaaagagagattttgtgttctctagac

SEQ ID NO: 91985 - DNA, 513 bp, Arabidopsis thaliana columbia
acgactcactctagggaaagctcgcacgcctgcaggtgccggtccggaattcccgggtcgacccacgcgtccgatacgatattgtgcctgaagcttgcgaaatcaagatttcagttgaagcttcgaagaaaaattcgaatatcaacattcgtagtcttttcgaaaagagatatgctcatcaacttacaatcggcattggtttgatgcttctgcaacagttatgtggaactgcaggaataagttcttacggaagcactctatttaaacttgccgggtttcctgctcggattgggatgatggtgttatctcttatcgtcgtaccaaaatctttaatgggtctaatcctcgtggatcgatggggaagacgcccacttcttatgacttcagcgttggggctgcgtttaagctgcatcacattggcagtagcgtttggagtcaaagatgtcccgggaatcggaaaaattactccaattttctgtttcattggaatattgtcgtttacgatgatgttcg

SEQ ID NO: 91986 - DNA, 580 bp, Arabidopsis thaliana columbia
  unsure (1)..(580): unsure at all n locations
attccgtatcnaaaagccggagaacctcagatcttaaaggcatcgatgtaaancgcatgtatctccgtcaaacgacgcgttcgtgatggaancgtggaggaaagancttggaattaacgatgaggtaatgttgctatccgatggaaatggcgaattcacagggaagcttggtgttgaattggatttgagggataagcctgtgggacttggagttaggtcaaggagatatgcgattttggctgatgatggtgttgtgaaagttctgaatcttgaagaaggaggtgcttttactaatagtagtgctgaggatatgcttaaagctctctgattcttatgattttctcatcaatttcgtcttcttctctgttttgaattttctttactctgttttgtgttgctgtttctttaaatctacgaatcattatcggatttgtaatggaataatgaagttagaggttctgtgttcgcagatgttttgctttagtagttttgatatctatgacgtttttctgcttatgagaagattttgaatgcatgatnaaactactagctgagtaattgttcagaacttggtcttgtt

SEQ ID NO: 91987 - DNA, 656 bp, Arabidopsis thaliana columbia
  unsure (1)..(656): unsure at all n locations
accacgcgtccgcccacgcgttcgcccctacggtctcatcaaccaaattcgctttcgccgcctttccacaagcaatcatggtgctccaaaacgacatcgatctccttcatccgccacctgagcttgagaagagaaagcataagctcaagcgtctcgtgcaatctcccaactccttcttcatggatgttaagtgtcagggatgcttcaacataaccactgtgttcagccattctcaaactgttgtggtatgtggaaactgtcagacagttctgtgccagcccaccggtggtaaagcgaggctacaagagggatgctctttcaggaagaagtgagattgagatctcacgaatcattcatccgttcgcagatgttttgctttagtagttttgatatctatgacgtttttctgcttatgagaagattttgaatgcatgataaaactactagctgagtaattgttcagaacttggtcttgttgaaacagaatatgctttcattttaagtttaaatctttctcggattgcatctaaaaaaaaaaaaaaaaaaaggaaaaaaaagcggccgctctagaggatccaagcttacgtacgcgtgcatgcgacgtcatcatcttctatagnnnnnnnnnnnnnnnnnnnnnnnnnngagagtatcat

SEQ ID NO: 91988 - DNA, 516 bp, Arabidopsis thaliana columbia
  unsure (1)..(516): unsure at all n locations
ccggcannnnnnnnnnnnnnnnnnnnnnnnnnnnnnnnnnnnnnnnnnnnnnnnnnnnnnnnnnnnnnnnnnnccacgcgtccgggatctgttctataggctcgtacctctgtttccttgatttctaaggagacaggcccttaaccctggttgatgaaccatggccgtgcgatcagagcgtgattgacggctacgatcgtcttaggacgcatctggtgctgtagaggatcgttactcggctcggttctaccttgccggggtggttgcacggcggtctgacaggttccattttttttcactccttatattgtcttgtgggatgttttgagatgaccaccaaatttgatattcgagcacgatttttaaaattttacagtaatgtgggtatttcgtcccaagtcaaccactttatatgtacaactctacattccctctacgaagatagtgcatcccaataatgagcagactatgagaagctagcagagatattcttctttttttggtttaaagaaaagc

SEQ ID NO: 91989 - DNA, 1379 bp, Arabidopsis thaliana columbia
  unsure (1)..(1379): unsure at all n locations
atgctacgccgagctctatacgacttacttagggaacgctggtacgcctgcaggtaccggtccggaattcccgggtcgacccacgcgtccgcggacgcgtgggcggacgcgtgggcgatcacagcgacgaggtcgaatacgatcttcttacccctgtcgacagttctgaattaatatcaattttcattgtcttcctatctctctttctctctttggcttcttccaatctaatttcagtgatttacttgttaagaattcaccttttgagaggcccagttttgaaatatggctggccaaaacgcgcgtttgaatgtggttcccactgttactatgctcggggttatgaaagctcgtcttgttggcgctacaagaggtcatgctctcctcaagaaaaagagtgatgctttaactgttcagtttagggcacttctcaagaaaatcgttacagctaaggagtctatgggagatatgatgaagacatcgtcttttgctcttaccgaagtaaagtatgttgctggtgacaatgtcaaacatgttgtcctcgagaacgttaaagaagctactttgaaggttcgttctcggacagagaatatcgctggagtgaagctgcctaagtttgatcacttctctgaaggtgagaccaagaatgacttgaccggtttagctagaggtggtcaacaggtccgagcttgccgtgttgcttatgtgaaagccattgaagttctagttgagcttgcttctctccagacttctttcttgacccttgatgaagcaatcaagacgactaaccgtagggtcaacgctctggagaatgtggtgaaaccaaagctggagaatacaatcagttacatcaagggagagcttgatgagcttgagagagaggatttcttcaggttgaagaagattcagggatacaagaggagggaagtcgaacgacaggcagctaatgctaaggagtttgctgaggaaatggttcttgaagacatctctatgcagagagggatttcgataaacgctgctcgtaacttccttgttggtggtgctgagaaggattcagacattattttctgaggtgtgggctctctctctctctctctctctctctttgtgccttctgtgtttgctcggtttctattttcgccttcgcgctgttattactctcttcatcagacttatgtttcttcaaataaaatggatttgatgtagatgaaatactgtatcatcttggattgtgctttgatataaaatttttcgagagatttgtgattaagaaaaaaaaaaaaaaaaagaaagnnnnnnnnnnnnnnnnnnnnnnnnnnnnnnnnnnnnnnnnnnnnnnnnnnnnnnnnnnnnnnnnnnggaaatcgcaacctcaacct

SEQ ID NO: 91990 - DNA, 950 bp, Arabidopsis thaliana columbia
  unsure (1)..(950): unsure at all n locations
nnnnnnnnnnnnnnnnnnnnnnnnnnnnnnnnnnnnnnnnnnnnnnnnnnnnnnnnnnnnnnnnnnnnnnnnnnnnnnnnnnnnnnnnnnnnnnnnnnnnnnnnnttttttcaacaaagaaaacattaattcccactttctaaaaaaagttaccacatttgttttctttagaggaacaaatgaaagaaattatccctagaattgaacattatgagtttctttaatcacaaaatggaggaaaaggatgatttcactagacaagaacctcatcgtcatcttcaaaactcagattcaaagtctgtaacttaaatccagctccttgtatagtctccaccaagtttgacgccactcctgttgcttgaaccgttgtttgcttcaaaagctcaacgacggcaacaccttcagaaacctgaacctttaaattggaaactccatcaatatcctgtaaggcccttgtcacattaggaatagctgcttcgttcaaagttccatcagcctggaaaaacatggtgagcatgtctgaaggagagacaggaacagagacagtctcttgcggttgctcctctgcgacagcgacaccttctcctccttctccaatagacgaaagcttcctcaatccaaggcgattttgttttataaacccagcaaaactgcaattgcggctatttccgatagctctggtccgaaagttgaggtttttcgacaaaggaagaaggtgggtcgaagaaagattagggcttttggttctgcaaaacgagtgaaaggtagaagaagctgcaatcgacgccatttttcactactgacccaatcttctttcactcgataaggttgtgcgagttacaagcccacgcgtccgcggacgcgtggnnnnnnnnnnnnnnnnnnnnnnnnnnnnnnnnnnnnnnnnnnnnnnnnnnnnnnnnnnnnnnnnnnnnnnnnnnnnnnnnnnn

SEQ ID NO: 91991 - DNA, 744 bp, Arabidopsis thaliana columbia
cggcactaatacgactcactaagggaaagccggtacgcctgcaggtaccggtccggaattcccgggtcgacccacgcgtccgctgaggttcattttcgtgacatacggggtttctatgtgattactgagaactttgcctttcgcgccggttctcgttgattttttttttcgatttaggtatttccatgtgagactaacatttgtggctcgtttactcgcagatcaaagggacagagaacgtgtctgggccacctactaggatggataacagttctgatgaagagtcagagatcagtgagtctgagatagatgtctattatgaaaaaccttacgagaaactgatgaatggggattacaaggttaaggtgaaggacacattcaggtgtcccttttgcgctgggaagaagaagcagcattacaagtataaggagctacttgctcatgcgtctggtgttgccaaaggatctgcgagtagaagtgctaagcaaaaagcaaatcactttgccttggctaaatacatggagaacgagcttgctggtgatgctgatgtcccacgcccacaaatcccctcttcctcaacggtgcagtctcaggcagttgtggatgacatttatgtctggcctttggatggggattgtcatcaaccctgtgagaagaactgataacaagaatgtgctccttgatttcaccctactggttgaagaagcttcactaggttcaattcctcatgataagaaaaccctt

SEQ ID NO: 91992 - DNA, 413 bp, Arabidopsis thaliana columbia
cgtatctcgcggggaagaagaagaaaagactgctttttctcaaaaccctaaaatctctctctccggatccatttctcgaacatggcgtctattgttcaaccatcgcctactttcccggcgctaaatctccggcgttcttctctgattcgtccgccttcttccgttcgatttcctcttaagtgtaacgcggcggatccgtacaagttcgacggcggaaactctgccggtttccatctgcttactggcgacaccgttccggctagcttttcgaggacacgtttggaagattcgatttatcagaacaccacacgacttcgtatcttttccggcactgctaatcctattttggctcaggagatttcttgctatttgggtctggaccttgggaaaatcaagattaaactctttgctga

SEQ ID NO: 91993 - DNA, 640 bp, Arabidopsis thaliana columbia
  unsure (1)..(640): unsure at all n locations
tgatcctgccagcatctatactgactcactttagggaaagctggtacgcctgcaggtaccggtccggaattcccgggtcgacccacgcgtccggtaaaaaccttcacttacaccctgttttaatggcgtggggttacttcccggacaaggaatcttctaacatcagtttcaagggaaattcatatgaaggcgggatcataacatcagtgagcaaagtgttatcagaagattctgaagtcagagcaatcatagagacaccgcaactaggaccaggttcgttctccgttttaactccttggacctctgggcttgacatgaagaaaagaatggctagatactcaagaaccgcgagtctcataaccatagttagagaccgcgggtcaggagaagttaaaaccgaaggcagaataaactacaccgtggacaaaaccgacagagataatctcaaagctgggcttagagagtcgctaaggatactaatagcagctggagcagaggaagtgggaactcacagaagcgacgggcagagactaatatgcaaaggtgtcaatgagaattcgatccaagagtttttagactcggtgagtacagaggaaggagcanagggaatgactgagaaatggaacgtttatagctcagc

SEQ ID NO: 91994 - DNA, 840 bp, Arabidopsis thaliana columbia
  unsure (1)..(840): unsure at all n locations
atacgactcacattagggaaagctcgtacgcctgcaggtaccggtccggaattcccgggtcgacccacgcgtgcgcgcacttgcagcagaaatttcagctttgaaggtgcaaagagagaaggaggtacgatacttcagggatgaaaacaagagtctccagtcacaactaagagatactgctgaagctgttcaagcagcaggagagttacttgttcgatttaaagaagctgaagaaggattgacatttgcacagaaacgagcaatggatgcagagtatgaagcatcacaagcatataaaaaggtggacaagttgaagaggaaatacgaaaccgaaatcagcactgtaaaccaacaacataatgcagagccacaaaatcccatagaatctttgcaagcttcttgtaatgacgatgctatggccaaatatgatgaaccatcagctagtgatggtgataaccaatggagagaagaattccaaccattgtacaagaaagacgaagagttgtcaaagctcgctgaaaccctcttggttctcggggtatggaccgaatgcaaacatataatttcgtttccacaacattatttttcctgtaatgtgtaataggaaaaaaaagaccatgttggggtctgatccgaattctgtgagatatatctgaagcttgtactcttttcattgtatttctaatgtgttacaattaaacatttttttgtactcgtccatctctcatctgaaagaggtctttgtttgattaaaaaaaaaaaaaaagnnnnnnnnnnnnnnnnnnnnnnnnnnnnnnnnnnnnnnnnnnnnnnnnnnnnnnnnnnnnnnnnnnnnnnnnn

SEQ ID NO: 91995 - DNA, 531 bp, Arabidopsis thaliana columbia
ctacaatacgactcactttagggaaagctcgtacgcctgcaggtaccggtccggaattcccgggtcgacccacgcgtccgattgattcctctgcttccggttcaatgtcgctgctaaaccaactcttcaaccgtgggatctttggcgccaaatgcaagacaagcttgaacttggcgatagctcgaatgaaattgctgcaaaacaagagagatatgcagcttaaacatatgaagaaggagatagctcacttcttgcaagctggacaagaacccattgctcgaattcgggtggagcatgtgatcagagaaatgaatttatgggcagcttatgagatattggagctattctgcgagtttatacttgctcgtgttccaattcttgaaagtgaaaaggaatgcccgagagagttgagagtggctattgctagcattaatcttctgctgcctccaagggtgctctgaaggtccccatcttcttcaaataaagaatctgttgtgtacaaaatatggaaaagaatttatcatggttgct

SEQ ID NO: 91996 - DNA, 417 bp, Arabidopsis thaliana columbia
cttccgttcatgggcggaagaaaaccaggggtatatttgtctatttgggagaacataaaggggatggggcctttcatgaaatggaagaacatcatcattcttatcttcaatcggttaaagaatccgaagaagacgctagagcatcgctcttgtatagctacaaacatagcatcaatggcttcgcggctgagctaacccctgaccaagcctctaaactagaaaaattagcagaggttggttcagtattcaagagccatccaagaaaatatgaagcacatacgacacggtcatgggaatttgtaggattggaggaggaagaaaccgacagtgatgttccacgtcgaaaaaatgatgccgatgatcggtttcgtgtgggaagaaatttttgaaaaggcaaagcatggtgatggaatcatc

SEQ ID NO: 91997 - DNA, 556 bp, Arabidopsis thaliana columbia
atgattctccagctctctacgactcactattgggaaagctggtccgcctgcaggtaccggtccggaattcccgggtcgtcccacgcgtccggaaaatatgaagcacatacgacacggtcatgggaatttgtaggattggaggaggaagaaaccgacagtgatgttccacgtcgaaaaaatgatgccgatgatcggtttcgtgtgggaagaaattttttgaagaaggcaaagcatggtgatggaatcatcgtcggtgttctcgacagtggtgtgtggccagaatcaaagagtttcaatgacaaaggaatgggaccagttccaaaatcatggaaaggaatctgccaaaccggagttgcctttaactcttctcactgtaaccggaaaattattggagcgaggtattacgtgaaagggtacgaaagatattacggagcgttcaacgctacagcaaacaaagacttcttgtctccaagagatcccgacggacatgggtcccacacagcttctactgccgttggccgtcgagttctcggtgcatccgcacttggcggtttcg

SEQ ID NO: 91998 - DNA, 586 bp, Arabidopsis thaliana columbia
taaatttttattttgtctcttatctactttagagtttagaagttccatattaaaaattttagttatgaaacaatgggaccaaaaaattgccaagattgttcttgaatcttacttgtgcattgtaaatagagtctgttagcaaactttgaccattgagtattttgtgctttgtgtctagattcttgaatcttattctatggttattggacttcataaatccattttgttctttagtagttggtacccaaatattgatttttcaatagtttcagaaaacagaccaacatggaagatcggtgcttgatcaagaacgatatcactgaattgattggtaacacaccaatggtgtatctgaacaatgttgttgatggttgcgtggctcgtatcgctgcgaagcttgagatgatggagccttgttctagcgtcaaagacagaatcgcgtatagtatgatcaaagatgcagaagacaaaggattgattactcccggaaaggttaatatgaacatttaaagttatcataaaagtttctccataatttataaagaatacatagatggaatttaattgtttttgattatagagtaca

SEQ ID NO: 91999 - DNA, 825 bp, Arabidopsis thaliana columbia
  unsure (1)..(825): unsure at all n locations
gggccccccctcgaggtcgacggtatcgataagcttgatatcgaattcgcggccgctttttgtatttcctcaacaaatttctcatctgctctcttcatattgtgtctttgaacgcttcatctcctcgtcatggtggccacctctgctacgtcgtcattctttcctgtaccatcttcttcacttgatcctaatggaaaaggcaataagattgggtctacgaatcttgctggactcaattctgcacctaactctggtaggatgaaggttaaaccaaacgctcaggctccacctaagattaatgggaaaaaggttggtttgcctggttctgtagatattgtaaggactgataccgagacctcatcacaccctgcgccgagaactttcatcaaccagttacctgactggagcatgcttcttgctgctataactacgattttcttagcggctgagaaacagtggatgatgcttgattggaaacctaggcgttctgacatgctggtggatccttttggtatagggagaattgttcaggatggccttgtgttccgtcagaaatttttctattaggtcatatgaaataggtgctgatcgctctgcatcctatagaaaccgtcatgaatcatctgcagggaaacggccgctttaatcaatgttaagacctgctggatttgcttggggatgggtttcggctctacaacctgagatgtttaagaaagaacttgatatcgggttgccacccgtttccagggtgtgggtgataaatatccccccttggggggcnttttttaagnggcaccnggcagcagcntggaaaatggatcgcgg

SEQ ID NO: 92000 - DNA, 1899 bp, Arabidopsis thaliana columbia
  unsure (1)..(1899): unsure at all n locations
tccgaattttctcgccctatttttctctcaacaccaaaaatttgtattttttttactattgtttaccccaaaaagtattgagaatcgcaaaaaaactgaattgtaaaaaatatttgagaaagagaaatacaaaaaaaaacaaaaaaaaaagttttaaagaaaaggcgaaggagagatcgtgagagacagagaggctgccgaagaaaggagaatttagggtttggagacttttgttgaaatttggcgttacgtttttttgtatttcctcaacaaatttctcatctgctctcttcatattgtgtctttgaacgcttctatctcctcgtcatggtggccacctctgctacgtcgtcattctttcctgtaccatcttcctcacttgatcctaatggaaaaggcaataagattgggtctacgaatcttgctggactcaattctgcacctaactctggtaggatgaaggttaaaccaaacgctcaggctccacctaagattaatgggaaaagggttggtttgcctggttctgtagatattgtaaggactgataccgagacctcatcacaccctgcgccgagaactttcatcaaccagttacctgactggagcatgcttcttgctgctataactacgattttcttagcggctgagaaacagtggatgatgcttgattggaaacctaggcgttctgacatgctggtggatccttttggtatagggagaattgttcaggatggccttgtgttccgtcagaatttttctattaggtcatatgaaataggtgctgatcgctctgcatctatagaaaccgtcatgaatcatctgcaggaaacggcgcttaatcatgttaagactgctggattgcttggagatgggtttggctctacacctgagatgtttaagaagaacttgatatgggttgtcactcgtatgcaggttgtggttgataaatatcctacttggggagatgttgttgaagtagacacctgggtcagtcagtctggaaagaatggtatgcgtcgtgattggctagttcgggactgtaatactggagaaaccttaacacgagcatcaagtgtgtgggtgatgatgaataaactgacaaggagattgtcaaagattcctgaagaggttcgaggggaaatagagccttattttgtgaattctgatcctgtccttgccgaggacagcagaaagttaacaaaaattgatgacaagactgctgactatgttcgatctggtctcactcctcgatggagtgacctagatgttaaccagcatgtgaataatgtaaagtacattgggtggatcctggagagtgctccagtgggaataatggagaggcagaagctgaaaagcatgactctggagtatcggagggaatgcgggagagacagtgtgcttcagtccctcactgcagttacgggttgcgatatcggtaacctggcaacagcgggggatgtggaatgtcagcatttgctccgactccaggatggagcggaagtggtgagaggaagaacagagtggagtagtaaaacaccaacaacaacttggggaactgcaccgtaagaaaaaagaaaacacaacaacaatggctcatttgaatccccttgtaactatatctgctactaccaccttgcttgcttgcaaccaccaccaccaccatttcatgtcctcctcctcctcacaaaagtttcggccaccaaccctttgtatatttctttttttggttcttcttctttttttattcgatggagatttattatatttatttaatctttctatttatttttttgcttaatgggaatgggngccgggaacataacgaatncggnggaatganccctggggcancgnaannaaaggntaanncccctacccaaattatggacttggggggtt

SEQ ID NO: 92001 - DNA, 2240 bp, Arabidopsis thaliana columbia
acaaccttatagaattttctcgccctatttttctctcaacaccaaaaatttgtattttttttttactattgtttaccccaaaaagtattgagaatcgcaaaaaaactgaattgtaaaaaatatttgagaaagagaaatacaaaaaaaaacaaaaaaaaaagttttaaagaaaaggcgaaggagagatcgtgagagacagagaggctgccgaagaaaggagaatttagggtttggagacttttgttgaaatttggcgttacgtttttttgtatttcctcaacaaatttctcatctgctctcttcatattgtgtctttgaacgcttcatctcctcgtcatggtggccacctctgctacgtcgtcattctttcctgtaccatcttcttcacttgatcctaatggaaaaggcaataagattgggtctacgaatcttgctggactcaattctgcacctaactctggtaggatgaaggttaaaccaaacgctcaggctccacctaagattaatgggaaaaaggttggtttgcctggttctgtagatattgtaaggactgataccgagacctcatcacaccctgcgccgagaactttcatcaaccagttacctgactggagcatgcttcttgctgctataactacgattttcttagcggctgagaaacagtggatgatgcttgattggaaacctaggcgttctgacatgctggtggatccttttggtatagggagaattgttcaggatggccttgtgttccgtcagaatttttctattaggtcatatgaaataggtgctgatcgctctgcatctatagaaaccgtcatgaatcatctgcaggaaacggcgcttaatcatgttaagactgctggattgcttggagatgggtttggctctacacctgagatgtttaagaagaacttgatatgggttgtcactcgtatgcaggttgtggttgataaatatcctacttggtaagctatcctcttgcataaacctggttctgcaggtcatgctctcactcttaaccaggttgggaaaaatgatgtgtatttcgttttttcagttgatactgcttttacagtacgagatatatgctcatatgactaatgacttcttgcaccctgaattatatgctctgcatgcatattatattgcatcataactcatttgcttattcaatatatgcctcacaggggagatgttgttgaagtagacacctgggtcagtcagtctggaaagaatggtatgcgtcgtgattggctagttcgggactgtaatactggagaaaccttaacacgagcatcaagtgtgtgggtgatgatgaataaactgacaaggagattgtcaaagattcctgaagaggttcgaggggaaatagagccttattttgtgaattctgatcctgtccttgccgaggacagcagaaagttaacaaaaattgatgacaagactgctgactatgttcgatctggtctcactcctcgatggagtgacctagatgttaaccagcatgtgaataatgtaaagtacattgggtggatcctggagagtgctccagtgggaataatggagaggcagaagctgaaaagcatgactctggagtatcggagggaatgcgggagagacagtgtgcttcagtccctcactgcagttacgggttgcgatatcggtaacctggcaacagcgggggatgtggaatgtcagcatttgctccgactccaggatggagcggaagtggtgagaggaagaacagagtggagtagtaaaacaccaacaacaacttggggaactgcaccgtaagaaaaaagaaaacacaacaacaatggctcatttgaatccccttgtaactatatctgctactaccaccttgcttgcttgcaaccaccaccaccaccaccaccatttcatgtcctcctcctcacaaaagtttcggccaccaaccctttgtatatttctttttttggttcttcttctttttttattcgatggagatttattatatttatttaatctttctatttatttttttgcttaatgggaaatgggtgtcgtgtatcattacgaattctgatgttatgtaacccatgtgccagcggaagacaaaggcatcaactctctcttatcctaaatttaattgtactttgttgagttttgtagttgtttccagctaaaccagcacgtgaacgataactgttatgaaaaaaaaaaaaaaaaaaaaaaaaaaaaaaaagggcggccgctct

SEQ ID NO: 92002 - DNA, 992 bp, Arabidopsis thaliana columbia
  unsure (1)..(992): unsure at all n locations
nnnnnnnnnnnnnnnnnnnnnnnnnnnnnnnnnnnnnnnnnnnnnnnnnnnnnnnnnnnnnnnnnnnnnnnnnnnnnnnnnnnccacgcgtccgcaaaagtgcaaggatgttggtgctacgctggttatttgccaatggggattcgatgatgaggcaaaccatctattgatgcacaggaatttgcctgctgtcagatgggtagggggtgttgaattagaacttatcgcaatagccacaggcggtagaattgttccaagattccaggagttgaccccagagaagttagggaaggctggcgtggttcgtgagaaatcttttggcacaacaaaagaacgaatgctgtatattgagcactgtgcgaactcaaaagctgtcactgttttcatccgtggaggtaacaaaatgatgatagaagagacgaaacgtagtatccacgatgctctgtgtgtggctaggaatctcatccgcaacaaatcaattgtttatggaggtggggcagctgaaatcgcttgctcacttgcagttgatgcagctgctgataaataccctggcgttgagcagtatgcaattagggcgtttgcagaagcttttggactctgtccctatggctcttgcagagaacagtggattacagcccattgagacactttctgcggttaaatctcagcaaattaaggagaatattcccttctatggaatagattgcaatgacgtgggcacaaacgatatgagggagcagaacgtgtttgaaacattgatcgggaaacagcagcagattttgctagctacgcaagtcgttaagatgattctaaagatcgacgatgtcatctccaattctgaatactgatgtgttgctaccattgtactaccctttggcttcttgggtgttttttgtttgctttctattagcttttgatactcttcgacatcgttttccttaacttgttcccttcgttttgcaaccttttctataagaacatcgtcaggtctt

SEQ ID NO: 92003 - DNA, 781 bp, Arabidopsis thaliana columbia
ccgggttcgacccacgcgtccggaacaagttggatggattttgctttggatctcacatctgatatcatattaatctctctgtgaagtcgaagaacgaaaccctagttcccatggatctctcttcacgcttctcatcgatccttatccttctcttgatctccatctccatagcttcggctgagattcgtaaatcagagatccgatccgatgatcgaccaatcatccctttagacgaattcggtttcactcacagcggtcgtcttgagcttgacgcttccaagatctggctttccaacagcaatcccgatctcgatctctccaaagttggcttctttctctgcactagagacgcttgggttcatgtgatccaacagcttgaagaagaagagatcacgtgcgctctacaatcagatctcgttaagcatgtgttcaccttcaacaatctcaagggaggagataagagcagattctccaccgtattcaccgagaacgatgcggatcagtactctctcgtcttcgctaattgtctccaacaggtcaaaatcagtatggatgttagatccgctatgtataaccttgaaggtaaaaagggaggtcgtgattatctctctgctggaagaactgttcttcctaagggctatttcttattctctgttatctatttctctctcgccgccacgtggatctacgttctctataagaaacgtctcactgttttcgcaatccatttcttcatgttgggagttgttgtcttgaaagctttgaaccttctttgtgaggc

SEQ ID NO: 92004 - DNA, 790 bp, Arabidopsis thaliana columbia
  unsure (1)..(790): unsure at all n locations
gcgnnnnnnnnnnnnnnnnnnnnnnnnnnnnnnnnngactcactatagggaaagctggtccgcctgcaggtacccgcccggacgcacaaccgctttcatcggaagaagaacaagttggattgattttgctttggatctcacatctgagatcagattaatctctctgtgaagtcgaagaacgaaaccctagttcccatggatctctcttcacgcttctcatcgatccttatccttctcttgatctccatctccatagcttcggctgagattcgtaaatcagagatccgatccgatgatcgtccaatcatccctttagacgaattcggtttcactcacagcggtcgtcttgagcttgacgcttccaagatctggctttccaacagcaatcccgatctcgatctctccaaagtgggcttctttctctgcactagagacgcttgggttcatgtgatccaacagcttgaagaagaagagatcacgtgcgctctacaatcagatctcgttaagcatgtgttcaccttcaacaatctcaagggaggagataagagcagattctccaccgtattcaccgagaacgatgcggatcacgactctcttcgtcttcgctaattgtctccacaggtcaaatcagtatgatgttaatccgttgatacctgaggtaaaggtggcggatatctttgtgagactgtctctaggcattctatcctgatcattcctccgcgccgtgactcgtcttatagacgttactgttcgcatcattctctgtggagtgtgctgaacttacctcttg

SEQ ID NO: 92005 - DNA, 498 bp, Arabidopsis thaliana columbia
  unsure (1)..(498): unsure at all n locations
cannnnnnnnnnnnnnnnnnnnnnnnnnnnnnnnnnnnnnnnnnnnnnnnnnnnnnnnnnnnnnnnnnnccacgcgtccgggcattttcttgcccatcatcaagtctctatcgctctcggctggaagtaaaccgaatgattcttcttcgaggaaactaggctcttacttgattcaatctcaattccagtgcgccggaaactctagtgcgcttttcttgactgctgcagctcaaaatttgctgtgtctcaagttagcagaggagcttggagtagtgatctcaaacccgtgggtttcttggtttaaggctgctagtctacctgcaatcatatcacttctttgtactccacttatcctctataagctttatcctccagaaacaaaggacacacctgaggctccaggtattgctgcaacgaaactcaagcaaatgggccctgtcactaaaaacgaatggatcatggtcggtacaatgcttcttgctgtcactctttggatct

SEQ ID NO: 92006 - DNA, 1040 bp, Arabidopsis thaliana columbia
  unsure (1)..(1040): unsure at all n locations
cagctctcctacgactcactattgggaaagctggtccgcctgcaggtaccggtccggaattcccgggtcgacccacgcgtccgcccacgcgtccgcccacgcgtccgattgcaacatatattgttgaaggaggaacaactcgaacatatacagtcataaagaatatgtgccacactgcaccagatgtattgagagctctattatctcatttaaccaaggccattaccgagtatgtggtttaccaagttgagcacggagctcactgcatacaaatattcgattcctggggtggccaactgactccggagatgtgggagcgctggtccaaaccatacattgaagagatcatacatgctgtaaagaaaagatgtccagatacgccgatagttttctacatcaatggaaatggtggccttcttgagcgaatgaaaggaactggagctgatgttattggacttgactggactgtagatatggctgatggaaggaggcgattgggaagcgaggtaagtgtgcagggaaatgttgatccagcttacctattctctccgcttcctgctttgaccgaagaaattgaaagagttgtgaagtgtgctggaccaaaagggcatattctcaatctaggacacggtgtcttggtagggacaccagaggaagccgtggctcatttctttgaaaccgctagaaacttggattaccgaacacttttccaaaatcatgttcctgcagaaaaagctgaacctgaattggttgtctgacaaatggtgactagacaagtgcctacgccgaagaatttgctgtttaagttttgtgagcatatgtctgaatctctttcacttggtccaggaatgagagcaaaagtgccatgtctgacccttaagcgatgctagagttggtaacctgctatgagatatatgcccagctgtccagtttttgtttggcttaaaaaaaaaaaaaaaaacaaaaaaagnnnnnnnnnnnnnnnnnnnnnnnnnnnnnnnnnnnnnnnnnnnnnnnnnnnnnnnnnnnnnnnngtcccc

SEQ ID NO: 92007 - DNA, 519 bp, Arabidopsis thaliana columbia
  unsure (1)..(519): unsure at all n locations
ccnnnnnnnnnnnnnnnnnnnnnnnnnnnnnnnnnnnnnnnnnnnnnnnnnnnnnnnnnnnnnnnnnnnnnnnccacgcgtccgcggacgcgtgggggataatcggttgggcgttgattctggagtataccattggtggctcagctgttgcccgtggcatatcccctaatctggcactgatttttggtggtgaagatggtttgcctgcaattttagcgcgccaccagatcccaggccttgatattgttgttgatccatgtgctgctattcttgtgtttgttgtaactggccttttgtgcatgggaataaaggagagcacatttgctcagggaattgtaactgcagtcaatgtgtgtgtcctgttatttgtcatagtagctggcagttatctcggcttcaagacaggttggcctggttatgaacttccaacagggttctttccattcggagtagatggaatgtttgctggttctgctacagtcttttttgcattcattgggtttgattcggttgcaagta

SEQ ID NO: 92008 - DNA, 723 bp, Arabidopsis thaliana columbia
  unsure (1)..(723): unsure at all n locations
cnnnnnnnnnnnnnnnnnnnnnnnnnnnnnnnnnnnnnnnnnnnnnnnnnnnnnnnnnnnnnnnnnnnnnnnccacgcgtacgcccacgcgtccgtttttttttttttttagccaacaagctttgatatgactttataactggcatcgcagcaccttatcgagtaatgcagttcatatttacacctttcttttacacaaaaccaatcccactccctttctcatcatccacacaaagtagccggtaaagcaaaaaagctcttatacacaaagaaagcaagaattgtcccaaaagaaaactctcatacatcactttgctgtttctttcttaacttcgttattcgtccagactacttgctccagagaattagagagcttcttatagaacttgtgaaattcgagagtgtctcctttcgacttcgatacttgaaccatatgaagacttggcgctacttggaatatctctgtcgctacattgagattcccctttcttccagccttcacattctcaagcctcatccttgtagttctcctttagaacatcgaaaccgggagggtttggaggttcttccaacctccccgntganccattgggntccnctaatggaacctggttccccctaaatccngnntgggtaaaagntccnanggaaggccctggattgaatggnngaggatgntgcgggggggcttccctccgaanaggggcccanggctgaaagnac

SEQ ID NO: 92009 - DNA, 821 bp, Arabidopsis thaliana columbia
  unsure (1)..(821): unsure at all n locations
cagctacaatacgactcactctagggaaagctgcgtacgcctgcaggtaccggtccggaattcccgggtcgacccacgcgtccggtcagttgattatggtaactacaacaatagatcttcttctcatcaatccgcagaagaagtaaaacctggctctgaaaacatagaaagctccaatctttatgggattgaaactgacaatcaaaacgggcagaacaagacatctgatgtcactacaaacaccagtcttgaaaccgtggatcatcaagaggaagaagaagagcaaagacgcggtgattcgatggctggtggtgcgcctgcagaggatggatataactggaggaaatacggacaaaagttggtcaaaggaagtgagtatccgcgaagctattacaagtgcacaaacccgaattgtcaggtgaagaagaaagttgagagatcaagggaaggtcacatcacagagattatatacaaaggagctcataatcatcttaaacctccacctaatcgccgctcagggatgcaagtagatggaactgaacaagttgaacaacaacaacaacagagagattctgctgcaacgtgggttagttgtaataacactcaacaacaaggtggaagcaatgngaccaatgtcgnagaggggatcttcgggattcgagtatggaaccaatctggttcaattcangctcaaaccggggncaaatacgggtcaggtntcctttggttntggttnatcttcttcacaattntttattgttnaggttgagnttntngnggcccatgnagtntttttttgggtccnttnngtggggngtngg

SEQ ID NO: 92010 - DNA, 527 bp, Arabidopsis thaliana columbia
  unsure (1)..(527): unsure at all n locations
tgtcctccnnnnnnnnnnnnnnnnnnnnnnnnnnnnnnnnnnnnnnnnnnnnnnnnnnnnnnnnnnnnnnnnnnnnnnccacgcgtccgcggacgcgtgggcagagactctccttccatctacccttagagggcgcgcctcccgtgcgccttcttaactggttatggaatccaaatgtctcatgttcgtttccattgtatctgtcttcttcatggttgttaatggcgtatcagagaccgaaactctcttgaaattcaagaattctcttgttattgggagagcaaatgctttggagagctggaatagaaggaatcctccatgcaaatggactggtgtcttgtgtgatagaggctttgtttgggggttacgactagagaatcttgagctctctggctctatcgacatcgaggcgttgatgggtttgaattctctaaggtctcttagtttcataaacaacaaatttaaaggtccatttccagagttcaagaaacttgttgctttgaaatcactttacttgtcaaacaatc

SEQ ID NO: 92011 - DNA, 499 bp, Arabidopsis thaliana columbia
atacgactcacttagggaaagccggtacgcctgcaggtaccggtccggaattcccgggtcgacccacgcgtccgagcaaatgcaagaagaagaagaagtgtctctatgtgctctgtctgaatctgctaacggcgttttcaggaactttgcagctgacttctgactacgttcctgataaattcttagtcttcctctctctctcatagtcagaattgtttagtatctctgtcttcgggcatcgtgttagaataattcggataagctttctatctgtttggaatagcttgccgttttgttattgttgtccaccacttgttcgatgaaatgactgtgtgaaggttttaattgcttttcgacggtgttattcgcctctctatggataacgaagttgcatttcttgtcaaattgcaatccagaacaaaaatttgcattcctgcttatgtgaaatcttcagaacccagtaagattatgttgcgaaaaatcaggactgtgttagctc

SEQ ID NO: 92012 - DNA, 506 bp, Arabidopsis thaliana columbia
  unsure (1)..(506): unsure at all n locations
nnnnnnnnnnnnnnnnnnnnnnnnnnnnnnnnnnnnnnnnnnnnnnnnnnnnnnnnnnnnnnnnnccacgcgtccgcccacgcgtccgcccacgcgtccgctgaaaaagagcaagagtttgccagctgcaatcaacgtgctcgccaagtccctagagtacactgtcaagagcaagtcctataagcttaataaggacgaagaagagaggttactaaaagaaaagatagaagtggttctctcggctgagcggggtaatccatccgaccaggaatctagttctgagagccctaagaaagcaagtggagaaaatccaatcctgcttcttgcatacaagctgttcaaaaccgatggtccattgaaggatacaatattggattgtttttggcatagcttggacttctttgagcattgtggctgtgtttactaccgtgacctgatcacacaatggatacttgaaggctactttgatcctgttaggtctgccgaaaaggcgtaccaggatggtc

SEQ ID NO: 92013 - DNA, 505 bp, Arabidopsis thaliana columbia
ccggcactaatacgactcatatagggaaagccggtacgcctgcaggtaccggtccggaattcccgggtcgacccacgcgtccggaacaatcccagaggtggagatacttgcaagattaccgttgagaagcattgcgaggttcaaatcagtatgcaaaagatggaaatcagtaatagaatcggactacttccgacgtctcttcggatcttttcaccgaagctcctctacctcatggtcgatcatgttcagaacagagtatcttcgtgagatgacacaagccataggcttccatggatgcaaaacatgggatcttcccaaatctctagtttcatatatcatgccatttcaagaatatccgaatctccctacctctgaatactactatatagcttcttccaatggattgatttggatcgatgtgcttgtttctcgcatcaagaacaaggtttatagttataaatctttcgttgggaatccagttttacaagaatgggttgagatccct

SEQ ID NO: 92014 - DNA, 1553 bp, Arabidopsis thaliana columbia
gcggtaccgcaccggaattcccggatcgacccacgcgtccgagaaacaattacaaccgacagtatccaataacatatctggactctcttcaggtggggagaagcttagctcaaagaccaatggaggatcaaaaagggagctactgcttccaagggatggacttggacaaattgctgctcatacatttgctttccgcgagcttgctgctgcaactatgaactttcatcctgacactttcttaggcgaaggtggatttggacgtgtctacaaaggaaggcttgacagcaccggtcaggttgttgctgttaaacaactagacaggaatggtctacaaggtaacagagaatttctggtagaggttcttatgctcagtcttcttcatcatcccaacttagtcaaccttattggttattgtgctgatggagatcaacgcctcttggtctacgagtttatgccgttaggatcattggaagatcacctccacgatcttccaccggataaggaggccttagattggaacatgagaatgaaaatagctgctggtgcggccaaaggattggaatttctacatgataaggcaaaccctccggttattaatagagattttaagtcatcaaatattttactggatgagggtttccaccctaaacctttctgattttggacttgctaaaactcgaccaacgggagacaaaattcatgtcttcaataaagttatgggaacttatggttattgtgctccccgagtcgcaaaggaccgggacaattgacaggaaaaatcagatgttttccagtattggggggggtttttcttcgacctcattaactggaccaaagctatagacagcgagatgcctcatggagagcagaacctgggtggcttgggcctcgcccattgttcaacgacaggcgaaagttcataaaactgggctgatccaaggttaaaggggcggtttccaacggcgtgcactctaccaagctttagctgtggcatcaatgtgcatccaagaacaggcggctacacgtcctctcatagcagatgttgtcactgcactctcctatcttgcaaaccaagcttatgatccaagtaaagatgatagtagaagaaaccgggatgaaagaggtgcaaggttaataacaaggaacgacgatggaggtggctcgggaagtaaattcgatttagaaggttcagagaaagaagattcaccgagagagacagctcggatattgaaccgagatatcaatagggagcgtgcggttgcagaggctaagatgtggggagagagtttgagggagaaacgaagacagagcgagcagggtacttcagagagcaacagtaccgggtagaaccggtttgggtcggtcttgacccttttttgttcttatttctctcaagactctcatttattgtcaaacatagaaaacaaacaaaaaaacattgggacgacgagttgctgtacattatatatgtgatgttgcaataaaaaaaaaaaaaaaaagggcggccgctctagaggatccaagcttacgtacgcgtgcatgcgacgtgatag

SEQ ID NO: 92015 - DNA, 751 bp, Arabidopsis thaliana columbia
ttagagtcttcactcttcaccgaaccctctgattctcgtatagacacacacatacctatacatacacactttaacacttatatctgtagagtatagccatgggagaaggagaagcaaaagcagagcacgcagccaaagcagatcacaagaacgctccctccgcttcttcaacgccagaatcttactctaaagaaggcggaggaggcggtggagatgctcgccgcgcaatctgcggcgcgatcttcaccatccttgtcatactaggtatcatagccttaatcctttggctcgtctaccgtccacataaaccacgtctcaccgtcgtcggagccgccatctacgacctgaatttcacagcgccgccgttaatctcaacctccgttcagttcagcgttttagcaagaaaccctaaccggagagtctccattcactacgacaagctctctatgtacgtaacgtacaaagatcagatcataacaccgccgcttccactaccaccgcttcgtttaggacataaatctacggttgtgatagctccggtgatgggaggcaacggtataccagtctcgccggaagtagctaatggtttaaaaaatgatgaagcttacggcgtcgttttgatgagagtggtgatttttgggaggctacgttggaaagctggtgcgattaagactggacggtatggattttacgccagatgtgatgtgtggttgagatttaatccatcttctaacggacaagttcctcttct

SEQ ID NO: 92016 - DNA, 565 bp, Arabidopsis thaliana columbia
atgatactccagctccctacgactcactatttggaaagctggtccgcctgcaggtaccggtccggaattcccgggtcgacccacgcgtgcgcggacgcgtgggccagagcagctgctgtgatgcaggtcacagatgacttaaccgggtgtggcatttctgatccagagaggttgtctcggatcaagaaccttctcagaaatgtgcttaagggaagcaacacaccaagggaagctaaaaccgtagtgtctcatggggaggtccacacggataggaggcttcatcagatgatgtttgaggatagagactatgaacaccgtttggtggatgatgattcctctatccaagatgaaaggcaaagaccagatgtttgtgttgataattggctcgataaggattactctgtggtcacagttagatgtaaagacagaccaaagcttctgttcgacacagtctgcactttgactgatatgcagtatgtggttttccatggaagtgttgatactgagggcaccgaggcgtttcaggagtattatgtgagacatatagatggatcccctgtgaaat

SEQ ID NO: 92017 - DNA, 548 bp, Arabidopsis thaliana columbia
  unsure (1)..(548): unsure at all n locations
atgatcctgccagctcnnnnnnnnnnnnnnnnnnnnnnnnnnnnnnnnnnnnnnnnnnnnnnnnnnnnnnnnnnnnnnnnnnnccacgcgtccgcggacgcgtgggcggacgcgtgggcaatttgatggtcactaacaacgaaggtcaacatttccccagttgcaacaccaagagaaccttgtctgtagcatctgagactaatcctcatcccatcgatcagcttctttttgatcgtgtcttatgtgatgtcccgtgtagtggtgatggtactctgcgcaaggctccagacatatggcgaagatggaattctggatctggcaatggacttcatagtctacaggttgtgcttgccatgagaggtttatctctgctaaaagttggtgggagaatggtatactcaacctgctcaatgaacccaattgaagatgaagctgttgttgctgaaattctgaggagatgtggatgctctgttgagcttgtagatgtctcagataagcttccagaacttattagaagaccaggtcttacgaaatggaaggtgcatgac

SEQ ID NO: 92018 - DNA, 530 bp, Arabidopsis thaliana columbia
  unsure (1)..(530): unsure at all n locations
cnnnnnnnnnnnnnnnnnnnnnnnnnnnnnnnnnnnnnnnnnnnnnnnnnnnnnnnnnnnnnnnnnnnnnnnccacgcgtccgatttgtggataatcgattacttgatctgacctgagaaaaagtagaaacctttgagtagagctggttctattacaaagttgtgtttgggagcttgctacaagaccattggatttcttcactttcttcatttgttgagtctgctacaagatcaaggatctgttgattttgggtatttgatcaaaatctgaaattgatcttgtggaagtaaggttgctgtagttgtcaaggtctttggtgaagtttgtttctcacaaagtttgatccttgaagttggtctctattgatcttagatctagtgtgaataaaggaagtccttggaaagcagcagacttgaaaacgctatcacaagaggaattgcttcctgaagagactgtctggattgctgatagatttatatgattcagagaagaactcaccgatgagtatggatttttcacctttgttaac

SEQ ID NO: 92019 - DNA, 664 bp, Arabidopsis thaliana columbia
gattccctcgtccactccagtactcgtcgtccgacccaagtctccttaactgtatcacagcgactgctattttacgagcagagacatttgggatcccgatacctgagtggactaagaacccaaaggaagcagcagaagctgttgacagagtgatagtcccagactttgagccaaggcaagatgcaaagattgtgactgatgagaaagctaccactttaaccactgcttcggtggacgacgctgcagtcatcgacgatctcattgctaagatcgaccagtgtaggcataacttgtcgccagacttcaggatgaaacctattcagttcgaaaaggatgatgatacaaactatcacatggatgtgatagcaggactagccaacatgagggcgagaaattacagcatccctgaagtggacaagctgaaagcaaagttcatagcagggagaatcatcccagccattgcgacttcaacagccatggctactgggctggtctgcctcgagctgtacaaggtccttgatggaggacataaagtggaagcttacagaaacacatttgccaacctggcacttccactattctccatggctgaaccacttccaccaaaggtggtgaagcaccgtgacatggcttggacagtttgggacagatgggttctcaaggg

SEQ ID NO: 92020 - DNA, 759 bp, Arabidopsis thaliana columbia
  unsure (1)..(759): unsure at all n locations
cnnnnnnnnnnnnnnnnnnnnnnnnnnnnnnnnnnnnnnnnnnnnnnnnnnnnnnnnnnnnnnnnnnnnnnnccacgcgtccgacaaagagaacccaaaaaatgaaagagttctcgagagtttctttggttggtactacgcttcctcagctgtggcggttctcatcgcgttcacgggtattgtatacattcaggagcatctcgggtggaaaatcgggtttggagtacctgcggtcctcatgttgatcgctgctttgctattcattcttgcgtctcctctctatgttacacgtggtgtgaccaagagtctcttcaccggtttagctcaagcgattgttgcagcttacaagaagaggaagctaagtctaccagatcatcatgactcctttgattgttattatcacatgaaagattctgaaatcaaagctccaagtcaaaagttgaggtttttgaataaagcttgtttaataagtaaccgtgaggaggagattgggtcagatgggtttgctttgaatccatggaggctatgtacaacagacaaagttgaggagcttaaggcattgatcaaagtcatacccatatggtccacaggtataatgatgtccataaacactagccaaagttcgtttcagttactgcaagcgtcttccatggacaggcgtctgtaccgtcatggttttaagctttaagctccagttggatcatttctttatggtcactattatagtttttagcccttatgtttcattttatttgacct

SEQ ID NO: 92021 - DNA, 835 bp, Arabidopsis thaliana columbia
  unsure (1)..(835): unsure at all n locations
nnnnnnnnnnnnnnnnnnnnnnnnnnnnnnnnnnnnnngtcgattcctcaccatctccattgctnctgaaatctttttcgcgtccgcggagcttttatggctaactgcaatgttaccacaagtgaagccatcgccttgcgatcccacagcagccggaagccactgtgggtcttcgaccgcatctcagctggctcttttgtattccgcatttgcccttatatcgatcgggtcaggcgggatcagaccatgttccttagcatttggagctgatcaactagacaacaaagagaacccaaaaaatgaaagagttctcgagagcttctttggacggtactacgctacctcagatggagaggttctcatcgcgttcacgggtattgtatacattcaggagcatctcgggtggaaaatcgggtttggagtacctgcggtcctcatgttgatcgctgctttgctattcattcttgcgtctactctctatgttacacgtggtgggaccaagagtttctttaccggtttagctcacgcgattgttgcagcttacaagaagaggaagctaagtctaccaaaacatcatgactcctttgattgttattatcaacatgaaaaattctaaaatcaaggctcccaagtcaaaagtttgaggttttttgaaataagtcttgttttaataacttcctcctctaaggagggagattacgggtcaatcattggtttatggcttactaaattctcaatgggaaaggccttattgccctaacctatatccatatatctactaatgattatctcttcatctctcatataattgaatgactacttttttcttgacacg

SEQ ID NO: 92022 - DNA, 499 bp, Arabidopsis thaliana columbia
  unsure (1)..(499): unsure at all n locations
nnnnnnnnnnnnnnnnnnnnnnnnnnnnnnnnnnnnnnnnnnnnnnnnnnnnnnnnnnnnnnnnnnccacgcgtccgaagaaaattccgaaattgtttcgaaaaatcctgaagaagaagaggtctttgaatcaacaacagttccatgttgtgcccaacgtagacaccaagtgtttaccattttcaaacgcaaaagccagttttccggaaacagaggtttcgggtttgttcatctacttctggtggtgaggatgatagattcaaagtagagtacactccttggcttatcgttgggttgggcaatccaggaaacaagtatcatggaacaagacacaatgttggtttcgagatgatcgatgtgttggctagaaaagaaggggtgttgatgaacactatacagtccaaagctctaatcggaataggtgctattgaagatgtacctatcttgttggcgaaacctcagacttatatgaacttcagcggcgaatcggttggatctt

SEQ ID NO: 92023 - DNA, 765 bp, Arabidopsis thaliana columbia
  unsure (1)..(765): unsure at all n locations
gccttggnctttaattcgtganttnnccaagcctttcngncctgnagnncttttntgcgaattcctgtggcncnaantnacccntttgatnccaaggggcaaccccttccaaaccgcccctgggttttggcaatgccaaattngcccccacatnncaccgaaatgngancatagagttttgagggnattcctaaagngttaccccggaggccgataatggatgatccattcatcagaaactacatggaagatctgctgaagaaagtgagaacacaagtgtttctgaagctgatttagccatccacaaagatagggattccgttcatatcaaaggaactgaacgtgccagagacggatgtgacggagttactagtgtcgctgatactcgacagcagaatcgatggtcacattgatgaaatgaaccgttacttactgagaggcgacagtggcaatggaaggaagttgcataaggcggttgataaatggaactcacagctcaagtctctttcttcaaatatcaccagccgagtctgttaacttggaaacctctcttttggatagattttgtgatttggcgttgattctttgtggattatctgtttctcttcacatagctggatttgatggagtttataatccacttcaatgccaagaaaaaggatttgaaactaaaaaaaaaaaaaaaaaaaaaagggcggccgctctagaggatccaagcttacgtacgcgtgcatgcgacgtcatagtaacttctatagtgtcgcc

SEQ ID NO: 92024 - DNA, 667 bp, Arabidopsis thaliana columbia
  unsure (1)..(667): unsure at all n locations
nnnnnnnnnnnnnnnnnnnnnnnnnnnnnnnnnnnnnnnnnnnnnnnnnnnnnnnnnnnnnnnnnnnnnnnnnnnnnnnnnnnccacgcgtccgatgactttgatgatagccatgtccaccaaatcagccaagaaaagatcaagacctcggctgcttacgttctgttctataaacgccttgtagactaaagaaactgaagcggaaaagacaagaaagtggtatttgcatttttgccgggtttggcttatttaaaaacatcattggcttgattctaattcactacaagatcaagatgaaagcagctctgcgttgaggctaatttacagaagagagagagagagttgggaagaagagcaaaagaccgagaggacatgttgcggggaatttattttattcttacaaaaattggtatctgattattttattaaccatattccatttgggaattggaggatagagaaaagcccttttgtgggaaaagggtttaaaatggtggttaggttttggggggcaggtttgggttttggtggcccaaaaaaaattaaaaaaccttttccctattttaaatccaattttttggttttggccaaaaaaaaaaaaaaaaaaaaaaaaaaaaagggcggccggtttaaaagaatccaggctaaggtaggggggcatgggagg

SEQ ID NO: 92025 - DNA, 523 bp, Arabidopsis thaliana columbia
  unsure (1)..(523): unsure at all n locations
cgtatagccggtttatgaagaacaagctggaggcatatgtggatttcccgctagataatcttgatctatcaagctacatctcctacaagaatggtcagacaacatatcgttacatgctctatgcgattagcaatcactatgggagcatgggaggtggtcattacactgcatatgttcaccatggaggtgatcgatggtatgactttgatgatagccatgtccaccaaatcagccaagaaaagatcaagacctcggctgcttacgttctgttctataaacgccttgtagactaaagaaactgaagcggaaaagccaagaaagaggtatttgcatttttgccgggtttggcttatttaaaaaccatcattggcttgattctaattcactccaaggtcaagatgaaagccagctctccgttgaggctaattttccaggagggggggggnagattttggggggggggcaaagacccgggggcatttttcggggatttttttttcttncaaattnggtctgtnttttt

SEQ ID NO: 92026 - DNA, 623 bp, Arabidopsis thaliana columbia
  unsure (1)..(623): unsure at all n locations
atgatactccagctccatacgactcactatatggaaagctggcccgcctgcaggtaccggtccggaattcccgggtcgacccacgcgtgcgctttctcaccgctttcttctcttcattgaacaaaaaaaaaagctcttaacttttttttcttctttaggtaaaatttgacaaaagctctcaactttcaaactctgtttcttcatcatcatcatcatcaccatggacgccctgcttcaagtttcagttgatgggtttagatttgagaacggatctggatcttgctgcaaacccagaaacaatctcgaatctgggaacaatctcttccctgatttccacgagtctcagaatcagtcttcaccaaacgattcacctccaacggtgtgtttggataactctcctggtctgaagtacatcaatgatatgttgatggacgaagaagacttcgtaggtatatctcgtgacgatttagctttacaagccgctgagagatcccttctacgggcataattcaaccagcaatcttccagaatccgtgatccagaccaactaggttcctccttccgnatnaaaaacttccgggtgncccaagnatttnttggttttncccagnancaacaaacag

SEQ ID NO: 92027 - DNA, 507 bp, Arabidopsis thaliana columbia
  unsure (1)..(507): unsure at all n locations
nnnnnnnnnnnnnnnnnnnnnnnnnnnnnnnnnnnnnnnnnnnngggcgcccacgcgtccgatacatcttcatcagtgattttccgcgcggccgtttctctagatcgattttggatttagatctctttgtttctactgcttttcatcgttggatctgcgttttgcaaagggagatacagaaaggaatagctttgaattgacaaggtttctctctaatccaaccgaatctcaagcttccatggctctcaatctccgtcagaaacagactgaatgtgtaatccggatgttgaatctgaaccaacctttgaatccaagtggaactgcgaacgaagaagtttacaagatcttgatttacgataggttttgtcagaacattctatctccattgacccatgtcaaggatctgcgtaagcatggagttacactcttctttctcatagacaaagatcgacaacctgttcatgatgttcccgctgtctactttgttcaaccaactgaatccaacct

SEQ ID NO: 92028 - DNA, 625 bp, Arabidopsis thaliana columbia
  unsure (1)..(625): unsure at all n locations
atacgactcacattagggagaagctcgcacgcctgcaggtaccggtccggaattcccgggtcgacccacgcgtccggcctgccggagctgatctcattttcgaacaaggagacaacattacggggaaggtatcaagagacgaagtagcgcgtatatgcatcgctgctttagaaagcccgtatgctcttaacaagaccttcgaggttaaaagtacggttccgtttagcgagcctttcacggtagatcctgagaatcctccaccggagaaagactacaatgagtatttcaagactctgaaagatggaatcaccggtaaagaagctttagaacagagcactgttgcagtttaaaccaggttttatctacttttgtaactgtgtgttgtctcatcttcgttaaaaatctttccaaaagtaaaaacaacaacaaaagagtcgtgtagaaacatgtttgtatactccatatatcgtacattgtagataagatttacaaaagcttattgacgacaacaataaagattgtaccttttgatccaaaaaaaaaaacaaagnnnnnnnnnnnnnnnnnnnnnnnnnnnnnnnnnnnnnnnnnnnnnnnnnnnnnnnnnnnnnnnnnctgtacctaa

SEQ ID NO: 92029 - DNA, 635 bp, Arabidopsis thaliana columbia
acgcgtccgactaactcttgagttttgctatggagtccgtcgaaatgaacaatcccaattcgcaaacccgagatcaacctcctcctgccgccaacggagacactgctccactcgcattggatcatatgaatcctcagaattcggagtctgtggctttaaacgggtcttctactcctatccccgatactaatggttcatcagcaaagcctgagctcttacgtcctttgctatcggagaacggtgttagcaagacgctgagtggtaacgataaggatcagtctggtggagaggaagagactacaagccggaggaagcgtcggagtcggtgggatcctccgccttctgagtccattaataaccctagcgccgaagggggtactgattccggtactgggactaggaagcgtaagtcgagatgggcagatgatgagccgaggacgcaaattcagttacctgacttcatgaaggatttcactggaggtattgagtttgatcctgagattcaagctttgaatagtaggttacttgagattagtaggatgttgcagtctggtatgcctttggatgatagaccagaaggacagaggtctccttcaccagagcctgtgtatgataacatgggaattaggatcaac

SEQ ID NO: 92030 - DNA, 528 bp, Arabidopsis thaliana columbia
  unsure (1)..(528): unsure at all n locations
nnnnnnnnnnnnnnnnnnnnnnnnnnnnnnnnnnnnnnnnnnnnnnnnnnnnnnnnnnnnnnnnnnnnnnnnnnnnnnnnnnnnccacgcgtccgctcatggtcccttgctattctattgaatcgtttgcatcacttgttaaaccatccatcagtgttgactgtgggattcttcgagactgctatgaatcctttgccatgtactgttttggtagataccttgttgcctgcattggtggggaagaaaggactatcgagtttatggaaagacaagggcgtaagagctttaagacgccactcttagatcacaaggatgaaaagggaatcatcaaacatccttttcctatgaatttattcttaaaaccgtggaggctcagtccctggttttatcaagttgttaagtttggtattgttcaatatatgataataaagtctttaactgccctcacagctctgattcttgaagccttcggtgtgtactgtgaaggagagtttaaatggggatgtgggtacccttatttggcagttg

SEQ ID NO: 92031 - DNA, 569 bp, Arabidopsis thaliana columbia
atgatactccagctctctacgactcactatatggaaagctggtcacgcctgcaggtaccggtccggaattcccgggtcgacccacgcgtccgcccacgcgtccggttcgcttatggccatgggggtttctcttacttcccacaataaccctcttcttcgccacttatctccttcctcttcctgggtttctcgttcctcctctcgcctctcttcttctccactcccttccttcctctttccttgccgtcgaacccttcttcaaaggaaactagcttccactgatggaaatgtcggttattgtactactacagtttgtcagggatttcagcattcggttcatcaacggtcgtcttctgttgtgtttaacggagagtgggaacttcgatcggaatctaacaaggtaaggatggttcctaagattatcaaggttggaaatcagacggaggtagccgaaactcatcaagttcctggaacctgtagtgcttggagggaagaagctaataagcttagagaaagaaatggtcaaattgctagaaaccttgatgacaatggttatttcaatggctctg

SEQ ID NO: 92032 - DNA, 568 bp, Arabidopsis thaliana columbia
  unsure (1)..(568): unsure at all n locations
atgatactccagctctctacgactcactatatggaaagctggcacgcctgcaggtaccggtccggaattcccgggtcgacccacgcgtccccccacgcgtccgctcatctttttgtaccgctccgttgcgcctctctcttcttcccttcctctctctagcggcggagttacattgtcggccgccggggaaaccggcgacagtggattctctaaactcttaaactcgctacgtcgattcttaaaggattcatcgccgataacttttatacctccttcttttccgataggatcgggactcattttgtttccaacaccccggatccggtgatttagggcgctttttgatgcttatcgagtaaaggatttatcgatttagtgatcgtttatggaaggaggtggtggttctggtgagcgttcacggattgcttcgaatactcctcgaagcttgaaggagaagagcgatggggttggtaggactgtgtcttctactgaaactaggcagaattatcagaagagatccagaatggttgttagtgattcggaatcaagtgatgagtntatgaaacca

SEQ ID NO: 92033 - DNA, 493 bp, Arabidopsis thaliana columbia
ccgcctgcaggtaccgggccggtattcccgggtcgacccaggggggcgcggacgcgtgggcggacgcgtgggaaagaagaacacgatgaggaaaccatcgaaaaagagcgaaatcgagttctgcacggtgtgccggtttcatcacgaccaaggctcgcgccacaagtacttccctcgccacaaaagttccctctcttccttactcgatcgattcagatcgaagatagctgacgtcagattcttcctgaagaaccctagcgttctacggccacaagagcagtcgcaaaaccgtgtttggtgtgtcttctgcgatgaggacattgttgagctcggtagctccttcgcctgttctaaggctatcaatcacttcgcaagttccgatcatcttaagaatatcaagcaatttctgtcgaaaaatggcccggcaatggattgcatagacgagttccgaatttctggagctggtgtatgcttatggggagatatgtgtccg

SEQ ID NO: 92034 - DNA, 539 bp, Arabidopsis thaliana columbia
atgatcctgccagctacaatacgactcactttagggaaagctcgtacgcctgcaggtaccggtccggaattcccgggtcgacccacgcgtgcgcgaacttgccgttgaaggtaggatggagactgatgctcggaatcggagccgtaccttccgtgatactcgctatcggcgttctcgctatgccggaatctccacggtggctcgttatgcaaggccgtctcggtgatgccaagcgcgttctggacaaaacctctgattcccccaccgaagcaactctccgtctcgaagacatcaaacacgccgctggtattcccgccgattgccacgacgacgtcgttcaggtgtcgaggaggaacagtcatggagaaggagtttggagagagcttttaatccgaccaacaccagccgtgcgtcgtgttatgatcgccgcaatcggaatccatttcttccagcaagcttccggtatcgacgcggtggttctcttctcaccgcgaattttcaaaaccgccggactcaaacccgatcaccaacagcttcta

SEQ ID NO: 92035 - DNA, 748 bp, Arabidopsis thaliana columbia
  unsure (1)..(748): unsure at all n locations
cagctctctacgactcactatatggaaagctggtcacgcctgcaggtaccggtccggaattcccgggtcgacccacgcgtgcgactagatccggatctggaactttctctactctctgctcataaagtttcattctttggggagatctgaggcaaccctttttctctggtgcatgtgactagggattgtgccgtgggtttaggatcatggcaacggggaagtattctcgtgtagacgggaagaagtcatcgggatatggcttaaccattaccatcgttttaattgtttctctatgtttggttggggcgtggatgttcatgtcttcatggtctgctccaactgagtctattgacttctctgcaaacgagaggacaaaagatgtagatactactaagagtgatttcaaaagtgaagaggttgatcgaggttccaagagttttccggatgaaaagaatgaggagacggaggttgtgacagagaccaacgaagagaagactgatcctgagaaatctggtgaggagaactctggtgagaaaacggagtccggcctgaggcaaagaaaggagtttgatgnccaaaaaatggtgnatgggggttgaaaaaaatgggnnccggtnagaaagncnccgggacccgnaagtggtgaaacccaacccaaaaaggggnaaccccacctggnannnagnccncgnnggaaacaaaccttggggatgaattnggcccgaaanatcctggggancctgnngaa

SEQ ID NO: 92036 - DNA, 692 bp, Arabidopsis thaliana columbia
ccccctttgaaagcctttgagagcactgcgcacccccctcttggtcgactttatcgataagcttgatatcgaattcgcggccgcgggagatctgaggcaaccctttttctctggttcatgtgactagggattgtgccgtgggtttaggatcatggcaatggggaagtattctcgtgtagacgggaagaagtcatcgggatatggcttaaccattaccatcgttttaattgtttctctatgtttggttggggcgtggatgttcatgtcttcatggtctgctccaactgagtctattgacttctctgcaaacgagaggacaaaagatgtagatactactaagagtgatttcaaaagtgaagaggttgatcgaggttccaagagttttccggatgaaaagaatgaggagacggaggttgtgacagagaccaacgaagagaagactgatcctgagaaatctggtgaggagaactctggtgagaaaacggagtcggctgaggaaagaaaggagtttgatgacaaaaatggtgatggggatagaaaaaatggagacggtgagaaagacaccggaatcagaaaagtgatgaaaacccaagccaaaaaaggaagaaaaacccccaaccctgggaaaagaagaggcctccagtaaagaaaaaaacccaaattccttggaggggattaagttaaattgggga

SEQ ID NO: 92037 - DNA, 508 bp, Arabidopsis thaliana columbia
aatacgactcacattagggaaagctcgtacgcctgcaggtaccggtccggaattcccgggtcgacccacgcgtccggtggaaagtgcaattgtattgtcccgttgaagccatggaagtagagagatcgagcaacccaacggctgattcgagattgttgttctctctcaagtttaatcagcttgaaggtgtgatgcagttcaatcacaaagttgtagttagagacaattggatcgatgtgatcgtgaagatagacaacatcagatacgatgtactaaagcttgtaaacgagaaactgatgtcgagaagaggagcaggggagcacgaaaagcatttcccatcaaggatctctctgcaactaactcctactctccaaaccgatttcattagcgtttcggttagcaaatcatcaaacaatccgggaagagagtttgaagtcgagagatctattgaaggctcgttcgatccaccaaactcactaggcttaagagttgctggacgagaagcctc

SEQ ID NO: 92038 - DNA, 380 bp, Arabidopsis thaliana columbia
cggacgcgtgggggcgttctaaatgatccattatctccatttcatcggtgaattttgtttcgccagtgctgttaaagtagttgagtggttctcggagaatctgtttctcaaaagaagcacaatggcgttatcgaagagagggttcgtgatgacctctaatcctagatttcacggcgaggaagaggaattagagttaggattaggatcagtgaggttcacgcgaggattagggaggaaaaggattttgattttcgagttgtgtgcgtgaatctctatctagatcggccgttgagattccggtagtatctgaatcgccgccggtgaagagttcgttgaagagacaacgaagcagaataacaattgtttcttcttcatcctct

SEQ ID NO: 92039 - DNA, 595 bp, Arabidopsis thaliana columbia
  unsure (1)..(595): unsure at all n locations
cagctannnnnnnnnnnnnnnnnnnnnnnnnnnnnnnnnnnnnnnnnnnnnnnnnnnnnnnnnnnnnnnnnnnccacgcgtccgaagaaaacgaagaagagcttagatccagttccagaaaccctaatttcagcaaccgatcaaatcgccggaggaattcaaattctgaagacgacgacgatgagaggagagacaaaaagcatcggcttttacacggattgaattcacacgagggtcgtgattcttctaattccaaatctggcggcggcgatttggactccgatgcacgcaaccgccggaaaattgacggatctgacaatacgggagaaaaggcttcgaaagcgacagacattcttcttcaaagagggtcacttgtggagtctacacctttgccagacaaaaagttgttgttcttcattcttgatagagttcaaaagaaggatacttatggagtgtactctgatccagctgatccagaggagcttcctgattattatgagattatcaagaatccgatggatttcaccacattgcggaagaaattagaatccggtgcatacaccagcttagaacaatttgagcaagacgtattttt

SEQ ID NO: 92040 - DNA, 851 bp, Arabidopsis thaliana columbia
  unsure (1)..(851): unsure at all n locations
nnnnnnnnnnnnnnnnnnnnnnnnnnnnnnnnnnnnnnnnnnnnnnnnnnnnnnnnnnnnnnnnnnnnnnnnnccacgcgtgcggcggttggaaactgaatcttaaacccttcactcacattcatcttcaccgtcaaatctctgaaactgagcttcgacgatgttgggtttacgaagatctgcgacgaccttgttcgacatcagccagtctctgcttcgtaatgttacgtttcatgggttacgagtccaaggaattcgtgtgggaaacgcagaggttccaaacaataagccactcaaaaccggtcttcaagaagtttatggaatcggccgccgtaaatctcaccaggttctctgtcaccttggaatcactaacaaacttgccagagacttaactggaaaagaactcattgatctccgtgaagaagttggccagcaccagcatggtgatgaactgaggaggcgtgttggatcggaaatacagagactggtcgaagtagattgctacagaggtagtagacatagacatggattgccttgcagaggacaaagaaccagtggtaacgctcgcaccaaaaagggcaaagccgttgcgattgcaggaaagaagaaagcccctcgcaagtaaacctgtaattctatctattctctgggattcataagttgtaatccatgtcttattgtttacagacatggctttgtgttatttttgggatgaaactgatcaaataagtaaaacatgatttgtccaaaaaaaaaaccaaaaaaaaaaaaaagaatttaccaaaagggcgaacgctctagaggatccaagcttacgtacgcgtgctgtcgacctcataagtcttctatag

SEQ ID NO: 92041 - DNA, 528 bp, Arabidopsis thaliana columbia
  unsure (1)..(528): unsure at all n locations
nnnnnnnnnnnnnnnnnnnnnnnnnnnnnnnnnnnnnnnnnnnnnnnnnnnnnnnnnnnnnnnnnnnnnnnnnnnnnnnnnnnccacgcgtccgccaaactctcttcttcttcttctgcttttgtctcaaaccattacaaagagaacattttttgtttagtaaagaaaaaacaacaaaaagacatgataacgagagagagtttaacgctgagaagcatcacaatgatgactttagtgacaatcctggtctggtctgcaactctagagacctgcattgccagaagaggaagacattggagacaccaccataggagctcctcctctttgtctgattccttgtccagcaagaaaccagaaagccatgagaacaaccaccaccacatgtcccataagtcaaaaccaaaaccgaagatgaaaactcagccgccaaaatccaacgacggttcacctgttgtgtcacagccaccacaagttcaacaaccaccaccaccacatgtccaaccaccaccaacacctcttccgctgcag

SEQ ID NO: 92042 - DNA, 575 bp, Arabidopsis thaliana columbia
  unsure (1)..(575): unsure at all n locations
nnnnnnnnnnnnnnnnnnnnnnnnnnnnnnnnnnnnnnnnnnnnnnnnnnnnnnnnnnnnnnnnnnnnnnnnnnnnnnnnnnnnccacgcgtccgagaatattaccaagccaagaagttggagttagaaaatgtcaaatcagaagaacttggagtaaaggctttacctcctcttccatgttatactcagaaaacccgactcatgaagaggaaaacgagaaagcgagttgaagagaccgctgatgttacatcctatgcatcaaaccataatctcttctcttattatgattgtcggaaatctttggccgatattgctcttaatgacaactcccgcaacctagataagaagaataagagcgccaaggatgagacagctttctctgaagagacaccgcctctcgagtttagagaaggcgatgcgtacttggaacagatacttttgaaaattgaagcagcaaagtcagaggcccgtaacttgaagatccgcgtacacaagggtttgagtgaaaatccaagtatattccctctggctaacacagtgaatccacttggagctgctgatgtatacaccagctc

SEQ ID NO: 92043 - DNA, 565 bp, Arabidopsis thaliana columbia
atgattctccaggtctctacgactcactattgggaaagctggtccgcctgcaggtaccggtccggaattcccgggtcgacccacgcgtccgctaagcgagaatccaaaaatgagtgaagaagatcacattgcttaggtgaagaagtctccgaagaatctctcaaaactatcttcgtcttctcttacaattccgacgaacagagatttccattctctctccaagtccgacgagttcaagcgtccgatcgatgagttagcttggagctcgcagtctgttcttgagacgattggtggtaagaaatcgatgagatttgatgatcccatggatgagttcaagaggaatcgaaagatggaggaagattcgaagaaggtaatcgatgtgaaagtggctgagagtgataagggattcgcgaaatttggcaaggcagaggttccgtttcatataccgacgttaacgaagcctcaagaggagtataagattttggtagacaatgctaataatccttttgagcatgttttgttggagaagagtgaagacggtcttcggttcattcatccactggag

SEQ ID NO: 92044 - DNA, 648 bp, Arabidopsis thaliana columbia
acccacgcgtccgggaaacaacaccgataagtaatttatgacgaatcttttggccttgtggggggtcttgagcacttgactggcggcggaggtatggtctccgagtccagccatgaccacccacaacacggcggtggcgtcagagggagaagtcatcgtcaaagacggacaccacgttgtggtggttgagtacgatcgcgacgggaaaaccaataccagagtctcgatctcgccaccatcggcagatcaaggagaagaaaaagagaatgaagtagagatgggaacttctatgtttataaatgttaaagagaaagctaaagaaacggcgtcgtatcttccacacgtcggccaaggaatctcccagccggagatgacagacgaggcgcgtgatcaccacgcgacggctggggaagtcatatgcgatgcgttcggcaagtgcagccagaagcatcgcgagtgtggtaggtcgggctaaagaccgcaccgttgattccgtcggcgagacagcttctgatgtcagagaagccgccgctcataaggctcacgatgtgaaggaaacggttacacatgcggcacgtgacgtggaagacacggtggctgatcaagcccagtatgctaagggtagggtaacagaaaaggcccatgatg

SEQ ID NO: 92045 - DNA, 529 bp, Arabidopsis thaliana columbia
cagctacatactgactcacataatggaaagctcggcacgcctgcagtgtaccggtccggaattcccgggtcgacccacgcgttcgactatttgaaatcgacaacgagagacacatatagaagaataaattgatgacttgtatgataatcttgttggatgatttcgtagcatcgttgtattgtcaggacggagttagagagctaatcgattacaacgagaaaatatctactactcgatccatgcttgcgtcctaatgctccaccaggatgtcatcgtcagccatatgaaccccgtactccggttaacgtatataggcgtggttgcaccacaatcaaccgatgccgccgagtgcagaatccggcgagatctaatgacatttgttatggacttatgccaccacattactcatattaggtatatggggtccaaaaggctcgtaggattgatgcttcagtattggtgagggctcatgggaggtttagaatgtaaaggattcatgcggtaatgggtacttatggtgtagcaacga

SEQ ID NO: 92046 - DNA, 515 bp, Arabidopsis thaliana columbia
  unsure (1)..(515): unsure at all n locations
nnnnnnnnnnnnnnnnnnnnnnnnnnnnnnnnnnnnnnnnnnnnnnnnnnnnnnnnnnnnnnnnnnnnnnccacaggtccgcccacgcgtccgcggacgcgtgggcgcgaacagtcttgttgggttttgggttttgagagacagagaggttttggcttccgggtcgttagtgtttgatcatcttcgtatctcagaagggtgaactttgttgttttggcttttgcgtactgttgaatcagcttttccagatgcctcgaagaccatcatcaggaagaagagtgttaaagcatcagcctttaacattttcaccgtttatgcggttactttcctttgcttcaatggctaggcgtgatttgtctcatcctgaagattgtcaatgttctgatgaagatatatcttttgatgaaaagcaaaagatccctaatttaccaagaaaagggaaagaagaacaagtctcggactcgtctgatgaagaagattctcaggaagatgtccaagcagactgtgagttcttt

SEQ ID NO: 92047 - DNA, 536 bp, Arabidopsis thaliana columbia
atgatccgcccagctacaatacgactcaccttagggaaagctcgtacgcctgcaggtaccggtccggaattcccgggtcgacccacgcgtccgcggacgcgtgggccgcaaccttcgattttcgtttattcgcatccatcggagagagaaaacaatcaataagcgaccatgttggtgtaccaagatcttctcaccggtaagctcaataattccttaatctcggtatgaactgtgtagctatcgatctttttcttccgatcggaataaatcatgttatcgaattgttagatctgtcatcgcatcataggtttttcgttgatttgctgctctttgcattgataattcaaatcttaggggattagtttatgtgatttggttagatctgtgattcattagtatataaacgtcctttaattgagcttaccgattcgttgtagattggattttagggtttattcgcttgtatcgattaatgtttgggatcttatgagtaatgactaaagagtctgggctattgatttacaggtgatgagctt

SEQ ID NO: 92048 - DNA, 419 bp, Arabidopsis thaliana columbia
  unsure (1)..(419): unsure at all n locations
aagattctntccgcctccttctctctataagaaccgacacagagacgaagaagaataatcactcgaaaactcatcaaatcaaaaatcaaacacagagaagagaaaatggccgcagaaggagaagttatcgcttgccacaccgttgaagattggaccgagaagctcaaagccgccaacgaatccaagaaactgattgtaatagacttcactgcaacatggtgcccaccttgccgtttcattgcacccgtctttgctgactttgcccaagaagcacctcgacgtagttttcttccaaaggtcgatgttgacggtttgnacactgttcgctgnggggtttaaagttcaggcaatnccaccggttttntttcatngtaagaagggggggntnaaggggggccttttgggtttggngntttcgg

SEQ ID NO: 92049 - DNA, 1165 bp, Arabidopsis thaliana columbia
gccgcagacacagcaatcaattagtttgacgcacattttgacagatgaatctatgcacacgaacaacatggagaaaagtcgatgcaggaagataagacttgaatattcttgacattaagaagaaactctcgtagaaatatcagagaagaagagtaagacacaagcacacactggatattgactcgggtgataagtactaatgggtcctttcgtagggttcatctcattacttcagtacattgtataagtatgcagcgatacccagaacaatacacaacaaaacaatatcgatacagaagttccggctagatctcagctggttcacggtatctttaagtctaacattggtgttcttaagatcggaggttgctctgtccacctttgtgtcgatttcatccatcagtggaacttgtctatccagttcctcgttcatatcagaagccatgttcttcaaagcatctaacccttcggagatcatgtcaagaccttgttcctgttttattttccgcatctcatactcctgcctgaattggctagattcatttgattcttgaaagtaatcatcgtcaaaacgcccatctgaatcaaatttgatatcagcccgagatgttgttgaggacggagtccaagcactagtgcttttagggccacctgctgtcccatcaggtatggcttcaatccgggctggaagagcgagcaccaaatcatttctcgcagcaagctcttcggttgtaaggcccttaacccgcttgacagcaagtctttgcaacttgggaacttcctctgacaatcgtgccttggtccggcggatctcagcattcattgcaacagcagcagccctgtttttctccttcgtaacaagttcagctttctcgagagcggtctcgatttgggtttcgaaagctccatagagacgagcaaaggcatcatcgccggagatattggcctcccgctgtttgtcgacatcgtacttgtcgtacttcttacagatcgagtcaactctagtcagaatatcgatcacagtcatcttcttccaaatctatcacaagaagctcccagatctgagctaagaaggagacaatctctgattcggagaggaagaagactttaatttgtgaaattttgaatcgctacagcctttctggaactggttcggcgacgaaag

SEQ ID NO: 92050 - DNA, 926 bp, Arabidopsis thaliana columbia
  unsure (1)..(926): unsure at all n locations
ggtnatggncttnaancccggggggggaaaangcnagnnccaaaaaattanttnnccnaanaaagctccttcgggttttaaggccccttaaccccnttgacagcaagtntttgcaactttggaacttcctctgacaatcgtgccttggtccggcggatctcagcattcattgcaacagcagcagccctgtttttctccttcgtaacaagttcagctttctcgagagcggtctcgatttgggtttcgaaagctccatagagacgagcaaaggcatcatcgccggagatattggcctcccgctgtttgtcgacatcgtacttgtcgtacttcttacagatcgagtcaactctagtcagaatatcgatcacagtcatcttcttccaaatctatcacaagaagctcccagatctgcggacgcgtgggtcgacccaccgtccgatcaaaaatcaaacacagagaagagaaaatggccgcagaaggagaagttatcgcttgccacaccgttgaagattggaccgagaagctcaaagccgccaacgaatccaagaaactgattgtgatagacttcactgcaacatggtgcccaccttgccgtttcgttgcacccgtctttgctgacttagccaagaagcacctcgacgtagntttctttcaaggtcgatgttgacgaattgaacactgttgctgaggagtttaaagttcagacaatggccaacggtttatcttccatgaaagggggggagatcaagganntgtggttggggccgctaaagaagaatcattggcaatcccgggagcncaagacagttnttgctgcnccttgattgnnttccccctacccantttgccaaaanatggttggggttaaaaaacccttgtcccccgggctttacccnaaaggcccntggggggggaaaaagtntcnc

SEQ ID NO: 92051 - DNA, 772 bp, Arabidopsis thaliana columbia
ctcactatagggaaagctggtacgcctgcaggtaccggtccggaattcccgggtcgacatcgtacttgtcgtacttcttacagatcgagtcaactctagtcagaatatcgatcacagtcatcttcttccaaatctatcacaagaagctcccagatctgcggacgaatcactcgaaaactcatcaaatcaaaaatcaaacacagagaagagaaaatggccgcagaaggagaagttatcgcttgccacaccgttgaagattggaccgagaagctcaaagccgccaacgaatccaagaaactgattgtgatagacttcactgcaacatggtgcccaccttgccgtttcattgcacccgtctttgctgacttagccaagaagcacctcgacgtagtcttcttcaaggtcgatgttgacgaattgaacactgttgctgaggagtttaaagttcaggcaatgccaacgtttatcttcatgaaagaaggagagatcaaggagactgtggttggtgctgctaaagaagaaatcattgccaatctcgagaagcacaagacagttgttgctgctgcttgatttgcttttctctcttacctattttgctaaaatatgtttggtgttttaaataaatcctttgttcgcccgagtcttttcaccttaaatgtgctcttatgtgtggtggtgaataaatgttgttgcaaacttgattactcgcagctatgctaattgttcgttcatggttatgtttactctttggggattctattgttaaaaaaaa

SEQ ID NO: 92052 - DNA, 562 bp, Arabidopsis thaliana columbia
cgtccgttcgagagcaaaattctctcaagctttagccttgtttgcctctgcttctcccctctctggggggaggctttaaatcccttcctgtgtgcgtctccagacccgcttccgtttccgtcttacctccttccctctccttcaaacttcactccgaccacctcgtctctatcttcgcttcctccgcccttaaatgctcatcccccgccgggttcccgtcgggtttccgtagaaacgttgctgtatcttcggattttgaggtggaggaagatgatatgttcgctgacggtgacgattcagcgcctgtggagcgtggcctcctgctttctcctgaccttaaagctctttgttggtaacctttcttttaacgttgatagcgctcagcttgctcagctctttgagagcgctggaaatgttgagatggttgaggttatctatgacaaagtgactggccggagcaagggtttcggatttgtgacaatgtcaaccgcagcggaagttgaagcagcagcctcaggtatttttgggattcggattcaagatcctagacctggaaccggta

SEQ ID NO: 92053 - DNA, 417 bp, Arabidopsis thaliana columbia
gcgtccgcaaacgagtccgcggacgcgtgggcggacgcgtcggtgatagcgctcagcttgctcagctctttgagagcgctggaaatgttgagatggttgacgttatctatgacaaagtgactggccggagcatggggttttcggatttgtgacaatgtcaaccgcagcggaagttgaagcagcagctcaacagttcaatggctatgaatttgaaggcagacctttgagagtcaatgctggccctcctccacctaaaagagaggaatccttctccagaggaccaagaagtggaggttacggttctgagcgtggtggaggttacggttccgagcgtggtggtggttatggttccgagcgtggtggtggttatggttccgagcgtggtggtggatacggttctcaacgtagtggtggtgg

SEQ ID NO: 92054 - DNA, 621 bp, Arabidopsis thaliana columbia
  unsure (1)..(621): unsure at all n locations
nnnnnnnnnnnnnnnnnnnnnnnnnnnnnnnnnnnnnnnnnnnnnnnnnnnnnnnnnnnnnnnnnnnnnnnnnnnnnnnnnnnccacgcgtccgtaacctttcttttaacgttgatagcgctcagcttgctcagctctttgagagcgctggaaatgttgagatggttgaggttatctatgacaaagtgactggccggagcaggggtttcggatttgtgacaatgtcaaccgcagcggaagttgaagcagcagctcaacagttcaatggctatgaatttgaaggcagacctttgagagtcaatgctggccctcctccacctaaaagagaggaatccttctccagaggaccaagaagtggaggttacggttctgagcgtggtggaggttacggttccgagcgtggtggtggttatggttccgagcgtggtggtggttatggttccgagcgtggtggtggatacggttctcaacgtagtggtggtggttacggagggtctcaacgttccagttatggttcggggtcagggtccggttcgggctcaggttcaggaaaccgtctctacgtgggcaacctttcttggggtgttgatgacatggcacttgagaacttgtttaacgagc

SEQ ID NO: 92055 - DNA, 641 bp, Arabidopsis thaliana columbia
  unsure (1)..(641): unsure at all n locations
cttaaaccttatctcttcaccaccagcttctcaaagctttagcctcgagagcaaaattntctcaagctttagccatgtntgcctctgcttctnccctctctgctttcaatcctaaatcccttcctctctgcgtctccagacccgcttccgtctccgtcttacctccttccctctccttcaaacttcactccgaccacctcgtctctatcttcgcttcctccgccctcaaatgctcatcccccgccgagtacccgtngcgtttcgttagaaaggtttgctgtatcttcggattttaaggtggaggaagatgatatgttcgctgacggtgacgattcagcgcctgtggagcgtaaactccttcttctcctgaccttaaagctctttgttggtaacctttctttttaacggtgatagcggtcagctttgctcaagctctttgagagcggctggaaatgttgagatggttgagggtatctttggcaaaagtgacttggccggagaagggggtcggggtttttaccaatgtaaccccaggggaggtttaggaggagttaacaagttcatgggcttgaatttaacggagcctttnaggaantctggcccnncnccaaaagggntcctttcaaggccaaaggggnttc

SEQ ID NO: 92056 - DNA, 552 bp, Arabidopsis thaliana columbia
taggtgacactatagaagagtctatgacgtcgcatgcacgcgtacgtaagctcggaattcggctcgagtttcgttagaggcgttggccgtatcttcggattttgaggtggaggaagatgatatgttcgctgacggtgacgattcagcgcctgtggagcgtaactccttctctcctgaccttaagctctttgttggtaacctttcttttaacggtgatagcgctcagcttgctcttgctcggggagagcgctggaaatggtgagatggttgagggtatctatcacaaagtgactggcccggagcaaggggttttcggatttgtgacaatggccaccgcagcggaaggtgaagccgcagcctcaacagttcaatggctatgaatttgaaaggccgaccctttgagaggcaaggctggccctcctccacctaaaagagaggaatccttctccagaggcccaagatgggggggggtccggtctgggcgggggggggggttccgggtcccagcgggggggggggtttgggtcccggcggggggggggttatggtcca

SEQ ID NO: 92057 - DNA, 668 bp, Arabidopsis thaliana columbia
  unsure (1)..(668): unsure at all n locations
cggancngntccccngccgttacgccaggaagctttaactggnttttcgccgggcncggtaaccnagggttggattttgcccttagctctccccaagaggttcagaaggcgatcaatccctggaatggacccgatttggatggaagccaaataggagccccagaggctgaggctaggccccccaggaggccaattttgagcggtcacacctctttcatattctcaaaaaatgcaaattctggagggttctttgaagcatatagggttagtggaaaatggcggtttcagacagtaactaaaactcactgctggtgcacgctaggctttatccgcctttgatgcatgaaggtcgttaaggaatggtctttttttgagaaagataacaattagattaaagcagagaacccatgtttcttgtctgttcgaatcctgcgagattggttgtagttgaagttgcattttcttcttgtcttttttgttggtattttgacacaatttggctttttggcatatgagagtgactgtagcagtctgttttatttgatgttcttgatcttcttatgttctgaaaaccagttttcctaaaacttaacaaatttcgatatggaacaagaaattttctggaagggtttgattgtgtgaggttgtattgtcagttctcatatgaa

SEQ ID NO: 92058 - DNA, 1575 bp, Arabidopsis thaliana columbia
  unsure (1)..(1575): unsure at all n locations
nnnnnnnnnnnnnnnnnnnnnnnnnnagcccacgcgtccgcccacgcgtccgcccacgcgtaaaccttatctcttcaccaccagcttctcaaagctttagcctcgagagcaaaattctctcaagctttagccatgtctgcctctgcttcttccctctctgctttcaatcctaaatcccttcctctctgcgtctccagacccgcttccgtctccgtcttacctccttccctctccttcaaacttcactccgaccacctcgtctctatcttcgcttcctccgccctcaaatgctcatcccccgccgagtacccgtcgcgtttcgttagaaacgttgctgtatcttcggattttgaggtggaggaagatgatatgttcgctgacggtgacgattcagcgcctgtggagcgtaactccttctctcctgaccttaagctctttgttggtaacctttcttttaacgttgatagcgctcagcttgctcagctctttgagagcgctggaaatgttgagatggttgaggttatctatgacaaagtgactggccggagcaggggtttcggatttgtgacaatgtcaaccgcagcggaagttgaagcagcagctcaacagttcaatggctatgaatttgaaggcagacctttgagagtcaatgctggccctcctccacctaaaagagaggaatccttctccagaggaccaagaagtggaggttacggttctgagcgtggtggaggttacggttccgagcgtggtggtggttatggttccgagcgtggtggtggttatggttctcaacgtagtggtggtggttacggagggtctcaacgttccagttatggttcggggtcagggtccggttcgggctcaggttcaggaaaccgtctctacgtgggcaacctttcttggggtgttgatgacatggcacttgagaacttgtttaacgagcaaggaaaggtagttgaagctagggttatctacgacagggacagcggtagatccaagggttttggatttgtgacacttagctcttcccaagaggttcagaaggcgatcaattccttgaatggagcagatttggatggaagacaaataagagtctcagaggctgaggctaggccaccaagaggccaattttgagcggtcacacctctttcatattctcaaaaaatgcaaattctggagggttctttgaagcatatagggttagtggaaaatggcggtttcagacagtaactaaaactcactgctggtgcacgctaggctttatccgcctttgatgcatgaaggtcgttaaggaatggtctttttttgagaaagataacaattagattaaagcagagaacccatgtttcttgtctgttcgaatcctgcgagattggttgtagttgaagttgcattttcttcttgtcttttttgttggtattttgacacaatttggctttttggcatatgagagtgactgtagcagtctgttttaaaaaaggaaaaaaaaaaagttatgtnnnnnnnnnnnnnnnnnnnnnnnnnnnnnnnnnnnnnnnnnnnnnnnnnnnnnnnnnnnnnaacnnnnnnnnn

SEQ ID NO: 92059 - DNA, 800 bp, Arabidopsis thaliana columbia
gagtttgcctgaaggtccgattgagcctgcaactccattatctgaggttaagcaagagccgtacaaccttccttctgtttacgagtggacgacatgtgatatgaactctgatgatatgtgttcagaggtatacaaccttctcaagaacaactatgttgaggatgatgagaatatgttcaggttcaattactccaaggagtttctaaggtgggcactacgtccaccgggttattaccagagctggcatattggagttcgagccaagacttcgaagaaactcgttgctttcatcagcggcgtgccagcaagaatcagggtgcgtgatgaggttgttaaaatggcagagatcaatttcttgtgtgttcacaagaagctcaggtctaagaggctcgctcctgtcatgatcaaggaggtgactagaagggttcacttggagaacatatggcaagcagcttatactgcaggagttatccttcctacaccaatcaccacctgtcaatactggcacaggtcattgaacccgaagaagctaattgatggtggggtttcaaggcctggtgcgaggatggcaattagcaggaccatccaactttaccagttaccagaaggcccggtcaattctggaatcaaggaaatgggaccaccgcatggtcctggtggtaacagggtggcttagcacctccccagcccggttggaagtcgccaccgcttttaatgagaatgaggccaagcattggctactcccaaaagaagatgtggtggacggtaaccaagtagaaagccctgaacccacgcgtccg

SEQ ID NO: 92060 - DNA, 523 bp, Arabidopsis thaliana columbia
  unsure (1)..(523): unsure at all n locations
nnnnnnnnnnnnnnnnnnnnnnnnnnnnnnnnnnnnnnnnnnnnnnnnnnnnnnnnnnnnnnnnnnnnnnnnnnnnnnnnnnnccacgcgtccgtacactcacaccatctcacaaccctaatctctcccacacaagagagatagagagaaacaatgaaactttttcttctccttctttttcttctccacatttctcataccttcaccgcaagccgaccaatctccgagttccgtgctctcctctcactcaaaacctctctcaccggcgccggagatgacaaaaactcgcctctctcttcctggaaagtctcaacaagcttctgtacatggattggtgtcacgtgcgatgtatctcgccgtcacgtgacttctcttgatctctccggtctcaacctctccggtactctttccccagatgtttctcatttacgtcttcttcagaatctatcactcgctgaaaatctaatctccggtccgattccgccggaaatctcgagcctttccggtcttcgtcacttaaatc

SEQ ID NO: 92061 - DNA, 570 bp, Arabidopsis thaliana columbia
  unsure (1)..(570): unsure at all n locations
atgatactctcnnnnnnnnnnnnnnnnnnnnnnnnnnnnnnnnnnnnnnnnnnnnnnnnnnnnnnnnnnnnnnnnnnnnnnnccacgcgtccggaagatgacgtggaggatttggagatgttgttggaggcatacttcatgcaactggatggaatgcggaacaagattcttacagtgagggagtacattgacgacacagaagactacgtgaacattcaactggataatcaacgaaacgaactgatccagctgcagctgacgctgaccatagcctcgtttgcaatagccgcagagacattgttggccagcttgtttggaatgaacataccatgtccattgtatagcatacatggcgtctttggttactttgtgtggagtgttactgcactttgcattgtgcttttcatggtcactcttggttacgccaggtggaagaagctgctaggctcataatctccctctctcttacaaaccatgtgccacttgtgtaataatttatacatatgttactggacagagttgtttcactcatatcttgtccagtgaagacgttagtgattcatatatgtt

SEQ ID NO: 92062 - DNA, 393 bp, Arabidopsis thaliana columbia
gaaaaaaaaaaaaactagtggtgcgaaatcaacgactgtttaaggaattgggattttttgtcttccaacaaaatgcttccggtgaaaaaagttccgccatggctacaatatctccgggaggagcttacatcggaactccctcaccgtttctcggaaaaaaaatcaaacctttcactctaacttcaccgattttgagttctaaaccaacggttaagctcaattctaactgtcgcgctcaattgatcgatacagttcacaatctcttcgtcggagttggagtcggacttccatgtacggttatggagtgtggtgatatgatctatcgcagtactttgccgaaatctaatggtttaccgattactgctcctggagtagctttagctctcactgctc

SEQ ID NO: 92063 - DNA, 1180 bp, Arabidopsis thaliana columbia
  unsure (1)..(1180): unsure at all n locations
ggtgacaaaactgaaccgtgggctgatcaacttgtattctctctggatctctggagggatcaagttcagtattttgtagaagaggttatcggtgagcctgtgtacattgcagggaactcacttggagggtatgtagctctctactttgcagcaacccatcctcacctggttaagggtgttaccttgcttaatgcaacacctttctggggtttcttccctaatccagtaagatccccaaagctagcacgtctctttccatggcccggagcattccctctgccggaaagagtgaaaaaaatcacagaattggtgtggcaaaagataagtgatcctgaaagcatagctgagatacttaaacaggtctacacagaccattctatcaatgtggataaagtattctcacgtattgtggaggtcacacagcatccggctgctgcagcatcgtttgcttcaatcatgcttgctcctggtggagagctatctttctccgaagctttatctaggtgtaaggaaaacaatgttcagatatgtctcatgtatggaagagaagatccatgggtgagaccgttatggggaaagaagataaagaaggaaatccccaacgctccatactacgagatcagcccagcgggtcactgcccacacgatgaagtccctgaggtggtgaactatctgatgcgcgggtggatcaagcacctggagtctggtggttttgaagcgctcccgcttttggaggacactgaagaagattgggaggagtccaggattggtagagaaattgagttcccgagagatggttggaaaaaagcagtgaatctgtggttatatgggtcaaactatacgtactggagaggagttagagaatctttcagatccagttttataagggtgtttggagggaagtctgcatagaagaagcatggaacagtcgtctagtgtaaattaattgtaatctatgttgcatccgatgctagctatataatgttgtctgtagaatcaagtttctaaaatgttcaaaaggaaaagttagaaaaatatctacttgatagttagtcacctaaatcgaaggaactcctttcttgcattgttgtatataaaaaaagaaaaaaaaagnnnnnnnnnnnnnnnnnnnnnnnnnnnnnnnnnnnnnnnnnnnnnnnnnnnnnnntaaacgannnnn

SEQ ID NO: 92064 - DNA, 523 bp, Arabidopsis thaliana columbia
  unsure (1)..(523): unsure at all n locations
tcnnnnnnnnnnnnnnnnnnnnnnnnnnnnnnnnnnnnnnnnnnnnnnnnnnnnnnnnnnnnnnnnnccacgcgtccgggctttaacatgccttcactccagttcaccgccgttgtcttctctctcaccgacggcttaagttttatctgtcggagtagtttcaatgcggagtgggaagaagagagctcgctcagaacctggatccacaaagcaaccccgaagcaaatactccgacaacccaccggattttgcctcgttagcgtctctttacccatctttcaagccctttgttttcttctccggtagtcgagctcgcatcgactggaccgattacaacgcaacccgagagctcactcgtgtcctccttctacatgaccatggcgtcaactggtggattcctgatggacagctttgcccaactgttcctaatagatcgaattacattcattggatcaatgatcttttgtcctctgggatcattcaaagtttgggtggtgatggaagtaaagtaaagggctttgac

SEQ ID NO: 92065 - DNA, 585 bp, Arabidopsis thaliana columbia
  unsure (1)..(585): unsure at all n locations
tcnnnnnnnnnnnnnnnnnnnnnnnnnnnnnnnnnnnnnnnnnnnnnnnnnnnnnnnnnnnnnnnnnnnnnnccacgcgtgcgatcatttctctttaacttcgcaaacttctcctcgataaaatttctctctctaaaaaaaaacaattagaatcttgccttttacagagtaacactacatgccgacaatggggaataagaattcgatgtgtgggttaaaaaggtttccgaactacaagaagtctccgatcggttcatttgcgaaaaactcatcatctcacgacggtattaaaacaatcgaagctgttaacagttgcagtttttctagaaaagcagatctttgcatccgtatcatcacatggaacatgaatggaaatgtttcgtatgaggatttagttgagcttgttggcaaagaaaggaagttcgatttgcttgtcgttggcttgcaagaagctcccaaagcaaacgttgatcaacttttgcagacagcttcatctccaactcacgagcttcttgggaaggcgaaattgcaatcggtccagttatatttgtttgggccaaagaattcacatacattagtaaaaga

SEQ ID NO: 92066 - DNA, 1000 bp, Arabidopsis thaliana columbia
  unsure (1)..(1000): unsure at all n locations
atagaagagctttgacgtcgcatgcacgcgtacgtaagcttggatcctctagagcggccgctctcgatctgtaactagggcggcgaaagcagcggtggttttgccacggccggtgacgtttgtgactggaaatgctaagaagctcgaagaagtcaaagctatcatcggaaattccattcctttcaagtctctcaaactcgatttgcctgagctccaaggtgagcctgaggatatttccaaagagaaggctcgcttggctgctcttcaggtggatggaccagtgcttgtggaagatacatgtctctgtttcaatgctttgaaagggcttcctgggccatacataaagtggtttctagagaagcttggtcacgaaggtctgaacaacttactgatggcctatgaagataaatcagcttatgcattgtgcgcattctctttctcgcgtggtccaagtgctgaacctcttacatttttggggaaaactccgggtaagatagttccagccagaggaccaactgatttcggatgggatccagtgtttcaacctgatggatatgaccaaacgtatgcagagatggcaaaggaagaaaagaacaagatatcacataggtacaagtctttagcattggtgaaatctcactttaaggaggctggctatgtgttccagacagatgatggtaccatttaaagagaaccagaactcattcatcattgtcttctgcgtttgaagaatggagcaccaatcactcaccagattcttgttcctattctaagctcctttgggaatattgatattgtaactttttttttcctcaaatacaagtagaaaccatggattgcaagaaataatatatttgtatcgttcgtgttgttcattaaatactcgcggtgagacttatatgaaaaaaaaaaaaaaaaaaaaaaagnnnnnnnnnnnnnnnnnnnnnnnnnnnnnnnnnnnnnnnnnnnnnnnnnnnnnnnnnnnnnnnnnntgtaccta

SEQ ID NO: 92067 - DNA, 966 bp, Arabidopsis thaliana columbia
ccccccaaggttttcccgctaattggcccccggtttcctctgcttaaaccgccctatattttgtgcccaaaaacatactgggcccccgctaaaatgtcctttaagcgcctccattatatatagggaaaccaagggtttttcgcgccggtctttgtttctaaaataaaaagtctaaaaattaaacttctcgggaattctctccttcaaatttcaaacccaatcccagattccaaggggacctgggaattttcaaaaaaagggcggtggggctcttcaggggagggccaagctttggaaaacaatgtttttttaaaggtttaaagggttttgggcccacaaaaaagggtctataaaaaattgtgtctaaaagttttaaaacatttcttttgtggcatataaaattaaacaagtttaccctttgggccatttttttttctcgggtggtcaggggtttacccctttcacattttgggggaaaattctgggtaaattagttcaaaccagaggcccacatttcttggaatggaatcccatgttttcaccgtgatgaaaatgcccaacggtatgcagagatgccaaaggaagaaaggtccaagttttcccttagggccaagttcttaaccagtggggaattctcactttaaggagcgtgcttatgtgttccaaccaaatgatggtcccatttaaaaagacccagaatcatctctccatgttttctgcgtttgaagaatgagccaccaatcactcaccagattctggatcttattctaagctcctttgggaaaattgatattgtaactttttttttcctcaaatacaagtagaaaccatggattgcaagaaataatatatttgtatcgttcgtgttgttaaaaaaaaaaaaaaaaaaaacggacgcgtgggtcgacccggaaattccggaccggtacctgcaggcgtaccagctttccctaagagagtcgtatt

SEQ ID NO: 92068 - DNA, 557 bp, Arabidopsis thaliana columbia
  unsure (1)..(557): unsure at all n locations
nnnnnnnnnnnnnnnnnnnnnnnnnnnnnnnnnnnnnnnnnnnnnnnnnnnnnnnnnnnnnnnnnnnnnnnnnnccacgcgtccggttcaaacatgtccatggagagtatgcagacgagtaacgctggaggatctgtctcaatgtctgtggataacagtagcgttggttccagcgatgctcttattggccacccgggtttgaagcctgtacgccattactcactctcggttggtcaaagcgtgtttcgcccgggaagagttacccatgcgttgaatgatgatgctttggctcaagcactgatggataccaggtatccaactgaagggctgacgaactatgatgagtggacgattgatctgaggaaactcaacatgggtcctgcctttgctcaaggggcttttggtaaattatacacagggacatacaacggtgaagatgtagctatcaaaatacttgagcggccagagaacagcccagaaaaggcacagttcatggaacaacagtttcagcaagaggtgtctatgcttgctaatttgaagcacccaaacattgtgag

SEQ ID NO: 92069 - DNA, 521 bp, Arabidopsis thaliana columbia
  unsure (1)..(521): unsure at all n locations
cnnnnnnnnnnnnnnnnnnnnnnnnnnnnnnnnnnnnnnnnnnnnnnnnnnnnnnnnnnnnnnnnnnnnnnnccacgcgtccgcacgcttcctagtgttttgtttagctataatgattcacttgagatcttgaaactcaagtgtgctatcgatttagactttccttctcgggtttgtttgaagtctcttagaaagctataccttgaccaagtacatttcaaagacgaagaatctgtttgcaatcttttatgtggctgccctagtcttcaagatttggtcgtgcatagatatagcaatgccgatgtggcgactttcacaattgcgtcgccgtcattacaaagattgaccatagaagatcttagacaagaaggaggttatggaaatggaagctatgtgataaatgcccctggtttgaaatacttgaacatcaacggggttattgatattgagtcttgtttgattgacaaggcactagagttagaggaggcaaaaatcagtaacgtttctggtataaccaatga

SEQ ID NO: 92070 - DNA, 1352 bp, Arabidopsis thaliana columbia
  unsure (1)..(1352): unsure at all n locations
taggtgacacttagaagagctatgacgtcgcatgcacgcgtacgtaagctcggaattcggctcgagcggctgcgttctgcgacttgggttcgtcttcttcttctttctattcagattcacaataattgccaagcgaacaagtctttgcctctttggtttactttcctctgttttcgatccatttagaaaatgttattcacgaggagtgttgctcggatttcttctaagtttctgagaaaccgtagcttctatggctcctctcaatctctcgcctctcatcggttcgcaatcattcccgatcagggtcactcttgttctgactctccacacaagggttacgtttgcagaacaacttattcattgaaatctccggtttttggtggatttagtcatcaactctatcaccagagtagctccttggttgaggaggagcttgacccattttcgcttgttgccgatgagctgtcacttcttagtaataagttgagagagatggtacttgccgagggtccaaagcttgcctctgctgctgagtacttcttcaaaaggggtgtgcaaggaaaacagtttcgttcaactattttgctgctgatggcgacactctggatgtacgagttccagaagcattgattggggaatcaacagatatagtcacatcagaattacgcgtaaggcaacggggtattgctgaaatcactgaaatgatacacgtcgcaagtctactgcacgatgatgtcttggatgatgccgatacaaggcgtggtgttggttccttaaatgttgtaatgggtaacaagatgtcggtattagcaggggacctttcttgctctccccgggcttttgggggctctcgctgctttaaaggaccacagagggttgtagcatttacttttcaaactgctttaggaccatccttgttaccggtgaaaccatggagataactagttcaaccgagcagcgttatagtatggactactacatgcagaagacatattataagacagcatcgctaatctctaacagctgcaaagctgtttgccgttctcactggacaaacagcagaagttgccgtgttagcttttgagtatgggaggaatctgggtttagcattccaattaatagacgncattcttgatttcacgggcacatctgcctctntcggaaangggatcgttgtcagatattcgccatggngtnataacagccccaatcccnctttgccatggangagtttcctnaacttcngggaagtttttttgatcaaaggttgaaaaagntccntaggaattttttgncaaattncttttaggaggatcntttgggaagtgcaaaggggntttcagagggccaag

SEQ ID NO: 92071 - DNA, 739 bp, Arabidopsis thaliana columbia
  unsure (1)..(739): unsure at all n locations
tgatctnnnnnnnnnnnnnnnnnnnnnnnnnnnnnnnnnnnnnnnnnnnnnnnnnnnnnnnnnnnnnnnnnnnnnnnnnnnnnccacagctccgtgctgctggggttagtagtagtagtagtaggccaatagataacttttctagtgagagctctataccggcattgcatctactcagccttctggatcctcgcctgaggtcaacgactcccgctgaccaacacggaaacactaaatttactaaaagacattttccgccagccaaccagtccaaagagtttatagagcttcaaacaggggactctagtaagtcagcctactcaactaagcagataccttttgatctatacagcaagagattcacacaagagccttcccggaagagtttccccatcactccacctattgggacgtcttcactttcatttcaaaatgcttcatggagtcctcatcatcaagagaagaaaaccaagagaaaagacacctttgctcctgtttacaatactcatgaaaagccggtgtttgcaagcagcaacggccaagcggaagttccagcttgctgggngcatcggaattccatgatgctttcctttgaaaatttcacattgncgggttaanggaaaggaaccaaaagggggnanngncagggnggctgcaattaacaaatgnccttttggggggnccctntgnagggccagtttttgggcccntttnttgttnangggcaaatngganccnt

SEQ ID NO: 92072 - DNA, 814 bp, Arabidopsis thaliana columbia
  unsure (1)..(814): unsure at all n locations
cnnnnnnnnnnnnnnnnnnnnnnnnnnnnnnnnnnnnnnnnnnnnnnnnnnnnnnnnnnnnnnnnnnnnnnnccacgcgtccgcggacgcgtgggcggacgcgtgggcggcggcggaatattctcgccggaaaatggggaaagctagaggagttaacagcggcggcggagagagctctctcggttatctttttggttccggcgagtctgttcccaaaccaaacaagcccaacgctaaaaccggttttaccaccaccacgaccaccacaacaacaacggatggagctggaggtagacccaagaccacgaccacaactacaacaaccggagataaaaacaagacagaggagaactcggctggtgtgagaggaagtcctaataattactacagatcagatggacaaaactgtggcaacttcctcacggaacgaccatctacgaaggttcatgctgcaccaggtggaggatcttctttgggttacttgtttggatctggtccttgtggatctgacaaatgatttctatttccacgacaaacatctcatgcatttgaccctttgaaaaaatgtaaaaattgttctaaactttattctttatccttacaaactggttttgaggattgttttgaatttggccatttcttgtgttcttgaaaaagctacgaagctttctcaatcttgagatctccagaatgtgtttccagcaaaagaaaatcattttaccacaaaaaaaaaaaccaaagggcggccacaaannnnnnnnnnnnnnnnnnnnnnnnnnnnnnnnnnnnnnnnnnnnnnnnnnnnnnnnnnnnn

SEQ ID NO: 92073 - DNA, 946 bp, Arabidopsis thaliana columbia
  unsure (1)..(946): unsure at all n locations
nnnnnnnnnnnnnnnnnnnnnnnnnnnnnnnnnnnnnnnnnnnnnnnnnnnnnnnnnnnnnnnnnnnnnnnnnnnnnnnnnnnccacgcgtccgcttggtttacaaagatctagatgaagctcccagtggagagctccctgatggaggctatacaatggtagcagttgttggaatcaaggatccagtacgtccgggtgttagggaagccgttcagacttgtcaagctgccggaatcaccgtccgtatggtcactggagataacataagcacagccaaagcaattgctaaggaatgtggcatatataccgaaggaggcttagctatagaaggttcagaattccgggacttgtctcctcacgaaatgagggccattatccccaaaattcaggtaatggctcggtctctgccattggacaaacatactttagtcagcaacttgaggaaaattggagaggtagttgcagtgacaggggatgggacaaacgatgcccctgcgttgcatgaggcagacattggactagcaatgggaatagctggaacagaggttgcgaaagagaatgctgatgtgatcataatggacgataacttcaaaacaatagtaaatgtggctagatggggacgtgctgtatatataaacattcagaagtttgtccagttccagctaactgttaatgtggttgccctgatcatcaactttgtctctgcttgcatcacaggatctgctccactcactgctgtgcaactcctttgggtcaacatgatcatggacacacttggtgcattggctctagcaacagaacctcccaatgaaggtttaatgaaacggtgcaccaatagctagaaccgccagctttcatcaccaaaaccatgtgggggaacatcgctggtcaaagcgttttnccagtttgnttgttttagggattntncaatttcgnagggaaatca

SEQ ID NO: 92074 - DNA, 537 bp, Arabidopsis thaliana columbia
  unsure (1)..(537): unsure at all n locations
atgatactgccnnnnnnnnnnnnnnnnnnnnnnnnnnnnnnnnnnnnnnnnnnnnnnnnnnnnnnnnnnnnnnnnnnnnnnnccacgcgtccgctcccatttaatggtttcctcttaaaccattcccttcccttcctcctaactgcaatctactctccacctaacattgctccgttttgactcgctcgactcggctaagtgaccacagttcctttcgagccaataaaatggctacgggacagctattttcacgcaacacacaagcgttgttctacaattataagcagcttcccattcagcgtatgcttgattttgatttcctctgtgggcgagaaactccttctgttgctggtatcataaacccaggttccgagggattccaaaagctattttttggtcaggaggagatcgccatccctgtccacgcagccattgaggcagcatgcgctgcgcatcccacagcagatgtattcatcaacttcgcatcgtttagaagtgctgctgcttcatccatggctgctttgaagcagccaacta

SEQ ID NO: 92075 - DNA, 621 bp, Arabidopsis thaliana columbia
  unsure (1)..(621): unsure at all n locations
agcatttctctatattaatggtgcttcctctctaaaccattcctctctctttctctctaccaccatttattctctccttaatcactgactcgactcgggtcgtgaccagttttttctatctgagctatggcaacgggacagcttttttctcgtaccacacaagctttgttctacaactataagcagcttcctgttcaacgaatgctcgatttcgactttctctgtggacgtgaaacgccttctgttgctggaatcataaatcctggttctgaaggttttcaaaagctctttttcgggcaggaggaaatcgctatccctgttcatgccgccattgaggcagcttgtgctgcgcatccaacagcggatgtattcatcaactttgcatcttttaggagtgctgctgcttcatccatggctgctttgaagcagccgactattaaagttgtggcaattatagctgaaggtgttccagaatcagacactaagcagctgattgcggatcctcgtgcaaacaataagggtggtattggaccggctactgttgggggatcaaatgcgccttaaaatggggaactgnggacaattggaaattaccagggagcannanccgnctgtgggttc

SEQ ID NO: 92076 - DNA, 521 bp, Arabidopsis thaliana columbia
  unsure (1)..(521): unsure at all n locations
nnnnnnnnnnnnnnnnnnnnnnnnnnnnnnnnnnnnnnnnnnnnnnnnnnnnnnnnnnnnnnnnnnnnnnnnnnnnnnnnnnnccacgcgtccgcgcttcgattcaaagacaggttttttcttttgttccctgagagatcgaatcgaagaaatcgaaatttttgtacttcgataaaaatctgtagtctctatagaaatcggagaagatggacaacaaaaacgtcgtcgtttgcgacaacggcaccggttatgtaaaatgtggatttgctggagagaatttcccaacgtctgttttcccctgtgtcgtgggaaggccattgcttcggtatgaagaatcactcatggagcaacaagtcaaggatatagttgttggggagacttgctctgagctccggcatcaattggatataaattatcctgtccacaatggtattgtgcagaattgggatgatatggaacatgtttgggatcatgctttctataacgaattgaaaatcaatccatctgactgtaagatattg

SEQ ID NO: 92077 - DNA, 693 bp, Arabidopsis thaliana columbia
  unsure (1)..(693): unsure at all n locations
cnnnnnnnnnnnnnnnnnnnnnnnnnnnnnnnnnnnnnnnnnnnnnnnnnnnnnnnnnnnnnnnnnnnnnnnccacgcgtccggccacgcgtccgcccacgcgtccgcccacgcgtccgaaaactgttaattgattctgtctgaatattatttttattaacggaccaaacaaaaaaaaacttgcagaagaatgaaagaaaaagcaataaccctccaaaccaaattctaaagcctcaaatttggaatattccctttcttcttcattcccttttttttttttttaatttgccatttactcattattgatcttatgtgagacgacctcctctgtttctttcttcctcgtaacagtaaagggtcttcctttttaatctgaatttaccaatctgattcttctgttttttggtttttttatttggctatcttttaaactatttgaaatctaaactttgtttggttcttcacgatttttaatctccgatgaatcaaattcatcaaaagattcatcttttagatctggttacgtaattcgatttgctctgttttttgtttttcgttttgaattctttattaagtaaccaaatttggggaagaaggaggagtgtgggtgataatggatttggatgatttccgatcggttatggataacgcaggtgttgatgtttggacatttatccgtaccgggattcttgt

SEQ ID NO: 92078 - DNA, 1087 bp, Arabidopsis thaliana columbia
  unsure (1)..(1087): unsure at all n locations
cccacgcgtccgcccacgcgtccgcccacgcgtccgcccacgcgtccggggtcggatctctccctggaatctctactcaaagatggcagccgcaacccaatgggatctcctttccctccgatgtttctcagaatcattctgcattctggaggttgcgtgcaacaactaatgaggttgtttctaactccactccaatgactaatggtgggtatatgaacggaaaagcgaaaaccaatgttcctgaacccgccgagctctctgaatttatggctaaagtctctggtcttcttaagcttgtggattcaaaagacatagtggaacttgaactaaagcagctcgactgtgagatcgttattcgaaagaaggaagctttacagcaagctgtaccaccaggctccagtttatcactcaatgcctcctgtaatggcagacttttcaatgcctccagctcaaccagtggctcttcctccttctcctactcctacctcaacgcctgcaacagcaaaaccaacatccgccccatcctcgtctcatcctccactcaagagtcccatggctggtactttctatagatctcctggacccggtgaacccccttttgtaaaggttggagataaggtacagaagggtcaaattgtttgtattatcgaagctatgaaactgatgaacgagattgaggctgagaagtcaggaaccatcatggaactactggctgaagatggaaaaccagtcagcgttgacacgcctctttttgtcatcgcaccttgaaacgaagaaggatccttttagctgcttcaaaacatcttcaaagtctcggttaagctatagcaacgtgctaaaactcatcaagtaattatttcagcttaagttggttggtttcggatttctgcttgtcgcttcaataattgacccatcttttgggatttcacgtaacgtactacactttgctttttagttttctgcgaaactaaatgtattttgtagcctctcaaaaaaaaaaaaaaaaaaaaagnnnnnnnnnnnnnnnnnnnnnnnnnnnnnnnnnnnnnnnnnnnnnnnnnnnnnnnnnnnnnnnnnnnnnnnnnnn

SEQ ID NO: 92079 - DNA, 1358 bp, Arabidopsis thaliana columbia
  unsure (1)..(1358): unsure at all n locations
nnnnnnnnnnnnnnnnnnnnnnnnnnnnnnnnnnnnnnnnnnnnnnnnngtccgaaagaaaagaaaaatatagcaagtacactgcatttcaacactctcatatctctccttcctacttcctcggtttcatcgtccactgtctcaacaatggcgtcattgtcggtaccttgcgtcaagatctgtgctctgaacaggcgggtcggatctctccctggaatctctactcaaagatggcagccgcaacccaatgggatctcctttccctccgatgtttctcagaatcattctgcattctggaggttgcgtgcaacaactaatgaggttgtttctaactccactccaatgactaatggtgggtatatgaacggaaaagcgaaaaccaatgttcctgaacccgccgagctctctgaatttatggctaaagtctctggtcttcttaagcttgtggattcaaaagacatagtggaacttgaactaaagcagctcgactgtgagatcggtattcgaaagaagggaagctttacagcaagctgtaccaccaggctccagtttatcactcaatgcctcctgtaatggcaggcttttcaatgcctccagctcaaccagtggctcttcctccttctcctactcctacctcaacgcctgcaacagcaaaaccaacatccgccccatcctcgtctcatcctccactcaagagtcccatggctgggactttctatagatctcctggacccggtgaacccccttttgtaaagggtgggggggtggtgcagaagggtcaaattgtttgtattatcgaagctatgaaactgatgaacgagattgaggctgagaagtcaggaaccatcatggaactactggctgaagatggaaaaccagtcagcgttgacacgcctctttttgtcatcgcaccttgaaacgaagaaggatccttttagctgcttcaaaacatcttcaaagtctcggttaagctatagcaacgtgctaaaactcatcaagtaattatttcagcttaagttggttggtttcggatttctgcttgtcgcttcaataattgacccatcttttgggatttcacgtaacgtactacactttgctttttagttttctgcgaaactaatgtattttgtagccttctcaatcctggctctctgtcccatacttcagttttttacacaacgcactgcttataaaagcacagttaaaggtgtctaaaggagaatggtgtgtctttgactgaggcaacaaataaaacagtgaaaagttaaggttttacatgatgcattaccttagtaaaacatgtttccatgttttcatctatnnnnnnnnnnnnnnnnnnnnnnnnnnnnnnnnnnnng

SEQ ID NO: 92080 - DNA, 748 bp, Arabidopsis thaliana columbia
ggtcgagcacgcgtccgcaccacacgtccgcggacgcgtgggcggacgcgtggtcaaaaatggctctccgatctgtcaaaacgccgaccttgataacttcggtcgccgtcgtctcctcctccgttaccaacaagcctcactctatcagattctctcttaaaccaacgtcggcactcgtcgtccataaccatcagctatcgttctacggttcgaatctcaagctgaaaccaactaaattccgatgctcagcgtcggctcttacgccgcaacttaaagacacgctggagaaactggtgaattcggagaaagtggttctgtttatgaaaggaacgagagacttcccgatgtgtggattctccaacactgtggttcagattttgaagaatctgaatgttcctttcgaagatgtgaatattctggagaatgagatgttgaggcaaggacttaaagagtattcgaattggccgacgtttcctcagctttatatcggcggtgagtttttcggtggttgtgatattactcttgaggcgtttaagactggagaattgcaggaagaggtggagaaagctatgtgctcttgatcctgatttcaatacttggtttttgtgatgatggaatttgatcttatctatctatctatcacctgggaaaaaaaatgtgattttgatgtttcagagtttgtggttgtaacattaagagacatatattgtatgatggatttaggtatacaacagttggagttgcttgg

SEQ ID NO: 92081 - DNA, 1042 bp, Arabidopsis thaliana columbia
  unsure (1)..(1042): unsure at all n locations
gaaacagtgggcccacgttatgttgttgtaaaacttgaaactttggaagcaaactcatttttataacaaaaggaaatcttattttatacattacattaaagcaacatgaaagacaattcaagctggtcttgttcttgttcttggtcttcgtggaaaatatgtttgttgtctgttctctttctcaccgagacgatcaccgccgtgaagctgccgccaaaattgattattccggctgtaatcgctttcggagactccatcgtcgacacaggaatgaacaacaatgtcaaaaccgtggttaagtgtgattttcttccttatggtatcaatttccaaagcggagttgccacggggagattctgcgatggacgagtccctgccgatttgctagccgaagaactgggaataaaatcaattgtaccagcatacctagatccgaatctaaaatcgaaagatcttttaaccggtgtatcgtttgcgtccggaggttctggttatgatcctataacaccgaaacttgtggcagtaatatcattagaagatcaattgagttatttcgaggagtacatagagaaagtgaagaatatagttggggaagcaagaaaagacttcatagtagccaacagcttattcttattggtcgcaggcagcgacgacatagccaatacatactatactctacgtgcaagacctgaatacgacgtcgattcatacactactcttatgtctgactctgcctcagaatttgtgactaaactatatggatatggagtgagaagagtagctgtgtttggtgcaccaccaatttgggtgtgtaccatcacagagaaccgttaggnanggaggtatccttgaagagatttgtgctgntaattacancgaaggagccaaacctttttaattccaaagncctcccccaaaatttggatccgntgcggnaaaccctaccngggngccaacccgntcncattaatanccaagnnccccctttttgncancaccaanacccgnaaatnatggggttaagngcacnaagggccnnggg

SEQ ID NO: 92082 - DNA, 718 bp, Arabidopsis thaliana columbia
  unsure (1)..(718): unsure at all n locations
aanggggttggggctttttncaggggttttccattggggnaangnntggcncttnatncagnattttgncttcttnttttcaattacccctcggccattcattccgcgtgcctttcctcccccctcaacaaggaaggaggcacaaagtttctctgcaggggattgcctcccacccggttcacgagtgctggttcgatcaacaatactagaaaacctcccaaatactgcaaggaaagctaacaagacaggaagcttctcttttgcacctatcgtacacaacaacatcaacaacagaacaccaaataagagatcaaactctcctatgagattccctctcttacgttcaggatctctactgaaacgttcaagctccccaagccaaccaaagaaaccgcccttagcgttaccggaacctcaaagagctatatctgtgtcgagaaatacaaagatagtggagataaagcaatcttcatcgcgaaaagggaagaagattctgatgttcaaggcattgatgagtatgagcaagtcgagaaactaaaatctctccttgtatttgataaatgaaaagatttggacacaactaatgtgaaataagagagagagatgcttattttgttggaanaaaaaaatannannnanannaannaagggcggctgctctagaggatccaagcttacgtacgcgtgcatggtacgtcatagtaatnctatagttgtc

SEQ ID NO: 92083 - DNA, 412 bp, Arabidopsis thaliana columbia
acaaaacccatcaaagatcttttttttttctcaattattgtgataatgaattcgatgtttagtgccttcgacgccatgtgtgcagagattatgggaaagaaagtcaccgctgcttcttatgtctaccgctctgaacgcaattctgcttcttcttcttcttccgtcggcggtcaaaacgcgtctttgtctctcaagaaagatgaaaaagcttcaaagaacatggatttaccaacgaagacaccgaggtttgctcttgagctcgatggtcttcattgcttcgagactatagttcgttcttgatcaatatcaagattaccaatttttgctgagtttttttttctttttcttgttttgttctgtttcgattccttttatgtaaatacaattttggaagatttaatttcttgattag

SEQ ID NO: 92084 - DNA, 634 bp, Arabidopsis thaliana columbia
  unsure (1)..(634): unsure at all n locations
taaacttaaaccttgttggtcaatttttnaatctaatgaagcggtatcgtcaaagggttacgttacattctccttaacaaatggtcctgaataccatgtttntaanattactgatgccgtgatggtggcgaagatcttggagcaactcttgtgcttcctgacattagaggaagcaaacctggtgatgaaatgaaatttgaagatatctatgatgtggataaactcattaaaaccttggaaagtgtcgtcaaagttgtaagaaaattgccgagccacgtatctctaagagatattgccattgtcaaagttcctacccgagttgcagaagattacatcaaggaacatattgatcccatcttcaaatcaaaagggaacataagggttacaacctatttcccttctgtgaatttgaggaaatcttcgcagggtgctgaaaccgaccctgtctcttgtttggcaatgtttggttccttggagttgcaacctgcagtgaatgaattggttgagtcgatgattcagcggttgaagacacatagcaagaaatccggtggccgtttcatagccatagacttgagggttgagatacttgaaaagaaaaactgccatgaaacaggtgcagtggggtccaaaacat

SEQ ID NO: 92085 - DNA, 548 bp, Arabidopsis thaliana columbia
  unsure (1)..(548): unsure at all n locations
ctgaantncctgggtcngcccactgtgtcggcacaacctccggcgaaaatggacgtgcgtgaatcaatctcactgcaaaaccaagtctccatgaatctcgcaaaacacgtaatcaccaccgtctctcaaaactccaacgtcatcttctcaccggcttcaatcaacgtcgtactcagtataatcgccgctggatccgccggcgctaccaaagatcagatcctctcgtttctcaaattctcttccactgatcaacttaattcattctcttccgaaatcgtctccgctgttctcgctgacggtagtgctaacggtggtcctaagctctcggtggctaatggcgcctggttcgataagtctctctcctttaaaccttcctttaaacagctcttggaagattcgtataaagctgcttcgaatcaagctgatttttaatcgaaggctttggaggtgatttcctgaaggggaatttattgggctgnaaagggggcaaaatgggntaatactnngggttnttccngaagggncanctggnagnttgccaactnntc

SEQ ID NO: 92086 - DNA, 430 bp, Arabidopsis thaliana columbia
agaccgttaagagtagttgatggttctaacaatggaagcgctaagtactttgattacttattctacattgattttgaagcctccatggctgatacacgtgctcagcacgctcttggccatctacaggaattcgcaagtttcatccgtatcctcgggtgttatccaatggatctagtcagataaccgagcaactcttcaattgatttcatgttaccataccgtgaagaacatgtgaatatacccaaacagaagaacagggtttgtggctttggtatacttcaagaatcttctttcaccattttctcattttagaactttagcttcaaactcttcattgttgagacagatacaattgatgtagcattttgttaagaatatgttctgtacattaaacaagttttttcagttaatatcaatgaataaggttgtt

SEQ ID NO: 92087 - DNA, 473 bp, Arabidopsis thaliana columbia
  unsure (1)..(473): unsure at all n locations
cttctttctctctctctcatcgattaacaaaatcgaatcgaaaaaaaaaattagggttcttctctcttccgtctctcgttatcgatttcgttttgatttcgcgccacaaagaagaagtttcattaggcgcgaatctgaaacctaggttcgatttagttctgtccgaattactgtccgttgtcttgtccgttagtcgattcgatctgagaaagaaagaaagagaagaagaaaaaacgatgtcacgatatttcacatccccaccgcctgtgtatgcgaggaactgggcgaacggtcaaaacttggtcgaatggactaaggtcgaaagaccaatagttgattctaaaaagctgcatcggaaagggaggagggggaaaagganggaaaggaattaaggaagngaggattccnttnaccanaggttttcccacccagggnagtnttatttgatnccgccagntttggaattttttttc

SEQ ID NO: 92088 - DNA, 911 bp, Arabidopsis thaliana columbia
  unsure (1)..(911): unsure at all n locations
gttctnggtggtgtcgacacatcggttaacgcatccnaattcgccatggcagagattgtgagcagaccggaagtgttaaacaagatccgactagaacttgaccaagttgttggcaaagacaacatcgttgaggaatcacatttacctaagcttccttacctacaagcggttatgaaagagactcttaggcttcaccctacgcttcctcttcttgttcctcacagaaacagcgaaacctcggtggttgcgggatacactgtgcctaaagactccaagattttcatcaacgtttgggcgattcatagagatcctaagaattgggatgaaccaaacgagttcaaacctgagaggtttttggagaattcgcttgatttcaatggaggtgattttaagtacttgccttttgggtcaggaaggaggatttgtgcggcgattaacatggctgagagacttgttctgttcaacattgcttcacttcttcactcttttgattggaaagcacctcaaggacagaagtttgaggttgaagagaagtttggtcttgttcttaagttgaagtctccacttgtggctattcctgttccaaggttgtccgatccaaaactctatacagcttaagtaagtaagaaggaaatttggtttgagcttatgagaggaagttgaattgagttttcttgtttaaagtttatttttctttattcgtgtttggagtttgatgctttgtaaaaaaagatgtgtcaagttaaatttaattttcttatatataataaaataaagttttagtcacaaaaaaaaaaaaaaaagggcggccgctctagaggatccaagcttacgtacgcgtgcatgcgacgtcatagtattctatagtgtannnnnnnnnnnnnnnnnnnnnnnnnnnnnnnggcaaaatc

SEQ ID NO: 92089 - DNA, 417 bp, Arabidopsis thaliana columbia
agattttccgctctctacgactcactattagggaaagctggtacgcctgcaggtaccggtccggaattcccgggtcgacccacgcgtccgcggacgcgtgggtgttttttctctcgtcgtcgtttggtcgtgtcctaagacaagaaccggcgaacgaagaacaaactttttgaatctaacatccgaaagaaagagagaaaatgtcgtttacaggaacattggataaatgcaaggcctgtgacaaaaccgtgtacgtgatggatttgttaacattagagggtaatacttatcacaaatcatgtttcagatgcacccattgcaaaggcactctcgtgataagcaattactcatcaatggatggagttctttactgtaagccacacttcgaacagcttttcaaagaatctggcaattaca

SEQ ID NO: 92090 - DNA, 609 bp, Arabidopsis thaliana columbia
  unsure (1)..(609): unsure at all n locations
nnnnnnnnnnnnnnnnnnnnnnnnnnnnnnnnnnnnnnnnnnnnnnnnnnnnnnnnnnnnnnnnnnnnnnnnnnnnnnnnnnnnnnnnnnnnnnnaccacaaattctcatttcttcaagaatttttgataaataagacagagaacttgagagatgaaaagaaaaaaacacaaaacctggtgttttttctctcgtcgtcgtttggtcgtgtcctaagacaagaaccggcgaacgaagaacaaactttttgaatctaacatccgaaagaaagagagaaaatgtcgtttacaggaacattggataaatgcaaggcctgtgacaaaaccgtgtacgtgatggatttgttaacattagagggtaatacttatcacaaatcatgtttcagatgcaccccattgcaaaggcactctcgtgggtatttctcttttcttcttcttcctccattgttactctgtttttcgacaatgctccattgttttaaaagaccacatcttttcttaacacagttaagcattactcaccatgggtggngtccttacngnaagccaacttcgaaagctttccaagatnggnattnagcaganttcagggggaanccggagccatgtnt

SEQ ID NO: 92091 - DNA, 557 bp, Arabidopsis thaliana columbia
  unsure (1)..(557): unsure at all n locations
ttataacaagcgaatcaatcacacgcttcttccttcctcttccatcttcttcatatctcccttagtcacctctactctactctgcaggcaaaaatagttatggcgacttcttcgatcactatcccgaccattagaactccgattcatcgatcaaaatttctaggccaaacacatcaattttcaactgtaaaccggtcggttttcccgcctccaaaacagcagtcaaaactgtatcaagtaaaggccatgggtaaattcaatctatgggaagtgatgggaggaagaggattatgcaacggagagaaaggtattgagaaggagctccagaggaacattgaagacgagcaagagacatcaaaggctgagaacaacgagacagagagagagagcgatgacagtaacttgtcttttaaagtacctgaagatggtttcgagaaagagatgatgggtctcacaggaggatttcccggtggcgaaaagggtttaaaacggttttggaaaaatccccccctttttnncntccnccccttaaancangggggggttntccgggtttt

SEQ ID NO: 92092 - DNA, 533 bp, Arabidopsis thaliana columbia
  unsure (1)..(533): unsure at all n locations
nnnnnnnnnnnnnnnnnnnnnnnnnnnnnnnnnnnncaattcatttgatattccttctaaaaatggggcaacaacaatcgcagtccacggatgagatgctgtttcaagaagtgagtaacaacaacgtcgaaggtatcaaatcacttcaccatgaaggagcaggactcgagggggtggataaattagggagaacaccattaatcttagcttgtacgaacgacgatctatatgatgtagcaaaaactctgcttgagttgggctccaatgtcaatgcttatcgttctggttgcaatggtgggactcctctgcaccatgctgcaaaaagaggtctcgtacacacggttaagttacttctgtctcacggtgcaaatccattggttcttgatgatgatgttaagacagctctcgaggttgctagagatgaaggttacagtaatgtcgtacgcgcaatcgagagtcatatctgcttggtctctggttggatgcgtgagtattctggcttcagcttgctaatttatttgctcctcaacttg

SEQ ID NO: 92093 - DNA, 504 bp, Arabidopsis thaliana columbia
gcagtgacacgaaccacagcgggaaccctacacaacgaagaaccaggacgaaaaaagaactagcagggagcacagcttaagaactagacaacggggtttctgttgccacgtccagatttcaaacgcctcttctgccttcctccatatagactggtgggtgaaaactgtgggcgtatttcacaagcactccatatccatgataactatgctatggtttcaagcagtagagtcaacctctgttagacagaagaagctggagaagaagataaatggtgatcttagtttatatgaagaagcgtctatatgaaaatctcaagtaagtagccaactaagtgttttgatggattgttagacccatgattttgcagccatagattttttttcgtttttttttccattcaactatgtttttgattactataaagctaaatgctaatgtaagatcaaagctctagttacaattaaaggatctattaatcaagattcctcagggaagctctagtt

SEQ ID NO: 92094 - DNA, 462 bp, Arabidopsis thaliana columbia
ggcaattattagggacttgctgtcacacacacttttgttctcggctcacctgctgaaggcagttaactttgttgcagaacttgattgcattttatcgttggcttgtgtagcccatcagaataactacgtaaggcctgtcctgacagtagaatcattgcttgatattcgaaatggaaggcatgttttgcaggaaatggctgtagatacttttatcccaaacgacactgaaatcaatgataatggacgaattcatataattaccgggcctaattactcaggaaagagcatatatgtaaagcaggtggcgttaattgttttcctatcccatattggaagctttgtaccagcagatgcagcaactgttggtttaactgacaggatcttttgtgcaatgggaagcaagttcatgaccgcggagcaatctacattcatgatagatctgcatcaagtaggaatgatgct

SEQ ID NO: 92095 - DNA, 464 bp, Arabidopsis thaliana columbia
ggaagcttttcgcttccaacgttctcatctctgggatgcagggccttggtgttgagattgccaagaatattattctagctggtgtgaagtcagtgacccttcacgatgaaaatgtggttgagctatgggacctatctagtaactttgttttcacggaggaggacattggtaagaatagagcacttgcttctgttcacaagttgcaagaactcaacaatgctgtggctggctcaactttgactggggaagttaaccaaggagcaagctttctgatttccaggttgtggtatttgtggatatctcttttgagaaagcgacagagattgatgattattgtcacagtcatcagcctcctattgcattcatcaaggctgatgttagggggctgtttgggtctttgttttgtgattttggacctcatttactgtcttgatgttgaggggaggaacctcactctggcatca

SEQ ID NO: 92096 - DNA, 752 bp, Arabidopsis thaliana columbia
  unsure (1)..(752): unsure at all n locations
gcaaaaggttggagaaggaagatatgtcactggtcgactacgacgattcttcatccgacgacgatgttttagccgccgaggagaaacctctcccacagacgcaaaagcgtctggtttctccagctcaatcttttcctccaaagaggcagagatttgagcaggacgagagtgttgagaagctaccagatgctctgcttcttctggagtcaccgacactcgctcaggtgactggcggagaccatgcttccgttgttgcagctgcaatggctgagagtgcattaaggaagagagacttgagtgggaatgcttcttctcttcctcgtcgtcccaagctaccaagaggaaatttgcctcattcaaagaattatcctgaaactttgggtaatgtgcttgtgcctcctcagctcaagggaagaagcaatgttgctaccaaggatatgagctggctttttgtaaaaaaacggcaagagtcctcccaggcaaaatctccagatcaggaatagtttggtcaaatatgaatgcctttatttctcggactaatgacgtaacattttgagcaccataatagtggtattttagcaataataccaaagcatgcgactctttttgatatgtcagtaaattggtcctatttatactaaagatcccaaaagagttccttataaaaaaaaaaaaaaagnnnnnnnnnnnnnnnnnnnnnnnnnnnnnnnnnnnnnnnnnnnnnnnnnnnnnnnnnnnnnnnnnntgtccta

SEQ ID NO: 92097 - DNA, 376 bp, Arabidopsis thaliana columbia
  unsure (1)..(376): unsure at all n locations
nnnnnnnnnnnnnnnnnnnnnnnnnnnnnnnnnnnnnnnnnnnnnnnnnnnnnnnnnnnnnnnnnnnnnnnnccacgcgtccgaagcaatcgccgcaagtatcagcagaggaaagctagtttccggcggtgaatccgtcgctcacggcggagcaaccaccaacaccacaaccctagccgttcctgcattcgcgaatccaaggtggatcgaaatcaaaactctctcgaaacgatcaatgctcaattcacgaagacaaccagagctattcggaatcagaatcgcctctgttgttatcaccggattcattctcgccaccgtgttctggcgattagataattcgcctaaaggagttcaagagcggttagggttcttcgcc

SEQ ID NO: 92098 - DNA, 602 bp, Arabidopsis thaliana columbia
  unsure (1)..(602): unsure at all n locations
cnnnnnnnnnnnnnnnnnnnnnnnnnnnnnnnnnnnnnnnnnnnnnnnnnnnnnnnnnnnnnnnnnnnnnnnnccacgcgtccgcggacgcgtgggcggacgcgtgggcaaatatctccgttgccggcgaaatcactttgctcactctctcaactttgaaaggagactcaagtttctcactttctctcttccatggctttctcatactctttaacttctccgtcaccaaattcgactctctcctattccagtacccatcaatttctcaacccgtcttcttcgtttcccgtctcgttatcagtctcatctccgaagaatacccgccatcttcgtctcctcatcacctccgctttgaatccacagacgggacagccgacgaagaaggcctccaccggtagtgataagagtagtacgaacaagaaacgtaagaaaaaggggaaaattgcgaaacctgtggaggattgggaattgagagattcagaagacgcttttgaggaagatgatgatgccgattattcttcttcgtcgagttctctagcaacttttaactctcctcctaccatgaccaaaccacctgctgggtttgtgattaatgaaactgg

SEQ ID NO: 92099 - DNA, 675 bp, Arabidopsis thaliana columbia
  unsure (1)..(675): unsure at all n locations
aatacgactcactttagggaaagctggtccgcctgcaggtaccggtccggaattcacgggtggacccacgcgttcgctagaccgaggtcgaacaagaaacacatttgtccgaatttcatcttgagagctgctagagcccttcaagaaatcgagagagagcttctttcccccattttctgcgattcacgatatttcttcttctataggacaacgttttttttctcattgaggctaacagagagatggctgatgatcagagttcaagtactgaccgtatcgcgaaacctgaaagtttaaactcagatcgaggatccaatcaatctattgaatcttgtggagagagttctagagctcagggttccacaagcctgtctactactaaatctatggatggtaagaaaacctaggaagaagagacgacggaacaacgcgatgttgatgatgaagaggaaccgctcatccaatcggttgaatgtcgtatatgccaagaggaggattcccttaaagaacctcgagtcccccttgtccttgtagtggcagttttaaggtattgctcatcgtaagttttgttaacgttggtttaatgggaaggcgggacctttgaatttgcncagttttttaacctggttnaccgtcctctcttcnccgttgtgaaccatttnantggtaagttgg

SEQ ID NO: 92100 - DNA, 766 bp, Arabidopsis thaliana columbia
cactatagggaaagctggtacgcctgcaggtaccggtccggaattcccgggtcgacccacgcgtccgagctgtttgtgcccttcaagaaatcgaaagagagcttctttcccccattttctgcgattcacgatatttcttcttctataggacaacgtttttttacacattgaggctaaaagagagatggctgatgatcagagttcaagtactgaccgtctcgtgaaacctgaaagtttaaactcagatagaggatccaatcaatctattgaatcttctggagagagttctagagctcagggttccacaagcctgtctactactaaatctatggatggtaagaaaaccgaggaagaagagacaacggaacaacgcgatgttgatgatgaagaggaaccgctcatccaatcggttgaatgtcgtatatgccaagaggaggattccgttaagaacctcgagtccccttgttcttgtagtggcagtttgaagtatgctcatcgtaagtgtgttcaacgttggtgtaatgagaaaggcgagaacctgtgaaatatgccacaagtcttatcaacctggatacaccgctcctcctcctcctcccgctgatgataccattattgatatcggtgaagattgggggcatggtgttcacttagatttgaatgacccacgcattttggcaatggcggctgcagaacgccatttctttgatgcggactatgacgaatacgctgattctaactctagcggagctgcattctgtcgctctgc

SEQ ID NO: 92101 - DNA, 507 bp, Arabidopsis thaliana columbia
  unsure (1)..(507): unsure at all n locations
antcgncggatccggcgcccaccgccggacggatttttggggttcggaactcctgatnggnttttngggttcttccccgaagcgacncgggggccaacagtgattgacaatgacgctacctccaggtctttactccggcaccagctctcttgctctggtggctcgtgcttcggcttttgggttgggtctcgtctatgggaacatgaagctcaaggtccttaagatcaaatcgatgtcacagaagaaggttgaagccaccgctcatcattaaaccactcttctttctttacaataagatgccaaaagctgggggtgatgtctccccggttagtttgatttcttctttcatgattcatcctttagcataagaaggaacaaatgtgtttttgaaaagcatattatacggttttaagacctttttggagccataattgccattggcttaaaacccgagtcaagaacatctttccatttgttgtcatccaataacaccgttcacattcacat

SEQ ID NO: 92102 - DNA, 678 bp, Arabidopsis thaliana columbia
gaacgatttcgctgagattggttggagattcaggactgggatttcgaaactatctgggaacttacctgtgtctgagttcacaaagatcgcttcgaatttcttacaattgagttcagaagatgtggatccgaaagattacgacgtaatcggagttacagaggaattagttgcgtttgtgaaggatcttgcgatgcatcctgagacttggttggattttcctttacctgatgacgacgatagctttgatgactttgaattggccgatgctcaatacgagcacgctttacctgtagaaaggctagcaccgagcttggcttctttgaggattgagctttgccctgaatatatgactgagaattgcttctggaggatttactttgttcttgtgcatcctaaactcagtaaagaccatgccttgcttctctccactcctcaggtactcgaagcaagatcaatgttatctcaggaactacagaaacaaaacaaattacccgtagaagcagggagtattgaagctaatactgtcattgtggaacctcttactgtgcctccttatgaaccttcaccagaaacagcagctgttaaaatcgtaaatccagtcgagtcatctgacgttgaaacagacaagcaccctattgagagcaaagagatacaaattgttgacaaatctgtcattga

SEQ ID NO: 92103 - DNA, 861 bp, Arabidopsis thaliana columbia
  unsure (1)..(861): unsure at all n locations
tacgcctgcaggtaccggtccggaattcccgggtcgtctcactctctccagagcaacaatggctgcgactgcttcttctcttacaatcgcgtcgtcattctccgaaccacggactcagatccattcctcgagacgtttgaatctccctcttcaatattcaatcccgtacaaggtgttacggagtaggagtagaagattaggactcgtcgtcagttctgtttcagctcccaacgttgagctccgtactggacctgatgatctcatttctaccctcctctctaaggttgcgaatagtgatggaggtgtgacgctaagccctgagcagcacaaggaggtggcacaagtggccggagagcttcaaaagtactgtgtcaaggagcctgtcaaaaatcctctcatttttggagattgggaagtggtgtactgttctagaccaacctctcctggtggaggctacagaagcgtgataggccgtctcttcttcaaaacgaaagagatgatacaagccatcgatgctcctgatatcgttaggaacaaagtttccattaatgcttttggttttctagacggagacgtctccttgacagggaagctgtaagcgttggacagtgagtgggtgcaggtnatattttgagcctcccggaaatcaaaggtttggntcttttggagttcaaattacggggttcggaaagcgaagttnaagnttccggttcacatancgttgatgngaaacttaggtttgggtttgggtntaaaggntccattnntccgcnttagaaggcgncaaaattnancggtttcccctgggnantacccntgaanccctccggaaaaagggccacctttngggccncgggnttt

SEQ ID NO: 92104 - DNA, 442 bp, Arabidopsis thaliana columbia
gcgctgtcctggctattgagtccattcataagcacaactatattcacagaagtatcaatcctgattatctgctacttgacaaagacggccacatgaaattgtcagattttggattatgtaaaccattagactgtagtaatcttcaagagaaagacttcacagttgcaagaaacgttagtggggctttacaaagtgatggtcgccctgtggcgacaagacgcacccaacaagagcaattactaaactggcagagaaatagaaggatgcttgcttattccacagttggcactcctgactatattgccccagaagttctgttgaaaaaaggatatggaatggaatgtgattggtggtctcttggcgccattatgtatgaaatgcttgtggggtttccgcccttttagtcagatgacccaatgacaacttgtaggaagatagtaaa

SEQ ID NO: 92105 - DNA, 484 bp, Arabidopsis thaliana columbia
cggacgcgtgggctttcttcttcttcatttcctctttctttcttcttccttctccattttttctctaatcgttggacaaaaaagattgagcctttttctgggttttattttctataaaggaatcgaaagaagcaaggacagattttaaaaaaaaaatcttgggttttcaagaaaaagtagagacattttaaagaatcaatagatttgtgggggtgaagtaaggaacatggaggaaacaatggcagctaggtattggtgtcacatgtgttcacaaatggtgaatccagtaatggaatctgagatcaaatgtcccttttgccaaagcggattcatcgaagaaatgagcggtaatggcggtggaggtggtggcagaggcataagagatgttcaagattcagaaaccgattttggaacagaccgtgcattgtctctatgggcaccaatcttgcttggaatgatgagtagtcctcgcagacgaagaagg

SEQ ID NO: 92106 - DNA, 610 bp, Arabidopsis thaliana columbia
  unsure (1)..(610): unsure at all n locations
accggaatggaccgggtccgagcccacgcccgatccgaatctcttctttctttttttcaaccgccgcgataattttctcgtatctcgattatacagaatggcgaagggaaccccagttcgtgttcttgttacccggagctgcaggacacaatcggatactgctcttgttcctatgattgcaagggggataatgcttggtgctgatcagcctgtgatcctccacatgcttgacatcccttttgcagcagaagctttgaacggtgtgaagatggaattggtcgatgctgctttccctcttctaaagggtgtggtggctacaactgatgccgttgaagcgtgtaccggtgttaatgttgctgtcatggttggtggtttcccgaggaaggaaggaatggagaggaaggatgttatgtccaagaacggttccatttacaagtctcaaagcttctgccttggagcaagcatgcctgcaccaaactgcaaggttctggtttgttgcaaaccctgcaacaccaattcattgatccttnaggantttnaccatngtcccagngagnccattnttnttgccaggttnccnaaaaggattggcaanttttanggtagggnc

SEQ ID NO: 92107 - DNA, 445 bp, Arabidopsis thaliana columbia
acagtataactgtataaggtctcattttcgtgtgctctcgtcgcgattactctctttgagctctctctctctcttctaacatcggtcttgtattggtgcttattggatatctccggcgaaggaaacgagtttcgcggttagatttttctttatcgcttaccggcgaggatgatcgtttcttcggtaaggtcgattaatcggttctgttttcgaagatgttgttgttagagttagatccgcatggttttggtgatcgttttggatcgaagacgtggttccacagacgcaaaaaatgccgtcgtctcttgctttgagatttggcttctgaaatctttcctctttcgttctcgttgaatcctaatttttgctttggcttttttagaaatttttggtctttctaatcctggggataggttacagtctccgattgtaaatagaaatttgc

SEQ ID NO: 92108 - DNA, 657 bp, Arabidopsis thaliana columbia
  unsure (1)..(657): unsure at all n locations
nnnnnnnnnnnnnnnnnnnnnnngagaagaagaaatagaaatgagagctctcttgtgctcacaccgtttactaccattatcatctctctcaagaacaaccgtcaaaaccaaatctcacaatccaaaaaccctatatcctaacaacaaaccaagatgggaatccaagctccacgctggacctaaagggtttcaatcttctagaacctctgaaaaacccggccggccagacccggacccggaagacgatcccccgatacctcaagaagtgttcgagaggatgatggggaggattgtggtgtctgtgggaacaccactgggcttgggagtggcgatcttgaaagtactcgaagttttgaaggatagaaacgtctgggacgtgcctttgtgggttccatacttgaccacactcgtgacctttggttcgtcggctcttgggattgcgtacggaagcttgtccacaaacctggacccggccaagactaactctctttttgggctcaaagaggcaaaggggaattgggtaaaaatttggaaaagggcataatgggaatggttaatggaaaaaactttgggggcggaatttttnnanccngggggccccantttttnaggggnncnccggggggngnccactttntccccttnganggggaatnt

SEQ ID NO: 92109 - DNA, 991 bp, Arabidopsis thaliana columbia
  unsure (1)..(991): unsure at all n locations
nnnnnnnnnnnnnnnnnnnnnnnnnnnnnnnnnnnnnnnnnnnnnnnnnnnnnnnnnnnnnnnnnnnnnnnnnnnnnnnnnnnccacgcgtccgccttgagcttttagaggcttgtgctatgaattgcgagaaggttttctctgaagttgcttctgagaaagttcttgatgagatggtttggttaatcaagaacggagaagctgattccgagaacagaaagcgagcttttcagcttattagagcttggggacaatcccaagatcttacttatcttcctgttttccaccagacttatatgagcttggaaggcgaaaatggattacacgctcgaggtgaagagaattcaatgccgggacaaagttctctggagtctcttatgcaacggcctgttccagtgcctccacctggtagctatccggttcctaatcaagaacaggctcttggggacgatgatggtcttgactataactttgggaacttatcgataaaggataagatagaacagattgagattacacggaacagcctcgaattgctctctagcatgttgaatactgaaggaaagccaaatcacacagaggacgatctaacggttagcctgatggagaaatgcaagcaatcgcagccattgattcaaatgatcatagagagtacaacagacgacgagggagtcctgttcgaggctctgcatctgaatgatgagctccaacaagttttatctagttacaagaagcctgatgaaaccgataagaaagcctccattgtggaacaagaatcatcaggaagcaaagatactgggtccgaaccaacagaacatgaagaacaagagcctgtaaagaaaacgggtgctgatgatgacaaaaacattcagaagcatcaagatcctccaccaaaaccgtcaaaaaaaaaaaaaaagnnnnnnnnnnnnnnnnnnnnnnnnnnnnnnnnnnnnnnnnnnnnnnnnnnnnnnnnnnnnnnnnnnnnnnnnnn

SEQ ID NO: 92110 - DNA, 453 bp, Arabidopsis thaliana columbia
gagtttagagagaaagaagcacgaaaaccaaatcaatggcggtttcagtttcaatcctcaccgtcgtcactgctcttcacctccttgctttcgtcttcgccttcggtgccgagcgtcgccgtagcaccgctgtgccggttccggatcagtacgatgagaagactatttgtaagtacggaactgaggcgtcgacagtgtacggtatgtcggcgtttgggttgcttcttgttagccaagcggtggttaacggtgttactaagtgtctctgttttggaaagggtcttgttactggtacttcttacactgtctgggctattgtcttcttcgttgtttcttgggtaagctttttaggagctgaggcgtgcttgttgggtggatcagcgaggaacgcgtaccacactaaaagtgaaggcatttacaaagggaaagagctttcgtgtgccgcctacccgt

SEQ ID NO: 92111 - DNA, 1094 bp, Arabidopsis thaliana columbia
  unsure (1)..(1094): unsure at all n locations
nnnnnnnnnnnnnnnnnnnnnnnnnnnnnnnagaagaacatacagtatatcttatccactctcttcctcatccacgcggcaaaccacgcgtccgctttagaaaaatgtcgtcagcttattgttcctccgccgtggctgtatccgccgcagccaccgcttcctccgccgctacctttaatccattactctcctcccactccaattcccaactcttctatcgctttacaccaaaatccttcaaactcgttgccaattgccctaatccactaatcctccactcaaatatccgccgccaccgcttcttctgcgccgccgaaaccgaagctagttccgccgatgatgaaatccaggcatcagtagaagaagaagaagaggtagaagaagaaggagatgaaggtgaagaagaagtagaggaagaaaaacagacgacgcaagcgagtggtgaagaagggaggctttacgttgggaatttaccttacacaatcacttcttctgagctctctcagatttttggagaagctggaactgtcgtcgatgttcagattgtttatgataaagttactgatagaagcagaggatttggatttgtaacaatgggaagcattgaagaagctaaagaagcgatgcagatgtttaacagctctcaaattggtggtagaacggtgaaagtgaacttcccggaggtgccgagaggcggtgagaacgaagtaatgagaaccaaaatccgtgataataaccggagttatgttgatagtcctcataaggtatatgcaggaaaccttggttggaatctaacctcacaaggtttaaaggatgcatttggtgatcaacctggtgtgcttggtgctaaagttatctatgaaagaaatactgggaggtctagggggtttggtttcatctcgttcgagtcagcggaaaatgttcagtctgctttggctacaatgaatggcgtggaagttgaaggacgagcgctgaggctaaatttggcttcagagagagagaaacccactgtgtctcctccttccgtagaagaaggagaaaccgaggaggccagtctagagagtaacgaggtgctttcgaatgttagtgcatga

SEQ ID NO: 92112 - DNA, 1217 bp, Arabidopsis thaliana columbia
ttcgccgtaccggtccggaattcccgggtcgacccacgcgtccgcgttatccatgcggacttgaaaaattatccttaggagatttttcctgacctatcctcgcgtcgcgccttcttgtcttctctctcaatccagcatattcctacgcaaatcccttatcgttttcatgtttgtcctggtttaaatcttcaatctcctacccggtcttttcatcctccgatggcattccttgttcgttcgccggagatacccaccgtctcggcgagaatcttctccgatgcgaattcgagtgttattagtcatgtgtttatgaggaggaaggctacggtttcggcgattgacgccagagatttgcctggtgttaagaatccgaaatcgagattgtactggcaattctcagctccggtgaaagaagactacaagattagcagagaggaggaagaagaagaagaagaagataagcagagttactacgtgaatatgggtcacgccgttcgtagtatcagagaagagtttcctttgtttgttctacaaagagcttaatttttgacatttacagggatgatattgttttcaaagaccctatgaacactttcatgggaattggtaactacaaatccataatttggggccttacggttccatggaaggttcttcttcagagccctaatgtgtgggcattgttagtgtttggcaacccacagagaacactctgatgatacgatggactgttcatggaattcctcgtggtccgtgggagactcgtggtcgattcgatggtacttctgagtataaattcgataagaatggcaagatttatgagcataaagtcgataacatagccattaattcgcctccaaagtttcaaatgctcactgttcaagagcttgttgaagccattagctgcccttcgactcccaagcccgacctactttgagttcggagattgattcatcatcatcgtctgaaacatcatgctggtgttatgtatactagtagtcttttgtgtggttataaatagagtggtactgtaatatagatgaagaaggaacgatttaaaataaacccaatagcatgaatacattacacgctttttttgcgtataataatcaataaaacgcgctatatgtaaaaaaaaaaaaaaagggcggccgctctagaggatccaagcttacgtacgcgtgcatgcgacgtcaagatactctataggtcaccta

SEQ ID NO: 92113 - DNA, 566 bp, Arabidopsis thaliana columbia
  unsure (1)..(566): unsure at all n locations
atgattctccaagctccctacgactcactatanggaaagctggcacgcctgcaggtaccggtccggaattcccgggtcgacccacgcgtgcggtagatcggcagagaaaggcggtgcgatttgttattacaagcgcagggcttgttggatccgatggtccagtgcagtgtggagcttttgacatagctttcatgtcatccttaccaaacatgatagccatggctccagccgatgaggatgagcttgtaaatatggttgcaactgctgcttatgtcactgaccgcccagtatgtttccggttccctagaggctccatcgtcaacatgaattatcttgtccccactggattaccaattgaaatcggaagaggaagagttctcgtagaaggtcaagatgtggctttacttggttatggagcgatggttcagaattgtcttcatgctcactcgcttctctcgaaactcggtttgaacgtgactgtagctgatgcaagattttgcaaacccctagacatcaagcttgtgcgtgatctttgtcagaaccacaaattccttatcactgtcgaa

SEQ ID NO: 92114 - DNA, 442 bp, Arabidopsis thaliana columbia
agacacgaagacacagaacaagtagccactctctcatctcaccacccctctttctctctacttgctctctatctctctctgtgtctctccactttctcttcttcttcttcttcttcttcttcttgctctagagatctctctatctccattcttttctctctctgtttctagaaagacaacagtgacattttgtctgaacgcatctatggctgctctggtgctttcacttctccttctatccttggctggacattctagtgcctcatggtgtgtgtgtaagacagggctgagtgatacagtgctacaggcaaccctagactatgcttgtggaaatgggggcacattggaatcctacctaacccaaacaatcttgcttcaaccctgacaatgttaggtctcattgcaactatgcagtcaatagcttcttccaaaagaagggtca

SEQ ID NO: 92115 - DNA, 534 bp, Arabidopsis thaliana columbia
atgatctaccaagcatcaatacgactcaccttagggaaagctcgtacgcctgcaggtaccggtccggaattcccgggtcgacccacgcgtccggctgccacgaattggcgtattttagattgatacgtcaaagctcctcctcgcgcacgttagctaaaggaatgtcttgtactctttttgttgttgttgttgattttttgaacaaagaaagaaactaatcaaaaagacgaagaggaagaagaagctcaccgtttctatctctcattttaaccactgatcttcgccgattgcgtcttgcttctcgtcgtgtgcttccgatctctctctggattttctcaatttcgtacggagtaggtgaattgtgtacaaaggagtttagttgatcattgttttggacatgtgggatgatgatgcgtactgttgcgttaccattgtcccatgatctgaatgttcataagatccatgaagcttctggattccataatagtgctgctggtaaaaatcgtgtgtatctgactcggactggtctttcat

SEQ ID NO: 92116 - DNA, 602 bp, Arabidopsis thaliana columbia
  unsure (1)..(602): unsure at all n locations
atgatctnnnnnnnnnnnnnnnnnnnnnnnnnnnnnnnnnnnnnnnnnnnnnnnnnnnnnnnnnnnnnnnnnnnnnnnnnnnccacgcgtccgtacggctgcgagagacgacagaaggggatttctgaaattaagtgaatctgaaggtgaaagcaaagccggaggaagaaataagaatcacagaggtaaaattgtgatggagctcgaagatccaacaatggcagattccacgattaagctaacagtcaaattcggaggcaaatcaataccactttcggtatcaccagattgtacagtcaaagatcttaagtctcagttacaaccaatcaccaacgttcttcctcgtggccagaagctcatcttcaaaggttttggttgaaacgtcgactttgaaacaatctgatgtgggaagtggagctaaactcatgttaatggcttctcaaggtctgcatcaaggggaaggtccaatacttaaggaagctagtataaggccaatctctagaactgttgtatctgataaagtagatcagagaaagcctagtgtacttgtagacaagaaccgcactgatcgatggaaagccacaggagttattgctttagct

SEQ ID NO: 92117 - DNA, 793 bp, Arabidopsis thaliana columbia
  unsure (1)..(793): unsure at all n locations
gtttcgccgaagcttcttcaatggcgatttctctcgccaccgcctatatctctccatgttttacaccggaatcgtctaattccgcgtcaccatcacgaactctttcctccgtacgattaccttctcagattcgccgattcggaagtgttcaatcgccgtcttcgtctactcgcttcgctccactcactgtaagggcagcgtagaagcaaacgttcagctcttgtgatgatttgttgcagaactctgatcaacctgtacttgtagacttctatgctacttggtgtggtccatgtcagcttatggtacctatactcaatgaagtgagtgaaacactgaaagatataattgcagttgtgaaaattgatactgagaagtacccaagtcttgctaacaaataccagattgaggctttgcccacattcatcttattcaaagacggcaaactctgggaccgtttcgagggtgccttgccagcgaaccaactcgttgagcgtattgagaattctttgcaagtgaaacagtaggtttgagaaaccaagactacttgtcatctatgaacaatctgttgtgacataagccattgttgattgtttgctcggtataatcatctacctattcatatatggcatctgccatttttcttaaaactcttgctcatttttaaaagtttttcctcctttgggatgctcaatacatacaaacgtatccgaccaaatgataagtttaagttactccgattgtaaaacccaaactctatgttaatcaataatatgagatctacnnnnnnnnnnnn

SEQ ID NO: 92118 - DNA, 537 bp, Arabidopsis thaliana columbia
  unsure (1)..(537): unsure at all n locations
cnnnnnnnnnnnnnnnnnnnnnnnnnnnnnnnnnnnnnnnnnnnnnnnnnnnnnnnnnnnnnnnnnnnnnnnccacgcgtccgggttcgccgaagcttcttcaatggcgatttctctcgccaccggctatatctcttcatggtttacaccggaatcgtctaattccgcttcaccatcacgaactctttcctccgtacgattaccttctcagattcgccgattcggaagtgggcaatcgccggcttcgtctactcgcttccctccactcactggaagagcagcaaagaagccaactttcaactcttttgatgatttggtggaaaactttgattaacctggacttggagaactctatggttcttggggggggtcatggtaacttaagggtccttttcctaatggaggggagggaaccattgaaggatttatttgcggttgggaaaatggatattggagagtacccaattcttgctaacaaataccagattgaggctttgcccacattcatcttattcaaagacggcaaactctgggacc

SEQ ID NO: 92119 - DNA, 542 bp, Arabidopsis thaliana columbia
  unsure (1)..(542): unsure at all n locations
acgcaggtaccggtctgngattcccgggtcgacnacgcgtccggatccgtttcaatatccacaaaccacaaccaagcaaattcttagctttctcacaccatccatattcactatcacttgtatgcatgtacatagatatcttacttcctagttctaatttgagttacaaaaatgttgaaatttccactttgttgcagtgagttatctttagaaccgaagattctagcttttgaaagtcagcttgtttcggggcgacgcgatacaatcaaagtttctgcgggaaaaatcggaaatttctctcttggttcggtaagatttcactatacatccatatacaatatgatatggttatcatcgtcaatgaaggagttttgttaattcctccaaaggttttttcaaacagattttcaaaagctgcggggcttgtggggctaaaggggcatttgattgtcccggttgcaaggccctaattggggttcattactagatactatgtaataaaactaataataacttcaagtgagtctatttctttagtatat

SEQ ID NO: 92120 - DNA, 768 bp, Arabidopsis thaliana columbia
  unsure (1)..(768): unsure at all n locations
nnnnnnnnnnnnnnnnnnnnnnnnnnnnnnnnnnnnnnnnnnnnnnnnnnnnnnnnnnnnnnnnnnnnnnnnnnnnnnnnnnnnnnnnnnnnccacgcgtccgaatatccacaaaccacaaccaagcaaattctttagctttctcacaccatccatattcactatcacttgtatgcatagatatgcatatagatgtacatagatatcttacttcctagttctaatttgagttacaaaaatgttgaaatttccactttgttgcagtgagttatctttagaaccgaagattctagcttttgaaagtcagcttgtttcggggcgacgcgatacaatcaaagtttctgcgggaaaaatcggaaatttctctcttggttcgatattcaaaagttgtgagacttgtggagccaaaggagcaattgaatgtcccggttgcaagggaacaggtaaaaataagaagaacggaaatatgtttgagaggtggaaatgttttgattgtcaaggatttggtatgaagagttgtcctaaatgtggcaagggaggcttgacgcctgaacagagaggggaacgatagacttatactatttgtttttcctacataagttaattttgtgatacaaacatgtctctattcctataacatttcagtcgtataatttgcatgtaaaaataaaaatcattaataaaaaaaaaaaaaaaagnnnnnnnnnnnnnnnnnnnnnnnnnnnnnnnnnnnnnnnnnnnnnnnnnnnnnnnnnnnnnnnnnnnnnn

SEQ ID NO: 92121 - DNA, 749 bp, Arabidopsis thaliana columbia
  unsure (1)..(749): unsure at all n locations
tatcgtggatagatctgcttcatccgatgattcagattattatagaagttacagtagtagaaagaaaagatcagagaatgattacaaaagccatcacagggagagaaagcaagtgcatagtaacgatcctgtttcagagaaaagtcagaaacagcattattcggagtctggaaagattcagagagtcgagaaagagcatagatatgatgagagaagacacagatacgtcgatatggagtctgaaaatcgtaatagatccgagaagaaaccgagatatgatgatcgtgattctgagaagcatcacaggagtgtgaagggcaaagaaaagcatgtgtatgaagcatctgatgatcctgaagagttttctgacagatacagaagcacaaagaaaactgaatctgattcggaatcaaaccgtagaagtagaaagaagaagcatgagttgtcttccgaagaagaagaaggggagtctcgtaagcatcgatacagcactaatagaaggagaaactgagtctatgctatgtcaattgtcctggaccaagagttatggttccggtctgaatgagattgcgagataatgtagtaatgtacgattgttttttttttttggtctatgtatactgggtttataaaagcttaatgagtccatgactctttttattaaaaaaaaaaaaaaaagnnnnnnnnnnnnnnnnnnnnnnnnnnnnnnnnnnnnnnnnnnnnnnnnnnnnnnnnnnnnnnnnnnnaac

SEQ ID NO: 92122 - DNA, 365 bp, Arabidopsis thaliana columbia
  unsure (1)..(365): unsure at all n locations
ggaacttaaacagatatttcataaggaaaatgaagggtgagtttttcacattgatggcaataatgtctctcctcttagccttctcgttagtccatggaggaggagagtctggaacaccttctaatgcagccgctaccccgactagcccaaccgaaggatccagtggttcaagtggttcagctcatggacctaattggggatatagttggggatggggttcagccccgggaggtggttatggctatggttctggttcgggttcgtcaccacatggaggaggaaaaggggctggattcgggtttggttcggggtcaggttcaggaactggatttgggtctggctcgggaggangangagccacagac

SEQ ID NO: 92123 - DNA, 817 bp, Arabidopsis thaliana columbia
aattctgcggccgccaataacaagagaagaagaagtaggttcaagaattaaggaagagagcttctccgttaaagtatagtgagagaatatggaagtcaccaatgggcttaaccttaaggacacagagcttcgtttgggattacccggagcacaagaagaacaacaactagaactttcttgcgtcagaagcaacaacaagcgcaagaacaacgactcaacagaagaatctgctcctcctcctgcaaaaacacaaatcgttggatggcctccagtgagatctaaccgtaagaacaacaacaacaaaaacgtgagttatgtgaaagtgagtatggacggagctccatatctccgtaagatagatctcaagatgtacaaaaactatccagagcttctcaaagcactagagaacatgttcaagttcacagtaggtgaatattccgagagagaagggctacaaaggatctggatttgtacctacttatgaagaccaaagatggagattggatgttggtcggtgatgttccatggggcatgttctcttcatcttggtccaaaaactcaggatccatgaagggttccgaagcttcctacttgccttattggacccattggttctcaaaacccctttttgggtcggggcaaaaacaaattctactttgtttagataaaaaaaagtttggtgtaaagaaagaaaaagcaatagggttacaaatacgttatatagatgtaaactagctttggttaattctgtaaaagatgagttttgattatacgaagtttatatgtatgctcaagatatttgatactaacataatcc

SEQ ID NO: 92124 - DNA, 387 bp, Arabidopsis thaliana columbia
aaatctagtttcccttatatactaggacaagcagtgctttcagctgtcgtcttctggaagaacttcacagcttattcgatgactaagaagctgtttccggccggggtttttgctgtcatcagtgcttgcatgttgtgtttctattcatatgtggtgctctctggaggaaacccccctccaaagaaattgaaaccatctgcgactagtccttcatactgaagggactttacataggtttagatttaaaaaagtggagatcttctctcttttgataactctggtctgttggattactggtgtaattttatactctttacgaattgatacacttggttttgtttgtgacctgttctttccaccgtcataatctaaagttttgattttctt

SEQ ID NO: 92125 - DNA, 761 bp, Arabidopsis thaliana columbia
  unsure (1)..(761): unsure at all n locations
cgcctgcatgtaccggtccggaattcccgggttgacccacgcgtccgagcaccttcagctcttgaatttttttcgtttcagactaacggatcgaaacttctcagccaaatcagccgcatctaacctcacgcgccgccgcaatggcaactccaccgacgctacctgtcaccaatcagcaagctgttcaatctcagcctccaatcaacacacctgcttttcgtactttcttctcacgtctctccacctcgatccgtgatggcttgtcacagcgtcgtccatggacggagctcatcgatcgtagttccatggcgagacctgaatctctcaccgatgccttgtcccggataaggaagaatctcgcttacttcaaggttaactacgtcgccatcgtctccctcgtactcgccttttcgcttttctctcatcctctctccctccttgtcctcatcggactcctaggcgggtggaggtttctctacctcttccgtccctcagatcagccactggtcgtcttcggtcgcactttctctgatcganagactctgcttgctcttgtgctgtctacgatcgtngtcgtgtttatnacgagcgttggatctctcttaacctccgcgcttatgattggngttgcaatcgtttgcgtacacggtgcgnttgtggttccggatgatctcttcttggacgngcaagagcctgcnaatgctnggattactctcaatcctttggaggtcttgctaaccnaagctngctgaannttnttt

SEQ ID NO: 92126 - DNA, 433 bp, Arabidopsis thaliana columbia
gaacaatgctcgtaaatcaatcctcagatcttacttatattgggcaagattagatcatcagaggggtgtgtactaatggcatgggggtgaaaacaactgaatctgaagcaaacattcatcaatgaaatattcaagaagctcaatcttctttgagagaaggattatctctaaatttctaggaatcaagagcacttcttgtaagattgtaataccacagagggaatttagaaggcgcactccctgtctttgaatgaatccacccttaaccatctatcccaccgctacaggcttccaatgcctcttgggagaccggctactaataaaaaccgtcccccttaaccgcagcattcactttctcagcatgctgctaacttcctccttgaaactatctacttgtaaaccaaatcccttcaaaaactttggagaataactt

SEQ ID NO: 92127 - DNA, 647 bp, Arabidopsis thaliana columbia
cggacgcgtgggctctttttctaattttttaaaggttctttcatcttcttcagatccgaattgtcgccgcgaaattcgtcagtgcagcttcttcttcttcgcgtactttattcgatcggctgtctgaagaacatgaagccgatgatcgtagttgctgctagttacggcggattgatgtttggatggacgcagaaattttgatgtgggtttagtctaaaaggcgaagaacaatgctcgggaatcaatccgcggattttagtgagaagggggaagatgagatcgtcagacagcggtgtgctaatgggattggcgtgaaaacaactgaagttgaagcaaaccttgatgaaggaaatattcaagaagctgaatcttctttgagagaaggattatctctcaatttcgaggaagcaagagcacttcttggaagattggaataccaaagagggaatttagaaggcgcacttcgtgtctttgaaggtatcgacccttcaagcagctatcccaccggttacaggtcttccgtgcctcttgagaaaccggctactaagaaaaactcgccccgctgaaccgcagcaatcactttctcagcatgctgcttacttggtccttgaagctatctacttgaaagccaaatcccttcaaaagct

SEQ ID NO: 92128 - DNA, 507 bp, Arabidopsis thaliana columbia
  unsure (1)..(507): unsure at all n locations
nnnnnnnnnnnnnnnnnnnnnnnnnnnnnnnnnnnnnnnnnnnnnnnnnnnnnnnnnnnnnnnnnnnnnnnnnnnnnnnnnnnccacgcgtccggagaatttgcgcgacaacaacgatcgatcagtcgtcgtcttctcagatcttgttcttcaaaggattctatgccgcaagagcttcgattgtatcctctctgaggattgggtaatacccaataccatggataacaatagcgagcgcaaaggaaaacgaatcgataaggataatattcgtgtcaagcggaaaactttgcaagctttgctcaatgattgccagagagccctcgagttattaaacttagccgaagtcagttctgaagacgatgaagatgataaaagcaccggcgagggaagtgggtcacaagagagcaggggagaagtttcttcttccgatcgagaagatcctgaagctgatgaattatatgatctcatcaaatccagggttgaatgtgatgacttccttgaaaagat

SEQ ID NO: 92129 - DNA, 588 bp, Arabidopsis thaliana columbia
atgatacttccagctctcactacgactcactattgggaaagctggtcacgcctgcaggtaccggtccggaattcccgggtcgacccacgcgtccgcccacgcgtccgaatttattttccatttttctgtacagccagtcctcgtcttgctggcctgcaataataatgtctctgatcggccgcctcaatcttggtcggcgcttctgcaccgccgtgccaagaagatcggaagacataatgtcaaacccagattgccgcccttctgatctatgcttgagggtctcgtacttgatcagatgcgttggggatctcgacacggcggcgaagtacgctcgtttggctgttttcaccagcatcaaatcggagtcaacaacaacaatatgtcaatccatcatcggaggcatgttacgggataaaaggctcaaggacgcttatgatctctacgagttcttcttcaatcagcataacctcagacccaacagccattgctggaactacatcatcgaatctggtttccaacaaggtcttgtcaacgatgctctgcatttccaccaccgatgcatcaattccggtcaggtccacgactacc

SEQ ID NO: 92130 - DNA, 528 bp, Arabidopsis thaliana columbia
ccagctacatacgactcacattagggaaagctacgtacgcctgcaggtaccggtccggaattcccgggtcgacccacgcgtccgcaggttaatcgttaattaccctctgattcccaagatatcccaccgggtttgtagtaacagtagtagtaagctcagggagttactatgattcttcgtcgatcataaaatatggcggaatcagcgatgttgttggtaagaagcaggagctttttctaagtgtttcggtgaaagcagtggaagacaaaggtaacaatggaggtggaagcatgagtttctcgggtcaaagctgggatcctagttccgagattgaagttccttcagaccaaagacccgtgaatgagtattcgtctctaaaggaaggaatgttgtattcatggggagaattgggtccaagcgaattctttattcgtctaggtggtctttggttggtcactttcactgttcttggagttcctgttgcagctgctagctttaatccttccagagagcctttgagatttattc

SEQ ID NO: 92131 - DNA, 537 bp, Arabidopsis thaliana columbia
  unsure (1)..(537): unsure at all n locations
atgatcctgccagctannnnnnnnnnnnnnnnnnnnnnnnnnnnnnnnnnnnnnnnnnnnnnnnnnnnnnnnnnnnnnnnnnnccacgcgtccgcagctctttcgaagaaatagcttagcaatggcttggggaataaggatgaagatagctctcggagccgccaaaggtttagcttttctccatgaagcagagaaacctgtcatctacagagactttaaaacctctaacatattgttagactccgactataacgccaaattatctgacttcggtctagccaaagatggacctgaaggcgaacatacgcatgtaactacccgagtgatgggaacacaaggttatgctgcgcccgaatatatcatgactggtcatttgacgacgatgaatgatgtatacagttttggagtagttttgttagagctgataaccggaaaacggtcaatggacaatacccgaacacggagggaacaaagcctagtggaatgggcgcggcctatgttaagggaccaaagaaagttagagaggataattgaccc

SEQ ID NO: 92132 - DNA, 1075 bp, Arabidopsis thaliana columbia
accggaaccgccgggccgacccaggcgtatccgggaagctttgtttcatctgttgttccctgtgaccatggctactccactctcaatctcatcaaatcctctcacctcccgccattgttaccgtctccacttatcttctacttcattcaagggaaatgtaagtgttttgggggcaaacccaagtcagattctatctctgaaactcaaccaaacccttaaaacgagaaaccaacagcaatttgcgagaccccttgttgtggttagccaaacggcggctacgtcgtcggcagttgtagctccggagagattccgtttggataatcttggaccacagccaggttcgaggaagaagcagaagagaaaaggtagaggtatctctgcaggacaaggagcaagttgtggttttggtatgagaggtcagaaatcaagatcgggtcctgggattatgagaggctttgaaggtggtcaaactgctctttatcgtcgtcttcccaaacttagaggaatcgctggaggtatgcgttcaggattacctaaatacttaccggttaatatcaaagacatagaaacagctgggtttcaagagggagatgaagtgtcattggagacattgaagcaaaagggtttgattaatccttcagggagagaaaggaaactccctcttaagattctgggtacaggagaactaagcatgaagctcaccttcaaagctcgtgccttctcaacacaagcaaaagagaagcttgaagcttcaggttgtacactcactgtgttgccggaaagaaagaaatgggttaagccatctgttgcaaagaaccaagcacgagcagatgaatactttgccaagaagagagctgcagcagcagaagcagcaacttcagagccagcagcctctgcttaaattacttcagtttcaagctctttttagtgttgtaaagctgcagagaagataattgtctatgacaaatgttaattacaattcctttgtctttttgtatggtgaagagatttacattttgttgtttgaagagtcattatcaaaaagatatttaaacggtaatgtaatattgaactc

SEQ ID NO: 92133 - DNA, 537 bp, Arabidopsis thaliana columbia
  unsure (1)..(537): unsure at all n locations
atgatcctgccnnnnnnnnnnnnnnnnnnnnnnnnnnnnnnnnnnnnnnnnnnnnnnnnnnnnnnnnnnnnnnnnnnnnnnnccacgcgtccgtctctctttccgtcttcatcgtcctcccggcttctgcgattttgtttagtagcgccggaccggagtagttaaaaccctagcccagtctatttaaagattcaccgagtagtcttctagtcctgcgtatacttcttcttcttcgtttatacttagaagatgaattgtgcaatttccggcgaagttccggaggagcctgtggtttctaagaagtcgggtttgctttacgagaagcggctaatccagacgcatatatccgattatgggaaatgcccggttactggtgagccacatactcttgatgacattgttcccatcaaaactgggaagatcgtaaagccgaaaccattacacacagctagcatccctggattgcttggaacgtttcagactgaatgggacagtttgatgctatcaaattttgctttggaacaacaactgcatact

SEQ ID NO: 92134 - DNA, 853 bp, Arabidopsis thaliana columbia
attagagcagaccccgaactcttccactctccagtcacagccacagagagatttgatcagcttcgtgtgttttccatggcgtcggaagcgagggaatcaccagcaaacaatcctggcttgtcaacgaatcgagatgaggctacaaaaggatacatcatgcaacagactatgtttcggatcaaggaccctaaggctagtcttgacttttactcacgtgtgctggggatgtcattgctgaagaggctggatttctctgagatgaaatttagtttgtacttcctgggctacgaggatactacaacagctccaaccgatccaacagagagaacggtttggacatttggtcaaccggcaacaattgaattgactcacaactggggtacagagagtgatcctgagtttaaaggttatcacaatgggaactctgagcctcgtggatttgggcacattggggttaccgttgatgatgtgcacaaggcatgcgagagatttgaagaattgggagtagagtttgccaagaaaccaaacgatggaaagatgaagaatatagccttcattaaggatcctgatggctactggatcgagatctttgatctcaagactatcggaactactaccgtaaacgcagcttgatctcaagactatcggaactactaccgtaaacgcagcttgatctcaagactatcgggactactaccggaaacgcagcttgaggaagtagcgattgcgctatttgtgttcttttgctcattccacccgagtgtgtgcatacagttaaagaattttcatgtttcatcgaataatcggaacaagatggtcgttgtttatcaatgtggtctgtttcttgacatat

SEQ ID NO: 92135 - DNA, 403 bp, Arabidopsis thaliana columbia
  unsure (1)..(403): unsure at all n locations
ccgaggaaaaaaatggcgtctggtttgatcggaagattggttggaacgaaaccgtcgaaattagccacggcggcgaggttaattccggcgagatggacctctacaggagcggaggcggaaacaaaagcttcctctggcggcggaagaggatcgaacttgaagacttttcagatctatcgatggaatccagataatccagggaagccagagcttcaaaattaccagatcgatctcaaagattgtggtccaatggtattagatgctttgattaagatcaaaaacggaatgggtccatcttttactttccgtaggtcatgccngtgaaagggatcttttggttcaaagtggctatgnacattgatggntgtaancggncttnctttgtttgncaaangttnaagnt

SEQ ID NO: 92136 - DNA, 485 bp, Arabidopsis thaliana columbia
  unsure (1)..(485): unsure at all n locations
ctccgagaaaatggcgtttggtttgatcggaagagttgttggaacgaaaccgtcacgattatccacggcggcgcgattgattccggcgcgatggacatcaaaaggntcagaagcacaatcgaaagcttcaaccggcggcggaggagcgagtctgaagacgtttcagatctatcgatggaatccagataatcctggaaagccagagcttcaagattacaaaatcgatctcaaggattgtggtccaatggttctagatgctttgattaagattaagaacgagatggatccatcgctcactttccgtcgctctttgccgtgaagggtattttctnggttcgtgtgctattgaaccattgatgggatgtaattgggcctttccttgttttaccgaagatttgaattcttggatcctaaaagaggccgccgggtttcccccgtttcccgcataatgtttttgtanataaaggaattncggttttttggat

SEQ ID NO: 92137 - DNA, 514 bp, Arabidopsis thaliana columbia
  unsure (1)..(514): unsure at all n locations
atacgactcactatagggaaagctggtacgcctgcaggtaccggtccgggattcccgggtctacccacgcgtgcgngggtttggtttgatcggaagagttgttggaaccaaatcatcacgattatccacggcggcgcgattgattccggcgcgatggacatcaacaggatcagaagcacaatcgaaagcttcaaccggcggcggaggagcgagtctgaagacttttcagaggtatcgatggaatccagataatcctgggaaagccagagcttcaagattacaaaatcgatctcaaggattgtggtccaatggttctagatgctttgattaagattaagaacgagatggatccatcgctcactttccgtcgctcttgccgtgaaggtatttgtggttcgtgtgctatgaacattgatggatgtaatggtcttgcttgtttaacgaagattgaatctggatctaaagagacgacgattacgccgttgccgcatatgtttgtgattaaggatttggt

SEQ ID NO: 92138 - DNA, 1007 bp, Arabidopsis thaliana columbia
  unsure (1)..(1007): unsure at all n locations
nnnnnnnnnnnnnnnnnnnnnnnnnnnnnnnnnnnnnnnnnnnnnnnnnnnnnnnnnnnnnnnccacgcgtccgcccacgcgtccgaaagaagaaacctgggaagaagtgagaaactcatctgatcgccatgagtgaagaaactccgaagcttttcaccaataaacccaagaagaaggccattatcgctcagcttaagcacgttgaagccaatttcaacaatcccaccgttcctccatcatctaaaccgtctccagctgcagcagcggcggcttcgtatacgatgggtggtggttctgttcctcctccgcctcctcctaaggaatcattcgctcgtaggtacaaatatgtctggccgcttctccttaccgtcaatctcgccgtcggaggttatctgttctttagaactaagaaaaaggacctagatcctgtagttgaagagacggctgctaaatcgagttcagttgcagctcctgttactgtggaaaaaactttgtcttccacagtggttgcagagccagtggtgatcaaggcacgtgagccaattccggagaaacaacaacgtgagctcttcaaatggatgttggaggagaaaaggaaagtaaatccgaaaaacgcagaagagaagaaacggaatgacgaagagaaagcgattctcaaacagttcatcggctccaaaaccattcctactttctgattcattaaagtgcagattctgttgatttttagtttggtttcacttcttactttgtggatatcacatgttttgcttttggaaaaattgttcgtttcattgttgaaaccagtcactttggtatcttcagttccaacattgatccattgtccggtcttgtgtttctgtgtcattgtgaaacgttgaatgctagagaaaaaggttcgactttttatgggctaaaaaaaaaaaaaaaaaaaaagnnnnnnnnnnnnnnnnnnnnnnnnnnnnnnnnnnnnnnnnnnnnnnnnnnnnnnnnnnnnnnnnnnnnnnnn

SEQ ID NO: 92139 - DNA, 431 bp, Arabidopsis thaliana columbia
gcgtcgcgggttttttctttcctccaaaatttttaaacaacttctgtgtctgtggatttctacttggacggcgatggcgagaattggggctaaacccagaaattgaggatttgaattctgctgctgcggcgtctctgtggtggtttggtttctcgtttctgaaaatctacggtgtagtaagtcggagttgcagttgagatttagcactcggccggcaggataaccttccggttcaaccggataaacctccgaagagtctggttcgtcccattttaaacctggaaacaacttcgtcttcttcatcctcttcctcctcctcaccggaacttctacggcatttgcaagccgctttcaaacgccatcgcccactcagtaaaatgcagacgaccagtatcgggcctcgacgaagtgttgctccacaaagacaagct

SEQ ID NO: 92140 - DNA, 542 bp, Arabidopsis thaliana columbia
  unsure (1)..(542): unsure at all n locations
caagggncctgccacttatggacttcagcaattcatgccacctccatgggaactccgaaggccgaggaagaggcggttttatgggcgccctcgtggtggtggttttgccggtggtaatttcagaggtggcaggggagctagaggacgtggtggtcgtggcagtggtggaagaggacgtgatgaaaacgtatctgcagaggatcttgatgctgaattggacaagtaccacaaagaggcaatggaaacaagttagaaaggggagattaaacctattgcatgtctacatgtattccttcctttagtgccgatatgcttttgtattagtatgatctttagattgaatgtcaatgggtctgacattttcgagctttagcttttgttttttcttctcttggtgagcttcttagctttttgcagttgagttcagagaaacaagcattgtgtgtaccgtggaactcaaaactcttctaaaatatcaattcagaacacaattctatctannnnnnnnnnnnnnnnnnnnnnnnnnnnnnnnnnnnnnnnnn

SEQ ID NO: 92141 - DNA, 495 bp, Arabidopsis thaliana columbia
tacgtgaagacgtagctcgtgtttatttccagttattgatctcagccgttgatttctgtcatagccgtggtgtttatcaccgagatctgaaaccggagaatctcttgttagatgaagaaggtaatctcaaggtgactgattttggtctctctgctttcactgagcatttgaaacaagacggacttcttcatacaacttgtggaactccggcttatgttgcgccggaggttatattgaagaaaggatacgacggagctaaggcggatctgtggtcttgtggtgttatactttttgtgcttcttgctggttatttgccgtttcaagatgataatcttgtgaatatgtataggaagatttacagaggagatttcaaatgtcctggttggctttcttctgatgctagacggcttgtgactaagcttcttgatccgaatccgaatacgaggattactattgagatggttttggattcgccttggttcaagaaacaagcaa

SEQ ID NO: 92142 - DNA, 560 bp, Arabidopsis thaliana columbia
attcgatcacacaagaaaaattacaattcttcttaatcctcattattatatatataaataaacttcaatctaagcttcttcgtaatttctctttcggccagtgcgacccgtttagatctcgaacaaaacaaagtctccagaagaaaaaaccaaattccatggcgtctaaagcgaagcagcatcttcgttatcagccgcgaaaatctgtgtcacgatcaacacaagctttcacggtgcttatacttcttctcgtagtgattctgattcttctgggtctcgggattttgtcactacctaatgctaatagaaactcttccaagacgaatgatttgaccaacattgtacgaaagagtgagacgagttctggagatgaagaagggaatggtgaacgttgggttgacgttatttcttgggagcctcgtgctgctgtttatcacaatttcttgactaatgaagaatgtgagcacttgatcagccttgctaagccgagtatggttaagtcaaccttggtagatgagaaatccggtgtttgcaaagatagcatagtgagaactagctca

SEQ ID NO: 92143 - DNA, 546 bp, Arabidopsis thaliana columbia
atgagatggcaggcaagaccaagactcatatagtaaaaatgttttgacaatcaaaggccaaataagcaaagagatctctgactctctatctgaaatctcaaaacggagaacgcgagggaacaagagattaaagcatagtgagaccctaagagagagagctttaggtctagaggggatcttcacaattcacacaacaactacgagataggatcgtgcgcgtcaaaagaagctggtactgctgattccagccgaagattagtctccgcttctggttgttccggtggagactcgtcggaaatgagaggtcttttcaaatccaaaccgcggactcccgctgatattgttcgtcagactcgcgatctcctcctctacgccgatcgatccaactccttccctgaccttcgagagtccaaacgcgaggaaaagatggtggaactaagtaagagcatacgagatttgaagttgattctatatggaaacagtgaggctgagcctgttgctgatgcttgtgctcagttgactaagagttctttaaggctgatactc

SEQ ID NO: 92144 - DNA, 496 bp, Arabidopsis thaliana columbia
tcttctctctttctctttttttttttttttattttcttctcttccatgtcacttccttgacgaattctatatacctagttcgttttttcttcctcaaatatatctttttcaatttatttggtttttctttgggtgcaacttcacctcacaaaattttctctctttttttatattaatttgagttaggcctttttgatttcatagatgagtcgtctagtcgtctggatttgatgtggttatagtcttacagagacctttgattgaaataagaacaaaagcaagaatacatacatcctcttcatcttacacccatccttttttacttttctagggttttatttttttttaatttattttttttctttgatttttatattctctctctctctcaaatctttactcatctgggtatggaagaataccagcatgacaacagcaccactcctcaaagagtaagtttcttgtactctccaatctcttcttccaacaaaaacga

SEQ ID NO: 92145 - DNA, 381 bp, Arabidopsis thaliana columbia
ccggctccagctgagcttgagaagagaaaacacaagctcaaacgtcttgttcagtctcccaactcctttttcatgaaatatggaattggatactcaaaacttggttcaaatataatattctgaatcgattgaccagtaaggaaaacttgactcatgtgcgtgataagatggttcaactatttggagcttataaaagaaccacatgcaacattgcagcaagcacttctcaatcttcacgaaaggatatcccatttggatatgatgggttttactcttacttttctcaaagaaatggaactggaaaatcaccattagatatgtacttggaagagcctgtgttagatatggtctcttttagagatatggatgttattgcatatt

SEQ ID NO: 92146 - DNA, 388 bp, Arabidopsis thaliana columbia
ctttcgcagcgctcatagccgtggccaaaaactggccaaacttcatccggttcaggctatgcattctcgagccacacaaacctgaccacattacatttcaatcactggacgagggctttggtgcaatcgtacaagcttgcaagggtctaagacggctctctgtctccggtctcttaaccgatcaagtctttctctacatcggtatgtacgcggaacagctcgagatgctttcgatagcttttgcgggggacactgacaaaggaatgctctatgtgttgaatggatgcaaaaaaatgaggaagctggagataagggacagtccttttgggaacgctgcgcttcttgctgacgtgggtaggtacgaaacaatgcgatccctttggatgtc

SEQ ID NO: 92147 - DNA, 514 bp, Arabidopsis thaliana columbia
acgactcactatagggaaagctggcacgcctgcaggtaccggtccggaattcccgggtcgacccacgcgtgcgtacggctgcgagaagacgacagaagggaagggacagtccttttgggaacgctgcgcttcttgctgacgtgggtaggtacgaaacaatgcgatccctttggatgtcgtcttgtgaagtaacactcggtggctgcaagaggctcgcgcagaattcgccacggcttaacgtagagatcatcaacgagaatgagaataatgggatggaacagaatgaagaagatgaaagagagaaggttgataaactttacctctaccgaacagtggttgggactagaaaagatgcaccaccatatgttaggattctttagtctctttgcaccttcatgtgttttcaaacttttctttgtactagtttttgccttttatcaaacttggaacaaatacaaatgtcgcattttattatcaccgtaattcagccattgaaaacataaatttaggtaaa

SEQ ID NO: 92148 - DNA, 822 bp, Arabidopsis thaliana columbia
  unsure (1)..(822): unsure at all n locations
ncnnnnnnnnnnnnnnnnnnnnnnnnnnnnnnnnnnnnnnnnnnnnnnnnnnnnnnnnnnnnnnnnnnnnnncttttttttttttttttttttttgttaacaaatgtcgcattttattattaccgtaattcagccattgaaaacataaatttaggtaaaataccaatcccgttttccaaataatacaaattacaatgacatccacaagaaacctacttgtctaatccatgctctggatgagtgcactctcaaacaaagaggtaaacattaacagacattgacacacgatagtccacaagacatagagtgttatggcatatgtcttcgattagacacataatgctgacagtaaacgacgagatccacagagactggcggcattctcagaagcagcattcctccaacaaacagcaacagcaaagagcagcaagacagccacggatgaaagagaagcaaccagagtcagaatcttggtaatggtgatgatcatgatggcagtggtcgtaattttgcggcgaagaagaaggtggtggtccgtgatgctgatgaggataacctcctccggcgaagtagccttgataaccgccttcgtaaggacgtgaagacggtggtggatatcctccgtaaggctgaggtggaggatatccttcgtgatgcgacggaggagaaggatatcccggcggtggcggtgctgatggataacccggaggtggatagtgagattggtatcctggaggaggatacgattccggtgggactctgtcgtagctcattttttttttgtcaaaatcaacggacgcgtgggtcgacccgaaaattcaa

SEQ ID NO: 92149 - DNA, 543 bp, Arabidopsis thaliana columbia
agaaaattccaagtaaaagaatgtccttggctcttgttattcagctgttttaaccttatatcatggcttttactttgtttttgtttacctcatgtgattggttgtatcaccatatataacttagcatgctgataatcccatcctcacacctataacctagtaaaaagataagaaagagagtttgtgacatagatttggtgttaaagtggttagagggaggagaagaaaagccgagggagagagtgagagatgttgacattttggctaacattttcatctctcttttcgggagttagtttgtttttggtgtataggtttggtatttggcttctctagagcttgtgtacctctgattccttttatttgtttgttactctattgcactctttgtgtgatttattcgtttgtattttgggtttgctgatatataatatatgatttgataaaaaaaaaaaaaaagggcggccgctctagaggatccaagcttacgtacgcgtgcctgcgacggctcaaaactctttctaataagtgtcaccctaattc

SEQ ID NO: 92150 - DNA, 892 bp, Arabidopsis thaliana columbia
  unsure (1)..(892): unsure at all n locations
atgatacctnnnnnnnnnnnnnnacgactttatatagggaacgctggtacgcctgcaggtaccggtccggaattcccgggtcgagccacgcgtccgggcaaagcacttttaaacggacctgggaattattccttcaacaaggctactgatgactctaaggaagcagagtcaggtaatgggtggaaagaaaattcagaggagaagccacaaagtgaagaccctgaagcagcaactgaggacagtgtccctggtgttttgtatgatttactacagaaagaagtagtttctttgaggaaagcctctaatgaaaaggatcaaagcctcaaagacaaagatgatgccatcgagatgctagcgaagaaggtggaaacattaacaaaggcaatggaggttgaagcaaagaagatgagacgggaagtagctgcaatggaaaaagaagttgctgcaatgcgtgtggagaaagatcaggacgccagagccaaaaggttttcaaatagcaagagcccatccaacaccgcccagattcttgcgggaagagctgctggacgaagtggcgggttaacgaagagtacccagtgaagggagattcaagaaaataacaagtaaaagaatgtccttggctcttgttattcagctgttttaaccttatatcatggcttttactttgtttttgtttacctcatgtgattggttgtatcaccatatataacttagcatgctgataatcccatcctcacccctatagcctagtaaaaagactcagaaagagagtttgtgacataaaaaaaaaaaaaaaaaaacaaaagnnnnnnnnnnnnnnnnnnnnnnnnnnnnnnnnnnnnnnnnnnnnnnnnnnnnnnnnnnnnnnnnnnnnnnaataaatgtaattcgg

SEQ ID NO: 92151 - DNA, 426 bp, Arabidopsis thaliana columbia
  unsure (1)..(426): unsure at all n locations
ctgtaagctctccactaccatggcgtgtcctagagtgatttttctgattctgatcacgttcttcattttacagactgctttctcaagttcttggcaaacattgagtgggaaacctccggctgtgattgctcgaggcggattctctggtatgtttccagattccagtattcaagcatatcagttggtgaatataacaacttcaccagacgtaatgctctggtgtgatcttcaactaacaaaggatggtgttggaatctgctttccaaatctgaagcttgacaatggttctaacgtcataagaattgacccacattacaaagaaaggttgtctgttgatttcacatggaaggaactctctgatgtgaaattggcacanggtgttgtctcaagaccatatatattcgatgatgtatcctcgatattggc

SEQ ID NO: 92152 - DNA, 441 bp, Arabidopsis thaliana columbia
ttctcacctcttttcctttaacgaactatttgaatctaaattcaaattgatttgttaagggaaacctgagctagaaaaaccatggcaaagatctccttcgtacttttcgttgtggcccttatcgcctttctccacgcttatgaagctcgcaaagtagtaaatctcggtgaagcatttgaaaaagacttacataaagccgaggccatgatcgcggaagaattaaaggctaagaaaacgaacattcaaggtttgaaatctgaggtgaaaacgttgagcaaatcagaagtgatgttgaaggaacttggaaatgcttacaagaaggatatggacttaaggccttacgaaaagaaactcaaaaacttcagcaggatcgtagccctcaagaaagcacctatgaaaaacaacaacaagaaacctgtatccataatccaatcgattttg

SEQ ID NO: 92153 - DNA, 419 bp, Arabidopsis thaliana columbia
tcgcggacgcgtccgcccacgcgtccgggataccaagaaacttggttttaaaactggtactactaagtcatccgaaaaacggtttacacaaaaaccttttggcaggcaccttgtgtaggtcaagttgataactgaattccaggatggacatttttccggcggtttacttgaaactgccgatatccgttttcgacggattgaatgccgttctggacaaaccgtgcacgtcaagactaataaacgatacattaaattttccggttacatgtcccatacccaaccttagagaacatgtgtagcctttagcttaggcttccttgtgtgctgttatattgagtatatatgaggtaatttttgcctcttgtgttgtaacacttgtatttttgttcctttaacatttgatgtagagatttttccta

SEQ ID NO: 92154 - DNA, 628 bp, Arabidopsis thaliana columbia
  unsure (1)..(628): unsure at all n locations
agaactttgcagcaagctcgaacgattctgagccgcctggaacagcggctaggttcaggttcgtgtcttttgattccagaacaagtttccggattcttccactccgagagacgagaggaaactgcaaaagagaacgagtttgtgtaaagcagtttctcttttttcttctgagtttattgaatttggttcccttgtgaagggaaaaggtcgcagagccgacttcaatggttaagtcactcgtaacgtccgagacaggcctggaacaacagagagatcagcaacattttgaggaaagaagagatgagttagtgaaagagtaccattgaggagtgtgtttgatactggaacttggacgaaacgctcttttagcagcaacactttgcttattaaaatcaggaacagtaacaacacccattggatcttattattatctatctcttctccccaaataaagttgtaaacctctttttgtgttactgcaaatatgtttttgtgtttctcccnnnnnnnnnnnnnnnnnnnnnnnnnnnnnnnnnnnnnnnnnnnnnnnnnnnnnnnnnnnnnnnnnnnnnnnnnnnnnnnnnnnnnnnnnnnnnnnnnnnnnnnnnnnnnnnnnnnnnnnnnnnnn

SEQ ID NO: 92155 - DNA, 732 bp, Arabidopsis thaliana columbia
gcttgagcaaaccagaggctagctgttctttgcaggcgtttacagcgattgcgttgaccagcctcccgccgaggttgatctcttcagctacaggcagtagcctctcgcaggagtgaagaacagtgatcgaattcgatatgtcattgaaaatggagtctttcaggtaggcctctgttctcgcctcgaggttcttctctgacaagtcttctgtcatctccaggtaatgagccacgcatcgcagcgccgcaatgctggacgagttatattggacgccaacgccgtagcagaactttgcagcaagctcgaacgattctgagccgcctggaacagcggctaggttcagggaaaaggtcgcagagccgacttcaatggttaagtcactcgtaacgtccgagacaggcctggaacaacagagagatcagcaacattttgaggaaagaagagatgagttagtgaaagagtaccattgaggagtgtgtctgatactggaacttggacgaaacgcttttttagcagcaacactttgcttattagactcaggaacagtaacaacacccattggatcttattataatatatctcttctccccaaataaagttgtaaacctctttttgtgttactgcaaatatgtttttgtgtttctcccaaaaatgttccttaaaaaaaaaaaaaaaaaagggcggccgctctagaggatccaagcttacgtacgcgtgcatgcgacgtcatag

SEQ ID NO: 92156 - DNA, 380 bp, Arabidopsis thaliana columbia
attctattttctcaattcatcttctaagacttgtggtttctccttccttggagttcacagagaattgggatttatcctcccttgtccggtttctatgtggccttccacatcacctagattcaccatcaccacaccttatccacacccacgcgccgcctcttctttcttacaggtgaaagctttccaacgcggcgactttgaccgtttggctgataacgttaagtcaggtaaagcatggagagacgcgtggagaagcgctaacgatggattcgagcaattcgtttttgaggctaagaaaaccgctgagcgaattgatcgccaatacgctgtttctcgccgctttagctccgctgctagctcagccgctgaccgtgctcgtg

SEQ ID NO: 92157 - DNA, 948 bp, Arabidopsis thaliana columbia
atggtggggtgggcgattgcgctacacggcggtgccggagacattccgatcgatctccccgacgagcgacgtatccctcgtgagagcgccctccgtcactgcctcgatcttggcatctccgccctcaaatccggcaagcctcccttggacgtcgccgaacttgtcgttcgtgaacttgagaaccacccggacttcaatgcgggtaaaggatctgtcttaactgcacaaggcactgttgaaatggaagcttccattatggacggtaaaaccaaaagatgtggagctgtctccggcttgaccactgttgttaatcccatttctttagctcgcctcgtcatggagaaaactcctcatatatatcttgcattcgatgctgctgaagcttttgcaagagcacatggtgttgagacggtatattctagccatttcataactcctgaaaacattgcaaggctaaagcaggccaaagaattcaatcgagtccagttggattacacagtccctagtccgaaagtaccggacaattgcggtgacagccaaataggaacggtcggatgtgtagctgtggacagtgctggaaatctagcttcggctacatcaacgggcggttatgtcaacaaaatggttggcagaattggggatacgccagtcattggcgcaggaacttacgctaaccacctttgtgccatctcagccacaggtaaaggagaggatatcatccgtggaaccgtggctagagacgtggctgcactcatggaatataaaggcttgtctttgactgaggcagcggcttatgttgttgaccaatctgttcccagaggaagctgtggactcgttgctgtctctgccaatggtgaagtcacaatgccgtttaacactaccggaatgttcagggcttgtgctagcgaagatggttactctgagatcgcaatctggccaaacaattga

SEQ ID NO: 92158 - DNA, 891 bp, Arabidopsis thaliana columbia
aatacgactcactttagggaaagctcgtacgcctgcaggtaccggtccggaattcccgggtcgacccacgcgtccgcccacgcgtcaagagaaaactaaagaagctagaagatggagaaaagtaatgatcatgacaaggctagccacggcggctccggtggtggtgccacggagaagtgggaggagactagcctcggaatccgaactgccgagacaatgctccggttagctccggtgggcctttgtgttgcagcacttgttgtcatgcttaaggactctgagactaatgagttcggttcaatttcttactccaatctcacagcctttaggtacttggtgcacgcaaatggaatatgtgcaggctactctcttctatcagcagccattgcagcgatgcctcgttcttcttcgacaatgcctcgtgtttggaccttcttttgtctcgaccagcttctgacctacctggttcttgctgctggagctgtatcagctgaggttctatacttggcttacaatggagactcagccattacttggagcgatgcatgtagctcctatggcggtttctgtcatagagccactgcttctgttataatcacattctttgtggtttgtttctacatcgttctctctctaatctcctcttataagctctttactcgctttgatcctccttccattgttgactccgccaagaatctcgaagtcgctgtcttcggaagttagatcctccatttgctcttcaagtacatctagtttgtcatgtttcaaatgttgtgtgtttttaactttggtcaagagaaagaatgcttatgtgtttgctaaaaaaaaaaaaaaagggcggccgctctagaggatccaagcttacgtacgcgtgcatgcgacgtgatg

SEQ ID NO: 92159 - DNA, 656 bp, Arabidopsis thaliana columbia
aatgatttaggtgcactatagaagagcttgacgtcgcatgcacgcgtacgtaagctcggaattcggctcgagctgagtcttgggggagcaatgaattaaaagatatattgacaggctcgcaagaggcaactggttcaccacttgttgttgctggtgatgagcgcgaaggggctcttaaggattctgataaagcatctgggaatgttaaagccacatcttcattaggaaatgagttcaaatctggagaaagacatggcggaacactcagttcgatgaatgctttgattgaaagttgtgtcagatactctgagacaaatgcctctttggctggttcggatgatgttggaatgaatcttcttgctagtgttgctgctgatgagatgtctaaatcgcctgttgcatctccctcagtatctcagcctccaaattccgtgatgaatgaaaattctactgtagggaacaatacaaagctaatggcttcggatggcttgcctcacgagcaacatcaagctgtttgtacctctgtcagtactgagcaaggtgagcaacatgttagcagtagtggcacacagttggagtcagaaataaaaaatgaatctaagaccggagatcgtgataagagctcgaattcaaacactgaagatctgcaaaggttg

SEQ ID NO: 92160 - DNA, 893 bp, Arabidopsis thaliana columbia
  unsure (1)..(893): unsure at all n locations
ctggacaataaagaaagaaaaaccattttaaggggctttttatactaaaactccacagatctcccattctgagatgcagagtgataataacaacaattgagaccaaagcaaaatccgaaactgtcaccgttttcctttgtcttcttctctgccaaaatctttcaatctttatcttcttcctttttcttgtttttctaaaactttctccatcttgaaaaccaaaacaacccaagattaataatatacaccaatgggtactggttggcgacgagccttttgcaccaccgcccctagaaacagcgacgcaacagcgccagatctcgacaagcaacgcaccggctataatcttaccccaagtcctagcccaagaagctgcgtgaagctagcttttctatccggaggaagtaatccttcaactccccgaccaacttctagtcctagcctacgttgtcggactacagatgctgaaactcccacggcggaacaaacttccgacgccaagatcggcgactaagagtccaagactgtctttggccggctatctctaacccttcttcggcctcggtcacccgttaaaaccttttctcttgttccgcaaccagcttcaaattcagaagtacttttgggatatggtttgaaccagtgtgaaaccaggggcaaagggnccggcggaattatacggnggggggtnttcacacggattttaaattttccttgtattcgccggcctatgttnggnaaacagggnaagcttttttncccnngtttgaaatccattttgaaancggttttttccttnntccctaanaagnttgaactnattnccctnggggggtttttccgaatncagggggggggttttttnnggttttccnggaaaccagcaaagngga

SEQ ID NO: 92161 - DNA, 359 bp, Arabidopsis thaliana columbia
ccctcgcgtccggaaaaattgaaaacctctctctgtctcattttccctttttttctctttatctcaagctcattcttcttcttaataactagatctctctttctttcttcttatttttctcttctcttctttagtttcgcttatctcgcggctctgaccagctctcaagttgttcgtttctggttaatggatattgaaccctcttgggatcttgggggggtggttatttccttttcgaaattgcatggccacatcaaatgaccaaaccaatactaaatcatcacattctcgtactcttctccttctcttcatcttcttatccctccttctcttcagtagccttacaatccccatgactc

SEQ ID NO: 92162 - DNA, 356 bp, Arabidopsis thaliana columbia
tcggtttgttggaagagacattagggcttataccaggaatggtgaattacagagttgaagatctaccagaggaagttgtatttgaagatttggactctgctttcccaaaggctttataccaaatgagtcttgctttacctcgcgcctctgctgttttcatcagttcctttgaagagttagaacctacattgaactataacctaagatccaaacttaaacgtttcttgaacatcgcccctctcacgttattatcttctacatcggagaaagagatgcgtgatcctcatggctgctttgcttggatggggaagagatcagctgcttctgtagcgtacattagcttcggcaccgtcatg

SEQ ID NO: 92163 - DNA, 551 bp, Arabidopsis thaliana columbia
  unsure (1)..(551): unsure at all n locations
ctctgcctcatcatcttcaaactgttaccacgtccatagggttgtcgaagagctaggaagagccttaccaagtgcttcttcttcccctaacatttaggttggtaggagaagcaaaggaagagatcatttataatggctcctgcattcggaaaatgtttcatgttctgctgcgctaaaacctccccggaaaaagacgaaatggcaacggaatcgtacgaagccgccattaaaggactcaatgatcttctcagtacgaaagcggatctcggaaacgtcgccgccgcgaagatcaaagcgttgacggcggagctaaaggagcttgactcaagcaattcagacgcaattgaacgaatcaagaccggttttactcaattcaaaaccgagaaatatttgaggaatagtactttgttcaatcatcttgccaagacttcagacccccaaagtttctggtgttttgctttgctctgcattcctcggagttttnnccatcctnaaaatcttgaatttcccancctnggtnaggnttttntttntcagaaacattagccaat

SEQ ID NO: 92164 - DNA, 696 bp, Arabidopsis thaliana columbia
  unsure (1)..(696): unsure at all n locations
nnnnnnnnnnnnnnnnnnnnnnnnnnnnnnnnnnnnnnnnnnnnnnnnnnnnnnnnnnnnnnnnnnnnnnnnnnnnnnnnnnnnccacgcgtccgcccacgcgtccgcttcgataaggattttactctccagagaaagaaaaaaaaaacctcctctgcttttgtgatcctttaaggaaaaagacgaaatggcaacggaatcgtacgaagccgccattaaaggactcaatgatcttctcagtacgaaagcggatctcggaaacgtcgccgccgcgaagatcaaagcgttgacggcggagctaaaggagcttgactcaagcaattcagacgcaattgaacgaatcaagaccggttttactcaattcaaaaccgagaaatatttgaagaatagtactttgttcaatcatcttgccaagactcagaccccaaagtttctggtgtttgcttgctctgattctcgagtttgtccatctcacatcttgaatttccaacctggtgaggcttttgttgtcagaaacatagccaatatggttccaccttttgaccagaagagacactctggagttggcgccgccgttgaatacgcagttgtacatctcaaggtggagaacattttggtgataggccatagctgctgtggtggtattaagggactgccgttcaggtgtctcccacnaagggctnntgaattgggggc

SEQ ID NO: 92165 - DNA, 397 bp, Arabidopsis thaliana columbia
gggtctggcacaacaacggagtcaggttgtcggttccaagagccgagtcttctataaacatcactatgggttgtacgcttcagcgtgggatagcaaaaagcttaagtcaggaaaacctagtggagttatctgatgaaaatgatgatctatgtcctgtggagtgtgtcactgagttcaagacagatgatgaattgcttagcgttcttgaaaagtcgaaagaaactaattctttggttgtggttgatttttatcgcactgcatgtgggagttgtaaatacatagagcagggcttctcaaaactgtgcaagcaatctggtgaccaagaagctcctgttatcttccttaagcataatgtggtagatgaatatgatgaacaatctgaagtcgcagaaaggct

SEQ ID NO: 92166 - DNA, 391 bp, Arabidopsis thaliana columbia
tccggtggctcaagctttacttttggtttatgagaaagcagaagctgaaggaaggtacatctgcataggccacacggttagggaacaagaagtcgctgagaagctgaaaagtctttatctaaattacaactacccaaagagatacatcgaagcggatggaaaagtgaaggtgagttcagagaagttgcagaagttgggttggacttaccggccgttggaggaaacacttgtggattctgttgagagctaccgcaaacgctaagcttgtggactgaaaactgggaacgaatagcatatgagtgttttgggtccatgtgttaagtgttcctatctgcacacgctctttcatcttctactcaagaataagagttgtgcaacatatataacatcc

SEQ ID NO: 92167 - DNA, 810 bp, Arabidopsis thaliana columbia
  unsure (1)..(810): unsure at all n locations
aatccacaggaatactgcaagaaaactgagaattggtattgtctggcaaagacacgagcagagagtgaagcttttgaatttgcaaaacgaaccggacttcatctcgtcagtgtttgccctacccttgttttgggacctatactgcagcagaacacagtaaatgctagtagcctggttcttcttaagcttcttaaagagggttttgaaacacgtgataaccaagaacgtcatttggtagatgtgcgtgatgtagctcaagctttactcttggtttatgagaaagcagaagctgaaggaagatacatatgtacatcccacacggttaaagaagagattgtggttgagaagctgaagagtttttatccacattacaactacccaaagaaatacattgatgcggaagatagagtgaaggtgagttcagagaaattgcagaagttgggttggacttaccggccgttggaggaaacacttgtggattctgttgagagctaccggaaagctaagcttgtggactgaaaacttggaaagaagagcaaaatagtgttttagcttcatatgttatagttatagtgttccattctgcacacacacacacactctctcatcgtttactcaataataagagttgtgcattcaccatggatttctgagtttttgttattttctttttagatatcattacttttattaccaatctacaattttctttccataataaaaaaaaaaaaaaagnnnnnnnnnnnnnnnnnnnnnnnnnnnnnnnnnnnnnnnnnnnnnnnnnnnnnnnnnnnnnnnnnnnaacgaaat

SEQ ID NO: 92168 - DNA, 560 bp, Arabidopsis thaliana columbia
  unsure (1)..(560): unsure at all n locations
cnnnnnnnnnnnnnnnnnnnnnnnnnnnnnnnnntacgcctgcaggtaccggtccggaattcccgggtcgacccacgcgtccgcccacgcgtccgcccacgcgtccgcccacgcgtccgggaagatgatggagaacactgttcggagattgaatctccgccgtctcttggaactcataggagattgatttctttgcttctgtggttgtttccgaaagaaggaagaaggaagagaatattggaggagcagttgaattcgtcgttgaggattaagaagactaatcaacggttgatgctctttcaacctttgtttaattatcgtaaacccaacgaccaattttcattactctcttaagatttttcttttctaaaagaaacaacagtttgaagtttattatacacacttgtgcaagttgcttaacaaagtcatagaattttattccaaaaaaaaaaaaaaaaaaaaaaaaaaagagnnnnnnnnnnnnnnnnnnnnnnnnnnnnnnnnnnnnnnnnnnnnnnnnnnnnnnnnnnnnnngnnnnnnnnnnnnaggatatccgcaa

SEQ ID NO: 92169 - DNA, 537 bp, Arabidopsis thaliana columbia
ctctcattctctctcataaatgaaagatcacattggtgtgagttgttggcgtagcgggtgtaaccgaatcttgtgtatgtgcgagattactatctcgactatggaattgcaaattcattgatgtttacggttagaaactcatagaatgagaacttttagtagatatagaactttgagagcgacaagacgatttctcaagcatgtggttgataggagaaaccgttaaccgtgagacctccatcaacacaaatggtttgacctgtgatataagaagctgcaggtagacacaagaagaccactagtgatgaaacttcattcggctctccaacacggccaagtggagttctactcaacaatccctcctttttactgacgtcttcaagaaacgattgagactgggcagtcttgacaacattaggtgcaacagcattggctcttatgccgtcttttgcccattcacatgccaagtttctagctaattgatttagagctccttttgttagaccataaatggatccacagtcaattagtgataca

SEQ ID NO: 92170 - DNA, 541 bp, Arabidopsis thaliana columbia
taggtaccactatagaagagttatgacgtcgtacgcacgcgtacgtaagctcggaattcggctcgagctcactttctctctctctctctagaaaaagaaagaaagaagaaaaacttattgttattcccatttcgcccctatccgaaaaatggttgaagctcaatcatggacaacgcggcggatgagcaatcctagattcgacgccgccgcaaccgccgcaccaaccatcgtagacatccccggaacaccaccacactcctccgcttcttcaccactcaaacccttcttcctctcttcccccaccgtatcaccaacaatcctcacggcggctataatcgccgcctggtttggctcaaatataggagtcctcctcttaaacaaataccttctcttctactacggtttccgttacccaatcttcctcaccatgacacacatgttatcatgcgccgcctatagctccgccgtaatcaatatcgccggaatcgtgccacgtcagcacatcttatctcgccgtcagtttctaaagatcctctctttg

SEQ ID NO: 92171 - DNA, 734 bp, Arabidopsis thaliana columbia
gtttattcttgggtctctctctatctctcttatccagatttatcatcgtcattacatataaacatcaaacttaacttttcaatattctcattcactttttcctcttgtgctctaattcttatccggatccgatttctctcatacaaagattctgtttttcttcttgggttattgttcttgctctgtttccgtatctcaaagtttcagctgctgaattgaatttgcattgatcgtagatgagaccaatcattaggttatcatctctcagtagaattagatgggctctaaggaacaatcaagaacgttattcttcaactttctactccaaaagccgcaaacttttgatcggtgtcaatcaaaatcaagctctgctgaatacaaacactgataattcaagtttgtattcaaggtcaagtatctttagaggcttatcagcagaagcagtagaagcagctgatcctgctactactagggtcaccgtctcagatgtgaatagaacaggtcctcttgttgagtatgagagaagaatcagtaatggtgaactcatgactggtgatatctgccaaattagtgcattgagagagcttcagagactatatgatgagcttgtggattcagtagatacatgtcgtttagatcggtataatacttctgataaatcctcaagaagtcgttggttttggtctcggctcatgccacagacttcttactcacccgtcaaaggattatacctt

SEQ ID NO: 92172 - DNA, 469 bp, Arabidopsis thaliana columbia
agagagagagagagatagttggcccagcggatcgacgtcgacgatgatgatgatgatgatcatttgattcttaagctaaaagctttcttcttcttctctctcccatcccatggagttcgtgatttagtctctcctcttagatttttctctctttccgctccttatttttagtattattatctcagcagaaaaacaaaaacacttttcatttctttatttttctttctcatttcgcataaatctttgtcgccgagacgatttgtgtctgagaaactgagaagaggaatgggagaaacagttcattgtggaagcttcttgtcctcaatgagggatctaagtgaagatatttccaatacttgtagctattcaatgtattgtggaggtgataaaactttgccttatgggcagtatcagaatggtttctcggcgagacctccaacggattcttacgagagagattttttgaaac

SEQ ID NO: 92173 - DNA, 470 bp, Arabidopsis thaliana columbia
tccacaactctaacaaaccttcccgattcatcctctttgactcccttcactcgatctcatccgcaatggaatcaaagacaacccaaaacggatccgaagtcgtcgaactcacagagttcgagaaaacccagaagaagtatcaagatttcatcgctacacttccaaagagcaaaggctggagaccagatgagatcttaacccaatacggtggacactggtggcaagaatgtctcctcgaaggtctttttcacgctaaagaccatttcgaagcacgaccaactgatttcctcgtctgtagctacccaaaaaccggtacaacttggctcaaagcactaacttacgcaatcgtcaatcgttctcgttacgacgacgccgcaaacccactcctcaaacgaaaccctcacgagtttgtcccttacgttgagatcgcacttccgttggaccccccctttgatgttcttcaagacaga

SEQ ID NO: 92174 - DNA, 369 bp, Arabidopsis thaliana columbia
ccctcgcgtccgcggacgcgtgggcgacactttctagaccaaaaaaacaatacgtatagagattgtaccataaataattaaaccatagtaagagatgtactttaagagaatttttttgaagttttcaaaattaatcgaaccaaacctaactagttagttattatgagtgtggctttttagtgactggatttgatgtcaagtgattttactataaattgatcttaaattgttttggaaaatcttaagcggactaatgggattttatctcagatttggagaattcatttttgaggcaattaagtttttctgatattagtatattgctgaaaaaatgaaaaacaataattataaaaaaggaaactataagtt

SEQ ID NO: 92175 - DNA, 497 bp, Arabidopsis thaliana columbia
cggacgcgtgggcggacgcgtgggtgcttcaccaccagagagatacatccaaaaattcatatctttccttcatttttattggcgtttttaagaaaacaaagcttccccaattagggttttgtattagaacaatgggattgtggaatggaaaaggcaccggaggatttatcctctaccttctcgtggctttctccgtcgccgtcttctctgtttcttacgtcggagacacaacaaaccctattcatcatcatctctcttctctctctgccaccgaaaaaatttggccggatttgaagtttagctggaaacttgtgttggctacagtgatagcgtttctacgatcagcttgtgggactgttggtggtgttggaggtggtgggatttttgttcctatgctcactcttatactcgggttcgatacaaaatccgcagctgcaatatcaaaatgtatgataatgggagcatcagcatcatcagtttggtacaatgtacgagtt

SEQ ID NO: 92176 - DNA, 525 bp, Arabidopsis thaliana columbia
  unsure (1)..(525): unsure at all n locations
cctaatttgacatatgcaaaggatttggttgatgtcatgtatcgggccaatggaccggatttcggagcagcaagtgatggtgatggtgacagaaatatggttttaggaaacaaattctttgtcactccttcagactctgtagctatcatcgcagccaatgcacaagaagcaattccatatttccgtgctggtcctaaggggctggcacgttctatgccgacaagtggtgctcttgatcgtgttgccgagaagttgaagcttcctttcttcgaggttcccactggatggaaattttttggaaatcttatggatgctggaaaattgtcaatctgtggagaagagagctttggcacaggttctgatcacatccgtgagaaggatggaatatgggctgtgttggcgtggctttcgatccttgctcatcgcaacaaggacacgaaaccaggggacaagttggtgtctgttgcagatgttgtgaaagagtattgngcgacatacggaaggaactttttttcaagatacgac

SEQ ID NO: 92177 - DNA, 788 bp, Arabidopsis thaliana columbia
  unsure (1)..(788): unsure at all n locations
gtctcccgtcgtctctctttcgtcctctccatcgatttcaaaatctctcttctgatctatatctctctccgcccatatctctcgtgaatgttctctgagaattctctagatcttcaatcaaaagttatctctctctctcacctattgtaaaaatcaccagtttcgtatataaaaccctaattttctcaaaattcccaaatattgacttggaatcaaaaatccgaatggatgtgagcaaagtaaccacaagcgacggcggaggagattcaatggagactaagccatctcctcaacctcagcctgcggcgattctaagttcaaacgcgcctcctccgtttctgagcaagacctatgatatggttgatgatcacaatacagattcgattgtctcttggagtgctaataacaacagttttatcgtttggaaaccaccggagttcgctcgcgatcttcttcctaagaactttaagcataataatttctccagcttcgttagacagcttaatacctatgtaatcttcttccctttcccttcgccttttttttttacttcatcatttctcgattttatggattttgttccattaatgttgttcccatggttgctttatgtttctgagcagaggagttttgtatccattagaatcgatagttagtttcatgagtatgctttttagagactactttatttgcaataaaaaaaaaaaaaaaaaaagnnnnnnnnnnnnnnnnnnnnnnnnnnnnnnnnnnnnnnnnnnnnnnnnnnnnnnnnnnnnnnnnnnnnnnnn

SEQ ID NO: 92178 - DNA, 422 bp, Arabidopsis thaliana columbia
cttcctgacttcccagttcccatttcagcaatctacataaacgaccttactggggaaattgtaaccgctgctggaactgtccttgcggtttggagcatcaatggcgattgccttgctgtggctaacacatcgcagttaccatctgattcggtattatcagtaacaggctcaacatcttccgactggcttgagacaagctggtatgtaactggtcatcagagtggagcagttaaagtatggcggatgattcattgtactgatccggtgagtgccgagagcaaaacaagtagtagcaacagaacaggagggctgaatttgggtgatcaagtgccagaatacaagttgattctacacaacgtgttgaaattccacaagcaaccagtcaccgcgctccatctcacaagcgacctgaagcagttact

SEQ ID NO: 92179 - DNA, 510 bp, Arabidopsis thaliana columbia
acgactcacttagggaaagctgctacgcctgcaagtaccggtccggaattcccgggtcgacccacgcgttcggccacgcgttcgcggacgcgtgggttcgagaggaccgggaaggacgcaatatataggatactagatagagagtgactgaaggagagaaaaacaaaaatggcgattggttccgtctctaactcttttctcactttcaattctccctatctgtctccgatttagccgaagaagattctctgccatggcttcttcaactactggagtgagagtcgctgaaggagaaggcaatttgccaaaacttgtccttacttctcctcagaacagcgaggctgagatatatctccttcggaggctgcattacttcttggaaaggtgcgagcggttaagatcttctttttgtcagaccagatgctgtcttcaataagattaagcccattagcggagggattccacattggttttcaaaatttggacctgggcttattcaacaggatgggt

SEQ ID NO: 92180 - DNA, 531 bp, Arabidopsis thaliana columbia
cagctctcatacgactcactttaaggaaagctggtacgcctgcaagtaccggtcccgaattcccgggttcgaccacgcgtccgcatttatgggagaaacacttgaagacttaatggggaaaaatccttggaccttctgctcacatagaatggcaatgctatctatcttctccatatcatctcgattctcctcatcacaaaactagtcatcttggtttggccaaaatcatatctcttatgcgatcgctttcatccattttttcgagatgatgatcataggaggagatatccatcttcaatccctcttgactctaccatgaacttctacctatccctcgaaacaggtcgcttttggtttccagctcaagtttacaaccgtgagaatggacatgtagggttcatgttgtcatgctatgatgctgagctcagctatgacactgacactaatacttttcaagctaggtatccaccacatggtaaaagagcaattgcggttgaaaaagacgtgacatgggagaggataagagcagct

SEQ ID NO: 92181 - DNA, 956 bp, Arabidopsis thaliana columbia
  unsure (1)..(956): unsure at all n locations
nnnnnnnnnnnnnnnnnnnnnnnnnnnnnnnnnnnnnnnnnnnnnnnnnnnnnnnnnnnnnnnccacgcgtccgctcaattcaaatacataaataaatatcaataaaatggcgggccgcgacacattccagctgcgttttgcagcagtcgcggcatccgccgccgtattgatctttctcatggctggtcaagtcgcggagtcgcgtatgatcaatatctgctctcacaccgcgtatccatctttgtgccgacctctggtgaaacgtgtcacgagccctagaaaagccacgcaccgaaccatccaagctttggaggctaagacgaaactagctctagccgaaacagctaggttcaaaaacggtaaccaagcggtcagcacgtgttacgagacattgggcgacgcggtttacaatttggcaagcgcgagaaagagcataaggaaacgtgatgtgccggcgatgaacacgtatctaactgcggctgtgtctgattacggtgcatgtgtggacgggttcatttaaacacaacaggttaatgcgatccaaaatgcagtggttgacttgagaaaaattagcagcaattgcttggcgttgtctacattgattagatgatcgatttaagagaacaattgatttaatttttctcaaaacaaaaactaattaattgaagaaataaaaaatctcaagcaattaaaatttgggtttctttttgttgtttttgttctgaaaaaaaagtttgttgttgatccatcattcgtatgtaacgcccctgggtgtaactaattaaatttgaatttcgtgtaattaaaaatcgctagtagattttttcatattccnnnnnnnnnnnnnnnnnnnnnnnnnnnnnnnnnnnnnnnnnnnnnnnnnnnnnnnnnnnnnnnnnnnnnnnnnnnnnnnnnnnnnnnnnnnnnnnnnnnnnnnnnnnnnnnnnnnnnnnnn

SEQ ID NO: 92182 - DNA, 410 bp, Arabidopsis thaliana columbia
atcgtaatccgaatttaaaaccagaagagctcttaaccggtgtaacatttgcttctggtggtgctggttatgttcctttgacaaccaaaatagcgggtggaatacctttaccacagcaattgatatattttgaggaatatatagagaaattgaagcaaatggttggagaaaagaggacaaagttcataatcaagaatagcttgttcgttgttatatgtggtagtaacgatatcgccaacgacttctttactctccccccggtccggctacactacaccgtcgcttctttcaccgctcttatggccgacaatgctcgttcttttgctcagacactctatggatatggagcaagaagaatacttgtatttggtgcaccaccaataggatgtgttccttcgcagagaaccgta

SEQ ID NO: 92183 - DNA, 1745 bp, Arabidopsis thaliana columbia
gcccaaaataatctcataaccattaaaaacaaatctcctccttctctccggcgtcgatggaggatctccgtcgtagatttccgactaaaaagaacggagaagaaatctctaatgtcgccgtcgatcctcctcttcgtaaagcctctgacgcgcttcctcttccgttatacctaaccaacacttttttcctctcgctcttcttcgctactgtttattttcttcttagccgatggcgtgagaagatccgtaactcgacgcctcttcacgtcgttgacttatctgagatctgtgctctaatcggtttcgttgcttcgtttatctacctccttggtttctgtggtattgatctcattttccgatcttcttccgatgatgatgtttgggttaacgatgggatgattccatgtaatcaatccctagattgtcgtgaggttcttccgattaaacctaattccgtcgatcctcctcgggaatcggagcttgattcggtggaagatgaagaaatcgttaaattagtgatcgacggaaccatcccttcgtactcattggagacgaaactcggagattgtaaaagagcagcagcgattagaagagaagcggttcagaggataaccggtaaatccttaaccggtcttccattggaaggtttcgattacaattcaattttggggcaatgctgtgagatgccagttgggtatgttcagatcccagtggggattgcaggacctttgttgcttgatggggttgagtattcagtgccaatggctacaacagaaggttgtttggttgctagtaccaatagaggttttaaagctatacacttgtctggtggtgcttttagtgttcttgtgaaagatgccatgactagagctccagttgttagattcccttctgcaagaagagctgctcttgtcatgttttatcttcaagatccttctaatttcgagagattgtctctcattttcaacaaatcgagtagatttgctaggcttcagagtattacatgcacgattgctgggaggaatctgtatccgaggtttgcgtgtagtactggtgatgctatggggatgaacatggtctcaaaaggtgttcagaatgtcttggactttgtaaagagcgagtttcctgacatggatgttattggcatctctgggaactactgttcggacaagaaggcttcggctgtaaactggatcgaaggacgtggtaagcatgttgtatgtgaagcttttattaaggctgagattgtggagaaagtgttgaagactagcgttgaggctcttgtagagcttaacacgctcaagaatcttgttggttcagccatggcgggttctcttggtgggttcaatgctcattcaagcaatattgtcagcgctgtgttcatcgccactggccaagacccagctcaaaacgtggagagctcacactgtatgaccatgattcttcccgatggtgacgaccttcacatctctgtttcaatgccttgcattgaggttggtactgttggaggtgggacacaacttgcatcacaagcagcttgtttgaatctactcggtgtgaaaggatcaaacaacgagaaacctggctcgaacgcacagcaattggcaagaatagtggctggttcggttcttgcaggagagctttcactaatgtctgctattgcagctggacagcttgtgaagagtcacatgaaatacaacagatccagcagagacattggcccttcgtctcaagtcaacaggtga

SEQ ID NO: 92184 - DNA, 698 bp, Arabidopsis thaliana columbia
  unsure (1)..(698): unsure at all n locations
tctaatacgactcacttagggacaagctggtacgcctgcaggtaccggtccggaattcccgggtcgacccacgcgtccgtacggctgcgagaagacgacagaagggggggaatcgattgctcttcttcgtagtcgcctttgaattcgcagagtgagaagcaatgaaggtgagatcatctgtgaagaagatgtgtgagttttgtaaaacagtgaaacgtcgtggacgtgtgtatgttatatgctcttccaatcctaagcacaagcaaagacaagggttcagttcctttgcttatgaaggaattacaccttcccctttgtttgctgagccgattgctagtcaggagttggtgaggctgcctggtcagggggtatcagccggactggcatcacttttacacaaaaggcctatgccaacagcgtatttcggatggaggtctggtcttgcatccattctcttcaaacaaggaaattaggatgtcagcatttccctttttattcttcagatttgtaatcgcagttttcttccaattcctatgaaacattattgtatatctctccacttttaccttggtcagtcgtatgctccttcgagacctgtttgnnnnnnnnnnnnnnnnnnnnnnnnnnnnnnnnnnnnnnnnnnnnnnnnnnnnnnnnnnnnnnnnnnnnnnnnnnnnnnnnnnnnnnnnnnnnnnnnn

SEQ ID NO: 92185 - DNA, 415 bp, Arabidopsis thaliana columbia
cccacgcgtccgcggacgcgtgggcggccatagaagacatacgcgagaacgagattctcttcagaggttcatcccccgagttactgatgttggatcaatccggatatctacagattgtagacttcagattcgccaagaaattgtccggcgaacgaacatttacaatctgtggaaatgcagattatttagccccagaaattgttcaaggcaaaggccatggttatgcagctgactggtgggctcttggagttttgatctactatatgctagaacgagaaatgccattcgggtcatggacagagagcgagctcgacacgtttcagaagattgcaaaaggccaactaactttccctcgagttctaagctcagaagctgaagatctcatcacaaagttgcttgaagttgatgaaaacct

SEQ ID NO: 92186 - DNA, 882 bp, Arabidopsis thaliana columbia
ctgcagtaccggtccggaattcccgggtcgccccacgcgtccgcgatggggtcatcacagtcttcgcaattactcgatgaagaagaagaagaagaagatgaagcagagagcgaaggtgaagaagtagaagaagaagaagatgaagcagagagcgaattgaataacagaagaatcgagctggataatctcttggtcaagaaagttctcgagcaagagcctgagatgcttccttgtcacgcctctgcttctccactctctcctcagctctcttctcttggaactcctcgaatcggaccttccattaaagtctgggatccttacaacgtcctcgcgccacctcctccttcttctccgcctcttttctctcgtatctcctccgccgcggaacacgatcgctccgccgtgacggaagtctatttcatcagccacggcgagtgtgatctcaatctcaggcctgatctgattggaggtagatgccacgtggctactctcacacccaacgggaaacgtcaggcgagagctcttgccgtatttttaaactctgaaggtgttcgattcacctccgtcttctcttcgcctctggatcgagctagatccatggctgtgtctgtttgccaggaaatgaattctcctgaggagcatttgcaagtctcggatgctgtggtcggcatgagtttaggggactgggaaagctgccatcggtcagagatttacacagcctgaaactcttaggttgattgaaagatgccaacctgatttctcagctccatctggtgaatcactcagacaagtagagtttcgtatggttcagtttctgaatgggacaggttcacgtctttcggagaagcttaagccagacctttttgtattttcacagctcac

SEQ ID NO: 92187 - DNA, 474 bp, Arabidopsis thaliana columbia
tttgcttccgttctttttaaaatacaaaaaataaaacttattaagcaattctttattaggtttctcgtggcgatggagaattcttacgactcaagcaagtggtctgattctacaactccatatatggtctcgtggtcactacaatctgagtcctctgattctgattggaaccggtttaatcttggcttctcttcttcctccttcggtggtaatttcccggctgatgattgtgtcggtgggatcgaaaaagctgagtcactttcaagaagccaccgtctagcggagaaaagacgccgtgaccggataaattctcacctcactgctctccggaaacttgtccccaattccgacaagttagacaaagcagctctattagcaacagtgattgaacaagtgaaagaactcaaacaaaaagcagcagaatcaccaatcttccaagatcttccaacagaagcagatgaagtaactgtacag

SEQ ID NO: 92188 - DNA, 792 bp, Arabidopsis thaliana columbia
  unsure (1)..(792): unsure at all n locations
cnnnnnnnnnnnnnnnnnnnnnnnnnnnnnnnnnnnnnnnnnnnnnnnnnnnnnnnnnnnnnnnnnnnnnnnccacgcgtccggggttaatgtggtggattgattttacaaagctgaaaggaattaaagtacaagggaaaggtgttattgatggaagaggctctggttggtggcaacaagattctcctttcattgatagtgataccaaactcatcgtccctttgaacaattctgctaaccaaaaccctcctatgccgatcagaagtgagcttgatgagagaatgccaagcattaaaccaacggcattgagattctctgggagttttggtgtggaagtgacgggtataacgatacaaaacagtcctcagtgtcacctcaaattcgacgactgcgtaggggttgtggtgcatgacatagccgtttcttcacctggtgacagtccaaacactgatggaattcacctccagaacaccaaagatgtcctcattcacagcactactctcgcttgcggagatgactgtatctcgatccaaacgggttgctcgaacgtntttntncacaatgtgaactgtggaccgggtcacgggatcagcattggtagtctcggcaaagagggtacaaaagcctgcntctcgaacataacagtacgngacgtagctattgcacaacacaatgncaggtgtccgnatcaagnatggcaaggaggagtaggntcantnaagggttattttttcaaacattagnttnaccaagtcnaattccntaacggtaaccaattttcttntgcccttg

SEQ ID NO: 92189 - DNA, 804 bp, Arabidopsis thaliana columbia
cttttgtttttccacttctacggtaagtgaaagagagagagagagaggaaaaaaaaggggaaagcttaagatattggagagtaacaatgccttcaaattcaggagatgataatgttcttcaagttctcataaagaactttgatgtccttgctctcccattggttacactcgtctatcctctatatgcatcagtgaaagcaatagagacaagatcattaccagaagatgaacaatggcttacttactgggttctttacgcacttatctctctctttgaactcactttctccaaacctctcgagtgggtttcctatatggccatacatgaagttgtttgggatctgttggttagtgttaccacaattcaatggagcagaacatatctacaaacatttcattagaccattctacagagatcctcaaagagctaccaccaaaatttggtatgttcctcacaagaaattcaatttcttccctaaacgcgacgacgacgacattctcactgctgctgaaaaatacatggaacaacacggtaccgaagcgtttgagcgaatgatcgttaagaaggatagttatgaaagaggtaggagtagtagaggaatcaataatcacatgatctttgatgatgactataggtactaataagttcttaaaccggtttaattagctactttcagtttataagtttgctatgtgacaatatattgtctgtttctatggttgttataatttgcgtggattatgtataagcccttatttaggactgcttatttttgtgaaaaatcaaataaacattttctctcc

SEQ ID NO: 92190 - DNA, 517 bp, Arabidopsis thaliana columbia
accgtttcaccatgtctgggttttggccttcgggagtcctaacgaagcttctctccggcgaatcgccggaagttacaacgattctcgaatcagcttcatcagctcaaactacgatttcaaatactatggaagattccagatcgcgcttcaaacagaagcagatctggtttatatcctcgacgatgatatgattcctgggaagaaaatgcttcagatgctctcacacgtcgccggaactgagaaatacgaaaactctgttttgggaagtatcggaaggattttacctttccggcaaaaggatttcacgtttccgagctataggaagtttagatctaaggaagctggcctttacttgcctgatccagcttatgacatcaccttagatcggattcttcaggttgatttcttatcaagctcgtggttcttatcggcggagctcgtgaaagcgttgttcatcgaaaaaccattcacattctctaccggtgaagatcttcatctcagttatcagcttcagaaa

SEQ ID NO: 92191 - DNA, 472 bp, Arabidopsis thaliana columbia
aaccggcgatgaaaacagtgaaatgatcattgtctatgaatatatggagaagggaacgcttaaggaccatttgtatgacttggatgataagccgaggttgagttggagacagaggcttgagatatgcgttggtgcagctagagggcttcattacctccacacaggttccacaagagcaagcatacaccgcgatgtgaaatctgcgaacattctattggatgataattttatggctaaagttgcagattttggattgtctaagacaggtcctgatcttgatcaaacacatgtgagtaccgcggtcaaaggaagctttggatatcttgatccagagtatctaacaagacaacaattaactgagaaatctgatgtttactcttttggtgtggtgatgcttgaagtagtatgtggtagaccagtcattgatccatcactaccgagagagaaagtgaatttgatcgaatgggcgatg

SEQ ID NO: 92192 - DNA, 1206 bp, Arabidopsis thaliana columbia
  unsure (1)..(1206): unsure at all n locations
ggggcctgctactactcagcagcgagaatctcaatctgtctctccttcgagtattttacaaaaggctagtactgcattagaaattttgaaggaagtgcttgacgcagtcgattctcaaaatcctgagggggcaaaagatgagtttactcttgatcttgtcgagcaatgttcgtttcagaaagagcgcgtaatgcacctcgtcatgacatcgagggatgaaaaagcagtttctaaagcaatcgaattgaatgagcaacttcagagaattctcaatagacacgaagatttgctgtctggtagaatcactgttcctagcaggtctaccacatcaaatggatatcattccaatctcgaacctgtccgtcctatctcaaatggtgaccagaaacgcgagctaaaggcttctaatgcaaacaccgaatcaagcagcttcatttctaaccgagcccatcttaagcttgaggaagaagatgaggaagaggagcctgagcagttattcagaagattgcgaaaagggaaagctagagcaaggcctgaggatgaagaagagccatcacctccacaaggattgcctggatcagcaatacataacgaaagacttaaccgtccacttatccgtcctttaccatcagaggaggcatcacgcggtggtgatagccattcgcaatccccacctgttgtgattccccccccccctgccaagcccgttgagagggaaatattcttcaaggagaataaaggtcccggcgcctttgggtttcccaggtcatatgcgaggccgtttctttgcatagcccgtgatgccaacagctcccccactggaagcgtagacttcagtgtcttaaccaaccaaagctctcatcatcataaatatgtattttttcccgcttgtttctttaggtttggttaatttcccgatgggaaaaagtttgtgttgtgtgccccccctaaatcacgaactctctctctctttctctccccttatacgtttctagtgttgtgaatttagaatgtagcccgatgagatctgattatgtatacgagtaaaaggtacttcctttccctatgttccaaaaaaaaaaaaaaaaaaaaaaaaaaacctaacccaaagggcgaacgctctagaggatccaagcttacgtacgcgtgcagtctacctcataaaacttgcgagggcggtaaacaancgagccccccccccccccc

SEQ ID NO: 92193 - DNA, 534 bp, Arabidopsis thaliana columbia
  unsure (1)..(534): unsure at all n locations
agttcgnaagggaacntgnaaccctggggtnaaaggccccccccncaggttcctggncgcaatcatacgaaggctaccgccactanccgcctttccatcagggaggcatcaccccggtggtgatacccnatcgcaatccccacctgttgtgatccaccaccacctgcgaagcacgttgagagggaaaaattcttcaaggagaataaaggtgacggtgccttgggtttaccaggtcatatgcgaggcctttctttgcatagccgtgatggcagcagctcacgcagtggaagcgtagacttcagtgactgaaacaaccaaagctctcatcatcatatatatgtattctttcacgcttgtttctttaggttttgttaatttacagatgggaaaaagtttgtgttgtgtgttgctgttatttctctctctctctctctctctttctctctccttctacgtctctagtgttgtgaatttagaatgtagcacgatgagatctcattatgtatacgagtaaaaggtacttcctttcactat

SEQ ID NO: 92194 - DNA, 439 bp, Arabidopsis thaliana columbia
ggtggtggtggtgatttttgggaattttgaagagccgttaaaccctagaacggacggagaagaaaaccctagaccggcgaagaagataaatcagattcgatgtcggataataaagaccgtgattccgattccgatgctccggaggaattaacccaggagcaggcgaagctggaagaggaagcactgtggaaaatacagagagagaataagaatagggtttcccgtgagaagaaagagaggcgcaagcttatggcagagcaagtaactctccgaaaatctcgaaagattgaaataattgaggatgtagtagaagaagaagaacctgaggaaaactctgaagctcttgcaaacaagggattcctttccaaagacatcatagactttcttgcggagcgagaaaaacataaagctgagtcagattttgaagaagaagagatca

SEQ ID NO: 92195 - DNA, 585 bp, Arabidopsis thaliana columbia
  unsure (1)..(585): unsure at all n locations
atgaaaacagaaactcgggtttgtatcgttctcgttatctcttatcaaacccaaagggtcctgaatttagagaacaggtcctaaaactctccgcttaaattctttcattttcgagttgtctttttgcgttgttatatacaattcatggttatcacttatcagcaactgagtgatcagtgtaatgttgctggatagattacagttttcagtgtagtgtctgatcttaaccatacgagtcacagatgagcagacccttctttgaattgaaaaaagtaaattatgaagatttgtcaaatatctgaaaatacaaaccaatgtttatggaaatataaatctatagagattttaatgaatggagagagtaaggttatccttcttctgctacttcttcttcttcttcggcttgaaagacatcatctgagattaaagcgaataaatgggaaatggaacgagagagtttgaagccgaaagatctnttctttgtcttcatcccctcctgcaggagaatatgtcgcaagaagtggagattatgagaaacgataaagcttggattatcacaaaaatggcagcatttgtccggacgcg

SEQ ID NO: 92196 - DNA, 623 bp, Arabidopsis thaliana columbia
cccacgcgtccgaagacatctttttaattcactcccttgcaaaatggtggatcatcatctcaaagctgatcgtgtagttgctcgggtagagaagtcggtcaatttggttataggtcataggcaaacacaaaggcaggccggctcaagggagtatgaaggtgaatcaaagcagaagtacacaactaagaagatcccaaaatggaagcataatgattcagagagaaagataggtcaaaagcaaaacaatgaaacaccaactatgattgtcgctggtggatgggtcaggccaaatcgagccatgtgggcttcacctccaaattcctcgagctccaagccacaaaagaataattaattattgagagaagctggtggtaacatatataagaactcaaattaaatgttcaagttgggaagtagacaactgttgagcgagaacaaggccagtcgtttcaaaacatccattaaaaactcagccatggagggtgtggtggcatatatatgtgtgtagactctagatgggtgaattttataagtttattacatgtaatattacatcatggaagttgatatgtctatatatatatactgtatattgcgtgcctttgtaatatatagaattcaat

SEQ ID NO: 92197 - DNA, 454 bp, Arabidopsis thaliana columbia
  unsure (1)..(454): unsure at all n locations
tctggaactttcgagcttctgttttgcggtgctctcaaagcttatatcggatctcgaatcgtgaatcggactcagaacctcggatcttcgaaaatcgacgaacatgtcttctcctggcgaattctataactcacttccacctataaccaaggcttatggtacgttgtgctttttcactacagtagccacgcagcttggcttagttgctcccgttcacattgctttaattcctgaacttgtacttaagcagttccagatctggaggctgataacaaacttgtttttcctcggtggtttctctatcaattttggaatacgtcttttgatgatagcaagatatggagttcaactcgagaaagggccatttgaaaggcggacagcagactnnttgtggatgatgatctttggatccttcactctattggtattatcagtcatacccattttctggaca

SEQ ID NO: 92198 - DNA, 352 bp, Arabidopsis thaliana columbia
gcgtccatgtctctcgagtgctgtgaagattcgggcagatgaattaagcaaaggggatttcacaggctctaagtggttggttcttagatatgctgttcttaatttacaagtaattcaagcagccattcgatttgccaagcaagaaggtctttctgtttccttggatttagctagttttgagatggtcaggaattctaaatcagagcttcgacagcttctggagtctggtaacatagatctttgctttgctaacgaggacgaagcagcagagctccttaggggtgagcaagaagcgggtccggaggcagctcttgagttcctacgcagacattgcagatgggctgtggtaact

SEQ ID NO: 92199 - DNA, 541 bp, Arabidopsis thaliana columbia
cccacgcgtccgcggacgcgtgggctccaatcgtcctccctcgtcctgaatccatccatcatccactctcctcttaaaaatcctatctttgtggtttgcaatctctcccacgacgcgcttcatcattcatggctatttgaatctctcttctctctctctatcaaatatgcaaaacccttcaacggtaacccaggaatcagccgcaccggtctttgatttcttcccacggctcagaggtttaacctctagaaatcgatccccgtgttcgaattcagatgggtatgctctctcatcgtccaatgccttgtacttcaatggtttccggactttaccctcccgaaggatgggaaaaaccctagcttccttgagcttcaacactaagagcagtgctggttcgagtctccgtaggtttatcagcgattgcaatagctttattaggtttcactgcgataaagtggttccggagagctttgcctccgtcggaggagtcggattatcgagtgatgagaatgggattagggaaaatgggactggtggggtt

SEQ ID NO: 92200 - DNA, 577 bp, Arabidopsis thaliana columbia
  unsure (1)..(577): unsure at all n locations
atgannnnnnnnnnnnnnnnnnnnnnnnnnnnnnnnnnnnnnnnnnnnnnnnnnnnnnnnnnnnnnnnnnnnnnnnnnnnngccacgcgtccgaaagaaagaaaaatgtcaacgttagtatcgtaggttagctttgctctcttatgcagtgatcaattattcacataaatgttttgtcaaatatttaagtggacttcatgaattaaattagtgaagtgagcattgctcaaagttgtatatattaagccatgagctttcctcatgactcataatatctcagtaaaacaaaataacatacaaatggatagcatttggattctatcacttctcttcttcatcatctttcttcttctggccgccttcaaacgcaaaaatcatgggaaacatcgacgaataccatctcctcctggttttccaatcatcggaaacttacatcagctcggagaattacaacatcagtctctatggaagctctcaaagaagtatggccctgtgatgcttttgaagcttggaaaagtccccacactcatactttctttatcagaaacagcaaaacaagctctaagagactatgatc

SEQ ID NO: 92201 - DNA, 586 bp, Arabidopsis thaliana columbia
ctgagaatgtgggcttcctctacagcaaatgctctcaagctctcttcttctgcctccaaatctcatctcttgccagctttctccatctccagatgcttctcctcagtgttggaaggacttaagtatgcaaattcacatgagtgggtgaaacatgaaggctcagttgctacaattggtatcactgaccatgcgcaggaccatttaggagaagttgtgtttgtggagctgcctgaagcaaacagttcagtgagcaaagaaaaaagctttggagctgttgagagtgttaaggccacaagtgagattctatctccaatctctggtgaagtcattgaggttaacacaaagctcaccgagtcacctggtggaagctctgatgggtccaaaggaatacaccaagttctgcgaagaagaagacgctgctcactagggtttcttcgccttttatctttcccaaatgttcgaaaaacagagcaaaacaagagaatccatgctttagtttcaatctttcatttctcaatgtttcttaccactctcaacttgtatcagtgtgatactaatttgattaaaagatcatccaatgagactc

SEQ ID NO: 92202 - DNA, 709 bp, Arabidopsis thaliana columbia
cggaagcgtccgcccacgcgtccgcccacgcgtccgcaagaattagaaagaagggagagaaagcaaaaatggcactaagaatgtgggcttcttctacagcaaacgctctcaagctttcttcttctgtttccaagtctcatctctctcctttctccttctctagatgcttctccacagttttggagggtttgaagtatgcaaattcacatgagtgggttaaacatgaaggctctgttgccaccattggcatcactgcccatgctcaggaccatttaggtgaagtggtgtttgttgaactgccagaggacaatacttcagtgagcaaagagaaaagctttggagcagtggagagtgtgaaggcaacaagtgagatcttatcaccaatctcaggtgaaatcattgaggttaacaagaagctcacagaatcacctggcttgatcaactcaagcccctatgaagatggttggatgatcaaagtgaaaccaagtagccccgcggagttggaatctttgatgggtccaaaggaatacaccaagttctgcgaggaggaagatgctgctcactaggagggtttctctctgtcttttatgttccaagttctatcaattctcatgcttgttttctaaatttgcatacactcctatgaccaacttcacaaaataagagttaaagaagatgaaacagagacctaacaaacacattaagattt

SEQ ID NO: 92203 - DNA, 615 bp, Arabidopsis thaliana columbia
  unsure (1)..(615): unsure at all n locations
cacacacacaaataaagcagtgaaacagaatatctttgagatctcctctttatttggagaagacaaaacacagaacaagaattagaaagaagggagagaaagcaaaaatggcactaagaatgtgggcttcttctacagcaaacgctctcaagctttcttcttctgtttccaagtctcatctctctcctttctccttctctagatgcttctccacagttttggagggtttgaagtatgcaaattcacatgagtgggttaaacatgaaggctctgttgccaccattggcatcactgcccatgctcaggaccatttaggtgaagtggtgtttgttgaactgccagaggacaatacttcagtgagcaaagagaaaagctttggagcagtggagagtgtgaaggcaacaagtgggatcttatccccaatcccagggggaatcccttgggggtaacaagaggctcacagaatccccgggcttgatcaacnaagccccatgaagatggtnggtggcaaagtgaaccaagannccccggagttggatccttnnngggccaangntncccaagtntgcnggggaatctcccccagggggtccccgcttatgccagcacaancnc

SEQ ID NO: 92204 - DNA, 840 bp, Arabidopsis thaliana columbia
  unsure (1)..(840): unsure at all n locations
cnnnnnnnnnnnnnnnnnnnnnnnnnnnnnnnnnnnnnnnnnnnnnnnnnnnnnnnnnnnnnnnnnnnnnnnccacgcgtccgcaaacgtcaataaaagcaattaagatctctctttactgttttcccacttttcctttgagaaaactcaaaacaaagtaaacaaacaaaccagaaaaaggaatggcactgagaatgtgggcttcctctacagcaaatgctctcaagctctcttcttctgcctccaaatctcatctcttgccagctttctccatctccagatgcttctcctcagtgttggaaggacttaagtatgcaaattcacatgagtgggtgaaacatgaaggctcagttgctacaattggtatcactgaccatgcgcaggaccatttaggagaagttgtgtttgtggagctgcctgaagcaaacagttcagtgagcaaagaaaaaagctttggagctgttgagagtgttaaggccacaagtgagattctatctccaatctctggtgaagtcattgaggttaacacaaagctcaccgagtcacctggtttgatcaactcaagcccttatgaagatggttggatgataaaggtgaaaccgagcagccccgcggagttggaagctctgatgggtccaaaggaatacaccaagttctgcgaagaagaagacgctgctcactagggtttcttcgccttttatctttcccaaatgttcgaaaaacagagcaaaacaagagaatccatgctttagtttcaatctttcatttctcaaaaaaaaaaaacaagcgcggccgctctagaggatccaagcttacgtacgcgtgcatgcggcgtcatag

SEQ ID NO: 92205 - DNA, 576 bp, Arabidopsis thaliana columbia
  unsure (1)..(576): unsure at all n locations
gggtctacccacngcngtcctgnagaacgtaatggtacgagatgcaggatcttcatgttgcagagacacttccccagatggtagaactatcggaagcatacatgcagatatatgagcaggaggaggaatagagcactggaaacaaactgactccatctggttttaagagtaaaagtgaccagtttaatcttggattgaggaggaatgagattagaactcaaaaaggggattcttgaacctcttttttaaggatagagagagagcctgttgttgctagtgattcatcataatgaaaaaccttggtaaaaaaacgcatattgtatgagttttgggaagagcttttggtaaaaagtcttcaaattctgcaacttttgaaattttgtagtaaaatacacatttgacttttgagtttccatttccaaaaaatatcttataaaaaaaaaaaaaggggggccgcgctagaggggccagcttccgncgcgtgatgggcggcataccctncaaagggccccnaatccatcncggcgcggttaaaggcggnngggaacccngggtnccacttanccctgagaatgc

SEQ ID NO: 92206 - DNA, 714 bp, Arabidopsis thaliana columbia
  unsure (1)..(714): unsure at all n locations
ggagaaaaacattattccgcaggttgctctatttgatttattgaagaagtttgatggagaaactgtgacagaggtggttcggcctaagctggccagaatgagataccgtgtaatcaaatctcctcgttacttgatgttccatatggttcggttcaagaagaataacttcttcaaagagaagaaccctaccttggttaacttcccagtgaaggacatggagctgagggattacataccatcattgcctagagcaccagaaggggagaatgtgtgttcaaagtataatctaatcgctaacattgtacatgatggtaagcctgaggacgggtacttcagagtctttgtgcagcgcaagtcacaagaactatggtacgagatgcaggatcttcatgttgcagagacacttccccagatggtagaactatcggaagcatacatgcagatatatgagcagcaggaagaatagagccctggaaagaaactgacttcatttggtttaagagtaaaagtgaccagttttatcttggaatgagattagagatttgtttcacaactcttttggaaaaagatttttggacccctttaaaggatagagagcctgttgttgctatggatttatcataatgaaaaacctttggtaaaaaaaaaaaaaaaaaanaaagggcggccgctctagaggatccaagcttacgtacgcgtgcatgcgacgtcagg

SEQ ID NO: 92207 - DNA, 415 bp, Arabidopsis thaliana columbia
attcacaaagtccctcatcagccaccggttctatataatcccagaacgaaatctctacgtcgaaaccatgtccagtttcttccctttgccgccagccatcgggaaatccactggatgtggagtgcgtgatgaatcacaatcattagttgtatgggccattgaggactactcaatccctgaaagtatcgatcctgatatgatcaacttgaaaatcgaaacagctattgtcaaaaaatttaatttaaggtcgtcggcggtagtgacaacctggattttcggttctgctgagaatgcatggttggctaaatccaaagttaaactttgggaatccgagtttagagtctctctccacaaagggggggatatacgtgccagattaaacatgatgttagcagacgtcatttattatgtatgg

SEQ ID NO: 92208 - DNA, 562 bp, Arabidopsis thaliana columbia
gccagctctatacgactctcttagggaaagctggtacgcctgcaggtaccggtccggaattcccgggtcgagccgacgcgtgcggtacaataaaatcccagaacgaaatctctacgtcgaaaccatgtccagtttcttccctttgccgccagccatcgggaaatccagtaagatgatttctcgaaattaattggttgtttatgatatcatctttctgcgaaggtggtgggggatttatatgtctatgatcgatcttgattagatctaacttgatatctttttcgtaacattagctggatgtggagtgcgtgatgaatcacaatcattagttgtatgggccattgaggactactcaatccctgaaagtatcgatcctgatatgatcaacttgaaaatcgaaacagctattgtcaaaaaatttaatttaaggtcgtcggcggtagtgacaacctggattttcggttctgctgagaatggctgggtggctaaatccaaagtaaactttggaatccgagtttagagtctctctccaaaagggggggataacggcccgataaacatg

SEQ ID NO: 92209 - DNA, 580 bp, Arabidopsis thaliana columbia
  unsure (1)..(580): unsure at all n locations
gaaccaaagcttcgaaaatcagacaattcaactaacaaaaaaatgtcagtagcttcaccgattcaatgtatcaggattctaaatccatcatcttcatcttcttcttcgacagcttcgtcgtctttnagattctcaacaacgactaagccatgtgtcttcatcatcagatgctctcaaacagaaggacccttaaganggccatcggctcctcctgctctccgggagccgcaaaaacctgttcctgcatcacaaccgtcttcctctcctccaccaaccaccgccgcaggaatcagtggctatttgatggtaagggtgtaacttcagtgggggtttcagaggcaaaaggctaaagagcttcaaggatactttaaacaggaaaagcttgaagctgcttggtcaaggtcccttttttggggttccaacccaaaaattgggtctccaatggaaggtgggctttgtttggttcggagttggatgcnacagggttnaacaggtcanccttgtgacaagttaggccctnttgnattnggatntnggcttgntaaanggnttttgtttttgnagcccttntntgcntngc

SEQ ID NO: 92210 - DNA, 840 bp, Arabidopsis thaliana columbia
cggaatggaagggccgggccagcgcgacccgacacgaaccaaagcttcgaaaatcagacaattcaactaacaaaaaaatgtcagtagcttcaccgattcaatgtatcaggattctaaatccatcatcttcatcttcttcttcgacagcttcgtcgtcttttagattctcaacaacgactaagccatgtgtcttcatcatcagatgctctcagacagaaggtcctttaagaagaccatcggctcctcctactctccgggagcctcaaaaacctgttcctccatcacagccatcttcctctcctcctccttctccgccgccgcagaaagctgtagctgttgatgggaagagtgtaactacagtggagtttcagagacaaaaggctaaagagcttcaagagtactttaaacagaaaaagcttgaagctgctgggtcaaggtcccttttttggtttccaacccaaaaatgagatctccaatggaaggtgggctatgtttggtttcgcagttggtatgctcacagagtatgcaacaggatcagaccttgttgatcaagttaagatccttctctcaaatttcggattctagacttggaataataagagtgttgttgttatatatacccagatccttttctctcttctcttcgattcctcttcttgttgtttcttcatattcttcttcctggatgtgtatctgtttcatacagggccatttgtgtattcaatcacctttatcttcaaagtggtatagattcgatcttgcatcattggttctagaattgcaaaggtcggccgctctataggatccaagcttacgtacgcgtgcatgcgacgtcaagct

SEQ ID NO: 92211 - DNA, 865 bp, Arabidopsis thaliana columbia
  unsure (1)..(865): unsure at all n locations
ttttaggtgcactatagaagagctatgacgtcgcatgcacgcgtacgtaagctcggaattcggctcgagaaatccaccaaaaacaatcggcgagaaaaagggggaatcagtttcttgcaagtttcaacaaggacgatcagaagaaatcttagagaaatcggaaaattctcttactcgggttttgcatcggtgaatatgaattgcgaagtttgtcagctaaaggaactggaagtggaatccttcgagatacgcgaagttttgcgctgcattctacatacgattgtctttcatcgtgcgcttggtcttatccgccctaaagatattgatttggagctttttgagatcacttatgttcaatgcggtgaaattgaagtggagaagaaaatcgatgaaaagattgagcagttcattaactggattgagaaacacccaaacaaaaagagtcagatttgtctatcgttctatgaagtcaaaagcaaacagccttctttggttcaccaaaatcgaacggttgtactgggaacaatggtacatcaatctgaatgtccttcagcccactaaggccccctgtcggaaagtctcaccattcctaaactggttttggcccctggagaggcatcggaggagagaagttctcgtaggacactgcttgagcaatcccttcaagaagtcttgttccaaatcataaaattcggtgnaattaggaggaggntcatgttccctccccttaaacggtggngtaatttactnnccctttgnggncactttnccaaggttattgggcntttcctttggggtnggtnttttcaagngggttcttcanaaggggcccnccctnaatgncgggaaatnccatttnccctna

SEQ ID NO: 92212 - DNA, 487 bp, Arabidopsis thaliana columbia
cccacgcgtccgatattctgaaagcagccaaaggaaagtttgtttgataaacctgcgtttcattcccggacggagctctaatctttcagtctctatacctctttctctatctctgagaatctatggcggtggctgcagcggcgatgatcgggttgccacaggcgtatctggaacggaaggacgtgaaggagacgagttcgttggttactgaactctgccgtcacttttatactcaaggttgggtgtctggcactggcggtagcataacgatgaaagttcatgatgcttcgattcctaaaccggagcaacttatcgtcatgtctccttcaggtgttcaaaaggagaggatgcaacctgaggatatgtacatcttatctgctaatggatccatcatatctacaccctctccaaagccatacccaaataagcctcccaagtgtaccgattgtgctccacttttcatgaaggcatatgagatgcgaaatgc

SEQ ID NO: 92213 - DNA, 579 bp, Arabidopsis thaliana columbia
  unsure (1)..(579): unsure at all n locations
nnnnnnnnnnnnnnnnnnnnnnnnnnnnnnnnnnnnnnnnnnnnnnnnnnnnnnnnnnnnnnnnccacgcgtccgcccacgcgtccgctagaaacatctttcatgcgttatcttctccaaaagctctgattctgattctgaatcatcctgaaaaaaacctagaaaaattctatcccacaaaatcttcaaagatccatggccgtaattatccctcgttcagatccaccgtcacgaatccatccggaaccaccacaaaccctagaaatcgaccatttcgatcatcttcctgactcaatcctcctcctcgttttcaacaaaatcggcgacgtcaaagctctcggaagatgctgcgtcgtttccagaagattccattctctcgttcctcaagtcgataacgtcgttgttcgtgtcgattgcgtaatctccgacgacgattcgtcatctttgtcatctatcaaatctcgctccggttcttccgctggttcgttctccgctatatttcgtcttgttgttgggggcattgttaagcccgtacaagctttaggtcaattccttggtacgaagaaatcatcatcatca

SEQ ID NO: 92214 - DNA, 796 bp, Arabidopsis thaliana columbia
  unsure (1)..(796): unsure at all n locations
nnnnnnnnnnnnnnnnnnnnnnnnnnnnnnnnnnnnnnnnnnnnnnnnnnnnnnnnnnnnnnnnnnnnnnnnnnnnnnnnnnnccacgcgtccggaaaacagagaaacatctgtttttttgtttagtttgatctgttgagagatgacgagcggtggcgacgataaaaacagatctgtggtgacagatcatcaacatcaacaacagcctcctcctccgtttcaaggcgtctctaactatccaccgcagcagcagcctcccgccaccggttatcctcagcctgctcagccctacgcccaaggttatgttgttaatggagtaagaccaacagaacacggtcgttgttgcggtatcggcattggctgggtattattcatccttggtttcttcttcgctttgccctggtacatcggtttcttccttctattattctctaggaacccgcgtgagagaccaggatatatagcttgcgcagttggggctgtttttgctaccattatcgtcatctttggaaccgtaagaggatcaggggtgtggtcatgaaggtgaagatgtcaacaatctgaatccgttgagattttgtttcagaagaagatcgatccataatgtttgtttacataatgtgtattgtctctagattacaaaacagtactgtatatgtttctttgaaaagttcttcttttgnnnnnnnnnnnnnnnnnnnnnnnnnnnnnnnnnnnnnnnnnnnnnnnnnnnnnnnnnnnnnnnnnnnnnnnnnnnnnnnnnnnnnnnnnnnnnnnnnnnnnnnnnnnnnnnnnn

SEQ ID NO: 92215 - DNA, 497 bp, Arabidopsis thaliana columbia
gctccatacgactcatatagggaaagctgctacgcctgcaggtaccggtccggaattcccgggtcgacccacgcgtgcgcggacgcgtgggcggacgcgtgggcggacgcgtgggcggacgcgtgggaccgtttcttcactcctaaatccaagccacaccatattgattctcttcactggtgcttgcttggagctaagttttaacctcacggaaggaatctttattctgcaatcactgcaaagagaaggagtctatattttggtggagaatgttgttggacgataataaacatatgatttcagtgcaacgcggctttaagagtcgtggtcagatgaaatatctgagttaaagattgatcaaatggctatcgctggtctgcaaaatattttggtgatcgattcatctttccgtcgggactctgaggttcaggcgactagacaaagggaaaatgagggaaggtcaagcgtccgggcatcctcactcctacagatgtgga

SEQ ID NO: 92216 - DNA, 500 bp, Arabidopsis thaliana columbia
  unsure (1)..(500): unsure at all n locations
ntcgtttttttttacccttttgatttgatcttctcttctcggttgaaattagggatttctgtaaaattgtaatgtgtttctcagtaaatcatgagcaagcccgaagaaacttccgacccgaacccaaccggacccgatccgtctcgatcttcctccgatgaggtcaccgtcaccgtcgccgatcgggctccgtctgatctcaatcacgtttctgaggagctaagtgatcaattgaggaatgtgggtttggatgattctgcgaaagagctgagtgttccgattagtgtccctcaaggtaatgtagaaacggattcgagggcattattcggcagcgatcaaaaggaggaagaagaagggagcgagaagagaatgatgatggtgtatccagtgagacctgattcagaggattgttcgttttatatgagaactggaagctgcaaatacggatcaagttgcaagttcaatcaccctgttcgcaggaaacttcaaattggtaggga

SEQ ID NO: 92217 - DNA, 561 bp, Arabidopsis thaliana columbia
  unsure (1)..(561): unsure at all n locations
nnnnnnnnnnnnnnnnnnnnnnnnnnnnnnnnnnnnnnnnnnnnnnnnnnnnnnnnnnnnnnnnnnnnnnccacgcgtccgcttatcttcttcctcttttgcttttctaatctctcaatggctaccttaaaacacaaacctgtaaatttggtattttacgtttataatttgattattatattctcctcccatagttccacggcggagctccgcaggctactgcagccatcaaaaaccgatggtacagtgagctttctcgttatcggagactggggaagaagaggctcctataatcagtcccaagtagctcttcagatgggagaaatcggagagaaattagatatcgattttgtgatttctactggagataatttttacgacaatggtttaaccagcttgcacgatcctctatttcaagattcttttaccaacatttataccgctccgagcttgcagaaaccttggtatagtgttttaggaaatcatgattatagaggtgacgtcagggcacaacttaggccctattgctcagagctcttgggcaacagnttgggtttcaat

SEQ ID NO: 92218 - DNA, 483 bp, Arabidopsis thaliana columbia
cccacgcgtccgcccacgcgtccgcggacgcgtgggcgaagcacatctcttttgatctcttcgccaagaaaacaaaaagcatagcctaacagaacagaatctagtgagccaaatcaagatggtgacgccaactacaattagaaccgtcgatctccgctccgacacggtgactaaaccaacagagtcaatgcgttcagcaatggcaaacgcggaagtagacgacgacgttttgggaaacgatccaacggctctgcgtttggagaaagaggtggctgagatcgctggaaaagaggcggcgatgtttgttccgtcagggacaatggggaatctgataagcgtgttggtccattgtgatgagagagggagtgaagtgattcttggagacgactctcacattcatatatatgaaaacggcggcgtttcaagcctcggtggtgtgcattcgaggacggtgaagaatgaggaagacggtacgatggagat

SEQ ID NO: 92219 - DNA, 519 bp, Arabidopsis thaliana columbia
atacgactcaccttagggaaagctgctacgcctgcaggtaccggtccggaattcccgggtcgacccacgcgtccggtgactttatatttatttagatgagtttcattctaatgggatcttttatttaatgttttggttataatccaacgcagtgagccaaatcaagatggtgacgccaactacaattagaaccgtcgatctccgctccgacacggtgactaaaccaacagagtcaatgcgttcagcaatggcaaacgcggaagtagacgacgacgttttgggaaacgatccaacggctctgcgtttggagaaagaggtggctgagatcgctggaaaagaggcggcgatgtttgttccgtcagggacaatggggaatctgataagcgtgttggtccattgtgatgagagagggagtgaagtgattcttggagacgactctcacattcatatatatgaaaacggcggcgtttcaagcctcggtggtgtgcatccgaggacggtgaagaatgaggaagacgg

SEQ ID NO: 92220 - DNA, 497 bp, Arabidopsis thaliana columbia
  unsure (1)..(497): unsure at all n locations
cagctannnnnnnnnnnnnnnnnnnnnnnnnnnnnnnnnnnnnnnnnnnnnnnnnnnnnnnnnnnnnnnnnnnccacgcgtccgaacttgcatgccttgctaaggaacaggggaagaacaatgttgcctttctttgcttatttacgctgggtagattggaagattgtctgcagttattggtggagagtaaccggataccagaagctgctctgatggcacgttcttatcttccaagcaaagtttcggagatagtagctctatggagggaagatctcagcaaggttaatccaaaagcagctgaatctttagctgatcctgaagagtactcaaatctttttgaggattggcaagttgctctttctgttgaagcgaacactgcagagacaaggggagtttataccgctgcagaaaattatccatcccatgccgataaaccttccattacccttgtggaagcctttagaaacctgcaagttgaagcagaggaatcacttgaa

SEQ ID NO: 92221 - DNA, 502 bp, Arabidopsis thaliana columbia
  unsure (1)..(502): unsure at all n locations
cagctacnnnnnnnnnnnnnnnnnnnnnnnnnnnnnnnnnnnnnnnnnnnnnnnnnnnnnnnnnnnnnnnnnccacgcgtccgacaagattctgcaatatttggagattatgttactcctgaaaccggggcagacgagggtcgtgtggacatggaaactcttgatattgtacaggaggaaggcaccaccagttcatatgtgcaacatactggaaagttgcaaccaaaacctagattactcgagactgtggttgaagaacctgagcctcattactccgctggtgatactggttattttccaatgggtacgaacgagtctgagtttatggccaatgtggaatcaagaaacggtttcagtacttatgaagatcttcaagaagaagaacttaatattcctgaagcccccagagaaacggttggtgagatggaggcgcaaaatgcttctggcggatgggaacaagaagaacagggtgtatcgccttgcattaacaatacagttacag

SEQ ID NO: 92222 - DNA, 438 bp, Arabidopsis thaliana columbia
cggacgcgtggcatctccttcctccgatcttcgtctccaattcggaatcttcctatcacaatttcaaggctcctttaacccttgatcatcaccgattcaatcaattcggaatcacaatttcaaatcgagagaatttcaatttctcttgtaaaaccctaaattatgtacagcaatttcaaggaacaagcgatcgagtacgtgaagcaagcggttcatgaagacaatgctgggaattacaataaagctttccctctatacatgaacgcgcttgagtacttcaaaactcatctcaagtatgagaagaaccctaagatcagagaagctattacccagaaattcaccgagtatctccgtcgtgctgaggagatccgtgctgttctcgatgaaggtggatcgggtccaggatctaacggtgatgcatccgtcgcaacgaggccc

SEQ ID NO: 92223 - DNA, 599 bp, Arabidopsis thaliana columbia
  unsure (1)..(599): unsure at all n locations
cacttacgtttcccagaaaataaaagagctatgaagtttggtaagagtctcagcaatcagatcgagcagacacttcctgaatggcaagacaagttcttgtcttacaaagaactcaaaaaacgnctcaaactcatcggttccaaaaccgccgatcgtcccgttaaacgactccgtttagatgagttttccggcggaatatcgaaagaagagatcgatttcatccaattgttagaagacgagttggagaaattcaacaatttcttcgttgagaaggaagaagaaatatatcatcagactaaaggaatttttgagataggaattgcgaaaccttaaggattcaattggagaagatgataaaaatcaggaaggagattgttgatttccatggagaaatggttcttcttgagaattacagtgctcttaattacactggattggttaagatactgaagaagtatgacaaaagaactggtgatctcatgcgtttacctttcatccagaaagttcttcagcaacctttttacactactgacttattgtcaagcttgtcaaggaatctgaggcaatgcttgatcagatctttcctgctaacgaaactg

SEQ ID NO: 92224 - DNA, 548 bp, Arabidopsis thaliana columbia
  unsure (1)..(548): unsure at all n locations
ggaaaagaagaaatcaataattaatctgaagtggtatatattacatcaactacaacacacccaacacagaaacaaaagttccatgcccgttttgggtaccctaaggacttattgcccggccaaagatgatatcccggaacatgaccctataggttcctctgcctttttgggtaccattggatgataatgtcttgtttaaatctgttagcttcttctattgtataaaaaagtggaatagagcgagtgtgcctctgtctcactctctatttggcttcttgctccaacaatggaatcttcttccatgtctcatctaagccatttaactggtaagaggcggcaatggaaaacacactaacagtagaacttccactcccggatctccttcaaaacccggcaaggcagcgattgtgctctccatatgaagctctccatggacttaggcccgganacnctgctnggaaaccccagcncagttcgtagcaggggagtctggtcagcatgcccagatcctggnagctgacaaagccgagggaangggcggagnctnt

SEQ ID NO: 92225 - DNA, 510 bp, Arabidopsis thaliana columbia
  unsure (1)..(510): unsure at all n locations
nnnnnnnnnnnnnnnnnnnnnnnnnnnnnnnnnnnnnnnnnnnnnnnnnnngagaccaccaaccaaagagatttccccgcgtccggaaaaatgttgaacttatgagctaaaaaagcttctcctccttaccaaagactcgacggtctaccggaaaaaatggctgccaatttctggaattcatctcactataaacagcttttggatccagaagaagtcgacgtagttcatgatctcgataaagaacgtggaatctcaattgatgattttaagctcatcaagttccatatgtctaatcatattatgaaattggctcagcacattaaagtgaggcaaagggttgtagctactgcaattacgtatatgagacgggtttatatcagaaagagtatggtagagtttgagcctcgacttgttgctcttacgtgcttgtacctggcatctaaagctgaagaaagcatagtgcaggccaggaatcttgttttttacatcaaaagattgtatcctgatgag

SEQ ID NO: 92226 - DNA, 621 bp, Arabidopsis thaliana columbia
  unsure (1)..(621): unsure at all n locations
nnnnnnnnnnnnnnnnnnnnnnngaaagcagccacgcctgcaggtaccgggccggaattcccgggtcgacccacgcgtgcgcccacgcgtncgcccacgcgtncgacggctgcgagaagacgacagaaggatacggctgcgagaagacgacagaagggcacggctgcgagaagacgacagaaggggaaaccaaagatctctcttcaaagcttccaccatgtttctccgatcactcaatctctgtacaatactactcttcctagcgatttcatcacaagtttctcaatctctccacttcgaattgcaatctggtcgaacaaaatgtatatcggaagacataaaaagcaattcaatgaccgtcgggaagtacaccgtcgttaaccctaacgaagctcatccttctcctcaatctcacaagatctccatcaagtgacatcgagttacgggaacacgtatcatcacgcggaagatgtagaatcgggacaattcgcgttcacggcggtggagtctggagattacatggcttgttacacagctgttgatcataaacctgaggttacattgagtattgatttcgattggagaactggtgttcaatctaaaagctggagtagtgttgct

SEQ ID NO: 92227 - DNA, 582 bp, Arabidopsis thaliana columbia
aatacgaccctctatagggaaacctggtacgcctgcaggtaccggtccggaatttccgggtcgacccacgcctccgcagatcactgtgccgtcgcccgtcgccgccgccgccacactatcatctctctcaggtttttgattttccacggcaatggagtcttcgattctcaaaagccctaatctctcttcaccatcgttcggtgtaccttcaattcccgccttatcctcctcctccacctcaccattttcatctcttcatctccgatcacagaaccaccgtaccatctctcttaccaccgccggaaaattccgtgtctcgtattctctctccgcttcttcacctctaccacctcatgctcctcgccgtcggccccattacatcccctaaccgtatatcgcgagcccaattaccgtcagaatcttcgatacaacctctccgagaccgtggaaccgtcttccggaacctcccttaccttccaaggaaaagcttgatattggtcgggaaattaaccaacctcgggagtcaacctcattcgaacctggttttcccgttgctccaaaggacaattcgaaaccggtaaa

SEQ ID NO: 92228 - DNA, 640 bp, Arabidopsis thaliana columbia
gacatctgcaatatttatagaggatgtgagaagagaagtgaaaatactgcgggcgttatctggacatcaaaatttggtacaattctatgatgcgttcgaggacaatgccaacgtttacatcgttatggagttatgtggaggtggtgaacttcttccccgcgtccgcggacgcgtgggaaaatactctgaagatgatgcaaaagcagtgcttatacagatccttaacgtcgtagctttctgtcatctccaaggagttgttcatcgagatctaaaaccagagaacttcttgtacacttccaaggaggagaattctatgttgaaagtcatagattttggcttatcggactttgtcagaccagacgaaagactaaatgatatagtgggaagtgcatattacgtagcccctgaagttctacacagatcttataccacagaagcggatgtatggagcataggagtcatagcatacattctcctatgtggaagccgtcctttttgggcaagaactgaatcaggaattttcagagcagttctaaaagctgatcccagttgtgatgaacctccttggccttcgttatcctttgaggcaaaagattttgttaagagattattgtacaaggaccctcggaaaagaatgact

SEQ ID NO: 92229 - DNA, 890 bp, Arabidopsis thaliana columbia
gctacaatacgactcactttagggaaagctcgtacgcctgcaggtaccggtccggaattcccgggtcgacccacgcgtccggcatggtcttatgctgttcttgggcaagtggagcgacctttctttgccaatatatggaatactttaaccaccttggaggagcaaaggctttcagaacagtatagggaagatgtcatgtttgcttctcaggtgtatcttgtgaatcagtgcttgaagcttgagtgcccccaccttcagttgtcactttgtcaagaactcgaagaaaaaataagccgcgcaggaaaaaccaaaagattcaatcagaaaataacctcatcgtttcagaaagaagttggacgccttcttataagtacagggcttgattgggctaaagaacatgatgtggatggctacaccgtggatgttgctctggtcgagaagaaagttgctttagaaatcgacgggccaactcatttttcaagaaactctggactaccattagggcatacaatgctgaagcggcgatatgttgctgctgctggatggaaagtggtatctctgtctcttcaagagtgggaagaacatgaaggcagtcatgaacagctagaatatttgagggagattctcaccggctgcatatagagaagacaagtaaccaaacatgtaatgtgttgtcattttaaggttgttaatcaagtgttcttttccgttatgtatatagctaagattcttatagtagattgatggtctatgtttagagcaataatcaccattgaaatccatttaaattttacaaaaaaaaaaaaaaagggcgaccgctctagaggatccaagcttacgtacgcgtgcgtgcgacgtcatagtcttctatagtgtacctaatagaatcg

SEQ ID NO: 92230 - DNA, 496 bp, Arabidopsis thaliana columbia
  unsure (1)..(496): unsure at all n locations
nnnnnnnnnnnnnnnnnnnnnnnnnnnnnnnnnnnnnnnnnnnnnnnnnnnnnnnnnnnnnnnnnnnnnnnnnnccacgcgtccgttccaatccaaagccaataaccaacagcaacgtaccacttcaagatgaaaagaagcaggatgcatcgagaaccctagctatttttcagctcacaatcagaaatggcatccctttgtttcaatttgtggtcgatgataacagcagcagcagcaggagcattctcggggctacaatgaaaagctcagattcatcgttcaaagatgattctgttcagtactgcacattctactctgttaatgaagtcaaaaagaaaaaaagtggaagctggctaatccatggacacagagagaaacattgcgggttcgtctacaacataatcggtcaaatgcagctgggaaactcaatgagcgtagatatatcagagcagaaatctttgatcacagagtcagttctgtttgacgaatcagagca

SEQ ID NO: 92231 - DNA, 753 bp, Arabidopsis thaliana columbia
caacttaatttccggttcgacccacgcgtccgcagaaatgtttcttcaggttaccggcacggcgactccggctatgcctgcggtagtgtttctcaattcatggagacgaccacttagtattcctctccggagcgtaaaaaccttcaagcctctagcattcttcgatctcaaaggaggcaaaggaatgagtgagttccatgaggttgaactcaaagttcgtgattatgaattggatcagtttggtgttgtgaacaatgctgtttacgcaaactactgtcaacacggtcgacatgagtttctagagagtatcggtatcaactgcgacgaagtagcacgttctggggaagccttagcaatttcagagttgacaatgaagttcctttcacctttacgtagcggagacaaattcgtggtgaaagcgaggatatcggggacatctgctgcgcgtatttacttcgatcatttcatctttaaacttccaaatcaagagcctatattggagggcaaaggaatagctgggtggcttgacaacaagtaccggcctgttcgcatcccatctttctataccgtctaaaattggtcactttcttcccccaagacgacgcccggtttggtttcaaccttaattcacccccacaaatggaaatcttaccttaaaatgagggcctcggtgctttttacccccccttaatttttttcttatcaaaacatatagaagaacatagggggtcttagtttgcgggggataccaaa

SEQ ID NO: 92232 - DNA, 1669 bp, Arabidopsis thaliana columbia
ggcggctcaagatcagcctcatgaaaaccttatattccctgaggaggttctaccacgtggaaacgctctttaatggaactttagctttagctggtcgtgaccaagaaaccaccggtttcgcttggtgggccgggaatgcccgacttatcaatttatctggtaaacttttgggagctcatgtagcccatgccggattaatcgtattctgggccggagcaatgaacttatttgaagtggcccattttgtacctgaaaagcccatgtatgaacaaggattaattttacttccccacctagccactttaggatggggggtaggtcctgggggagaagttatagacacctttccgtactttgtatctggagtacttcacttaatttcttctgcagttttgggctttggcggtatttatcatgcacttctgggacccgaaactcttgaagaatcttttccctttttcggttatgtatggaaagatagaaataaaatgaccaccattttgggtattcacttaattttgttaggtgtaggtgcctttcttctagtattcaaggctctctattttgggggcgtatatgatacctgggctccgggagggggggatgtaagaaaaattacaaacttgactcttagcccaagtgttatatttggttatttactaaaatctccctttgggggagaaggatggattgttagtgtggacgatttggaagatataattggaggacatgtatggttaggttccatttgtatatttggtggaatctggcatatcttaaccaagccttttgcatgggctcgccgcgcacttgtatggtctggggaggcttacttgtcttatagtttagctgctttatctgtttgtggtttcattgcttgttgttttgtctggtttaataataccgcttaccctagtgagttttacggacctacggggccagaagcttctcaagctcaagcatttacttttctagttagagaccaacgtcttggagctaacgtggggtctgctcaagggcctacaggtttaggtaaatacttaatgcgttctccgactggagaagttatttttggaggagaaacaatgcgtttttgggatctgcgtgctccctggttagaacctttaaggggtcctaacggtttggacttgagtaggttgaaaaaagacatacaaccttggcaagaacgacgttcggcagaatatatgactcatgctcctttaggttcgttaaattctgtagggggcgtagctactgagatcaatgcagtcaattatgtctctccgagaagttggttatctacctctcattttgttctaggatttttcctattcgtgggtcatttatggcacgcgggaagggctcgggcagcggcagcgggatttgaaaaaggaattgatcgtgattttgaacctgttctttccatgactcctcttaactaaagtagtaggtaaaacaaataggttcatattaaaaagtcttctttgtttctttcaattcaatctaaatttttctggctcggctatactatccagccccgccagaaaaatttatttatcatgctaagaagtaaaaaaagccaataaagagaaaaatagattcatccaacaaaaggagagagagggattcgaaccctcgatagttatttttatgaactataccggttttc

SEQ ID NO: 92233 - DNA, 454 bp, Arabidopsis thaliana columbia
ggccacacactcactcactcgtagtttcgacgctatctctagaacattccgataaaccacaaagaagaagcagagcaaaagtaaagaagaagaagaaaacaaacatgtcgtggcagacttacgtcgacgatcacttaatgtgcgatgttgcaggcaaccgcctcaccgccgccgcaattctcggccaagacggtagcgtctgggctcagagcaacaattttcctcaggtgaagcctgaggaaattcagggcatcaaagacgattttactacacctggaacacttgccccaacaggattgttccttggtggtaacaagtacatggtaatccaaggagagcctaatgccgtcattcgaggaaagaagggagctggtggtgttaccatcaagaagaccaccttagctttggtatttggtatctatgatgaaccaatgactcctggacaatgcaatat

SEQ ID NO: 92234 - DNA, 522 bp, Arabidopsis thaliana columbia
  unsure (1)..(522): unsure at all n locations
atgannnnnnnnnnnnnnnnnnnnnnnnnnnnnnnnnnnnnnnnnnnnnnnnnnnnnnnnnnnnnnnnnnnnnnnnnnnnnccacgcgtccgaaatacaaaaaataaaaatccttaaaaatatatccttatcttcaaccaagaatgggagaggtccaagaaggtcccaaagttgaacaagagaagaagccggctgccaccgtagtcccagttgagactactgacggcaagccaaagagcggcggaggagattccgcggcagcagcagcaccaccggtcgccgcggttgtctctgcctttgtttacaaagtggatatgcactgtgaaggctgcgctaagaagataaagcgaatggttaagcactttgatggagtgaaagatgtgacggcagatactggtggaaataagcttttggtggtcggaaagattgatccagtgaaactccaggagaagttggaggagaaaaccaagagaaagggtggttctcgcgattccaccgtcaaaggtagagggacctgttgct

SEQ ID NO: 92235 - DNA, 518 bp, Arabidopsis thaliana columbia
  unsure (1)..(518): unsure at all n locations
nnnnnnnnnnnnnnnnnnnnnnnnnnnnnnnnnnnnnnnnnnnnnnnnnnnnnnnnnnnnnnnnnnnnnnnnnnnnnnnnnnnccacgcgtccgctctgtgtaggtttttgaagcattaggcaatatgaaattcccttacgtttatcctgatccacaaagtcgtagacttcgtgatgcactggctcaagactctggtttggagtctgaatacatacttgtaggctgtggtgctgacgaacttattgatttgatcatgagatgcgtgttagatcctggggagaagattatagattgtcctccaactttctcaatgtatgtgtttgatgcggctgtgaatggagcaggtgtcattaaagttccaagaaaccccgatttcagcttgaatgtagaccgcatcgctgaagttgtagaactagaaaaacccaaatgcatattcctaacttctcccaacaatccagatgggagtatcatcagcgaggacgatctgttgaagattctagaaatgccaatactttgt

SEQ ID NO: 92236 - DNA, 647 bp, Arabidopsis thaliana columbia
  unsure (1)..(647): unsure at all n locations
agctccatacgactcacttagggaaagctcgtacgcctgcaggtaccggtccggaattcccgggtcgacccacgcgtccgagctgtaatgctgctgcgagataaaatgaacaatgaagaagcggagacctgttgacttcaaataattttaattagtttcttctgtgcgatagagatcgatcgagagatgggtgcttcatcatcatcatctgtgtcggagaaatcaatccatcaattcaccgtcaaggatagctccggcaaggaggttgacctaagcgtgtatcaagggaaagtgctgctcgtcgtcaacgtcgcttctaaatgcggattcacggagtccaattacacccagctgacggaactttaccggaaatataaagatcaaggttttgtggtattggcgtttccttgcaaccagtttctgtcccaagagcctggcaccagcgaagaggctcatcaatttgcttgtactcgctttaaggctgaataccctggtttccaaaaggtgcgtgtaaatgggccaaacgctgcaccagtctacaaatcctcaaatcaaagaaccccctttcttggaantggncaaatggancgccccaagttttgggggcaaaatggcaagccttaccgatgggaacgttacggnccccg

SEQ ID NO: 92237 - DNA, 920 bp, Arabidopsis thaliana columbia
  unsure (1)..(920): unsure at all n locations
cgcctgcaggtaccggtccggaattcccgggtcgacccacgcgtccggcggagacctgttgacttcaaataattttaattagtttcttctgtgcgatagagatcgatcgagagatgggtgcttcatcatcatcatctgtgtcggagaaatcaatccatcaattcaccgtcaaggatagctccggcaaggaggttgacctaagcgtgtatcaagggaaagtgctgctcgtcgtcaacgtcgcttctaaatgcggattcacggagtccaattacacccagctgacggaactttaccggaaatataaagatcaaggttttgtggtattggcgtttccttgcaaccagtttctgtcccaagagcctggcaccagcgaagaggctcatcaatttgcttgtactcgctttaaggctgaataccctgttttccaaaaggtgcgtgtaaatggacaaaacgctgcaccagtctacaaattcctcaaatctaagaaaccctcttttcttggaagtcgtatcaaatggaacttcaccaagttcttggtcggcaaagatggtcaagtcattgatcgttatggcacaactgtttcacctctatccatccagaaagacatcgagaaagcccttgcacaagaattgtgaacacgcacagagatatttgactcctttggaagaaacttctctcatactctcggtcatgcagtcaagtttctacatttcccattgcaccttccatatgggccttgtattcatcttatgtgtaactctactagccatttcttttgtgaaatttgatcaaaggtgattccaataagttgatttgaacccataaaaaaaaaaaaaaagggcgaaaagcaannnnnnnnnnnnnnnnnnnnnnnnnnnnnnnnnnnnnnnnnnnnnnnnnnnnnnnnnnnnnnnnnnnnn

SEQ ID NO: 92238 - DNA, 511 bp, Arabidopsis thaliana columbia
  unsure (1)..(511): unsure at all n locations
nnnnnnnnnnnnnnnnnnnnnnnnnnnnnnnnnnnnnnnnnnnnnnnnnnnnnnnnnnnnnnnnnnnnnnnnnnnnnnnnnnnccacgcgtgcgctggatttcctcttctccacgttctcagagttagttacacagctttcaacgatgaatcagctcgcgctttcaagatccggttacaccgccgccgtgaggtttctccctatgctttccgcagctgttccgaagatcttatcatctctcgccgccgcatccaccgtccgcaacttcagctctaccggaagtcctctcaccagctaccaaatcaataaaccttcgccgtcaaaatccttcacttccaggcttctccaccaatcctcctccgccggtactcctccgcaacaacttttcggcgcccgtagcttctcatctcccagcagtgatttcaacagctaccacattaatccgccgtctaactggggaatccgaatcgtgccggagaggaaagcttgtgtgattgagcggtttggtaat

SEQ ID NO: 92239 - DNA, 518 bp, Arabidopsis thaliana columbia
  unsure (1)..(518): unsure at all n locations
nnnnnnnnnnnnnnnnnnnnnnnnnnnnnnnnnnnnnnnnnnnnnnnnnnnnnnnnnnnnnnnnnnnnnnnnnnnnnnnnnnccacgcgtccggtgatgatcagtttctgctatgatgaacatcacagaaacatatggtttaagcaaaaagataagctggcaaggagatccgtgtgctcctcagctttatcggtgggaaggtttaaattgtagttatccggactccgagggatcaagaatcatatccttgaacttgaatgggagcgagttgacaggttctataacatctgacatatccaagctaacactgttgacagtattagatttatcacataatgatttatcaggagatattccaacattttttgctgagatgaagtcgttgaaactcataaacttaagtggaaacccgaaccttaatctcacagcaattccagactctcttcagcaaagggtaaacagcanatctttaacactaaatttgggtgaaaacctgactctgactnccaaaaaagaga

SEQ ID NO: 92240 - DNA, 494 bp, Arabidopsis thaliana columbia
atacgactcactttagggaaagcacgtacgcctgcaggtaccggtccggaattcccgggtcgacccacgcgtccgctggtgttggattatacaattggtggatcagccattgcccgtggcataactccaaatctggcatctttttttggtggtttggacaatcttcctgtgttcttagctcgacaaactatacccggggttggtattgtggttgatccatgtgctgcacttttgattatgattgtcacgatactactatgttttgggataaaggagagttcaacagtacaagcaattgtaacatcagtgaatgtttgcaccttggttttcatcatagtagttggtggatatttagcttgcaagactggatgggttggatatgatctccccagtgggtactttccttttggactaaatgggatacttgccggatctgctgtagtattcttctcatacattggatttgatactgtaactagtacggctgaggaggt

SEQ ID NO: 92241 - DNA, 506 bp, Arabidopsis thaliana columbia
  unsure (1)..(506): unsure at all n locations
tgatactccnnnnnnnnnnnnnnnnnnnnnnnnnnnnnnnnnnnnnnnnnnnnnnnnnnnnnnnnnnnnnnnnnnnnnnnccacgcgtccggtgatgctggttacttatccgagtcctatgtattctacgaagcaatactcactagggagtacttcaaagatggattgtttcaggatctcaatattgcaaacaagcagcttcggtttcttgcaaggtttcttatggtgtgtttggttcttggccgccgtgagatggtgcatcaactcgttgatcagtttaaacggttgattgatgaatgcaagaggacattccaggaaaccgattttaaggaatggaaggtggtggcgcaggaaatagttagatttctgaaatcggacactgcattcatgaacattagacctctaagatacagtcttgtattggatcctaatctggatgctggtactccgcgtgcaagtaggtctttaaggttgacggatgctatcttgagcagntattactgtaa

SEQ ID NO: 92242 - DNA, 423 bp, Arabidopsis thaliana columbia
cggacgcgtgggcggacgcgtgggtgctgaccacgctccggttctccatttctttcccttttgacttttcacttccaatttttcggtatcagatctggacgatggcttcacaaatctctcagcttgcttgtttctcatccaccaatcgccaatttcacttccaaagccgatcgtttccatgccctatgattcgtccccagtcttttgtagttaaaagtgttgatgggaatagctctgaaacaccagcttctctaagctatacagctgaggtttcaaaacctgttgttgagaaaacatccaaaccgtattccactgttgatgaaactgctaccaataaagagagcatcacagagccagtagaggaagatgttgccacacaaccaataagagcagcaaagatccacgacttctgtttcggcattc

SEQ ID NO: 92243 - DNA, 647 bp, Arabidopsis thaliana columbia
  unsure (1)..(647): unsure at all n locations
nnnnnnnnnnnnnnnnnnnnnnnnnnnnnnnnnnnnnaaaaccgcattagtcaggcacgggatttcccttacaaccctcattgccgcgcggccgagctgattttaaagagatggagatactagacgcagataaaggagaaagattggagagttcgagcgggcgattggcttcacgagacattgttcagtttgtggcactacgagatgtccaatatggagagatctcagtggtacaagcgcttctagcagaattgccttcgcagtttttgacgtatatgagaatccgtaatatgaaaccgattcctccatgaatgatctcgtctcgtgtgtaaatgaagtgtgtacatattatacattacataaaccactgcggcggttaaaaatcgctgtcgttttgcgcgattacataagctttttccatttttataataaaaatgtctgaatgtgggatgtaagtttcgaatgaagaggctgatgtacacatttgtcttgatttcttttacatcaatacttggaatttggggataaaaaaaaaaaaaaaaaaaaaaaaaaaaaaaaaaaaaaaaaaaaaaaaaaaaaaaaaaaggaaaaccaaagggcgaacgctctagaggatccaagcttacgtacgcgtgcaggtgacgtca

SEQ ID NO: 92244 - DNA, 600 bp, Arabidopsis thaliana columbia
  unsure (1)..(600): unsure at all n locations
nnnnnnnnnnnnnnnnnnnnnnnnnnnnnnnnnnnnnnnnnnnnnnnnnnnnnnnnnnnnnnnnnnnnnnnnnnnnnnnnnnnccacgcgtccgcttcttcttcttcttcttcttcttcttcttcttcttcttcttcttcttcatattttccctatgatttggatctctaaaatcttcaatccccatgttctaatttaaaaaatcacaacactctctttatcatataccctattataaaccaaactttgatcctcgaatatattttattaaaaagataatattcgtgtttctcatgttggagtcataataaagaaacctttgtgttttaatttaatcccctccaagaaacctgaagattctaagaagctgccattaaaactaataaaggaagagagtccaaagaagaagaagaagaagagaaaatgtcacgtcttgacgacataccttcaagcccaggcaaattcaagatggagaaatcttcctacttgcatcgtctcagattccaatcttctctcacaaagtttgcatttttctccttcttcctcctctggctcatctctctactcttcctncgatctccaccgtccattaacccttct

SEQ ID NO: 92245 - DNA, 534 bp, Arabidopsis thaliana columbia
  unsure (1)..(534): unsure at all n locations
atgattctgccagcgnnnnnnnnnnnnnnnnnnnnnnnnnnnnnnnnnnnnnnnnnnnnnnnnnnnnnnnnnnnnnnnnnnnnccacgcgtccggaaaattctcaccaagtcctctgttgaacatgacgattaagcctaaatcgccggcgagattcaagctaggtaggcagtcttcgcttgcgccggaatcaagaaccccgattgatacgttaacggaagatgaggacgacgacttggctgcggcggctacagctgggatcggggatccgacgattcgtttaatgtatttagccaacgaaggtgatatcgatggcatcaataagatgcttgattcgggtactaatgttgattaccgtgacatcgatgcccgtactgctcttcacgtcgccgcttgtcaaggacgaaccgatgtcgttgagctgctgcttagccgtggtgctaaggttgatacgaaggaccgatggggtagtacgcctcttgcagatgcagtgtattacaagaatcatgatgtgattaaacttttggagaaacat

SEQ ID NO: 92246 - DNA, 582 bp, Arabidopsis thaliana columbia
cagctacaatacgactcactttagggaaagctagcgtacgcctgcaggtaccggtccggaattcccgggtcgacccacgcgtccgaaacattcaattcccaaaccaaacagagcagaagaacaacaagttttgattctaaaaaaggaagcttcccaagtatggatccgtcggagtattttgccggcggcaatccttccgatcaacagaaccagaagcggcagcttcagatctgtggtcctcgtccttcacctcttagtgttcacaaagactctcacaaaatcaagaaacctccaaaacaccctgcgccgccgccaaatcgtgaccaaccgccgccgtatattcctagagagccggtggttatctacgccgtatcccccaaggttgtacacgcaaccgcgtctgagttcatgaacgtagtccagcgactcacagggatctcctctggtgttttcctcgaatctggcggcggtggagatgtttcaccggcggcgaggctagcgtccacggaaaatgctagtccaagaggaggaaaagaaccggctgcgagagatgagacggtggaaatcaacacggctatggaa

SEQ ID NO: 92247 - DNA, 1199 bp, Arabidopsis thaliana columbia
gaaaaagattgcagtcagtttgataatgatcgagtgacattgctttttcgctccgaaccaagggatcccttatatatgatgcaagatggatcttgttctatcgttgatcagagatttctctatgaaaaatacgaatcggagtttgaagaaggggaaggagaaggagtcctcgacccgcaacagatagaggaggatttattcaatcacatagtttgggctcctagaatatggcgccctcggggctttctatttgattgtatcgaaaggcctaatgaattgggatttccctattcggccgggtcatttcggggcaagcggatcatttatgatgaaaagtatgagcttcaagagaatgattcggagttcttgcagagcggaaccatgcagtaccagagacgagataggtcttccaaagaacaaggcttttttagaataagccaattcatttgggaccccgcagatccactctttttcctattcaaagatcaaccctttgtctctgtgttttcacatcgagaattctttgcagatgaagagatgtcaaaggggcttcttacttcccaaacggatcctcctacatctatatataaacgctggtttatcaagaatacgcaagaaaagcacttcgaattgttgattcagcgccagagatggcttagaaccaatagttcattatctaatggatttttccgttctaatactcgatccgagagttatcagtatttatcaaatctgttcatatctaacggaacgctattggatcgaatgacacagacattgttgaaaaaaagatggcttttctcggatgaaatgaaaataggattcatgtaatgtaacaggagaagggtttcccattacttagccggaaagatatgtggccatgaaatagggattaagtggaacggaattgactgggtggtagagttgtataaacacctgtttcttccacttagctccatggaacaatatgctactactgaaacatggaagaattgaaatcttagatcaaaacactatgtatggatggtatgaactgcctaaacaagaattcttgaacagcgaacaaccggagctattactcactacatcaaaaaaatttccattaataaaagatggaaatccattggaaaatcaaaaatacgcatgtcggattaaattgttgttgctatctgttccaataacgaatcaactgaataact

SEQ ID NO: 92248 - DNA, 521 bp, Arabidopsis thaliana columbia
atacgactcactttagggaaagctcgtacgcctgcaggtaccggtccggaattcccgggtcgacccacgcgtccgggtcttttcatggaacaggttcttcgtttatgtctgctaaggactactatagtgttcttggagtgagtaagaatgctcaagaaggtgaaatcaagaaggcttattatgggcttgctaagaaactccatcctgatatgaataaagatgatccagaagctgagacgaagttccaggaagtctcaaaagcatatgaaattttgaaagataaggagaagcgtgacctttatgaccaggttggtcatgaagcatttgagcaaaatgctagtggtggatttccaaatgatcaaggcttcggtggtggtggtggtggtgggtttaacccatttgatatctttggggagcttcaatggcgatatttttaacatgtaccggcaagatattgggaggtaaagatgtcaaggttttggttgatctttctttcatggaagctgtttaaggatgctcca

SEQ ID NO: 92249 - DNA, 497 bp, Arabidopsis thaliana columbia
  unsure (1)..(497): unsure at all n locations
cnnnnnnnnnnnnnnnnnnnnnnnnnnnnnnnnnnnnnnnnnnnnnnnnnnnnnnnnnnnnnnnnnnnnnnccacgcgtccgctgttaattaactccggcgattgatcactccgtcttctttgtaacacagccggagaaaaatcgaaagtttcgtttttttcttctccttcgtagctaattcgccgtcgattttataattcggcagccatgagctcggttttgcagggttttacgaagtcacttgctatgacctttgtatcggagattggtgacaagacgtttttcgctgcagcaattttggctatgcgttatcctaggagacttgtgttggctggttgtttatcggctctgattgttatgactatcctctctgctactcttggatgggctgctcctaatctgatctctcgcaaatggactcatcacataacaacattgctgttctttggttctgggctatggtctttgtgggacggtttcaaagaaggaggagggg

SEQ ID NO: 92250 - DNA, 648 bp, Arabidopsis thaliana columbia
  unsure (1)..(648): unsure at all n locations
cagctcnnnnnnnnnnnnnnnnnnnnnnnnnnnnnnnnnnnnnnnnnnnnnnnnnnnnnnnnnnnnnnnnnnnccacgcgtccgaacgaagtcaaaaccatttataaacccaaaatcttcttcgatctctccataattctcgtttgcgtcattcattcatcacatatcaaccaccacagagacagaggaatagtctcaaaactttctcagaaatggcaggcagtaatattctccataagattaagttgaaggctgggttctgtggatctgctcctgacatgggaagaggcaaaagcaagatgtggaagaacatcacccacggttttcactgtgtgaagggcaagtccagccatccgatggaggactatgtagtgtctgaattcaagaaacttgaaggtcatgaattgggtttgtttgctatctttgatggtcacttggggcatgatgtggctaaatacttgcagactaatctctttgacaacattcttaaaggggagggtttttgggcttacacagagggatcctttaaggattccctccaggtncaacaagttcccggggntttcangngnccctaagnttggnaaggngggccacccntttaacnggntntttttttggaaaacctntttttcaatttttggcccc

SEQ ID NO: 92251 - DNA, 511 bp, Arabidopsis thaliana columbia
  unsure (1)..(511): unsure at all n locations
atgatctnnnnnnnnnnnnnnnnnnnnnnnnnnnnnnnnnnnnnnnnnnnnnnnnnnnnnnnnnnnnnnnnnnnnnnnnnccacgcgtccgtcaatgaattggctcaaaggtacccgggactaatgtcgttgcgaagcgtagatctttccccggcaagttggatggcggtagcgtggtaccctatttaccatattccaatgggaaggaccatcaaagatttgtccacttgtttcctcacttatcacactctttcatcttctttccaagatatggagccagaagaaaatggcggggaaaaggagaggatccggaaggaaggagaaggtgtaactttgcttccttttgggttagccacttataagatgcaaggcaatgtttggctctcggaagacgatcaaggtcaagatcaagagcgagttctttcgcttctaagtgttgcggattcttggctaaaacagctaagagtccaacaccatgacttcaactacttctcaagaatggctcaccgtg

SEQ ID NO: 92252 - DNA, 526 bp, Arabidopsis thaliana columbia
  unsure (1)..(526): unsure at all n locations
nnnnnnnnnnnnnnnnnnnnnnnnnnnnnnnnnnnnnnnnnnnnnnnnnnnnnnnnnnnnnnnnnnnnnnnnnnnccacgcgtccgctgatttcttccggcgagaaaacaaacgaaagagtgaaaaaaaggcgacttttttcttgtcccgggttataaagatgtcagctttgtgtcctgtctgcaatctcacgcttcctctctccctaatccaaagccatgtgaattcccacttcgaagacgatgaaatcaatccacaaatcgaaaccgatcaccacttggctctgcaactcgcttctgatgatcattcttctgatgatccttcttcgtcttcctctgcttcatcatctaacaacgttgcctccttggtccagttacagactaagagtcaattctatagtgtaggtcatggtggtttgattcgtttgctgaggaactgtctggagtcagaactgaaattgaagtcgaaacctttagagtgtagtactagtttactatcaggctttgttgatcattttcaatcttcg

SEQ ID NO: 92253 - DNA, 499 bp, Arabidopsis thaliana columbia
  unsure (1)..(499): unsure at all n locations
agctannnnnnnnnnnnnnnnnnnnnnnnnnnnnnnnnnnnnnnnnnnnnnnnnnnnnnnnnnnnnnnnnnnccacgcgtccgtttgaatgcagagatccgcgagggtttgggttcgttcaatttatggaccctgctgatgctgctgatgcaaaacatcacatggatggttatcttcttcttggccgtgagttgactgtcgtgtttgcagaagagaacagaaagaaaccgactgaaatgagagcaagggagcgtggtggaggaagatttcgggatagaagacgtactccacctcgttactactcgcgctctcgttctcctccccctcgacgtggtagatctcggtcacggagcggtgactattattctcctccccctagaagacatcacccaagatctatctcgcccagggaagagcgatatgatgggaggaggtcatactcgcgctcacctgcctctgatggctcaaggggtcgcagtttaactccagtcagaggtaa

SEQ ID NO: 92254 - DNA, 645 bp, Arabidopsis thaliana columbia
  unsure (1)..(645): unsure at all n locations
nnnnnnnnnnnnnnnnnnnnnnnnnnnnnnnnnnnnnnnnnnnnnnnnnnnnnnnnnnnnnnnnnnnnnnnnnnnnnnnnnnnccacgcgtccgcccacgcgtccggagaaaataacttttaaactttagcttctaagagatattcaggatgaccggaggaggatttgcgacttcggcgaacggagtagagtttgaggcaaagataactccaatagtcatcatatcttgcatcatggctgctaccggcggcctcatgtttggttacgacgtcggtgtctccggcggagtgacatcgatgccggactttctcgaaaagttttttcccgtggtttatcggaaagtagtagctggcgccgacaaagacagcaactactgcaaatacgacaaccaaggactacaacttttcacatcatctttatacttagccggtctaaccgcaacgttctttgcttcatacacgacaagaacgctcggaaggaggctaactatgctcatagcccggcgttttttttaaatcaanggttttggcttttnaacgngggggcttaagacctngccaatgcttatttnnaggaaggnntattnctttggtttttggagtttggggtcgnnaataaagcccttcccgttntnttttcggantt

SEQ ID NO: 92255 - DNA, 429 bp, Arabidopsis thaliana columbia
cccacgcgtccgcacatatcttggctctacagggaatgcaacaagtgataaagaagtagagaggttattgaaagatgcagagagctacactttagcaaaccatatcttctggggactatggggaatcatctcgggacatgtgaacaagattgagttcgattacatggaatatgcaaggcagagatttgaacagtactggcttagaaagcctttgcttcttgaaggatgaagcagattcgcattgaaaagccgatatacaactaaaagtttctgcaattaggtccaaagaaaaaaagaaaatttagtagactatatgttgctattgttactctcaccagtctgtgtgtttcttcccttctactataaaggtttgttaactctcccaccagttaaattgagcaaaatcaaacaaaaaaaaaaaaaaaaaga

SEQ ID NO: 92256 - DNA, 493 bp, Arabidopsis thaliana columbia
ctctaatacgactcctttagggaaagctcgtacgcctgcaggtaccggtccggaattcccgggtcgacccacgcgtccggcttctcttttgattctctcgctctctctttcttcatcgcctcttcgagcttcgatggttgggaatattctggtgaccggtggtgctggttacatccggaagtcacacggttcttcagcttcttctcggaggctataacaccgtcgttatagacaacctcgacaattcctctctcgtttcgatccaacgcgtcaaggatctcgccggagatcatggacaaaatctcaccgtccaccaggtggaccttcgcgataaacccgcacttgagaaggttttctccgaaacaaagtttgatgcagtaatgcattttgctggattgaaagcagttggtgagagcgtggcgaaaccacttctgtattataacaataacttgattgcgactattacacttttggaagtaatggctgcacacgg

SEQ ID NO: 92257 - DNA, 1088 bp, Arabidopsis thaliana columbia
  unsure (1)..(1088): unsure at all n locations
nnnnnnnnnnnnnnnnnnnnnnnnnnnnnnnnnnnnnnnnnnnnnnnnnnnnnnnnnnnnnnnnnnnnnnnnnnnnnnnnnnnnccacgcgtccggagctgctggcaaggcagtaaaagttgagcattgtgagagagttcatgtgattgtagctaccaaacgaatttgcatcgccaattgccgtgaatgtgtgttctttttgggagtcaatcagcgacctcttatagttggttataaccacaaactacaggttgctccatataatacattttactcacacttggaggagcacataaccgaggtaggaattcagccaactatcaacaaatggaacgaatccttggcgctcggagcaattgatccgcatgactcactatcacatccgactggtgcctctgataaacaagctgaaccggcttcttgtgtggaccctgaccagttcactacctttttgatcccaaactggtttgcgggtgaggcgattggttccacgaaagacaatccatttccattggcagatgcatataaggcagtgcagcagacaaaccttaagaacttagaggaaacaagacaatccttgtgagaaacacctttcgaagaaaaccgataacgagaactcactacagcgttccacatgtatttcaaagactggctatacgcgacgggaaatattcggcaactttactgcctacaaggcgattaagaccaatggcgagtgaaaatgtcagtgtcactggggagttctcttgttccggtccttctcagagatttgctagcacggtttgacatcagaatttaactgcacagcacgctctctaactcctaaagctctgtttttttgtgtgtaggtttctctctggcttttatccgtatttattagtcttaaatatccacgtttttgtccttgaaaaacattaagccatcttgtcttgttgttgatttctttcaattgttataacaacttttctcaataccatatatataaatcttttagtaactaaaaaaaaaaaaaaaagnnnnnnnnnnnnnnnnnnnnnnnnnnnnnnnnnnnnnnnnnnnnnnnnnnnnnnnnnnnnnnnnnnnnnnnn

SEQ ID NO: 92258 - DNA, 545 bp, Arabidopsis thaliana columbia
tactactcaccttagggaaagcacgtacgcctgcaggtaccggtccggaattcccggtgtcgacccacgcgtgcagacaaggatctccttcaaacgctcggaagtttccgctttggattcctgtcaccggcgatttcgtgggatgataacgacgccgagctatatttcgtgactgaagcaaagtgatgattcttcgattgaaagaccaaacgctcatcaaaatcaattcaactcgttcgtacttatcttccttagttttccgacgagattctcactcgcaggctcggacaaaacccgatcacgaccgccggagaagaggatacgagagggatgtgagaatcgaggagaagaaggaacacgatggattgtttctgtgcaagagcaaaggccaacaccttcttaccaacactagaatcctcgactccattgttcgaagctccgatatcaggccgactgatacagtcttgggaaatcggacctggccctggaaatctcacgatgaaacttcttgaagctgctcagaatgtcgtagccgtcgagctaga

SEQ ID NO: 92259 - DNA, 515 bp, Arabidopsis thaliana columbia
ttctgactcactttatggagagctcgcacgcctgcagtgtaccggtccggacttcccggtccgacccacgcgttcgccgacgcgtgggtccggttatacgattcgtcggtaccaaaaccctccgagaagtgtttcaggtgggaaggtatctctgtctacacgatgtccggcgaggaagaagccaccgtgagggagccactagatctgattaggctgagtctcgacgagagaatctatgtcaagctccggtcagaccgcgaacttcgcggcaagcttcacgcgtttgatcagcatttgaatatgattctgggtgatgttgaagaaactatcactacagtagaaatcgatgacgagacatatgaagagattgttcggactacaaagcggacgattgagtttctattcgtgagaggagatggagtgattttggtgtctccaccgctgaggacagcagcctgagttcaactctatttcttttgggtgctccttttcgcaaaggggaatttggtaacttt

SEQ ID NO: 92260 - DNA, 805 bp, Arabidopsis thaliana columbia
taatacgactcacattagggaaagctcgtacgcctgcaggtaccggtccggaattcccgggtcgacccacgcgtccgctggatttggagagcgcaagagccaataccttgacgatattgccattctaactggagcaactgtgatcagagaggaagttggtctttctcttgacaaagctggaaaagaggttctgggtaacgcttccaaggttgtcctgacaaaggaaatgacaacaattgtgggtgatgggaccacacaagaagcagtgaacaagcgtgttgtacagattaggaatcttattgagcaagcggagcaagactacgagaaggaaaaattaaatgagagaattgcgaagctctctggtggagttgctgtaattcaggttggagctcaaactgagacagagctcaaagaaaagaagctgagagtggaagatgctcttaatgctacaaaggctgctgttgaggaaggtattgtcgttggtggtggttgcactctgctccggcttgcatcaaaggtcgatgccatcaaggatacccttgaaaatgatgaagaaaaggttggagcggaaattgttaaaagagcactgagttaccctctgaaattgatagctaagaatgctggtgttaatggaagtgttgtcagcgagaaggtgctggctaacgataatgtgaaatttggatacaatgctgcaaccggcaagtatgaagacctgatggctgcaggcatcatcgacccgacaaaggttgtgagatgttgcttagaacatgccgcctcagttgcaaagacgttcttgatgtctgac

SEQ ID NO: 92261 - DNA, 705 bp, Arabidopsis thaliana columbia
  unsure (1)..(705): unsure at all n locations
tggggggganccttaccnccaagccctttnngantttcccttgngnggtcccttcccccgttccncaaggccntncccacaaggnccccttaaaatgtgaanaaggttgcccgnaatntttaanggcnctggtcccctctgaatttgtngctnaggatctgntgttaatggaattttgncancaagaaggtctggctaacgattatgtgaaatttggatacaatgctgcaaccggcaagtatgaagacctgatggctgcaggcatcatcgacccgacaaaggttgtgagatgttgcttagaacatgccgcctcagttgcaaagacgttcttgatgtctgactgtgtggttgttgagatcccagagccagagccagttcctgctggtaacccaatggacaactcaggttatggatactaagatagaccgaccaggtttgctcgtaaagctgagagataggcaaaattccgaagcgagagtagctcactgggatacggattcctttagcttgcaaacaaattttctgtgcaagtgtagtgatttttgaaccagagaataatgtgttcactagatatcatatttgaaatcattttgaataacttaaaaaaaaaaaaaaaaaaaaagnnnnnnnnnnnnnnnnnnnnnnnnnnnnnnnnnnnnnnnnnnnnnnnnnnnnnnnnnnnnnnnnnnnnnnnnnnnnnnnncg

SEQ ID NO: 92262 - DNA, 1051 bp, Arabidopsis thaliana columbia
acgctcaatacaagaatatctacaatctctagaaaatggcgatcacttacttgcttcctctgtttctttctcttatcatcacctcctctgtttcagctaatttccaaagagacgttgagatcacttggggtgatggtcgtggacagatcaagaacaatggagagcttctcactttatctctagataaatcctctggttctggattccaatccaaaaacgagtacttgtttggtaaagtctccatgcaaatgaagcttgtccctggaaactccgcaggaacagtcacaacactttacttgaaatcacctggaacaacatgggacgagatagatttcgagtttttagggaattcaagtggagaaccttacacacttcacacaaatgtctacacacaaggcaaaggagacaaagaacaacaattcaaactctggtttgatccaacagctaatttccacacttacactattctctggaacccacaaagaatcattttcaccgtcgatggaactccgatcagagaattcaagaacatggagtctctaggcactctgtttcccaagaacaaaccaatgagaatgtactcgagtctttggaacgctgatgattgggcaacgagaggtggtttggtcaaaaccgattggtctaaagctcctttcactgcttcttaccgtggctttcaacaagaagcttgtgtttggtcaaacggcaagtcttcttgtcctaatgcctcgaaacaggggactactactggctcgtggttgtcacaagagcttgactcaacagctcaacaaaggatgagatgggtgcagaggaactacatgatctataattattgtacggatgcgaagaggttccctcaaggtcttcctaaagagtgcttagctgcatagagagagtaaagagttgagagaggaacaagattttatttttctttgtggttataaaattctattcattttattgtagatcacgtgaattttattgatttgttttgtagtatactctatagttcgttaaagttataatattctctttgttacaaaaaaaaaaa

SEQ ID NO: 92263 - DNA, 467 bp, Arabidopsis thaliana columbia
  unsure (1)..(467): unsure at all n locations
tgttgacgcgtgggcacaaaagctatctccgaggttagagcaatggcagctgtgaactgccatttcttccagctatcacgacatctcaaaccttctaggccttctttttcctgctctgcttctcaaccttcacaaaacaacattaaggtaatcataaatggagctgctaaggaaataggtagagcggctgtggtggctgtgactaaggctaggggaatggagttagctggtgctgtcgataatcattttgttggcgaagatattggcttgctgtgtgacatggaggagcctttagagatacctgtagtgagtgatctaacaatggtgttaggctcaatatctcagggaaaagaagtcggagttgtgatcgactttacagacccatcaacagtgtatgagaattgttaaaccaggcaacggcatttttggggttaangantttggtgnattgtnccncgggttaagcc

SEQ ID NO: 92264 - DNA, 513 bp, Arabidopsis thaliana columbia
  unsure (1)..(513): unsure at all n locations
nnnnnnnnnnnnnnnnnnnnnnnnnnnnnnnnnnnnnnnnnnnnnnnnnnnnnnnnnnnnnnnnnnnnnnnnnnnccacgcgtccgcttcttctaaagttcggacacttaggatttatcgccggagttttgaacatggatgggattcttgcagctgttccatctgcagtgtgtgtctctctacgcatttcttgtcggaatctggataatgctgaatccatctatcattttcccggcaaatccttgaatcgagtttcagtgcttcaaactgggaactacgtctctcgtaaaggcaattcgttgcttaaaaaccgacattgtggtgaaatttcccgtgtgatcgtaaaatccgccgcttcttcagttggaaatgcagaggactacgctgaagaaacggctacaagtgtaaagtttaagagatcagtgacattaccgggttgttctagcccgttgtctttgctcggcactgggtttagggagaaaaagtttgctatcatcggtgtcaaagtctatg

SEQ ID NO: 92265 - DNA, 497 bp, Arabidopsis thaliana columbia
  unsure (1)..(497): unsure at all n locations
nnnnnnnnnnnnnnnnnnnnnnnnnnnnnnnnnnnnnnnnnnnnnnnnnnnnnnnnnnnnnnnnnccacgcgtccggaggagtcagaatatcatcagccgcctctttcacttcaaccctccttaaacctcatctctttcctactccgccgctctctccgtcgtctctcccgttactccatttctctcgacccctccaggtgaaaatggctgggaagtcgaacaaatcgaaggccaagagagcggctcagagcactaccaccaattccactactgatgttaaatccgatgctcctgctcctcctgttgctgctactgttcctgctactgctccggttactgctgctgctgctccggttgctactgctgctgctccggttactgctcccgataatggcaccctcactgctgttgactctgcggtgcctgaagccaatgaagttgctcctacgattcctaaggctgacgaaagtgagtcacaagttgaaaataacgatgc

SEQ ID NO: 92266 - DNA, 760 bp, Arabidopsis thaliana columbia
  unsure (1)..(760): unsure at all n locations
nnnnnnnnnnnnnnnngacttacttagggaacgctggtacgcctgcaggtaccggtccggaattcccgggtcgacccacgcgtccgcacacgtctttctccgaaactcgtctgagagaggctctgagattcgatgtcgttcgaggaagaagaagaggaggaaacattcgagcatacacttctcgtggtgcgtgaggtctccgtttacaagatcccgccgcgaaccacatccggcggatacaagtgcggcgaatggcttcaatccgataagatctggtctggtagactccgcgtcgtatcgtgcaaggatcgatgcgagatccgcctcgaggattcgaattccggtgatcttttcgcagcttgttttgtggatcctggacgtagagagaactctgtagagccgtctctcgattcgtctaggtatttcgttctcaggatcgatgacgggagagggaagtatgcgtttatcgggctaggattcgctgagaggaacgaagcgtttgatttcaatgttgcgtaatcggatcatgaaaagtacgttaggagggagaaagaaaaggagacaggggaaacgagtgagagcgataatcatattgatatccatcctgccgttaatcacagattgaaggaagggtgaaccataagaatcaacgtgaagccgaaaccaccaacanatggcacttggatgctttcagctgctctttcaggaacggggaagccaaacctctagcacttgcccacccccaaagcttgccgagtac

SEQ ID NO: 92267 - DNA, 895 bp, Arabidopsis thaliana columbia
  unsure (1)..(895): unsure at all n locations
nnnnnnnnnnnnnnnnnnnnnnnnnnnnnnnnnnnnnnnnnnnnnnnnnnnnnnnnnnnnnnnnnnnnnnnnnnnnnnnnnnnccacgcgtccgtttcagaaaaaaaataacaacaacaacaataatggcgtcttttgcaacccatcttgttgttgttgttacaatgttgtttgtagccatggcctccgcggagatgcttcaagatgtttgtgttgctgatttgtctaatgcggtcaaggtcaacggatacacttgcaaggactcaacacaaataacaccagaagacttctacttcaaaggcttagccaacattgccgccacaaacacctctaccggctcagtcgtgaccggagccaacgtagaaaagctaccgggactcaacactctcggcctctccatgtcccgcatcgactacgccccaaacggcctaaacccaccccatgtccacccacgtgcctccgagatcattttcgtccttgaaggtcagctctatgttggctttgtaccaaccgctggaaaactcatcgccaagaaccttaacaagggagacgttttcaccttccccaagggactcatccatttncagaggaacattgccaacagtccagcatctgtactcgcagccttcgatagccaattgcccggaacacaatcacttgtcgcctctctctttggagctcttcccgatgacattctggccaagtcattccagctcaaacacaaacaggttaagaagatcaaactgagatacgcacccaagaaaatgacgtttgtttttgtttatattgtaaacacttagcaaagaagaatgaatcaatataaacgtttgcaacttttaaactatctatgagatgaaactaaagaactgattanaaaaaaaaaagggggcggccg

SEQ ID NO: 92268 - DNA, 518 bp, Arabidopsis thaliana columbia
  unsure (1)..(518): unsure at all n locations
acgataaggttatcgaggtctttncagacatggaagagctgaaggtnagcccagacgaagactctgcnaggagagtggcacgagcnttcagggaactcaaccaagaagaaaatcgaaaactgatccttagaaggtacctctctgaatacaaatacatctacttcaatggtgagcgggttagagtcaaaagatatttctctgaagatagttgatttcattcttatgaacacacacaaccacacacatgtatatgtagaagttacccccaagttttttacccttgattgtaatttctaatttgtgaattcatcaagaagatggtaaaatgaatctccatttataaagttatcttttattctcgagaaaacaaacgaattgtcaaatgttcaatgacactcatgctttatagtgttcatgattccttgcaaaaaaaaaaagaaaggccggccgctctagaggatccaagcttacgtacgcgtgcatgcggcgtcatagtcaactagtagtgcagcctaaat

SEQ ID NO: 92269 - DNA, 480 bp, Arabidopsis thaliana columbia
  unsure (1)..(480): unsure at all n locations
tancaggaatttttnngaacccaaaggattaaagggaaccccnacacgacgcgtggggcagtgtacaggagaacgggtcagggttcatcctatggtgcaggtgtgaaactcggtttggtccgagctgagtatgctgtagatcacaacaatggaaccggtgctctgttcttccgatttggagagaggtattaaggtaatgtgagaagcaggctcatgttatccaccttagtcttttcattttctctgttgaggatctgctatttttctcttttttccttttcttttgtgttttctttttttttttctacttctttttcaataattgtttaatgttagtgtttgatgacgttgctgagttgtgctgagaatcgggaaagagtttgttcttcgtaatatgtctagacttttgtaggaaaattttgaaactttcaagtttcaaaaaatcgtatgaatagttgacaaatgaaaatttatattggt

SEQ ID NO: 92270 - DNA, 646 bp, Arabidopsis thaliana columbia
ggagataattcatttggaattctctttaaaagtttagtgatcggaggcttctcgattttctctctcttctctcacttgaatttttcagagaaagaaaaagcgattcatggcaagactccgtccaacatcgttcggcttctttaacgacgatggttggttcgtttccagcatcaattggcttctttagtggtggtggctggcttttgtatccggacgtggtccggctttgccgtcttatctcgccatcgttgctgttctggagaaatttagatcaaatataaactctggatattgtggagcagagagtcagatttacaagcgtgatgagattgtcgtagaggaaatggtgggttatcggatttgatggtggtgctgggagataacgatgaaacaatcatcggcgtaagagaaaagtcacatccacggtgtcgtatgttgctttgacttgtttttattaagcgctgtactctttactacaaggggtttagttgtaccctttatgggtttttgaaatactttgatgactgggcttttggggcgtttggtaacccataatttgaataaaaagaaacttatgaacaaaaaaaaaaaaaaagggcggccgctctagaggatccaagcttacgtacgcgtgcatgcgacgtca

SEQ ID NO: 92271 - DNA, 556 bp, Arabidopsis thaliana columbia
cagcttcactcactactttggaagctggccgcctgcaggtccggtccggaattcccgggtcgacccacgcgtgcgcccacgcgtccggcaccgtctccattggcgggtttcagttctctaattcctagaacgcttctgaaacgcgccgttagtagcgcaacaagaaatctaacggcgccgttagcttctatttcagcagcaagaaatctcttcattggaggaggatgtgacgaaaattatggtgagccaggagtgttttctcattccaatggaataagaaagtacaacaccgttggtaatgctggcgcactaactggtccatttcatcatcttcttggggtcaaccagacaaacaagcccgcctttttaagggtccaatctatgagctatcagtttgtcgctgattctcattcatctcctaaacgtattgtgaagaatgaggatgaggaagatttttctgattcatcaaagaagggaaacgctgaaaaccctaggaaacatcaacattggggagaacatacccaagaaggataaaataaagtttcttgtgaacact

SEQ ID NO: 92272 - DNA, 869 bp, Arabidopsis thaliana columbia
  unsure (1)..(869): unsure at all n locations
nnnnnnnnnnnnnnnnnnnnnnnnnnnnnnnnnnnnnnnnnnnnnnnnnnnnnnnnnnnnnnnnnnnnnnnnnnnnnnnnnnnnccacgcgtccgcttttcttcgatctattcttcgtttgtgagtaaagaccgcgaatttaatctgaaggttaaggtggtgtgaaatcagcgttaggggatggcgaagtactttgacattgatgacatacttatagaggaagagtttgtaccggttttattccataaaacagcaaacggagtgactattgatccaagtgcagaaacaaattgtgctgaacaaggctctaaagttgaacttcccttctggcttgctcatgagttgcatttgaggcaagctgttaccataaaccttcctccctgttttgaccaaaagacgaggcttgaagttcaggctgatgctgcatacgtcgatcttagatcgcgatgtccatacttttatgaatttggatgcaagatagagccactggtcacagatagaacactggggatcttgcntatcgnctgcgtttaagatcagataccaaagagaggctctgacaaaagtatacacagcagctcacataacagcttccaagtacttgtcgtttttaacaaaagaagaaacaaacttgtatgaagcagctcacttgtcgatgacagccttcaagaagtggagaacaggtggtcctagattccagagagcttcaatactcggaagaaaacgcaaggattctaattaagttccctaaaactctttatcctcatccttaccaagagggtgattgtgttatattagttataacatgtcaaaatgatgcaatggcaacatattatggtctgaatcaaattgcaaatccttttgtgttg

SEQ ID NO: 92273 - DNA, 1124 bp, Arabidopsis thaliana columbia
tcgagagagaaaattttctgcaaatttggaatcttaaagttaagaaaatttattttcttcgaaaggtgaatctattcctctgtcgtatcgtctaagtgctgaccgcgaatttaatctcaaggttaaggtggtgtggaatcagccttaggggatggcgaagtactttgacattgatgacatacttatagaggaagagtttgtaccggttttattccataaaacagcaaacggagtgactattgatccaagtgcagaaacaaattgtgctgaacaaggctctaaagttgaacttcccttctggcttgctcatgagttgcatctgaggcaagctgttaccataaaccttcctccctgttttgaccaaaagacgaggcttgaagttcaggctgatgctgcatacgtcgatcttagatcgcgatgtccatacttttatgaatttggatgcaagatagagccactggtcacagatagaacactgggaatcttgctatcgactgcgtttaagatcagatacaaagaggcactgacaaaagtatacacagcagctcacataacagcttccaatgtatgaagcagctcacttgtcgatgacagccttcaagaagtggagaacaggtggtcctagattccagagagcttcaatactcggaagaaaacgcaaggattctaattaagttccctataactctttcttatcataattatccaatagggtgattgtagcatataacaatctcaaaatgatgtaactgggtaacatacatttgattatggttgagtcaaattgcaaatccttttgtgttatgttctcttcaggaaactcaaaatcatatccagatggtgttatcagttatgccatatgatccagttacgttcaaaattgatcattcgttctttataatcttattcaattcttcaaaagtattgaattatagattaaccaaaattttccacttcaatttatggaatcattctcttctgcttagttgaaaattataatatttactttgcccgggacagattcatatttatatcaccaaatccaacacaacaaataaaaggaagtatcttgtgtgagggctcattttaagtgtaacttggaagggccgtcatctagggaaatg

SEQ ID NO: 92274 - DNA, 527 bp, Arabidopsis thaliana columbia
  unsure (1)..(527): unsure at all n locations
nnnnnnnnnnnnnnnnnnnnnnnnnnnnnnnnnnnnnnnnnnnnnnnnnnnnnnnnnnnnnnnnnnnnnnnnnnnnnnnnnnnccacgcgtccgcccacgcgtccgggaaagaagaagaggaagaagaaaatggcgaatcttaactcagctattgattcagtgttttgggatcagaacgtttcttcacctcaaacccttgaaggcactgctcgctctgttcccggtgagccatttcccttagacggagcacgagcaagccgctctcaccggattcaacagctctctctgcttcgcgaaggctttcctcttggaatcattccttctttggctcctgcttctgacaagagactcggctctttctctctcaattctctcttgctcagtccttcctctaacaactggtggttaggtttagttgggcagttcaaaccaaagaagctctttgctgatatcaaagcagatattagcaatgcagaagagtgggatttgcaagttgtaaaggatacagcaaaacacattgttgaca

SEQ ID NO: 92275 - DNA, 409 bp, Arabidopsis thaliana columbia
tgaattttcacggacgacctctctctctcatctactaagctctcctccgagtattgttggcttcagaccaaatcttctccggcgctgtagcgtttcccccgtttcccctttttaacctttgcaaacaatgagtgggcgattttctcggtcaatctatgttggtaacttgcccggtgacattagggaacatgagattgaagatatcttttacaagtatggccgcattgtcgatattgaattgaaggttccacctcggcctccatgttattgctttgttgagtttgagcattctcgggatgctgaagatgccatcaagggccgtgatggctataatttggatggctgtcgcttgagggttgagcttgcacatggtggtcgaggacagtcttcaagtgatcgtcgtggtggc

SEQ ID NO: 92276 - DNA, 493 bp, Arabidopsis thaliana columbia
  unsure (1)..(493): unsure at all n locations
nnnnnnnnnnnnnnnnnnnnnnnnnnnnnnnnnnnnnnnnnnnnnnnnnnnnnnnnnnnnnnnnccacgcgtccgctctgatctcgatccagattctctctacttctcttatcttcgatagagaaatttgtatcttcagatttattcgaggaggaagacgaaccctacttgattgatttaggaggtggagagatctttctgaacaagtttgattctgttggtaattgatctgaaatcctaggttttagccgtagatctgctgcttgtttcgatcgatttgggataccgtaggtattgattccatagaatttctcgctcgaggaaggtgaagaatctgcccagattccggagatttttagttagtcttggtgtgcttgttgcttcggtaatgttagatcataaaagtcttccattgtgaggaatcggaggttgctaagagtgtttgtggaagctgcttcttctggtattggattagaatcgggactatggaagt

SEQ ID NO: 92277 - DNA, 514 bp, Arabidopsis thaliana columbia
  unsure (1)..(514): unsure at all n locations
tacgactcacttagagaaagaacgnacgcctgcaggtaccggtccggaattcccggttcgacccacgcgtacgcccacgcgtccgtacggctgcgagaagacgacagaaggggtcagaggaaagttgctacttccttgaaattaatcaatgacacacttgatgatttgattgcaacatgcaagagaatggtagaagaagaggagttgcagtttcacgaggagtatatgaacgaaagagatcctagcatccttcactttcttttagcttcaggagatgatgtctctagtaagcagcttcgtgatgacttgatgacaatgcttatagccggacatgaaacatcggcggcagtattaacatggaccttttaccttttaacaacggaaccaagtgtagttgccaaacttcaagaagaggttgattctgtaattggagatagattcccaaccatacaagatatgaaaaagctgaaatacactactcgagtcatgaatgagtcattgagatatttccaca

SEQ ID NO: 92278 - DNA, 468 bp, Arabidopsis thaliana columbia
tttgacgcgtgggcggacgcgtgggcggacgcgtgggttaaaaaagaaatgaggccaaaagcagtgtgggagcctgagtatcacagagtgtttgttgatttatgtgtggagcaaacgatgctagggaataaaccagggacacatttttcgaaagaaggttggaggaacacattaatatcgtttcaggagcaaacaggcgccatgtacgatagaatgcagcttaagaaccattggggatacaatgagcagacagtggaaaatatggcgtagactcgttgaaactagttttatgaattggaaccctgagagcaacaggtttcgtgcaactgatgatgactgggctaactatttacaggagaatcctgatgctgggcagtatcggttgagtgttccgcatgatctcaagaagctagagattctctttgcgggttgtaatgtagaggtgaaaaatgatgaagtctcgggtgt

SEQ ID NO: 92279 - DNA, 559 bp, Arabidopsis thaliana columbia
  unsure (1)..(559): unsure at all n locations
cnnnnnnnnnnnnnnnnnnnnnnnnnnnnnnnnnnnnnnnnnnnnnnnnnnnnnnnnnnnnnnnnnnnnnnnccacgcgtgcgctgctttaatggaaggaccttgacacttctctctctctttctctttgctattcatcttctacagtttcttaaaaattatactcttcttctccaaaatatctcagactctcttatttttgatcgtcttcttcttcttcgttgtgagcttccatttttcatccaggatttgttttttccgtttgaggtaaagcagctttgcagttaaagaaaccttgagtatccaatgtccccggaagaggagctacagagcaatgtatcggtggctagttcttcacctactagcaattgcatctccaggaacactctaggaggacttaaagagcataactacttgggtctctctgattgttcttctgttggaagctctactctctctccccttgctgaagatgacaaagctactatcagcctcaaggctacggagctgacacttggtcttcctggatcacaatctcctgcgagagacacagagctta

SEQ ID NO: 92280 - DNA, 412 bp, Arabidopsis thaliana columbia
caaaaatcttttttttttttttgttgtctttcttctcgagagagataagtgaccaaagggtttcgatttctggaaatagtttgaataaaaaagtaatttttatgtgattattggcaaagaaaagttttagttttttttagtttgtgagagatgtctggttctgtatctggttgtggttctggtggttgtagtattgtatggtttagaagagatcttagggttgaagataatccagctttagcagcagcagtaagagctggtccagtgattgctctgcttgtttgggcaccagaagaagaaggacactatcatccaggcagggtttctaggtggaggctcaagaacagtttggctcagcttgattcttctcttagaagtcttggtacttgtcttatcaccaagagatctactg

SEQ ID NO: 92281 - DNA, 663 bp, Arabidopsis thaliana columbia
  unsure (1)..(663): unsure at all n locations
ttgcctcgggntaatggccncccatnncggntggatcccccgaagnccggaaagacttgtttncgggataccggcttcaagnngccggtccccttgggncaagcccctagngactggggttaaagcctccaggcattttgggggggccccaagaatgcttctccaactatagtctcccccaaaacagtacaagagggaggtttagaaaggccatgacccacttattttctcactgttcctgaccccgcgtccgcggacgcgtgggaaaagaaaccatttttcatcattcttttgttcactgattccaatttgttcttctcaaataaaaagggaaattggttaacagacacatataatataatacaggttcgaacctgactgattgatttatcttttttttttttttggtgtgttggtttctctgagttctggagaattgtatattgtaattatcggccaaactaaagccccccaaatttaaagaaaaagaatactaatgatttgcctttttctcnnnnnnnnnnnnnnnnnnnnnnnnnnnnnnnnnnnnnnnnnnnnnnnnnnnnnnnnnnnnnnnnnnnnnnnnnnnnnnnnnnnnnnnnnnnnnnnnnnnnnnnnnnnnnnnnnnnnnnnnnnnnnnnnnnnnnnnnnnnnnnnnnnnnn

SEQ ID NO: 92282 - DNA, 510 bp, Arabidopsis thaliana columbia
gtattaaccaccaaatcagtttcgttgtcccaaatccaaaattcctccttcttcttcgctgtaacgctttatacctaatcggagataaaacaatgcaatcgtcgaaaggacggcggaaagttggctccacaaccgccggagccggtatagattcggcggagaagctcgacgagctcttgatatcgtctgccatttgtaacggtgaagatttaggaccatttgttcggaaaactttcggtacagggaaaccagagactcttcttcaccatctcaagtttttcgcacgatctaaggaatcagagatcgaagaggtatgtaaagctcactatcaagactttatccacgccgtagacgatcttaaatcgcttctctcagatgttgaatcgcttaaatctgcgctttccgattcaaactctaaactccaatctgttgcggcgccgcttctttcgtctctcgattcgcttgttgaggctcagactgtgtctaagaacgtcgatctggcgattggag

SEQ ID NO: 92283 - DNA, 507 bp, Arabidopsis thaliana columbia
  unsure (1)..(507): unsure at all n locations
cagctannnnnnnnnnnnnnnnnnnnnnnnnnnnnnnnnnnnnnnnnnnnnnnnnnnnnnnnnnnnnnnnnnnccacgcgtccgctctcaagatcaaaagagatgtcatcaatagcttctggcacagtttcaacaaccagatcgacactttgtttcagaaaaatcccaaagtctgcaactgttttatctatgcttcatcgatcttcttcttcttctccacgaatgttattattgttgtcttcttcatcagctaactctgcaaaactactgaactctaacaatggtctcttaatttcctcttctcctaaacctttcagacccgttatgcaatggcaagacgtcacggtaaagatggtggtggatgcaccagcttccgtggcttacaagttatacgcagatcgagaaatgttccccaagtggatgccatttttgtcatctgttgaggcaatggagggtagtccagacctatcgcgttatttggtaaaactcgagtcttttggacaaaat

SEQ ID NO: 92284 - DNA, 603 bp, Arabidopsis thaliana columbia
  unsure (1)..(603): unsure at all n locations
acatggctgtttnatcanccggtaaggtggcaccgtccggttggaggccgcntaccgctaaaccgatcagcccggttccacattccatggccattatccactaaatcgcctcgtaggcgaatgcgtgttgctttccacttgtaacgtatgtgggcaaagaactacaagagctattaatcctcatgcttacactgatggcactgtcttcgtgcagtgttgtggatgtaatgtgtttcataagctggtcgataatctcaacttgtttcatgaggttaagtattatgtgagcagctcgagcttcgattacaccgatgctaagtgggatgttagcggcttgaatcttttcgatgatgaggatgatgataatgctggtgatagcaatgatgtctttcctttgtaaagaacctttctacaatatctttgttatatatctgtatatagctaccttgtcatatcatcttggtgtgaataacatttggaagtaataaattggtcatatagctcatgttcctaaaaaaaaaaaaaaaaaaaaaaaaaaaaagcggccgctctagaggatccaagcttacgtacgcgtgcatgcgacgtcatggtcttctatag

SEQ ID NO: 92285 - DNA, 855 bp, Arabidopsis thaliana columbia
  unsure (1)..(855): unsure at all n locations
cgatcaaccatggaagctacctctctaagctctgcagcaccaatcatcccctcctcatcttccccactctccatattctctccaaagaagcgaacagactcagcacctcccccgagaatcgtccgtctctcgaacaagaaggaagacaaagattacgatccgcaacattccgaatcgaactcatcaagcctcttccggaatcgaactctctccaatgatgaagcaatgggactggtgttgagtgcagcttcggttaaaggatggacaaccggttccggtatggaaggaccgtctctaccggctaaaaccgatacagacacggtttccacatttccatggtcattattcactaaatcgcctcgtaggcgaatgcgtgttgctttcacttgtaacgtatgtgggcaaagaactacaagagctattaatcctcatgcttacactgatggcactgtcttcgtgcagtgttgtggatgtaatgtgtttcataagctggtcgataatctcaacttgtttcatgaggttaagtattatgtgagcagctcgagcttcgattacaccgatgctaagtgggatgttagcggcttgaatcttttcgatgatgaggatgatgataatgctggtgatagcaatgatgtctttcctttgtaaagaacctttctacaatatctttgttatatatctgtatatagctaccttgtcatatcatcttggtgtgaataacatttggaagtaataaattggtcatatagctcatgttctgaaaaaaaaaaaaaaaaaaaggacgagggcggacggtttaaaagattccaggttacggtagggtgcattccaagttataggttgnnnnnnnggaat

SEQ ID NO: 92286 - DNA, 528 bp, Arabidopsis thaliana columbia
  unsure (1)..(528): unsure at all n locations
nnnnnnnnnnnnnnnnnnnnnnnnnnnnnnnnnnnnnnnnnnnnnnnnnnnnnnnnnnnnnnnnnnnnnnnnnnnnnnnnnnnccacgcgtccgcggacgcgtccgcccacgcgtccggcgatgggtcaaattctgtagtctctagatttctaggattaaacccgactaaagacctcggttcgcgggccatcagagggttcacaaattacccggacgaccatggattccgacaagagtttataagaatcaagatggacaacgtcgtaagcggacgacttcctataactcacaaactcgtcttttggtttgttgttttgcgaaattgtccccaagactcaaacttcttaaaaaatcaagaggatatcgcaagattggcactagcatcagtccgcgaattctcagaagagtggaaagagatgctgaagaattgtgatatggactctttgtatatcaaccgtttaaggtaccgtgctccttgggatgttctgtctggaaaattccgacgtggcaccgtgacagttgccgga

SEQ ID NO: 92287 - DNA, 870 bp, Arabidopsis thaliana columbia
cgcgattcgtctaagcttggtgtatgcaatttgattgggtttactggagattgatctgtgacctaatcaatgagtgataacattgctggttcatcgcaattcgtctaaggttttgttactgattgagaaaacatgggaggtgacaatgataatgacaaagacaaagggtttcatgggtatcctcccgctggatacccaccccctggggcttatccacccgctggatacccacaacaaggttaccctccaccacccggtgcttacccgcctgcaggttatcctccgggtgcctacccacctgctcctggtggttatcctcccgcccctggttatggtggttatcctccagctcctggttatggaggttatcctcctgcacctggtcatggtggttaccctcctgctggctatcctgctcatcactcaggacacgcaggaggaattgggggtatgattgcaggtgctgcagctgcctatggagctcaccacgtagctcatagctctcacggtccttacggacatgctgcatatggtcacggttttggccatggtcatggctatggctatggtcatggtcatggtaagttcaagcatgggaagcacgggaagttcaagcatgggaagcatggaatgtttggaggaggcaagttcaagaagtggaagtgatctagttaataccttttgtgaatctgtctggactgaccaatgtttcaaataagccctaaacattatataagttgactttcgtcggttagattgctggttcgagttggaataattgaaacttaattagtatcaaatcttattgtggccctttaaagctatcgttggctttataatgacagattctgggtttcggtgtgttgtttt

SEQ ID NO: 92288 - DNA, 994 bp, Arabidopsis thaliana columbia
  unsure (1)..(994): unsure at all n locations
atgatctagccagcatctatactgactcactatagggaaagctggtacgcctgcaggtaccggtccggaattcccgggtcgacccacgcgtccgcccacgcgtccgcggacgcgtgggcttgatttctgacactaccctcatcgggtctccaagaggccaagaaagacctctttctcggcttctaggagtctcatcattctcttttttcacatttgcttcctccacacgcaacctccaaaaagccctaaatttattaaaacaaatggattccacggagctgaaccgtgtgttccaaatgttcgacaaggacggagacgggaagatcactacgaaggagctgaacgagtcattcaagaacctcggtatcataatacccgaagacgaactaacacaaattatccaaaagatcgatgttaatggtgacggttgtgttgacattgaagagtttggagagctctacaagacgataatggtagaagatgaggacgaggtaggagaagaagatatgaaggatgcgttcaacgtatttgatcggaacggagatgggttataacggtggatgaattgaaagcggttttatcttccttgggactcaagcaaggtaagaccttggaggaatgtaggaagatgataatgcaagtggatgttgatggtgatggtagggtaattacatggagttagacaatgatgaaaaggggcgctttttagctctttgactgatataacttttttcttctttttaccttctctgggtttattttggtatttgctaaccatttctcttgggtctaattgaaatacatgtcataactaatatttatcttaagaatgcagagccattgaaaaactgaggtgtttatgttaaattgatgaggtgcttgttcatcacaaaaaaaaaaaaaaaaaaaaagnnnnnnnnnnnnnnnnnnnnnnnnnnnnnnnnnnnnnnnnnnnnnnnnnnnnnnnnnnnnnnnnnnnnnnnnnnnnnnnnnn

SEQ ID NO: 92289 - DNA, 323 bp, Arabidopsis thaliana columbia
agcagagaccacaacaaaaaatctcgagacaaagatacaatggcgagccgaaacagagcactcttctctgtttccactcttttcctctgtttcatcgtctgcatctccgagcaatcgaacaatcagtcttctccagtcttcgcctgtgacgtcaccggaaacccttctcttgccgggcttagattctgcaacgcggggttgagtatcaaagcccgagtcaccgatcttgtcggaagattgacgttggaggagaaaatcgggtttttgaccagcaaagctatcggcgttagccgccttgggattccgtcttacaaatggtggtc

SEQ ID NO: 92290 - DNA, 784 bp, Arabidopsis thaliana columbia
  unsure (1)..(784): unsure at all n locations
acgccaactctatacgacttacttagggaaagctggtacgcctgcaggtaccggtccggaattcccgggtcgacccacgcgtccgccccctcactgtctgctctaggtcgagattttttagggtttatctccggatttgggttagcgaaatcgagctcacggggttgtctcgattattcctttttaggttgcttgaatctgaagctaatcttgggttaattggattgttagaatcgagacctaaatccttcgattggatcagagaaaatatgtcgcgcgttctcacttgcccaccgcttgtgtttgcaagaaaccacgttggcgttcaaaacttggtcgaatcgactaaggttcgttgagctacagatctggtttcttgcttcagttttttttgtgtgattgatttctacggatttcgtaaaacctgattttggattcgtttttggggaaacttatttcaatgtagtaatctttgaatttgggttacacttcttgtgggtatggctatattttcataagtcgtatttttttctctctgaaaccctatcatgtataaatctatataagctaattatcatgtgattatcattaacactatataaagagttgcatattagttntcaataatctcatcatgtgttcactgtatcagcaatcattaggagtgaatcaggtaagttgcattgttttcctttctgtaagtttgattttgtaggtctagatatgtatatgattaagcttgtaggagcttctttgtttattggaatggggttttgacattgag

SEQ ID NO: 92291 - DNA, 402 bp, Arabidopsis thaliana columbia
  unsure (1)..(402): unsure at all n locations
cactcctaagggaaggctgccccctgcgtccggcccgattccggtcgaccagcggcggaaaagacatgtctgggttggcagtaatgcttttgcttctcttctttgcaaatcccggggtgcttctatactaacattgtacgtaagaaggaaaaaaaaagaacgctgcatttctcgaatgtgtaagaatcccggtttcaaggaggttttagggtgggtttattatgaatcaaaattccgtttgggggtatgtgatgatggttttagcttgataagatgtgtttactcttctaagtgattcatatgtttagatgaaggtgtttgtaatattactagcaatagtacttaggaatgttgtaatcttttagtattagtatcatattattattgttggttcanaaaaaa

SEQ ID NO: 92292 - DNA, 574 bp, Arabidopsis thaliana columbia
cagctacaatacgactcactttagggaaagctgcgtacgcctgcaggtaccggtccggaattcccgggtcgacccacgcgtccgtatggatcctggagaagaagaaacagagcaattaaagaaagagtatgtaactttcatgaaaggagttgtctctgctcctctaaatctaccaggaactgcttatcataaagctcttcagtcacgagcaacgatattgaagttcattgagaggaaaatggaagagagaaaattggatatcaaggaagaagatcaagaagaagaagaagtgaaaacagaggatgaagcagagatgagtaagagtgatcatgttaggaaacaaagaacagacgatgatcttttgggatgggttttgaaacattcgaatttatcgacggagcaaattctcgatctcattcttagtttgttatttgccggacatgagacttcttctgtagccattgctctcgctatcttcttcttgcaagcttgccctaaagccgttgaagagcttagggaagagcatcttgagatcgcgagggccaagaaggaactaggagagtcagaattaaat

SEQ ID NO: 92293 - DNA, 518 bp, Arabidopsis thaliana columbia
  unsure (1)..(518): unsure at all n locations
atgatactgccnnnnnnnnnnnnnnnnnnnnnnnnnnnnnnnnnnnnnnnnnnnnnnnnnnnnnnnnnnnnnnnnnnnnnnnccacgcgtccgcttcattccagtagcagtagcctgcgtgttttaccagagatattacacaccaacagcaagagaactgtcacgcatgtcaggagtagaaagagctccaattctccaccatttcgctgaatcgcttgctggtgcaacaacaatacgtgcttttgatcaacgagatcgcttcattagctcaaaccttgttctaatagatagccattcaaggccatggttccatgttgcatcagcaatggagtggctttccttcaggttgaatttgctgtctcatttcgtctttgctttttctttggtgttacttgtgactctccctgaaggtgtcatcaatccaagtattgctggtcttggggtcacatatggcttaagtctgaatgttctacaagccacagtgatatggaatatatgcaatgcagaaaacaagatga

SEQ ID NO: 92294 - DNA, 674 bp, Arabidopsis thaliana columbia
  unsure (1)..(674): unsure at all n locations
accnnnnnnnnnnnnnnnnnnnnnnnnnnnnnnnnnnnnnnnnnnnnnnnnnnnnnnnnnnnnnnnnnnnnnnggccgggcgtcctacggcttcnataatacaacagaagggggtacttcgtttctttggacagtgtacctccacgtattcgtctctggtgatttaatcaaagcctctggagaagatctgtaggtacgtacaaatgtctgaacatgttatggttttgggtaaaggtaacaaaggaatcagcaagaattcttcagtcaatccatatgaatcagcttggttaggtcgttggactcagtcaggtagtgaagtgaagtttcatgatggtgagaccaattgctctaagcagttgataagacctgaagatgagaatcatggagtcgaggtcttgccgtttcctatgttcaaggtttctcaaaagagagagactactactactactactactaaaccgtctttccatgaagatgttggttcaagctcgagagctatggttaatagaatgccctggatgtatccgcaaggagagaacttcagttctagtaatcgtcttgacttcccnnnnnnnnnnnnnnnnnnnnnnnnnnnnnnnnnnnnnnnnnnnnnnnnnnnnnnnnnnnnnnnnnnnnnnnnnnnnnnnnnnnnnnnnnnnnnnnnnnnnnnnnnn

SEQ ID NO: 92295 - DNA, 507 bp, Arabidopsis thaliana columbia
  unsure (1)..(507): unsure at all n locations
cagctannnnnnnnnnnnnnnnnnnnnnnnnnnnnnnnnnnnnnnnnnnnnnnnnnnnnnnnnnnnnnnnnnnccacgcgtccgcggcaaacgcagagtagcttgaagaaatccgttgctcattctcttctccgatcgtttttttcttcgcatcccaaggtctctcagttacagaagatggagaaaacgccgttcgttctctgtttctcagtttctcggaatcaaattccagattacaatccggacgaagcgaattggagtgagaaaattctggatcatgtgggtgatttcaaaagtctggaagaagtggtgtctaagctgacagagaatctgaatctgaccgagtctcagattgcgagtatttggaagtcattgattaaggcagaagaagaagctcaacaagttccaccaccaccaccaccaccgagtgctgcagatgtaagtagtaaatcaacgaggaagaagatgaagaaacaagcctctaagctgcagagtaaacttcttctc

SEQ ID NO: 92296 - DNA, 522 bp, Arabidopsis thaliana columbia
  unsure (1)..(522): unsure at all n locations
nnnnnngatgctccaggtacacacgactcacttagggaaagctcgcacgcctgcaggtaccggtccggaattcccgggtcgacccacgcgtccgcggacgcgtggggatgaatgtttctggagaatgtgtaggccgtgaaagatgcgaggaattagccaagtcttcttcgttttaccggaaagtttactcggaggatgtgccatatatgtttacactagaatggtcaacaagttcaagattgaaggatgtaatgcaccaattccaaaagcatttggactatcttcaagaattttggtctgtcttggacaatatcgataaatctctatgtgttgttgatgtcaagcaaccagctcgtgcctctgctattcgccggattgatgctgggaatgattgtatcatcattgttcatatcgacttcaaagaccctaaatccctaccagagtcccggtttattggtcctgtgccttcagctacgcatatgaacaacttgcatatgttatggagaagaaattgcaaaagat

SEQ ID NO: 92297 - DNA, 842 bp, Arabidopsis thaliana columbia
  unsure (1)..(842): unsure at all n locations
gcccacgcgtccggcgtgccagtctctaacaaaaatctcaatctttccatacttatcgatcacgtcacctcctttgtctctattacctaactccatccttaaaaatccaatctttcacctttcttctccgagatttcactacactgcgcaataaaaaaatggcgaatacccaactcaaatccgatgcaatcatggacatgatgaaggaacatctttccaccgacgccgggaaagaggtcacagagaagatcggtcttgtttatcagatcaacattgctccaaagaaattagggtttgaagaggttacttacatcgttgatctgaagaaaggcgaagtcaccaaagggaaatatgaaggagggaaagtggatgctacgttctccttcaaggatgatgattttgtcaaagttgccactggaaagatgaatcctcagatggctttcattaggggtgcgatgaagatcaagggtagtctcagtgctgcgcagaaattcacccctgacatcttccctaaaccttcaaagttgtgaacaccaaaaagagtggtatgcagcaaaccctaaactcaagctcaatttatgtcttcaaaggggttggctttttagtacaactagtcagaaataaagttctcttcaaagtatctttgtattctcttttatctttggaacaaaaatattggtattgggttttaataatatgaatcttctctttgacccnnnnnnnnnnnnnnnnnnnnnnnnnnnnnnnnnnnnnnnnnnnnnnnnnnnnnnnnnnnnnnnnnnnnnnnnnnnnnnnnnnnnnnnnnnnnnnnnnnnnnnnnnnnnnnnnnnnnnnnnnnnnnn

SEQ ID NO: 92298 - DNA, 578 bp, Arabidopsis thaliana columbia
  unsure (1)..(578): unsure at all n locations
atgatactccnnnnnnnnnnnnnnnnnnnnnnnnnnnnnnnnnnnnnnnnnnnnnnnnnnnnnnnnnnnnnnnnnnnnnnnnnccacgggtccggggaagccaagatgtgcatgtccataatgccttgggtaaaattatcatagacagtaacaacaaccccgagcatttcctgaccaccaatccttactacgactctaaggttgtgggtaagtactgcgagaaacgtgatcccactctggctgttgtggcatacagaagaggacaatgtgacgaggaactcatcaatgtcaccaacaagaactctttgttcaagttacaagccaggtacgtagtggagaggatggatggtgacctctgggagaaggttcttacggaagaaaatgaatataggaggcaacttatagaccaagttgtgtctactgctttaccagaaagcaagagcccagagcaagtttctgcagctgttaaagcattcatgactgctgatttgccgcacgagcttattgagcttcttgaaaagattgttctacaaaattctgccttcagtggaaacttcaatctgcaaaatctgcttata

SEQ ID NO: 92299 - DNA, 498 bp, Arabidopsis thaliana columbia
taatttttcccggatctttgtgtaggttcgaatccacctgtgaaggcccttgttatttttccaggggtgggcccattccaggttttgattttgctgcagcctccaggaggaaaaaaaagggggcaagagctcttagaggagggcctaggtacggaaagcttggttcctgcaaggacctacagatgaattgcagagtcatggtgtagataacgtataagtggagattgcaaataagcattttgaagaaggctggtgttggtttctcgcctgtgttcttggggccagttttctcctgtatgggggatatgttaatgggtttggcgttgatccagaatcagcttcgtaagattcctttggcagctcagagaggtagtacatttccttggactaactcgccatttagaaacaattctcttgggcgagaggatataaaagtagttatacaggaaaaaaaaaaaaaggggagaccgctctagaggatccaagcttacgtacgcg

SEQ ID NO: 92300 - DNA, 1398 bp, Arabidopsis thaliana columbia
  unsure (1)..(1398): unsure at all n locations
tcccgctctatactactcactatagggannnnagtacgcctgcaggtaccggtccggaattcccgggtcgacccacgcgtccgaaaataatctccggtttgagctgcgtcgacgagatctatcgtcaggatctcagatttgttgttacactcttgctcaagtctggagacatgagttctccgggaacgagtatgttcaccaatttcactaagctctgcaaaggacttgccctggtacttgtggtgggacacctcgtggttcagttcattcccgctaccgtcccataccttgctctgattccggcgaggactattccttttgcctggaatctgataacaagcggctattttgaactctcagtatatggggttgtcttcagcaccgtttctctcctttttatgggaaagttcctggaacctgtctggggttccacggagttccttaagttcatctttgtggtgaacttccttacgtatctctgtgttttcgttacagccattgccttatactacataacgaggctggaagtttacctatatatgccctttgctggttttcatggtgtcttggcaggccttcttgtagggataaagcagataatacctgaccaggagatattgctgttaaagataaaagcaaagtggttgccctcaattatgctaattttgtcaatagcctcaagcttcttcaacactagatttcagcagcatatcttcccactttgatatttggtacatatatgggctggttatacctcaggtacctacagaggagaccagaaacaaagctcagaggtgatccaagggaggactttgccttctctactttctttcctgaacttctcaggccagtaattgaccccattgccttaatctttcaccgggatgctttgtggaagatcaaatgccaccagtgaagaccatgattattctaccagtggtgcaccattgccaggttctgattctgctgaagcatccaggaggagagaaagaggggcaagagctctagaggagagactaggaacggaaagattggttcctgcaaggaacaaagatgaattgcagagtgatggtttagataacgtataagtggagattgcaataagcattttgaagaagctgttgttggttcttacttgtgttcatgtggacagtttttttttggtttttttattttgttaatgaaattggcgtttatacagaatcagcttcgtaaattcctttgacagctcagaaaggtagtacatttctttggacaaaccaccaattagaaacaattttcttggacgagaggatataaaagtagttatacaaaaaaaaaaaaaaaaggggcggccgctctagaggatccaagcttacgtacgcgtgcatgcgacgtcaaagcttctatatagtgtaa

SEQ ID NO: 92301 - DNA, 1010 bp, Arabidopsis thaliana columbia
taataccctggcccaaggaagaatatattggttggttaaaaagaaaaaaaagccaaagagggggttgcccccccaaaattaatgattaaagtttttgggacaaaagagccctccaaagggttttctttcaaacaaattagagattttcaaaggcaaaggacaatatttttgtattcgccccaactaatattgaatataatatattagggggataaacaatataataaagtcgggcggaccataggggatatatgattacacccatatgcgagaggggttgaacccatcatacccatagaagagtgaagggtatccgctagggaaaaaacccaaaagaggggtttcacgaagaagggggttggatatccctaagaagggtgtagtaagggaccacatattgcccactatattgttagaaagctttatgctgaatcccctgagaacagttcctccgggggaacaagataatatagaacccccattggcccttaaatctttatcacccggagtgctttggggaaaaatcaaaaggccaccagtgaggacacatgattatttctaccagtggtgcgccatgccagggttatgattaagctgaagcatccagaaggagagaaaaaggggcaagagctctagaggagaagactaggaacggaaagattggttcctgcaaggaacaaagatgaattgcagagtgatggtttagataacgtataagtggagattgcaataagcattttgaagaagctgttgttggttattacttgtgttcatgtgggcagttttttttagttatttatttttggaaatgaaattggcgtttatacagaatcagattagtaaattcctttgacagctcagaaaggtagtacatttccttggacaaaccaccaattagaaacaattttcttggacgagggggtataaaaaaagtaaaacaaagataatagaagaagggcggccgctctagaggatccaagcttacgtaagcgtgacatctaagtcgatat

SEQ ID NO: 92302 - DNA, 874 bp, Arabidopsis thaliana columbia
tttggtttagtttagactctctctttctttgtttgtatataaatacacaaaccattttattcagctccttcttcttcaaccttcgcacgacctcaaaaatctctcaacaacacacaaaaagatccaaaatccaaaatcatcctctccctccatttcggacgaccctctaaattcttttgtctaccggaaaattttcgattggatccaaattttctggcgcctaatttatcgatttggttttctattgtcattttcttttcacaggtcactcgattttctccattttcttttcatttgggactctcttctcgccgtcgccatcaccggagataaattccgtggtgctgcgtttggccttaccaaaatttgagatctcaattgaagaaagaaacatagcgaagaagaagacgatcaaggaattgaaattagattctgttatctctctatcatcttcaatttttttaatttgattgttttcaccaaaaaaacaaaaactatgaacacgacgttacgttacgatccgagacagatctcgaggcaaacgaaaccgtcagatacaccatcgtcttctccgtctcgtagtaaccggagacagcctttgcttcagagaagtctctcttctccgtcaccacgagcttcttgcggcggatctactcccgccgagttttgcggtggtacgacggcgagttgcgccgccgtgtggtgttgttgtccctcggactcgttaacctactcgttctcgcgatctacaaagttcctaaaggaatctgccgtcgcgctatcagaagtcgccgccgtaaacaactcgtgaagaacggaatccttccgccgcttccgacggacgggaaaaacgagcggatgcagagagttttca

SEQ ID NO: 92303 - DNA, 628 bp, Arabidopsis thaliana columbia
cccgcgggccccggtccgggattcgcacccacgcgtccggcgatatgtgtcttatccgcaagtggtgctgtctctactgcaactcttcttcagccagcaccttctcatggaactattatatacggtgtgaagctcatcccagtttgaggaggaggacgatttcatcatttcaccaattccatctctccttttgggtcaaacccaaacccaaatccaaaccctggaggtgtctctactggattcgtgtctcctcctttacccgttgactcttctccggctgattcgtcagcggcggcggcgggagctttggttgctcctccttcaggtgacacgtctgtgaagcggaagagaggacggcctagaaaatatggacaagatggtggttctgtttcgttggcattgtctccttctatctccaacgtttccccgaactctaacaaacgtggccgtggaagacctcctggctccggcaagaagcaacggctatcttccattggtgaaatgatgccttcatcaactgggatgagcttcacaccgcatgtaatcgtagtttccattggtgaagacattgcttcaaaggttaatatcgttctcgcatcaaggtcccacgagcggataatgtgtttta

SEQ ID NO: 92304 - DNA, 834 bp, Arabidopsis thaliana columbia
  unsure (1)..(834): unsure at all n locations
cagctannnnnnnnnnnnnnnnnnnnnnnnnnnnnnnnnnnnnnnnnnnnnnnnnnnnnnnnnnnnnnnnnnnccacgcgtccgctttcaaacaaataaactcagaaaaaatggccgaaaccgaaacggagtcgatcaccacctcttctccaccgccgatctcagaaaccgaaaactccaccacattaccaacaacggagacggagaagaatcccaatccggtaaccatttccctcagaatctggccaccgactcaaaaaactcgcgacgccgtgattaaccgtctgatcgaaacactgtcaaccgaatcaatcctctccaagagattcggatctcttgaatccgaagaagcttcctccgtcgcgaaatcaatcgaagacgaagcttacgccatcgcttctgccaccgtattcggtgatgacgacgggatcgagattcttaaagcttattctaaagagattagtaaacgtatgcttgaatctgttaaggctaagagtaatgtggcttctcctccaccgaaggatggtgatggaattgaatcagctgttgattcgaagattgattcaagtgaagcttgacgagggcttgaaattatggtgttgttctcttatctctaactatctttttatttgttttagattggtatgcgattatctatctcagagttttgtttgttgtataacttgtggatttgggacctgttactaatatgattttgtggttgatttggttttgacgttttaaaaaaaaaaaaaaaaaagnnnnnnnnnnnnnnnnnnnnnnnnnnnnnnnnnnnnnnnnnnnnnnnnnnnnnnnnnnnnnnnnnnnnnnnnn

SEQ ID NO: 92305 - DNA, 526 bp, Arabidopsis thaliana columbia
atgatctccaagctacaatacgactcacttagggaaagctgcgtacgcctgcaggtaccggtccggaattcccgggtcgacccacgcgtccgacgaaactaacgatgtacgaagcaatcaaagacaatgatgataatgatcatcaatggcgagagaagaaagacattgagtctgctcttcagatttctcgttcttcctctcttcctcccgacaaggaacgattagtttcccttgatgtctttcgcggtcttaccgtcgcatttatgatacttgtggatgatgttggagggattttaccatctattaatcattcaccttgggatggtgtcacactagcggattttgtcatgcctttttttcttatgtattgttggtgtctctcttgcctttgcttacaagaacttgtcatgtaggtttgtcgcaacaagaaaagctttgattcgatctttgaaacttctattacttggtctttttctccaaggaggatttattcatggtcttaataacttaacttatggaatagatg

SEQ ID NO: 92306 - DNA, 547 bp, Arabidopsis thaliana columbia
aggtctctacgactcactatttggaaagctggtccgcctgcaggtaccggtccggaattcccgggtcgacccacgcgtggtcggacgcgtgggcggacgcgtggggttacaccgtcgtccagatttttcaaacgccgacgaagctgatttagtgaatatggaatctaatggatcagtttcatcgatggttaacttggagaagtttctctgtgagcgattggtggaccagtcacaaccaatctcggagcgatttagagctctcttctctcttcgcaacttgaaaggcccaggacctcgcaacgctctaatccttgcatccagagactcatctaatttgttagcacatgaagctgcatttgcattgggtcagatgcaagatgctgaagccattcctgctcttgagtacggatcttaatgatatgtctttgcatccaatagtacgacatgaggcagcagaagcccttggagctattggtttggcgggtatgttaacattttaaagaaaagcttgagctcggatccagctcaggaggttcgggaaacatgt

SEQ ID NO: 92307 - DNA, 795 bp, Arabidopsis thaliana columbia
  unsure (1)..(795): unsure at all n locations
gggagaaccgtgtgtcgccccgcggggggggtagtatcgccggctctatacgactcatttagggaaagctggtacgcctgcaggtaccggtccggaattcccgagacgagagacgataatgggaggagctttatcaactgtgtttggaagtggagaagatgcaacagctgcagggaccgaatctgagccaagtcgcgtcctaaagtttagctcttccgctcggtggcaacttcatttcaacgagatcaaagaatcaaacaaactgctggtggttgatttctcggcctcatggtgcggaccatgtaggatgattgagcctgcgattcatgccatggctgataagttcaatgatgttgatttcgtcaaattagatgttgatgaacttcctgatgtggctaaagagtttaatgtgacggcaatgcctacctttgtgctggtgaaaaggggtaaagaaattgaaagaatcattggtgccaaaaaggacgaacttgagaagaaagttagcaaactcagagcataatgagcattgttaacgccttaaccaatagtcttgtgtaaactcaataataaatggtatgtttatggggaatgtgatgttctatactctctgctaatgtaagaccttctgtgtgatgccatgattgattgaaatggttttgttgaaaaaaaaaaaccaagaaaaaagaaannnnnnnnnnnnnnnnnnnnnnnnnnnnnnnnnnnnnnnnnnnnnnnnnnnnnnnnngttcccaattatttccgccgnccgccgcgggctcgagtctccacaagaaa

SEQ ID NO: 92308 - DNA, 1538 bp, Arabidopsis thaliana columbia
tctttcattgacacttgccagtttacatcgacacacagtggacatcagaatggatttctcagggagattctttgtcatcttcgttaccttcttctttctccctcctctgtcttcagctgggagctacgattctggttcgggtctcgagtcactcgctcgcgggatgcttcattcagccaaggatcctgagttcttcgagtggatgagaggaattaggagaaagattcatgagaacccagagacagggtttcaggagttcaaaacgagtcaactcgttcgagacgagcttgactcgcttggagtgaagtataagtatcctgtggcgaagactggcgtcgtcgcttggatcggatcctgttcgaaacctgttttcggacttagagccgacatggacgcacttccgttacaggaattagtggaatgggaatcgaaaagtaaagtagatggaaagatgcatgcttgtggtcatgatacttatgttgctatgcttcttggtgctgctaagcttcttcaaaccacaaaacacctcatcaaggggacagtaaaacttgtgtttcaaccaggcgaggaaggttatgcaggtgcttatgaaatgctaaaagacgagattctagacgacttagatgggatactcagtgttcatgtctttccatcgatcccatcaggtggtattggttctaggcctgggaccgttcttgcaggtgcaggattgtttacagtcacggttcacggtcaaggtagccacgcagctacaccgcacttctctaaagacccggttcttgcagcttcttccgctgttgttgccttgcaacagattgtttcgcgggaactggatccactcgaagctggtgtggttacagttggatatattgaaggaggtcatgctcaaaacgtaataccgcagagtgcgaaatttggaggtactttcagaagcttaagcaacgatgggcttctatttatccaaagacggatcaaagagatttcagaggcacaagcatcggtataccgatgcaaagcagaagtaaacttcgaagagaaaaagccgtcgcttcacccggtaatgaataacgacgagggcttatacgagcacggtaaaaaagtagcggaagcgatgattggaaagaataacttccatgatttcccggtgacaatgggaggagaggatttcagcttcttcactcaaaagactaaggctgcgattttcgtgctggggataaagaatgagacgctaggcgctggtaagccgcttcactcgccttacttctttgttgatgaagaagctcttcctgttggggctgctcttcacgcagctatggccgtttcttatttggacgaacatggtcatagccatgaagaagaggttaagagtgaattatagaaggtgttgggagaaaatcagcttatattagtcatcatctatttgtatttgaacttgaaagttaggtgaggttaggtttcgggttgggaagaatgtttgttaatagtcacgagaaaccaaccacttctattaaaataaatttgatgtaagagttttaaaa

SEQ ID NO: 92309 - DNA, 1004 bp, Arabidopsis thaliana columbia
  unsure (1)..(1004): unsure at all n locations
cagctctctacgactcactatanggaaagctgacacgcctgcaggtaccggtccggaattcccgggtttacccacgcgtgcgcggacgcgtgggctcagcagctcaaaagcatctgcagaaccaacagttgaggccaccgattaatcatgggaactctcaaggatttccaactcataaagtgcaatcgcagcctttgaattttcagcagaggcagcaacccagagaaaatgctactcaacatagtgagactgtaggggaagatagcccatcaactgctgatagccggggttctcgttccaatgttgcctatggccagaactatggtatgcaaatgcaaccaactaacttgggtttgatgagttcccctgcccctggtggtggggtggttggatcttcgagcagtcatggtgaaaagaaatcacagcagcaggtttcaaaggctggtgtagaatccttccagtcaccgggttatgctatgactnttgcgacgttcaatggggctaacactgctcctaccctaaacatgtcatcaattgctcagaatcacgctatgttccacagcatgcccgaagcagcaaggcaaggttatcagatgatggctgctcaagcagctcaacaaaaaatgaactacggtgcttcactagaagatggaaaatctgggtctattggtggtgctgctactgctaataatacccctgaggaacaaaggaagtcaggaggaggggcaatagggaaaacgagtggtgggaatggtgggcagtctattgctttctctaacaaacaggatttagctgatgcatctgtttctgctgtcacgagtggtagcatcgttgatagctcatcccgtttactcaaccttggttctgctctgcacagagttcgggttctttacccacgtctcatcatcaacaactactacaacaacagcagcaacagcatatgcaacggagtcaatcgcagcaaccttataccaccatgtacctccagaagcagcaacggtatg

SEQ ID NO: 92310 - DNA, 550 bp, Arabidopsis thaliana columbia
ccgagagacagctagaagaaatcaattaatgcttcaacaagctttgcctccaggagcagctaatagcatcttgcatggtccgacattcatattccccttgggccaacagcctcacgctgccgctacaatagctgccgcatctgtcagacctcctaatagtggcatcacatcttctggaccaacagctacttctacctccatgaatggttctgcatcagctactccagctggtgccccaacaatgagcttcagttatcctgccatgccgggaaatgaaacgcagtacctggccattttgcagaataacggctatccatttccagttccagcacatgttggtgcacaacctgcttatagaggtgctcctgggcagccgatgccattttttaatggttcattctattcctcccaaatgatccagcctccacatcatcagccacaaaagcagcatcagcagcagctaactggtcaaatgctccagagccatgctcctaacaaccagaatgggagtgcttccactggttcctcagcagctcaaaagcatctgcag

SEQ ID NO: 92311 - DNA, 837 bp, Arabidopsis thaliana columbia
ggccccccctcgaggtcgacggtatcgataagcttgatatcgaattcgcggccgccctccacatcatcagccacaaaagcagcatcagcagcagctaactggtcaaatgctccagagccatgctcctaacaaccagaatgggagtgcttccactggttcctcagcagctcaaaagcatctgcagaaccaacagttgaggccaccgattaatcatgggaactctcaaggatttccaactcataaagtgcaatcgcagcctttgaattttcagcagaggcagcaacccagagaaaatgctactcaacatagtgagactgtaggggaagatagcccatcaactgctgatagccggggttctcgttccaatgttgcctatggccagaactatggtatgcaaatgcaaccaactaacttgggtttgatgagttcccctgcccctggtggtggggtggttggatcttcgagcagtcatggtgaaaagaaatcacagcagcaggtttcaaaggctggtgtagaatccttccagtcaccgggttatgctatgacttttgcgacgttcaatggggctaacactgctcctaccctaaacatgtcatcaattgctcagaatcacgctatgttccacagcatgcccgaagcagcaaggcaaggttatcagatgatggctgcttaagcagctcaacaaaaaatgaactacggtgccttcaattagaagatggaaaaatcttgggttctaattgggtggtgcctgcctactggcttaataaataccccccttgaaggaaacaaaaaggaaagtccagggaaggaaggggggcaaatagggggaaaaaacca

SEQ ID NO: 92312 - DNA, 415 bp, Arabidopsis thaliana columbia
  unsure (1)..(415): unsure at all n locations
aagagagggggnttcatgcttgcagcgcagaactcatagttctgaccatcaaagactgcaaccagttgtgatgttcttcttcttctttgcaggatcaatcggagagttcaatctcaacagacgaccataccctcgatacagtagctgctccgctcatcaacgtccatttcgccgcctttagccgtcaacgttctctggttctgttgccgtacaaaattcttaaaggttaattagataagacctaaaacgggggcggtgtaaagcttgtcggtcttcttgacctttttggtgaactcctccttcctctctatcggctatcgctcgctgcggctctgtgtcttgttgcttggagcaagctctccagcgctcaagaatagggaaaataaaattatggattcagatgcatgggaaatta

SEQ ID NO: 92313 - DNA, 537 bp, Arabidopsis thaliana columbia
ctcactatttggaaagctggactgcctgcaggtaccggtccggaattcccgggtcgttccacgcgtccgctaattccctggatacaaagaagaggaagatgagctcatggaactacgttgttacggctcacaaaccgaccagtgtcactcactcgtgcgttggcaacttcacaagtcctcaagagctcaatctcattggcgcgaattgtactcgaatcgagatccttttgcttaccccacaaggacttcagcctatggtggacgttcctatatattggaagaatcgctactctggagttgttccgaccccatggcgaagcgcaagactttttgttcattgcaactgagagatacaatttctgtgttcttcactgggatcctgagccctctgagcttattacacgagcaacgggggaatgtttctggtcgtataaggccgccaacatacaattggcagattggcctcattgatcccgattggtggaccattggacttcatctagatgacggcttggtcagggtattccttttgaaatg

SEQ ID NO: 92314 - DNA, 524 bp, Arabidopsis thaliana columbia
  unsure (1)..(524): unsure at all n locations
atgannnnnnnnnnnnnnnnnnnnnnnnnnnnnnnnnnnnnnnnnnnnnnnnnnnnnnnnnnnnnnnnnnnnnnnnnnnnnnccacgcgtccgcggacgcgtgggtttctgatgcccgcccacctgggatttataaaccagattatattgatgctttatacactttttatcacgaaataaagcctgaaagtgttacttgcccaccaactcctgaatggaagaggtctgccgagcttgatcttaatggtgaagctgttcaagatgatgatgatgatgattctccgcctgaccctgttcaagaaatcaatcaggagaatgtgaagatgtcaaatgatgacactttgggtgatgaaataccccattatcaggaggaagcttaccggcaattctgttataaaatgcttatgatgaatgttgggggaagaggatttatgcaattcccaggttcgcaccctgtatcattagacagggagagtttgcaacttttgaggcagcgatactattatgcgacatggaaggcagat

SEQ ID NO: 92315 - DNA, 511 bp, Arabidopsis thaliana columbia
  unsure (1)..(511): unsure at all n locations
atgatactgccagctannnnnnnnnnnnnnnnnnnnnnnnnnnnnnnnnnnnnnnnnnnnnnnnnnnnnnnnnnnnnnnnnnnccacgcgtccgtcagcaaaagataaaagaactgaaacagtctctaaacagcgagtttcaactcattcacgagttatgcctatatgtcctctcagcttcccaaagacaagagcttatacgtgctacactctctgcattgcatgcctatctttcttggattccgttgggatacatatttgagtcccctttgctggagatcctacttaaattcttccctgttccagcatataggaatctcacacttcaatgtttgtcagaggttgcatctcttaattttggggacttctacgatatgcaatatgtcaagatgtacagcattttcatgaatcagttgcaggcaattctccctttaaatttaaatatccctgaggcatattcaactggaagtagtgaagaacaggcttttatccagaacttggcactgttttt

SEQ ID NO: 92316 - DNA, 690 bp, Arabidopsis thaliana columbia
  unsure (1)..(690): unsure at all n locations
acgcttcgatcgaaagaatatatatttggaagtttcctctgcttttttgttttcgtttgatagaatgggaacagttctcgattcgcattttctggctctcactgctattgtcactgtgatttaccagttcatattcttcgtaatcacggctcttttcaaatttgatcaagtcactgactttgctggtagcacaaacttcgttatacttgctgtgttaacacttgttctcaaagcctcttggcattttcgacagatagtattgactttgctagttgtggtatggggtcttcgcttggggattttccttctaatgaggatcttgcaatggggggaagatcgtcgctttgatgaacagcgtggaaatatagtgagactaatcattttctggactcttcaagctgtgtgggtttggacggttagcttacctttaacacttgttaatgcaagtagatggtggtggatctcttaaacccgcagatgttatcggttggactatgtggggtttcggcttcttgattgaaggctgcaagctgatccaacagaaggtatcattcaaaaacttttcctgaaaccagngggaaatggtgtnatgttggggctggaagtttcaaggcatccaaccacttcggnggggttttnctttggtggggatnttttttggtnaancccttnctttaaggtcanngantt

SEQ ID NO: 92317 - DNA, 911 bp, Arabidopsis thaliana columbia
  unsure (1)..(911): unsure at all n locations
tgcaaagagtaaaatggcgaatcctaaagtcttcttcgacatcttgattggtaagatgaaggcagggcgtgttgtaatggagttatttgcagatgtgactccgagaacagctaataatttccgtgctttgtgcactggggagaatggtattgggaaagcagggaaggctttacactacaaaggctcagcctttcaccgtataatcccagggttcatgtgtcaaggtggagatttcactcgtgggaatggaactggaggagaatctatttacggctctaaatttgaagatgagaacttcaagttgaagcacactggtccagggattttgtctatggctaactctggtcccaacactaatggttctcagttcttcatctgcacagagaagacttcgtggcttgatgggaaacatgttgttttcgggaaagttgttgatggatacaatgtggtcaaggcaatggaggatgttggctctgacatgggaaatccttctgaacgagttgtgattgaagattgtggtgagctcaagaacccaagttcataagttcttaaaacattgggtgggttgatcttgacaggttattctatcatatgctgtgaagcagagacagcatcttagcgttaaggtcaatctagtctgtgatgcccccctttggttttggctatatcatatgacccttaggaaggggcccccccctgtaagttgtttttttaaaactcttgtgtgaaaataggatggatgataaaaatggttagtttctttnnnnnnnnnnnnnnnnnnnnnnnnnnnnnnnnnnnnnnnnnnnnnnnnnnnnnnnnnnnnnnnnnnnnnnnnnnnnnnnnnnnnnnnnnnnnnnnnnnnnnnnnnnnnnnnnnnnnnnnnnnnnnnnnnnnnnnnnnnnnnnnnnnnn

SEQ ID NO: 92318 - DNA, 931 bp, Arabidopsis thaliana columbia
  unsure (1)..(931): unsure at all n locations
nnnnnnnnnnnnnnnnnnnnnnnnnnnnnnnnnnnnnnnnnnnnnnnnnnnnnnnnnnnnnnnnnnnnnnnnnnnnnnnnnnnccacgcgtccgcggacgcgtgggcagaagttcaccgttacaaccgatggtccaattaatactgctgctggcttgcagtcacgcgttgaatcactcctgcgcaaatctaacagtgaattcaccgtggttatatcacagatgaatggacaagaccatgcatcacgatcccatgtatttactgttggaaaggcgaggataaagctgtcccgaggatggatcacaaaggctagagaaatatattcaacctccatgcagctctgtggagtgagaggcaatgctaacgttcctgcaaaggcattgctctggcaacttagaaagggtctaactttcttactaactttcgagtcagagcaagaacgtaatgcagccatagtactcgcacgaacatatgcatatgattgtaatgtcactctagttggtccagatgattgaggtagtgaaaggagtagttttgtgatatcgactgttatgtatttcagtgtttgtgtgtggttgaaagaagaagaagaagaagaaccccaagtgttgctgcatagttttagacagaaaacacattttgtgtttttttttggcatgatcactggtttgaggtggttggcattttttctgatttgattttatttgtttgtttgtttgatttgtttggaccattattggctaattaggattattttttggattgtgaaaaattgtaatcaagatttgttggtatctaataacagaacagtgtttcnnnnnnnnnnnnnnnnnnnnnnnnnnnnnnnnnnnnnnnnnnnnnnnnnnnnnnnnnnnnnnnnnnnnnnnnnnnnnnnnnnnnnnnnnnnnnnnnnnnnnnnnnnnnnnnnnnnn

SEQ ID NO: 92319 - DNA, 417 bp, Arabidopsis thaliana columbia
ttagaattagcctaacttaaaaaccaatttgtttaaatacatctaaaaaaaataggaagcaaaagaagaaaaaaagacaatatatagataaaatatataaaaaataaaggttcgcatttttttagttccaaaaaggggattcgtatttttcccatcactaccttgagacaataataaaaaaagatcttttatttcctcttaatgaggaaataaaagatcttgaaattaattactttaagtgagcaaaaaatcttatgtttgtacaatataaaaagatacatcaaaaaaaatattttgataatttttttgatttctcttgagcaattaggaaaatctaattttatttaaaattgctaaggattttgaagaagtttttatttttcgaaaaagcatttttttatcaatatttcttcatat

SEQ ID NO: 92320 - DNA, 693 bp, Arabidopsis thaliana columbia
  unsure (1)..(693): unsure at all n locations
atgannnnnnnnnnnnnnnnnnnnnggtatgtggaggatgtcatcccctcttaatgtacattcgtggagctacaagtgttcaccgcgcgtccggtcacactgttaatctcgccctcgaagcaaaccaagtagcgcatgtgaattgcggaaactgcatgatgctactaatgtatcaatatggagcaagatcagtgaaatgtgccgtttgtaactttgtcacatctgttgggggttcaacgagcacgactgattcgaagtttaacaattaaaacttggatctatctacctatcaatacatagtgagttatgagcaatatagaggaagcatcaaatctttttcactctctcttcgatcaagaatccggcagtgatgagtttgaaaccattttcggaagtaaatgaaatatgtaattcgtcgaaatttctgactttggtctctttgtccgtttgtatagagctatctctcttctttggtttttggtttgttctcttaagaaaaatttgattcaccagtttgtaagagtgattcagaaatcaaagctagactttttttgcctggnnnnnnnnnnnnnnnnnnnnnnnnnnnnnnnnnnnnnnnnnnnnnnnnnnnnnnnnnnnnnnnnnnnnnnnnnnnnnnnnnnnnnnnnnnnnnnnnnnnnnnnnnnnnnnnnnnnnnnnnnnnnnnnnnnnnnn

SEQ ID NO: 92321 - DNA, 563 bp, Arabidopsis thaliana columbia
  unsure (1)..(563): unsure at all n locations
accagccccnngatcgggccncngcccccnagnccnatgggnccagccgggaaanccccgttgaaccttgccccacngggggggtagtcccttccttncccnaaaannccggttnaacccngccncaacttaccaaaattnctcccttttttttaaccaccngaccggtcccttanataangtttaattttnggtggctattgtttggataattgcttgtactgttgggggtccaaccgagcacgactgattccgaagtttaacaattaaaacttgggatctatctcccctatccatacatagtgagttatgagccatatagaggaagcctcaaatctttttccctctctcttcgatcaagaatccggcagtgatgagtttgaaacccttttcggaagtaaatgaaatatgtaattcgtcgaaatttctgactttggtctctttgtccgtttgtatagagccatctctcttccttgggttttggtttggtctcttaagaaaaatttgattccccagtttgtaagagtgattcagaaatccaagctagactttttatgcatccc

SEQ ID NO: 92322 - DNA, 625 bp, Arabidopsis thaliana columbia
  unsure (1)..(625): unsure at all n locations
cnccnttttaccccgtnggccntccccccccggaccggnttgccccattggnttgggggggtnccaacccccnttaaggcccatccggggncctccaaggtttccaangtccttgttgcccccctttttaatccccncccncggaggcaaccccaagttggcnncattttgaattgccggaaacctgccnggatggcntnctaatggtacccaattntgggngccaaggacccagtgaaantgtgccngtttggtanctttggtccaccatctggttgggggttccaacggagccacgactggattcgaagtttaaccatttaaaacctgggatctatctaccctatcaatacatattgagttatgagcaatatagaggaagcatcaaatctttttcactctctcttcgatcaagaatccggcagtgatgagtttgaaaccattttcggaagtaaatgaaatatgtaattcgtcgaaatttctgactttggtctctttgtccgtttgtatagagctatctctcttctttggtttttgttttgttctcttaagaaaaatttgattcaccagtttgtaagagtgattcagaaatcaaagctagactttttatgcatgaaaaaaaaaa

SEQ ID NO: 92323 - DNA, 429 bp, Arabidopsis thaliana columbia
acgcccacgcgtccggctgagaacaattttcttctccttcttcttcttcaagcagagacgctctcagctcaccagacatggatcctagcatggcaaacaacccggaattgcttcaattcctcgcccaagagaaagaaagagcaatggtgaacgaaatggtgtcgaagatgacaagtgtgtgctgggacaaatgcatcacaagcgcaccgggaagtaagttcagctcaagcgagagttcttgcctcactcattgtgctcaacgctacatggatatgagtatgatcatcatgaaacgctttaattcgcagtaaaattgattggaggatatcatacttgttggaattttaatttatcctttttttgtttctcttggcaagtgttgaaatcccttttattactctagtgatcttgcaagagtattctcggata

SEQ ID NO: 92324 - DNA, 435 bp, Arabidopsis thaliana columbia
  unsure (1)..(435): unsure at all n locations
tcccccctcaggncccgtccggatccccggtcggcccacgcgtccgagaaggccatggtgaacgaaatggtgtcgaagatgacaagtgtgtgctgggacaaatgcatcacaagcgcaccgggaagtaagttcagctcaagcgagagttcttgcctcactcattgcgctcaacgctacatggatatgagtatgatcatcatgaaacgctttaattcgcagtaagattgattggagatatcatacttgttgggattttaatttatcctttttttgtttctcttggcaagtgttgaaatcccttttattactctagtgatcttgcaagagtattctcggataagtgttttaggtgtttctttatggttatgtgattgagattgttattgatggctagtaatatattaagagacaagtgttgaataatgtggttttaat

SEQ ID NO: 92325 - DNA, 428 bp, Arabidopsis thaliana columbia
attttcacaaacaacctctcgtcttctaggttaatccaatttcgtcgattcatgaagttcacaattctcccatcggaaaattcttcgtaatcgacgacgaagagatcatgagtaccgtcggaggtatagagcagttgatacctgattccgtttcaacgtcgttcatcgaaacggtgaacggttcgcaccagttcacgattcaaggttactctctagccaaaggcatgagccctgggaagtttatacagagcgatatcttctccgttggtggatacgattgggcgatttacttctatcctgatgggaagaacccggaggaccagtcctcgtatatctctttgttcatcgctttagcgagtgattctaatgatattagggctctgtttgagcttacgcttatggatcagagtgggaaagggaaacataag

SEQ ID NO: 92326 - DNA, 523 bp, Arabidopsis thaliana columbia
  unsure (1)..(523): unsure at all n locations
nnnnnnnnnnnnnnnnnnnnnnnnnnnnnnnnnnnnnnnnnnnnnnnnnnnnnnnnnnnnnnnnnnnnnnnnnnnnnnnnnnnccacgcgtccgcccacgcgtccgaagctgatgatgttattggaacactggctatgcgaagcattagtgccggtttcaaagtccgagttgtctctccagacaaagacttctttcagattctttctccctcgttgcgtcttcttcgactaacaccacgcggatcagagatggcttcctttggaatggtagattttgctaaaaagtttggaaatttgggaccagcacaatttgttgatatcatcgcccttgctggagacaagtctgataatattccaggagttgatggtattgggaatgtgcacgcagtggaactgatatctagatttggcacgttggagaatctgttgcagtctgtggatgagatcaaagaaggaaaaataaaggagtctctaatagctagtgcggatcaagccattcttagcaagaaattggcactgttac

SEQ ID NO: 92327 - DNA, 799 bp, Arabidopsis thaliana columbia
atacgactcattatagggaagctgtacgctgcagtaccggtccgaattcctgtcgaccacgcgtccgtcacagaagataacacaagagcccacacatcgtacgccacgtggcagattcacctctttataatcctctctccctcacggtttctacgacattttcacaaagccacaccaactcactcacaaaatctgtagaatcatctttcaacaatggcttccactgctctctccagcgcaatcgtaagcacctctttcctccgccgtcaacagacaccaatcagcctcagatccctcccgtttgccaacacacaatctctcttcggcctcaaatcttccaccgctcgcggcggccgcgtcacggccatggctacctacaaggtcaagttcatcacacctgagggagaacaagaggtcgaatgcgaagaagatgtctacgtcctcgacgctgctgaggaagccggactcgacttgccctactcatgccgtgccggttcttgctcaagttgcgccgggaaagtcgtctctggttctattgaccagtcggaccagagcttcttagacgatgaacagatgagtgagggctatgtcttgacctgtgtggcttatccgacttctgatgtcgtcatcgaaacccacaaagaagaagccattatggaaaattgtaaagctttttgatgaatttcatcaaaagagaaattacctgatggttaagtcatctctcttgttacttccctaatgttgccctaatttggctcatcctttttataagatcaatcaataataacacatttcaatg

SEQ ID NO: 92328 - DNA, 485 bp, Arabidopsis thaliana columbia
ctgatctggatccaactagcgggtcgggtcatgtcgagaaactcggtaaccttgacacctacgtctgtggttccactcattcaaagcttgctgttcttcttgtccctcatgttttcggatatgaaactccaaacctgaggaaacttgctgacaaggttgcagaagctggattctacgcggtggttcctgatttcttccatggagatccttataatcccgagaaccaggatcgtccgtttcctatttggatgaaagatcatgaactagagaaagggtttgaggagtcaaagccaatagtggaggccttgaagaacaaaggcataactagtataggagcagcagggttctgttggggtgcaaaagttgcggtggaactagctaaggaaaagcttgttgacgctactgttttgttacatcctgctcgcgttacggtggatgatatcaaggaggtcaacattccaattgctgtattaggagctgaaatc

SEQ ID NO: 92329 - DNA, 798 bp, Arabidopsis thaliana columbia
tggatctcctttctcgtcggcggctaatcaaattcttccagagggttttgacagaaatttctcgagatgggtcaagctcaaagtgacgagaactcaattccgacgacgacgacaacgaacactcctcctccttctgcgaattcacctcgggattctgaagatacttcgtcgccatcgatggattctcttcttgcagaagctgcagcatatggtgaagatgataatgagaatgagtctcttgaagccaaagcacagagagctctcgattgtccttgtatagcagatttgcgtaatggctcttgcgggtctcagttctccgaggcattcctttgctttctcaaaagcactgctgaagaaaagggatcagactgcgtgaatccatttgtagcattgcaaagctgtatcaatgccaatccggatgcattctctaaatcagttacaggggacgaaaaagaaaccgagaaaaaggaagagcagcctcctgtgcaagaccatagaatcatccctcctctctgggccaaagacccgcctcgcagtggcaattccaagctttagaatatcaacaacaatggagtcagcatcagaagctagtctctcctcttttgattcttttctctagacagcacttttaagaatgtaaaagaagagtagaagaccatgatcagtggtcgtgtagatcaacattgttctttcttttttaatactaaaaagctgagatttttggttaaaaaaacaaaaaaagggcggccgctctagaggatccaagcttacgtacgcgtgcatgcgacgtcaaagtct

SEQ ID NO: 92330 - DNA, 471 bp, Arabidopsis thaliana columbia
acgcaacaatcaaatctcgaaacacctctcaaaacccaacacgaccaccgaagaatcaccacttcaaaccctgaatcatctccgcctcgacctttcccggaatccagccggaaacatgattctcctcctccccgagcctccaccaacgagccaatgaagaaaatcggaactccggagcgtttaagagtcccaatagctttcaagtacccagagaggtacaggagcccaactgatgcaatgatgtctccagttactaaaggtcttctcgcaaggaccagaaagtcttccggttctcttattccacccagctttaaccataccaagattcaagaactactcaaaccggaatcgggttattctactgtccagtgttgaaaagggtagacattatttaatttgatgcattgtatctaatgttatttttcggctattatttatagtatattgtttcttttttttataattttttta

SEQ ID NO: 92331 - DNA, 758 bp, Arabidopsis thaliana columbia
  unsure (1)..(758): unsure at all n locations
nnnnnnnnnnnnnnnnnnnnnnnnnnnnnnnnnnnnnnnnnnnnnnnnnnnnnnnnnnnnnnnnnnnnnnnnnnnnnnnnnnccacgcgtccgctctctctatcgtcttttgttttgatttaaatgcctcaagtcgttgcttcagcatgtaccggtgggtctgaccggaaaatctcatgtgaaactctggccgacgataacgaagactcacctcataactcgaagatccgacccgtatccatctccgccgtcgattttccaccggaatcttactctttatcaaaagaagctcagctcgaatggctaaacgacaacgccttcttcgaacgcaaagaatcacaaaaaggaaactcttctgctccaatttcgaatcccaatacaaaccctaattcgagctctcatcgaatctcactcaaatcaaaaagcgtcgatcatcagattaccgaaaccgcagaagacgtgtttcaacgaagcgaagaaacggagaaattgcagaatcgcgaggactttgatgattccgaaacggatcgggtcgagattgaaatcggatcctacgttatcggagccatggtctcccaaggtttcttgtatcggaagggttagatctaaacgtgatcgtagccgacgaatgcagagaacaaatatccggtcgaaccaattcgttttaagataaacccggtccgggtaagaaagcctggtttttcgctagcttcagagctatttcagaaccggtggcggttgcaagacttactgcgagt

SEQ ID NO: 92332 - DNA, 564 bp, Arabidopsis thaliana columbia
  unsure (1)..(564): unsure at all n locations
accgaccaatccgccatgaatatatctcagattattttcttcgcgtcccttcttctacggcttcacttatcaacggcggaacatcaaaattcaaacgctggtgatggagacaccatcatattcaccactctaggacgatcgcactacgaatttgacatattcgccctctccacgactcaaccgccgtcagtttccggagagctccgaatcaccgatggggaatcggtaaatttcaacggctatttcccgtctccttctccggctctattatctctccttcccgacgaaaccctaattcaaatggaagattcgtctcctctgcatctcatatacgtcaccgagagaaacggtacttctagcttgtactacgatctagtttacggccggtaatttctgtattttaaaacggaaacgnagatccggtnttagaagcancggnttcgggtncaaagttccggttgttatnccgnctttggtcaaacttagttggattnncgggnaaaatcttttaaaaggnaaggcntaggtttnagtggngggtttntttnttngggggaacccnct

SEQ ID NO: 92333 - DNA, 431 bp, Arabidopsis thaliana columbia
  unsure (1)..(431): unsure at all n locations
gagacggcgacaatggcgaatttgatgatgagattaccaattagcttgagaagcttctctgtttcagcttcttcatccaacggttcgccgccggtgatcggaggatctagcggcggtgtaggaccgatgattgtggaattaccgttggagaagatacgaagaccgttgatgcgaaccagatccaacgatcagaacaaagtgaaagagcttatggatagtatccgtcaaatcggtcttcaagttccgattgatgtgattgaagttgatggaacttactatggtacttttcttgttctttgtgatatctgttctttgaaagcttataaatgataaattcttccattggtttagggttctcgggatgtcacagatacgaggcgcatcagaagctagggcttccaactatacgtngcaaaatccgtaaaggaaca

SEQ ID NO: 92334 - DNA, 753 bp, Arabidopsis thaliana columbia
cttcttcttccttctctctttcccagaaagtatcatcgaaagataacccttttttcacttttcttctcctctgacttttttcttctcgaatctttagttttcgtttatagattctgttttcttcgtatatataataaaggtttgattttttcgatctgagagcaagagaaaaccctttccatggcctcagcggcgatattctcatcgttacgacggaggagatcgccgtctttggaagcattcttagcccccgttgacctttccggcgtcgcacttgttcaaaccctagcttcaatctcttcggaggttgtttcttgtttcacctctgttcgattctcgtttcaacgcaagaacgctcgttctttgattcgtaagatcgagatctttgtcgtattattcgaatttctcgtagattcaaattggggctcaacaacaacaagaacaagagcaagaagaagaagcaaaagctctgtttctgaatcaacagctttgctttgtctcaaagagctttatcttcttctctatcgttccaagatccttgttgattactgcgctcaatctagtaagttatggctcttgttacaaaacccttcgatttctgggtatttccatgatttgaatcaagaaatttcgactcttttggatgttttacctgtcaatgatcttggtctaagcgatgacattagagagcaaatcgagttgttgcagagacagtcaaggaaagcgagattgtatatcgataagaacgatgag

SEQ ID NO: 92335 - DNA, 867 bp, Arabidopsis thaliana columbia
  unsure (1)..(867): unsure at all n locations
nnnnnnnnnnnnnnnnnnnnnnnnnnnnnnnnnnnnnnnnnnnnnnnnnnnnnnnnnnnnnnnnnnnnnnnnnnncacacacgccacgcgtccgtttggagctaatcggaaaacaaaaaagcaacggccaaagcaatgaggaaagatgatctctgcatcactgttcctaccttcttccgatgtcctatatctctcgacgttatgaaatctccggtgagtctttgcaccggcgttacctacgatcgagctagtatccaacggtggcttgacggcgggaataacacttgtccggcgacgatgcagattcttcagaataaagatttcataccgaatcggactcttcaacgtcttatcgagatttggtctgattctgttcgtcgtcgaacttgtgttgaatcggcggaattagctgctccgacgagagacgagatcgccgatgcgatcgatagagtgaagatcgagatagaagaaagagatgatcgcgaggttttgtcgaagattgttcgattcgggagagaatctgatgataacagaggatttctcgccggaaaagatgatttcgtgaaacttctcgtggatctgattaatcaggtggatttcgaaaccacctccgncgcgatatctctggttgttcaagatgcggtgaagattctgagtacgattcgaagcanagtctcagatcggagacggttttcgaatctgattttaacccacggtcgagatcgggtatcggtgatcgtctacttgtttaaaccgggaatgtcgaattgaaattgattgcgccggttacttgagttatcgccgtcacgctgaatcaagctgttaatcccgagagagaggattatcacggagctatgaatcgattag

SEQ ID NO: 92336 - DNA, 392 bp, Arabidopsis thaliana columbia
gaaaaaacccgatccttcgatatatattacagctgccgagaagctaggtgtttcagtgaaagactgtttggtcgtagaggacagtgtgattggcctgcaggctgctacaaaagcagggatgtcatgtgtgatcacgtacacttcttcaacctctgatcacaatttcaatgatgcgattgccgtataccctgatctcagcaatgtgaaattgaaggacttggaaactctgcttcaaacaatagtcactccagcttaagacatttgtctcctattcatttctgactgttcttctgcaactgtacatctgctgtttatgtttgataaaatctcttcattaataagaaaagaagattcaaatgtataaaaaaacaaaaaaaaagggcggccgctct

SEQ ID NO: 92337 - DNA, 436 bp, Arabidopsis thaliana columbia
catttccgagtccttcttcttcttcttcttctcgatctctgtatctctcgatcatttccttctaaaggaagcgtctttgatcttaatcgtcgtgtcgttcgtttctaactttattttgaaagatggaaacagaaacggaacatgatagaactgtctctgtcgatgacaacgacagccttgtacctgagccaagctcaacgaaagaaagcttttttgaagatctctcgcttactgggcaagttatgaatcctcaactttcaagtgcaggcgaagttttgacaaaagttgaattggattttgcttttgtctctgagaaattggtcaatcttagtcttcttactatgcaactcggcacgagggaaaatgattttgagtcttttgtttctaagaaagaagaagatgaagaagagccttcgagtaatgttgatgatgatga

SEQ ID NO: 92338 - DNA, 633 bp, Arabidopsis thaliana columbia
tgatcttcagctctctacgactcactatatggaagctggtccgcctgcaggtaccggtccggaattcccgggtcgccccacgcctggcggaatcaagaattgctggacatcaagaggctttgaaaagggaagggagaacctgctaatggaaacagaggattcaagtagcagcattgcaattgggaagaacattacaaatctccagagtttcagcccatcaacacctccacttactacatctagtaactgcagaatcgtcaagcgaagaaagggaattcctcaccgatctccaatgggataagaaccgagattacacacaggttttagctaatacagaggcttcttctgtctcttatctttcctcgtataccaaaagaaatggtcttttgcttgtgttagcaaaaaaagaaaggccttaagttaggttttgttgtcctactacttgggcaaatatgtgaatatgtaatgtgctttgtatatgatgcaaaaagggtagaaatggaaatataggggttttagtgggctaaaagtaagaataaaaacaaaattagttttttggttttcaaaaaaaaaacaaaaaaggaaggccgctctagaggatccaagcttacgtacgcgtgcatgcgacgtcaa

SEQ ID NO: 92339 - DNA, 913 bp, Arabidopsis thaliana columbia
agaaaaaactacatttctaacatatagaagaaacagagaaaaagagagagagacccctaatggctgagaaagaagaagtgaagcttttggggatatgggcgagcccttttagccgtcgggtcgagatggctctcaaactcaaaggcataccgtacgagtacgtggaagagatactggagaacaaaagccctttgcttcttgctcttaaccctattcacaagaaagtccctgttcttgtccacaatggtaaaaccattctcgagtctcatgtgattcttgaatacatcgatgagacttggccacaaaatccaattctccctcaagatccttatgaaagatccaaagctcgtttctttgctaaactcgtcgatgaacagattatgaacgtggggtttatatcaatggcaagagcagacgagaaaggaagagaagttttagccgagcaggtaagagaactgattatgtatctcgagaaagaacttgtcggaaaagattacttcggaggcaagactgtcggattcttggactttgtcgccggaagtttaattccgttttgtttggagagaggttgggaaggaataggattggaagtgattacagaggagaagtttccagagttcaagagatgggttaggaatttggagaaggttgagattgttaaagattgtgttccaccaagagaggaacatgtagaacacatgaactatatggcagagagagtgagatcttcttaagaaaacaaatcatgtttagttcttgatcatgcaatgtttgtatggttatgttgttgtttattttattgaatatctttgtatgttgtgtggttgagagtgaggttttatcatcatctctcacgttatcttatttggtccactatttagaattaatggtaagcttggctctattttgtccc

SEQ ID NO: 92340 - DNA, 295 bp, Arabidopsis thaliana columbia
gtatttaaaggaaggtggtatgtgggatgccagagctaatgcgcctgttatctattacaagtagatcgatatatgaatttgttaaaccaaataatcaagaaagagaggaagggtgatgaaagttttcttttatttgtttagttcaaatcttcttcaatttgtgatgatattatttgtatatatatttcaacgatccaatattgttatgttttataagcatattacaagtattggaaacaaaattgtatgcttttgagcacattttgagattggaaatgattttgagtttgaaagc

SEQ ID NO: 92341 - DNA, 721 bp, Arabidopsis thaliana columbia
caggtaccggtttcgggattcccggagtcgacccacgcgtccggctaagaagcttgagcacgaggacaagaacccgtcgtggaggatccgagagagggagtgatgattcacctttcagtttactcggaccaaagctaaggagatccccgagtgttccttactacgccccatctataaagctttggagctggtggtgttccgaccattcttgaggagcttcctcgtcagaaatcaaagaaagtcaaaccaacaggcaaatttagtcacccaatctttagtcttttctacggaaagaaagaagaagtcgacgccgacgaagcctgagttttctaggtatcttgagtatttaaaggaaggtggtatgtgggatgcccgagctaatgcgcctgttatctattccaagtagatcgatatatgtatttggttaaaccaaatcatcaagaaagagagagggtgaggaaagttgtcttttatttgtccagctcacatcttcttcaatccgtcctgggaattttggaatcaatcttgctcgatcccaaaaatgacgtgtccgaaacgcttataacaagttttgtcctctcgtgtgtatgcctctgagcacattttgattgaaaatttttttggggtttccccccaaaaaaaaaaaaaaaaaaaaagggcggccgctctagaggatccaagctgacgcaagcgtgcatgcgacgtcatagctcgtctatag

SEQ ID NO: 92342 - DNA, 606 bp, Arabidopsis thaliana columbia
  unsure (1)..(606): unsure at all n locations
cctccacctacacagaaactagagggacaaggtggtgatggaggagattcttgggacgatggtgctttcctaaatgtaaagaaagtatatattggacaaggctcgaacggtattgtcgccgttaagtttgagtacgagaacgacgctagtgaggttgttgttggagatgaacatggaaagactacattgcttggatacgaagtgttcgagctggattatccgaatgaatacatcacatcattggagggttgccacgacaaggtcatgggagctgaaactggagttataacaatgcttaggttcaagacaaacaaacgtacctctccaccttttggacttgaagctggtgtcaacttcgtcctccagaaggaaagtcacaagatcactggggtccatggaaagtccagtactatgcttcatcagattgggggtcatgtcgttcccatcactgagtgaccatccatagccacctttaaaaatgggtgaataaccggtaatanaacccctggcaaagtaggtttgtaccttcncatgggttccctaggtgnattgggccctannaccgaacgnattcncttccggannaaaaaaaagggggcgcctntc

SEQ ID NO: 92343 - DNA, 767 bp, Arabidopsis thaliana columbia
  unsure (1)..(767): unsure at all n locations
atgannnnnnnnnnnnnnnnnnnnnnnnnnnnnnnnnnnnnnnnnnnnnnnnnnnnnnnnnnnnnnnnnnnnnnnnnnnnnnccacgcgtccgcccacgcgtccgcaatcatctctttacttctctcttcacatcatctttcttgaattctttatatacacagtttaaagatgcaaatgctaagaagcttgagcacgaggacaagaagccgtcgtggaggatacgagagagtgagtgatgattcaactttcagtttactcggagcaaagctaaggagatcgacgagtgttccttactacgcaccatctataaagcttggagctggtggtgttccgaccattcttgaggagcttcctcgtcagaaatcaaagaaagtcaaaccaacaggcaaatttagtcacccaatctttagtcttttctacggaaagaaagaagaagtcgacgacgacgaagcctgagttttctaggtatcttgagtatttaaaggaaggtggtatgtgggatgccagagctaatgcgcctgttatctattacaagtagatcgatatatgaatttgttaaaaacaaataatcaagaaagagagagggtgatgaaagttttcttttatttgtttagttcaaatcttcttcaatttgtgatgatattatttgtatatatatttcaacgatccaatattggtttggtttataagcatattacaagattgggaaccaaannaaaaaaaaaaaaaaaagggcgggcgtctagaagatccagctacgtacgc

SEQ ID NO: 92344 - DNA, 704 bp, Arabidopsis thaliana columbia
atgatactccagctctactacgactcactatagggaaagctcggtacgcctgcaggtaccggtccggaattccgggtcgcccacgcgtccggataatggctatggggctaatgtctccacatggcctgcacgtcttcatgatccgccagagaggctacaaagcattcaaatggatgcgtacatatcccgaaaggaaattatgaaggcagagtctagattttggttagaagtagtagagagttatgtgcgggttttccgctggaaggagttcaaactgaggaatgttctggacatgagagctggttttggagggtttgcagcagcattaaacgatctggggcttgactgttgggttatgaacattgttcccgttagcggattcaacaccttgccagttatttatgaccgtggactacaaggggctatgcacgactggtgtgagccatttgacacctacccaagaacctatgatctgatacatgctgcatttctcttctctgttgagaaaaagaagtgcaacataacacacattatgctgtagatggaccggatgttgagaccaggaggacatgtctacataagggattcactgtctttgatggaccaactcagcaagtggctaaagccatcggttggactgctggtgttcatgataccggggaaggaccccacgcacgcgttaggattctcatctgcgataaacg

SEQ ID NO: 92345 - DNA, 827 bp, Arabidopsis thaliana columbia
  unsure (1)..(827): unsure at all n locations
ctccggaaaggatgtggatatttctcacttccggaggtttttgttcctcgaagggcgcaagcgttcaagggggggcaattccgtaagatgtttcaggcagcctaattttgtttaagaaaaaaatttttcgggtttccccgaaagagttaactaggaattttggcatagaactgtttgagggttccgcaccattaagatatggggctccctgtggttataacagggttccgtaggggtttacccctcgcaggttttatgcccgtgtctcaagggctaagccgcccggtttagcctttgggtccaacccagaacttatgttttatacttgggcattctttttttgttgaaaaaagagtgcaacatacgaacattaggtggagatgcccggatgttaggcccggaggcaaggtttcaaaagggatccctgtctttgatggaccaatttcagcaagtggctaaagccatcggttggactgctggtgttcatgataccggggaaggaccccacgcaagcgttaggattctcatctgcgattactggatatgaggaaaagaaaaataaaagatccgcaatcgaatgtgatgatcagtctgctcaaagagacagttcttcttagtgataaattgataattgtattattgtttatttgtttgttgatttgattgttgaagaatgaagagtgttaatacacttgagctactttaacacatgagtaacaaaaagattcattttctcagaaaaaaaaaaaaaaaagnnnnnnnnnnnnnnnnnnnnnnnnnnnnnnnnnnnnnnnnnnnnnnnnnnnnnnnnnnnnnnnnnnntccta

SEQ ID NO: 92346 - DNA, 505 bp, Arabidopsis thaliana columbia
  unsure (1)..(505): unsure at all n locations
ccatttnaaaaccatctttgatcttttcattttccctctttttgagtgatgatgatcagtaagcaaatcttgagcataccccatcttcggattcttaaaatcaacactctttttaactcagattttggtactgatgttgatgttccgagcagcaccatctcaatttcaactaaaccaaaccgctctgagttagtttgtttttcgatggtccgggtttggaattggttagtgaaatcatgacgaatttcggcttgatggtttagcatgtttttaccggttaagttatgtacggttcatgatcaatggatctctgagggatctaggagtgtttaagtctacttataaagtcaaactacatattgctacgaaccctattatccgacataggaacaacgacatttcctttaagagatgatgatttggaagatctctgaatttgattaattggtagaattaaaatgtgttcatcagcagtggtatcaatacatttctcagatgatgattg

SEQ ID NO: 92347 - DNA, 614 bp, Arabidopsis thaliana columbia
  unsure (1)..(614): unsure at all n locations
gagcggagttggagactnanctagatccgccggcgaaaaagcagagccgtcacattcatcgtcggaaatcaagaaagggtaattntctgtaggatagagagacatggaagccaagtttttccggttcttgaagattnttggagttggatacaaagctagagctgaggaagcagggcgtttntnatacctcaaattgggttacagtcacgaatcgaacttgcggttcctccagcggttcgagtcttttgtttcaagaacaatgtggtttgctgcactggaatcgacaagcaaagagtgcatcagtttgctgcaacggtaaggagttgcaaaccccctgaaccttataagggcaaaggcataatgtacactgatgaagtcgtcaagaagaaacaaggaaagaagtccaaatgatctctctttgtatgcttcttcttccttcttactctgcagagacaactttcatctatctgtggtagattatggttggatttttatcaataagttttatttggttgtatgagacatcattttgttgttaagtctctttcaatgaaacaaaatgaggagagttcgtcttgggaaaaaaaaaaaattttttaaaaaaaaaataaaaa

SEQ ID NO: 92348 - DNA, 511 bp, Arabidopsis thaliana columbia
cggaaacccgggcgacgacgcgtccgacaacgtcactttcttcccggataattgaaatcggtgatcggaatccctagaaatgtcggataatcgtgcactccgacgagctcatgttctcgccaatcacatactccaatcaaatcctccatcttcgaacccgtccctgtcgcgcgagttatgtttgcagtactctccaccggagctcaacgagagctatggattcgatgtcaaggagatgagaaaattacttgacggacacaacgtggtggatcgggactggatttatggactcatgatgcagagcaatctgtttaatcggaaggagagaggcggtaagattttcgtgtcgccggattacaatcagacgattgagcagcaccgtgagatcacaatgaaacggatctggtacttgcttgagaatggggttttcaaaggatggttgacggagacaggtcctgaggccgagctcaggaaattagctctgcttgaggtttgcgggatttatgatcac

SEQ ID NO: 92349 - DNA, 747 bp, Arabidopsis thaliana columbia
  unsure (1)..(747): unsure at all n locations
ttttccttgaaacggttccctttttggggccattggttccaaagggtttgcctcattcgtggctaccataaagaagttcttttcaaacaaagcaaaccactacattggtgggtcccgttactcattgaaatcgcaaagaacatggggatccatcctttgctcttgatggttccaggagccattggggctcagttcgctttcttgcttcccacgggaacaccctctaacgtcgttgggttcacgacagggcatatagagatcaaagacatgatcaagacaggcttgcctctcaagatcgctggaaccatctttctctccatcttgatgcccactcttggggcttacgtttttgcatcaatgggaggagtttagttctacaagccaagcacaagaccatgtacacaattgatttattgtactatattgtttactaccgtaatacatatgtagatatatagtcaatggaatgggaaatttagatgaggtcaaaattcacaaaatcggcccatttttgtaacccgcccgattatagtttccggtaccattgctttcttttgtgcttccaaacgtaccggtaactttggtccctttttttttttgtttggtgtgtatatgaaaaagggttaatacagatttgtgtgttcttctttnnnnnnnnnnnnnnnnnnnnnnnnnnnnnnnnnnnnnnnnnnnnnnnnnnnnnnnnnnnnnnnnnnnnnnnnnnnnnnnnnnnnnnnnnnnnnnnnn

SEQ ID NO: 92350 - DNA, 413 bp, Arabidopsis thaliana columbia
gttgaattgagcggcggaggaaacaacgtcgtgaacaaagtgttctacgcgacgtcgtatcatccgattcaagccggaagtatcgacggaactgatgttgctccacatgataacggcgtccgtcgagctcttctctgttataacgctggcttatatgatccttctggtgattcgaaggctgttggagatccttactgtactctcttcgtgggtcgtctctctcatcacactacggaggatacacttcgagaggtgatgagtaagtatggcaggattaagaacttgcgcttggtaagacacattgtgacgggagcttcacgaggatatggttttgtggagtatgagactgaaaaggagatgcttcgtgcttatgaggatgctcatcattcactaatagatgggcgagagattat

SEQ ID NO: 92351 - DNA, 555 bp, Arabidopsis thaliana columbia
gtattttacggaaaacagatcgttttcggagattctcaagacgtgagcttcagaagatcatcagctatcacagctcagacaactttgaggattgggacagctcagaagtggtgggagaaaggtctgaaagataacatgagagagatctcttcagctcaagagctcgttgattctcttactaacgctggtgataagcttgttgttgttgatttcttctcacctggctgtggtggctgcaaggctctccatcctaagatatgtcagtttgcagagatgaacccggatgtggcagtttcttcaggtgaattacggggagcataagtccatgtgttatagtcttggtgtccatgttctcccttttttccgattctaccgtggctctcagggttcgtgtttgcagctttagctgtaccaatgccacgatcaagaaattcagagatgccttggcaaagcatggtccagataggtgcagcctcggaccgaccaaaggccttgaagagaaagagcttgtggcacttgcagccaacaaagaactcaactttacttacacaccaa

SEQ ID NO: 92352 - DNA, 549 bp, Arabidopsis thaliana columbia
  unsure (1)..(549): unsure at all n locations
tggccacggccccccctcgatgtcgacggtatcgataagcttgatatcgaattcgcggccgcgagatgccttggcaaagcatggtccagataggtgcagcctcggaccgaccaaaggccttgaagagaaagagcttgtggcacttgcagccaacaaagaactcaactttacttacacaccaaagcctgtaccagttgagaaagaagcagccactcctgattcaaacccaagtctccctgttcctcttccttcgatgagctccaatgacgaaaaaacattggtctccgcagggagatgagactgaataaacatttccctgtatagtttgcgtgatagtagtagtagcagcagctggatatattgcagtacctaaagatgtcagttctcggagcagccagcccgggtttagtgggggtttaggttttttttcggggccccttgagcaaaattcggttctttggcctctgggggtttacctagagcaaaaccacgttccgatgggtacttgtaggttttgctcagttccttattggnttttgngttggaagg

SEQ ID NO: 92353 - DNA, 562 bp, Arabidopsis thaliana columbia
  unsure (1)..(562): unsure at all n locations
tcctttcnccanaaggcccacttcttcccccaaccctncccgttggaaagacccccccnctgatnaacccaagccccctgccctcttccttcgatgccccaatgccgaaaaaccattggtctccgcagggagatgagcctgaataaccatctccctgtatagtttgcgtgatagtagtagtagcagcagctggatatattgcagtacctaaagatgtcagttctcggagcagccagccggtttagtggggtttagttttttttcgggtcccctgagcaaaatcggttcttggcctctgggtttacctagagcaaaaccagttccgatggttacttgagttttgctcagttcttatgggattggagtggaaggtcgtgcgctcggcagcatggaagctttctcctttcaatcagcttcagtagagttttggtttctttgtttgttttttatttgctttaagaatttaatgtaaataaaaatccaatgaggattatcatacaatgtcatgaaggatctatgaattagtatctaatgttagtataaaaaaaaaaaaaaaaagaaa

SEQ ID NO: 92354 - DNA, 1026 bp, Arabidopsis thaliana columbia
  unsure (1)..(1026): unsure at all n locations
taaaaacccaaacaaatccattaaaatgtatcaaaagtcatgagaaaatttcctatacttgttcctttatatctgcgagaagtcatgaaccttatccatttattagttttcttctgaccgactaaacctgataatcactaatccaccgttagatcttaaaattccaaatccaaaatggacggtcaagatcacttaacgaaaaagaaaacagtttcctgtccagaaatgtctaaccttgaggcctttttctctttcctttaaacttttttttttcgattataaattttctcgtgaagctaatttttcctgagaaagaaagcgaaacttcgctggcgactaaagattgctgagaagacacgtcgtctctgtgagaactttttctttttcttctggtatattctggagacagatattgttttttcttctgattagagaataatatgacggaagtgattagcaaaacgagtttgttcttaggagcttgtggtaatcatcaccgtgttgatgatttctctttctctccggtgagttttggtgggtttggtttgaaaaagagtttctcttgtctgaagcttaagagtcagaagcctcttagaagtgtattttacggaaaacagatcgttttcggagattctcaagacgagagcttcagaagatcatcagctatcacagctcagacaactttgaggattgggacagctcagaagtggtgggagaaaggtctgaaagataacatgagagagatctcttcagctcaagagctcgttgattctcttactaacgctggtgataagcttgttgttgttgatttcttctcacctggctgtggtggctgcaaggctctccatcccaagntatgtcagtttncagagatgaacccggatgtccagttctcaggtgattacgggggcataagccntgtgtaaagccttgggccatgtctccntttnccgtttnccggggttcagggcggttcanttagttccatnccggcaaaatnagngtctgaaaatgccangncccttc

SEQ ID NO: 92355 - DNA, 512 bp, Arabidopsis thaliana columbia
  unsure (1)..(512): unsure at all n locations
cgttaacccatccctncctttctcgtggccccaggcgaaaacatgncccccnggnntngcctgataacatcccttatagttcncngatatngtagtncgcactgattatgcagtccctaagatgcattctcggngcagccagccgtttagtgggnttatttttttcgggtccccctgagcaaaatcggttcttggcctctgggtttacctagagcaaaaccagttccgatggttacttgagttttgctcaggtcttatgggattggagtggaaggtcgtgcgctcggcagcatggaagctttctcctttcaatcagcttcagtagagttttggtttctttgtttgttttttatttgctttaagaatttaatgtaaataaaaagccaatgaggattatcatacaatgtcatgaaggatctatgaattagtatctaatgttagtatatattatggtttttcctaagttggtactttctctgtttgaagtttgattatcatacatgtatttgtta

SEQ ID NO: 92356 - DNA, 916 bp, Arabidopsis thaliana columbia
  unsure (1)..(916): unsure at all n locations
ccnnnnnnnnnnnnnnnnnnnnnnnnnnnnnnnnnnnnnnnnnnnnnnnnnnnnnnnnnnnnnnggtcgtaggccacgcgtcagcaaggaatggcaaaggaagggggcttgggagagaactcaagatggagtcttggaggcatgaccgctcttgtcactggtggctctaaaggcatcggggaagctgtggtggaggaactagccatgttgggagcaaaagtccacacgtgtgccagagacgaaactcagcttcaagaacgcttacgtgaatggcaagcaaaagggtttcaggtcaccacttctgtctgcgacgtctcttctcgtgaccaacgagtgaaactcatggaaactgtttcctctctctaccaaggaaaactcaacatcctcgtcaacaatgtgggaacgtcaatattcaagccgaccacagagtatacagcagaagatttctcttttgtaatggctacaaatctcgagtcagctttccatctctcacagcttgcccaccctttgttgaaagcctctggctcagggagcattgtgctcatgtcctctattgccggagtcgtgcatgtcggtgtggatccatctatggagcaacaaaaggagccatgaatcagttggctagaaacttagcttgcgaatgggcaagcgacaacataaggactaacgctatttgtccatggttaaatcacaactccttttgattagtgatcttctcaagtgttgagggnggtgaaaaaaggagcagggggaagggcanccattggggccgttttggggagaggcaaaattgaaggcttcaccccttctgggatttcctttgnctttcctgaaggttcttatattccctgggcaaggcatttttttttttgggggcgccctccattaaggggtctcccttttaaccacatncttt

SEQ ID NO: 92357 - DNA, 817 bp, Arabidopsis thaliana columbia
cccggccccccgtttggacggccatggagagcccctggcaggaattcccggccgcccacccgtccgcatatcttatatataggtgaacaatgtgggaacgttaatgctttaagccgaccacagagtatacagcagaagaattctcgtttcttatggctacaaatctcgactcagctttccatatttcacagcttgcgcaccctttgttgaaagcctctggctcagggagcattgtgctcatgtcctctattgccggagtcgtgcatgtcggtgtggatccatctatggagcaacaaaaggagccatgaatcagttggctagaaacttaccttgcgaatgggcaagcgacaacataaggactaacgctatttgtccatggctaatcacaactcctttgattagtgatcttctcagtgttgaggagatgaaaaaagaagcagaggaaaggacacccatggggcgtgtgggagaggcaaatgaagtctcaccgcttgtggcatttctttgtcttcctgcagcttcttatattactggtcaagtcatttgtgtggatggaggtctcactgttaatggcttctcctatcagccacatgcttgagctacgtctgtgttgtgtgtattggccaatgaaaacagtcaaccaaacaataacatcggaaaatgaatgatgtgaatatgtaggttaagccttaaaactaaattcattttggtatgttgacatattggtaaacgtcctgaacaagaaacctttaccaaaaaaaaaaaaaggggcggccgctctagaggatccaagcttacgtacgcgtgcatgcgaccg

SEQ ID NO: 92358 - DNA, 537 bp, Arabidopsis thaliana columbia
  unsure (1)..(537): unsure at all n locations
ttggtgtcgcctgcagagagatatgcagttgttcctgaagaaacgggcctaacggatggttcaagcaaaggtaatggaggtgatatcagtgttcccccaactgatgtcaagcgtgtacgaatttgagcctgagtcaattccgttttttttttacttccggttcttccgttggattcgaaggtttttcagtgatctcttttgggttgaggtttgtactaagagtacgtctgtctagtttgggattgtactttttgttgttgttgttagtttgtaacttgtgatgcttccctccccctagctctcttattacatgggcgttgtaaactgtgtgtactactactactagtctctagggtatgtactttttttttcctcaccataataataccttctggttctatatctttcatttcttaaaaagttttctgttttttccttcaaaaaaaaaaaaaaaaagnnnnnnnnnnnnnnnnnnnnnnnnnnnnnnnnnnnnnnnnnnnnnnnnnnnnnnnnnnnnnnnnnnnnnnnnntagaatc

SEQ ID NO: 92359 - DNA, 1025 bp, Arabidopsis thaliana columbia
  unsure (1)..(1025): unsure at all n locations
nnnnnnnnnnnnnnnnnnnnnnnnnnnnnnnnnnnnnnnnnnnnnnnnnnnnnnnnnnnnnnnnnnnnnnnnnnnnccacgcgtccggatcaaattctctctccaatggacgaaatggagagatgaacatagggaaagatgaaaggtttcttgtgaaaaggtgcttatcagatggagattttctccatgaaagttgcactccgctgtcagccatgagtagcaatcatgaaagcatgccacaaaaaggtttctccgcaccattacagcatgtgagccatattctttcagagtcatcgtctgatataccagtatctaatgatgtagcattatcaaggtgtactccttcaatgcccaggaaacagctcttcggagatgtgcaaaaggttcatcgttttggtagcgaccaagtttactttggcggggaggaagacatgtctagtgtctccaattttgttgatattgagtggctttcatcagaaaacccatgcgagaatgctttatttgacaggtcgtcggagcttacaagaaatttgacagcggagacgtcttcaacagagaatagcgtcaacggagtaggacaatcggcaccaactataagtgaaagtgggtcaagcagcagtaagggaaaggaaccgatgggaacaaagattcgggaggactgtccagatagcttcaaagaatggggagcataccgtgaagctctctgccactgagtcccaaaatcttaggaacacgggatggtacaaaagagtagtactttattgctgaatagctgaaaccttttgtgtgcataaaattcatcattcggttgaaaccttattttccccctatttgttttggaataagtgtaatgtttatataaagcttgtaagaatcatgttaaaattattcgtaggtttctttgtctctctgccctcgtttgaatcacaaacacctgcggttataaaaaaaaaaaaaaaagggcggccgctctagaggatccaagcttacgtacgcgtgcgtgcgacgtcataacttttgtatag

SEQ ID NO: 92360 - DNA, 795 bp, Arabidopsis thaliana columbia
  unsure (1)..(795): unsure at all n locations
nnnnnnnnnnnnnnnnnnnnnncgactcactttatggaagctggcacgcctgcaggtccccggtccggatttcccgggtcgacccacgcgtccgcaaatctccagctttctgcatagatccatgaccatgagagtctgtttcttagaacgaaaatgaaaaaaatatcttcacattattcggtagtcatagcgatactcgttgtggtgacgatgacctcgatgtgtcaagctgtgggtagcaacgtgtaccctttgattctggttccaggaaacggaggtaaccagctagaggtacggctggacagagaatacaagccaagtagtgtctggtgtagcagctggttatatccgattcataagaagagtggtggatggtttaggctatggttcgatgcagcagtgttattgtctcccttcaccaggtgcttcagcgatcgaatgatgttgtactatgaccctgatttggatgattaccaaaatgctcctggtgtccaaacccgggttcctcatttcggttcgaccaaatcacttctatacctcgaccctcgtctccgagatgccacatcttacatggaacatttggtgaaagctctagagnaaaaatgcggttatgttaacgaccaaaccatcctaggagctccatatgatntcaggtacgggctggctgcttcgggccacccgtcccgtgtagcctcacagttcctacaagacctcaaacaattggtgggaaaaactagcagcgagaacgaaggatagccagtgatactcctctcccatagcctaggaggacttttc

SEQ ID NO: 92361 - DNA, 1120 bp, Arabidopsis thaliana columbia
  unsure (1)..(1120): unsure at all n locations
nnnnnnnnnnnnnnnnnnnnnnnnnnnnnnnnnnnnnnnnnnnnnnnnnnnnnnnnnnnnnnnnnnnnnnnnnnccacgcgtccggtttcaataaaacaaagttttgttcttgtcttcttcacaagagaagagatatgtctctcttactctgtttttcttctctctctcaataatccaacatggtatcagagccgatggttgtccttggttgtctctacaaaaataagatgtcttctgctgcgaaaagaaaaagagagatggagacaacaaatctatggtgagatgaagaggaagaagaagagggaagaagaagaaataagaggtggtaacaagagaaagtaccatcagttttcacaaacacattcacatgaagtaccttcaagaggaaggctccaaaagcgatgaagaagataggaaatcttctctagaggcaatggagaaaacgaatgtggatttggagttgtggaaggagagttctgaaaatttgttcaacaacgtcttggtgaagcgcaagacgggaaagccgctgttgtaacaaactgagcaaggcttattatcaaaacgttgtgttgagttgtgaagatgactacaacacgaaaacgtggagaaaagtttgcttcaaaaggaagaaacaaacggggcgacaaaagtcaaaagaaggccaagaaatagtgtgacttttgtacgtgtgacgatcacattgaggtgattgttggagatagcaacacagagatgttagcttgcctacgagtgtgaagctgcttacctaagagagaaggagcagagttcattcggttgcaaagataccgacgagacgtgaagagatttcacgcacagacgcaaaagacgtggagtgatcaaagagggacaccataagaggatgcttacctcggagaaaaatggagcacaagatgatgcttacctcggagaaaaatggagcataagtcggttgaagagtaaaccgaagacgacgtgaagaagattcacgcacaagacgtcatggaaacgttatggtgataaaaaaaaaaacaaaaaaaagnnnnnnnnnnnnnnnnnnnnnnnnnnnnnnnnnnnnnnnnnnnnnnnnnnnnnnnnnnnnnnnnnnnnnnnnntgaatcg

SEQ ID NO: 92362 - DNA, 537 bp, Arabidopsis thaliana columbia
ggggtgacttgtgacgaaaggatcaattccgctaacagaatcttcaacagtaagcttgtgtctctggttgatcacttcaaccaaaacacaccaggggccaaagtcctacttacattaaatgcttagggtaccttccaagaacaatgggtagcctaatccttcccgctatgggtttagggtgacaaaccgcgggatgttgtggagttgggaggaacaatggacagataacttgtcttccgggtcaagctccatgtcttaacagggacgagtatgtgttctgggacgcgtttcatccaggagaagctgcgaatgttgtcatcggtagtcgatcttttcagagagaatctgcttctgatgctcatccttatgatatccagcagcttgctcggctctagttcatgaaatttcctccaagcaaacacagagtgaaaaagagagggagacagatttaatctttttcttatttaagtgtttgatgattgtttctttttgctgcagaagaattgtttgttttgttgagtttatgtatcatggttc

SEQ ID NO: 92363 - DNA, 569 bp, Arabidopsis thaliana columbia
  unsure (1)..(569): unsure at all n locations
nnnnnnnnnnnnnnnnnnnnnnnnnnnnnnnnnnnnnnnnnnnnnnnnnnnnnnnnnnnnnnnnnnnnnnnnnnnccacgcgtccgcccacgcgtccgggtttagggtgacaaacgcgggatgttgtggagttgggaggaacaatggacagataacttgtcttccgggtcaagctccatgtcttaacagggacgagtatgtgttctgggacgcgtttcatccaggagaagctgcgaatgttgtcatcggtagtcgatcttttcagagagaatctgcttctgatgctcatccttatgatatccagcagcttgctcggctctagttcatgaaatttcctccaagcaaacacagagtgaaaaagagagggagacagatttaatctttttcttatttaagtgtttgatgattgtttcttcttgctgcagaagaattgtttgttttgttgagtttatgtatcatggttctatataatgacatgaaatttctgcttaaaaaaaaaaaaataaaaaaaaaaaaaaaaaanannnnnnanaaaaaggggcggccgctctaaaggatccaagctggcg

SEQ ID NO: 92364 - DNA, 441 bp, Arabidopsis thaliana columbia
gtttagaagagaaacatcaaacatctttggtttgcttccctcgtacccgttcttcatacaagcacgcctttaattatggattgtcatagaaagacgttcttgttgaagtttttgtgcgtggcatttctgttaaactacagcaatgttggctttgtagacgcagcaacaaacattggcttgaactacggcctccttggagacaacctcccgcctccatctgaagttatcaacctctacaagtccttaagtgttaccaatattcggatcttcgacacaactacggatgtccttaacgcctttcgagggaatcgcaatatcggagttatggtagacgtgaagaaccaagacttagaggctctttcggtcagcgaagaagctgttaacacctggttcgtgaccaacattgagccttacttagctgatgtcaacatcacgttcatt

SEQ ID NO: 92365 - DNA, 431 bp, Arabidopsis thaliana columbia
aaacactgcaagtctctctctctttcaagccttgtcggtggttgaatcgaaagcgatgtctcagaccgttgttgggcagagtggccatgtcatgtgagggatgtgttggagctgtgaaaagagttcttgggaaaatggaaggttagattatttttcttattttggctattgatgttatgatctgtatcaaaatgctttgaacccacttgtcttacggtaaacatatagattcatcggaaaagattgtcgatatcgcggaatctgcaatgttttctatcttttctaaagcatggaacatcactctcttcactcggttattttggtttcaggcgtggagtcatttgacgttgatataaaggagcagaaagtgacggtgaaaggcaacgtgcagccagacgcagttttacagaccgtgacgaaaactggaaaga

SEQ ID NO: 92366 - DNA, 557 bp, Arabidopsis thaliana columbia
agggaaagctcgtacgcctgcaggtaccggtccggaattcccgggtcggccggtggttgactcgaaagctatgtctcagaccgttgttctcagagtggccatgacatgtgagggatgtgttggagctgtgaaaagagttcttgggaaaatggaaggcgtggagtcatttgacgttgatataaaggagcagaaagtgacggtgaaaggcaacgtgcagccagacgcagttttacagaccgtgacgaaaaccggaaagaaaacggctttttgggaagctgaaggtgaaactgctaaggcttaaggagaagcagatcattttatgtgattctctgttttaataaaatctatgtgaaatcttttagttttctccttctgtgcttgtgacttgtggctgagtgtattggaactatagatgatacaacacacttttgagtgaataaatatgcactggggcattatctggtctgaaaaaaaaataaaaaaaaaaaaaagggcggccgctctagaggatccaagcttacgtacgcgtgcgttcgacgtcatagctcttctatagt

SEQ ID NO: 92367 - DNA, 434 bp, Arabidopsis thaliana columbia
ctttcttctaaaattcgttttccatttttcttcactctctttccggtgacgccatgaacgccgccgtgtttagtccttctgctttatctctccctatctccttctctaaaacccgatcctctttttctctccagaaagaagggcgtgaaaggagcatttagggtatttgctgtgtttggtgatgagagtggattagttgagaagaagagtcaatggagacctttgtttgatgtggaggatcctagatcaaaagctcctccttataaaggaaagtttttagatgttaatcaagctattgaagttgctaggtttgatattcaatacttggattggcgtgctcgtcaagatcttcttaccattatgattcttcatgacaaggttgttgatgtacttaatcctctagctcgtgagtacaagtccatcggtacagggaa

SEQ ID NO: 92368 - DNA, 548 bp, Arabidopsis thaliana columbia
  unsure (1)..(548): unsure at all n locations
ctagacaaagccatccagttgcgcccacttgagcccgctcctattcagcatctagctcgggaattcatggtcaagacccgccgtagaaagggaatgagcgaagacgtcagcggaaataaattctttgatgaagcgatgatggtagagcttgcccagcaaacaggcgatctccatctgcagatgatttgatgatctctgcacttttttcatataaatcgtgattcaggactagtagtagtatcttctcttctctatatatgtgaaaggagaacaagaaaatgtggatcagttttgtaattgatgcctccaaatttacgttgtaagttgagagattttaatgaactcaacagtccacatggtcacactcacacatgactcgcaaatagttgacaggaaatgttcacaaatttttgtaaaattgtaaactactattggattatgggaaactgaactaggttatgacaaaaaacaaaaaaagnnnnnnnnnnnnnnnnnnnnnnnnnnnnnnnnnnnnnnnnnnnnnnnnnnnnnnnnnnnnnnnnnnnnnn

SEQ ID NO: 92369 - DNA, 772 bp, Arabidopsis thaliana columbia
  unsure (1)..(772): unsure at all n locations
aatgannnnnnnnnnnnnnnnnnnnnnnnnnnnnnnnnnnnnnnnnnnnnnnnnnnnnnnnnnnnnnnnnnnnnnnnnnnnnnccacgcgtccgcttacagacccaattcttgttttctgttttgctataacaaaccagggtcagggttttatcttccatattcttttcccactgattcttacaatcgatctaagggaatctacgaactgtttggtaatttctggtgggaaaagtcttgatcttgctgtttggtttggagtaatggtgagtgcttggtttgttgttggctcaccggtgatggactcttcgagcagtccatgtttatgtctggatgctcacacgacgggtaccatcaggaggaagaagatccttggcaaagcaagaaatctggaattaggaagctctttcactggctcacattgtttttaggctttctccgaagcgtgtatcgagaattgcgaatcgaaagagcaaaaagctcttgattgtgaatgaggatgttgctggtaattacgacgataccttcggggaggtacaaaagcaaattgttaattattttacatacaaagctgggaggacggttcttcatcagctgtacgaaatgaatcctcctcaatacacttggttctataatcatatcataacaaacagaccgacggatggcaaacgtttcctccgtgccctcggcagggagagtcaggagcttgcagaaagagtgatgatcacgcgtcttcacttgatggcaaatggatcaagaatgcgaccatggga

SEQ ID NO: 92370 - DNA, 658 bp, Arabidopsis thaliana columbia
tggtacgcctgcaggtaccggtccggttacccgggtcgacccacaccgtccgcttgaacctaccgaatcatctttgatttttttttccccaagcttttggccactctaatggcttcgccggccaatcatttgatctgacgaaagagagagaaagaagcagaaaagctttgagatggcgatgccgctgggcatggcgatgtatctgatgagaatggtttggttttctctgagtggttgggttttcacttgcgtggctatcgctgatgagatcgctggttctctgagaaacggagatattggtcctttccacgtcggatgattgaattcgagatccttagctctccttctgtgcgtatatgttcttctcttccccaaattttacgtttttttttgttttgctctgctgttttagattagagtcgcttcaaatttccctacaaactctgaaattgataatagttcgagtttatagaggataaagatagatcattttggtccgaaaaagaacaatcttttggagcaagtgattgatatatggcctcagtcactcagagtgtgcatggtgaactaaaaggtcgggttcgtatatggaactttacattatctatggaaaacaggagaggccaaccgcaccttgggcggacccctctaaaggatc

SEQ ID NO: 92371 - DNA, 538 bp, Arabidopsis thaliana columbia
  unsure (1)..(538): unsure at all n locations
acgactcactatgnggaagctggtccgcctgcagggtccgggtccggatttcccggggcgacccccgcgtccgaaaagcttcccctaccaatttgacgacaagaagctgtgaatcttctcaattgtgtttcggaatcgaaattcgatcaagagaaatgtctaattctactgcaatctctctgagaatgtgttctatctaagaaagtaaaaaagttttcagtaccaagtgaagaagaccataaacaagttggagcagcttgattgagcaagaaaccttgataacgttattacgctgattcagtcctaagctatgtacaatgataaagcatttcaaagattacttttgtgaacattcaacaaaaaacgatgcatttaaagtttttaaaaagaaaaacgaagattttttttttaaaaaaaaaaaaaaaaaaaaaaaggaaaaaaaaaaaaaaaaaaaaaaaaggaaaacccccannaaggaaggccgctctagaggatccaagcttacgtacgcgtgcatgcgacgtcaaagctctnctat

SEQ ID NO: 92372 - DNA, 402 bp, Arabidopsis thaliana columbia
  unsure (1)..(402): unsure at all n locations
actgantgaaaaaagcttatcgcggcgattagttcccggcgaagaagaagaagagagataagaaaatggcgactaatggntctcctagctcagcgcantctccccggaaggaagctgatgtcaggatgatgtgtgccgctgaggttcatcttggaaccaagaattgcaattaccagatggagcgttacgtcttcaagagacgcaacgatggtatttacatcttcaaccttggcaaaacatgggaaaagctccagatggctgctagagttatttgttgccatttgaggaccccccagggccttcatcggtccagtcaagctagggcccttttggccagagagccttttgttttagggttttctccggttcacttggggccccattcccctttttttgggangg

SEQ ID NO: 92373 - DNA, 1262 bp, Arabidopsis thaliana columbia
  unsure (1)..(1262): unsure at all n locations
cggaccggcccgggcgggggccggcccccggatttactgagtgaaaaaagcttatcgcggcgattagttcccggcgaagaagaagaagagagataagaaaatggcgactaatggatctgctagctcagcgcagctctctcagaaggaagctgatgtcaggatgatgtgtgccgctgaggttcatcttggaaccaagaattgcaattaccagatggagcgttacgtcttcaagagacgcaacgatggtatttacatcttcaaccttggcaaaacatgggaaaagctccagatggctgctagagttattgttgccattgagaacccacaggacatcatcgtccagtcagctaggccctatggacagagagctgtgttgaagtttgctcagtacactggagccaatgccattgctggaagacacactcctggtaccttcaccaatcagatgcagacatccttcagtgaaccaaggctgttgattcttactgacccaagaactgaccaccagcctatcaaggaaggtgctttgggaaacattccaatcattgctttctgtgacacagactctccaatgagatttgttgacattggtatcccagccaacaacaagggaaagcacagcattgggtgccttttctggcttctggctcgcatggtccttcagatgcgtggaaccattgctgctggacagaagtgggatgtcatggttgacctgttcttttacagggaacctgaggagactaagccagaggatgaagatgaagctggccctcaggcagaatatggtgcacttcctgctccagaatatggaatggtaggtggagaccaatggaccaccgctcagatccctgatgctgcatggccaggagaaggtcaggcaccaatctctgctgcacctgctgctgcttcttggagtgattccgctgctgcaccggcagatggtggatgggaagctgccgcgccaccctcaggggcaccagctgctggttgggagtaaagttgatagcctttactcaatggtttaatggttatagacatgcttttttgttacttttgggattgaagagttatcgaaccgtaactgttttttcttctcacttgtttctcttaagacccttagatgttttgcacctttttgtttgaatcgaatctatattttgcgtttatcaaaaaaaaaaaaaaannnnnnnnnnnnnnnnnnnnnnnnnnnnnnnnnnnnnnnnnnnnnnnnnnnnnnnnnnnnnnnnnnnnnnnnnnnnnnn

SEQ ID NO: 92374 - DNA, 603 bp, Arabidopsis thaliana columbia
gaccacgcgtccgctgattcatctcctctgtttaagcaaagcacttttctaaaatcccacaggagaagagagatcggaagagatgacgaagctggcggaaaaatcgggaagcagaccaccgtgggtgggattagcggcagccgcatgggttcaggtctcggcgggaagtggttcgacgttcccgctttactcctccgctctcaaatcggttttgggttttagccagcagcaggtcacgatccttggcgttgcttgtgatttgggtgaaaacatgggtcttcttcctggatacgccagtaacaagcttcctccatggtcgatgcttctcatcggagcttcctcttgtttcctcggcttcggcgttctttggctctccgtcagccaaatcgttcttggcttgcctttttggctgctttttgtagctctagctttagctaccaatagcaactcgtggttcggtacagcatctcttgtcaccaatatgaggaattttcctatgagccgaggccctgtggctggacttctcaaaggttatattgggatcagtggtgcagcattcactgacttgttcagcatggtgcttcaccattcagctatggatct

SEQ ID NO: 92375 - DNA, 799 bp, Arabidopsis thaliana columbia
  unsure (1)..(799): unsure at all n locations
atgcttnnnnnncagcactatcgactcacttagggaaagctcgtacgcctgcaggtaccggtccggaattcccgggtcgacccacgcgtccgcttcgtcttcacttccgccatgagaaaaacctgcacacacgcctgaaaaaccaaatcatcctcatcatcttctgatctaatgtctaccgacactatcccttccctctcatctccaccggcgccggagtttccttccaccacaccagacacggcgacgtcaccagctccgtctcagccatccatcatcggaccttcttcgttggctccgtttccggagacaacaacaaacattgatggaggctcgagaaatgtagcattaactggacttattactggagtagttctcggagctacgtttgtcctactcggagtttgtatctttgtctgtttctataaaagaaagaagaggaagtgttaagaagaagaagatggaagatttcgaagcttctacttacagagactcactagatcccaaagatgactagcaataatcttcagcaatggagttcatcagagattggacaaaacttgttacatatgaagatttggctaaagccactagtaacctctccaacactaaccttcttggacaggtgggtttggttatgttcatagaggagttctggtgatggctctggggtgctataagcagttaatctggaagggcaagtgaaccanagttaagctgaatcagactttagtgagttatctaagctctgttctctttggtattgatactgggccaaaatngttgtatgagttggcca

SEQ ID NO: 92376 - DNA, 796 bp, Arabidopsis thaliana columbia
  unsure (1)..(796): unsure at all n locations
atgattctccnnnnnnnnnnnnnnnnnnnnnnnnnnnnnnnnnnnnnnnnnnnnnnnnnnnnnnnnnnnnnnnnnnnnnccacgcgtccgcccacgcgtccgctttttttctctcttgtgaattcgtttattgttgtatcgtcggcccgagtttatcggaactccgggtctgacgtgagttttccaaatggcggcgtcagagagatcgattgacaaagaagtcgacatgggttcttcctttcttcaaaaattcaggctttacgagacccgctcgagcttctatatgattggaagagataaaaatcgaacgtcttggagggtcctgaagttagataggacagagccagcagaggtcaatatctacgaagattcaacggcttacacagaagctgaatgctttgaaactttgagaaggatacacgagggaaacagatcatctggtggtttgaaatttgtcaccacctgctacgggatcatcggattcataaggttcttgggaccttattacatgctgataatcactaaaagaaagaagcttggtgaaatntgtggcacactgtttatggtgttgcgaagagcaagatcatcacgattccacatgcctctgtgctatccaatgtggcttattctaaggacgagaataggtacaagaggctgctctgcactgttgatctcacaaaggacttcttcttcagctattcctatcacatcatgcatacactncagaggaatctgtctaacaatgtggaaggacacacttactacgaaatcgatgttgtctggacnaatacttaac

SEQ ID NO: 92377 - DNA, 402 bp, Arabidopsis thaliana columbia
ggaagatggcagtgagacaaaaagcaatggcgacgttgccgaaactgattcaaagcatgagaaacgaagttacgaagcagcccagtcgtgtcgtaccatctctcagaagagctttctctctctacgatcagatcaatctcatcgataacgttcctgaggatcagctccgatttcaggagtattcatctctctcagtcatgttcctaatttgactatgtagcaagggaatttggattttcgggtatgaaatgaatcaattaatggtgctttttgcaggtttgatgagacgagtttcacggtgaatggggttaaattcgatcgaagcttgctctgtgttgggaatttgctaatgtcatggacgcctcgttacgtctccgacatcacaacggataggttccagta

SEQ ID NO: 92378 - DNA, 877 bp, Arabidopsis thaliana columbia
  unsure (1)..(877): unsure at all n locations
cnnnnnnnnnnnnnnnnnnnnnnnnnnnnnnnnnnnnnnnnnnnnnnnnnnnnnnnnnnnnnnnnnnnnnnnccacgcgtgcgggagacggtgaagatggcagtgagacaaaaggcaatggcgacgttgccgaaactgattcaaagcatgagaaacgaagttacgaagcagcccagtcttgtcttaccatctctcagaagagctttctctctctacgatcagatcaatctcatcgataacgttcctgaggatcagctccgatttcaggagtttgatgagacgagtttcactgtgaatggggttaaatacgaaggaagcttgctctgtgttgggaatttgctaatgtcatggagccctcgttacttctccgacatcacaacggatagcttgtcaatcttccagacggttcgaccaattccagagctcttgattgtcgggtgtggaagatacacccacccactgaatccccaagtccgtcagttcgtaaagtcaatcggcatgaagctagaaactgttgattctagaaatgctgcatcaacttacaacatactcaatgaggaaggcaggatcgtggctgctgcattgcttccttatggagttacatcgtaagaaactcaacacctctggaatactgtagaacaaacttcgaacagcttgactcgatctttatagttgaaacaccaacatggtcttcttgtctactgtaaatgatatatttcactctnatttgtaaaacttttgcaaaaaaatcgaaatttccaggttttaaaaaaaaaaaaaaaaacacaaaaaaagnnnnnnnnnnnnnnnnnnnnnnnnnnnnnnnnnnnnnnnnnnnnnnnnnnnnnnnnnnnnnnnnnnnnnnnnnnnnnnnncg

SEQ ID NO: 92379 - DNA, 449 bp, Arabidopsis thaliana columbia
aatgtcttcattggtgttacccttgctgggactttgttcaacacagtgaaggatatcgcgaaaaatcccaaactcgacatgattattaaccttttggctactagcctccctaagagcgcaactttcttcctgacctacgttgctctcaagttctttatcggttatggccttgagctgtctcggatcatacctttgataatcttccacctgaaaaagaagtatctctgcaaaaccgaagcggaggtcaaagaagcttggtacccgggagacttaagctatgcgactagggttcccggagacatgctcatcctcacagtcacgttctgcgagtcagtcattgctcctcttatcctcatattcggcatcacctactttggtttaggctggctagtcctcaggaatcaggcgttgaaagtgtacgttccatcatacgagagctatggaagaat

SEQ ID NO: 92380 - DNA, 796 bp, Arabidopsis thaliana columbia
  unsure (1)..(796): unsure at all n locations
acgactcactatttggaaagctggcacgcctgcaggtaccggtccggaattcccgggtcgacccacgcgtgcgctttggagaaactgcatcaatggcgttgagattgacatcgctaaaacgcgccgcggttgagtcctgtcgcattttggaaacccgaagcttaagtcatgtcgctgcgatgccttcccccttgaacggagcttttgatcgcccgatttctatgccgccgctggttttacctgagttcgatcagaatcaaccgggtttgatcgaagaaaagagcttcgggttcgggcttcctagttttgcttttaatggatccatggagctaatggctgtgcctaagaagaagatttctaaacacaagagagggataagaaatggtccaaaggctcttaagcctgttcctgtgatcatccgttgcaggagttgcgggcgagtcaagctgccacatttcttctgttgcagcggtgagcggctaaaccctactgagtaaggcaattcgaacaactggtcatggtttccaatatgattactccttgttggatatcaagaggataaaatcttggctttcttagtagtaccctagaatgataaaagacttagttgatgctgttttggcaaattattgtatgctgcaagatcaatattctcatgcttctcttgacaaattatgttattgtcattgcttgttgcaaagtgtaggataatctcattcacttttnnnnnnnnnnnnnnnnnnnnnnnnnnnnnnnnnnnnnnnnnnnnnnnnnnnnnnnnnnnnnnnnnnnnnnn

SEQ ID NO: 92381 - DNA, 566 bp, Arabidopsis thaliana columbia
  unsure (1)..(566): unsure at all n locations
acgcgcacnnnnnnnnnnnnnnnnnnnnnnnnnnnnnnnnnnnnnnnnnnnnnnnnnnnnnnnnnnnnnnnnnnnnnccacgcgtccgcttcttctctcatctccgtctctcagagagtgtacacttctccttctgcttccgtcatgctcgagtaccgttgcagctccgttgactggaaaccatcaccggtggtagccctagctaacagctccgacgactctcaagtcgccgccgctcgcgaggacggttctcttgaaatctggctcgtctcccccggcgccgtcggatggcactgtcaactcactatccatggcgatccaaattcgagaatctcgtctcttgcgtggtgctgttctccttctatagggcttccttctggtcggttattctcctctagcatcgatggctctatttctgaatgggatcttttcgatttgaagcagaagattgtgcttgagtctattggaatctcgatatggcaaatggcattggctccgattagcggattctcgagtgatgtagaagtaatgtctagaaagagatgaaagtcattaagaagtgctgg

SEQ ID NO: 92382 - DNA, 544 bp, Arabidopsis thaliana columbia
  unsure (1)..(544): unsure at all n locations
cgggnncgccggacgcgtcaanccttctccttcctatttttttccttctccgttgcaaagctcaagaaaaactaaaggaatccaagtggtaaacctcagcgcaaatttcaagaagaagaaaagcagagaaaagttttcttctttttgacctttcttcccctaaattaaagatcctgttatggaatctccacattctgaggcatcaatcgtgaatggtagtatccatttgaatggcagtggtgaaaccaaaacaaagaatatagtcatgtcgtctgattcagacagtttcatcggtgtgcttgaggtttttgttcaccaagctagggacatccacaacatctgtatctatcataagcaagatgtgtatgctaagctttgtctcacaaatgatcccgaaaactccttgtccacaaagatcatcaatggtggagggcaaaaccctgtcttcgacgatacccttcagttcgacgttaagaaccttgggtttttcccgctttaaggtnttgggtttttttttgatgcggcccgggtaagganttttntt

SEQ ID NO: 92383 - DNA, 977 bp, Arabidopsis thaliana columbia
  unsure (1)..(977): unsure at all n locations
cnnnnnnnnnnnnnnnnnnnnnnnnnnnnnnnnnnnnnnnnnnnnnnnnnnnnnnnnnnnnnnnnnnnnnnnnnnnnnccacgcgtccgcccacgcgtccgcggacgcgtgggaatctccacattctgaggcatcaatcgtgaatggtagtatccatttgaatggcagtggtgaaaccaaaacaaagaatatagtcatgtcgtctgattcagacagtttcatcggtgtgcttgaggtttttgttcaccaagctagggacatccacaacatctgtatctatcataagcaagatgtgtatgctaagctttgtctcacaaatgatcccgaaaacctccttgtccacaaagatcatcaatggtggagggcaaaaccctgtcttcgacgatacccttcagttcgacgttaagaacctggattgttcgcttaagtgtgagatatttatgatgagccgcgtgaagaattatcttgaggatcagttacttggattctctcttgtacctttgtctgaagtgattgtaaggaatgggaaattggagaaagagttctccctttcttcaaccgatttgtatcactctcctgcaggttttgtcgagttgtctctctcgtacgcaggagattcgcctgacgtgatgcatattcctgcggttccaactgcggatgagaccgagttggctcctatcgagtttgatgagagtgagtttttggatccaaagattgtctgtgaaaacaatcaaatggtgtctaagtacttctccactacgtgttctgattctgatgattttgcaagctctgaaactggctttgtggaagtaaacagcatcctgtttccggttgttgaaactgctgttgacgaagcagcaccggccaattctgtctcaacaaatggaatctcatctccatcaactgcagttagctctggctcctcgggaactcatgatgtttcaaagcaatctagtgaaggaaacaactcagattca

SEQ ID NO: 92384 - DNA, 946 bp, Arabidopsis thaliana columbia
aaaagagggaagcgactagcaccttttgtagttttccgtttattttctgtataaggcgggtgatttcggctccttcatcggaaattatgagcaacgttatcggcgatcgcactgaagacggcctttccaccgccgctgcggcctctggctctacggctgtccagagttctcctcccactgatcgtcctgtccgcgtctacgccgatgggatctacgatcttttccactttggtcatgctcgatctctcgaacaagccaaattagcgtttccaaacaacacttaccttcttgttggatgttgcaatgatgagactacccataagtacaagggaaggactgtaatgactgcagaagagcgatatgaatcacttcgacattgcaagtgggtggatgaagtcatccctgatgcaccatgggtggtcaaccaggagtttcttgacaagcaccagattgactatgttgcccacgattctcttccctatgctgattcaagcggagcgggaaaggatgtctattgaatttgttaagaaagttgggaggtttaaggaaacacagcgaactgaaggaatatcgacctcggatataataatgagaatagtgaaagattacaatcagtatgtcatgcgtaacttggatagaggatactcaggggaagatcttggagttagctttgtcaaggaaaagagacttagagttaatatgaggctaaagaaactccaggagagggtcaaagaacaccaagaaagagtgggagaaaagatccaaactgtaaaaatgctgcccaacgagtgggtagagaatgcagatcggatgggtcgctggatttcttgaaattatttgaatgaaggttgccataaggtggggactgcaatccgtagacagtttccaaggaaaggtttaattgagacaaaagtcggcagagaggctggaaaacggtcaggatgat

SEQ ID NO: 92385 - DNA, 548 bp, Arabidopsis thaliana columbia
  unsure (1)..(548): unsure at all n locations
cagctctctacactcacttatggaagctggcacgcctgcaggtaccggtccggaattcccgggtcgaccacgcgggcgaagttatctcaggcggtcaatgctgcttcccaacagcttcaatgtgctgctcctactaaaaaagagcggcctgacatggaagctgttgggaagcagctttgggctataagatcaagttatctcaggcggtcaatggaataagacaagtgttcacacgttacaaccaccaaaatgctatagtctctctggtgttagataatatcacctcttttacattttgctatccaaccacttcttcttcagatttgaaatgagatgtcttattcatgacttcagattctcgaatgacgcatgtaactatgtgcattcattannaaaaaaannaaaaaaaaaaaaanaaaaaaaaaaaaaaanaaaaaaaaaaaaaaaaaaaanaaaaaaaaaaaaaaaaagggggggggccgttctagaggacccaagtttacgtccccgggcttgcaaggtaatagcttttctatagggcaccctaa

SEQ ID NO: 92386 - DNA, 855 bp, Arabidopsis thaliana columbia
  unsure (1)..(855): unsure at all n locations
acgcgcnnnnnnnnnnnnnnnnnnnnnnnnnnnnnnnnnnnnnnnnnnnnnnnnnnnnnnnnnnnnnnnnnnnnnnnccacgcgtccgggaattggaaaaggcggatgtgattgaaccgagttggaccgatccacaaaagatatgtagtcagggagatttatcggttatgtcgggtttaggaccatttggtttgatggttttggcatccaatgacatggaagagtacacgtccgtttacttcagaattttcaagtcaaatgacgatactaacaagaagactaaatacgtggtgttgatgtgcagtgaccaaagcagatcatcgttaaatgatgaaaatgataaatcaacctttggtgcttttgttgcgatagacccttctcaccaaacaatttctcttaggactttgattgatcactcgatagtggagagttatggtggaggaggcagaacatgtataacctcaagagtgtatccaaaattggcaatcggagaaaatgcaaatctgtttgtcttcaacaaaggcactcaaagtgttgatatcttgaccctaagtgcttggagtttaaagtttgctcaaatcaatggcgacttaatgtcaccatttattgagcgtgaagagtcacgctcacctaatcatcagttttgaatgaaaaatattttacattgtacgggtaaaacgaaatatataagagattattacatattaagagatattaacattcttattttaccattcacttccaaatttgaaaaaaaaaaagaaagtgtccnnnnnnnnnnnnnnnnnnnnnnnnnnnnnnnnnnnnnnnnnnnnnnnnnnnnnnnnnnnnnnnnnnnnnnnnnagaccgnnnnn

SEQ ID NO: 92387 - DNA, 405 bp, Arabidopsis thaliana columbia
aacaaattcacactctctccgccgcgcacagactcaccgacaccaccaataatgtcttcttctccggcgattcttcccgtcaccaaccagcaagcagccactcaatctcaacctccaatcaattctcacgccttccgtactttcctctcacgcctctcgtcctctctccgcgaaagcctctctcaacgccgtccatggctagaactcgtagatcggagctccttcgctagacctgactctctcaccgattccttctcccggatccgtaagaatctcgcttacttcaaagtcaattactccgcaattgtctcgttagtccttgctttctccctcctctcgcatccattctcgcttctcgtcctcctctctctcttaggctcctggatgtttctctacctcttccga

SEQ ID NO: 92388 - DNA, 299 bp, Arabidopsis thaliana columbia
cgaaggtttagagattcgttggaaggagctccgaagaggctagacaatagtcatgtgtgaagattagttggcaatggaggtcatgctggtgctgtacttatgccatatagaaatgatgccgggcttgcagctgcagagttggctcttgccgtggagaaacatgtattagagtcggagtgagtatacgcggtggatctaagcttagcaccaaagctttaccaccttcaagttgctctgggccatttcaaaagctggtctgtccctgagagctttccccatgtgcataactacatgaagac

SEQ ID NO: 92389 - DNA, 514 bp, Arabidopsis thaliana columbia
  unsure (1)..(514): unsure at all n locations
cccacgcgtccgcggacgcgtgggttcagatataggcagattctcacatttgcaaacatgacgactcagatcagcaagaagagaaagtttgtagcggacggtgtgttctacgctgaattgaatgaggttcttacaagagagctagcagaggatggttactctggtgttgaggttagggttactcctatgaggactgagattatcatcagagctacacgtactcagaatgttctcggtgagaaggggaggagaattagggaattgacttcccttgttcagaagagattcaagtttccagttgacagtgttgagctttatgccgagaaggttaacaacagaggtctctgtgccatcggtcaggctgagtctttacggtacaaagcttcttngtggtctccctgttcgtagggcttncnatggtgtttttaaggtttnttattgagagtgggcctaagggttccangtatcntnantggaaacttcntcnttccaanccatcnttaagtcaaaaang

SEQ ID NO: 92390 - DNA, 474 bp, Arabidopsis thaliana columbia
  unsure (1)..(474): unsure at all n locations
aaggtttagatatcggtgttgtaaccgccattgctgctccagcaagtttgaaggtggaatttgaaggcaatggaggtnatgctggtgctgtacttatgccatatagaaatgatgccgggcttgcagctgcagagttggctcttgccgtggagaaacatgtattagagtcggagtcaatagatactgttggaactgttggtattctggagctacatcctggggcaatcaacagcattccaagcaaatcccatcttgaaatcgatacaagggatatcgatgaagcgagaagaaacaccgtgatcaagaaaattcaggaatctgctaacacggtagctaaaaaacggaaagtgaagctatcaggattcaagattgtaaatcaaggtccnccagcactnttntgncaaacntggtaatcaggaaatggcagngnagccccagnncttaanttttcnnnaagttgtngtnaccggnttt

SEQ ID NO: 92391 - DNA, 575 bp, Arabidopsis thaliana columbia
  unsure (1)..(575): unsure at all n locations
tgcacacaaaggaagaagaatcaagatggctctggaaatctgtgtgaaagctgctgttggtgctcctgatcatctcggcgactgtcaccatcttctctttctctctctgtgtctgttttgcattaagctccattttgcaattcttagttcctgagctttgatcgttggtaaaattactaatttaagtgtttgtttgtcgttttaggtccgttcagccaacgggctcttctcacactcgaggagaagagtcttacctacaaaatccatctgattaacctctctgacaaaccccagtggtcagtttctctcacggctaaacccttaagatcgggtctagtttgaacttgtttagccataatctctgaaattttactttgtaactggtacggggctttgtgttanccggaaatttggattgggttcaaggtgcgnncattgtngttaaccgggaccttgaaattgggngntttnggttttanatatnntgcagggttntttgncantnagncccaaggggaagtnccagtccntaaaatcgccggcaagtgggggnctntttccgccggnancnttgg

SEQ ID NO: 92392 - DNA, 843 bp, Arabidopsis thaliana columbia
  unsure (1)..(843): unsure at all n locations
cggagcacggtgattttccgatgaaggtttattgttcagatgatgacacgtggaggtacgtgagtggtgagaagctacagggggagaagtattcggcgtcctttcgccgtgacgggagctgatgatcgtgtgtttgtggtggccagtgggattaacgtagcggaagggagagtgagtgaagggcaaaatggggattttagtgttgagtggaagatggtttcgtctcctaaaagttctattcagttttcacctgctagttgtcatgtgctatatgtttgatgtgtaattgttgttagttttgaatttgtaaactcttttgcttgaattcaagcattctcttcgtctcaacatttagggtttcagagatcggctgattttcacatccacaagtatggcgactcaaatcagcaagaagagaaagtttgtagcggatggtgtattctacgctgaattgaatgaggttctcacaagagagctagcagaggatggttactctggtgttgaggttagggttactccaatgagggctgagattatcatcagagctactcgtactcagaatgttctcggtgagaaggggaggagaattagggaattgacttcccttgttcagaagagattcaagtttccagttgacagtnttgagctttatgccgagaaggttaacaacagagggtctctgtgccatcgntcaaggctnaagcctttacggtacaaggttcttnggtggtctcgctnnttncgaaggggctttccaatggtgtnttgagggntttgttnttggngaantgggcctaagggattccgagggtntncntnagtggaaacttcngnccttccaaa

SEQ ID NO: 92393 - DNA, 736 bp, Arabidopsis thaliana columbia
gataagccttctcactgattaactcacgacccaacccgtcgctgcaaacaaaggaagaagaatcaagatggctctggaaatctgtgtgaaagctgctgttggtgctcctgatcatctcggcgactgtccgttcagccaacgggctcttctcacactcgaggagaagagtcttacctacaaaatccatctgattaacctctctgacaaaccccagtggttcttggacattagtcctcaagggaaagtaccagtgcttaagatcgacgacaagtgggtgactgattccgacgtcatcgttggtatactcgaggagaagtatcctgatccaccactcaagactcctgctgaatttgcctctgttggatccaacatttttggtacttttgggacattcttgaagagcaaagactccaatgacggatctgaacatgccttgcttgttgagctagaagctttggaaaaccatcttaagagtcacgatgggccttttatcgccgggggaaagagtttccgcggggggatctaagcttttcaccaaaagctttaccacccttcaagttgctctttggccatttcaaaaaggctcggtctggcccaggagagctttccccatgttcataactacatgaagactttgttcttgctcgacttttttgagaaaaactaaaacccggggaaaaggtatgtggatctcctgggaaggggcctcccccaagggtgtaaaccccctttgaaa

SEQ ID NO: 92394 - DNA, 1198 bp, Arabidopsis thaliana columbia
  unsure (1)..(1198): unsure at all n locations
nnnnnnnnnnnnnnnnnnnnnnnnnnnnnnnnnnnnnncgaccacgcgtcagcccaagcgtccgattctcttcgtctcaacatttagggtttcagagatcggctgattttcacatccacaagtatggcgactcaaatcagcaagaagagaaagtttgtagcggatggtgtattctacgctgaattgaatgaggttctcacaagagagctagcagaggatggttactctggtgttgaggttagggttactccaatgaggactgagattatcatcagagctactcgtactcagaatgttcttggtgagaaggggaggagaattagggaattgacatctcttgtccagaagagattcaagtttccagttgacagtgttgagctctatgctgagaaggttaacaacagaggtctctgtgccattgctcaggctgagtctctacgttacaagcttctcggtggtcttgctgttcgcagggcctgttatggtgttttgagagtttgttatggagagtggagctaagggatgtgaggtcatcgtgagtggaaagctccgtgctgcacgtgctaagtccatgaagttcaaggatggttacatggtttcatctggtcaaccaactaaggaatacatcgatgctgcagtgagacatgttttgctcagacagggggtgttgggaatcaaggtgaagatcatgcttgactgggaccctacgggcaaatcaggaccaaagacaccattgcctgatgttgtgatcattcatgctcctaaagatgatgttgtctactctgcacctgctcaggctgctgctccagttactcttgtgcaagaagctccactcacaaccgtagattaccctgagatgattcctccagtggcctagagaagacctttttttactattactccatgggattttgttctttttgttataacttttctacttttgacactctctagtcgtatctcttatatcctccaagcagacaagttttttctcatgttgtttcttaacctatgtcaagttttctggaggttgaatgcttttagttcccattgattttttggtcctaagactcgttattagaaaaagaattgcggccaccatggctgggttttggcggcccgcgaaattctgcaggcccggggattcccttaggtactaaaacggcccccccccccgtgaagctcccgccgttgtccc

SEQ ID NO: 92395 - DNA, 971 bp, Arabidopsis thaliana columbia
  unsure (1)..(971): unsure at all n locations
cccaagcgtccgtgcaaacaaaggaagaagaatcaagatggctctggaaatctgtgtgaaagctgctgttggtgctcctgatcatctcggcgactgtccgttcagccaacgggctcttctcacactcgaggacaagagtcttacctacaaaatccatctgattaacctctcggacaaaccccagtggttcttggacatgagccctcaagggaaagtaacccgcccaaggtgctttaaattacgacccttcgactaataagggaaaagcttgggtaacgccctgcaagggtacccggttccggaaattcccggggtcgacccaacgcgtccgttcaagactcctgctgattttgcctctgttggatccaacatttttggtacttttgggacattcttgaagagcaaagactccaatgacggatctgaacatgccttgcttgttgagctagaagccttggagaaccatctcaagagtcacgatggtccttttatcgccggggaaagagtttccgcggtggatctaagcttagcaccaaagctttaccaccttcaagttgctcttggccatttcaaaagctggtctgtccctgagagctttccccatgtccataactacatgaagactctgttctcgctcgactcttttgagaaaactaagaccgaggaaaagtatgtgatctctggatgggctcccaaggttaacccttgaaactatgcaccgttatgagatcgttggtgtggtaatgttgttcaaggtctctctcttatatcagtcaaataatgtacttggaccttttttatgtaatgtactgtatcaatcaaataagaagcctattttggaataaaaaaaaataaaaaagctcggtcgtccgctctagaggatccgagttcacgtacgcgtgcgtgcgccgtcatagctcttgtatagtgtcacnnnnnnnnnnnnnnnnnnnnnnnnnnnnnnnnnnnnn

SEQ ID NO: 92396 - DNA, 431 bp, Arabidopsis thaliana columbia
ggtgacctctacaagagtatgacgtcgcacgcacgcgtacgtaagctcggaattcggctcgagggggactctgcgtgtttcacagttccagagaatcccggaatctggaatcggcaaattggagaaggaatcgaatcctaagcattagcagttttagggataagaggaactgtgaagatggtggggactctgcttttcaatctttttcttcttgctagtgatgaaaaattgttgctacattttcagatgtgaatgttcaagattctctatcttttttttttttttgaactctttttaacttggagtggtttcccaaaaaataagatgcaaaactcatctttttgttggttttctatctttaatctgtgagaaataaaaaatatatatgagatcaaaaaaaaaaaaaaaaaaaaaaaaagggcggccgccga

SEQ ID NO: 92397 - DNA, 796 bp, Arabidopsis thaliana columbia
acgactcactatagggtaagctggtacgcctgcaggtaccggtccggagagtatcgttgtgaggtttggggatcgcgaaaatggaggttccaggttcatcgaagaagatgatcgcaacgcaagaagagatgtctgcagctaaaatagcacttggatctagagatatgtgcgctcatctcttgattccgctcaacaaatgtcgtcaggctgagttttaccttccatggaaatgtgaagacgagcgtcacgtttatgagaagtgtgaatacgagcttgttatggagagaatgcttgcgatgaagaagatccgtgaagaagaagctttggctaaacagaataaactacaaggaaacgctgctgttcctcttatccctaaaactgctaatgcttaggattcgattccttctccaatttgccgattccagattccgggattctctggaactgtgaagatggtggggactctgcttttcaatctttttcttcttgctagtgatgaaaaattgttgctacattttcagatgtgaatgttcaagattctctatctttttttttttttgaactctttttaacttggagtggtttcccaaaaaataagatgcaaaactcatctttttgttgggtttctattcccacaaaatttcttaccccccaattctaaaagggcggccgctcctagaaggatccaagctttacgttacgccgtggccttggcaacggtcaattaacttcttttcttataaggtggccaccccaaaaaatttcaaatttcacacttgggcccggtcggtttttt

SEQ ID NO: 92398 - DNA, 793 bp, Arabidopsis thaliana columbia
  unsure (1)..(793): unsure at all n locations
nnnnnnnnnnnnnnnnnnnnnnnnnnnnnnnnnnnnnnnnnnnnnnnnnnnnnnnnnnnnnnnnacccacgcgtccccacgcgtccgcccacgcgtccgcttcttcacagaaggaacgttcgaattgattcgcttcttaatgtcactctctacaatagcttctggtatcggcgttctcgagcttccttgtttgcgtctgttaccaatctcaagcacccaaatccagtttctcactgttgaagctagaaaacaatctagaagaataagacgcgagcgctccttcagcccttttccagtacttattcaatcgaaccgtcgtcttcgtcatggtttctcagagctcaattcgagttttgatcgttccaacagtggagaaactggttccgataccactcttaaagatggtgaagaagtgaggagtgaaagctcttcaggtgttggtgatagctatgtgggcttgtttgtgggaatgctcggtttggacaacgatcctcttgatagagagcaggcgatagagacgctatggaagtactctttgggtggaaagaaatgtattgatgcgataatgcagtttcatgggttgtttgaatctaattgtcaatcttctcaagtctgagtccagctccgcctgtgaagctgctgctgggcttatacggtctatagcttctgtgaatctgtacagagaatcccgtgctgagagtggagcgttggaaagataaccgctctactgagccgaccttcgctagcttcaggggggaaagaacaatgcttatgtgctctggggaatctgact

SEQ ID NO: 92399 - DNA, 767 bp, Arabidopsis thaliana columbia
  unsure (1)..(767): unsure at all n locations
cagcatctatcngactcactatagggaaagctggtacgcctgcaggtaccggtccggaattccgggtcgacccacgcgtccgggaggaggctgatgatgaagctgtggaaacgggcttccggtgctctcaaagaccggaaaaccttgtttaccatcggcttctcccggaaaacctccttccgcaaccctgaccttgattctgccatcatccacgcaacctctcacgatgactcatctgtcgattaccacaatgctcaccgtgtctacaaatggatccggtcctctcccgccaatctcaagccgcttgttcatgctctttcatctagggttaaccgcacaagaagctggattgtagccttgaaagccttaatgcttgtccacggtgtgctttgctgcaaagtcacgtcccttcaagaaattcgtcgcctccctttcgatctctcggatttctcggatggtcattcccgtcccagcaaaacttggggtttcaacgcttttatccgcgcctatntctcgtttcttgaccagtactctttctttntatccgatcaaatccgtcgtcgccacaaaaaacctcagctagattcgggtaaccaagagctcganagaatcgagaaacttcagtctcttctccatatgcttctccagatccgtccaatggctgacaacatgaagaagacgctttatccttgagccatggactgcgtggtgatcgagatcttcgacatttatggaagaatatgtagcgctatcgccaagcttctcat

SEQ ID NO: 92400 - DNA, 537 bp, Arabidopsis thaliana columbia
ctagctggtaccaatcttaaacccctctccgattttgatttctgcttgaaattgttttccccgagatctcaatttcgataatcggaaaacgaaaaagatggtttggtttcaatgcgaagactgtggagagtgtctgttgatgccaaaggtcccgtctcactgcaaggggtgcagagccaacaagttatcgtccatcgattgtggagaaatgtttgggagagatactgtgcaaggacataaccaatgcattactgaagctgagaagtatggtccaaaagggcagtcaaagtcagctaatggaacacctgcaaagccaaaggacatctctaagcaagagcctgactttgatattaatgtcggcttatcaaaccgatatccatggttttgcagtttatgtaacacataggctactagccagcagactttgcttgcccatgctgttgggaagaagcaccgaggaaaagctatagccttccatgctaggcaacaacaagaacaatccacgacttttgataacaaggatggaagtgaaaatgc

SEQ ID NO: 92401 - DNA, 834 bp, Arabidopsis thaliana columbia
  unsure (1)..(834): unsure at all n locations
nnnnnnnnnnnnnnnnnnnnnnnnnnnnnnnnnnnnnnnnnnnnnnnnnnnnnnnnnnnnnnnnnnnnnnnnnnnnnnnnnnnccacgcgtccggaaacgaataataataatatttgaataatgtgttctgttctgttcttcatctcatagatctctcctctctacactttcttctacaaaagtgagcaaataaacttgcctcttcgtctgcttcgtgagatttcagatcctgtaaagaaattttattagctcaaaagaatcatttttgggtttctgaaccataaaagcttctctcgactttcaaaaactctctactttttccttttagccatttcaagcagagagattgatcgaagaagataaaaacctcgtctttcttcaatctcagtgattctcaaattacccatcgcttccttcttttgatctctttgatttcacttcaaaaagcaaagaaatcccgattaggttattccttgtttcaccccataaatttgcctcctttttttttggtctcgggaactactctgatttgattcaatcgattctggatttcgggatttggatatagagctctctgtctttgacattgccctttggaacaaaattctcagtctgtgcattgttttgattcataagctcactaagtnttgggtttcagaagctattacattgaggtcttcgtaagcgtcctttgaatgcactgtaactgaagtgcagcctgatcaccgcaaaagtcatcagttgaggtagatctctccacggaatatggggaaggaagcagattcagaatagaggaagtgantggtaaaaggagttatggagttggctggtct

SEQ ID NO: 92402 - DNA, 830 bp, Arabidopsis thaliana columbia
tttggccccccctcgatttcgacggtatcgataagcttgatatcgaattcgcggccgcgatttcagatcctgtaaagaaattttattagctcataagaatcatttttgggtttctgaaccataaaagcttctctcgactttcaaaaactctctcctttttccttttagccatttcaagcagagagattgatcgaagaagataaaaacctcgtctttcttcaatctcagtgattctcaaattacccatcgcttccttcttttgatctctttgatttcacttcaaaaagcaaagaaatctcgattaggttattccttgtttcaccccataaatttgcctccttttttttggtctcgggaactactctgatttgtttcaatcgattctggatttcgggatttggatatagagctctctgtttttgacattgcctttggaactaaaattctcagtctttgcatttttttgattcaaaagctcactaagtttgggtttcagaagctattacatttggtcttcgtaagcgtcctttgaatgccctgtagctgaagatgcaccctgatcaccgcaaaaagtcatcagttgaggtagatttcttcacggaatatggtgaacgaagcacatacagaatagaagaagtgattggtaaaggaagttatggaagtgtctggtctgcttaccatacacctacccgagcagaaaagttgccatttaagaaaaatcacaggaattttcttttgaacccttgtttcttgggattgccaacctccgccattttctttcgggggagaaaacaaaaccctttgtttagaaaccttttttaaacggccca

SEQ ID NO: 92403 - DNA, 877 bp, Arabidopsis thaliana columbia
  unsure (1)..(877): unsure at all n locations
nnnnnnnnnnnnnnnnnnnnnnnnnnnnnnnnnnnnnnnnnnnnnnnnnnnnnnnnnnnnnnnnnnnnnnnnnnnnccacgcgtccgtatggggaagagggtatattctctgttttgattcgcttctgtcttaacacattgaaattttccatagaagattccattgtgctcttttaatcctcttctctttctctctgttttaaatacctgtctttaatcgcttctctctatctctctctcttgttaaatctcatcggagttcaatttcaggactctcggcgctcttatgaagtgattgtgaagatttgcgtacactaagcctttgcttcagaaagttgagtgatttgtttgactcactttcaagatgaaaaatgagctctagcaaagatggatggcgtaaactccgttgagggctatagaaatccttttagttgtccgtttagtgagagttatccgagtctttttctttggagacatttggtctagacacaacatttgtggcgaacaaggttttagtgggaattcttaccgtctagaaatatggaattgtcagtctctcctcaaacccaaaagatgaacctgcaaactcctcgtaaaagctcactttcaggatctanganagatttgtggtttgctatacgggaaggttcgttggttgatgtggattcagcacttagcatactcaagaagactgggggggcatataatttaaggaatgcctatggtctcactcctctgcatattgctgtatggagaaatcacattcctnattgtaggagactgcttgctgctggcgctgatccaaatgctanggatggagaatctggntggagtagtcttcaccgagctttgcatttggccatctcgcggagctagc

SEQ ID NO: 92404 - DNA, 572 bp, Arabidopsis thaliana columbia
agctctctacgactcactatatggaaagctggtccgcctgcaggtaccggtccggaattcccgggtcgacccacgcgtccgcccacgcgtccgtagagagatttttgctttctcaatttattattttttgtgtctctctctcgcccgatttggagtttttagggtttgatttttgtaatgtgagaaaggtttcgttatgttaaagaggcactctatcgccattctctccagaatcgcaagcttcgattcccataaaacccttatgtcttcctttaccgatcccctttttctgcgatcgctttactctcctcgatccatcgccatcagatttcatggagattttgctcatagactctacaatcccattcaaatttacaacaacaacaacaacaacagtggctcttgtaatggtttgttcaaggttaaaggtggaggaggaaagccgaaaggattcaccttgcgaagttgttttgattctcataagaaacctgatcaaaaggctcgagctttaactcaacatcgccgctttcttcatgatctgggatctgggcctagtgaagaacgcgcccctg

SEQ ID NO: 92405 - DNA, 2071 bp, Arabidopsis thaliana columbia
  unsure (1)..(2071): unsure at all n locations
cgcccccccttgggtgccccgggtcagccacgagaataatcccaaaaaccagaaaaaaaggagctttgcttttgtaggaattaatggattcagtgaactccttcaaaggatatggaaaagtagacgaagctcaagatttagcattgaagaaaaagacaagaaaacgtctacttctactatccatctccgtcgtagttctcatcgccgtaataatcgccgccgtagtcgccaccgtcgttcacaagaacaaaaacgagtcaacaccgagtccacctcccgagttaacaccatccacttcactcaaagccatttgcagtgtaactcgtttccctgaatcttgcatttcaagtatctcaaagcttccatcttccaacacaacagatccagagactctattcaagctctcattgaaagtaatcatcgatgagcttgattcgatttccgatttaccggagaagctatcgaaagagactgaagacgaaagaatcaaatctgcgttaagggtttgtggagatctgatcgaagatgctttagatcgactcaacgacactgtttccgccattgatgacgaagaaaagaagaaaactttgtcatcttccaaaatcgaagatctcaaaacttggctaagcgcaacggtaacagatcacgagacgtgtttcgattcgttagatgagttgaaacagaacaaaacagagtatgcgaactcgacgattactcagaatctgaaatcggcaatgagtagatcaacggagttcacaagtaacagtcttgcaatagtatcgaagattctttctgcgttaagcgatttggggattccgatacacaggagaagaagactgatgagtcatcatcatcagcaaagtgtggattttgagaaatgggcacgacggaggttgttgcaaacggcaggtttaaagcctgatgtgacggtggcgggtgatggaaccggtgatgtgttgactgtgaatgaagcggtggctaaggtgccgaagaagagtttgaagatgtttgtgatttatgtgaagagtggaacttatgttgagaatgttgtgatggataagagtaaatggaacgttatgatttacggtgacggcaaagggaagaccattatttccggcagcaagaacttcgtcgacgggactcctacttacgaaacggcgacgtttgctatacaaggcaaaggatttataatgaaggatattggaatcataaacaccgcgggagcagcaaaacaccaagctgtggcattccgatcaggctctgatttctcagtctattaccaatgctcattcgatggttttcaagacactctttaccctcactccaaccgccaattctaccgtgactgcgacgttactgggacaatcgacttcattttcggaagtgctgcggtcgttttccaaggctgcaaaatcatgcctcgccagcctctttctaaccaattcaacaccataaccgctcagggcaaaaaagatccgaaccaaagctcggggatgtcgattcaacgatgcactatctccgcaaacggcaatgtgattgctcccacgtatcttggccggccgtggaaggagttttccacgacggttattatggagacggtgattggagcagtggttcgaccgtccgggtggatgtcatgggtttctggagttgatccaccagcaagtattgtctacggagagtataagaatacgggcccgggttcagatgtaacgcagagagttaaatgggctggatataaaccggttatgtcggacgccgaggctgcgaagtttacagtggctacgcttttacacggagctgattggataccggcaacaggagtgatcaatcagctatcttaatatagtgacaatacaattggattcgtagcttgtttttgaaaacatccggttgtgatctactttatatttgtttgacacttatgcatgatctgtaattttttccaacatagttgtattttgtgtatcccctaaaaaaaaaaaaaaaagnnnnnnnnnnnnnnnnnnnnnnnnnnnnnnnnnnnnnnnnnnnnnnnnnnnnnnnnnnnnnnnnnnnnnnnnntacaatc

SEQ ID NO: 92406 - DNA, 702 bp, Arabidopsis thaliana columbia
  unsure (1)..(702): unsure at all n locations
atgctgttgtctggatacatctccacccatatctacatgaatgcacttcacacagaatattagttagttgaanagtggaaccgttctgaagggacaccacaggttggcttacacatttgatgctggtccaaatgctgtactgattgcacgcaacagaaaggtcgcagtccaattgctccaggggcttctgtactattttccccctaagtcagacactgatatgaagagttacgtagtgggcgataattcaattctaaaagaagcaggattagatggagcaagtggtgtagagaatctgcaacctccacctgaaattaaagacaacattggatctcaggatcaaaaaggagaagtcagttattttatctgcactagacctggaaaaggtcccatcgtgcttcacgaccaaactcaagcccttctcgatcctgaaacaggccttcctaagtgagcattctctctgcttcaaactaattattatgattagcatctcctttaactgcaagtttaagatacgatatatgtggcagaataggtgcaggtacgttgtcatctaactattagctttcctatttccaaataaaagaaattcattggttttgttttaaaaaaaacaaaaagaaaaagcnnnnnnnnnnnnnnnnnnnnnnnnnnnnnnnnnnnnnnnnnnnnnnnnnnnnnnnnnnnnnnnnnnnnnnnnnn

SEQ ID NO: 92407 - DNA, 372 bp, Arabidopsis thaliana columbia
  unsure (1)..(372): unsure at all n locations
acccacgcgtccggtcttctctgccctaaagagaaaaaccctacgtgagctgcgtcagttctgggtcctccgcaatttgagaatcggagatatctcaagtttcgcaaagtctcgtggatttgatcttcgtctccttgatcgatggattcaccttgagcaatcgttgatcgagcttcgaagatgtcgaatcactccagagatgagcctagtactgccccgaagacagatcaatggtatgatcttgtccttggttcctctgccaaagatgactcctcccataaattctgcactttgcgatatgaatttaagccggcttcaatcgataagaacaggtcaggntcaatgcacaagaagaaggntaacanagnttca

SEQ ID NO: 92408 - DNA, 782 bp, Arabidopsis thaliana columbia
  unsure (1)..(782): unsure at all n locations
gcggccagttccgacggcgagtggaacaaacgcgcacatgatgtacgttttcaatcgtaacggtgtatgtcttctctacaaagaatggaatcggcctcttcatacacttaatcctcagcaagatcacaagctcatgtttggtcttctcttctctctcaaatctctcaccgctaagatggatccagtcaatgcggataaaggaaatcttggggttccacagttgccaggacaaggttgctctttccatagtttccgtacgaatacttacaagctaagtttcatggagactccctctggtattaagattatcttagtaactcatccaaagaccggagatttacgcgaatccttgaagtacatctacagtttatacgttgaatatgtcgtaaaaaatcctatatacagcccaggatctccaatcaagtcggagttgttcaacactgcacttgaccagtacgtaaggagcatctcttagtgtgtgcattacagatttgtccattggaacttctctccttcaacagaactatcgtctgaacaatctctgaaaagaagagagaattgtagtagagagatttatcttgagttcgactgttttctctgcaaatctatgtttcgtttaccctttttattaactccactgtattggcttgctatcaatgatgttcatggtttactcaaaaaaaaaaaaaaaaaagggcggccgctctagaggatccaagcttacgtacgcgtgcatgcgacgtcagnnnnnnnnnnnnnnnnnnnnnnnnnnnnnnnnnnnn

SEQ ID NO: 92409 - DNA, 880 bp, Arabidopsis thaliana columbia
  unsure (1)..(880): unsure at all n locations
ctctaattcgattcactatagggaaagctggtacgcctgcaggtaccggtcccgaattcccggggcggcccgcgcgtccgtacggctgcnacnacagaagggggcttcttatttggtctcagctctgatcttttgattcaacggctcccggagacgacggaagcaatgcagttcttcggtggatctgagattagtccgtcgccgccagttccgacggcgagtggaaacaacgcgcacatgatgtacgttttcaatcgtaacggtgtatgtcttctctacaaagaatggaatcggcctcttcatacacttaatcctcagcaagatcacaagctcatgtttggtcttctcttctctctcaaatctctcaccgctaagatggatccagtcaatgcggataaaggaaatcttggggttccacagttgccaggacaaggttgctctttccatagtttccgtacgaatacttacaagctaagtttcatggagactccctctggtattaagattatcttagtaactcatccaaagaccggatatttacgcgaattccttgagtacatctacagtttatcccgtttttatgtcttaaaaaatcctatttacagcccatgatcttcaatcaagtgggagttgtccacacctcactgaccctgcctaggagcatttttatgggtcataacgattttcccttggacctcctccttaacaaactttcgcgtaacctctttaaagagaaaaattcctgtaaaaattttcttgatccactttttttttaaatgatggttggtcccttttattacccacggtgggcttgttcaggtggcagggccccaaaaaaaaaaaaaaaaaagggcgctaaatcacttcccccggctcattt

SEQ ID NO: 92410 - DNA, 539 bp, Arabidopsis thaliana columbia
  unsure (1)..(539): unsure at all n locations
nnnnnnnnnnnnnnnnnnnnnnnnnnnnnnnnnnnnnnnnnnnnnnnnnnnnnnnnnnnnnnnnnnnnnnccacgcgtccgcggacgcgtgggcaacaactttaccaaatctgcaagtgttgaaattattttattctcttttttgtgttgatgacataattatggaggaactacagcgcttgaagcacttgaagattttaacagcaaccatagaggatgccatgattttggaaagggtacaaggagttgaccgattggcgagtagtattcgaggtttatgtctaagaaacatgtcagcacctcgtgtaatattaaactcggtagctctgggaggtcttcaacaacttggaattgggagctgcaacatatctgagatagagatagattgggtaagcaaagaaagaagggatcatcgatctacaggttctcccggcttcaagcaactcgccagtattactgtatccggttgggtagggccaagggattggtcatggcttgttattggctcaaaatctgaaggatatacaagtgcaatattc

SEQ ID NO: 92411 - DNA, 551 bp, Arabidopsis thaliana columbia
ttcagctctctacgactcactatttggaaagctggcccgcctgcaggtaccggtccggaattcccgggtcgacccacgcgccgccccacgcgtccgaaaagacagagaactttctcgatacgaacgccaaagagaagaagacgaagacgaagatgatgggtgtgttgaagtcggcgattggggatatgttgatgaccttctcttgggttgtcctctccgctacctttggaattcagacggcggcgattatctccgccggtgattttcaggcaatcacttgggctccgttggtgattttgacgtcgttgattttcgtctacgtctcgatcttcaccgttatcttcggtagcgctagcttcaatcctaccggaagcgctgccttttatgtcgccggtgtccccggagatactcttttctccttggcgattagattacctgctcaggcaattggtgctgcaggaggtgcattggcgatcatggagttcataccagagaaatacaagcatatgattggaggtccttctcttcaggttgatgtgcacactggagct

SEQ ID NO: 92412 - DNA, 493 bp, Arabidopsis thaliana columbia
gagtaatctttcgtttacaacaaatatctctctctctctcgctctctctcgctctctctttcttcttcttcatcttctttcatggctgttactggctgggcaatcacaatctgaattctttcttcctccttgtctctctgattttcgccgagttttgggggctcttgttgttacacgatgagtctggtggttggtcagtctctgggtttaactctagtcggtgatggtctttcgttacgcaattccaaaataaatgtcggaaaatcaaagtttttctcggtaaatcggaggagattggcgcgtgcggccctggtacaagctaggcctaaggaagacggagcggcggcaagtccttccccatcgtcgagaccggcgtcagttgtgcagtaccgacgagctgatctcgcggatgatcttcaagccgaggcacgagctttgggtcgtgctattgatgcttctatatactctccggagctcatcgccaggaaacatg

SEQ ID NO: 92413 - DNA, 864 bp, Arabidopsis thaliana columbia
ctatgaggggacagctggtacgcctgcaggtaccggtccggaattcccgggtcgacccacgcgtccgcgagaattccgtcgaacatttgagctgcgttttaaagttctccaaatggcgccttttgcctactaaaaaacctttaccttcttcacagagatctaacctctccttttcccaatgttcggcactcctttttcatcggcggggttcggcactccgtcatccacacccgcctttggcacatcttctccggcgttcggtacaccgtcagctacgcctgcgttcggtacgccatcgaatccttgcttcacgttccggcagatttggctcttaactcttctcgtctcccttctcatctgaacagccacagcatcaacaacaacatcatcagcatcagcagccgagtccactgattcaggagcaaccatcttctatttttgttttgcaggcccattgcacaacaccgctcaccatgacagcaaacgcattttccaaatgctgaattgactacttagatgggtcccgttgctgcaattccttactctttcccctttcgtgatggccaggctatcattgaacctataaagaaaaacccacaaatcccagtttcctttcacatcttgattcagggtacttgaccacataccggtgaagcctcgggtgggtaaaactaacgggggccaagccctgagcaaccttgaggttggttaaccagaagaagcgctttggactaacttggccgaggttaaggattttttagcgcctaagctttaaagaatttcggcgagaggccgtgaataaaccactcaggcatgggaaatgtgcgaacctttgagctcaacttcctgtttgaagggggacaa

SEQ ID NO: 92414 - DNA, 538 bp, Arabidopsis thaliana columbia
cagctctcctacgactcactatatggaaagctgagcacgcctgcaggtaccggtccggaattcccgggtcgacccacgcgtgcggcgagagaaagatcgattctgtctttatacagacattatctcccactcattctctgtgtcgcttgaagcagcaagagagagagagagactgacagagacagagttaaatgcgaatttatgggtttgatctatacagatctgtgtaccctaatttatgtctctggcgtaacggtcatatttaaccccatttcaatttgagctcttcatcgctgcgtttctgtgatctcggagctcttccaagtggttcgagtagtgtcaaaagagaaggtgagagatgctgacgtgtatagcttgcacgaagcagcttaacaccaacaatggcggatctactcgagaagaagatgaagaacacggagttattggtacccctaggactaagcaagcgattaagtcactgtcgtcacagctaaaagacatggcagtaaaggcttcaggggcatacaaaaactgcaaa

SEQ ID NO: 92415 - DNA, 561 bp, Arabidopsis thaliana columbia
atctaggtctttctctcctgcaccaagacgaagaggaggtcctcctcgtggggaagaagatgaaaattacagtcgtaggtcctactcccctggctatgaaggtgctgctgctgctgctccagatcgggacagaaatggagacaatgagattagagaaaaaccgggctatgaagcagaggatagacgtcgtggtggaagagcagtttcaaggtcgccatcaggatccaggtccaggtctgtggaggtatctccaagatgaaacttatgtgaagaagtggccgaccaaaactttgtgcaacgctttatgggttttgcatttctctagtagtgcgtctctgtgtctttaaaaactccttactctggcttgtcaaagatattttgtcttgtgatgtgatgttacttgaaatcggtttcggtttatgggtctttttataaaaaaaaaaaaaaaaaaaaaaaaaaaaaaaaaaaaaaaaaaaaaagggcggccgctctagaggatccaagcttacgtacgcgtgcatgcgacgtcatagtaatctatagttcgcctcaattcaatcg

SEQ ID NO: 92416 - DNA, 630 bp, Arabidopsis thaliana columbia
  unsure (1)..(630): unsure at all n locations
ggnggaatggcattnnggngnaccnanggcataatttttttttctgnacacncaacanncgggaggagttattacttgttgctgtcttgcttagacattcagggacaaaagtgatttttgcagatcatcagtttctccaaatagctgaaggagcttgtgaaatcctctcaaataaaggtgacaaggtcccgattttggtcttgatcccagagcctcttactcaatctgtttcaaggaagaagagatctgaggaaatgatggaatacgaagatgttgtagcgatggggaaatcggacttcgaggttatacgaccaacagatgagtgtgatgctatatctgttaattacacatcagggtaccacttcaagccccaaaggtggtggttatagtcacagaggtgcttatttgaattctctggctgcggttttactcaacgaaatgcactcctcgcctacttatctatggactaatcccatgtttcactgcaatggctggtgcttattgtggggtgttactgctattggtgggactaatatatgtttgaggaatgttacggccaaggctatatttgataatatttcccagcataaggtgactcatatgggaaggtgcgccgacgatattgaatat

SEQ ID NO: 92417 - DNA, 1515 bp, Arabidopsis thaliana columbia
cagctctctacgactcactatatggaaagctggcacgcctgcaggtaccggtccggaattcccgggtcgacccacgcgtgcggctatatctgttaattacacatcaggtaccacttcaagccccaaaggtgttgtttatagtcacagaggtgcttatttgaattctctggctgcggttttactcaacgaaatgcactcctcgcctacttatctatggactaatcccatgtttcactgcaatggctggtgcttattgtggggtgttactgctattggtgggactaatatatgtttgaggaatgttacggccaaggctatatttgataatatttcccagcataaggtgactcatatgggaggtgcgccgacgatattgaatatgatcatcaatgcgcctgaatctgagcagaaaccgcttcccgggaaggtgtcttttataaccggtgctgcaccgccaccagctcatgtgattttcaagatggaagagttggggttttctatgtttcattcctatgggttaactgaaacttatggaccaggcacaatctgtacatggaagcctgagtgggactctttgcctagagaagaacaggcgaaaatgaaagctcgacaaggcgtgaatcatttagggctcgaggaaatacaagttaaagaccctgtaaccatgagaactttgccagctgatggtgtgactatgggtgaagttgtcttcagaggaaacacggtgatgaatggttacttaaagaaccctgaagcaaccaaggaagcttttaaaggaggttggttttggagtggcgacttaggtgttaaacaccctgacggatacatagagctgaaagacagatcgaaagacattataatctctggaggagaaaacattagctcgattgaagtcgagtctactctgttcactcacccttgtgttcttgaagcagcttgtagttgcgaggcctgatgagtattggggtgagactgcttttgcatttttgaaacttaaagacgggtctaaggccagtccggaggagcttattagctattgcagggaccggctcccacattatatggctccgaggagtattgtgtttgaggatcttcctaaaacatcgactggaaaagtccagaagtttgttctgaggaccaaggctaaggctttggtaagcttatcaaagaaaggcagaagcaagttatgaattggtaagctttctttgttacttccaatctctacaagatgtcttataaattactgtctataagatcatgtttgtgtctaagctaaaccagaatgagatactaaaaccaatttgtatgtttctgaaataaataaaaccgggatgaaattgtaattccggaagattagatctatagcattctgattagagttgaatctgatggcaagtggatatattattatcttaagggaatcaatctttggattgtgtctaaaaaaaaaaaaaaaagggcggccgctctagaggatcccagcttacggacgcgtgcatgcgacgtcaagctcgt

SEQ ID NO: 92418 - DNA, 826 bp, Arabidopsis thaliana columbia
tgctacgccggctctatacgacttacttagggaaagctggtacgcctgcaggtaccggtccggaattcccgggtcgacccacgcgtccggtttccttctcttcgttactggatacttcactctaaacgagagatcgagaaggaaattcacccaaacttttttccttgccccgcaagaaaagggtttctttgttctgaatgacatcctcagatttgttaatgatgatgctaaggataatgttccagagaccatagatggggaagttgtttctgggataaactctacaacacccactattatcaatggcatgaagggttcggagcaagctgcatgtgtttcagtgaatcctgtttgtaaggaagtgtccaaaccctgggatattgagaatgctaaggataatggtcttgtacctgagatggctaatgaagttgcaaggactgagataacttgcaaagaagttgcagatgattcacagaaaaattatgaccctgatgatggacttgcagatgctcccaagaaatcctatgcctctgtgttgaaggttacgaaagataaatttggagttccagctgtctttttaccttctccaaagaagatacctaaagaccaagaacatcaagcgccttcagatccttctacaggccagatactcaaagaccaaggtcaacaagcatcttcagattcttctcaagtgatagaatctgataccagttctgagtctgttgatgcttctgaaaatgggcacaatcaggaagcggtagctgagggacatctattatgtgagacatctccttttatgccaacattgcatgcttgaggctgattt

SEQ ID NO: 92419 - DNA, 680 bp, Arabidopsis thaliana columbia
  unsure (1)..(680): unsure at all n locations
tgtttnnnnnnnnnnnnnnnnnnnnnnnnnnnnnnnnnnnnnnnnnnnnnnnnnnnnnnnnnnnnnnnnnnnnnnnnnnnnccacgcgtccgcttgaggaaacacagtaaaaacctaaaaagagaatgaaactcgcaggtctgaaatcgatcgagaacgctcacgaagattccgtttgggcagcgacgtgggttccggcgacggaagatcgaccggcgttgcttctgactggatctcttgacgagacggtgaagttatggcgaccggacgagctggatcttgtgcggactaatactggacactctttgggagtagcagctttggctgcgcatccttctgggattattgcagcatcttcttcgattgatagctttgtccgtgtgtttgatgttgatactaatgctacgattgctgttttggaagctcctccttctgaggtttggggaatgcaatttgaacctaagggtacgatccttgctgtgtgcaggtggaggtaagtgcctcatgtcaagcttttgggacactgcaagctcgggagattcaatctcaactctattcattcccacgcccagatgccccaaaaaccttccgataaaacctagcacaagaaattcgttctctcggagggcttggctcctaatgggaaacgacttgctggtggtcaatggatgggacgatct

SEQ ID NO: 92420 - DNA, 883 bp, Arabidopsis thaliana columbia
  unsure (1)..(883): unsure at all n locations
nnnnnnnnnnnnnnnnnnnnnnnnnnnnnnnnnnnnnnnnnnnnnnnnnnnnnnnnnnnnnnnnnnnnnnnnnnccacgcgtccgcccacgcgtccgcctccctctaatggatctactcgatattcctaaatctcgagtaatatgtgccgtgctgcagctgataaatgaaattgtaaaagataataccgacttcctggaaaatgcttgtcttgttggtcttattcctttggtaatgagttttgctggttttgagagggatcgatcacgagaaattcgtaaggaagcatgcctacttcttgcagcagctttgtcagtcaagccccttgacgttgcaaatgttcatatcttgccgtggaatacccgttttggtgggatttcttgaagcagactatgccaaacacagggagatggttcacttggctattgatgggatgtggcatgtatttaaactcaaaaaatccacctcgagaaatgatttttgccgtattgctgcaaagaatggaattcttcttaggctagtcaacactctttatagcttgagtgagggaactcgactggcttctatatcggaggatgcaattgatttggatggtcaaactccacgagcacgctctggtcaacttgaccctaacaatcctatctttagtcagcgtgagacttcacctagtgagattgatcatcctgatgggttgaaaactaggaatgggnggtggagaagagccttctcatgctttaactgcaaattctcaaagtgcagatgtccatcaacccgatgccttgcacccagatagtgataggcctagattaagcagtgttgtagcagatgccacagaggatgttatacaacaacataggatatctctttctgccatagaacataac

SEQ ID NO: 92421 - DNA, 811 bp, Arabidopsis thaliana columbia
  unsure (1)..(811): unsure at all n locations
tgcnnnnnnnnnnnnnnnnnnnnnnnnnnnnnnnnnnnnnnnnnnnnnnnnnnnnnnnnnnnnnnnnnnnnnnnnnnnnnccacgcgtccgaaaatatcactaacctcattcaaagagagaatggcttgtaaagaaaagcctcgtgatcttcaagttcttttgatcatatctatagttttgagttgttcttttgctgtttctgcaacggtggaagaagctaatgctcttttgaaatggaagtcaactttcacaaaccagacaagttcatcaaagctatcttcttgggtcaatccaaacacaagcagcttttgtaccagttggtatggtgttgcctgctcactcgggagcattatacggttgaatcttactaataccggtatcgaaggtactttcgaagattttccattctcgtctctccccaatctcacttttgttgatctcagtatgaaccgtttctctggaaccatctctcctttatggagacagttctcgaaactcgaatacttcgatttgtcgattaaccagttagttggtgaaatcccacctgaacttggtgatttgagtaatttagatactctccatctagttgaaaacaagttaaacggatcgattccttctgagatcggtcggttaactaaggttacggagatagctatatacgacaatcttttaaccggaccaataccttcttcttttggaaacctaccaaactagttaacctctacctctttatcaattcgctttctggttcaatccttctgaataagaaacttacccaacctagagagctatgtctagatagggaacacc

SEQ ID NO: 92422 - DNA, 523 bp, Arabidopsis thaliana columbia
cggacgcgtgggcattgacatcaacagggttgaagaagaacaacatcattcaacatcagcatcacgaatattttcgagtcatggagagaagcgccgttgcctcaggttttcatagaaattacatcctctgtgcttcacgcgccgccacttccacgacgcgcctccactctttgtcctccctcagaaactttccctcttcctctctcaggattcgtcactgtccttctcccatctcttccaatttcatcgttagtgaagtttcccgaaaccgacgatgcgacgccgtttcttccagcaccaccgatgtgactgaattagccgaaattgattgggacaagattgattttgggcttaaaccaacggattacatgtacgccatgaaatgtagccgtgatggtgaattctctcaaggtcaattgcaaccttttggtaacattgacattaacccagcagctggtgttctcaactatggacaaggtttgtttgaaggtctaaaagcttacagaaaacaagatgggaatat

SEQ ID NO: 92423 - DNA, 282 bp, Arabidopsis thaliana columbia
gaaagagagctatggaaaacagttattgcattctgttcaggacagtcaatttgttcattcgattaaagacagtggtgcgttacctgcggttttggggagcttgttcgttgtgtctgcaactgttggtacttctctgttcttcaaaggagctaataattgaaacagaagaaacaaaattttaaaaaattgttgggatttgttgttgttcttgaaagattgaaaaagaactatgtgatactttgtactattcttttctataatttattgtgtgttttgtttttg

SEQ ID NO: 92424 - DNA, 453 bp, Arabidopsis thaliana columbia
ggagttctcaagctttttgtttactattttactcttttcactgaatatttctcctcttgtttcagctcatggctccaaccatgaagactttcttaagtgtctttcttaccgaatgaacgacaacaccgtcgaacccaaagtcatacacacttccaaagactcttcctttttttccatattggattcttcgatacaaaatccaagattctcggtttccgaaacacctaaaccggtctcaatcatcactcccgttaaagccagtgacgttcaaactgtgatcagatgcgcacagctgcatggaattcatgtaaggactcggagcgccggtcactgctacgaaggtctctcttacattgcgtacaacaaaccattcgctgtcatcgatttaaggaatcttcggtctatatcattagacgttgataaccggacaggttgggtccaaaccggagcaac

SEQ ID NO: 92425 - DNA, 452 bp, Arabidopsis thaliana columbia
  unsure (1)..(452): unsure at all n locations
nnnnnnnnnnnnnnnnnnnnnnnnnnnnnnnnnnnnnnnnnnnnnnnnnnnnnnnnnnnnnnnnnnnnnnnccacgcgtccgctgacgtgtgggcagacgcgtgggtgagcatggctctagtctgtgctcgctggctttaatgctatccaatatatatatatgttgcaggcaagaagtatataaggctttacgcatccttcctgcaagacgaactttacccttactctgagacaatgctctgcaactctagtcacgttgatctagacaatatcgacgaaaccgagttcccaaaggccatggagttggagtttatggatggtattctagaagaaggtgaaatgttgtacatccctcccaaatggtggcactatgtcaggtccttaacaatgagtctctcggttagcttctggtggagcaatgaagcagaatcttctagctcgtagcgaatgga

SEQ ID NO: 92426 - DNA, 417 bp, Arabidopsis thaliana columbia
atccaattctctctctctccctccagattcaaacgatccgatccaaaactttgagatccgagaagatgtctacgttcagcggcgatgagactgctccgttcttcggcttccttggcgccgccgccgctctcgtcttctcctgtatgggagctgcttatggcacagcaaagagtggtgttggtgtggcttcaatgggagtgatgagacctgagttggttatgaagtctagtgtccctgtggttatggctggtgttttgggtatttatggacttattattgctgttatcattagtaccggcatcaatcctaaggctaagtcttactacctatttgacggatacgctcacctttcgtctggtcttgcttgtggtcttgctggactctcagctggtatggctattggaattgttggtgatg

SEQ ID NO: 92427 - DNA, 1090 bp, Arabidopsis thaliana columbia
  unsure (1)..(1090): unsure at all n locations
tgatttgccggcannnnnnnnnnnnnnnnnnnnnnnnnnnnnnnnnncccacgcgtccgcggacgcgtgggctcaatccttgtatattcaacggagagagatctgcgagagaaagagagatcagattccggtgttccaaggaagcacatattttaagatccagaatcgcctgagagatgtctaccttcagtggcgatgagaccgctcctttcttcggcttccttggcgctgccgctgcgctcgtcttctcatgtatgggagctgcgtacgggacagcaaagagtggtgtgggagtggcatctatgggtgtgatgaggccggagttggtgatgaagtctattgtcccagttgttatggctggtgtgttgggtatctatggtttgattattgctgttatcatcagtaccgggattaaccccaaggctaaatcctactacctcttcgacggatatgctcatctctcttctggtcttgcttgtgggctagctggtctttcagctggaatggccataggtatcgttggcgatgctggtgtcagggccaatgctcaacagccaaagcttttcgttggtatgattcttatcctcattttcgctgaagctcttgctctatacggtctcatcgtcgggatcattttgtcctcccgagctggtcagtccagagccgaatgagaaaagagtgcggttcttgaagtccgcatgattctttcttccccttttcaccggtctcttcatagagccgggatcttcttatattgtttgtcaggttagtagagagacacagtggttttgttccttgtggcatgtcttctcgaaacaaaaaccacacatcatcatcaaaagcgttgttccgttttcacccttctgttatgtttgtaatgagaccgttgcggattcttctgttcccagtaagataactgtgggagaccccctatttatatcgtttatcattttcctaataaaattccagaaaaactcgatttgatcttgtttatgaaacttttttgaataaaaaaaaaaaaaaaaaaaaaaaaagggcggccgctctagaggatccaagcttacgtacgcgtgcatgcgaagtcatagct

SEQ ID NO: 92428 - DNA, 970 bp, Arabidopsis thaliana columbia
  unsure (1)..(970): unsure at all n locations
caaaaacaacaaacaaaataaataaattcaacagcgatatatcttcatctctctctctctcgccagattttcatcgactcgatttcagatttaagatctcagatacaaaactccgacatgtctacgttcagcggcgatgaaacagctcccttcttcggcttcctcggcgctgcagccgcactcgttttctcctgtatgggagctgcttatggaaccgcaaagagtggtgttggtgtggcttctatgggagttatgagacctgagttggtgatgaaatctattgtccctgttgttatggctggagtgttgggtatctatggattgatcattgctgttatcatcagtaccgggattaaccccaaggctaagtcttactacctctttgatggatacgcacatctctcgtctggtcttgcttgtggtcttgctggtctctcagctggaatggccattgggattgttggtgatgccggtgtcagggcaaatgctcagcagcctaagctctttgttgggatgattcttatccttattttcgcagaagcgcttgctctttacgggcttattgtaggaatcattctttcctcacgagctggccagtctagagctgaatgagaatctaaaccacaagactgctcaaaggtacttcctttacttctgtgtgcgttttgttttatcgtgattagtatgatgtatcatcgggaaccaaaaattttactggattcttggaaatttgtttcggaaacaaaaccgcctatcttcattctccttttcttttccggtggttactctccgatgtagaattttattgtttgattctgtaataaagaagctctgaggagtttggtatgtttttgtattcttgtatttgtcctgaggaagttaaatacatttatttgtaaagaagtttgcttttctgataccatttggtgtgaacttnnnnnnnnnnnnnnnnnnnnnnnnnnnnnnnnnn

SEQ ID NO: 92429 - DNA, 425 bp, Arabidopsis thaliana columbia
cggacgcgtgggcggacgcgtgggtttggaaattgtctttcgtcaaattctgttcttcttcttcattaaactcataactttttctgggtttttcgagaatttcttcgaaaggatcttacggtaagagaaaaggaaaattaagagggaataagaagattcatcatcattgtcatctgtggggaatctcagagcttttttttctgtagttttgttatctttctgaattctctacctgcttcaagatttcatttttattcatcgatctttggggtttagtttcaaagctgaattctttgaggtttctgaaatttgcgagctgggtttttgttgaaataggcttctgagttttggttatatttgtggataatcgattacttgatctgacctgagaaaagtagaaacctttgagtagagctggttctatt

SEQ ID NO: 92430 - DNA, 702 bp, Arabidopsis thaliana columbia
ggtcgagcacgcgtccgatttaagttctgtttcttgtttgttcactttctggccttctggggtgtttcaaaagatctgtctttttttgttctctttgatgtctctagtcttgttgggatgtgaaacacatgattttcgaggagtagagagagacagagagaaattaagggaaagagctcacttgtgtgacttgttctgtgagaaaattctctaagcaaaattctcaattttttcagcttctttctaatttatgcatattaaaattcagagcttttacacttgaaagttgtcatctttgtctcagtctctctctctctctctcgtttgcatagaagaaacaatttttgtgttgatttagtcagttcacctaatctgaagagaagttaaaaagtttggctaagatttgtctaaaacttaaaacttccttttcatggaagctcaacagcttaatctctttggcagtttccttatcttagtttctttggatctgcctttgattttctttcatttgtcttttaactgcagtttccaatttggttcatgcaggtaagagttttggctacagagcaaccatgctaacttgcgccttctcccaaaatcttatccactaatctcggtaaggaaagtgatgttggcaaaatggtgaagaaaggaagttggttttctgctatcaaaagggtttttactccacattccaaagag

SEQ ID NO: 92431 - DNA, 551 bp, Arabidopsis thaliana columbia
  unsure (1)..(551): unsure at all n locations
cnnnnnnnnnnnnnnnnnnnnnnnnnnnnnnnnnnnnnnnnnnnnnnnnnnnnnnnnnnnnnnnnnnnnnnccacgcgtccggaaaagggaaaattaccagacaagagttcttctttcttctctctgcctgcttctttttcctctcttttctctctctctctctttctttgtgaaaatctagaagaagagaaagctacaaaaatctcaacatcgagtttccaatttggttcatgcaggtaagagttttggctacagagcaaccatgctaacttgcgccttctcccaaaatcttatccactaatctcggtaaggaaagtgatgttggcaaaatggtgaagaaaggaaggcggctttctgctatcaaaagggtttgtactccacattccaaagagaagctagccaatcaggaaccagagaggaagagtggccaagaaaagaagaagaaaggtttttgggaagctaaggcatggcgagaccaattcatttcttcccatcttcagagagcctagtagtatcgaaaagatcttgggcgaggctgagagagatcaca

SEQ ID NO: 92432 - DNA, 543 bp, Arabidopsis thaliana columbia
tacgactcactattgggagagctggcacgcctgcaggtaccggtccggaattcccgggtcgacccacgcgtccgccaagagttgcctcaccacgagtcccttctccaagagctgaagttccaagaaccctttcaccaaagcctccttctccaagagctgaagttccaagatccctttcaccaaagcctccttctccaagagctgaccttccaagatcactttcgccaaagccctttgatcgatcgaagccatcatcagcctctgctaatgcccctcctactcttaggcctgcttctactcgagttccttctcagagaattacacctcacagtgttccttctccaagaccaagttcaccaagaggtgcctccccacaagccatctcttcaaagccgccttctccaagagcagagccaccaacattggacactccaagacctccctctccaagagctgcttctctaagagcagacccaccaagattggatgctgcacgacccaccacgcctagggcctccttctcactagcagacgcaccaagat

SEQ ID NO: 92433 - DNA, 1457 bp, Arabidopsis thaliana columbia
gccggccctaatacgactctacttagggaaagctggtacgcctgcaggtaccggtccggaattcccgggtcgacccacgcgtccgcccacgcgtccggagttcttctttcttctctctgcctgcttctttttcctctcttttctctctctctctctttctttgtgaaaatctagaagaagagaaagctacaaaaatctcaacatcgaggtaagagttttggctacagagcaaccatgctaacttgcgccttctcccaaaatcttatccactaatctcggtaaggaaagtgatgttggcaaaatggtgaagaaaggaagttggttttctgctatcaaaagggtttttactccacattccaagaaccctttcaccaaagcctccttctccaagagctgaagttccaagatccctttcaccaaagcctccttctccaagagctgaccttccaagatcactttcgccaaagccctttgatcgatcgaagccatcatcagcctctgctaatgcccctcctactcttaggcctgcttctactcgagttccttctcagagaattacacctcacagtgttccttctccaagaccaagttcaccaagaggtgcctccccacatgccatctcttcaaagccgccttctccaagagcagagccaccaacattggacactccaagacctccctctccaagagctgcttctctaagagcagacccaccaagattggatgctgcacgacccaccacgcctaggcctccttctccactagcagacgcaccaagattggatgctccacgacccactacgcctaagccgccttctccaagatcagacccgccaagattggatgctccaagacccactacgcctaagcccccttctcacaagatcggtttctcctagggctgtgcagcggcgggagattgtttatagtccagagccaacgcttccggtccatcatgcttctgcatcaaagattcaaggagctttcacagtgttacatggcaaggtcgagttccagagctctcaaaggtcctgtcatgacttcaaggtgtggtgagaggattacagcgcgaagcggcagacgataaatgcaatgaagtacatgcagcaagtggtccgtgttcaatcccaaatccagtcacgtcgcatcaaaatgttggaaaaccaagcccaggtagagaaagatgaagccaaatgggctgcgtctgaagctggtaatgataattgggatgacagtgtgctgaccaaagaggaaagggattctagatcacaaagaaagactgacgcaatcatcaagagagaaagatccatggcctatgcatattctcgcaagttgtggaagaacagtcctaaagtctactgaggacaatcgttctttccctcaatggtggacctgggtggaccggcagaatcctcttgctagtcctgcaccgagctatagccaaccacaaagagatt

SEQ ID NO: 92434 - DNA, 623 bp, Arabidopsis thaliana columbia
gctctatacgactcattaggggaaagctggcacgcctgcaggtaccggtccggaattcccgggtcgacccacgcgtcccgagaaaagggaaaattaccagacaagagttcttctttcttctctctgcctgcttctttttcctctcttttctctctctctctctttctttgtgaaaatctagaagaagagaaagctacaaaaatctcaacatcgaggtaagagttttggctacagagcaaccatgctaacttgcgccttctcccaaaatcttatccactaatctcggtaaggaaagtgatgttggcaaaatggtgaagaaaggaagttggttttctgctatcaaaagggtttttactccacattccaaagagaagctagccaatcaggaaccagagagaaagagtggcaaagaaaagaagaagaaaggttttgggaagctaaggcatggcgagaccaattcatttcttcccatcttcagagagcctagtagtatcgaaaagatcttgggcgaggctgagagagatcacaatcttgtcttcaggcctcctactcctgatcgaccaaatccatattcagcctctcctcctccgaggcctgcttctcctcgggtagcttccccaaga

SEQ ID NO: 92435 - DNA, 287 bp, Arabidopsis thaliana columbia
atacgactctcttagggaaagctggtacgcctgcaggtaccggtccggaattcccgggtcgacccacgcgtccgcgaaatcgatcttccgcaattcaaacttcgtctccgttaattcgcactctcgttctcgtcttcgtcgccggaggtcgtatcaagtcagcctcaacgatccgatttgttttttcagacaaaggttgattctctgggtatgagttttcttctatgagacagacatgttgtatttggtgcttaatgactaggtaatgaaggctatatgtgatagat

SEQ ID NO: 92436 - DNA, 1098 bp, Arabidopsis thaliana columbia
  unsure (1)..(1098): unsure at all n locations
ccagcatctatacngactcactatagggaaagctggtacgcctgcaggtaccggtccggaattcccgggtcgacccacgcgtccgggcgaaaatgttctacttcagcacgcattctctactcgataagaagatgatgtcaactacgatacaagccatcaagatatcaaagcaactaggcaatgtcattttttatgacttgaatctccctttaccactatggcactccagcgaagaaaccaagtctttcatacaggaagtgtggaatcttgcagacgtcattgaaatcacaaaacaggaacttgaattcttatgcggaatcgagcctactgaagagttcgatacagaaaacaatgacatcagtaagtttgtccattacccgccagatactgtggaacagctttggcatgaatatctcaaggtcttgtttgtgaccaatggcacttctaagatccattactataccaaagagcacaatggtgctgtttccggaatggaggatgttcccattactcctttacaagggatatgtcagcatctggagatggcatcgttgcaggtctataagaatgcttacggttcagccagatcttatgaacaaataaagggtacctggaacgcacagcgagatatgcaattgagtgtggtattattgatcaatggttgctggcaccaaaccgaggatatccctccaaaggataccatggagaagaagaagatgatgaagaagaagatgaagtgaatcagattccaaacggtataagatcgataacagagaaggaatacagaacctcaaagccttatgatgaaccagatggtccatacgttatgaaaccagtagaggaaagggagtacaagaagttagagcttgttggctcaatgtttgaagatggtagtttatgattttcataagatttgataatgtttctgttagtcagcttttttttcctgttcacatcttacaacatcttagtagtgtgaatttttgtcatatgttttgatatctcactcaccaaaaaaaaaaaaaaagnnnnnnnnnnnnnnnnnnnnnnnnnnnnnnnnnnnnnnnnnnnnnnnnnnnnnnnnnnnnnnnnnncacc

SEQ ID NO: 92437 - DNA, 974 bp, Arabidopsis thaliana columbia
  unsure (1)..(974): unsure at all n locations
atgatcctnnnnnnnnnnnnnnnnnnnnnnnnnnnnnnnnnnnnnnnnnnnnnnnnnnnnnnnnnnnnnnnnnnnnnnnnnnnccacgcgtccgtttttttttttggtcaaagtcttttttagaccccctttatttctaattttcccttaataaaatagtagagagtaaactataaaagcaaacaattaaattcattagcattaaaaacataacaagatctttagaaccacaataatagtttgatactaaataagtaaactcttagagaggtaagtatatataaccaactactactagagaggtaaacaaaacattccttctaaaaactttggatatccaagaacctcgcgtcggaaacaagtggcatctggatgtgctgaacttggaattcgaattcccaagatcgtgatgcgtatggcttgggtttaacggaagtggggccaaattctcaacgtaggaagatataacattaatgttagaggagagacaacgaatctcatctgtacctgaatatatttgaacagcctcttgtgattatcatagaagacaagattcccttgcttagataccgataccggcgtgaaccaccttttttgccatggccaggatacaccacctctatgggctaaacttatggagtaagccttgctccatgtgtaacgcttgctccatcctttttcttctatatccatgctccagatctctagtatccattcaggcccaactttggtcgtcatggccatggctagacggtcctcaaggttcactaattgggtatcttgcgtgacccacgtagccgggaggtggtagacaccattgaacgtttcttggtgaagatccaaggccagtattatgtaactcacactaatttgtaaccagtagattgatccattcacacacaccgatttacttcccactcgcattatatgaggaggtgacatcagtttgctccattcgccagattcaatatcaa

SEQ ID NO: 92438 - DNA, 785 bp, Arabidopsis thaliana columbia
  unsure (1)..(785): unsure at all n locations
aggtctctacgactcactatttggaaagctggcacgcctgcaggtaccggtccggaattcccgggtcgacccacgcgtggcgcccacgcgttcgccagattctctgaaatggtgttttgaggctgcatggatacttgcgctttcttatttcattgcatacttggagactattgctatcgcaaattttccttactatgagtttgtggaccgaagtgccatgtacagagttggatgtcttttctatgccatttacttcattgtgagcttcccaatgttcttcaggatggatgagaaatcaactgatgaatgggatttatctcgagtggctgttgatgctttgggtgctgctatgttggtaacaatcattcttgatctatggcgtctcttcttgggacctatagttcccttaccggagggacaaagctgccttcagtctggattaccatggttctccaattgaagattgaaagatcggttacttccacctattcagggaattgacatgggactgagagagaaacctgcaaaggaatttccattaacactttacggaattgggaagcagttaatgcagggcatgtttctaaggcttttcttctccaactgctgatttgtgtgttagttgtttttggttttcagcttctcttgatgaactttccctaatgtaaccgttcaagttatcctttatagaacagaaaaaaaacaaaaaaggggcggccgctctagaggatccaagcttacgtacgcgtgcatgcgacgtcaaagctctctataggttcacctna

SEQ ID NO: 92439 - DNA, 540 bp, Arabidopsis thaliana columbia
  unsure (1)..(540): unsure at all n locations
cgactcactatttggaaagctgatccgcctgcaggtaccggtccggaattcccgggtcgacccacgcgtgcggacagagcttcatcatccatgtattagtagaaatgtggggatgcttcttcagcagtataagtgttttggatcatcagcagcttctttaattcagagaaaccctttgttttcgtcgttggattcgaaagatgttagctactttaaggagatattaggtgaaaaaaacgtggttgaagataaagaaaggcttgagactgctaatacagattggatgcataagtacaaaggatctagtaagctgatgctcttgcccaaaatacacaagaggtgtctcagatacttgagtactgtgattcgaggcgtttagcagttgttcctcaaggaggaaacactggtcttgttggtggaagtgtgcctgtctttgatgaggtgatcgtcaatgttggtctgatgaacanaatcttatcttttgatgaggttagtggcgtctgggtgtgtgaagcaggatgcttattagaaaatctggca

SEQ ID NO: 92440 - DNA, 799 bp, Arabidopsis thaliana columbia
  unsure (1)..(799): unsure at all n locations
nnnnnnnnnnnnnnnnnnnnnnnnnnnnnnnnnnnnnnnnnnnnnnnnnnnnnnnnnnnnnnnnnnnnnnnnnnccacgcgtccgctcgttgttgagaagaagaacatcttccccactctctcccttcttcttcttcttcttcaactcaaaaaacttctctctctctctctctctctctctgaatcaattaaaaaacggttttgggttcttgtcctctgttctctagaggcttctattattctcattggtggctgttccagctctcttaaggtctccttagtgtgatctcagatctgattggtccgattctatgtttctttttattctggagatactttggtgttgtgcaaccccagacacgagacccagaaaatttcgagtctcaccttccgccatggttgacccacgacacagatgaagagctctctctgttccttgagatgcgtcgtcgcgagaaagaacatagagcagatcctcttttaacaggatctgtgattgttggattcaacgcaacggtgacggctggcgcggcagtgctctctttggngctccgaacggagtcgtctaacgttatcctccaggagaccagtgctgagactttttatattcgagaatgaaaagctgattcgattggctgctacacctccaggccggccgagttcgagacagagtccatagaagtgtaatgatcaggacgatgctcccaattccgacccccggatttantcccggctaggaactgtctgaagattctctcagggacattataagccccagcaagctttctctgagctgact

SEQ ID NO: 92441 - DNA, 204 bp, Arabidopsis thaliana columbia
gcccacgcgtccgataaaatcaatacacgagagcttttctaagaaaggcacaatcgttgcctcgtttcaagagcttttctctctctcttgaagaaaattttcgagatcgagatttagttttctgggtagtgttcttcatcgcaggccaaagtctttatacgatggttcaggagtgagctcgttactcttcgccgtcaacggtgg

SEQ ID NO: 92442 - DNA, 526 bp, Arabidopsis thaliana columbia
cggtcccgaaattccgggtcgacccacgcgtctgggaacgcgtggggtttcggggtaatactttgggaactagcaacattgagattaccatggagaggaatgaacccaatgcaagtagttggagcagttgggttccagaatcggcggcttgagatccccaaggaacttgatcctgtggtgggaaggatcatcctggaatgttggcaaacggatccgaatctgcggccgtcatttgctcagctgacggaagtgctgaagcctttgaaccggcttgtacttcctacaccacaatagatgtcatctgtgtgaatatgtgaaagaaaatttggttaatgtatactatttgacctctggtgctgcgcagagttattatacataagccagcctagaattgaggaatgtaaatgaaatcaatgtacactatactacgttttgatgtaaaaaaaaaaaaaaaaaaaaagggcgcacgctctagaggatccaagcttacgtacgcgtgcaggcgacgtcataactcttctatagt

SEQ ID NO: 92443 - DNA, 1100 bp, Arabidopsis thaliana columbia
  unsure (1)..(1100): unsure at all n locations
nnnnnnnnnnnnnnnnnnnnnnnnnnnnnnnnnnnnnnnnnnnnnnnnnnnnnnnnnnnnnnnnnnnnnnnnnnnnnnnnnnnccacgcgtccgcctctctatctctctctaagtatcagcaaaaaaacagagatttatagagagagaaaaaaactatggctcacataaagatctaacagagacagtagtatagtcccacttccccaccaccaaagcttcgatcatcatcatcatcatcatcatggatccggatccggatcataaccatcgacccaacttccctctccagcttcttgattcttctacctcctcctcttccacttccttagccatcatctctactacttccgaacctaactccgaacctaagaagcctcctcctaaacgaacctctactaaagaccgacacaccaaagtcgaaggccgaggccgtcggatccgtatgcctgccatgtgtgctgcacgtgtctttcagctcacacgtgagcttggtcacaaatccgacggtgaaactattgagtggctactccaacaagcagaaccagcggttatagccgctacagggactggaaccattccggctaacttcacttctttaacatctcacttcgtagctcaagatcttctctctctgctgctcatcctcgtacaactcctagtagctattactttcattcaccacatcagtccatgactcatcatcttcaacatcagcatcaggttcgtcccaagaacgagtcacattcttcgtctcttcttcttacagcttttagatcacaaccaaatgggtactatctagtccattaactgctggatctttacctacagggtcaagagtcctgcaacgggaaccggttttggagtaggtggtgncaacacacaggaatcttttggggttttaaaaattaatccncaataattccgggtgtttttggccgggggatgttttaaaaccccaacaagtgggtggnaggtggcggcggangtgggggncatttnntgnattttgnaggnccattgnttttgtttttggnanctttggtntgggtntgggggggnggngtnnggggggncangccttntgggttntngggttttc

SEQ ID NO: 92444 - DNA, 914 bp, Arabidopsis thaliana columbia
  unsure (1)..(914): unsure at all n locations
nnnnnnnnnnnnnnnnnnnnnnnnnnnnnnnnnnnnnnnnnnnnnnnnnnnnnnnnnnnnnnnnnnnnnnnnnnnnnnnnnnnccacgcgtccgggatgatatatccggccagggtttgattctccgatctgcttgttttcgtgtacccttctttaaagttttaatctttcactcgaattttgagaagctaagctcgattcaagagcaagttcctagcttctgtttagggttttaggacttttgtaggattctggtacagttttcagtatctataggctttgttgtgttctacgtggtgtagatatggagtcttatgtgttcttgttagtgattgttccgacatttgtccttgctgatttgttgataatgtctgatgttgatgagatcccgagtagacatactgtaaaccttttgagatggtgcaatgagattacgcagatccctcatctacggctcaagaacagtctttattcgtttgagttccttcttgataacaagagctggagagcttccgtgcacaggtttcagatgggtaaaacacgttatgctcattacccactatctatctgatgatatcttggctgatgcaggatggcattgcacggcgtatcaacgagtttatattcaagatgaaagcttatagtcattactcattatgataagagtgaggtttgggcatttctttgaaccaagaaacatatgtattgaatgagagcatactaacatttctcaaattattttgccacaatctgaaatgaacacagattagtattgacaattgtatattatagaaatgaaagagttattaagaacctaaannaaaaaaaaaaaaaaaaagggnnnnnnnnnnnnnnnnnnnnnnnnnnnnnnnnnnnnnnnnnnnnnnnnnnnnnnnnnnnnnnnnnnnnnnnnn

SEQ ID NO: 92445 - DNA, 797 bp, Arabidopsis thaliana columbia
  unsure (1)..(797): unsure at all n locations
acgcgcacnnnnnnnnnnnnnnnnnnnnnnnnnnnnnnnnnnnnnnnnnnnnnnnnnnnnnnnnnnnnnnnnnnnnnccacgcgtccggcaagagttttgaagatctgatacagaaattttttctcgggaaaattcagagggaagatcgatactttccacaacggagaaggtgtttcgtttctgctgatcagcagattacttcttctttttctcggattgatccttttggattcttcgaaagatggaccctaataatcagatacaggcaccagttgaaaattatgcaaacccaaggacatgtcttttccatgttctcttcaagggtgctgcgttggcgttttacattctctctgctctcttcttcaacagctttgtcatcatctttgtagtcactgttcttcttgctgctcttgacttctgggtggttaagaatgtcagtgggcgtatactggttggtctcaggtggtggaacgagatcaatgacttgggagaaagtgtctggaaattcgagtctcttgatcaggagtctttggctcggatgaacaagaaagactcatggcttttctggtggacactttaccttgcagcagctgcatggtttatccttggggtattttctctgattagatttcaagcttgactatctgcttgttgttggcgnttgcttgtccctcaatgtggctaatatcatccggcctcacaaagtgcaagaaaggtgcaaagaaacattctcagcagtttgcttcgcagacaatcgcatcacggttcccatcaacagtacaatctggcctcaccc

SEQ ID NO: 92446 - DNA, 457 bp, Arabidopsis thaliana columbia
cgactcactatttggaaagctggtccgcctgcaggtaccggtccggaattcccgggtcgtcccacgcgtgcgttcacgcgtccggacacgtatagatttggttgcagcttcccatctttacttgaagtatgtggtgcagagaccgttaccatagaagacattagctccatgagtcaggattctcagtttggagagattaatcgcatgatatgtgtcatcccaaatagtgcaggagacttatttggccgtttcaagcatctcagtttgttatctagagtgaacgagatggatttagtatgcgccgtcttttccggaatctaccttcgacttcactgataccacccatccgttgtaatttcattctcgtgctctacagatgagacagtggtagcggattctgaagccgaagaggaagaaacaacatcgtctgttcatatgattgatgctactgaaaggc

SEQ ID NO: 92447 - DNA, 644 bp, Arabidopsis thaliana columbia
tctatacgacttacttagggaacagctggtacgcctgcaggtaccggtccggaattcccgggtcgacccacgcgtccggttccatttattaagctctcttcacgctttttaagataattaacagtcacgggttctaaaagctaaagggttttgcttcgaattcaagtgtctcccttcactttctctctctctattgctgctctgtttctgctgtcaattccctaagaaagtcctgatttttagggtgatcgagagaagttgaagaatcatgtttattgagtttccttttttgatccatagggtcatctaattttgctaattttattgtcatctccttcaggtaagggattgttgttgccaatggggtggctaactaaaatccttaaaggttctagccataagttttctgatggacaatgtaatgcgaagatatagagaagatagaaactcggaaggtcctcgttattctgcggaaggatctgattgtgacacagaggagattgaatgtgctattggactttctctttctgaacaagacatggcattgcacaagatgacaaaggaagaaaattatccaagtccaatctgaaaccgaagaagatgacgatgacattgacgatgaggatgagtatacatgaaaccca

SEQ ID NO: 92448 - DNA, 570 bp, Arabidopsis thaliana columbia
  unsure (1)..(570): unsure at all n locations
nnnnnnggggacgagattacaagcaccaatncanctccatcaccattttcaaannctncnnaaaattggctgctttcccccgcgcccgctccagcaccggacctagtcaaaaagtctttcttctcaaatggatcaaaagcctcttggattgctcacgatccacgtcaagagagggattaatctcgccattcgcgaccatcgtagcagcgatccttacatcgttctcaacgtcgccgatcagacattgaagacacgtgtggtgaaaaaaaattgtaacccagtatggaatgaagaaatgactgttagcgttcaaagatcctaatggcccaatccgctcgacagggtccgatcgggacacgttcacaggagatcgacaaagcgggagatgcgaacatagacattcagccatactgagaggctctgaatatggcgatggagctttcgaggctccctactgagggtgctatgactagggttaaaccatcatggcacattcgttaatctgatgacagaagcattggtaggaacagtggtagaatcacccaagacttgagccttagacttaacatt

SEQ ID NO: 92449 - DNA, 1028 bp, Arabidopsis thaliana columbia
  unsure (1)..(1028): unsure at all n locations
aggcnnnnnnnnnnnnnnnnnnnnnnnnnnnnnnnnnnnnnnnnnnnnnnnnnnnnnnnnnnnnnnnnnnnnnnnnnnnnnnccacgcgtccgcggacgcgtgggggacttgaggtcgctgggaggcagcttaaacttgcaccaacctgtccagagggtacaagtttctggccacagttcgcttcagatgatggtgagggggcgtctacctaaatggcttttaataacctatcatcagctcacatggggagacatttcccaggaatattagcttcaacctccattgatggtggatcttttcgaggtatgcacaattctgttgggtcacctatgaactccttcattgaacgtcatcagagtctcgatgttcctattggtttgccaccatcgcaagagtcatctcagctagcaagcctgttggtcttaaggagttgggaaacccatttgataattcgaaaacggggatccaaagtatgccaaatctccatcctcattttcctgattaccttgacaactttgcaagcggtagtccatataaatcctctacgacattctctgaaatggtaagcgatggccaaaaagcaaatgagggctttatgatgagcaatgttcgtggagtgggagtagatggattaatggaggtgcataggatctccataatcaaggatcccatcgtggtaactcaacttatggagtactctaacagccagaacataatcagtcaagtgggatgatggggcctaactaccatctcgcgtaacggggttccctctagcgcatccactgttatgcattctctaaccattgctttaatggaacatggatatcccctgtgcccaccacttgatctgccccggtattaaactcacctttttgggatagaagacaggcatatgtagctgaatctccagaatcttcaggatttcacttaggttctcccggtagcatgggatttcctggctcgtctccctcacatccactggcttttggttctcataaggttttttatcatgtcggtgggaatcgca

SEQ ID NO: 92450 - DNA, 811 bp, Arabidopsis thaliana columbia
  unsure (1)..(811): unsure at all n locations
atgatttnnnnnnnnnnnnnnnnnnnnnnnnnnnnnnnnnnnnnnnnnnnnnnnnnnnnnnnnnnnnnnnnnnnnnnnnnnccacgcgtccgtgcggctgcgagaagacgacagaaggatacggctgcgggaagacgacagaaggatacggctgcgagaagacgacagaaggggaccgaggaagatgatgaagtggtcgatcgttaagagaatccccgtctatggaggttccttcatttctatgaaacatatgatgttagttccagctgatttgagctggagctgctcgttctctggtatgcactctttgataaacactggagaagaagacgaggaagaactcttgaagaagatcgttaaccatagtgaaagtggttcaaagatcatcagcaaaatcgattatacgaatcttgttgagaagtttacaagagatggaaatctctctggagcatatgacttgttacagtctttacaagaaaagaacatatgtttgcctatttcggttttcaagaaccttcttgcagcggcgggtgagctgaacgatatgaaagcttcttgtagaagtcttcagaagaggtctttgatctttgccggggtaaggaaccattgagttcagattgtatctcaaccttgctagagcattcattaacacggatgattgcacgtatttgacgagtctgcttaaagagatatcagagtcttcactttcgtataggttaatagtaatgaacagaatcatctttgcatttgctgaaactagacagatcgattaaggtcttatgatactaaaggagatgaaagagtgggaatg

SEQ ID NO: 92451 - DNA, 656 bp, Arabidopsis thaliana columbia
  unsure (1)..(656): unsure at all n locations
nnnnnnnnnnnnnnnnnnnnnnnnnnnnnnnnnnnnnnnnnnnnnnnnnnnnnnnnnnnnnnnnnnnnnnnnnnnnnnnnnnnnnnnnnnnnnnnnnnnnnnccacgcgtccgtacgcatgcgagaagacgacagaaggggcccgattcgagagtagcaatggggattctatcatggttcacgggaagtcctaagccatcacagtccgagacgtctaagccggagatgattcagatgccgaaatcagaaactccagccccggggatgaatggagccatagaagttcctcggcccgatcgcgcgacggttttcgagttcggctccgttgctgctactggagacagagtcactctcgctggttactgtcccgtttccgatgatctcgaaccttgccgttgggagattcttcccgccgacggcaaagacgctccacagtttcgcgtcgtcttctgaggaatcagtcaataatctgtagaagatgtaaacttgttcaatctcgtcgttgataattgtatttggtctggtaatgtcatctctttcatttgaaatcggaaaaaaaaaaaaaaaaaaaaaaaaaaaannnnnnnnnnnnnnnnnnnnnnnnnnnnnnnnnnnnnnnnnnnnnnnnnnnnnnnnnnnnnnnnnnnngttcaatt

SEQ ID NO: 92452 - DNA, 428 bp, Arabidopsis thaliana columbia
gcgtttcactgctgttgagctcttaaataatggtgctaaggtttaccaatgtgaaagatgcaagcagaaagttaaggctaagggacagctaactgtttctaaagcaccttacgttctaaccgtacatctgaagcggtttgaagcacacagatccgaaaaaatcgataggaaagtagattttacctctgcaattgacatgaaacctttcgtcagaggtcctcatgaaggtaatttgaagtatactctatatggcgtgttagttcattatggtcgaagcagccattctggtcactacgcctgctttgttcgcacatcaagtggcatgtggtattcccttgatgacaacagggttgtccaagttagtgagaagactgtgttcaatcaaaaggcatatatgctattctatgttcgggatagacaaaatgctg

SEQ ID NO: 92453 - DNA, 1089 bp, Arabidopsis thaliana columbia
atggcaaggtcaccttgttgcgagaagaacggactcaagaaagggccatggacatctgaagaagaccagaagcttgttgactatatccagaaacatggttatggtaactggagaaccctccccaaaaatgccggtacgtgtttgcaaagatgtggcaaaagttgtaggttaaggtggactaattatctccgaccagatataaaacgaggaagattctcttttgaggaagaagaagccattattcagcttcatagcttcttaggaaacaagtggtctgcgattgcggcgcgtttgccaggaagaacagataatgagatcaagaacttttggaacactcatataagaaagaagctacttagaatggggattgatccagtgactcacagtccacgactcgatctcctcgatatctcatccatcttagcttcatctctatacaattcatcttcacatcacatgaacatgtcaagactcatgatggatactaatcgtcgtcatcagcaacaacatccattggttaaccccgagatactcaagcttgcgacctctatattctctcaaaaccaaaaccaaaaccacaaccaaaatcaaaaccaaaaccaaaacctcgtggtggatcatgagaagcaaacagtttatcatcatcatgatgttaaccaaaccggagtaaaccaataccaaaccgaccaatatttcgagaacgcgattactcaagaactccaatcttccatgccaccattccccaatgaagctcatcagtttaacgacatggatcatcacttcaatggttttggagaacaaaatcttgtttcaacttctactacgtcagtccaagattgctataatccgtcattcaacgattattcaagttcaaattttgtcttagatcattcttattcggatcagagcttcaacttcgcaaattcggtcttaaacacgccatcctcgagcccgagcccgactacgttaaactcgagttacatcaatagtagcagttgcagcactgaggatgaaatagaaagctattgcagtaatctcatgaagtttgatattcccgatttcttggacgttaatggttttattatataa

SEQ ID NO: 92454 - DNA, 904 bp, Arabidopsis thaliana columbia
  unsure (1)..(904): unsure at all n locations
cccaagcgtccggtgaggtgctacaagcatgagaagctatgggaaggcatccagtcgcttggaagtctcgaagagatggatctgtcagaatctgaaaacctgacagaaattccagatctttcaaaggccaccaagctcgagcctttgatatctcaacaactgcaaaagtttggtgacacttccttctacaattgggaatcttcatagattggtgaggttggaaatgaaagaatgcacagggctggaggttcttccgaccgatgtcaacttgtcatctctcgaaaccctcgatctcagtggttgctcaagtttgagaacttttcctctgatttcaactagtatcgaatggctctatctggaaaacaccgccattggagaagttccctgctgcattgaggatttcacgaggctccgtgtactactgatgtattgttgccagaggttgaaaaccatctccccaaacattttcagactgacaagtcttgtgctcgccgactttacagactgtagaggtgtcatcaaggcgttgagtgatgcaactgtggtagcgacaatggaagatagcgtttcttgtgtaccattatctgaaaacattgaatatacatgtgaaccgtttctggggtgagttgtatggtgaatgggtgattgggacttagggacctgaatattttagcttccgtaatttgcttcaaaattnggtagagatgcncgaanacctcattcctaccggtcaatgctcaaagcctttngccttaccagggngnngaatccctaaggatttcacggatncggnttnttgngnntcccnaacctgcactttnccccgggggntttttntcaaacctctttcngtttaagntttcnncgtggttacccccttcnagggaaaggntttntcgatttc

SEQ ID NO: 92455 - DNA, 429 bp, Arabidopsis thaliana columbia
  unsure (1)..(429): unsure at all n locations
atgatacannnnnnnnnnnnnnnnnnnnnnnnnnnnnnnnnnnnnnnnnnnnnnnnnnnnnnnnnnnnnnnnnnnnnnnnnngccacgcgtccgcccacgcgtccgcggacgcgtgggctttaactggtggaatgctggtctatgcgctggtattttaaccgcggtgactgtaattgtctatatcgaagaccggattggttggggtgtggctagcatcatactcacaatagttatggggctacttcgttttttatcttccgcatcggcaaaccgttttaccggtattagagcaccttctggtagcccattgaccccaatgttgcaagtctttgtcgccgcctttgccaaaagaaatcttccttggcccagtgatgcttctcttcttcatgagttaactaatgaagaggatactaaagggccggttcttt

SEQ ID NO: 92456 - DNA, 630 bp, Arabidopsis thaliana columbia
  unsure (1)..(630): unsure at all n locations
taggtgcacactatagaagagtctatgacgtcgcatgcacgcgtacgtaagctcggaattcggctcgagctcgagccgttcagtgttctcttcttctccactaattcagatcacattcaagaatcttcttcactcacatctctgaaaaaatggcgagcaacatggaagttttctgcgagatcttaatcgcgatccttcttccacctcttggagtttgtctcaaacgtggctgttgcactgtagagttcttgatttgcttggtgctgacaatcttaggatacatcccagggataatttatgcactatacgtgatcgtgtttcaaaaccgtgaaggctctaccgaacttggagctccacttaactcagcttgatctgttttggtccattacacggatcaatatgttgttgaaactgttttacttatcatgtaccaaataataagttgctttgcaatttttatgtattgaagatttgagaacattgtcgcgttattgatacaaaaaaaaaaaaaaataaaggnnnnnnnnnnnnnnnnnnnnnnnnnnnnnnnnnnnnnnnnnnnnnnnnnnnnnnnnnnnnnnnnnnnnnnnnnnnnnnnnnnnnnnnnnnnnnnnnnnnnnnnnnnnnnnn

SEQ ID NO: 92457 - DNA, 833 bp, Arabidopsis thaliana columbia
  unsure (1)..(833): unsure at all n locations
gnnnnnnnnnnnnnnnnnnnnnnnnnnnnnnnnnnnnnnnnnnnnnnnnnnnnnnnnnnnnnnnnnnnnnnnnnnnnnnggtacgcctgcaggtaccggtccggatccccagggcgacccacccgtccgcccacgcgtccggtttacagggattggtattggtaaagaagatgattggatcgttgtagtcctcactaccaacacaccagaaggaagctattctacagctactcctacaaaacaagagtctaagtggcttcacctttgggattggtctcgttagttatttagtcattttcatgtactcttcctttggtttctttctcttttgagatatcaaatgttttgatgagttatcaaacactctttcctttagactatcaagaataaattctgtttagaaaagaaaaacatggaacaagagattgtaattagttacagccgaaaggaggccaccaggaagggcggccgatctcaaggatcccagctaacgtacacgagcaggaaacgtgaaggttttctataaggaacctagatcaaatcgctgcccgtggatgtacacgtggggaccgggaaaaccttgacgggccaaataaatagacgtggaaaagaccacctttgaccgcgggggatataacaaagaaggccgcccggtccgcactccaacaaggggacaacctaaaagggaaggagccgccccgaaccggccctttaagaaaaaggagggagggggccccaaagaaaacccgaacataccggggagccagagacaggcgtaaactgaataaaatattataaaaagcaagaaaggaataaacgataacgtaaagacg

SEQ ID NO: 92458 - DNA, 810 bp, Arabidopsis thaliana columbia
  unsure (1)..(810): unsure at all n locations
nnnnnnnnnnnnnnnnnnnnnnnnnnnnnnnnnnnnnnnnnnnnnnnnnnnnnnnnnnnnnnnnnnnnnnnnnnnccacgcgtccggttcaaagatttctttgtaaagttggaggactatatggcctgcttcaagttggtatcacccgaatcaaaattcgagatggcagtgaaatcggataagctcttcacggctatgatttcattggatggtactaaaggcggatcagtggattcgtggaggatgcttgatggtatgttgtcaatgggaaaagttttggttgatatcaagaagagcggttccaaggagataacttttgaacagagaagagatctgatcagctctatggtgaaatgggctagagctatcggcctattcgtgaaggcggcctctgagcgtaaaggaaaatctattgatctagcaccttttggaattgattatgaaaacaatgtcggaaatggaaaaggtaactttagaaccggccctgttctcatagacgacggcagcgagctctaatcttccaacgaaaaaggctcccaagtaaacaagaaatatgtaacaatatatggagacagccctgctttgttaaacagcagcgtgctgtagaacatttttggttattgtaaaaactatattaatcatattactaaaataaaattattacaaatcttaactcgttaaaaaaaaaaaaagagggcggccgctctagaggatccaagcttacgtacgcgtgcatgcgacgtcatagtaatctatagttcgtctcaatnnnnnnnnnnnnnnnnnnnnnnnnnnnnnnnnnnnnnnnnn

SEQ ID NO: 92459 - DNA, 540 bp, Arabidopsis thaliana columbia
  unsure (1)..(540): unsure at all n locations
atgannnnnnnnnnnnnnnnnnnnnnnnnnnnnnnnnnnnnnnnnnnnnnnnnnnnnnnnnnnnnnnnnnnnnnnnnnnnccacgcgtccgagcgaatctcagatccaaaattttgcaaaatcctcagatcgtcttaccttctccgaatcgatcgatttttcatggaggacgacgacgagattcagtcaattccatctccgggagattcttccctttcaccacaagctcctccttctccgccgattttgccaacaaacgacgtgacggtggccgtcgtgaagaaaccacaaccggggctttcttctcaatctccgtccatgaacgctttagcgttagtgggtcatactccttctgtaaccggtggtggtggtagcggaaacagaaacggacgaggaggaggaggaggatccggtggtggtggagggaggaagagatgatttgttgaacnaangaagctacaataggttcttatcgaagcttgggggagatcgattcttctgaccaggctaaggaactgtgaaccaacacatatgaaagag

SEQ ID NO: 92460 - DNA, 862 bp, Arabidopsis thaliana columbia
  unsure (1)..(862): unsure at all n locations
nnnnnnnnnnnnnnnnnnnnnnnnnnnnnnnnnnnnnnnnnnnnnnnnnnnnnnnnnnnnnnnnnnnnnnnnnnnnnccacgcgtccgcccacgcgtccgactttcttctctcttctcaaaaacccttccctcttcgtctccaaacaacaacaaacacaacaacaacaaaaatcttacaagaagatcatttttagaaaccctattaggataaaatggattacgaggcatcaagaatcgtcgaaatggtagaagatgaagaacatatagatctaccaccaggattcagatttcaccctactgatgaagaactcataactcactacctcaaaccaaaggttttcaacactttcttctctgctactgccattggtgaagttgatctcaacaagattgagccttgggacttaccatggaaggctaagatgggagaaaaagaatggtatttcttctgtgtgagagaccggaaatacccgaccggtttaaggacaaaccgggcgacagaagccggttattggaaagccacaggataagacaaagagatattcaagggaaaatcacttgtgggtatgaagaaaactttggttgtctataaaggaagagctcctaaaggagttaaaaccaattgggttatgcatgaatatcgtttagaaagcaaatattgtattgaaaatcttccccaaacagctaagaacgaatgggttatantgtcgtgtnttccaaaaacgtgccgatggtacaaaggttncaatgtcaatgcttgatccacacattaaccgaatggaaccagccggtttaccttcgttaatggattgttctcaacgagacttcttcaccggttcgtcgtctcacgtgacctgcttc

SEQ ID NO: 92461 - DNA, 591 bp, Arabidopsis thaliana columbia
  unsure (1)..(591): unsure at all n locations
tgagatcaatgaacaaactgagaacatgaaacagatccaagaagcattgtcggctccatttggggctaatgattttgatgaggatgaattggaagcagaacttgacgaactagaaggcgctgagctagaagagcaacttcttcagcctgttccaatccatgtgcctcaaggaaacaagcctgctcgtgctccagctcagaagcaacctactgctgaggaagatgaactcgctgccttacaagctgagatggctctctaagctgaagctagccttggaagatttcgattaagtggggagatttgtgtgtgcattatctaaaaacagaaagaaaagattttatgtatataaggatccgagtctaattgatcggaagattttttttttctttttcaatataattaacttattaaactgcatttgaatgtttcttttacatttgtgtcagctctttatgacactttcttgtgggttacgacttggcactttctgttcttaaaaaaaaaaaaaaaaaaaagggcggcagctctagaggatccaagcttacgtacgcgtgcaggtgacctcatngatcttctatagnnnnnnnnnnn

SEQ ID NO: 92462 - DNA, 1047 bp, Arabidopsis thaliana columbia
  unsure (1)..(1047): unsure at all n locations
ccgccacctctaatcgactcacttagggaaagctggtacgcctgcaggtaccggtccggaattcccgggtcgacccacgcgtccgcccacgcgtccgtagacccagagagagagagagagagagagagagagatcagtaacgagagagtcaaagagaggagatttcagtgaagatgaaggagatgcaggcaatagagacgtcgcagccgacgacggtggctccggcggtgcatagccgacaattgggagctcagttgtcgggaagtatgagtttcagcagccaaatgtcgaaggaagatgaggagatgtctagaactgcgttatctgcgtttagagcgaaagaagaagagatcgagaagaagaagatggagattagggaaagggttcaagctcagcttggtcgtgtcgaagaagagactaagcgtcttgctttgatccgtgaggaacttgaaggattagctgatcccatgaggaaagaagttgctatggttaggaagaagattgattctgtcaacaaagaattaaagccattgggccatacagttcagataaaggaacgagagtacaaagaagctcttgaagcattcaacgaaaagaacagggagaaggtgcagctaatcaccaggctaatggagttggtgggagaaagcgaaaagatgagaatgaagaagctggaagagctaagcaagaacatagattctatacactgactttgaatccaagacagtacaagaacttcttgggccagagatcattctctgagtggtttaactctacgtttagggttggtggtgggggatggaatttatattttataatcgtgcgggtgtatattactactacaattattatctcttgtaagggggttcttggggaatttataagtcgtattgtggtttttttatggaagtaacttcaaaaaatacttatcaagaacagggttgtactaaacgcttcttcttctttcctctaactatcttctctcttatggcccncnttaattggccctttcnaatgnntttttancttaacccccnttttaaacct

SEQ ID NO: 92463 - DNA, 1403 bp, Arabidopsis thaliana columbia
  unsure (1)..(1403): unsure at all n locations
aacaaaagcggaacctccaccggggtggcggccgctttagaactagaggatcccccgggctgttttttattttgggccgcattttgatagataatgtcagaatgtgcaggacgctcatgcctggagatgaagaaactatgagtgatgaagccatatgggaaacacttcctcatttctgggtttccatatctatggttttcttcattgccgcaacaaccttcccacgcgtccgattatgtggtgacgtagctgcgttgggatggtgggacttatttataaacttcggaatagcagagtgctttgcgtttcttgtctgtacaaagtggagcaatcagtcaattcataggtattcacatataccggaacctagctcatcttcaatggtagtaagatatctggattggaacagaggtctagtagtaaccgctgacgacgagcatcagcaaagcaacagaatatgtggtctccaagatattggtggacatgttatgaaaattccatttgtgacctttcaaatcatccttttcatgcgcttagagggaacgccagcttctgccaaaaacattccgattttagttctgtttgtacctctttttctgttacaaggagctggggtactttttgctatgtatagattggttgagaaatcagtcttattaataaatagtggtagtggttcttatggaagatattttaccgcaacatcatcagctcgtgaattcctgggattctttcaacatggtgcaagattacttggctggtggtctatcgatgaaggaagtcgggaagaaccaagcaggctctactctggagaagctactggatacaacaccttctcaccagaggttgtgaagaaaatgccaaagtctgatcttgttgaaggatatggagacttcaagctgcattgagtgagcaaacagatatcaccagttatagccagcaagagtacgaaaggcttcaaaacgagaagattctttgtagagtttgctttgaagatccgatcaacgtggttctactcccatgtagacatcacgtcctctgcagtacatgctgcgagaaatgcaagaaatgtccgatttgtcgtgtcctgatcgaggagcgtatgcctgtattcgatgtgtagatttcagagctccaatccagaaatgaagaacccatttcttgcttgtttggttttgttttagtaatgaagcaagccctatatatatatatgttacaccttgcataggaaaaattctgattcgttttcgagtggatgtaaataattctgtaaaccatcgcatatgtcatgaatcttctttctctcaaaaaaaaaaaaaaagnnnnnnnnnnnnnnnnnnnnnnnnnnnnnnnnnnnnnnnnnnnnnnnnnnnnnnnnnnnnnnnnnnnnnnnnnnnnnnncg

SEQ ID NO: 92464 - DNA, 550 bp, Arabidopsis thaliana columbia
aggtctctacgactcactatatggaaagctggtccgcctgcaggtaccggtccggaattcccgggtcgacccacgcgtggggctcctctcaccatttcttcttcttcttctctctaaaagaaaagagacttcaccgattcttttttattattccttcccagattttctcgggaaattaattcttttcctcctctttcttctcacttgttgttgttccttaacactctcttcctagatctactattaactgatttcatttcacgactaaaccatcgaagtcttcggcaagatatggatttgtttctgttctattaaacttgtttcaatcgagaagtaaaaaagaatccgattccacagatggaactatgtgctgtggatcagaccgattaaaccagatcgtgtcatcaagatcttcgttgccaatttctttcgaggaagataacaatcttgttaccaacacagacatgaatcacttaacagtcgaaacagaggatacgtttgcgagcttgcttgagcttgcagctaacaacgatgttgaaggtgtaaggct

SEQ ID NO: 92465 - DNA, 544 bp, Arabidopsis thaliana columbia
agctctctacgacttcacttattgggaaggctggcccgcctgcaggtaccggtccggaattcccgggtcgacccacgcgtgcggcaggagccgccagtttctcggagatcctcgagattgaagaacgctacaccagtttcctacgcagaggaacctgaactgaagaagggtaaagtgtctaaagaagagattgttttgtgggtaggagaaggcgtaaggccagagatttacactgaggagcatgagaaactgttaggtaacacagaacgaacttgggagctttttgttgatggttgtgacaaaaatgggaaacggatttatgaccctgttagaggaaagtgttgccaccagtgcaggcagaagacgctaggttatcatacccaatgcagccagtgtaaccattctgttcgaggtcaattctgtggagattgtttatacatgagatatggagaaacatgttcttgaagctctggacaatcccgactggatttgtccagtctgtcgcgatatctgcaactggcagtttctgtcgtacaaaaaaagg

SEQ ID NO: 92466 - DNA, 431 bp, Arabidopsis thaliana columbia
acgcacacgcgtccgccagagatctttctctctctctcatccaaagacttcacgagtccccaaagaaaaaaaagaacctattcccaaagatgaagaacaataacaacaaatcttcttcttcttctagctatgattcttctttgtctccttcttcttcatcctcctcccaccagaactggctctctttctctctctccaacaacaacaacaacttcaattcttcctcaaaccctaatctcacttcctccacatcagatcatcatcatcctcacccttctcacctctctctctttcaagctttctccacttctccagtcgaacggcaagatgggtcaccgggagtttcacccagcgatgccacggcggttctttccgtttaccccggcggtcctaaacttgagaacttcctcggcggaggagcctcaacgacg

SEQ ID NO: 92467 - DNA, 767 bp, Arabidopsis thaliana columbia
  unsure (1)..(767): unsure at all n locations
atgatctnnnnnnnnnnnnnnnnnnnnnnnnnnnnnnnnnnnnnnnnnnnnnnnnnnnnnnnnnnnnnnnnnnnnnnnnnnnccacgcgtccgcggacgcgtgggtgaagaggcagagaacaagagacgtgttgatgatagatgatactatgaaagatgttccagaaccagaagatggcattgatgagaaagtctctcaggaatcttcaaagcctggagatgcgagtgaagaaactaatgaattggatgcagagcagaaaacacccacgttagagaccgccattgaagaaagatgtaaagatgaggctgacgaatacattgctctgaaagctctcactgaagcttttgaggatgtcggacatttctccgcacctgaagcctctttttcctttgctgatttaggaaaccctgtcatgggactggcagactttctagtgagattgagcagatctgatgttgctactgcgtcagctcgggcttacattatatctcttcacagcagttctgggatgctgctggccacacgacattgttgtattctggatgatccacncgacgagcagagggatccaacctaactacagagttcgcaggctgatgcagaggggaatgatgataattcccatagagatgatcaggcagaccaataaggcagcattgcagaagaggtctccttacattcagagataggggaatgccagatactgattcaggcaaagaatctcaggattcaagtctctgaagaagagacactccggtctcgaact

SEQ ID NO: 92468 - DNA, 840 bp, Arabidopsis thaliana columbia
  unsure (1)..(840): unsure at all n locations
nnnnnnnnnnnnnnnnnnnnnnnnnnnnnnnnnnnnnnnnnnnnnnnnnnnnnnnnnnnnnnnnnnnnnnnnnnnnnnnnnnnccacgcgtccgcagatcttccttcttcttcctcttcctcttcttcttccttaaaccctacaagcttctactctattgacaatttgattccgagtttacatcgataatggcggaccaaacctccgattcaacatctcccgtggctcctctctccgtatcttctcctactgctactaagaaagataataccaatcctgttgattcgaagctcacggaattgaatgaatcaagggctgagttactaaacaggatccagaatctgaaacaggacttgcaaagttggagaggtaaattggacactcaagttaaagtctaccgtgaggagctctctgggctaaagaagactctgaatcttgaagttgagcagcttcgtgaggtatgaattcaaagatctgaaaactaccttgaatcaacagcaagatgatgtttccgctagcctgaaaagcttaggcctacaagattcaaaagagcaaattgataagagaagtgaggtgacagaagagaaagtggaagctctatcgactgatgataatgccaaagaagcagaacattagataatatgaaattgtttgttcttatgatattctcgccactactgttaccactaccttgagattgtactagtatgcttaatatgtagttccgcggtttagttgaaaaaaaaaaaaaaaaaagnnnnnnnnnnnnnnnnnnnnnnnnnnnnnnnnnnnnnnnnnnnnnnnnnnnnnnnnnnnnnnnnnnnnnnnnnnnagaaaacg

SEQ ID NO: 92469 - DNA, 422 bp, Arabidopsis thaliana columbia
agaaaaccgaagatcccgagaactcgtacgcaagtttttcagggacttttggctcgcgccaggattacgggttcgaataacgatgaggctcgtggttcttgtaagaagtgtggccgtgttgggcatttgacgtttcagtgtaggaatttcttgagtactaaggaggataaggagaaagatcctggtgcgattgaagctgcggttttgtcggggttggagaagattaggagaggtgttggtaaaggtgaggttgaggaggtgagtagtgaagaggaagaggagagtgagagtcctgattctgatgttgattctgagatggagaggattattgctgagaggtttgggaagaagaaaggtgggagtagtgttaagaagacgagttcggttaggaagaagaagaagcgtgtttctgatgagtctga

SEQ ID NO: 92470 - DNA, 451 bp, Arabidopsis thaliana columbia
ctcaatctcaatctcacgtcaacgaccgtcgccgtcaccggaaggaaacgatttcatcatcttctacaatgatcccatacgctatcattcgaagaagcgtcgatcgcattagcgcgaaacctcacatggctagagactctctggttcgattactccgccaccaaatccgattactacctctactgccacaacattctcttcctcttcctcaatcttctctctcgttcctctccctctcgttttcatcgaatcatctcaatccaacctcagatttgtttcaatcgctacaaaatccaaccaaaagtgaaaaactcatttctcatcgattgttcaaatgttacaaagacgtcatgaagatgttcatcctcgtcgttggtccattaacaactccgttcttatccttcgattcagatgattgagataccgaggggattaccattaccatcatgta

SEQ ID NO: 92471 - DNA, 753 bp, Arabidopsis thaliana columbia
  unsure (1)..(753): unsure at all n locations
gcttcaacccacccccccccccaaanaaccctagccccccaccanaacccnaaacccccaaacncnnccccnagtttncaggccctttgcctcttcctagaatcccggtccgaataccgatgaggccccgtggttcttgtaacgaagtgtccccctgttgggcattttgccgttccagtgtaggaatttcttgagtactaaggaggataaggagaaagatcctggtgcgattgaagctccggttttgtcggggttggagaagattaggagaggtgttggtaaaggtgaggttgaggaggtgagtagtgaagaggaagaggagagtgagagttctgattctgatgttgattctgagatggagaggattattgctgagaggtttgggaagaagaaaggtgggagtagtgttaagaagacgagttcggttaggaagaagaagaagcgtgtttctgatgagtctgattctgattcggattctggagataggaagagaaggcggaggtcgatgaagaagcggagttcgcataagagaaggagtttgagtgagtctgaggatgaggaagagggaaggagtaagagaagaaaggagaggagaggaagaaagagaggtgaagatgattctgatgagtctgaggatgaagatgacagacgtgtgaagagaaagagtagaaaggagaagaggagaaggagaagccgtcgtaatcattctgatgattctgattcagagtcttctgaagatgatagaagacagaa

SEQ ID NO: 92472 - DNA, 638 bp, Arabidopsis thaliana columbia
  unsure (1)..(638): unsure at all n locations
gccggcactnnnnnnnnnnnnnnnnnnnnnnnnnnnnnnnnnnnnnnnnnnnnnnnnnnnnnnnnnnnnnnnnccacgcgtccgcggacgcgtggggcgaagaacaaagtttgaaccttttcttcatccatctctctccgtcgcttcttcctaacgattccttcactcgaatcaggtttgtgaaggttttttctagggtttcgaaaagatgccggcgacagcaggaagagtgcgtatgcccgcaaacaatcgggtgcatagtagtgcagcgcttcagactcatggaatatggcagagtgcgattggttatgatccttatgcaccaactagtaaagaagagcctaagacgacacaacagaaaaccgaagatcccgagaactcgtacgcgagttttcagggacttttggctcttgctaggattacgggttcgaataacgatgaggctcgtggttcttgtaagaagtgtggccgtgttgggcatttgacgtttcagtgtaggaatttcttgagtactaaggaggataaggagaaagatcctggtgcgattgaagctgcggttttgccggggttgggnangtaggagagnttttgnaaagtaggttnggngtnanagttngggaanggggtaaatnttntgc

SEQ ID NO: 92473 - DNA, 839 bp, Arabidopsis thaliana columbia
  unsure (1)..(839): unsure at all n locations
ctaatacgactcacaatagggaaagttggtacgctccagggaccggtccggaattcccgggtcgacccacgcgtccaaaaaaaaaagcgtgtttctaatgagtctgattctgattcggattctggagataggaagagaaggcggaggtcgatgaagaagcggagttcgcataagagaaggagtttgagtgagtctgaggatgaggaagagggaaggagtaagagaagaaaggagaggagaggaagaaagagagatgaagatgattctgatgagtctgaggatgaagatgacagacgtgtgaagagaaagagtagaaaggagaagaggagaaggagaagccgtcgtaatcattctgatgattctgattcagagtcttctgaagatgatagaagacagaagcggaggaacaaagtcgcagcttcttctgactcagaagcaaatgtttcaggcgatgatgtttcacgcgttggacgtggttcttctaagcggtctgagaagaagagcaggaaacgtcatcacaggaaagagcgagagtaggaaatcgatctatatgagccattttcactctccatttctctcttatcaatgttatgtacaataatgaaacatgtctttgtatgttggatttgatttgtgttgaaacatgtctttgtattttcactctccatactctggtttggtctgtttgtttcaagcttgtgttataacactattgagatacttggtgttnnnnnnnnnnnnnnnnnnnnnnnnnnnnnnnnnnnnnnnnnnnnnnnnnnnnnnnnnnnnnnnnnnnnnnnnnnnnnnnnnnnnnnnnnnnnnnnnnnnnnnnnnnnnnn

SEQ ID NO: 92474 - DNA, 773 bp, Arabidopsis thaliana columbia
gggagctctatacgacttacttagggaaagctggtacgcctgcaggtaccggtccggaattcccgggtcgacccacgcgtccgcaactatacacatataacaaaacaaaacactctcctgtgacttctcttctcttcttctctctcgatctcttccccaaaaatcttcagatctctacatcaccggagagacgagaaacactcaccgtgagaaaaccatgattccttacgctacagtcgaagaagcttcaatcgcactgggacgaaacctcacacgtctcgaaactctatggttcgattactccgccacgaagtccgattactatctctactgtcacaacattttgttcttgttcctcgtcttctctctcgttcctctccctctcgttttcgtcgaattggctcgatctgcttctggtttgtttaatcggtataagatccagcctaaggttaattaccctttatctgatatgtccaaatgttacaaagacgtcatgacgatggttatcctcgtcggtgggccattgcacctcgtttcttatccttcgattcagatgattgagatacgatctggattacccttaccaacaattaccgagatgctgtcacagttagaagtctactccttggtagaagactacactaccactggggacatagattctttcatagtaatggggagacgaatagatcatcgggtcatcaccagtccccagtcctatagattgctgtcctatgcacttggggtgaagtttgcttctggatcccacgtta

SEQ ID NO: 92475 - DNA, 688 bp, Arabidopsis thaliana columbia
ccctaatacgactctcttagggaaacctggtacgcctgcaggtaccggtccggaattctccgggtcgacccacgcgtccgaagaaacagagagagactaatggcgcaaaaaccacgaacggtgatctgcgtcggagacatccatggatacatatcaaagctcaataacctctggcttaatctccaatctgccatcgacccatcagatttcagctcagctctcgtcatattccttggcgattactgcgatcgtggaccggagactcgaaaagtcatcgatttcttaatctctctgccggagaaacatcccgatcaaactcatgtctttctcgccgggaaccatgactttgccttctctgggttcttaggtttgttgcctcgtccttcagatggatctgatttgaaggatacgtggaaggagtactcaaaaagtgaggagacagaaggatggtatacaggtgaagggttcgaagatatgcatcttcaaggtagaagatggcctggtaaaattaaggcttacgttcatttctgtgaaagggatggcttataaaggatcgatttacaatggctgaatcgacttttgaatcttatggcgttccacatggtcttctgatttgatgaaggcagtacctgagagtcacaggaagtccttgaccaatatggtatgggttcatgaagaggacgatgtt

SEQ ID NO: 92476 - DNA, 390 bp, Arabidopsis thaliana columbia
ttttcgcgattattatcgagacaaagcatcaaagactgcattgatgcaaagaacaatataactacatttgacaacatctcttttaaaacagatagcagtaggcgaagatacatatccggggagatagcaaaactcggtaaagggaacatcagtgctcatatttttacattcagagagctttgcgtcgctaccaagaacttcaaccccgataatcagctcggtgaaggcgggtttggaagggtttacaaagggcagatagaaaccccggaacaagttgttgcggttaagcagctagacaggaatggttaccaagggaacagagagtttcttgtggaagtcatgatgttgagtctcttacatcatcagaaccttgtcaatttggtcggatat

SEQ ID NO: 92477 - DNA, 521 bp, Arabidopsis thaliana columbia
  unsure (1)..(521): unsure at all n locations
atgcnnnnnnnnnnnnnnnnnnnnnnnnnnnnnnnnnnnnnnnnnnnnnnnnnnnnnnnnnnnnnnnnnnnnnnnnnnnnnnccacgcgtccgatccctcccatttttcaaaccactctctctttctctttctctaagtctttaacaatggcgcgccttctcttccgtcttctccaagaagccaattctacatctccggctgaagcttctccgcctttcaactccgacctcgtcctcatccttgcggttcttctttgtgcactgacatgtatcatcggcttaatagccgtctctcgatgcgcttggctccgccgtatcgcctcaagaaacagatcggatcaaactcatccaccgccggtagctgcagccaacaaaggattgaaaaagaaagtcctccggtcgttaccgaaactcacctactcgccggattctccgccggcggagaaactcgtggagtgtgctatctgtttaacggaattcgccgccggagacgagcttaaggtgttgccgcagtgtggaca

SEQ ID NO: 92478 - DNA, 741 bp, Arabidopsis thaliana columbia
atgcttacgcggagctctatacgacttacttagggaacgctggtacgcctgcaggtaccggtccggaattcccgggtcgacccacgcgtccgcttttctttctttctttttttgctccacagctcttcccattgtaagttttgttttccaaactaatcctttcaatccaaaaaccatgggagcctgtgcgagcaaacctaaggaatctgacatcgtcgaaggctctgtctcgaccgaaaatgctgttgttgagtccaagaatgccgcgaccgagacagatgccacattaactcaggagaagaaggaagagtccattgaagagccaaagaaggaaggtgagacaaaagaggactcctctgaggcaaccaaggctgagccaactccagaagctgtgaaggcagaaaaaaaaacatcttctgagactgagccaccagcacaagagacccacacctgctgctaaaaccgatgaggcccctctcgtgatcctttgattttcatttcatcaaatctcaaaatcatgagtatgtgcaagtgcaagtgtttctcacattgttattcgtatgttcatctctgttctattgtcaatatgtacaatacccatgtacattctgttgtgcccgcctctagtaaattatgattaacgaaaaaaaaaaaaaaagggcggccgctatagaggatccaagcttacgtacgcgtgcatgggacgtcatagtaatctatagtgtcgcctaatgtaaatcg

SEQ ID NO: 92479 - DNA, 333 bp, Arabidopsis thaliana columbia
acccacgcgtcaggtattctgaaattgatcgttttggttcttcacctttccttttctttgctttctgcttcctcccttaaatacatttcactctgttatcatcgatttttttttcttagatctcaatcttattttgtttgtcttttctccatttttgtttcgttaagaagaaacaatggttatggctatggatcggatcgctttgttctcttcctcatcatcatctgtttatcgtcatcgttcgtctcattctcatggctccaaatcttccagagttttcactattcgttccgactctacagcggttggtaggaaactgtatattcctcctcg

SEQ ID NO: 92480 - DNA, 523 bp, Arabidopsis thaliana columbia
  unsure (1)..(523): unsure at all n locations
nnnnnnnnnnnnnnnnnnnnnnnnnnnnnnnnnnnnnnnnnnnnnnnnnnnnnnnnnnnnnnnnnnnnnncccacgcgtccgaccacgtgagagagagagagtcatagacaggagacgtttgagattgatgaacagcgaattcgaaacaaatcacatggaagaagagctctctttcgctaccgttaccttctccacttttctccttcattagggttttctctcttatttagctgcgcagctctctctctttcttacggattcacttcttaaaactcgttaatttcttgtgggtttttgtctcttttgcgatctgattccgaaagttgagtgagagtgagagaatcatggaggaaggaagtatgttcagatctctattagcgattcttcagtggtggggtttcaatgttaccgtcatcatcatgaacaaatggatctttcagaaactggattttaagtttccactatcggtttcatgtgttcacttcatatgttcgtcgattggagcttacatcgttatcaaag

SEQ ID NO: 92481 - DNA, 715 bp, Arabidopsis thaliana columbia
  unsure (1)..(715): unsure at all n locations
ccncagcactaatcgactcacttagggaaagctcggtcgcctgcaggtaccggtccggaattcccgggtcgacccacgcgtccgcccacgcgtccgcccacgcgtccggatgttttgaaagagttagctgggaaagtttctgctgaatacgactttatggatgatgtctcagatatttctctggaagaagttgttgaggatgatgatgtagaaacatcagaaacacaaaagtccaagacagatgatgaaaccgacacatctgcttatggaacagcatatgttgcatttggagggggtgaaaggggaaaggaggcatgtcatgctattgcctcattatgtgaagtttgctctatagactctttgatctcaaattttattcttccgttacagggaagtaatgtatcaggcaaagatggtcgcgtccattgctcccttaatatcaatacagaaactgggcgcttatcagctagaaggccaaatttgcagaaccaacctgcattggagaaggatcggtacaagattcgataaggcctttgtagcatcgcctggaaatacacttgttgtggctgagtatcggcaggtggaacttagaattctcgcacatcttactcggtcgaataagcatgatgcaagctcttatagctggcggcgatttccactcgcggacagccatcatatctgtatccacatgttcgtgatgctgtagataatgggc

SEQ ID NO: 92482 - DNA, 1133 bp, Arabidopsis thaliana columbia
acggtatcgttaagctagatatcgaattcgcggccgcttgaaagagaagagtctcgttggctcggttttctgtttatatcagcggatttcctcacatttaattgttcaatcatggcggctaccaatgtcatgcggcgagacgagagccttcttattgatccccaaagaggagatacaagtgtttctcgtggcctctcgcttgagaagaaaattgaggcccttgagagcctggccggacaagttagtaacaggcgatctcggagatggttaaatgatcgtattctgatggaacttgttcctcgtttggatgcccaagaaatcagaggcttgtttgctccaccaccgtggggtgatgatgtcccaccctcagcattttctttgactaatgttggagaatgggacaaatttagaaacatagacatggacaaggaggccaacatcatggattccttgaataggtcatccgtaaggcagaaaggtagcgtggacggtgataaaatcgctgtcttaaatgcttggagaagaatagattgtaggacaagagatgctcttcgacgtagctttttaccagaactaatcgagggatatgagagctgtataagtcacttcatcgaggaaggtggtgaaggagatgttcttgagctcaaggttcaagacccattccatagattgcttttacacggtgtttgtgagtatcaccaatttggtatcaacaactgcaacagaacagataggaaggatagcaatgaagacaacgagcatcaaatggaagaagagtggcgattcaggggagaaaccaagcatcagcctagcgcatttccttaggatgtcaaaggaaggagcttggtaacaacacatacactcctttgtagctgtggttttttatgaatatcagcgccaatttaaagggctatttatgcagcaaaaagatctcaagactctctctctctctctttggcctttgctacttccccctatgtggcctcttgtaagcttgtatttgtatcctcaatttatacggttttatgattaaagaacgagagcggccgcgaattcaaacagcccgggggatccactagttctagagcggccgccaccgcggtggagctccagctaatgttacactgagtgag

SEQ ID NO: 92483 - DNA, 802 bp, Arabidopsis thaliana columbia
  unsure (1)..(802): unsure at all n locations
gtccgatgaatccaccttccaggcattgcgccaccacgagtcgcagaggccgacataccttttttgactatgtacaaagctgacttttgaacaagacagcgaagaggagctccattggtcccctgtatgtcaccgagaggcggaggatgggtaccttgtaaatttactatagacgtgtgaagaattattagctcaagaccgtctcgccgttagtttgtcaacaataagtaggatttagccctttaatgcgtttcagagantccgctagcacttttttcaggtaaggttaatcccatcaatgaatcctttccacggggttgtgagcacccaattggtttcacacgtccacgagacagataggagatagcactccagcccagcgctcaatgcaaaacagtgcgattcacgggagaacccagcatcagccgaggagcattctttagaatgcaaaggaaggaccttggtaccaacacatacaccccattggtagctgggttctgttatcaatatcagcgccaatttaaacgcctatatatcagcaaaaagatctcaagactctctctctctctctctgccctttgaaaattacccctatgtggcctcttgtaagcttgtatttgtatcctcaatttatacggttttatattaaagaacgagatagacaatacattttattgagtgctgattgtgaattttgaatctttagagttatattttaaaaaaaaaaaaaaaaaaagnnnnnnnnnnnnnnnnnnnnnnnnnnnnnnnnnnnnnnnnnnnnnnnnnnnnnnnnnnnnnnnnn

SEQ ID NO: 92484 - DNA, 866 bp, Arabidopsis thaliana columbia
  unsure (1)..(866): unsure at all n locations
atgatactccagcactantcgactcactatagggaaagctcggtcgcctgcaggtaccggtccggaattcccgggtcgacccacgcgtccggccattttttttctaaactccgaatcccaaaattgttgccttccttcgtctccgatcattttcgtggtgtctgtaaccccaattacaattcgaatccattagcgaaagaaagagacttcctttgaaagagaagagtctcgttggctcggttttctgttcaaatcagcggatttcctcacatttaattgttcaatcatggcggctaccaatgtcatgcggcgagacgagagccttcttattgatccccaaagaggagatacaagtgtttctcgtggcctctcgcttgagaagaaaattgaggcccttgagagcctggccggacaagttagtaacaggcgatctcggagatggttaaatgatcgtattctgatggaacttgttcctcgtttggatgcccaagaaatcagagggcttgtttggctccaccaccgtggggtgatgatgtcccaccctcagcattttctttgactaatggttggagaatgggacaaatttagaaacatagacatggacaaggaggccaacatcatggattccttgataggtcatccgtaaggcagacaggtagcgtggacggtgataaatcgctgcttaaatcttggagaagatagattgaggacanagatgctttcacgtagtntnaccagactaatcagggattggagctgttaagcactcatcggganggggtgaagagatgtcttggctcaggtcagaccatncatnattgtttacacgtgttgtagatacaattggataacactgcacgacagat

SEQ ID NO: 92485 - DNA, 847 bp, Arabidopsis thaliana columbia
  unsure (1)..(847): unsure at all n locations
nnnnnnnnnnnnnnnnnnnnnnnnnnnnnnnnnnnnnnnnnnnnnnnnnnnnnnnnnnnnnnnnnnnnnnnnnnnnccacgcgtccgcccacgcgtccggagagaagcgtaagtcttgccggagagtcgagtgagctgaatggttggtactcaccattttccttcagtaattttctcagagagagctctttaatcgggaaaaatcttcaaatgcgtctggttttgttctctttttaatttttttcttgtgatttcattcatggagattgcaatttcgtataaaccgaatccgcttatctcttcatcgactcagttgttgaaaagatcaaaaagttttggtcttgttcggtttcccgccaagtatggactgggagctacccggaaaaaacagctctttcgagtctatgcgtctgaaagtagtagtgggtcttcatctaatagcgatggaggcttttcgtgggtgagattggctcagtctattcgccttggtgccgagcggattggggagaagattggagaatctgtgaagacaganattgggtttgactcggaagaagcaagtgggagagtgaatgagtatgtggctcgagttaaggatagtgtgcacaagggccatcacgagctgactcgctntaagattgagacagtgcccttcgttattgattggaacaagggggagcattggaaggacatcaggaattgggacggttaacgagttgctcgcttgtcatatatgcttttgcgctgttactttcttgtcaagagtttatgttgccatccaagctcctcgggtagaacgagagagaagagagttaacagagtcctttatggaggctttgatccccga

SEQ ID NO: 92486 - DNA, 1318 bp, Arabidopsis thaliana columbia
  unsure (1)..(1318): unsure at all n locations
atgannnnnnnnnnnnnnnnnnnnnnnnnnnnnnnnnnnnnnnnnnnnnnnnnnnnnnnnnnnnnnnnnnnnnnnnnnnnnnccacgcgtccgagagtcaccatttctgatttcaccgctaaaccctaattcgacagccaatggatatagatgggtcgataagtgccatggattcttacataacacggttctcgttgcggcttctctcttcttcgtcgcttacttagcttacgaagcgaagaagagtctgtctaaactctcgaatcggagatcttatatcatgattgcttattatggttgtctttggcttgttagcttgctcaatcttgcttggtgctgtctccagggttgggaatgtactcctgggaaagaagttgtttggaatctgttaactttgttcacaacatctgggaatgttgtttctggaagtaagcttggtggcttttctcttccaaggaaactatgcaaggcggtgcagaagcattaactagaacgttcctaatctcggggtttattgttgctcttgatttgcttctcaaggcaattnttctctttggatttggagtgccattgtttattgacaacaatgaaaatggaaaaacgttcaaatggggcttatggatcattcataagccttcactcacttggcgttatgggatggggttcttgatgacaactctaggtggagagaaaaattgcctgcaaggcctgcattctaccactacataatcatcatgttcgccttatacagcctttacctagttgcatctgcgtttaccgcaaacaacgcgcattttggtttctggttatatgggatcatgagtgtttgctaccacgcattataccttcctcttctttacataacgttcctcgcagactttttccaggaagaagatttgaacttggagaatgtatactactcagagatgaaggatgctggatttttcgactctgattgggaataggactagggtaacaaacatcttcctcattttctcaatctgtaaatacacgttgggtaggatctcctagaagtcatggctgctttttccggctttggcgggttacattttagggtctagtcctctcgtatgtctgtactttttcctcatgtttctttctcttttataaatccaaaatgtcttgtgaatctctttgttccttaagctgataatctaaaagaaagttttgtagtgaaaaaaaaaaaaaaaaaaaaaaagaaaaaaaaaaaaccaaggccggccgctctagaggatccaagcttacgtacgcgtgcatgcggcgtcatagctcatctatagttcgcctcaattagtcg

SEQ ID NO: 92487 - DNA, 744 bp, Arabidopsis thaliana columbia
  unsure (1)..(744): unsure at all n locations
nnnnnnnnnnnnnnnnnnnnacgactcactattgggaaagctggcacgcctgcaggtaccggtccggaattcccgggtcgacccacgcgtgcgggtaaatgtaacggaccatactctgaagattggtttgcgatgggctggcaaagggacaacaggcattccgattagaggggtatatggtcctatgatttcagctatatctgtggaacccaatttcaaacctccggtatattatgacacaaaggatatcatactaaaagtgggggtacctgtcgctgcagcaacacttcttttgtttatcatagtgggtgtattctggaaaaaaaggcgtgacaaaaatgatattgacaaagagctaaggggtctagatcttcaaactggaacttttactctacggcagataaaagcagccactgataatttcgatgtaacaagaaagattggtgaaggtggatttggctctgtttacaagggtgaattatctgaggggaaattaattgcagttaaacaactgtctgcaaaatcgaggcagggaaatcgcgagtttgtaaatgagataggaatgatctcagctcttcaacatccgaatcttgtgaagctatatggatgttgtgttgaaggaaaccaagtgatctaggtggttgaggacgtgtagaacaactgggtatgtggagcgttatttgtaaaggatgatagtttttagacttatactagacttggtaataatggtaacatattttcatt

SEQ ID NO: 92488 - DNA, 677 bp, Arabidopsis thaliana columbia
gcgtccggatcgaaaacgttattgcgaatgcggatacacctgacgacgccattgcagctaggaataacggagcttaaggaaacaggctttgtaggacagagcatatggtaactcctcctctgtacttgatttcatgtttttgatgatttacattgtttgtatccacatgtttaatgttgtctttggttcagagcttatgttctttggagcagataggattaaagcagtgagaaagatgataatggcggtaacaacagagcaaaggaaagcttctctcgacatcttgcttccttaccaacgttcggatttcgaagggatctttccgtgctatggatggtttaccggtaacaatccgtttgttagaccctccgcttcacgagtttctcccggaaggcgacttggacaacattgtacatgagctagctgaagaaactggtgtgaaagaagatgaagtcttgtcacggatagagaaactctctgaagtgaatccaatgcttggtttccgcggttgcaggctcggaatatcgtatccagagctaacggagatgcaagcgcgtgcaatttttgaagctgcagcgtcaatgcaggaccaaggtgttactgtcattcctgagattatggttccacttgtaggaactcctcaggaattgggtcaccaagttgatgtaattcgtaaa

SEQ ID NO: 92489 - DNA, 982 bp, Arabidopsis thaliana columbia
  unsure (1)..(982): unsure at all n locations
ctttgcagtaccggtccggaattcccgggtcgacccccccgtccgagaaactctctgaagtgaatccaatgcttggtttccgcggttgcaggctcggaatatcgtatccagagctaacggagatgcaagcgcgtgcaatttttgaagctgcagcgtcaatgcaggaccaaggtgttactgtcattcctgagattatggttccacttgtaggaactcctcaggaattgggtcaccaagttgatgtaattcgtaaagttgcaaagaaagtatttgctgagaagggtcataccgtgagctacaaggttgggacaatgattgagatccctcgagccgcgctcattgcagatgagattgcgaaagaggcggagtttttctcgttcgggacaaacgacttgacgcagatgacgtttggatacagtagagacgatgtcggcaagtttctaccgatttacctcgccaaaggaatcttacagcacgacccttttgaggttcttgatcagcaaggtgtagggcaattgatcaagatggcgacagaaaaaggacgagcagctaggcctagcctcaaggttgggatatgtggagaacatggaggagatccatcttctgtgggattctttgctgaagcaggacttgactatgtctcttgttctcctttcagggttccaattgcaaggcttgcagctgctcaagtagttgttgcatgatgaagaaaaaacttggtggtgttattctgtgaataaaaaagctttggtttctattccataaaaatgaacaaaatcaaagatattggatttaactatttttgtttccttctaaagaatgtagaatataaagccttcatgtaataattgaattgctaataaaataaaaaccattgtttttnnnnnnnnnnnnnnnnnnnnnnnnnnnnnnnnnnnnnnnnnnnnnnnnnnnnnnnnnnnnnnnnnnnnnnnnnnnnnnnnnnnnnnnnnnnnnnnnnnnn

SEQ ID NO: 92490 - DNA, 471 bp, Arabidopsis thaliana columbia
agctctcacactatccactcttcatcggcagctagatttccgggtcctcagtatcgggtcagatctagatccggatccggagacgctgagaatgaaacacttcagaactgagcgagtccgtgcgactccgaagctcttcacctacgttctcgtcggtttcagcgctctactcggcttgacttgcctctactacggctcttcgttcgctcccggatccagaaagtccgatgagttcgatggatctaataaccgcgttcgcaccggaatcggatccttgaggaatcgagatattgtgcttgcagtgagccgtttcgaagttcctaaaagtgttccgatatgtgattcgagacactcggagttgataccgtgtttggatcggaaccttcattaccagttgaaattgaaactcaatttatcgttaatggagcactatgagcatcattgtcctccatcagaacggcgtttcaattg

SEQ ID NO: 92491 - DNA, 579 bp, Arabidopsis thaliana columbia
  unsure (1)..(579): unsure at all n locations
ccggcccccccctcgaggtcgacggtatcgataagctggatatcgaattcgcggccgcgatttccgggtcctcagtatcgggtcagatcctggatccggatccggagacgctgagaatgaaacacttcagaactgagcgagtccgtgcgactccgaagctcttcacctacgttctcgtcggtttcatcgctctactcggcttgacttgcctctactacggctcttcgttcgctcccggatccagaaagtccgatgagttcgatggatctaataaccgcgttcgcaccggaatcggatccttgaggaatcgagatattgtgcttgcagtgagccgtttcgaagttcctaaaagtgttccgatatgtgattcgagacactcggagttgataccgtgtttggatcggaaccttcattaccagttgaaattgaaactcaatttatcgttaatggagcactatgagcatcattgtcctccatcagaacggcgtttcaattgccttgttccgcctcctgttggttataagatccgtaaggtgcctttagnggncgggnttgaggngaantccnaaannacttanc

SEQ ID NO: 92492 - DNA, 799 bp, Arabidopsis thaliana columbia
  unsure (1)..(799): unsure at all n locations
nnnnnnnnnnnnnnnnnnnnnnnnnnnnnnnnnnnnnnnnnnnnnnnnnnnnnnnnnnnnnnnnnnnnnnnnnnnnnnccacgcgtccgggagtcggagaaagtggtggtggacgagctgccgctagctattgtgcgccgggtggtgaagaagaagctgtcggagtgttcgccggattatgacgtcagtattcacaaggaagctttgctcgcattctcagagagtgcgaggatcttcatccactacctctccgccacggcaaatgattgttgctataactactctagtggcgaccgttcttgtgagaagcggtttttaagcttttcttaatgttattacggcattgttttgtgttttgttgaagattttccatgggcagccaatgtcacagccagctccaccaatgccgcatcaacagtctactattcggcctagagttagggctaggcgaggtcaagctaccgatccacatagcatcgctgagaggctccgaagggaaagaatagcagaacggatcaggtcgttgcaggaacttgtacctaccgttaacaagacagatagggctgctatgatcgacgagattgtcgattatgtaaagtntctcaagctccaagttaaaagtcctgagcatgagccgtcttggtggagccggtgctgtcgcaccactagtcactgaaatgccattatcttcatcagttgaggatgagacgcangccgtgtgggagaaatggtcaacgatgggacagagaagcaagtggctaagctgatggaagaaacgttggagcagcgatgcaacttt

SEQ ID NO: 92493 - DNA, 1016 bp, Arabidopsis thaliana columbia
  unsure (1)..(1016): unsure at all n locations
nnnnnnnnnnnnnnnnnnnnnnnnnnnnnnaaataacctagacgaagaacaaacaaaactctctctttctctctctctctctaataagtaaggttttgatctttttcaagatcaaacaaaaacaatggagttagagagtacgagcaatggccgacgtccgccgccaccggcagagattggccgtggggcgtacttggcgtgggaagatttgacggtggttataccaaactttagtggtggtccgactcgaagattgctcgatggattaaacggtcatgctgaaccaggtcggattatggccattatgggtccttccggatccggcaagtccacgcttcttgattctctcgcaggtagactcgcaagaaacgtgattatgaccggtaatcttctattgaacggaaagaaggcaagactagactacggtctcgtcgcttatgtaacacaagaggacattttgatgggaacactaacggtgagggagacaataacattctcagctcaatctacggctatcaagtgatttgaccaaagaagaaggcaacgacattgttgaaggaccaatctttgaacttggtcttcaagattgggcagacagagtcataggtaattggcattctagaggagtgagtggcggcgagaggaaacgcgtcagcgttgcgttagagatcttaacgcgaccgcaaattttgtttcttgatgaacctactagtggtttggacagtgcttctgctttctttgtgattcaagcgctaaggaatatcgctcgagatggtggtagaaccgttgtttcatcgattcatcaacctagtagcgaagtttttgctctctttgatgatctttttttgctctctagtggtgagactgtttattttggtgaatccaagtttgctgttgagttctttgctgaagcggggtttccttgcccgaagaaacggaatccttctgatcatttcctaagatgtatcaactcagactttgataccgtacagctacactcaaaggatctcaaagga

SEQ ID NO: 92494 - DNA, 552 bp, Arabidopsis thaliana columbia
  unsure (1)..(552): unsure at all n locations
acgcgtccgcgagattgttcacaacttcaaagcatcgaaaaggtttaaactttacgtttttctctggaacccgattcgaagaaatcatcaagaagtttcctttcactgatttctcaatctattcctttcgcgcttatggaagattctggagtgaatccaatggattcaccatctaaaggcagtgactttggagtctatggaatcataggaggtggaatcgtggctttacttgtgcctgtgttactctctgtggtgttgaatggaaccaaaaaggggaaaaagagaggtgttcccatcaaagtaggtggcgaggaaggttacacaatgcgtcatgctcgagctcctgaattggttgatgtacccttggggaaggagctgctanctatgcctgcttttgtttgagcaggncttgtaagaagtattcgaaagatcggntantagggacctagagagtttatnaggtaaggaatttnttncttcctaggtaatgggngnaaggtttnagagctcatttntggggggnntaaatngcaaattnttggggnggtttgc

SEQ ID NO: 92495 - DNA, 769 bp, Arabidopsis thaliana columbia
  unsure (1)..(769): unsure at all n locations
nnnnngtagcccagtagctctaatcgctacgattgctacacaccacatcccttaagaaaaccctaatcatctctctctcgcattctataggaatcgcttcccgaagcttccaacattctcttgtttctcctttgtctctcaatttcagtttcctatattatacgcttgtattaatcaccagtatacattttgtcgtttctgggtctggaaccctagtagttattatagcatccatcgctttcttcaatcgccgtccatcagagtttcaagggatttgctttaaagatcaatcctttcctaagaaaatagcgacaattcatcagcttttcctttcccatccttcattaccttaacttactcgagattcatcttccagctgaaattgtgaaacttcgtttctgggtttttatcagaaaacactctgtgacttattgtgtggtgatcgaggaaagaaaaaagatggttggtggtggaaacaggagagatgagggatcgatgccgattcagaacaccaacttgtttgctgctttggatacttcgaggaagaagaagaagtctgataaggctggtaagagcaaagcttcctctaagagagaagattcacagaaggagcctgagccacaggttttctgggcacctacgcctctcaaagcaaaggcttgggctgatatcgatagcgatgatgaagatgatgattattacgctaccactgctccacctcagtccctgtggagcacttctgaaagcctccattcagatgcttaagacg

SEQ ID NO: 92496 - DNA, 551 bp, Arabidopsis thaliana columbia
tacgactcactattgggaaagctggcacgcctgcaggtaccggtccggaattcccgggtcgacccacgcgtgcgcgccgctttttcttcgatcacatcgctcctatgccgatcaggtaatcgacacgcagaagcaggttctctctctgatccgcgatttcactctgaaagatctcgtggaggtaagatacttcatacattttgtttgttttctagagatttcgggttttgaacgattctactattcaatccctggagacacaggtgagttgtctttgaacgattttactattcaatctctggaggttttgatttttctttgatcttacttggtttttgggatgattaacaagttttggtgcctaatgagattgaaactgtgcctctttttttttttttttctcaggcaaggattagtcttcttcaggatgaagtttctactaatggcattgaagatgatgctcttaaggtttggccacacatggtttattggagtttttagggctaatggttcgcaggtgatatctccgttggatatccgggaattttggg

SEQ ID NO: 92497 - DNA, 559 bp, Arabidopsis thaliana columbia
  unsure (1)..(559): unsure at all n locations
acgactcactattgggaaagctggtccgcctgcaggtaccggtccggaattcccgggtcgacccacgcgtccgcccacgcgtccgcccacgcgtccgcggacgcgtgggctgtggtggacctctggtgtttagctatgaagataatgatatttctgatcaggatcttcttcttgatgtgccgtcgaacggctcattccctcaagcagagcttctaaacatgatatgaaagaagataaagtttctcaaactcattggttaaactcattgtgtttctcagaacaaagacagactttttaagattatatatatatatatatatctctgttgaagagaaaactcttttgctctttaggcttttctgagaaaatgtggccaaatgagatttttatgcattagaaattgcaatttgcagatataaaaaaaaaggaatgatttttatgtaagggctctctttggtggtcttactatataaaaaaacaaaaaagggcggccgctctagaggatccaagcttacgtacgcgtgcatgcannnnnnnnnnnnnnnnnnnnnnnnnnnnn

SEQ ID NO: 92498 - DNA, 672 bp, Arabidopsis thaliana columbia
  unsure (1)..(672): unsure at all n locations
gatctccnnnnnnnnnnnnnnnnnnnnnnnnnnnnnnnnnnnnnnnnnnnnnnnnnnnnnnnnnnnnnnnnnnnnnnnccacgcgggcgtattagtgagagaaggacgaagaatagatagaggaggaagaagaataaagagaaaagatgaacaagaaggagatcttcaagctagcgaagggtttcagaggaagagctaagaattgtataagaattgcgagggaaagagtcgagaaagctctgcagtactcttacagagataggcgcaacaagaaacgtgagatgagaggtctctggatcgagcgcatcaacgccggttctcgtcagcacggtgaactacgggaacttcatccatggactgatgaaggagaacatccagctgaaccgcaaagtcctctctgagttatctatgcatgaaccttacagtttcaaagcacttgtggatgtctcccgcaagtcgttccctggaaacaagaacgtggtccaagcatctcggaaagtagacatttcatccatcaatgcctagttaggaccaagttagtttaacttgtccttcttatgaccacggaattatttagttatttgtcagattaacatgtcccccgggggtatttccatacttttgcaatttaaggggatggattccgtcttctttatttcgttgagcggatct

SEQ ID NO: 92499 - DNA, 523 bp, Arabidopsis thaliana columbia
  unsure (1)..(523): unsure at all n locations
tgctccaacgtctctggtttctcagacgacgtatcaccggagccttgtcaagaactcatgagttctccttcgtcttgcttcgccggtggtagcatatacgagggtgatgcgacggctcagtcgtattacagttggtaattatagtaaaataaaatggtgatgaagaagaagaagaagaaaaagaagaagagagtgcatgaggttacgatacgattggattttcgaattttttttgtcaataagttcataaaatttgttgtcagagagcgagaggaagaagataaaaaaagaaaaattacgttttaaggtggtgagtttcaagaacagagcgagcttttctattgtattaatgtacagcttccatttctttcattcatggtgtaacaaaattcatctttttttctttctgtgaagaagaaaataaaaaattatatgtgaaaaaaaaaaaaaaagnnnnnnnnnnnnnnnnnnnnnnnnnnnnnnnnnnnnnnnnnnnnnnnnnnnnnnnnnnnnnnnnnncacc

SEQ ID NO: 92500 - DNA, 743 bp, Arabidopsis thaliana columbia
  unsure (1)..(743): unsure at all n locations
cacgcgtccggattgcatatttctaatgttttgatcgaaccatccgttgattctccccacgttcttgggggtgccctagattcttcggacaatgtttgtatcgaggactcaacaatcaacgttggccacgacgcggtttctctcaagagtggttgggaccaatacggtatacactacggccgtccaaccaccgctgttcatattcggaatctcagattaaagtctcccaccggtgctggaatctccttcgggagcgagatgtcaggcggagtctcggatgtgaccgttgagcgtcttaacatacacagctcactcataggtgtagccttcagaaccaccagaggcagaggaggatacatccgtaatatcacaatctccgacgtcgatctcacaagcgttgacacagccatagtagccaacggacacaccgggtcacccccggatgataaattcgaccgggacgcactcccagtcgtgacacacattgttatgcggaatttcaccggagttgatataggagtagccgggaatctcaccgggatcgggagaatctcccttccacgttcgatattgcctccgccggaatatttcnttttncnaaacgcnantcagaaaaaatctttgggattnttgctnccaaccntcttcntggnttttccttcnaaacgaaantttttnctcccgggaancctttgttcccaaaaaaatnccntgantttccnccnntcccttncttttgtntc

SEQ ID NO: 92501 - DNA, 864 bp, Arabidopsis thaliana columbia
  unsure (1)..(864): unsure at all n locations
gggaaacccaaggaattttccaggcgcgaaagtttttcgggaatgttgaccccgtttgaagccgttttttaaccaaaacaccaggttccactcatagggtggaagcccttcaaaaccccccagaaggcagaggaggattcatcccgtaatatcacaatctccgacgtcgatctcacaagcgttgacacagccatagtagccaacggacacaccgggtcacacccggatgataaattcgaccgggacgcactcccagtcgtgacacacattgttatgcggaatttcaccggagttgatataggagtagccgggaatctcaccgggatcggagaatctcccttcacgtcgatatgcctcgcggatattcatttacaaacgcgatcagaagaatcttggatatgctccaacgtctctggtttctcagacgacgtatcaccggagccttgtcaagaactcatgagttctccttcgtcttgcttcgccggtggtagcatatacgagggtgatgcgacggctcagtcgtattacagttggtaattatagtaaaataaaatggtgatgaagaagaagaagaagaaaaagaagaagagagtgcatgaggttacgatacgattggattttcgaattttttttgtcaataagttcataaaatttgttgtcagagagcgagaggaagaagataaaaaaagaaaaattccgttttaaggtggtgagtttcaagaacagagcgagcttttctattgtattaatggacagcttccatttcttttatctcatgcaattcatccngggggggggnnnnnnnnnnnnnnnnnnnnnnnnnnnnnnnnnnnnnnnnnnnnnnnnnnnnnnnnnnnnnnnnnn

SEQ ID NO: 92502 - DNA, 523 bp, Arabidopsis thaliana columbia
acgactcacatttttggaagctaacacgcctgcaggtaccggtccggattcccgggtttcccacgcggcggagtagaggtaagattgttcttgaagaatcgattctatagagcgtgttagcttcaatgctaacttgggagaccccagttatgcttgcaagcaacaccgcctcaaccaaaaagctacccttcattaccacctttctcatcattgcccgttgtccggtcacaagggtcatgtctcagccgcaggcggatgttttgccactgccagcctcagacgcagattgcctcttgagatttaaagatactttggttaatgcatcgttcattagcagttgggatccttccatctccccgtgtaagcgaaactcacagaattgggtcgggggtctctgtgttacccgtaatgttgggggcctacaactcgaaaggaagggcttaacccggaaagcttgaccttcaacccttaagtgcaatcaaagactgtacgaacccttgggttgcatgaccaccaatttaac

SEQ ID NO: 92503 - DNA, 1066 bp, Arabidopsis thaliana columbia
  unsure (1)..(1066): unsure at all n locations
ggacgggattnatnaaataaaggaagaaaaggaagaagaagaagaagaaaggattcgtcttccttcttccacaccctttctgacacctcatctcccctcccaccttctccgtcccgttccgtttctccatcagatcctcgattccgatccaacagttcgaattcagtttccgattctgatctgatcgaaccaatactcactgagatttgatcggcgattatggagtctatatctccggtatcgaatcagcttcttcagccgacgacgacgagctctaattccgatcgctctcgtcgtaagcgtaagaagaaatcatcgccatcatcggttgagaaatctccatctccgtcaatatcgttggagaaatggagatcggagaagcagcaacagatctactcaacgaagctagttcatgctttaagagagctacgaatcagccaacaaccatcttcatcatcatcttcttcgattccacgtggaggtagagccgtacgtgaagtcgccgatagagctttagcagttgcggcgagaggtaaaacgttatggagtcgagcgatactttcaaaagctgtaaaactcaaattcaggaaacacaaacgccagagaatctctaatccgacgacgacgacgttaaccaccgggagtatcaggtcaaagaaacagagagcgacggttttgaggcttaaggctaaaggtttgccagctgtacagaggaaagtgaaagtactgagccggttagttcccggttgccgtaaacaatcattaccggtggttttagaagaaaccactgattatatagctgcgatggagatgcagattcgtactatgactgcgattctctccgccgttagttcttctcctccgccgccaacgccaggtcacgaagggggacaaacacacatgcttggttagttggccaaactgtccttttatttttttccaattttaaaaaccaaaaaaaaaactgtttttttttatcatattattattcttctcactgtattgtttgttgtttgaatattttactattcaacttaatataccatttcgtcatgtatatcctttt

SEQ ID NO: 92504 - DNA, 545 bp, Arabidopsis thaliana columbia
  unsure (1)..(545): unsure at all n locations
gacttacttagggaaagctggtacgcctgcaggtaccggtccggaattcccgggtcgacccacgcgtccgaacctgttgaaaaaaaattcagggaaaattggaaaaagtgatgatgatgacgagagatcaattcaaatcttaagtcctccaaattttaaaaatttcgatctccactaccttcgtcatcttcctctacttctgattctcttttctgggtttgtcgtttaatgggttgattttgtatcgtcaaaacggagaaaacaagaagacttcttttggttttcttattgcgaagaagatatttctagggtttcgagattttctgggttttctgggtttttgtgtgttctttgattggatttgattattgggcaatttccttggaattcaagaaacttctaaggttcttaaagtgtaaagctttgtgattttttcttattcataccttctaagaccttgggtttggaagtggattgggctnttgggtctgaaaatgagaagcgaaacgaaaatggaaggtgtggttgaatataaacagactaat

SEQ ID NO: 92505 - DNA, 531 bp, Arabidopsis thaliana columbia
acgactcactatttggaaagctggaccgcctgcaggtaccggtccggaattcccgggtcgtacccacgcgtgggcgggcgcgtccgcccacgcgtccgtaaagaagaaaaaactgcaacgccgtttgttgccgatctgcagcagcgcgatctctctgattattagagagctatcatcctagcagaatagaatctctcagtttaaaggctccaaagatggcggcgtctgaagagaatagcgcattgtttcccatttttatcgtgacgattatggcaattcctttggggccttacaccatggtcaagttaagcggtgctctctccaagaaacaaaggaccattcattgtcagtgtctcgagtgtgaccgttctgggaaatataagagatccttgtttaaaaagatctctaacttctctacggggagcaacttgacacttgggctactctggggtcgtgatagatttcttgatttatacactaagaccatggagccgtgaggctcaggtttttgacccattcagatactgggac

SEQ ID NO: 92506 - DNA, 493 bp, Arabidopsis thaliana columbia
atacgactcactatatggaaagctggtacgcctgcaggtaccggtcccgaattcccgggtcgacccacgcgtccgcttatgttaatgcctacctagtaatcaatgttctagatgcaaaccaagtaatacctgtagcttgcatctccttgatgatcccgggatctggtgctctcagagtcatgggcaataaccttggaggcagcgtaagtttagaagatttctccatgtctttgaaatgcgaccagcattggaaatctccatctgcatcttcttcagcccatagtgtggactggtatacctacagtggttgcgccatatgccaatgaccacctagaaaagggattcccggtgcccattatgcaccgattcacacttcagaatgccgaaatcatctgcttcaaatctgaaattacaggttgcaacgaatgtgcctactgggaatccgtccaacagccttaatggctttgaaacttccacaatctacgacttggaa

SEQ ID NO: 92507 - DNA, 639 bp, Arabidopsis thaliana columbia
  unsure (1)..(639): unsure at all n locations
tttttgttctcctnancaatccaggatcggtcccatngngaccctntccctggctcanatncccggggactggncccncagngncagggcaataccntggnggcnncgtaagtttaggagatttccccagtctttggaatggggcaacattggaaatcnccatctgctcttcttcagccaatagtgtggactgttatccaaaccagtgtttgtgccatatgcaaatggcccacctagaaaagggattcccgttgcccataatgcacggattcacacttcagaatgcggaaatcatctgctcagaatctgaaatcccagtttgcagcgatgtcgcctacttggattcgtcccaacagcctcaatggctttgaagctaccacgatctacgacttggaaacctaactcgttgtagtttacaattggtggttgtaagtgtcgctactggtttggcatttggaccagactcagcgaccaaaacgaacaaagctttgtataatacttttgtacttaatgttgactaatctgtgaatgatatttctgtctgaaataaaatagtctttgtaattaaaaaaaaaacaaaccccaaagggcggccgctctagaggatccaagcttacgtacgcgtgcatgcgacgtcat

SEQ ID NO: 92508 - DNA, 386 bp, Arabidopsis thaliana columbia
agatctcgttaatatccatcctactgagcttaaattcccctttgagttgaagaaacaaagttcgtgttcgatgcaattgaccaacaagacaactactcaatgtgtcgcttttaaggttaaaacaaccaatcctcgcaaatactgtgttcgtcctaacactggtgttgtcttgcccggtgattcctgcaatgttacagtgacgatgcaagcccagaaagaggcaccacttgatatgcaatgcaaagccaagttccttgttcagactgttgttgtctctgatggtactacttccaaagaagtcctcgctgaaattgttcaacaaggagggcttgtagagtgattgaggatttcaaactgcgagttgtttacattcctgctaatcctcc

SEQ ID NO: 92509 - DNA, 615 bp, Arabidopsis thaliana columbia
cgtttccaactctctctaatgtttcactaaagcgcatacataaccctaaccctaactctctcgtactgcacaaaaaaaaaaaaaaaattgaagaagagcgatacgatcgtaaccagggagcttgatttctcccctgatttttctaatggattctcaacagagcgatctctttgacaccgcatcgcagccggacacggtggccgacgagtatacctttttggaattcaatactcaaggcgattcagagttcgattaccaggattttggatcgccgacggcatggccgacaccgtctgattctatttccatcgctgacgttgccgatcgtggtgaaggaggagctgccgcggatcatcattctgaggcttcgtcaccttcgtccctctctgccggtgccgggaatggtgcgaaagtgggacgcggtggagttggtggaagtggtggtgttagtagtagtagtcaggttgatgcattggccgctggtgtgggaaatttgaactttgaagagactggtgatgatgatggttttgattatggtaaaaatgatttcacggagcacgcttgtaagtattgtggtatctcgaacccagcttgcgtcgttaggtgtaatgtggc

SEQ ID NO: 92510 - DNA, 999 bp, Arabidopsis thaliana columbia
atgggtagaccaccttgttgcgagaagattgaggtgaagaaaggaccatggactcccgaagaagacataatcttggtctcttatatccaacaacacggccctggaaattggagatctgtccctgcaaacaccggtttgctaaggtgtagcaagagttgcagacttagatggactaattaccttcgtcccgggatcaaacgaggaaatttcactcaaccggaagagaagatgatcatccaccttcaagctcttttgggaaataggtgggcagctatagcatcatatctacctcagaggaccgacaatgatatcaagaactactggaacactcatcttaaaaagaaactagtgatgatgaagtttcaaaatggtatcatcaacgaaaacaaaaccaatctggcaacagatatttcgtcttgtaataataacaacaatggatgtaatcacaacaaaaggaccaccaacaaaggccaatgggagaaaaaacttcaaacagacatcaacatggccaaacaagccttattccaagccttgtcacttgaccaaccatcttcattgatccctcccgatcctgactcaccaaaacctcatcatcattctaccaccacttatgcctcaagcacagataacatctctaaattactccagaactggacaagctcatcatcgtcaaagcctaacacttcatcagtctccaacaaccggagctcaagccccggtgaaggaggactttttgatcatcactctttgttctcatcgaattcagaatctggatcagttgatgagaagctgaatttgatgtccgagacaagcatgttcaaaggtgagagcaagccagacatagacatggaagctacacctactactactactactactactgatgatcaaggctcgttgtcattgatcgagaaatggttgtttgatgatcaaggcttggttcagtgtgatgatagtcaagaagatctcatcgacgtgtctttagaggagttaaaataa

SEQ ID NO: 92511 - DNA, 503 bp, Arabidopsis thaliana columbia
  unsure (1)..(503): unsure at all n locations
caggnaccggncccggattcccgggttgancacgcgtgcgttagcaaagagagagagagacaaagagagatctgatcctttgaagaaacaccaccaaaaaaaaaaaaaaaagacatggcatcagcggatgaaaaggtggtggaagagaaggcttcggtgatttcaagcttgttggacaaagccaaaggtttcttttgcggagaagctggcgaatattccgacgccggaagcaaccgtggacgacgttgatttcaaaggcgtgacacgtgatggagtagattatcaccccaaggtctccgtcaagaatccttactctcaatccatccctatctgccagatctcttacatcctcaagagtgccacaaggaccatcgcgtaaggcacgataccggacccggtttctttggttgggagcggcacaacggttctggacgtaccggttaaggtggcttataacataccggttagtctgatgaaagatatgtgtacggactgggacattg

SEQ ID NO: 92512 - DNA, 659 bp, Arabidopsis thaliana columbia
  unsure (1)..(659): unsure at all n locations
tattccaatccccccccctaaaaattttcctaatctctctcttctctcacccattttttcgtttccagaatcttacgaaccctaaaacttctcatttttcgtcacacattgagatcatattccaatcaaaaaaatatgtgtcccatgaggttctaattggtgtttttttcagctgtactcgccggatatttcgcatggaagacggtgagttcttccccggaattcgattcaccggacgaattgaatgagaaacaagaactcaatctcaaaaagaagatggagaatgggttttgggtgttcgtcgatatggctagcggaagatacctttggaggaatctcaaggaaatgagagagaaatctcaatgaagatgatgatgaacgaatacgaaaagatttcatctttttttttttggtttcttctttgtgcagaaagtgtaagaaacaataataatgatactttacgagtttagtattcatttgttctaatctttctcctgaattttgtaacttttgattcattgatttgtaatcctggaaaaagaataacaaagagtttgtaaccttcaaaaaaaaaaaaaaaagnnnnnnnnnnnnnnnnnnnnnnnnnnnnnnnnnnnnnnnnnnnnnnnnnnnnnnnnnnnnnnnnnnnnnnnnnnnnc

SEQ ID NO: 92513 - DNA, 856 bp, Arabidopsis thaliana columbia
  unsure (1)..(856): unsure at all n locations
cgcgcnnnnnnnnnnnnnnnnnnnnnnnnnnnnnnnnnnnnnnnnnnnnnnnnnnnnnnnnnnnnnnnnnnnnnnnccacgcgtccgcccacgcgtccggcgagaggggagacatgtaatctcaatctcaccccctttataatttctctatatctctctcttctctcacacaattcttcgtttcccagaatcttacgaaccctaaaacttctcattcttcgtcacacattgagatcatattccaattcaaaaaaatatggtgtccgatgaggttcttattggtgttcttctcagctgtactcgccggatatttcgcatggaagacggtgagttcttcgccggaattcgattcaccggacgaattgaatgagaaacaagaactcaatctcaaaaagaagatggagaatgggtttttgggtgttccgtcgatatggctagcggaagatacctttggaggaatctcaaggaaatgagaggagaatctcattgaagatggtgaggaacgaatacgaaaagattccatctttttttttttgggttcttctttgggcagagaggggaggaaccaataataagtgtccccttacgaggtcaaggatcctttggctctaaaactttcctcgggatttgggaaccttttgactcattggatttggacaccggggaaaagaaaaacaaagaggtgggaaccctcaaaaaaaacaaaaaaggggcggccggctttaaggatccaggttacggaccgcgggcgtgggacggctaactcctgcattggggcgcctaattgctgcgccggggggggttctaaggggcgcgcggcaaagcccagcgaggccgcctaacggccgcggggcca

SEQ ID NO: 92514 - DNA, 705 bp, Arabidopsis thaliana columbia
gattgggcatgggtctttcgggaatgatgggaagggtcaagctaatgtaaatagttctggtgttttactgatgaatggccaagtgaacaacaacaacaacacaaatattggaggtgctggtgggtttggtggtgggattggtcaatccatggcagcaaacggaatcaataatataaacggtaacaatagtctcatgaacggaagagttgggatgatggtgcgggatccaaacggtcaacaggatttaggaaaccaacttttaggagcagtgaatggtttcaacaattttgattggaacgcgtgaaatgaagaagaggaagaagagacactgaaagggtaatgttctgcttgcgcagcatcacacatcttcaaactcaggataaggataggccaataagccgtgatattgtgcttaagaaaggaagagtcaaatctttgtatcaataactggtttttaggtcacctccacaatcaccaataccatctcttgagttactgtttctttttttactttggggagtttttcttatgctttatagtttataatgtacatctttctatcggtgtgtgttccttagggcacatcatcagggaggcaatgaatcaagctctatccttcaaaaaaaaaaaaaaaaaaaaagggcggccgctctagaggatccaagcttacgtacgcgtgcatgcgacgtcataatcttctatagt

SEQ ID NO: 92515 - DNA, 494 bp, Arabidopsis thaliana columbia
cttcttcttcttccttccttctctctccttattaagaaagaccaacacagacacggaagaagtagcttggttcttctctttgtgaaggtgaatgcgggagatggggactggagattctgcttcgagactgattctctggttctgcttagggtttttgattctaggtgttggatttgtgcaatgtggagttacttatgaccggaaagcacttctcattaatggacagagacgaatcctcttctctggctccatacattaccctcgaagcactcctgatatgtgggaagatttgattcagaaggcgaaagatggaggcattgatgtgattgagacgtatgtgttctggaatcttcatgagccttctcctggaaaatacgattttgaagggagaaatgatttggtgagattcgtgaagacgattcacaaagctggtttatatgctcatcttcgaattggaccttatgtttgcgccgagtggaattttggaggattcc

SEQ ID NO: 92516 - DNA, 500 bp, Arabidopsis thaliana columbia
gggggggggaggggggtccgtgtggcgcgcccgggggcgcccaggggcgcttgcgggcggtttgtcttggtggcgagtggggggcgggggcgattttgccgccgggggacaggttttgggccgggtttcgccccagcctctgttccgcccccctatagggaaaagtggtgcgcctgcagggaacggtccggaattttggggggggaaccacgcgcccccggacccgtgggtgtttgcctggggtgggtgggtactggtttagccctctccacttcaggacaagagttcgactcgtatttggtaccaagtcgggccatctcttcctctctctctctttcgccttcacaatccaatatccatgtcgatgttgttgtattgaacttaaagagaggtaataaaaattccctctaaaaaaaaaaaaaacaagggcgcgccgctctagaggatccaagcttacgtacgcgtgcatggcgacgtcatagatcttgtatagtggacct

SEQ ID NO: 92517 - DNA, 477 bp, Arabidopsis thaliana columbia
  unsure (1)..(477): unsure at all n locations
catcgaagaacacgaggcggantaatgacgccgctttctatatcggcatcgccttcgccgccgtggccacttctctctccgccactatcttcatcgtcgttaaacagagctgctccgtctattttttcccctttctctcgaatcaaccatggcttctcgtgctctttcatcgccgttcaacgcttcgctctaagccgcaagacaaggaagcagttacaggtggtggctatggctcctgaggaagagaagctcactcgtcgcaatcctctcgattttccctatcgaatgggagagaccaaagccagggaggagaccaggtattatttcccaaagtttaggcctttggaaagtcaccgttgccttcctcccaatggccttattgntcctcccagaagaaagggggaagaatggggaagggaacgaaaagacgggggaatttgaggttgcccnttaaaaggangcgggggncncaccccg

SEQ ID NO: 92518 - DNA, 905 bp, Arabidopsis thaliana columbia
  unsure (1)..(905): unsure at all n locations
gctggggggacctatacgactttcttagggaaagctggtacgcctgcaggtaccggtccggaattcccgggtcgacccacgcgtccgtcgaagacacgaggcggagctatgacgccgctttctatatcggcatcgccttcgccgccgtggccacttctctctccgccactatcttcatcgtcgttaaacagagctgctccggctattttttcccctttctctcgaaagaaccatggcttctcgtgctctttcattcgccgttcaacgcttcgctctaagcccgcagacaaggaagcagttccaggtggtggctatggctcctgaggaagaaagctaacttcgcgaatcctctcgatttcctatcaatgggagagacaaagcccgggaggagaccagatttattcccaaagtgtagtcctaggaagcccccgtgcctcctcctatgcctaagaccctcaaaagagagggagaagagggagagaagaaggagaagacctggagatgcccctgaaaaggagacaaggccaccccataccgggcgaaagaggtcctttttctaccgtatgggggggtttttgcctaaaaacaggtaaaacctcttcattccaaaaaaaaaaagattggcaccccccaaagcttaagggagcttgaccttttatacttggttaaaccncgataaaataaaaaaaagggggcgcctcaaagagacagtacgtcggggcgcgaatttaatttttttgggccccaaataatcccggccgggttaaacgggggaggggaacccggggtccaactaaggctggaaaaaccctttcccgggggaaaaaaaagcccccatgccttcaaattggccctaagggaaggacccccggcggcataccggggggtggcccccggccccccgc

SEQ ID NO: 92519 - DNA, 423 bp, Arabidopsis thaliana columbia
caaaaaaaaatctctgaaacaatggcgtgttgcttagcttcgtgctgtgcgtcggcgacttgtggattatgctcgtcggtagcatcggggatatcgaggaaatcagcgaggatcgcttattgtggtcgcttcggtgcctctcttgtcgtctcctggattcttcgtgagactggtgctccgctcctcgagaaactcccttggatcaatacttctgattcagataccagagaatggtatcagcaacaagctgttcttcgtgtgagctttgggaatttcctcttctttgcagtatatgctttgatcatgattggtgtcaacgaccagaatgacaggcgtgactcctggcatcatggtgggtggggtttgaagatgattgtctggtttttgcttgatgtcctcatgttttttgttccaaatgttatc

SEQ ID NO: 92520 - DNA, 458 bp, Arabidopsis thaliana columbia
tccgacttatatggggaacgctggtacgcctgcaggtaccggtccggaattcccgggtcgacccacgcgtccggccacgcgtacgagaaaaagttcttctttttcttccgcacatgtctgactctctcataagcgtaaatcgctctgtcaaatatctctgaccagagagacagagttgcctccacggttctccagactagtctcacgctctgccctttcaccacattcccttctccatttctcaatctcactttaccttctcggttcttgcccccatttccgaatcttcccgagtgaaaaaaagctctcaaggtgtggaaccttctaagtgtttattaaatccggggctgcccctgagtttcgtcgggaggctcgcatatgatctctaacgctcaggttttctccctccggggcttgggattttcacggctaagggataggggatctcggggaattta

SEQ ID NO: 92521 - DNA, 530 bp, Arabidopsis thaliana columbia
  unsure (1)..(530): unsure at all n locations
tgttttggacatgtgttacactacttcaaatggcttacgctgttgcaattctagttggagccacatctccattcatatggagcaaagtcatctcggttgtgggtcatgttatactcgcaacaactttgtgggctcgagctaagtccgttgatctgagtagcaaaaccgaaataacttcatgttatatgttcatatggaagctcttttatgcagagtacttgctgttaccttttttgaagtgactgacattagaagagaagaagatggagataaaagaataagtcatcactatgcttctgtttttattacaagttcatgaaattaggtagtgaactagtgaattagagttttattctgaaacatggcacactgcaaaaatatgtcaaagatatgaatttctgttgggtaaagaagtctctgcttgggcaaaaaaaaaaaaaaaaaaaaaagnnnnnnnnnnnnnnnnnnnnnnnnnnnnnnnnnnnnnnnnnnnnnnnnnnnnnnnnnnnnnnnnnnnnnnnnnnacaatc

SEQ ID NO: 92522 - DNA, 605 bp, Arabidopsis thaliana columbia
ccctccgactttattagggaacgctggtacgcctgcaggtaccggtccggaattcccgggtcgacccacgcgtccgatttcttccccattctctctctaaaaccatttcttttttctcagctacaaaaatcgaaactttccgacgagtttttaacattaggacttcattcggcaagaagcattaccgtagtatgtcggatttgatttaagatgacatgagatatggctgcattgaatctatcaaagaggtcaatttgtgaaacatgcggacatcaaggatggaagaattcacttgtaacttgctctaaatgccgcatagcctgtgaacactgttattgcatgcgggagagttcatttgagacctcaatacattttgtctgtgctgattgttcgatgagacctgttcaaaacaaatttacttcagattctatcaaaggagtccctagaagtattaggaataaagtgcgggtggaatcttcaaatccagttcctaaatggaaaaaaattcctgaaccgtcaaggatgaagttaattccccagaggaagtaaaaaacttgctgtggaggcagtcccagtaaccaacttttaaagtcccaaacctgttc

SEQ ID NO: 92523 - DNA, 551 bp, Arabidopsis thaliana columbia
ggatctaacctgttgaacccgcccgggtaaaacgtggttcccccaaatatatttttgcaaagcccttgccatctcagctattggtccaatcccaagatttgccagactccaacaaattcagacgccagaaccttactggaaccgggtactaaggctctgaaataaaggtccactgaatcgcaaggttcgccccccggggagattccgtaggcggagagaccagaaccaggtgatgatggattcattatttttgagtttttcttactgtatcttcataatttaccatcatcgctggtaaaataagcgctaccattcactctttgtcctctactggaaaaatgctagagatcctctcgtgtgtgttttttttgttctcttcataattttcccacacacacactaataagttctttgatgtttggttgaaaacttgaattggatacatttcatttaaaaaaaaaaaaaaaaaaccaaagggcggccgctctagaggatccaagcttacgtacgcgtgcatgcgacgtcatagacttctatgagtggtacctaaa

SEQ ID NO: 92524 - DNA, 814 bp, Arabidopsis thaliana columbia
  unsure (1)..(814): unsure at all n locations
aggatctgactgtcgcgttatcagtgccagccgatgctgnatattatcatagccatatgtataggacccaagctggcctccgagtttcagacgctgatgtacacgtgcacgaaatcagctgaaatcatcattgttacttcacatggatgaaccagcccaattgctgaagatattggtgtcagctgctgacctatgggcgtagaatcccaaccgctgactcttttgctaggatcgatgctgttgatccagcacggttaaaacgtgttgccaacaaatatatctatgacaaagacattgcaatctcagctattggtcaatccaagatttgccagactacaacaaattcagacgcagaacctactggaaccggtactaaggctctgaaataaaggtcactgaatcgcaaggttcgcccacggggagattccgtaggcggagagagcagaacgaggtgatgatggattcattatttttgagtttttcttactgtatcttcataatttaccatcatcgctggtaaaataagtgtaccatttactctttgtcctctactggaaaaatgctagagatcctctggtgtgtgttttttttgttctcttcataacttttcccatacacatctactaattaagttctttgacctgtttggcttgaaaacttgaattggacctacatttcattttcttctttgtgaaacttctatcaattcactcctgtgatttgatccaaaaaaaaaaaaaaaaaaaaaggannnnnnnnnnnnnnnnnnnnnnnnnnnnnnnnnnnnnnnnnnnnnnnnnnnnnnnnnnnnnnn

SEQ ID NO: 92525 - DNA, 870 bp, Arabidopsis thaliana columbia
  unsure (1)..(870): unsure at all n locations
aaaacacgtgggttctgacctgacccagaggggttgccattaatgaaatagcagaaagcataatggcattcaacactaactacaaggatactgnactgttcggcgtttatgcagttgccaaggccgattgcttggatgatttatcatatgccattatgtatgaggtaaccaagctggcctaccgagtttcagacgctgatgtgacacgtgcacgaaatcagctgaaatcatcattgttacttcacatggatggaaccagcccaattgctgaagatattggtcgtcagctgctgacctatgggcgtagaatcccaaccgctgaactctttgctaggatcgatgctgttgatgccagcacggtaaaacgtgttgccaacaaatatatctatgacaaagacattgcaatctcagctattggtccaatccaagatttgccagactacaacaaattcagacgcagaacctactggaaccggtactaaggctctgaaataaaggtcactgaatcgcaaggttcgcccacggggagattccgtaggcggagagagcagaacgaggtgatgatggattcattatttttgagtttttcttactgtatcttcataatttaccatcatcgctggtaaaataagtgtaccatttactctttgtcctctactggaaaaatgctagagatcctctgtgtgtgttttttttgttctcttcataattttcccatacacatactaataagttctttgatgtttggttgaaaacttgaattggatacatttcattatcgataccgtcgacctcgaggaagggcnnnnnnnnnnnnnnnnnnnnnnnnnnnnnnnnnnnnnnnnnnnnnnnnnnnnnnnnnnnnnnnnn

SEQ ID NO: 92526 - DNA, 1747 bp, Arabidopsis thaliana columbia
  unsure (1)..(1747): unsure at all n locations
atgatactgccagctactatacngactcactatagggaaagctggtacgcctgcaggtaccggtccggaattcccgggtcgacccacgcgtccgaaaccctagagagattgagagagcgaagagaagccatcatcagccatggcgatgaagaatctactgtccctagctcgccgatctcagaggcgtttattcctcactcaagccacacgatcttcctcttcgttttcagctatcgattcggtgccggcttccgcatctccgacggctctatctccaccgccgccgcatcttatgccatacgaccacgcggctgagattataaaaaataagatcaagaagctcgagaatcctgataagaggttccttaaatacgcatctccacatccgatcctcgcttcccacaatcacatcttgtcagctccggagactcgtgtcactaccttgcccaatggtctacgagtcgctactgagtcaaatctctcggctaagaccgccaccgttggagtctggatcgacgctggatctcggtttgagtccgatgagaccaacggaacggctcattttttggagcatatgatattcaaaggcacggataggcgtacagtgagagcgttggaggaagagatcgaagatattggtggtcacctgaacgcgtatacatcgagggaacagaccacttattatgctaaggttttggattccaatgtgaaccaggctttggatgtcttggctgatatcctacagaattctaagttcgaggaacagagaattaaccgcgaacgagatgtcatcctcagggaaatgcaagaggtggagggacaaaccgatgaagtggttcttgaccatttacatgccactgcattccaatacacaccccttggaagaactattttgggacctgctcagaacgtcaaatcgatcaccagagaggatctacagaactacattaagactcactacactgcttccaggatggtgattgctgctgcaggagctgttaagcatgaggaagttgttgagcaagtgaagaagctatttaccaagttgtcgtctgatccaacaactacttctcaactggttgccaatgaacctgctagttttactggttctgaggtccgaatgattgatgacgacctaccccttgcacaatttgctgttgcctttgagggagcatcttggactgatccagattccgttgctcttatggttatgcaaactatgttgggttcgtggaacaaaaatgttggtggtggaaaacacgtgggttctgacctgacccagagggttgccattaatgaaatagcagaaagcataatggcattcaacactaactacaaggatactggactgttcggcgtttatgcagttgccaaggccgattgcttggatgatttatcatatgccattatgtatgaggtaaccaagctggcctaccgagtttcagacgctgatgtgacacgtgcacgaaatcagctgaaatcatcattgttacttcacatggatggaaccagcccaattgctgaagatattggtcgtcagctgctgacctatgggcgtagaatcccaaccgctgaactctttgctaggatcgatgctgttgatgccagcacggtaaaacgtgttgccaacaaatatatctatgacaaagacattgccatctcagctattggtccaatccaagattttccnaggctttaaaaaantttaggcgggggncccttcttggnacccggtncttagggcntt

SEQ ID NO: 92527 - DNA, 758 bp, Arabidopsis thaliana columbia
  unsure (1)..(758): unsure at all n locations
caaagccaacggaagtgtttcttaattcattttttgtttgttttggtttaaataattcagtgtctcacgagctgtgtcgagattggatccatacaaaatctgcacgacgcctgcttcttcactctctcccactgttccagcttcaactctcttgatatacagagagagatagagataaagagagagagagtgagagtgatagctctcggagaaattgaagaagacacaatctgattagtattctccaatattccatcaactttttgctgagggaaatctccagatttataatcgtttgtatatatatatatacagagcagcgtagaaaaggatcttagatttatagcagcaacaaaaaaatgtcaatgccactacaacgtggcatctctggagtacgagtttctgatagcagtgatgatttgagagactctcaaatgaaagacaaaactgaaagagctcgttctactgagaacaacaacttaaccttaaggtttccttttggtttcctctttagtaatccaatcttccttccaaacacgggtgggtggtggcgaaaacgggttttctgctggtcccatatagtgcaagaagnagggcatagattgatggtggtggttcctcaagatcagtttnggtcccaattgngggnattgnccctgctggtccttcctggggggncatttccatttcggnttcttcccgggggcangnnaaccccattttggggggnccggggcagntggttccaccttngggnc

SEQ ID NO: 92528 - DNA, 495 bp, Arabidopsis thaliana columbia
  unsure (1)..(495): unsure at all n locations
gaaggcgggaccccctgcaggtcccggcccggaattcccgggttgacccacgcgtccgcccacgcgtccgcccacgcgtccgcccacgcgtccgcggacgcgtgggttcatgatctaaggtcaagattcggtatcattcctcaagaacctgttctcttcgaaggaaccgtaaggagtaacattgatccaacacagaaatactctgatgaagaaatctgggagagtctcgagcgatgtcaacttaaggatgttgttgcttccaagcccgagaagctcgactctctcgtggcggataatggcgagaactggagtgttggtcacagacaattactgtgtttaggaagggttatgctgaaacgaagcaggattctgtttctagacgaagcaactgcgtcggttgattcgcagactgatgctatgatccanaagatcatcagggaggatttttcggactgtaccattatcagcattgctcataggattccaacagttatg

SEQ ID NO: 92529 - DNA, 857 bp, Arabidopsis thaliana columbia
  unsure (1)..(857): unsure at all n locations
aagtcagaagcccgtaacttgaagatccgcgtagacaaggttttgagtgaaaatccaagtatattccctctggctaacacagtgaatccacttggagctgctgatgtatacaccagctcagaacaacaaaagcccctgctggctatcaaaaacgaagatgagaaatcgatcatctctgaagaaaaaccggtgaaatctgcttcagtttcatctcatcacgtctcacctgaagacgacgagacaacagatattttactgtctgagattctagcatcaaagcgaagggaagggaaatctattattcccgataagaatctagtgaagacagaacaagcttcaattgaggaaggtccatcaagacctgtaaggaaaagaacaccgcgcaatcgtgaaatcattacgaaggaagagagtaacccaaagaggcgtcgggtttcaagagagaagccaaagtctaatgctgtgatggcttctaggttttccaacaggaagagaaagcgaggaaaacgaaggtcaggctctgccgggttacgaagaagatcctgaagaaggtttggaaactttcaagtaactaatcggatcttgtgttaaaaagtaaaaattgttcattctaagatattcttaactcttaagcctttaaagtacaaagaaatatttatagtggctgtgttttgattcttcatgtcaacaatatattcaaactacatcaacttttgaactttacttctataatttagaggtgtatatatttttctctattttgtattatcaaaaagaataaaaaaaggcgngcagctctagaggatccaagcttacgtacgcgtgcagtagacgctcataaagcttctatagtcccc

SEQ ID NO: 92530 - DNA, 967 bp, Arabidopsis thaliana columbia
  unsure (1)..(967): unsure at all n locations
tatacgacttacttagggaacgctggtacgcctgcaggtaccggtccggaattcccgggtcgacccacgcgtccgaaaatcttccggagcttctaactttttttctgcatggcgtttcctcttcgtgtctaagagcgcttcatttctagttccttttctgcttgcctgggtagatattttatatccttaaaaggagaaaatggatgaaaacaacgcggcatagttaaaccgggatcaagcagattgtgagactaaaggagattcttcaaaaatggcacactgtcacaataggttcaaagtcagatgatggagaggtgggagctagaaacacacagctatcatttcacccgttttaaacaagaggctattggatttgaagactggtgacctcgacgaggaaactacttgccaaagccctgaaccaccggctgatgtccctaaaaggatatttggcggtttatggtgggacccgaccttccggaatttattaatacccacaaactttcttaaccttcttttgttaaaggtcttgcttgagaaagctgaagaagaatttggattttaatcaccagggtgcgttaacccttccttgggaaagttgaaactttcaagggcttacttaggcgcttgagaaacctccttaaaaagacccctgggctggagatcccggaaaaccgaagaataattataccccctcccatattaacctttctttccctttttataccaccccctttaacctcgttaggggggaaccctcccaagggattgaaaacaattctctttgttttttaacattttctccctccccccccggggtttttttaaaagaagaaagggattcctttaaatgggggattaagttaaaacccctggggccttggtttttgcccctttcggcccctttggaaaaaaaaaaaanaaaacctcaatatttattgggcgccccttaatccccctccccccc

SEQ ID NO: 92531 - DNA, 852 bp, Arabidopsis thaliana columbia
ggatgaaagtgatttaattaatgttacattagtgaaacagccaagttcgaagtctcgtttctttgatgagagccagacaacaagacagaggataaattaggaggtagccaaacataatcaatggcatccatttgcaggtgcaaatcaggcaaaggcgtgcttgttgatcccattaataaccgggccaacaacgcccctggtcgccttcacatatgaaaggtattcgctataatgcatgctgaataatgtactctggtaacgcgttagattgattcgcctacgcactgcttctgttattacaccattgtatcctgctttacgcaccagcgaatcgattgcctctatctttgtccagccttcatgagctggcacctcaggcaaatatgtggcgcttcgctttgtattagcctcaggttcagtaaactcaatgattataccatgcttaccaacctcccaatcaaggtaatcttctgcatctttataatcagtcaagacagacaccgtacactgcagagatggcaattctttggcctgtataggtgggaacctgcgatccctcaaggcacttgtcaaggcataatccttgaagccactgatcaagcggcgtgcttccagtgtaccaatacatccacgcaaccgaggctctccaccattcactattttcttccaggtaacaaacaatggatgattggcctcttcaaaggcaggtggtggagtctcttcattgttgtagtgagagaccaaagtgtcgaaacagtaaacagccatttctctgttcgcccacccccttgttgcttggaagagaaaaccgcaaataaaaaaaatccaaatcagcaagtaatgtgaaacgga

SEQ ID NO: 92532 - DNA, 395 bp, Arabidopsis thaliana columbia
tcgctggctccaaacgtatgaaccagaacaaagccttttagatagttccgtctgcgaaccctaaaatcattcaataaacttcgaacaaaaacgaatgcttttgttcaatcatcttctcagtttctgattccgaagaaaccctaatcaaataaatcatggactgctcatgcagtactcgtccttcgtctctgcttatctcttccgaaccatcttttcgctttcctcactctaatttctcctcgaatctcagctttcagataccgaaagatacgaagttggtgaagcagcgtttggtagtgagaagttcctctggttctgattatcaaaacggcgacgttaatgggtttcctctcaaaccaaacaaactctttatgcaagaggcgattggagctgag

SEQ ID NO: 92533 - DNA, 523 bp, Arabidopsis thaliana columbia
tcacgcgtccgcacacgcgtccgcaaatatgttcctcttgatctccttcagggtgcatcagtggtggtgctggctaatctgaagccgaggaatatgagaggggttaagtcatgtggtatgcttttagctgcatctgacgcagctcatgaaaatgttgagcttcttgttccaccagaaggctctgttcctggagatagagtttggtttggcaacgaagaagatctcgagcagcttcctgaacctgcacctcctaataaggttcaaaagaagaagatgtgggaattggtgcaaccacttttgaagacagatgcgtctggtgtttcaatgcttaaggagcatttgatgcggacatcttctggtcttgttacttccaagtctttaagaaatgccaacatttcttgatttctgttaaaagctattttgtgatgttgttttgacacaagagagaaagaccaaaccgctaaggagattttttccattgcaatcaaactgatgtttttgttgattcaaaaaaaaaaaaata

SEQ ID NO: 92534 - DNA, 577 bp, Arabidopsis thaliana columbia
  unsure (1)..(577): unsure at all n locations
cnnnnnnnnnnnnnnnnnnnnnnnnnnnnnnnnnnnnnnnnnnnnnnnnnnnnnnnnnnnnnnnnnnnnnnccacgcgtccggagaatttacataaaatagagggttttattgtaagtaactcgctatctttcggttatcttcggtttgtaatttttcatgatcttcttcgacttgtagatttaagttttgaattcgttcaccagaattcagaacttgatactgatcaattgaattttcactcatcaatttgcaacgatttgatctacggaggcttgacgaggtggattggagccagaggaagggcggatcatctcgaagtagaagatctcgattttggatcgctcggaaaactgatcaaatggaggagaaaaacggatcatcagaggtagagatcggagagaaagacgaaacgaagaagcaatcaaaggatcttgagttcttaagctgtatgatgcagccaaaaacagctgattcagatccacactacatcggaatccgccggatttcttcttcatcggaaagctgattctggcgttatctctcgccgttatgattggagatgccatggaaaaggt

SEQ ID NO: 92535 - DNA, 530 bp, Arabidopsis thaliana columbia
  unsure (1)..(530): unsure at all n locations
gactttcttagggaaacctggtacgcctgcaggtaccggtccggaatttccgggtcgacccacgcgtccgcaccatttgaagaaggagaagaagaagaagacgattcggtgaaagcgaagatgggtggaggaatggaaacgaacaagaacaagttcatcgaggactggggatctgctagagagaatctcgagcacaatttccgctggactcgtcgtaacttcgctctcatcggaatcttcggcatcgctctcccgatcattgtctacaagggaatcgtcaaagatttccatatgcaagatgaagatgcaggcagaccacacagaaagttcctctgaggttgtttgcaagaacactctctgcaataaagtctcagcaatgtgaaatttcaagacgaggatgttaaaacccgcttttggttttttcatttcaatcaacatctggaacccaaggatataattttttttttgggaaaagtttgttgtaatgactacactttgttatgcaaataaacaaaactcagttttcccnt

SEQ ID NO: 92536 - DNA, 495 bp, Arabidopsis thaliana columbia
  unsure (1)..(495): unsure at all n locations
gaatgtgaggggatgcaatttttccccgggagcacctattcccacgattcgcccagctctaattgtgccccctataaagaaaaatggtgcgccctcaagggcccgtccggaatttccggggtgggcccccgcggccgggcatttacatgatgatgaacttagttccagaagtggcaccatcagtgttgtaagcagtgtaagcacagaagcaaatggagctacgctgagtagagagataagaaacaatgatccaatgttgtctcattgtagaaactcttatgctccaagccaaggtagtcgggacgagtacgacacagggacccatagtatgagcagtctcagcagtccaagtcatgttcatgagaccgtcacacttagtcctctccctcagcatcatacagctggccaccgcttcactgcannnnnnnnnnnnnnnnnnnnnnnnnnnnnnnnnnnnnnnnnnnnnnnnnnnnnnnnnnnnnnnnnnnnnnnnnn

SEQ ID NO: 92537 - DNA, 566 bp, Arabidopsis thaliana columbia
ccgggaatttccccggggttctgaccccacgcccgtgcgctttcgaacaaaattcgaaaacagcacacggcgatggcgtcgcttatactcggagctcctccgcgagtcaccgtcgcattaccttcctcacggttatcatcttctcactctgaaactgccggtgtctctctctcttgcttcactcatcaattctctctctccacttcctcatccagctcaattccactcgtgtactgtggcagaggtgaccggaaaacagctaaaggaaagcgtttcaatcactcttttgggaatgcgaggccaagaaacaagagcaaaggaagaggaccggagagagtaccggttcctccagcaccaccgaggaaagataagtttgagaacgacgagaagatcaaaatcgatatcgacgagtctctcttctctaattagaaatatgagattcttcacttgttgtctctcactgtaattttaatttgttttttgaaaagctttgatgctacgactcttttgttgttaaaaacatctccaaagttctcatctttttatgaaaagtttgcttctttatg

SEQ ID NO: 92538 - DNA, 613 bp, Arabidopsis thaliana columbia
  unsure (1)..(613): unsure at all n locations
nnnnnnnnnnnnnnnnnnnnnnnnnnnnnnnnnnnnnnnnnnnnnnnnnnnnnnnnnnnnnnnnnnnnnnnnnnnnnnnnnnnccacgcgtccggacacacaagttttattttgttttcttactatatataaatcaccaaaagaaagtaactttatacacacgtctaggtcgcactactattcttttaactacacaatgatcggctctttaattacttttgtattgatgttcttcgttttccttttggtatcatctttagatggtcagcgattgcagcaaaactgcctggaagaaccgataacgagatcaagaacgtatggcacactcacttgaagaagagactcgaagattatcaaccagctaaacctaagaccagcaacaaaaagaagggtactaaaccaaaatctgaatccgtaataacgagctcgaacagtactagaagcgaatcggagctagcagattcatcaaacccttctggagaaagcttattttcgacatcgccttcgacaagtgaggttttttcgatgacactcataagccacgacggctatagcaacgagattaatatggataacaaaccgggagatatcagtactatcgatcaagaatgtg

SEQ ID NO: 92539 - DNA, 1246 bp, Arabidopsis thaliana columbia
accacgcgtccgcccacgcgtccgcccacgcgtccgatttgatctcaagctcataggaatttgatctccacattatatcttgatcatcaccacaagaaaaacatttcaacttcttttatcagcaatcacaaatcaaagagatgggaagagctccatgctgtgagaagatggggttgaagagaggaccatggacacctgaagaagatcaaatcttggtctcttttatcctcaaccatggacatagtaactggcgagccctccctaagcaagctggtcttttgagatgtggaaaaagctgtagacttaggtggatgaactatttaaagcctgatattaaacgtggcaatttcaccaaagaagaggaagatgctatcatcagcttacaccaaatacttggcaatagatggtcagcgattgcagcaaaactgcctggaagaaccgataacgagatcaagaacgtatggcacactcacttgaagaagagactcgaagattatcaaccagctaaacctaagaccagcaacaaaaagaagggtactaaaccaaaatctgaatccgtaataacgagctcgaacagtactagaagcgaatcggagctagcagattcatcaaacccttctggagaaagcttattttcgacatcgccttcgacaagtgaggtttcttcgatgacactcataagccacgacggctatagcaacgagattaatatggataacaaaccgggagatatcagtactatcgatcaagaatgtgtttctttcgaaacttttggtgcggatatcgatgaaagcttctggaaagagacactgtatagccaagatgaacacaactacgtatcgaatgacctagaagtcgctggtttagttgagatacaacaagagtttcaaaacttgggctccgctaataatgagatgatttttgacagtgagatggaacttctggttcgatgtattggctagaaccggcggggaacaagatctcttagccgggctctagttaacatgtttgaggagtaaagtgaaatggtgcaaattagttaaggctaagaaattcaaaagcttttgtttaccgagaaaaaaacacactctaactcttgatgtgatgtagttagtgtattaattagaggctgcgttttcaaaaaattgaattcatttgtttctccaaaagaaaaaaaaaagggcggcagctctagaggatccaagcttacgtacgcgtgcaggtgacgtcatagatcttctatagt

SEQ ID NO: 92540 - DNA, 765 bp, Arabidopsis thaliana columbia
agctaagatcaaagataaagatgaagttcattaataaagggaagagaatatggatgttagccttactaaaaatccaactagttctgatcgtgctaaaatggccaaaatgcaacccatattatcgcaattccctgaggatcagatgagtagatatgaatcttttaggagatctgcccttcaaagaccacagatgaagaagttattgataggtgtcactggtagtcagaagattggtatgccaatgattattgttgcgtgtggtattgcaaagatgttcgttggtgaactcgttgaaacagctcgagttgttatggcggaaaggaaagaatcaggacctatcagaccttgtcatagtcagggagtcttagcggagactaaagctcgaaggacaagtgcctaagagatcagttccacgccttttccgccactcaacaggagccaaaagagtacttagatcagcctaagactggggaatttaccaatgctgctcaaggataagggtctacggcaggtttaagctggcgagatttgcctatcaatctcatcataaaggagaacttctttggcttccctggtggatcatactgtgctttgatgttcttaccgttgtgtgacaacttttgtagtaaatcaatctttggatacagaccctgaaatggctatcagtcttacggtttggtttttaaaaaaaaaaaaaaagggcggccgctctagaggatccaagcttacgtacgcgtgcatgcgacgtcaagctggtctatagtg

SEQ ID NO: 92541 - DNA, 916 bp, Arabidopsis thaliana columbia
  unsure (1)..(916): unsure at all n locations
cttacttagggaaacctggtacgcctgcaggtaccggtccggaattcccgggtcgacccacgcctccgcgttaaaacagctcgagttgttatggcggaaaggaaagaatcangacctatcanaccttgtcatatcagggagtcttatcggagactaaagctcgaaagaaaagtgccctaaaaatcagttcccctccttttccgctaagcagcaagacccaaaaaagaacttatattcaacactaagacctgggaaatttaccaatcctgctccaggaataaggtctacggcagtgtttaacctggcaaaattttcctatcaatctcatcataaagaaaacttctttggctcccctgggggaacaatatggtcttttaaggtcctaactttgtggaaccacttttgaaaaaactaatctttgaatccaacccttaaaggcctttcattctaacggttttttttaaaaaaaaaaaaaaaaaaataanatantnatggggggccccccttttaaagaaccatttttcctcccgttcatgaaattattttctttttataagccccctaattcaatcccccccccgttttatcaacggcggaatagaaaaccttggttccccatttttccccttaaaacacccctttttccagtggtaaaaaaaaaaacccccccatccccttccaaatnccccccttaaggaaaagaccccccttaccccattaaccccggggttggttttccccaaaaaccctactctcccccccttccccctttttttttttcctttttttcccctnccgctttcccaaaaattaaaagggctctttttggtcccttttccttcccccccacccaaataatgggtggtgtcctggcccccccttaaacttccctctaatggcaacttatatcccccca

SEQ ID NO: 92542 - DNA, 899 bp, Arabidopsis thaliana columbia
  unsure (1)..(899): unsure at all n locations
cgacttatatagggaacgctggtacgcctgcaggtaccggtccggaattcccgggtcgacccacgcgttcgcccacgcgttcgcggacgcgtgggggggacagtgctaataaacctgatgcttgggcgtttgaggaaggtcctcattctgattttgctggacctaattctgggagcacggcatgcgtagctgttgtttgagacaagcgggtatttgttgcaaatgcaggtgactcacgttgtgtgatatccagaaagaatcaggcttataatctttctagagatcacacaccagatcttgaagctgaaaagaaaggatattgaaagctgggggctttatacatgcagggcgagtcaatggaagcttaatctatcccgagctttcggtgacttggaatcaagcagaatatgtttttgccctctgaaaagcgaatagttcccggttgcccagatggtaacactggtgaaactctgggaaaaggatgattcccttgttctggcctgcgatggaattnggggatggcatgacaagccaacaactcgtgttttcatacctaaacattgaattcagagaccaactttggggggttggagaaaagttctcgatgaaggttggctccaacccttaggggggaggggtgggaaacatgaccttattttgggttcattaaaacccctcctcttagagaacggatataaccaagcccgccggcagaagaaccccattagccgtctcttaaattagcccatctcaagggagggaaaccccttaatcaaatttggggtaaatggaatctttggagaaatatttttccacccgcgtggtttgaattaaccttccgcggggcgactttttctagcgcccatttgaagggtaattgggaaaaaaaaaaaaaaaaa

SEQ ID NO: 92543 - DNA, 639 bp, Arabidopsis thaliana columbia
tctacgactttcttagggaaacctggtacgcctgcaggtaccggtccggaattcccgggtcgacccacgcgtccgcatactctctttttttctcggacaagaaggctacagaaagatatgtcgctgtcgtcttacctcagcccgacgcgccttctagaaggctacctccgccgttgtctcagggcggcaggactgacgtcgcagacgctttccatagactctgaaacaaccatccacttctggggcccaccacctctagaccaccggagcgacgatgacagaccggttatgcttctcctccacggcttcggtccgtcgtccatgtggcagtggcggcgacagatgcaagccttctctccctccgctttcagggtttattctcccgatcttgtcttcttcggcgactctacctcttcctccaccaatcgcaccgaagtcttccaggttttataaaccctatggctctatctctctattaattataaggaatggttggatcccacaatttcccattagatttaccgatgatattattgttttttttaaacgaaccagatttgggatggtttccgaacgctagcctcatgacttggggaaaaacaaatcagataaagaacccaagaagcaaattttttcaaa

SEQ ID NO: 92544 - DNA, 593 bp, Arabidopsis thaliana columbia
  unsure (1)..(593): unsure at all n locations
caaaaacccttttaatctctctctcgtgtagatctatcactctccatttcccttcttctctgtaaaccctttataaatctcacttccttcttcttcatcaatccttcctcagatctcttcttattcaaattcaattgagagatactctcttcttcttctttttctctatccagttccttctgtgcgaagttcttctgattaatttgagtttcttggaagcttttactcgatcttcatcggatcttagggttttgtttaaatccagatcttgggttttgttaaataatggcgactccttatcctggagcgacgcaggtgggttcgtactttgtggggcagtattatcaagtgttgcagcagcagccagatcttattcatcagttttattctgagcctagtagagctattcgtatcgatggtgattccaccgagactgctaattctttgctgcatattcataacatgggtatgtcactgaatttcactgcgattgaagtgaagacgattaattcagtcgagccgtgggaaggtggtgttcttgtgggggttcagggccttgaaaacaaggtttttgnacaaaggggtttttgctg

SEQ ID NO: 92545 - DNA, 429 bp, Arabidopsis thaliana columbia
aattgttatccccttctctctctgaaactagggtttctatttctctgagtgatgtgaaatgctcgtgtaaacggaaacgatgcagaagattctgtgcaaaagtaccacttcttcaacccctgttctctctacgccggtgaactctctcgccgccggttttatctctctagggtttaagacccccgttaaaaatctccctccttgttctactactaaacctctctccacttgtttcttctctacttccgctatgccgaccacaacggcttctgtttcttcaggcggtgttggtttctctgcttatctacagaggactgttcataaaccggcaccggcgtctgttcggttctcaacagctggttaccggacttgccggtgttcaattgacggtacgaaccgggcttgggttggtcgaaccgggtcttggcg

SEQ ID NO: 92546 - DNA, 579 bp, Arabidopsis thaliana columbia
  unsure (1)..(579): unsure at all n locations
tatacgactttcttagggaaagctggtacgcctgcaggtaccggtccggaattcccgggtcgacccacgcgtccggaaaaatcttttttcttcctctccttgatcggagggtcgccgtgttgaaaaggatggatggtggtggagagacgacggcgacggctacgatggaggggagagggttgaagaaagggccgtggacaacgacggaggatgcgatcttgacggagtacgtgagaaaacacggtgaaggtaattggaacgccgtgcaaaagaactcaggtttgctccggtgtggcaaaagttgccgtctacggtgggcgaatcatctccggccaaatctaaagaaaggatcttttactcctgatgaagaaaagatcatcatcgaccttcacgctaagcttggaaacaaatgggctcggatggcttctcagttccctgggtgaaccgaccgtgagatcaagaactattgggacaccaggatgaagagaagacaaagagctgttccaaaccaagatcttgatcatacccaccaaatatgattcagnccacatattctttaatacttcataatcctgggct

SEQ ID NO: 92547 - DNA, 533 bp, Arabidopsis thaliana columbia
  unsure (1)..(533): unsure at all n locations
nnnnnnnnnnnnnnnnnnnnnnnnnnnnnnnnnnnnnnnnnnnnnnnnnnnnnnnnnnnnnnnnnnnnnnnnngtgggtcgacccacgcgtccgtacggcggcgtgatgacgacagaagggggaaggtcgtgagaaaagaaaaacacttctcaatctttctacagtcttcttcttccaaaagaacaccatcttccttcgtaatgtcagagaaccagtccgaagaagtccagcaaatcgagaagctctatgagttcagtgagcgtctcaatgcctccaaggacaagtctcagaatgttgaggattatgaggggatcattaagatgtccaagactagtatgaaggcaaagcagcttgcgtcgcagctaattcctcgctacttcaagttcttccctagtctctctactgaggctttcgatgcgcatatggactgtatcgatgatggagatcttggggtacgtgttcaagccatccgtgggctcccgctgttttgtaaggatacgccagatattttatctaagattgttgatgttct

SEQ ID NO: 92548 - DNA, 585 bp, Arabidopsis thaliana columbia
  unsure (1)..(585): unsure at all n locations
anncgggttcnttgncttccaggncttttgggaagggttnccccggagcgggnccacaaccnnttttggggagtccaaattgcccccccccagattttcttcccaaatgggtcacaggatccatggcgtcatgcatccaaacagacctcatctcctgaactgccttcttacattgtgacttgccacaactgtggccatggaagtgatctccgtggatgccctcaatctcccatggtcattggaggtgattccaagaattgcagttcacctgatgcagtgaacaaagtgaggcaacatatagtagatcatatggacttgtggctctctgagtgtcgtggagggattaggagttccatgtaaagagtcacacgaagtcagaaactgcggttatgcaaataaataaaacatcagatgtatgtttcaaacctgtatctgtgtaactgtaacctctgatgtatgtttcgaacttgtctctacggacctaatacagtagtttacacgaaaaaaaaaaaaaaaagggcggccgctnnnnnnnnnnnnnnnnnnnnnnnnnnnnnnnnnnnnnnnnnnnnnnnnnnnnnnnnn

SEQ ID NO: 92549 - DNA, 899 bp, Arabidopsis thaliana columbia
ccgagcttgacgttaatgctgatttcttatacttgatagcagatgcagaagttatggcgatccaatacggaaacccagataaactatgtgtaccactccgtggaagctcaaaagaatccgtgatgatttttttggaaaccatagggctaaatatgttaaaaaagtttttgtgtagagagagtttccgggcctaacctctaaaacatttaagcccgaaacatctgctatacccttggggccacccaaaaaagtccatatagggctttggtgggttccaatttcgcactgaagtgggcatatttccaaaggggcacctgcaaacaattacctccgggtttattaaaataaaacaaaatgtcttttggatcctttccaaaaatttttttgagaaaaggtggttaccccttaaagccaatccaaacaaccccttttttttggaaagggaacataatttccctcccacccaaattttctttcccaaatggggtaccaaggtcccttggggttttgcctccaaaaaaaacccatttttctgaaaggcctttttacatgggaacttcccacccttgggcctgaaaagaaatccccggaatccccctcacccccccggggctttggggggattccaaaaatgccccctccctctcccgaaaacaaggagggcacctttggaaaattatggcctggggctcttgaagggcggagagtttagcttctcttaaaagtccccaacccaactccggtttcgaaaaaaaaaaaaaaattttttaaacctgtcttggaacgccccccttgtttgcacacctgcttaaaaaaaaaaaaaaaaaaaaaagaaagggggccctctaaaacacttcccaccccccccccctttttttttttggccaataaagctcggg

SEQ ID NO: 92550 - DNA, 470 bp, Arabidopsis thaliana columbia
aacaataacaactctcatgaacttgcagattgatatggcagtatctggtcatacaccacttgtgaatgctgcagtgatagttgatccttcagttaggcgaataatagctagtgaaactgatcaagtatatgcatcatctgctcctcatgacatgactagcgcagagaccaggcccttccaagaaacacgggaaatatgtttaaatgacacacgtgaaaaacataatggttcattgtctgctctttcttgtctgaatccctggcaatggagtttgcagccgcatgacactgaagattgtacccagtggcatcctcttaggcatgcttccatggttgccattgaatcctcttctgccagagatagaaatttgtttcccaatccatccaagatttttgatcaggatcatgttttggcctcaaatacagattctccggctaaaaaacagaaaacaagcagtcaaagtccagacg

SEQ ID NO: 92551 - DNA, 539 bp, Arabidopsis thaliana columbia
  unsure (1)..(539): unsure at all n locations
ctcnnnnnnnnnnnnnnnnnnnnnnnnnnnnnnnnnnnnnnnnnnnnnnnnnnnnnnnnnnnnnnnnnnnnnnnnnnnnncggccgctaattaattaaggtggatatttgatgctaggagaggagagtgagagataagatgggtttcgtctgaagagctccaacttgattcgctcaattgatctcttttgtatcgacaacctgcgatggcgccggcggaatctggagtctctccccgtcggaatccttctcaactctcgtggatgaatctctctagtaacttgattttggcctaccagagctttggtgtagtctacggtgatctcagtacttctcctctttatgtcttccctagcacatttattggaaagttgcacaagcatcacaacgaggatgccgtatttggtgctttctctttgattttctggaccctcacgctcattccccttctcaaataccttcttgtattactgagtgccgatgacaatggagaaggcggaacatttgctctctattccctgctttgtaggcatgctaagc

SEQ ID NO: 92552 - DNA, 658 bp, Arabidopsis thaliana columbia
  unsure (1)..(658): unsure at all n locations
nnnnntaatacgactcactatagggaaagttggttcgcctgcaggtaccggtccgaaattcccgggtcgacccacgcgtccgcacatttattggaaagttgcacaagcatcacaacgaggatgccgtatttggtgctttctctttgattttctggaccctcacgctcattccccttctcaaataccttcttgtattactgagtgccgatgacaatggagaaggcggaacatttgctctctattccctgctttgtaggcatgctaagcttagcttacttcctaaccagcaagctgctgatgaggagctctcagcttacaagtttggtccttccacggatactgtaacttcatcccccttcagaacatttcttgaaaagcacaaaaggctgaggaccgctttgctgcttgttgtactttttggagctgctatggtcattggagacggggttctgaccccagctttatcagttctgtcgtccttgtcaggcttgcaagctacagagaagaatgtgactgatggcgaactactggtgcttgcctgtgtcatattggtcggactgtttgctttgcaacattgtggtactcacagggcggccgctctagaggatccaagcttacgtacgcgtgcatgcgccgtcaagnnnnnnnnnnnnnnaac

SEQ ID NO: 92553 - DNA, 825 bp, Arabidopsis thaliana columbia
acgacttcctatagggaaagctggtacgcctgcaggtaccggtccggaattcccgggtcgagccaggcgttcgcccacgcgtccgcccacgcgtgcgcggtatattccccccaagagatatgtgtttgtaacttcttcgttttgcacagtaacggagggaacttgtttatatatatatatatataaatgtacaggtcgaatttctgaagcgggggggggctggtgatcacaatggagccctaaaggacgcatgctttcacttaggtcccttacccgcaatgaccagtctttactggaaaacttgaaggagacttttgttagtttactccaacccgacggacccgcacctgggaaagatttggcctttgaatgatctggcaaatacgctacaggtttctgccggtaataggcttgggaatcggaagaccgaagttaatgaaaataatcaaggcgacgctttacacccataccgagggtttaagcttaaatgagtaaagacgggttaataatctcctgaagaaaattctttgaggaagggacccccgtttgattggggttattaaatcaaatcaaaaaaagatgcaccccaacttggttcttagtcacacaacgttttagcgccctgaatacaaaaaggggggacaccacttgttgagatgactaaacttgcccaaaaacttttggaagaaagcgcttttaaagatggaattctgcgatgccgaggttgtgcaattacctgtttacaataatggagacctgaggtgggttcacactttttggtacccaaccaactaaccggtaaattgctgggccgttttttatttg

SEQ ID NO: 92554 - DNA, 749 bp, Arabidopsis thaliana columbia
  unsure (1)..(749): unsure at all n locations
cnnnnnnnnnnnnnnnnnnnnnnnnnnnnnnnnnnnnnnnnnnnnnnnnnnnnnnnnnnnnnnnnnnnnnnnnnnnnnnnccacgcgtccgcggacgcgtggggcgagtgcaattcagaaatcactctggctgataaaaaacggtgtcgtatggttctttagtctcatcactttcctaaagagcagtgaagcaaaatggcgaattggatctcgtcgaagctcaaagccgccgaaacaattcttcaacagcttgatcagcaggcagcagattctcttcggaaagatgagaagtcagagacccatgacgaggtgtttgagacctctccaaaatctggaagtagtcctgtttctttgaaagatcagttgaggaagaagacatatgaaggtagtgactctggtagtggatctcagagaaactcaacagagcaaaagcctagctacttaagtagcagcaaaaaagtacgcataccagatcaatcacacgaaaggacaagtgcaccgtcacaaagtttgacacaagataatactaaactcactgacaatgattggacagaacttctgagtactccaaatcagaggaccagcacttctacgtctcgtagtcctggtgaacatctgcgattcggggattgaagaagggatggaaaagacatgggaatttggggaaaatcctttggatctgatggaaagagaagagagtagaatgggggtaatccagagggggccccaaaacagacaattaggaccca

SEQ ID NO: 92555 - DNA, 434 bp, Arabidopsis thaliana columbia
ggcccgaatttccgggttcaaccaagccttccaaattcagccaggggtctggtagtcgacagttagattccatagaagagtcaaaaggttcaacatcaccagaaactgctgatctggtagtccagtatcaaatgtttcttaatagacaggaagaagttcttgctgctactcgcattcagaccgcctttcggggtcatcttgcaaggaaagctctacgtgccttgaagggaatagtgaagctccaagcatatatcagaggtcgtgctgtgagacgccaagcaatgactacactaaaatgcctgcaatctgttgtgaacattcagtcacaagtctgtggtaagagaacacagattcccggaggtgttcacagagattatgaagagagcattatattcaatgataacattttcaaggtggacacaaacggccaaaag

SEQ ID NO: 92556 - DNA, 520 bp, Arabidopsis thaliana columbia
  unsure (1)..(520): unsure at all n locations
gcacgcctgcaggnaccggnccggaattcccgggtcgacccacgcgtgcggttcagggtgaagcttatgtcggatctgaagacggagacagataagatcacacacatcgatgtttaacaaaggcgtaaccgaagaggaagaggaacaaatcgacggttctggttctgggtctggttccggtcaagagaaggagatgattcctctcggtgaagccgtggaatctaaggaaaaagaagagcagcaagcgtgtaaagaaccgtgaatcccaacagttttgatcaaataaaggaatttgtgatttgacggaagaaaggtagtgaagaaatcccatctcccggttgagaaggcggccggcgggagtgggttcgaagccggagaaagaatgcgttccctatgtttctctattgaagcttatcgaagaagggagatgggaaggacgatttcatttgggatgggtaggtcacccgaccaccgggttcggcccaggaaacgggtccaaacctgtcataaaaaaactcga

SEQ ID NO: 92557 - DNA, 397 bp, Arabidopsis thaliana columbia
attgtttctagggtttacgaaatttgggtctctctccctctctctacttaacgctctctgtatcttcttctccgtcaacgatacgaacccagagacgtcggcggttaaaacaatcgtcggatctctctggattcgttagacgagaagtttccggtatctaatttctgtgcgttagagagaaattagggttgttgctacgatggatgagactttacttgacgatataatacgacggcttttggcgacgaataatggaaggacggtgaagcaagcacagattactgagacggagatacgtcagctatgtttagcttcaaaagaggtttttctcagtcagcctaatctcctcgagctcgaggctcctatcaagatttgcggagatgttcatggtcagttt

SEQ ID NO: 92558 - DNA, 452 bp, Arabidopsis thaliana columbia
cagctatggttaacgtcagatttttctttaactatgggaaaacattcaataaggcacggggtccttatgagaaagagcgtgttgatgctgagctaaagcttgttggagaatacggtcttcgttgtaagagagagctttggagagttcaatatacacttagcagaatccgtaatgctgcaagagaactcttaactcttgatgagaagaatcctcgtcgtatctttgaaggtgaagctcttcttaggagaatgaatcgacatggtcttcttgatgaaacccataacaagcttgattatgtttcttgctttgactgttgagtatttccttgaacgtcggctccaaactattgcctttaagtctgttatggttaagtacaattaccatgctcgtgttcttatccgacaaaggcttattagggttgtgaggcaacttgtgaactttccattagttta

SEQ ID NO: 92559 - DNA, 691 bp, Arabidopsis thaliana columbia
  unsure (1)..(691): unsure at all n locations
atgattctccagctctctacgactcactatatggaaagctggcacgcctgcaggtaccggtccggaattcccgggtcgacccacgcgtgcgcttttagatagccatcatgtaaagaaaaaaccctagccgcctaaagaggcaacgacttctctgatccattgttgaagatcgatgaagcagaatccaaagacgaaaatggaggaaatgaagatctcattgtactcgcacatggacgagacgatcgaatccgattcagttgttagatctagaccaaaggcgaggagataaagcgaaggttagatctgcttttgtaccagcacatatacggggaagaaaggaatctatttcaggctagacaatatcaaatttccgatcaaatgtcagatatacgtgtctcaaactaatttacttttattgatttagttgttagaccaagcaagcaaacaaaaacttgaaagaactctgcaatggattacactgtcgatcgatatggttagatctgtgatgaaagtggacagataatacgagctttgtcgggaaaaggtgccagcngtgctacaatgtgtcaacggttgatggggtcatcaagtccagcatnaaccaaggttcatggnggggggcncccctaagttggccnagttccccgggggnnccnncnttngggtttcccaatncaaatttttgnccttt

SEQ ID NO: 92560 - DNA, 500 bp, Arabidopsis thaliana columbia
  unsure (1)..(500): unsure at all n locations
ccctcgcgtccggaaaaaccctaatcagcttctcgtctccataaattcagaaccaagaaacatctctgagagactaaacgaagatgtatcttcagtgctatatcaacgagaagggtgagaaggtttacacaactaagaaggaatcaccgctagggctagccactgaatctgcccatccagcccggttctcccctgacgataaatactcaaagcagagagtattgttgaagaagcgatttggtctcttaccgacccaaaacgcacctctccagtactgatgaagaagcaaaccacttgcctgtgttggtttttgatgttcctttttaatttgctatgttgtctcttaatgaaatgttgacttgaaccgtctttgtaatgtcttcaaatagtgtgagttaagagcaattaaaaaaaaaaaaaaaaagnnnnnnnnnnnnnnnnnnnnnnnnnnnnnnnnnnnnnnnnnnnnnnnnnnnnnnnnnnnnnnnnnnnnnnnnnnn

SEQ ID NO: 92561 - DNA, 499 bp, Arabidopsis thaliana columbia
acgactcaccatagggaaagctggcacgcctgcaggtaccggtccggaattcccgggtcgacccacgcgtccggttaggctgagtatatggacatgaagacccttttagaccgtacaaacgacgccatcaacacaatcatacgacttgatgagaccaccgaaacaggggaatttcttcagccttgtattgaagctgcattgcatttggggtgcacactcttggagagcttcaaggagccaacggaacattaacccgagatgttatcttagccaagactcaactaacttggacaacatgttgtcccaagtattcatgaaaccaaacaactttgctccaaagaatcttgcagtagcacaagagaattgccctgtctccaagtactctgcctaccctttatgctattcattccggccaatcagtgactcgtgtaagtccaagaacagtagaccggcgagtctcattgacccaacaatggcattacctttggtgggtgtgaat

SEQ ID NO: 92562 - DNA, 509 bp, Arabidopsis thaliana columbia
  unsure (1)..(509): unsure at all n locations
ggacacgactcancatagggaaagctggcacgcctgcaggtaccggtccggaattcccgggtcgacccacgcgtccggaacaaagaagaaattttgaaaatagtgaaaatggtaaccgtaagccaaagtcacacgacgacgtttctcttcttcaccacatttctcttgatattcggatcaatctcagccgtccgtttgcttccacgaccaaacactacaacaaccaacgatctagatttcatccgaacaagctgcaacgctactctatatccagacgtctgcttcacgtcactctccggctacgcctctgccgttcaagacagtccggcgaggctagccaagctcgcaatcggcgtttcactttcacaagccaaatccactgcggcttttctctccaaactctcacgctctgccgctaaatactccggtgatggccaccaaacagcttccgccgtaatccgagactgcgtttcgaacgtcgaagacgcggtggacgagatgagaggatc

SEQ ID NO: 92563 - DNA, 481 bp, Arabidopsis thaliana columbia
  unsure (1)..(481): unsure at all n locations
agctggcccgcctgcaggtaccggnccggaattcccgggtcgacccacgcgtccgggagaatttagtccaaacagctgagaataacttggctacagagagaaagaaaattgaggtagtctctcaacagattaacgatctgcaatctcaggtggaacggcaagaaacagaaattcaggataagatagaagcactgagcgttgtttcggcacgcgagttagagaaagtaaaaggttatgagacgaagatatccagcttgagagaagagttggaactagcaagagagagtttgaaggaaatgaaagatgaaaaaaggaaaaccgaggaaaagttatcagagacaaaagcagagaaagagacccttaagaagcaacttgtgtctctggacttagtcgttcctccttaattgataaaagggttcgacattctaaagggtttgatagcacaaaagacgcacaaaacgaatgctaggttgaaaacctg

SEQ ID NO: 92564 - DNA, 793 bp, Arabidopsis thaliana columbia
acccgacttttttagggaaacctggtacgcctgcaggtaccggtccggaatttccgggtcgacccacgcgtccgctctgatttagtgatttttcaaatttcaagttttcttcacctttaattttgtgtctcgttgatctctctttggacattctgctttggattctggaggcttctcattagatctctattagtgggtttaggtcaagttcttgaaatggataaggagaaatctcctgcaccaccacctagtggaggtcttcctccaccatcgggtcgttactctgcgttttcacctaatggaagtagctttgcaatgaaagctgaatcatcttttcctccttttgaactccaagtggaagcaatagctcaaatgctaaccgattcagccatgatattagccggatgccggataatccacctaagaacctaggccatcggccacgcttattcagagattctaactcttcctgatgacttaagctttcgaagggatcctgggcggggggtggggccccttaagcgcccctctttcttgagagatccgggcaaggacttaccttatttggttctgggaagggaaaaattaaattttggggtccatgaacctttaaaggggggagcccacagacccgctgggggaaatgattacccccaatttatacctcaagaaaccccgggggctttagtgaaagcccagaattaaccccccccggccaagggtggggggttcaccaccttcaccctcaaatccttttgcagggaataatattttttggaatttattaaaaaac

SEQ ID NO: 92565 - DNA, 584 bp, Arabidopsis thaliana columbia
  unsure (1)..(584): unsure at all n locations
nnnnnnnnnnnnnnnnnnnnnnnnnnnnnnnnnnnnnnnnnnnnnnnnnnnnnnnnnnnnnnnnnnnnnnnnnngggtcgacccacgcgtccgcccacgcgtccggcggaatcgagttgtggaagttgttgcggtgatggtggtggtgaagcggtaacggcggttggtggtggttgtaaacggtgcggtgagagagaagcgagtgtgttggtgttaccatgtcgtcatttgtgtttgtgtacggtttgtggtggttcggctttgttacggacttgtccggtttgcgatatggtcatgaacgctagtgtgcatgttaacatgtcttcttgaccatcttttttttttgttcgttacaatttaatttatattttttttgtttccttaggattatattcgcaaaagaaatagcaaattgattcttttctttttgtaagtacatataaattagtttttggttaanaaaaaaaannnnnnnnnnnnnnnnnnnnnnnnnnnnnnnnnnnnnnnnnnnnnnnnnnnnnnnnnnnnnnnnnnnnnnnnnnnnnnnnnnnnnnnnnnnnnnnnnnnnnnnnnnnnnnnnnnnn

SEQ ID NO: 92566 - DNA, 351 bp, Arabidopsis thaliana columbia
agcggacgcgtgggtttggagatgcacttttacgagtcttgcccttacctgaagttcgctcatttcacggcgaaccaagcgattctagaagctgttacgacggcgcgtagagttcacgtcattgatttagggcttaatcaagggatgcaatggcctgctttaatgcaagctttagctctccgacccggtggacctccgtcgtttcgtctcaccggaatcggaccaccgcagacggagaattcagattcgcttcaacagttaggttggaaattagctcaattcgctcagaacatgggcgttgaattcgaattcaaaggcttagccgctgagagtttatcggatcttgaaccc

SEQ ID NO: 92567 - DNA, 508 bp, Arabidopsis thaliana columbia
  unsure (1)..(508): unsure at all n locations
nnnnnnnnnnnnnnnnnnnnnnnnnnnnnnnnnnnnnnnnnnnnnnnnnnnnnnnnnnnnnnnnnnnccacgcgtccgctaaactaagagggacaccgttggacactgcaagcaaatcagattcatgtaatgatacccgagatagcaaagcgaacacaaatcctattcgtaaaagcaaccggatttctaaacgacgtgttctggatgaagaactcggtggtcttgatgatgatgacgaagaaattcaatttctcagaaggatgaaaatggctaaagttgtggctgtagaagaagatgttgatgacgatgaagacaggaccagaaaacataaaaagctttccaaggtaatgaaacaaaatgtagaattcccacggggtgtgggaacatcaaaaaactcacccagaaggataagatgggaaaagcttttgacgatgctgattatgtcaaggatgatgatgaggaaaaagaagacgctgttcaagatgttgagctaaaaaataaagaccgc

SEQ ID NO: 92568 - DNA, 1017 bp, Arabidopsis thaliana columbia
gctgggacgcctgcaggtaccggtccggatttcccgggtcgacccacgcgtccgtacggctgcgagaagacagaagagagtcatgggaagatctccttgctgcgagaaagaacacatgaacaaaggtgcttggactaaagaagaagatgagagactagtctcttacatcaagtctcacggtgaaggttgttggcgatctcttcctagagccgctggtctccttcgctgcggtaaaagctgccgtcttcggtggattaactatctccgacctgatctcaaaagaggaaactttacacatgatgaagatgaacttatcatcaagcttcatagcctcctaggcaacaagtggtctttgattgcggcgagattacctggaagaacagataacgagatcaagaactactggaacacacatataaagaggaagcttttgagcaaagggattgatccagccactcatagagggatcaacgaggcaaaaatttctgatttgaagaaaacaaaggaccaaattgtaaaagatgtttcttttgtgacaaagtttgaggaaacagacaagtctggggaccagaagcaaaataagtatattcgaaatgggttagtttgcaaagaagagagagttgttgttgaagaaaaaataggcccagatttgaatcttgagcttaggatcagtccaccatggcaaaaccagagagaaatatctacttgcactgcgtcccgtttttacatggaaaacgacatggagtgtagtagtgaaactgtgaaatgtcaaacagagaatagtagcagcattagctattcttctattgatattagtagtagtaacgttggttatgacttcttgggtttgaagacaagaattttggattttcgaagcttggaaatgaaataaatgaatagtattagattcttaaattgtaggtgtgataatgaatgttcgcttcttagaaaaaaaaaaaaaaaaaaaaaagataaagcggccgctctaaaggatccaagcttacgtacgcgtgcatg

SEQ ID NO: 92569 - DNA, 352 bp, Arabidopsis thaliana columbia
  unsure (1)..(352): unsure at all n locations
gattctntgaagtgtatatnaagagtgtagcagaagaagcgtttttcccggcggcggagagttcgccggagtctgagccacgtntcgcgttcacggttgtnccagggtttagaattgggaagacttcaatacaatgcgaggtctatctctcgctttcatgatcgccgtttgatctaagatccgaaaacggacggtgaagattcttgggcggtttggtaatttctgaaaatggtggggtatgtttagaaaattgagaaaaattgtgggccgttggatttgaagtagccgacctagagttgtgtttatgttttctttttttccccctcttttgagttttgtcgatattagttca

SEQ ID NO: 92570 - DNA, 505 bp, Arabidopsis thaliana columbia
  unsure (1)..(505): unsure at all n locations
actcactattgggaaagctggcacgcctgcaggtaccggtccggaattcccgggtcgacccacgcgtccgcttagcaatggcattacgtctagctttaagtctatgtgtttatctgctgtttacacaaggtgcacagggaaacactgatgattttgattgtgtggaaatatacaaacaaccagctttccaacatccattgttgaaagatcacaagatccaggaaacattcagcctagatggaaaaattgaaagaagcaacaaatataatacaaaagagcatttgtccaaaggaaccgttgccattttgagacaaagaaatgtatgccaagggcgttcatttgaataccgacgagtattctggggaacatttttgcaacaattgagaccattttagatggaagtatatatccggngagcagaaccctgatttaagtattcatgatttgaaactgcaaaataacccatgcaggaaaagtccaatatggcctaaagaatggacctaca

SEQ ID NO: 92571 - DNA, 594 bp, Arabidopsis thaliana columbia
  unsure (1)..(594): unsure at all n locations
nnnnnnnnnnnnnnnnnnnnnnnnnnnnnnnnnnnnnnnnnnnnnnnnnnnnnnnnnnnnnnnnnnccacgcgtccgcttcgaaattggagctggggttggtgacatgataaactggggactttgtgttatcttcgttttgtttgtgtttatctttttggtcctggcaatgtgagtgttgtatagaaaggggaaggagaaggaagtagcgggcctgtaaaactatcaaaggttttgaaccgcgacaaagacgatggtgaacgtagaagtgctgtttcagggaaaaaaattctgctgaagttgacaagtccanagaggacaaagctgcagaaagcaaaagaaattgacctgctttaggtcttaaccgcaagtttccgactagtatttttcggcttttgcctcgatgacagaatcttaacaccaaaagaaaggtagaatggtatttgattaaatnctaagttcccgaattggttgggagatacaatcctggtttggttttccaaaggactaatcctgcagggattggtctacttctttttcttgttaagcctaaaaggtgggttatcgccactgtttttttggaacccaagaatgg

SEQ ID NO: 92572 - DNA, 1191 bp, Arabidopsis thaliana columbia
  unsure (1)..(1191): unsure at all n locations
aacagtccatatgctcaaatgccccaacaaggtcaagcagttgccaacatcagtccatatcctcaaattccacaaacggcgntgtcatgccaaaccaaccaaatcaggctcttgggtcaggctatcaaccacagcaacaacagcagcagcagatgatgatggctcagtactatgcccaacagcaacagctacagcaacaacancagcaacaggcgtatggaaaccagatgggaggatacggatatggctataatcaacagcaacaaggaagcagcccatatctggaccagcaaatgtacggtttatccatgagagaccagacatcgcatcaggtagcatcatcatcatctaccacatcttatctgcctccaatgaaacctaagaataaaccagaggccaagctatttggggatcttgtggacatctccaaattcaagcctacaaaaccgacttccggaagagctggtaccatgtgaaaattcctccatccattcatcatttaccagtattcatctcctctatcctcctcagctaactctctttcttctctttgttaagcttttttcatcattgattttattaccctcttgggagataacatagatatacatatgtgttatgttcttccttataatttaccgttggttatgggtttgtatatttcttgtagagaaaagaaaactggaaaatcttttgttgagaactcagcgatttggggtttgtctcgagattctattttaggacattttaatctctcatttgtattttcagaccttttatttgttatatccattggcaataaagtttgatatcaattggatgagaaaaaaaaaaaaaaaaaaaaaaaaaaaaaaaaaggccncccaatttaaaagggcccacctttcctgcacgatccaagcgggccgaccctccttataggacccaacctctattccatttggtggccanggtatttcctcgtgatgggcgggccaaacttgggtgaccgggaaatccgtgacctccccgatcttcgcgattttgcggccgtccccttttgaaactgccggcaacagtcccctttccaaaagtgcgcaccttcaaagatgcccgcactctgcccgtataagagaataccctctctggtggtaaaggcccccccccggggcgttcccttaacccccccgttccccggccctccctatggcc

SEQ ID NO: 92573 - DNA, 787 bp, Arabidopsis thaliana columbia
  unsure (1)..(787): unsure at all n locations
nnnnnnnnnnnnnnnnnnnnnnnnnnnnnnnnnnnnnnnnnnnnnnnnnnnnnnnnnnnnnnnnnnnnnnnccacgcgtccgcgccttctctcgcagccaacgatcccatccaaaaccaaaactcgctctccggtgatcgtctttcctttacctcgccgaccttctccgtcttctctataactcatttctcttcttttctcttttctagttatattgagattgtggctgcaagagaaacggcaaaatgctgctactgaagcaaatctcaccaccgttccatctccaccaactccgccgccgtatctccaccatcatctccgccggattcactctcaacctcccaaaactcgaaccttcctccgacgccgaactaatctcccaaatgttaataacaaatcacaacccattccacttcatggaatcatctctccaactcaacggcatctccctcactcccaacctcatccaccaaaccctcctccgtctccgtcacaattccaaaattgccctctccttcttccaatatctacgctccttaccctctccttcaacaacaccaacctctttcaatctcatcatcgatatcctcggccgtgttcgtcaattcgacgtcgttagacaacttatagtcgaaatggatcaaacttctcctgagaccttcttaatcctcgttaaacggttaatcgccgccgggcttactcgacaagcggttcgtgctttcgacgatgcagccttgtttctcgagaatcgtcggtttcgtttagtcgaattcgggttttactcgat

SEQ ID NO: 92574 - DNA, 1286 bp, Arabidopsis thaliana columbia
  unsure (1)..(1286): unsure at all n locations
nnnnnnnnnnnnnnnnnnnnnnnnnnnnnnnnnnnnnnnnnnnnnnnnnnnnnnnnnnnnnnnnnnnnnnnnnnnnccttcaatggactttcccagttgcaggccttcatgctctctatgtccttgctttaattgcattcacaagagcagttcgacatgtagagtttcgttttgacgagcttagagatctctggaaaggaattctcgtctcagccacttcaatcgttatatgggtaacagcgtttgtgttgaatgagattcatgaagaaatctcttggcttcaggttgcttcaagatttgtgcttttagtcacgggtgggattctcgtcgttgtcttcttttccatctcgagtaaccaacctcttctttcacaaatcagcttgaagaaaagacaaaactttgagtttcaaagaatgggtcaagctctaggcattcccgatagcggattattatttcggaaggaggagtttcgacctgttgacccaaacgagccactcgataagcttcttctcaataaaagatttcgccattcgtttatggaatttgctgatagctgctacgctggagaacattgcattnttttgaagaggtgtctgaacatggtaaaatcccggaagatgattcgataagaagaatctacatggctcgacatatcatggaggagttcatcgtcgcaggagcggaaatggaattgaacttatctcataaaacccgacaagagatcttaaccactcaagatctaactcacactgatctcttcaagaacgcattaaacgaagtcatgcaattgatcaagatgaacttggtaagagattactggtcatccatctacttcatcaagttcaaagaagaagaaagctgccacgaggcaatgcataaggaaggatacagtttttcatctccaagactgagttcagttcaaggctctgatgatcctttctatcaagaacatatgtcaaagagttccagatgcagtagtcccggttaaggagtctaaaactggtactagaccagaacccaaaccaatgttcatagcaatccaatccatgtaatcttccttcacatttcttgtacatgtcattttctctcttgttatacctaactgtaagagaaaatgtccggttcggattttggtttagttttaaatgtgtataccggacaaaaactatggaaccatactaattaatatctcgaagaaaaaaaaaaaaaaaagggcggccgctctagaggatcccagcttacggacgcgtgcatgcgacgtcaaagttctttataggtcccctaaa

SEQ ID NO: 92575 - DNA, 620 bp, Arabidopsis thaliana columbia
ctttgaagctttaacattgttgcgaagaccagactctcagactcagactcgggagtgatttcacttcaactttctgctcagatggcagtccactactggacagccctgtttctattgctgccatgccttttctgtatttcaaatgctagtgctggcgatgctgatccagattacaggacatgtgtttcagaatgtgagataagcggttgtgttggaccactttgctttcctcagtgcaattcttcatccgatggtggtccatggtacatccaagaacctctgtatttacaatggaaaaaatggggttgtcaaggtgattgccgttatcaatgtatggttaatagagagagtgaacgggaaactctcggtcaagccccagtcaagtaccatggtaaatggcccttcaagcgggtacttgggattcaagagcctgcttctgttgctttctctggactcaacctagcaatgcatttccatggttggctttcctttttcatcatgatccactataagttgcctctgaaacaagattggacaagcgtctatgaatacgttgggttgtggcatatctacaggctactgtacatgaactcttgagtctggagtgctggtttccacag

SEQ ID NO: 92576 - DNA, 750 bp, Arabidopsis thaliana columbia
  unsure (1)..(750): unsure at all n locations
ctgtcgcgtgggttcgttctgttcctttcgttagactccgccgtgaatgtctccgaactaaagacaacggctctgttgctttggattgggtcgccggcgaagataggcactttcctcctgattcaccaatcctcattttgttgccaggtttaacaggaggaagtcaagattcgtatgttagacatatgttgttaagagctcaaagtaaaaaatggcgttgtgttgtgtttaatagccgtggttgtggagatagtcctgtgaccactcctcagttctactcggcttcgtttttaggagacattggtgaagtgattgatcatgttgttgataaattcccaaaagccaatttgtatgctgctggatggtctcttggaggcaacattcttgttaactatttgggtcaggaatctcataactgtcctctcactgctgctgtttctttgtgcaatccttttgatttggttatagcagatgaagatttccataaggggtttaacantgtttatgacaaggccttgtcggaatctcttcgtaggatattttagcaaaccattcctcttcttttttaaggcataggaggtgaatttaacattccttttggctgcaaatcctgnaccggttaggggattccntgntggcttaacccaggcttgnccggttcaaancagngngngnccntcccagccgggagnccaagcttaaanangccggnccctccttnttcnggnggaaaancccttnnccccgnng

SEQ ID NO: 92577 - DNA, 795 bp, Arabidopsis thaliana columbia
  unsure (1)..(795): unsure at all n locations
gaattgagacgacactatacttgnactatgacgccgcatgcacgcgtacgtaagctcggaattcgtctcgagtgatgatcgtcatgatgatgatgctgatgggaagctcatgttatctgcttgttgtaagcatttcactgcctatgatttggaaaaatgggggaatttcactagatacgacttcaatgctgtggtcacagaacaggacatggaagacacatatcagcccccatttgagacttgtataagagatggtaaagctagctgcttgatgtgttcatataatgcagttaatggggtccctgcttgtgcgcaaggagacttattacaaaaagctcgagttgagtggggatttgaagggtacattacatcagactgtgatgctgtggcaactatttttgcgtaccaaggatataccaagtcacctgaggaagctgttgctgatgccataaaagcaggggtggatataaattgtggaacatacatgcttcggcacacacaatctgcgattgagcaggggaaggtgagcgaagaactagtagaccgagctctgctaaatctctgtgctgttcaacttcgtcttggactttttgatggtgatccaagaagaggacagtacggaaagttaggatcaaatgacatttgtagctcagaccacagaaaattggcactggaagcaacaagacagggaatcgcgctcctgaaaaatgatcacaagttgacgcctttgaacaaaaaccatgtttcttcattagcaatcgctggtccaatggctaataatataagcaatatggg

SEQ ID NO: 92578 - DNA, 519 bp, Arabidopsis thaliana columbia
ctatacgacttacttagggaaagctggtacgcctgcaggtaccggtccggaattcccgggtcgacccacgcgtccggtcgtaatgtcatcatcgaacaaagctggggtgcaccaaaggtgacaaaggatggtgtgactgttgccaagagcattgagttcaaggatagaattaagaacgttggtgccagtcttgtgaaacaggttgctaacgccacaaatgacgtagctggtgatggaacaacgtgtgccacagtccttactagagctatcttcacggaaggttgtaaatcagttgccgctggaatgaatgcaatggacctaagacgtggtatcaaattggcagttgatactgttgtgacgaacttgcagagccgagcacgcatgattagcacctctgaagaaatcgcccaagttggaacaatatcagctattggaaatagggaaatggggaactgattgcaaaggcttgaaaacctgccgcaaagagggagtggtcacacttcaagatggcaagacctt

SEQ ID NO: 92579 - DNA, 197 bp, Arabidopsis thaliana columbia
gaaatcatgtacaacactatacaaaccggagtttacacacttatcctttactcgatgatcggatacgactggactgtggtcaaattcttctggttctactactacatgttaacatgcttcgtctacttcaccctatacggtatgatgcttgtcgccttgacaccaaactatcaaatagctggaatcctgcttgtcct

SEQ ID NO: 92580 - DNA, 400 bp, Arabidopsis thaliana columbia
atacgactttattagggaaagctggtacgcctgcaggtaccggtccggaattcccgggtcgacccacgcgtccgcggacgcgtgggcggacgcgtggggcctgcctttttcagattacctccggtttctaccactctcgccgtcgccgtcaccggtactccgatcacctccgcacgattcatttcctatttgcatttttcacctctctagcggaaagtgagtcttctcgagaatgggagattgaagaagtaagagattcactgattgaggaagagagaaaggtagttcaaaaaaatggctccagtgagtaaagctgataagaaggcaggcgtaaatgctgctgcgggatgtacgatgtcggcacttctgtgggatcctcattggtaataaagcgcttatg

SEQ ID NO: 92581 - DNA, 492 bp, Arabidopsis thaliana columbia
  unsure (1)..(492): unsure at all n locations
gcgcccctcccctcgcccccatcccacccctagaagcctcatcnctttacgactcactttttgaaagccgggacgcctgcacgtaccgggcccgaattcccgggtcgacccacgcgtgcggttccacatctttgtctgatcatggtgaaggaaacagtgtactatgatggtcttggtgtcactccctctgcttctgaggaagagattcgcaaggcttattacatcaaggccagaccaggtcatcctgaccagaatcaacgggatcctctagctgctgaaaaggttcaaggtcttggtgaagcttaccaagttctaagtgatcctggtcatcgggaagcgtatgatccgactggaaaattctcagctcccaaagaaaccatgggtgatcccaccgctggtttacctcttttttttcgaagggaactattcgaggattattatccggcccttggggtggtacatcaatggccttacactcacaaggcttctgaa

SEQ ID NO: 92582 - DNA, 530 bp, Arabidopsis thaliana columbia
  unsure (1)..(530): unsure at all n locations
nnnnnnnnnnnnnnnnnnnnnnnnnnnnnnnnnnnnnnnnnnnnnnnnnnnnnnnnnnnnnnnnnnnnnnnnnnnaaaaaaaccacgcgtccgaggagtttcatgttaaaaagaaatgaagctctcttgtttggtttttctcatagtatcgtctcttgtttcgagttctcttgccaccgctccgcccaacacatctatatatgaaagctttctccaatgtttcagcaatcaaacaggtgctcctcctgagaagttatgcgacgtcgttctgcctcaaagcagtgccagcttcactccaaccctacgtgcctacatccgtaacgctcgtttcaacacttccacgtcccccaaacctctgctcgttatcgcggcgcgttctgagtgccacgtccaggccaccgtcctctgcaccaaatctctcaacttccagctcaagactcgcagcggcggccatgactacgacggcgcttcctacatctctaaccgccctttcttcgtcctcgacatgccctatctccgtaacagtaccg

SEQ ID NO: 92583 - DNA, 812 bp, Arabidopsis thaliana columbia
  unsure (1)..(812): unsure at all n locations
cgactcacttagggaacagctggtacgcctgcaggtaccggtccggaattcccgggtcgacccacgcgtccgctttcttctccatatacaaaaaaaacagagaactcacaatgtgcgattcagattttctctctcgttgctcttcctacgaagcagacgttgattccgacagcgagatctcgacctccagtttcagttcttgttcgtacagtgaatctgaggaagaagagatcaacaatggttttggtgttgttcagtcgaagaagcaaacgaagaaactggagaagaagaagagtaatgtgttgttagaaggttacgttgtagattcagctgtgaatgatgatttgaagagaaccaagagtttaacggacgatgatctcgaggagcttaagggatgtgtagatctagggtttgggtttaattacgaggagattcctgaactttgtaatactttaccagctcttgagctctgttactcggtgagtcagaagtttattgatcaagatcatcatcaccattcttcttcttcgccagagaagaaatcatcggttcttgattctcctgttagtcctattgctagctggaagatctctagtcctggtgataatcctgatgatgtaaagccaggtgtgaaattttgggcacaagctgtggcatgtnctgtgaggttatgtacttgaagatgagatttggatttgatcaaccaaaagctgaggaatcaatggaggnggaagaagatggtgaaaccagacaatttgcaggngtgaaatctcttatgagactgacctgcttgaaaacaaccattgttgtag

SEQ ID NO: 92584 - DNA, 319 bp, Arabidopsis thaliana columbia
gagtgatcaagaccgagatgccatttttaaggcttacattgaagccttgaatgaggatcctaagcaataccgaattgatgctcagaagatggaggaatgggcacgaagtcagacttctgcttcactagttgacttttcctctaaagaaggagatattgaagcagttcttaaggacattgcaggaagagctggtagtaaggaggggtttagttacagcaggttcttcgctgttgggctctttcgtttgcttgagcttgcaagtgctactgatccaactgtcttggacaagctttgtgcatccctaaatatcaacaagaaa

SEQ ID NO: 92585 - DNA, 657 bp, Arabidopsis thaliana columbia
  unsure (1)..(657): unsure at all n locations
tcccctgttncccttttncccccctggggtccngtttcacccgntccntttagnttcattgaccttgatgggccctancatcccgattntcccagaagtggnggatggccccgaatcagcttctgcttcactagtggnctttccnctaaaggaggggatattgaaccattcttaaggnccattncaggaagacctggtattagggagggtttagttacagcaggtttcttcgctgttgggctctttcgtttgcttgagcttgcaagtgctactgatccaactgtcttggacaagctttgtgcatccctaaatatcaacaagaaaagcgtggatcgggacctggatgtgtatcgtaacctgctttcaaagcttgtccaagccaaggaattgcttaaggagtatgtcgagagggagaagaagaagcaaggagaaagagcccaatctcagaaggctaacgaaacaatctccaagtgtctgggagatactctatataacccatctttcttggttgaacggaaatcttagaaaatcatttgtgacttctttttttgttttcttagcaacaactatgcccaagaacatatatatctcatttctaagaacatttcagacgtgtatatgtttgctttttttcctttcaattacatgagtttacat

SEQ ID NO: 92586 - DNA, 608 bp, Arabidopsis thaliana columbia
  unsure (1)..(608): unsure at all n locations
tnnnnnnnnnnnnnnnnnnnnnnnnnnnnnnnnnnnnnnnnnnnnnnnnnnnnnnnnnnnnnnnnccacgcgtccgaaccaattagcttctttctgtaaaacctcactcgttggccaattcttttggttttcatacacataaatctcagattccaaatgggttttcttagctctttctttcaaatgatgaacatttgttagcagaatcttcctctttccctaaagttttgatctttttttcccccttcaattttgtattttctcaccaaataaaaaaaggtttcttcagtgggttttaagggtttattattatcttaaaattaaacacaattctttaatcaaaaggcaaaaatcttaatttcatcactctcttctcactcacaaaagttcttacaatcttcaaagttttggtcttgtttcttttccgatttcaccggacaaaaaaaatgtcggcgtgtttaagcagcgggggaggaggagcagcagcatatagtttcgagttaaaaaaagtgaaatcaccaccaccatctttcctcacaacacaacaagagctacttcaccatcatcaaccattttcgaatcatcaaattcacacctcgcatctcaac

SEQ ID NO: 92587 - DNA, 503 bp, Arabidopsis thaliana columbia
  unsure (1)..(503): unsure at all n locations
acgactacgtattgggaaagctggcacgcctgcaggtaccggtccggaattcccgggtcgacccacgcgtccgcgctgacagtgcttgctcacacactaatcgcaattgttgctgcattgccgactctgattcgttcgatttcagcattttgttcttccgaagcgatgcctcgtcgatccggagattgcatgagatgtctggtgattttcgcggttgtatcagctttagttgtgtgtggacctgctctttattggaaattcaacaagggtttcgttggatccacacgtgccaactctctttgtcctccttgcgtttgtgattgtcctcctcctttgtctcttctccagattgctcctgngctcgcaaatctctctattacagattgtggaagcgacgatccagagcttanacaagagatggagaagcaattggtggaccttctgactgaagagctgaagctgcaagaggcagttgcagatgagcctagcccgcatatgaatgt

SEQ ID NO: 92588 - DNA, 497 bp, Arabidopsis thaliana columbia
aaacagaacagagaagaaaaagagagaagatggcttcggaagaaggacaagtgatcgcctgccacaccgttgagacatggaacgagcagcttcagaaggctaatgaatccaaaactcttgtggtggttgatttcacggcttcttggtgtggaccatgtcgcttcatcgctccattctttgctgatttggctaagaaacttcctaacgtgcttttcctcaaggttgatactgatgaattgaagtcggtggcaagtgattgggcgatacaggcgatgccaaccttcatgtttttgaaggaagggaagattttggacaaagttgttggggccaagaaagatgagcttcagtctaccattgccaaacacttggcttaagctttccactcttatatatctcttaagatgttggattaattgttctattactcttgacatgttataacttgttcccctttgttatggttccggtctataatctcatctgactatttgaagctg

SEQ ID NO: 92589 - DNA, 679 bp, Arabidopsis thaliana columbia
  unsure (1)..(679): unsure at all n locations
gctggtacgcctgcaggtaccggtccggttttcccgggtcgacccacgcgtccgtaaagactcagcctttaagtatccccagaagtcgtatgaccttacgtagcttaatccttgagatgcgttcgagaccgcatcgtgtggtccacgaccttgccgccgccgcagctgccgattccacttctgtgtcatcgcaagattatcgctggtcagagattcctgaagagcttcttagggagattctgattcgtgttgaagcggcggacgggggcggatggccgtcacgacgcagcgtggtggcttgtgccggcgtttgtcgtggctggcggctacttatgaacgaaaccgtcggtggccctgagatctcttctaaggtgactttccccatctctctcaagcagactattgagtttgaagacgctgcgtttgcgtttgtattggtccccaacccagagggggtggctcgaaactatgatttgatcatgaaacaagagatatatgatcatttttacggttggatcagnttcaggtaaatattgggtagcctacttaaatggtgattttgggggggggatcttctgcagctggcccaaggattactgggtcaatgctttataaacgtatcgattacgcatcattcattttatttgggttacccactcttaccgatgtgggaagtttg

SEQ ID NO: 92590 - DNA, 928 bp, Arabidopsis thaliana columbia
ctatagggaacagctggtacgcctgcaggtaccggtccggaattcccgggtcgacccacgcgtccgtgaacatcgtcaagttcatcaaagattgttagatcaacggcttttagcgatggtctcaccaagaggtacacagagaagacactcaagtgattattctgaagattttctaagatcttgctctctttgtaaacgtcttggtgggcatggccgtgacatctatatgtatagaggagatagagcgttttgtagtttagagtgcacggcccaacaaattacagtgggaggagaggaaggagaagaagaaggggtgggtgaaggtcaccatcgttgggcgccaccggaaccaccaaaggagagagagtttccgccgccgggtaggcctcttttcatatggtatatattatcgggaatggatggattatagggtccttgttttatgtataaaaggcttggagcactatggactgtgattaaccctgtgaatgcttcctttaagccttggcttgtgatcttaagaatattgggattatgcatataaagaagatttggggttctccggtttaaaaaaccaaaaaaataataaaaaaaggggggggcggtttaaggaaccaaagttacctgcgcggggatggggaagaataaattttttatagggccctaaatatattgacggggcggggtttacacgggagggagggaaaacccggggatccacattatggggttggaaaaatccccttttgccaggtgggtatagagaaaggcgcccccttcccctttccaacagtgccaccctgaggggatgggcccgcctgggtgggattatggcggggtggtggtttcccaaaatccccattttggcgccctacgccgtttttttttttttttttttgacagtggggtttcccaaaatatatggggc

SEQ ID NO: 92591 - DNA, 754 bp, Arabidopsis thaliana columbia
  unsure (1)..(754): unsure at all n locations
nnnnnnnnnnnnnnnnnnnnnnnnnnnnnnnnnnnnnnnnnnnnnnnnnnnnnnnnnnnnnnnnnnnnccacgcgtccgcggacgcgtgggctcaattttgcttcttacttctttccccggctgattagaaacttgaccgcttgattctcttaaaggaggtcttgcgatggattccgctattgatatcagttctgatagtgatgtcgagatacaagaaactagaaccaggcctcaacatcccccacggatagctgaagagatctctctacgctgagaccgcactttcttagtgggagttcttccggtgcaaatggccacactaaaacaggacttacaaatctcgactcacgtaatggttttgaatccaagccactgcctcgggcagaacaccatacacatattccgggaaatgggagtatcgtaacttccagaattcccaatatctctgttggtgattatgagaaattttcatctcaacaagcttttaaaaggacacatccaccaacctttagtcgacctccttttcctcctagacctgatattggtacaagtaacgggaatgcgagtcactttcgtggtggagcacatgatgatctaggcatggggcgtgtgactaacggcactcggatcctacctccatctgtggcgcacggaacatctgcgtctccttcacatttaatggattaagtgatccaatgcataggaatggcataggcgaagaaaggaattcggaaaatgacgagaggctgatct

SEQ ID NO: 92592 - DNA, 909 bp, Arabidopsis thaliana columbia
cgctggacgcctgcaggtaccggtccggaattcccgggtcgacccacgcgtccgcccacgcgtgcggatattccttatctgtgtgaatggaagaaggattcatctatctgagtcatgctaatgtgcttcctgggttacgattctttcagctgccaatcgagcgactctctcatcttcctcctatcgcgtgttccagaggggttgatcaggaagatgaagcacagagaaggagagcagaaaacttctaccacaccaacacgatgaaaattgcgaccacttcacgctcttgcttataagtaaatagtgggaggcccgaagattatcaacaagaagaacctaccgaacttccttcaaaactgttgccttgtgagggggcccctcgggcggccccttgaaactggaataccgtcgaaaggagggtgtcgccacgcctcaaatgtttccgcagctacttttggaccaaacctggcaagggacaaccggggggtttggtcctggtttaaagattcgaaaggcccctcctgcacagaaataaggcttacctaccggctgcgggggcatttgtttcccgtcaccctatttactaggaccggctcctttaaaaaatgggagcaaccaaccaccggcggcgggagaccctaaatccccatttaggggtttgcgagaaaaaaaaaaacaaccctcccgccccccttcggaacctcccaaatcttccccgccccaccgaccaaaggaagagctctccaaaattggggcgtttgaaccccccttcccctacagggagtggggcgccccgcaatctttgggcgccccaccccggtgtgggacaagggcctttttgcgcgccccaccttgcaccaacacggccctccacccctctaggaggggcgcagaacccacccaaaaggg

SEQ ID NO: 92593 - DNA, 527 bp, Arabidopsis thaliana columbia
gttgttgttaaatgtgtgacgtcatctcaaaccaactgtgcttcttcggaatctgtaagaaaaaaaatggatcctttcgactagggaccgcctaaatcatacgcaaacaaagtctcttcctttacccgtctacacgttcgaattttttctccgggtcgggtcaatgtcaagaacgacgagaattgtatataatcgtcgattcacgtggccgggtttatcatttactgctggatctcgttttcaattttgagtcagattccccccaattgagagattctagggttttaagatgattgaacatgggaactctacctttgattaccggagtattagagaagtcgctgcaaacgccggcgccggagccaccgcaggggctatcgcggcgacttttgtttgtccattagatgtgatcaaaacaaggttacaggttcttggtctccctgaagctccagcctctggtcaaagaggtggtgtgatcattacaagtctgaagaatataattaatgaagaaggttatacggtgaatg

SEQ ID NO: 92594 - DNA, 632 bp, Arabidopsis thaliana columbia
  unsure (1)..(632): unsure at all n locations
nnnnnnnnnnnnnnnnnnnnnnnnnnnnnnnnnnnnnnnnnnnnnnnnnnnnnnnnnnnnnnnnnnnnnnnnnnnnccacgcgtccgcggacgcgtgggctcgttttcaattttgagtcagattccccccaattgagagattctagggttttaagatgattgaacatgggaactctacctttgattaccggagtattagagaagtcgctgcatacgccggcgccggagccaccgcaggggctatcgcggcgacttttgtttgtccattagatgtgatcaaaacaaggctacaggttcttggtctccctgaagctccagcctctggtcaaagaggtggtgtaatcattacaagtctgaagaatataattaaggaagaaggttataggggaatgtttcgagggctttcaccaaccatcatagctctccttccaaattgggctgtctacttctcagtttatgggaagctaaaggatgtgctgcagtcaagtgatggcaagcctagtattgggtcaacatgatagctgcagctggtgctggagctgccacatctattggcactaatccgctttgggttggcaagacaagattaatgacgcccaggatttaggcctggggtgggaccctacaaaagt

SEQ ID NO: 92595 - DNA, 766 bp, Arabidopsis thaliana columbia
  unsure (1)..(766): unsure at all n locations
gcgggcacgcctgcaggtaccggnccggaattcccgggtcgacccacgcgtccgcaacaatttattccgtgttccataaccccatgaacacattattcgagagaaatggaatcagccaatcactctctttcctccatatataaaatctagccaatattcacaaataataactacttccttcgttcttttccttaccaaaagatccacctcgaacctctctcctccgtcttcctccgcagccgccgtcactatcaccgcagctagaatgagagaagataatccaaattggttccttagatgggaagaagagcttccatctccagaagaactcatccctatctctcaaaccttaatcactcctcatctagctctcgctttccaaatcggaagtcctaatcatcatctcggatcaaagagaaccaccgcgatttatcaccagaagcttcaatcctccaccactccaacaactccaactccaactcctccaccgatgatgatgaattctgatttcggcggtggcgattccacggatcttggttcaggatcaataggaggagagccagcaagaacgttgaaacggccgcgtctagtgtggacgcctcagctacacaaacgtttcgtggatgcggttggacacttagggatcaaaaacgcagtcccaaagactataatgcagcttatgagcgttgaaggattgactagagagaacgttgcgagtcatcttcagaaatatcgtctttaccttaggggggaatgcaaggcgggg

SEQ ID NO: 92596 - DNA, 558 bp, Arabidopsis thaliana columbia
tccacactcacctgagggaagagctggcacgcctgcaggcaccggtccggaattcccgggtcgacccacgcgtccgataatttctttttttccgatcaatctaatccaatccagagattctgagtctcaaagttttgcttttttgagtctgttttccaaagacatgtagggctggattctaagcttgcaacgtatccatttccctggtctttcttggtgatccggaactgaagtgaaggctctctggattgcttcatttagatcaatatagaggtttatctgacttaggttcttgatgagtttatgttctgtatcagagtagatatatgtggaggagatagttttagttttaaagattagattttgctgtccattttatacaggaattgaagtgaggcatggaagatgtgtccgagtctgataataatgttgagacctccattatccaccttccagatgattgcctttcctttatctttcaacgacttgatagtgttgctgaccatgattcaattgggtttgacttggtcatcgctggctcaacatccaaaacattag

SEQ ID NO: 92597 - DNA, 2638 bp, Arabidopsis thaliana columbia
cttttttcgcggcgtttgatgcactgtgtgaagaagggatagcaacctcggtctgtagagctcttgatgaagtagctgatatatcagtcccagcctcaaaggaccatgttaaggtgcagggtgagatattagagggtcttgttgctcgtatcgtgagcagtcagagctcaagagatatggaaaatgtcttgagagatcatcctccaccaccctgtgatggagctaatcttgatctgggactcagtctaagagagatatgtgctgcccatagatctaacgagaaacagcaaatgagagcacttttaaggagtgttgggccaagcttttgccccagtgacgtggaatggttcggagatgaatctcatccgaaaagtgctgacaaatctgttataacaaaattcctgcaatctcagcctgcagattattcaactagtaaattacaggaaatggtacgcttgatgaaggaaaaacgtcttccagccgcattcaagtgttaccataattttcatagagctgaggacatatcacctgataaccttttttataaattggttgtccatgtgcacagcgattcaggatttaggcgttaccacaaagagatgaggcacatgcctagtttgtggcctttatatcgaggtttctttgttgatattaatttgttcaagtcaaacaaagggagggatctgatggctctgaaaagcattgataatgccagtgaaaatgatggtcgaggagaaaaggatggtttggctgatgatgatgctaacttaatgattaaaatgaagtttctcacatacaagttgagaacctttttgatccgtaatggcctatcaattctatttaaagacggggcagcagcttacaaaacttactaccttaggcaaatgaaaatctggggtacgtcagatggaaagcagaaagaactttgcaagatgcttgatgaatgggctgcttacataagaagaaagtgtgggaatgatcagctatcttcatcaacatacttaagtgaagctgagccattcctggagcagtacgcgaaacggagcccaaagaaccatattttgatagggtctgctgggaacctagttagaactgaggacttcttggccattgttgacggtgatctagatgaagaaggcgatcttgtgaagaaacaaggagtgacaccagctactcctgagccagctgtgaaggaagctgtccaaaaggatgaggggttaattgtattctttccaggaattcctggatctgctaaatctgcactttgcaaggagttattgaacgccccaggaggctttggagatgataggccagtgcatactctgatgggtgatcttgtcaaaggaaaatattggccaaaggttgctgatgaacgtcgtaaaaaaccacaatcgattatgttggctgacaaaaatgccccaaatgaagatgtctggagacagattgaagatatgtgtcggagaactagggcttctgcagttccaatcgttgctgattctgaaggaaccgatacaaatccatattcacttgatgccttggctgtattcatgttccgtgtacttcaacgagttaaccatccgggaaagctcgacaaggaatcttcaaatgcaggttatgtgctattgatgttttatcacctttatgagggaaagaaccgtaatgaatttgagagtgaattgattgagcgctttggctccctcatcaagatgccactattgaaatcagacaggactcctttacctgatcctgttaaatcagttcttgaggagggcattgatttgttcaatctccatagtagaagacatgggagactcgagtcaacaaaaggaacatatgcagcggaatggaccaaatgggagaaacaactacgagatactctagttgcaaattctgagtatctcagttctattcaggttccatttgagtctatggttcatcaagtgcgagaagagctaaaaacaatagcgaagggtgattacaagccaccttcggagaaaagaaaacacgggtctattgttttcgctgccatcaacttgcctgctactcaagttcacagtcttcttgaaaagttggctgcagcaaacccaacaatgagatcttttctagagggaaagaaaaagagcatacaggaaaaacttgaacggtctcacgtgacgctcgcccacaagagaagccatggcgtagcaactgtagccagctatagtcagcacttgaacagagaggtacccgtagagctcaccgagctcatctacaacgacaagatggctgctctaacagcccatgttggatctgtggacggagagaccgtagtctccaagaacgaatggccacatgttacattgtggacagcggaaggcgttactgcgaaagaggccaacacgttacctcagctttacttagaaggaaaggcgagccgcttggtgatagatcctccggtgtcaatctcaggtcctctggagtttttctgaatacttgattaaacatggaagtttctctcttgagggaggttgctcgtggaatgggacacatatggttgttataataaaccattccattgtcatgagattttgaggttaatatatactttacttgttcattattttatttggtgtttgaataaatgatataaatggctctt

SEQ ID NO: 92598 - DNA, 465 bp, Arabidopsis thaliana columbia
  unsure (1)..(465): unsure at all n locations
acgcctgcaggtaccggnccggaattcccgggtcgacccacgcgtccgcggacgcgtgggagattatatagtgagcgattgttagaagccattaattacttgagtcggaaggtttatttgtttgttatttgtctctcggactggttgattgggttaaacttgtcaatgagtaaccctttgaatctgtcgttttgtttggtcgggcgaattatatagaaatgtattattggttataaaatggtattagggtttttggcgaaaaaaaacactatacactttaattaaaaacctcacagaccccaaggggcgcgccgctctagaaggatccaagcttacgtccccgttgcttgccgaatcattagtttttttatagagggccctacattaaattaacctgtccggagaatgaacaacatcgtgactggggaaaaccctgacagtacccaaattaatacaactaaaaaa

SEQ ID NO: 92599 - DNA, 463 bp, Arabidopsis thaliana columbia
gctggaccgcctgcaggtaccggtccggaattcccgggtcgacccacgcgtccgaaccaccaccaccacttctcaatgtcgtcttccaccaccacaacaaccaccgtccacggcgagcctgaacgacgaacttactggtgtcatgaatgcgatatgagtttatccctcctctcctcctccgattccgattccgattcctctcctctgttatgtccccaatgccgtgtcgatttcctcgaacgtatggatcacgattcttcttcttctaatctctttgacgttacccatcggggattttggagaacaagacggagaaaacgatgatgaagacgaccaagaagattggtggttcgttgatccaagctgttaattccgatgataattccctcctcgataggccttaccttcaccgtctttttcgtatcttgcttccataattcaggatcggcttcttcttcctcgc

SEQ ID NO: 92600 - DNA, 354 bp, Arabidopsis thaliana columbia
ggaaaaaccgggccgacccacgcgtacgtgggttctgggttttgattatttctacaatgtaaccacatttttcactttccggagatgggcctgcaaacgatgaaggttgcgaaagattgtgtagttgaagtcagttctgaagaggaagggttcgaaggagcttggttcagagctgttttagaggaaaacccaggtttcttatctcgcagaaagcttcgtgttcgttactcgacgttgctggacatggacggttcgtctcccttaatcgaacacatcgaacagagattcattagacctgtacctccggaggagaattaacaaaaagacgtcgttttggaggaaggttttgctggt

SEQ ID NO: 92601 - DNA, 355 bp, Arabidopsis thaliana columbia
  unsure (1)..(355): unsure at all n locations
taaaannccccggttccccgnanaaagnccccgttttcccccaaaagcnntttaaagcccgccgncttcaancctctcaatctcctcaaacgtccgcctatactcctccatcccccactccatatcccgatcaagttcaagttcagcttcacggagagattcttcagcttcttcgagttcttgttgctgttcggattcgagagctgcccaagctttgtatgaatcgacttcaaagagacgcatgaggtcctcgattcttgaagggtcgaatgttttgtcgacaagagcttgatcggagaggagagtgaagtggtgaattagagcttccatgttttggtgaattttgatggagaag

SEQ ID NO: 92602 - DNA, 684 bp, Arabidopsis thaliana columbia
acgacttcctataatcccataaatatatattgattacaaattacagatacataaactagaaactacctataattcataattcttcggcaatagtaagtagtaacccatatgtttatcaaaggaaataattattcattaaaatgttcttgacctactaatcctataacatggggaccaatactttgacaatcatcgtcatcttatcatattcatcatcatcatcatcgatcaagatggatgaaccttatttccagctgcagtcttccaagctgatctcatagacgcggcggctgatcccatcgccgccgcaatatgtcgtttcgcggcaactgtcgccgctttctccattaaattccccgttctccgagcagtctccgctttctcctcaagctctttcagctccgccgcctccatcctctccatctcctccaacgtccgcctatactcctccatcccccactccatatcccgatcaagttcaagttcagcttcacggagagattcttcagcttcttcgagttcttgttgctgttcggattcgagagctgcccaagctttgtatgactcgacttcaaagagacgcatcaggtcctcgattcttgaaccgtcgaatgtttctcgagccgaattccgagcttacgtacgcgtgcatgcgacgtcataactcttctatagtgtgaccta

SEQ ID NO: 92603 - DNA, 761 bp, Arabidopsis thaliana columbia
  unsure (1)..(761): unsure at all n locations
nnntatacgacttacttagggaaagctggtacgcctgcaggtaccggtccggaattcccgggtcgacccacgcgtccgcttccttctggttaactgaaaatggagtgtagttcagtgagtgtactaggaatattactggtatttcctctccttcataaccttgtcaccatctccgggcagaatcttccggcggtgggtttgttcactttcggagattccaacttcgacgctggaaataaaaagttcctcacaagtgctccacttcctcaaaacttttggccttacggtaaatctcgagatgaccctaagggcaagttttctgatggcaaaattgtcccggactttattgcaaaattcatggggataccacacgatttaccgccggcgctaaaacccggcaccgatgtgtcacgaggagccagcttcgccgtcgggtccgcttccattcttggatctccaaaagattctttggctctgaatcaccaagtgaggaaattcaatcagatgatatcaaattgggaagtggattacattcagaaatcagggtttatgattagcattgggatggaagattactacctctttaccaaaaacattcctaatgctgaagtttcttgtcaacaagctttccgtacttctgtcactacccggtaaagagtgatatcacttgttgattcatctggagctagaaattcggcgacccttgctagcgccttaggttgttaccgacgcagaaagaattaaaaccggaacaatggttc

SEQ ID NO: 92604 - DNA, 504 bp, Arabidopsis thaliana columbia
acgactcacacatagggaagagctggcacgcctgcaggtaccggtccggaattcccgggtcgacccacgcgtccgcggacgcgtgggttaaggttctattgaaccagaaagagataagtggagaagcaatagacttcatacttgaccattaccctcctcagactccgttaaattctctcttacaagagcaaaatccgggaagtcttccttttgtccctgaacatctccggcgtgaatccggcgactttgtccttgttaatcactctaccgacgtcaatgctcaagtatgattcccggcgtcccagagacatcaaatcactaagcttaggtttattcatttggccgtcattgtaacttcgactcaatctctgaagtttcggacagttaaatttacagaaataaagaaaaaaaccttgggtccaaaaaaaatgtacaaacccaagaccgcactatacgaccatcgagagaaagggtcgacatcattaaaagggcggccccctctaa

SEQ ID NO: 92605 - DNA, 312 bp, Arabidopsis thaliana columbia
gacttctatagggaaagctggtacgcctgcaggtaccggtccggaattcccgggtcgacccacgcgtccggggtaaggcgcatccaaggacccttaaaggcaagaaaattgccattacagggaagaagaaagtttccaagtaatcactttcttgttctttaatactctttttagtttgtctagtctctctgtttatattgtgaatttttatcttcgtacaacatctgtattatcatcagacacattgatatgcaaactggtttgttcaattcaaaaaaaaaaaaaaagggcggcccgctctaaaggatccaa

SEQ ID NO: 92606 - DNA, 447 bp, Arabidopsis thaliana columbia
  unsure (1)..(447): unsure at all n locations
cnnnnnnnnnnnnnnnnnnnnnnnnnnnnnnnnnnnnnnnnnnnnnnnnnnnnnnnnnnnnnnnnnnnccacgcgtccggaaatgcgcaatcgcaaagaggtactccagcttttgtaagacatccatcaccaactgtgcagccaattcctcagtttatggcagctcagccttttcccagtcatatacccttccctactgaattggcacagtcgtcgtattatccccgtatgccttacatgacacctattccgcatggtccgcagttcttctaccattatcaagatccctccgttacacatgaaactgcataagcaaatacaatattatgttagtgatgaaaatttgattacagacctatacccttcgaggggtcatgaataatgagggttttgttccgctacgtgtggtagctggtttcaaaaaggttgcagaacttacagataata

SEQ ID NO: 92607 - DNA, 604 bp, Arabidopsis thaliana columbia
tgggaacaccctacgactcactatagggacagctggtacgcctgcaggtaccggtccggaattcccgggtcgacccacgcgtccgcgaaaccctaatccccaatttctctttcaagttttcgatcacgatctctggaaaattaagagagaaattcaaaaacttcgggagttcaaagtctcattcagacattccagaaggtattctagtcgactgagtaaacaatcatgagaatcagaaaaggaagtagagttgaggtatttagcaacaaagaggcgccttatggtgcgtggcgatgtgctgagattgtctcgggtaatggacatacctacaatgttagattttactctttccaaattgaacacgaggaggcagttatggagaaagttccaaggaagataattaggccttgtcctccacttgtggatgttgagagatgggatactggtgaattggtggaagttcttgataatttttcctggaaagctgccacagttcgagaggagttatctggactttactatgtggttcgcttacttgggactccagaagaactcacttttaacaaagttaacctcaggcccccaaagtcgtggcaagatgaaa

SEQ ID NO: 92608 - DNA, 583 bp, Arabidopsis thaliana columbia
  unsure (1)..(583): unsure at all n locations
taattccaggatgtaataagataatcggaaaagcccttgtgctcgatgagattatcaattatattcagtcattgcagcggcaagttgagtttctatcaatgaagctagaagttgttaactcgggtgcaagtactggtccgacaataggagtttttccttccggtgatctcgggactttaccgattgacgttcatcgaccaatatacgagcaacaagaagctaatgaaacccgagtatctcaaccggagtggctccatatgcaggttgatgggaactttaaccgaaccacataaaaaagagtctttctctgattgatggatgtgttttgtaggcagtaaaaatgaatgcaaccctttattttttatcctatgcgtgtgtatcattttgctgttatatcataagatagaatatgagagtgaccagagagattaacactttataaaacattgttgtattgtcctattatataacttgtaacaattgattcagtaacaaaaaaaaaaaaaaagnnnnnnnnnnnnnnnnnnnnnnnnnnnnnnnnnnnnnnnnnnnnnnnnnnnnnnnnnnnnnnnnnnnnnnnnnn

SEQ ID NO: 92609 - DNA, 748 bp, Arabidopsis thaliana columbia
  unsure (1)..(748): unsure at all n locations
nnnnnnnnnnnnnnnnnnnnnnnnnnnnnntatagggaacgctggtacgcctgcaggtaccggtccggaattcccgggtcgacccacgcgtccggtggaaatggagatggttcgatgagacctgaaggcgaaacaagttcgggtggtggtggaagcaaagcaacggaacagaagaacaaacctgagccaccaaaggattatattcatgtgagagcaagaagaggacaagctactgaccggcatagtttagcagagcgagctagaagagaaaagatcagtgagaagatgacagctcttcaagatataattccaggatgtaataagataatcggaaaagcccttgtgctcgatgagattatcaattatattcagtcattgcagcggcaagttgagtttctatcaatgaacctagaagtttgttaactcgggggcaagtcctggccccacaatatggagtttttccttccggtgatctcgggacttttccgattggcgttcatcgaacattatcccgagcacaagaaagtatgtgataccccgtttttttaaccgggggggctccttatgcgggtgggtgggaaccttacccaaccaaattaaaaaaatnttttctttattgaaggaggggttttttgagggaaaaaaaaagaatgcacccctttatttttattcctaagcggggggtntattttgggggttttcataaaaaaaaaattgagggggcccagagaatataccctttttaaaa

SEQ ID NO: 92610 - DNA, 1200 bp, Arabidopsis thaliana columbia
gaaaaaaaaaatacagaggaggaaaagaagcacattgtcgccgtctctttaacttccttcatcaatctccgtctcgtgaatctctgtttctttgatctgtaattgcgaattcgtcgtttcccaattttgaaattgttgtaatgtcggcggtctcgtgctccacggcgagttctagcggaggatgtgcatttaggtttcgatcaaagacatcaatccattctcctaatttcatcagaattgggacaaattctcagagtgacagattctgtaatcatcgtttggaattggtacatggaactcgtaaagtgaaaggagcatctgtacgtatggcattagttgaggagagacaatcaacgagcaaagatgttgctgagcctcctcgggtcctggcgtatgatcttgttcaaggagcacttgtgaaatggagatggaaggatgacaaatctgttccagatacacctccacgcgtccgcctacacggaattttagggagcgggaaaaactggggcacttttgctcgtagattggctcatgaattcccaacgtggcagtttctattggtagacctgcgttgccatggggattcaacatctctcaagaagagaggtccacacttcggttgctactactgcttctgatgttctaaaacttggtgggcaggtgaggttaacaccccgggtcccttgtggtcataactttggggggaaagtgtataagcatggtagagcagcagctaatcctcttccacgacaatccgagcttgggtattggatgctactcccgggaaaatccgcgccggaggagatggaaaaaattctccccgaaagcttattttattttaacataattgccaaaaggggtcttggaaagcgcgagggttttaaacttttttaaaagaagggttccaatgttgccgacaggggtatttccaatttaaacctatgacccttgttttagttttggggactttgacctaacggaacctaatttccctcttacaaaaaaaactttgaactttgtgaaatcccaaaggaaactgtgatttttaaagcggaaaacttcccctgggcccaaaacttaggaatcccccctaaaactaccttaaaagggggagaaaaactttttgaaaaccgatttgttcaccaaccccagggttaggagtttttttttccgttcaaaccaaagggagggcctggtgtt

SEQ ID NO: 92611 - DNA, 846 bp, Arabidopsis thaliana columbia
  unsure (1)..(846): unsure at all n locations
tnnnnnnnnnnnnnnnnnncccacgcgnnngnnaaaaaccgcaagaaagcccacaagatttttccccacgcgtccgattcaagttcttctctccctcctctttgcgagaagatctcatacaaaaactattttctaagagttgtggatctcacgattctaggctttctcttttctcttctcttgtaccgaattctacttatgaaccaaaacaactccgtttgggttgtggctttcctctgtgaatcctttttctctttcatatggcttcttattaccagcataaaatggagtcctgcttcatataaatcatatcctgaaagacttgatgaaagggttcatgaccttccatcggtagatatgtttgtgactactgcggatcctgttcgggagcccccgattcttgtagcaaacacgttgctttcgctgttagcagtgaattatccagcngataaacttgcttgttatgtatcggatgatggatgctcacctctcacttacttctntttcaaggaagcctttaagttcgccaagatttgggttcccttctgcaaaaaatataacattaaagggagagctccttctaaatatttttagaaccctcccccccaacgaaaggtctgatttcagaaagactgggaataaccaggtaattaaagggtttattgtttctccgcgcatgattaaatttgcaattggttacaaataaagattcgcttcttcaaaaagccaaatttttttcaacaactttttggaatggaaaaggaagggaaaaacgggggggccatttggtcttaaaatagacaggcggttttaaaaaataaaacaacatatttccacaatttggta

SEQ ID NO: 92612 - DNA, 527 bp, Arabidopsis thaliana columbia
  unsure (1)..(527): unsure at all n locations
nnnnnnnnnnnnnnnnnnnnnnnnnnnnnnnnnnnnnnnnnnnnnnnnnnnnnnnnnnnnnnnnnnnccacgcgtccgtgctcctctcggtctcggtggtgaagacaatggggtcagacgaggaagatttcgtgtttcatggaacgccaatagagcgcgaagaagaaatcgcaagccggaagaagaaagcagtcgctggggcttctggcaatcttagaactctccctgcttggaagcaagaggtgactgatgaagaaggccgtagaaggttccatggagcatttactggtggatattctgctgggtattacaatacagttggatcaaaagagggctgggctccacagtcatttacatcatcaaggcagaacagagctggagcgagaaagcaaagtgtttcaaactttctagatgaagatgaaagggcggatatggagggcaaatcactgtctgcgagctcacaatttgacacatttgggtttacggcagccgaactttcccgaaagcgtgctgagaaagaacagcat

SEQ ID NO: 92613 - DNA, 824 bp, Arabidopsis thaliana columbia
  unsure (1)..(824): unsure at all n locations
nnnnnnnnnnnnnnnnnnnnnnnnnnnnnnnnnnnnnnnnnnnnnnnnnnnnnnnnnnnnnnnnnnnnccacgcgtccggtccagtagagggacctgttctaccctcaaaagtggcttatgttgtgaaagaactctatgacatgggctgctttgagatttctctgggtgatacaattggaatcggcactcctggttctgtggttccaatgcttgaagccgtgatggcagttgtgccagcggacaagctggctgttcacttccatgatacctatgggcaagctcttgcaaacatattggtgtctctccagatgggaataagcatagtagactcatcaattgccggattaggcggctgcccatatgcaaaaggagcttcaggaaatgtagccccagaagatgtggtttacatgttgaacggtttaggcgtccacaccaatgtcgacttgggaaagcttatagctgctggagatttcatcagcaagcatctcggtcgtcccaatggttcgaaggctgccgttgccctcaaccgtcgtatcacagctgatgcctccaagatatgagttttattagaccatctccaatgtatagctctatatcttactcgaaaatagagttactctctacaatttatccctctattttctactctaaaaagaatattcttaaaaaatattctatttctattttatatactaatacattttatttatctaattgacaatttgaccccacaaaaaaaaaaaaaaagggcggccgctctagaggatccaagcttacgtacgcgtgcatgcggcgtcatagctcagctatagtgctgctcaat

SEQ ID NO: 92614 - DNA, 795 bp, Arabidopsis thaliana columbia
  unsure (1)..(795): unsure at all n locations
aatacnacttactatagggaacgctggtacgcctgcaggtaccggtccggaattcccgggtcgacccacgcgtgcgcccacagcgttcgcccacgcgtccgatgagagccaagtggaagaagaagcgtatgaggaggcttaagaggaagagacgaaagatgagacagcgttctaagtaaatttgcctttgaagacaatgcgactctgtttcttgcttctctccctttctctcttgcaaacattgttcttactataagcttccttttatgtttcagacttgtttaagattttaatcaaaaagaaagtttcagactttaaaaaaaaaaaaaaaaaaaaaggggcggcccctctagagggcgccggtatagaggatccaatgtcaccgacgcgggcttctatgggttacctttttttaggggctcgccggtcatttacagggccgggggttggacaacccgtgggcgtggcaaaacctatggggcttcgcaactttacccctttggacacatgccttttacccaaggggccaatagaaaaaggtcccaaagttgccctttcaaaggttgaagggcccaccgtgaagggccctcctccgccgggtcattagccccccggagggggggtttcccatggggccccttaccgcccactcccaacgccccttttttttttttcctttctttttccccgggagcggtttccgggaaccttagggggggttctttgggtcggctttccccaaaactcttacgaaaaattaatgggggggccccggggccttccccctaagggtta

SEQ ID NO: 92615 - DNA, 571 bp, Arabidopsis thaliana columbia
cctacgactcactatggggaccgctggcacgcctgcaggtaccggtccggaattcccgggtcgacccacgcgtccggaaaagaagagaagaaagatgggagcaaagggttgtgttaacgttctcctcaagcttctagtgtttcaaggtcttttcgtttcacgtcctcaagaagactttgatttcttctacttcgttcttcagtggcctggagcctattgcgatacatcgcgtgcttgttgctatccaacatccggtaaacccgctgcagattttggtatccacggactatggcctaattataacggtggttcatggccatcaaattgtgatcccgatagccaatttgatagatctcagatatcggatctcgtaagtagtttgaaaaagaattggccaacactatcatggtccagcaacgaagggcttcacctttcgggaccccaatgggagaaacacggtacatgctccgattccgtaatggaccaccatgagtccttcgaaatgcctctaactcaaacaaaagcaatctcctccaatcctaaaaactccgggtttatccggatgatggat

SEQ ID NO: 92616 - DNA, 721 bp, Arabidopsis thaliana columbia
cacccgacttacttagggaacgctggtacgcctgcaggtaccggtccggaattcccgggtcgacccacgcgtccgcagaagctccttcattctccaccatgagctcgttttacctttcttcttctccaattttcaaacttcagtggcacgcaaaccataaacctaaacccaatcgtgcaatagtttcttttccaccttctcgtcttcatgccaactgctattcgtggagattatcttgtaaccttgctcaacatggtattgagttggaggaaactgtggaggaagatgaaatccttcaagttctcgacttaccaacagaggagacaaatctcgacaacgaaacgattgcttctccatctaaaatgttgaggaagaaaaaaggagatgaagagagcttggacgatagattcaagctcaaaaatggaaaggagattttcgaagagaaggcatatctagtgggcgtggaaagaaagggggatggagaatgcttgtttaatattgaggaatctgttgaggagctagaacaacttgcggatactgctgggcttgcagtggttggttctacttatcaaaagctagcttccccaaatcctagaacatacattggatcaggaaaggtcgcagagattaaaagtgcattaatggcttggacggtgagactgtgatatttgacgatgaactttccccgggcaattgcgtaccctggaaaagggccttgggg

SEQ ID NO: 92617 - DNA, 510 bp, Arabidopsis thaliana columbia
gaatgtattaggtacaactatagaagagctatgacgtcgcctgcacgcgtacgtaagctcggaattcggctcgaggagtctctcaggcgggaggggaagcaaatagagaaatggctagctttactgcctccgcttccaccgtctccgccgctcgtccggctctccttctcaagcctaccgtcgccatctctgctcctgttcttggtttgcctccaatgggtaagaagaagggaggagtgagatgttcaatggagacaaagcaaggaaacgtctcagtcatgggggctggagtttcagctgcagcaacagctgctttgacggcggtgatgagcaatcccgcgatggctttggttgatgagaggatgtcaacagaaggaacaggattaccctttggtctaagcaacaacctcttgggttggattctgtttggagtctttggtttgatctggactttcttcttcgtctacacttcatctctcgaggaggatgaagaatctggtctttcactct

SEQ ID NO: 92618 - DNA, 924 bp, Arabidopsis thaliana columbia
  unsure (1)..(924): unsure at all n locations
nnnnnnnnnnnnnnnnnnnnnnnnnnnnnnnnnnnnnnnnnnnnnnnnnnnnnnnnnnnnnnnnnnnnnnnnnnnnccacgcgtccgtacggctgcgagaagacgaagaaggggaagcaaagaaattaaaagtgttcttgttgctgtagaacacaaacagaacaaacaaaaaatcaattgaagagtctctcagtcgttaggggaagcaaatagagaaatgggtgggggtactgcctccgcttccaccggctacgaacgtcgtccggctctccttctcaagcctaccgtcgccatctctgctcctgttcttggtttgcctccaatgggtaagaaggagggaggagtgagatgttcaatggagaccaagcagggaaacgtctcagtcatgggggctggagtttcagctgcagcaacagctgctttgacggcgggaatgagcaatcccccgatggctttggttgatgagaggatgtcaacagaaggaacaggattaccctttggtctaagcaacaacctcttgggttggattctgtttggagtctttggtttgatctggactttcttcttcggctacacttcatctctcgaggaggatgaagatcctggcctttcactctggaggaagaatcaatctttcgtcttctcatttccattttcatgtgagaacatgaatcaaaagggttcacccttctagttcctggtaattgttaagtaaagactaaaaactattttcatgtgtgtttactttcccccattctctttatcttgtcataacattgataaggaggagattatgtgattattaaaaaaaaaaaaaaaaaaaaaaggnnnnnnnnnnnnnnnnnnnnnnnnnnnnnnnnnnnnnnnnnnnnnnnnnnnnnnnnnnnnnnnnnnnnnnnnnnnnnnnnnnnnnnnnnnnnnnnn

SEQ ID NO: 92619 - DNA, 706 bp, Arabidopsis thaliana columbia
  unsure (1)..(706): unsure at all n locations
gaaggaggttacccccccggttcaaccgttcccncgttgcccggntcctttnaaacccnccggcncaattngccccntcctgggtcccccccaatggntaaaanaaggggggntttagatntccaatggggccaanccagggaaccgccccagncatgggggcctggggtttcagctgcagcaacagctgctttggacggcggtgatgagcaatcccgcgatggctttggttgatgagaggatgtcaacagaaggaacaggattaccctttggtctaagcaacaacctcttgggttggattctgtttggagtctttggtttgatctggactttcttcttcgtctacacttcatctctcgaggaggatgaagaatctggtctttcactctgaaggaagaatcaatctttcgtcttctcatttccattttcatgtgagaacatgaatcaaaagtgttcacccttctagtttcttgtaattgttaagtaaagactaaaaactattttcatgtgtgtttactttcccccattctctttatcttgtcataacattgataaggaggagattatgtgattattaaatatcatgcatgacatgttcatcaaaaaaaaaacccaaagaaaaaaaaaaaaagcggccgctctagaggatccaagcttacgtacgcgtgcatgcgacgtcatagtaaatctatagtgtcgtttaaat

SEQ ID NO: 92620 - DNA, 769 bp, Arabidopsis thaliana columbia
  unsure (1)..(769): unsure at all n locations
atgatcctnnnnnnnnnnnnnnnnnnnnnnnnnnnnnnnnnnnnnnnnnnnnnnnnnnnnnnnnnnnnnnnnnnnnnnnnnagccacgcgtccggaattcccgggtcgacccacgcgtccgcagaacaaacaaaaaatcaattgaagagtctctcagtcgttaggggaagcaaatagagaaatggctagctttactgcctccgcttccaccgtctccgccgctcgtccggctctccttctcaagcctaccgtcgccatctctgctcctgttcttggtttgcctccaatgggtaagaagaagggaggagtgagatgttcaatggagacaaagcaaggaaacgtctcagtcatgggggctggagtttcagctgcagcaacagctgctttgacggcggtgatgagcaatcccgcgatggctttggttgatgagaggatgtcaacagaaggaacaggattaccctttggtctaagcaacaacctcttgggttggattctgtttggagtctttggtttgatctggactttcttcttcgtctacacttcatctctcgaggaggatgaagaatctggtctttcactctgaaggaagaatcaatctttcgtcttctcatttccattttcatgtgagaacatgaatcaaaagtgttcacccttctagtttcttgtaattgttaagtaaagactaaaaactattttcaaaaaaaaaaaaaaaaaggnnaagggcggccgctctagaggatccaagcttacgtacgcgtgcatctacgtc

SEQ ID NO: 92621 - DNA, 851 bp, Arabidopsis thaliana columbia
aaaaaatttgatttgcattgcatttgtaacactaccgagtatagggaaagctggtacgcctgcaggtaccggtccggagttcccggctcgacccacgcgtccgattaaaagtgttcttgttgctgtagaacacaaacagaacaaacaaaaaatcaattgaagagtctctcagtcgttaggggaagcaaatagagaaatggctagctttactgcctccgcttccaccgtctccgccgctcgtccggctctccttctcaagcctaccgtcgccatctctgctcctgttcttggtttgcctccaatgggtaagaagaagggaggagtgagatgttcaatggagacaaagcaaggaaacgtctcagtcatgggggctggagtttcagctgcagcaacagctgctttgacggcggtgatgagcaatcccgcgatggctttggttgatgagaggatgtcaacagaaggaacaggattaccctttggtctaagcaacaacctcttgggttggattctgtttggagtctttggtttgatctggactttcttcttcgtctacacttcatctctcgaggaggatgaagaatctggtctttcactctgaaggaagaatcaatctttcgtcttctcatttccattttcatgtgagaacatgaatcaaaagtgttcacccttctagtttcttgtaattgttaagtaaagactaaaaacctattttcatgtgtgttttacttttccccccaaaaaaaaaataaaaaaaaagggccgggcccggtttcttagaggatacccaaagccttacgtttcccccgtgtcatggccaacggccattagcctcttccctattggggggaccc

SEQ ID NO: 92622 - DNA, 784 bp, Arabidopsis thaliana columbia
agcccacgcgtccgcttgcttgtttagtctctcctctcctcctcgtcctcaatcatcatcatctgagaattcgcagcttttgcttcttcgatagaaaatctaattatcatcaatcatgtctaagttcacgggattctcatctctcgctatctcttattttctcttggtttcaacgattgttgcagccaccgatgttcactactgcgataataacgaagagtatgaagtaaaagtacaaggagttgatataactccttatcctatagctagaggcgagccagctactttcagaatttctgctaacacagacactgagatctcgagcggcaagttggtgatcgaagtttcctactttggatggcatattcattctgagacacatgatctttgtgatgagacaagttgtcctgtggccattggagatttcttggtagcgcactcgcaagttcttcccggatatacccctcctggttcatactcactaaaaatgaagatgcttgatggacgcaagaaggagttaacttgcatcaagttctcatttgatattggatttggatcctccgtggccgacatgtagagctgatttgctcgacgggatacaccatcttgttctataccatggaaccactctcatttattttgtataaaatacactctcctgctatacataattgttgatcaaaaaccctttgaaaattctcattctggaccattcatgaatccccaccatttatagaaaaaacaaagtaatgaattaaaaaaaaaaaaaaaaaaaagggcggcc

SEQ ID NO: 92623 - DNA, 417 bp, Arabidopsis thaliana columbia
tcaaagaaaaatgggtttcaggtgttatgtccaatcctccatggttcctggtcacctttctagactttcgcgcctgtgaaattccggagccccgtttagtcgtctcctctgtatttccgccggcaatcatgccttcatgtcacttccggtaggtcttcccaatcggaaaaggaagtttattgaacctcaagagtgaaagacctcagagatttgttatctcagctgttgtggatgataaaagtgttgtagctaaagaggagaagaaagatggttctgaagaggttgttgtagataaccagagaatgatcaaagtttgtgataagcttattgaggtttttatggttgataagcctacaccatctgattggagaagattgttcagctttagcaaagaatgggatagtatacggccacatt

SEQ ID NO: 92624 - DNA, 800 bp, Arabidopsis thaliana columbia
  unsure (1)..(800): unsure at all n locations
atacgacttacttagggaaagctggtacgcctgcaggtaccggtccggaattcccgggtcgacccacgcgtccgcttcaagaactgagactcgagagaagcctactatatcgacggttttggttccggctagactggctcaggtcctgaatctgaatttaggcgaaccggtccggtctacggctactctcaacgatgtgtcgtggagacagaggagcaacaatggtgggttctcgagccaaatggtcggtggcgtgagggcggagcagtcagtgcaagagcctcggttaccatcaggagtgggcttattgactgattntatgttcgtaacttttggggtgtgtttagggggaagatcttatgatgggtcttggtttgaagaaagattagagttgatgacaggtagtgaaataggggaaaaaaggttagggtaatgtagagataggggaaatttggaaaagattaaaaaagttcgaaggtgtgagagaccacgttttgaatcgtttaacccccttgatggttggatgatgaaaaaaggactctgagacaacagagatngggactctttttccttttttttggggtttttttttactttttaccgggaatgaaaggtcgtctgcacgggctgtcctttagggaccccttctggcttctttgtccacactttaagaaggataaggaggcttgtcaaaaaanaaaaaagagttcttcaggcaaaatttaaaaaagaggggggccctaggatcaactaccccgggctcgatttattttttttgggccctaataattcgggccggt

SEQ ID NO: 92625 - DNA, 255 bp, Arabidopsis thaliana columbia
agggtggtgattggcctctactgagagtgatgaaaggaatatttgaaggaggacttgagagtgcaaacagaggggctgttgatgaagaagaagaagatgttgaaggcgactggggtgagggacttgacaaattcgatgttgatggaatggagaacacagacatcgaagccatattggatggtgcagaagcaggtgaagaagaagacgacgaggaaagtggatggggacttgacttggatctttcaccagagcttg

SEQ ID NO: 92626 - DNA, 602 bp, Arabidopsis thaliana columbia
gtgtgtttgtcgtctttaaggcttagccttcttgatctgtctaacaacagattatcaggtcgtatccctctgagtttgtcatcatataatggtagcttcaatggcaatcctggcctctgtagcacgacgatcaaatcgtttaaccggtgcataaatccttcgagatcgcatggagacactcgcgtgttcgtgttgtgtatagttttcgggttactgatcttgctagcgtctcttgtgtttttcttgtacctgaagaaaacagagaagaaggagggacgttcgcttaaacacgaatcttggagtataaagtcattccgaaagatgagtttcactgaagatgatatcattgattcaatcaaagaagagaatttgattggtagaggaggttgtggggatgtgtacagagtagtacttggtgatggtaaagaagttgcggtcaaacacatccggtgtagtagtactcagaaaaacttcagcagtgcaatgccgattctcactgaacgggagggaagatcgaaagagtttgaaacagaggtgcaaacgcttagttcgatacgacacttaaacgtggtgaaactctattgtagcatcacgagcgatga

SEQ ID NO: 92627 - DNA, 887 bp, Arabidopsis thaliana columbia
acgacttactatatggaacgctggtacgcctgcaggtaccggtccggaattcccggggcgacccacgcgtccggagagattgtcgactttaaagcttacccttcttgatctgtctaacaacacattatcaggccgtatccctctgagcttgggatcatataatgacaagcttcaatggcaatcctggcctctgtagcactacaatcaaatgagggaaccggtgcataaatccttcgagatcgcatggagacactcgcgtgccccggttgggatagtgttcgggtaacagaacttgctagcgtctcttcgttatttcttgcccctggaaaaaccaaaaaaaagggagggcgttcgtttaacaccatttttggattataaactccttccaaagaggattttaccgaaaaaggtttccttgcgtcaaacaaaaaaaaaatatttttttggcacaggaggttgtagggaattcctcccaagttcttcttggggagtggaaaaaaagcgcggtccaccccaccgggggggggaacaccaaaaaaatctttatggctgcgagccccactttcacctgaagggggggttacatcgagataattttaacaaacgggccccccgtcttttgcatcccatttctaaaggggtgtaaaccttttggaaatccaagagacatgactccgctttggtggcggacaatctcttcctatttgaaccccatgggcctctttaatttttgaggagacacaattgggggagaaacacgataaaatatctttggggagaaaagggcttaatcctccttatgcggggaaaccccgactcacgggcggtaccctcctccttccaaataatttgccccttttcaggcttttctttccaataataaggac

SEQ ID NO: 92628 - DNA, 442 bp, Arabidopsis thaliana columbia
ctgaaactcctaagagtagccgaggcatacagttttctttctccattggagatcatattatcatagagggaaacaaaaggacgcctccaaggtttgtcggacgcatagctgttataatgacacaatgcttaaatggatggtacgttgtgaagacagtggacaattcagagtctatcaagttacaacattgctcacttgccaagatttcagacaattcatctacgaaggtaacagtagctgaaatgcccccgtcttggctctaactcgtagaaagcaaatatctgtggctgcagaaatcagcatctgtaattttttcattcagagaaagtagttactacgtttccttatgtaatataggaacgagacaaccattttctgtactaaatccagtgtttcccttcattccggggggtgttttgtgaaaaggaggaaaaaaaaataa

SEQ ID NO: 92629 - DNA, 420 bp, Arabidopsis thaliana columbia
gtctggaatcaattacttcctaaaggttgccatttgttaacttactctgttagtctactaccgaccaataactatgtttttcgatggataccattatcatggaacaacctttgagcagagttaccggtgttatccggcatcttttatcgacaagccacaacttgaaagtggtgacaagattataatgccaccatcagcccttgatcgtctagcctctttgcatattgactatccgatgctgtttgagcttcgtaatgctggaattgaacgtgttacacactggggagtccttgagttcattgcagaaggaaggcatgatttacatgccatattggatgatgcagaatctgctgctgcaagaaggagacattgtgagagttagaaatgtcactcttccaaagggaacttacgttaaactac

SEQ ID NO: 92630 - DNA, 578 bp, Arabidopsis thaliana columbia
gttgctagttgaaatggttggttttggtacatccgctggcgttgtggttcttgctggaaccaacagaccggatattttggataaagctttgttaaggcctggacgttttgatcgccagataactattgataaacctgatatcaaagggcgtgatcagattttcaagatttacttgaagaagatcaaacttgatcatgagccatcatattactctcaaaggcttgctgctctcactcccgggtttgcaggagctgacattgcgaatgtctgtaacgaagcagctcttattgctgctagacacgaaggagcaacggttactatggcacactttgaatctgcgattgatcgtgttattggtggtcttgagaagaaaaaccgggtgataagcaagttggagcgacgtacagttgcatatcatgaatctggtcacgcagttgtagggtggttccttgaacatgcagagccgttactgaaagtgactattgtaccacgtggcacagcggctctcggatttgcacaatacgttccaaacgaaaaccttccatgaccaagagcaactctttacatgacttgatgac

SEQ ID NO: 92631 - DNA, 579 bp, Arabidopsis thaliana columbia
  unsure (1)..(579): unsure at all n locations
ctctccgacttacttagggaacgctggtacgcctgcaggtaccggtccggaattcccgggtcgacccacgcgtccggtttggttcatatagatttggagatgataattcctaggtgaatattgagaacaacaaagaagaaattactcacaacaaggtacttgtcaccatactcacattatgattcaataaaaataaaggttgagtctaaaaaaaaaaaaaaaaaaaaaaaaaaaaaaaaaaaaaaaaaaaaaaaaaaaaaaaaaaaaaaaaaaaaaaaaaaaaaaaaaaaanaaaaanaaaaaaanaaaaaagggggggggccgggggggggggtcttaagttaccccccctttcttcccacggcaaagccatttttaaggttcccctaaaggaaaccaaattgcctcctttgaccccggtttaacgggaaaaacctgggaaaacccagtttatcccccttaaaccctccccctttccccccttttcgaaaaagggaaaagagcccaaaaggccccctcaaaaccttttccaaaatttagaggcaatgagagccccccgggcaccgcccttataccccc

SEQ ID NO: 92632 - DNA, 1010 bp, Arabidopsis thaliana columbia
actcactatagggaaagctggtacgcctgcaggtaccggtccggaattcccgtgtcgacccacgcgtccgtacggctgcgagatgacgacagaagggggagatacggaagaatcagatcaacgcatgcgaccaagtaaatcaaaatcgggttgaagaagaaagagataagctttcacatcaatttttgaaggcgcgaaatggggaatacttcatcgatgctgactcagtacgacatcgaagaagttcagagtcattgtcatgatctatttgagcagcaggagattttatctctgtatcaacggttttgccagttagatcgaaacgcaaaaggatttatatctgctgatgagtttctctctgtgcctgagtttgcgatgaatccactctctcagaggctgcttaagatggttgatggtttgaactttaaggattttgttgctttcttgtctgcgtttagtgccaaggctagtctaagacagaaagttcaattgatctttaaagtctatgattcggactgcaacgggaaggtctcttttaaagatatcatggaagtgttgcgtgacttatcgggatcattcatgtctgatgagcaaagagagcaagtactgagccaggttttgaaggaatcgggctacacgagtgactcattcttaactctggaggatttcataaagatctttgggagtagtagaccggagatggacgttgaaattcctgtggattagactttatgatcatatatcatcaaacccaacactcaaatctcatcttgtattttgtccacactgtttctagaataatccttgttaattgatcacatcattgcaggctttttcagcacttgttaagtatttgtcaattgaaacttgttctactaaaggaaattacaattgtttcctctgcttagctttttgcaaaaaaaaaaaaaaaaaaaaaacaaaaaaagcggccgctctagaggatccaagcttacgtacgcgtgcaggcgacgtcataactcttctatagt

SEQ ID NO: 92633 - DNA, 792 bp, Arabidopsis thaliana columbia
  unsure (1)..(792): unsure at all n locations
gagagaatgagttggtctctctgcagcacccatggggtctcctcttccatagctctcacttatggctttcgccatagaagaagatccaccttccgtattttcgccacctctgacggattagaacccaaggacgacccgccggaatctcctctcccttcctcatcctctgctctcggtaaagacttgaaaaaggttgttaacaagactgctgcaacctttgcccctagagcttccaccgccagtaaaaaccctgctctccctgggactactctttacaaagtttttgaggttcaaggctatgcatcgtctgttcctcggaggtgtcctttctttcaacctcctctttccctccaggaaacctgttttatggagggtgatgggccttgggcccatttgagtgttcacttttccttttttgggccccaaacttttccaaaaaaaaaaaaaaggctcttaactccctttttttaatcggccccttgctaaggggtgctttccccttcttttgagaaataatgtgcctcttggccgggctgccaacaccggttcccttctntttttttttttccctgaaaactttgattggctgaaaaaaacaaagtagggccccctcgcgaatcttgagggtttaagacttaaatttctttttcttcttcctctaaagggcctcattcccctattccgtaaggcccgggttaaggaaaaaatgcaccttcctctaatgtattaaccccccctaggatatttttgaaatctaaggttgaaaaattttgtgcacaaaaaaaaaaaaaa

SEQ ID NO: 92634 - DNA, 629 bp, Arabidopsis thaliana columbia
  unsure (1)..(629): unsure at all n locations
gnnnnnnnnnnnnnnnnnnnnnnnnnnnnnnnnnnnnnnnnnnnnnnnnnnnnnnnnnnnnnnnnnnnnnnnccacgcgtccgggcctatagatggaactggcgaaaagccaaagagagattgaaagtctcaattcagagcataattatctggaaaaacaactagcttccctggaagccgcatctcaaccaaagacagatgagattgacaggcttaaagagctcaagaaaataatctctaaagaagaaaaagagattgaaaaccttgagaagggttctaaacagctgaaggataaagctttggagctgcaaaccaacttagagaacgctgggggtgaaaaattaaaaggacaaaaggcaaaggttgagaagattcagactgatatcgacaaaaacaatacagagatcaatcgggggtaatggtcaaatagaaacaaaccagaacctgataaagaagttgacaaaggggattgaagaggctactcgagaaaaagagaggctagagggggagaaggaaaatttgcatgtgactttcaaagatataacgcagaaagcattcgagatccaagagacgtataagaaaacacagcagttgattgatgagcacaaagacgtgttgactggagcaaa

SEQ ID NO: 92635 - DNA, 502 bp, Arabidopsis thaliana columbia
  unsure (1)..(502): unsure at all n locations
aagaaactcccnnnnnnnnnnnnnnnnnnnnnnnnnnnnnnnnnnnnnnnnnnnnnnnnnnnnnnnnnnnnnnnnnnnnnnccacgcgtccgagagactctctcaacaaggtgccatcaccaagaggatgactgcaattgaagaaatggctggaatggatgttctctgcagtgataagactggaactctaacccttaacaagctctctgtcgacaagtccttaattgaagtgttcccaaagaacatggatagtgactcagttgtattgatggctgcaagagcttccaggattgaaaaccaagatgccattgatgcttccatcgtcggaatgttgggtgatcctaaagaggcaagaccaggaatcacagaggtgcatttcttgccctttaaccctgtagataaacgtacagcgatcacatacatcgatgaaagcggaaactggcatcggaccaataaaggagctcctgaccanatcattaaactctgcaactcccagggggag

SEQ ID NO: 92636 - DNA, 646 bp, Arabidopsis thaliana columbia
  unsure (1)..(646): unsure at all n locations
gggacagctggtacgcctgcaggtaccggtccggaattcccgggtcgacccacgcgtccgctgaaatctcaaaatcgaaactaaaagcttctcagatctctaactatagctcaaggcggaggagactgagatcgatcatctgaatcgccgaaacatgtcgagcgatagcaatgatcttgacgaagatgagcttcttcaaatggcgttgaaagagcaggctaagagagatctcacctatcagaaacctccttcatcttctgctcgtaagcctgttgccaatttagtgcagcagcctcgacagcagaagcctgtggctgcggctgccgctccgccgaagaagtctgctgcggcggttaggaagccttccatggatgaggatgaggagtcggaggtggaattgcttatcatttcgagcggggatgatgatttggagagggaaagggaaataggtggttctagtgggggtgcggggagaggaagaggtanccatgtaccaaagaagggaagagcgaggaaggaagatgatggtgcttgggatggaggaaagccttattgtagaaacgggttattgaagctgaccttgctcgaggggtccggatatgagggaatcgaaacagccccgtggttaaaaagtaaaaagtaagcc

SEQ ID NO: 92637 - DNA, 618 bp, Arabidopsis thaliana columbia
  unsure (1)..(618): unsure at all n locations
nnnnnnnnnnnnnnnnnnnnnnnnnnnnnnnnnnnnnnnnnnnnnnnnnnnnnnnnnnnnnnnnnccacgcgtccgctgaaacggtcgagtttacttgagattacagagattaaggcccgagaagaagcttcatctgagttgaatctcgatctttcgcgagatccgtacaaaatcatcgtcagagaagccgtcgatagtttcatcgagaaggcgattatgacaatcgatactgagatgggaaagcttcatactcagattgtagaagatgttgatggagaagtaaccgagaatgccccgaagacgactacgaagaagaaaaagaagaagaaggcaaagaagaaggtggaagaagaagagtcatcacctgcttaggtaaattttatcatctcagataaatttcatctttgctcaggtttttgtgtaatttcaacgatgaatgatgtctttagttgaaattagtgttttagccattgatactacacttcaagtcaaagtgtatcagactctgtaacatgctccctccaaaaaaaaaaaaaaaaaaaaaaaaaaaaaaaaaaaacaaagggcggccgctctagaggatccaagcttacgtacgcgtgcatgcgacgtcatag

SEQ ID NO: 92638 - DNA, 420 bp, Arabidopsis thaliana columbia
cgtgggtcacagcgagagtgcaagagaaatgatggagcagtactacgtgggagagattgatccaacaacaataccaaagaaagtcaaatacacacctcctaaacagcctcacttacatccaagacaagacctctgaattcataatcaagctccttccagttcctcgtaccccttgccattcttggtttagcagtcggaatccgtatctacaccaaatcagggtaggcttcttttttttctgagcattacttccttatatcttatatatagagagaaagattcaagtcttttgaaaagacaaatctgaaagtctctccctttgttattgtctcttcccatattttgctgtttgaatgtattttggataatttcttatctattgtggcgcaactgcatataaacaacagtcttgttggtgtt

SEQ ID NO: 92639 - DNA, 745 bp, Arabidopsis thaliana columbia
cgacttactatagggaacgctggtacgcctgcaggtaccggtccggaattcccgggtcgacccacgcgtccgcggacgcgtgggcaaacaaacaatgggagacgaagcaaagatcttcactctctcagaagtttcagagcataatcaagctcatgactgttggattgtcatcaatggaaaggggtacaattgtgacctagtttcttgaagaccatcccaggtggggacgatgttctcttgtcttcaacaggtaaggatgcaacggatgattttgaggacgtgggtcacaagcgagagggcaagagaaatgatggagcagtactacgtaggagagattgatccaccacaattccaagaaagtcaaatacccccctcctaacacgctcactacatcaaaacaaaactctggattcataatcaagctcctccaggtcctctaccccttgccatttttgggtaagaatcggaaatccgtattacaccaaatcaggtaggctttttttttttctgacatactctcttaatctttatttagagagaagattcaggtcttttaaaagaacaaatcgaaggcccccctttggtttgcctctcccatatttggtggtagaaggatttgaataatcctaactttgggggggacggctataaccacatttgttggggaaaaaaaaaaaaaggggggccctcttagaaccaacttactacccgggatgcgagtttaatttttttttggcgccaattt

SEQ ID NO: 92640 - DNA, 349 bp, Arabidopsis thaliana columbia
  unsure (1)..(349): unsure at all n locations
ctacactgctggaaataaactcttatagctctaacaacaaggagtttccttacatcaccgcgacaagagtttctaggaatatgcacaaaggctatcctcatcatccaacgggcaagaacatttcaactaagcatgcttttggtctcactagctgcaaagaacaaaaagccaacacttggttcattgtacacaagaaccgtggacaaatttgttggaaccaacactctagtgaaaaattagagaagccattttgcttatacaacagaaaagctcttctagctttcgataagaagttaaaacacaaccagctttaccaaggtaagntttatttgcatacaaatgataaagc

SEQ ID NO: 92641 - DNA, 558 bp, Arabidopsis thaliana columbia
  unsure (1)..(558): unsure at all n locations
cctgcggnnnnnnnnnnnnnnnnnnnnnnnnnnnnnnnnnnnnnnnnnnnnnnnnnnnnnnnnnnnnnnnnnnccacgcgtccgaggacgcgtgggcggacgcgtgggtaggcttttcatagctagtgtctgatatcagacaaacacagacatgtctgtgtctctaagctacacttgtcttcttagattacccaccttttcagttccaacgaaacccattagtttcaatggacctctccctttttatctaccaagatctcatatttcctcatcttgttttggtttcaaatcaaacccattcataagaactcagaccccaagattcttcaagtgtttgcctcagagagtgtctgatgaacgcagagaaacccaagtcacaacagaagaggaagaggaggatgaggaagaaaagattgccgtatttgagaggctcttctctaacctgaatcaatcaacattgaagcgagaatccggaagtttgtccagtgaattttcttggttgctggcactaccgtaggtgcagggatacttgcgattccagctgtgacacaagaatca

SEQ ID NO: 92642 - DNA, 673 bp, Arabidopsis thaliana columbia
  unsure (1)..(673): unsure at all n locations
atgatactccnnnnnnnnnnnnnnnnnnnnnnnnnnnnnnnnnnnnnnnnnnnnnnnnnnnnnnnnnnnnnnngttctgccccacgttctctgcagcttctcctcttctcagaaattagggttccgtctcaaattacgagcagatctcgtactctctgatgtctgaagatccggagtaccgttgcttcattggtgggcttgcttggacaacgtctgatcgtggtctcagagatgcctttgagaagtatggtcacctcgttgaggccaaggtggttcttgacaagttttctggtcgctcccgtggttttggattcatcactttcgatgagaaaaaagctatggatgaagctattgcagcaatgaatggaatggatttggatgggcgaactatcactgttgataaagctcagcctcatcagggtggtgcaggcagagataatgatggtgaccgtggtcgagaccgtggatatgatcgtgatcgcagtcgtccctctggtgggcgaggtggtggagattgctttaaatgtagcaagcctggacattttgcaagagagtgtccttctgaaagtagtagagatggtggtggaaggttcagctcaaaggatgataggtacagttcgaaggacgataggtatggtgcaaagatgataggtatggtgcaaaggaggatagg

SEQ ID NO: 92643 - DNA, 522 bp, Arabidopsis thaliana columbia
gcttgttaagtacctccttgccttctcattcctcacccgtaagatggtgtccagggaaggtgtcccctagcagatcagtcataagatccagctggtgaaccacattctttccagggaaaagtggtttacccatcaacacctccgcaaaaatgcagcctatactccagatgtcaattgcgggtgtatacttagagtaaaaagatccacaaagctctggagctctataccatctggtagcaacatagtcagtccagaagattgttgtgggggtatcattgtatgcaacccttgccaatccaaaatcacaaatcttaagtttacagtttgcatttgccaatatgttctttggtttcaggcctcggtggtagacattagctgtgtgaatgtacttcagtgcacgcaataactgatacaggaaaaactggtaatgctctctagtcaaatcatcacggacgcgtgggtcgacccgggaattccggaccggtacctgcaggcgtacgtgctttccctaattgagtcgat

SEQ ID NO: 92644 - DNA, 759 bp, Arabidopsis thaliana columbia
  unsure (1)..(759): unsure at all n locations
agcccnttggcttccggcccngtggttcattaccggccgtcnttctgccggaggacccagccctttnccccacaccctggggggaatccccctttccccgcaacccctttcgcccctttcctcttcanaaccctttccgggggccaagggcttaaggaagttgatttcgacacgcccgggaaaaggctacaaccaaactacagacaagccgagaatgcaaaaaagcaaaggactatacaggtgatggacattcatgacattcctaaacctaagaaaggtggatttttcccaagaaaaggcgggagttctcaaggtggtagacactggtaaattgagaaagatgagagttaagtgaggaagagaaaaaaagacagagaacaaagctctgtttctgagacacaagaagacagtgaattctaaaaatgtttcaagaatttggaattaagttggtgggtacacttgttttctattttgttgttactactacgtatatttttttctgataaagaacataatttttcttggattttattaaataatagattcgaaaaaaatcaagtttaccatatttgtatttttgttattagacaatgatgggcataaaatctatctctttaaagaaaatagattgattttctttggcaaaaaaaaaaaaaaaaaaaaaaaaaaaaaaaaaaaaccacaaagggcggccgctctagaggatccaagcttacgtacgcgtgcatgcgacgtcatagtcttctannnnnnnnnnnn

SEQ ID NO: 92645 - DNA, 377 bp, Arabidopsis thaliana columbia
cacaaaccatggcttcttcttcttcttcttctttattatttcctttctttcttattcttttttcatgtttaatctcggtttcatcgtcaagaagatcattaatcgaccgtactcttccgaaaaaccttccgagatccggttttcgattgagtcttcgacatgtggattccggtaaaaacctcaccaagatccaaaagattcagagagggattaaccgtggattccatagattaaacagattaggagctgtagctgttttagctgtagcctctaagcctgatgatactaataacattaaagcacctactcatggaggaagcggtgagtttcttatggagttgtctattggaaacccggcggttaaatactctgctatt

SEQ ID NO: 92646 - DNA, 840 bp, Arabidopsis thaliana columbia
ctggtacgcctgcaggtaccggtccggactacccgggtcgacccacccgtccgctctaaatgatcttgcagagatggcatgtatgaagaaggcactaccattcattttaaaggtattggtgcaaatagggtatgcaggaatggatattcttacaaaggaagtcctaaacaaaaggctttattatttaacgtgtttcgcgtctaccgtcaacggagttgccacccgtgtttatggctccgttcgccttttaacttcacaatccagtgattgctcaaaacttatttaatcccgggatgaaaaacaccacagctacctttgcaattgccttgaacaacatttacctgcaggcacgttcatcccccgcttattattaggctcaaaagccggaattttaaataacaggagcgccctaaggggggtggaacaatacccacaggtgggagaatcatgggcctgaaaccttgaaaaggcccaccttttacctctttgggaaaaaaggaccctccgacaaacacagtggggaccattttttaatcccctcaaggggcatgttataaaaatatgggtccttaacctttccctgttcttataccccaaccaaacctttgagaaccccccgcggaagtctttcctccccatggaatgccccatagggccacaaaggggagtgggtttccctctcggggggaaaagaaatcccccgcgggggccttgggggggaacccaaaattttaaaaaccaaataaggagagaggggcccccgcccgtttcccatggggggggggggaaaacacaggccggtgtagaaccctaacccctctttatgccggggattttcaa

SEQ ID NO: 92647 - DNA, 805 bp, Arabidopsis thaliana columbia
cgaactctacttcgacttactatatggacagctggtacgcctgcaggtaccggtccggttttcccgggtcgacccacgcgtccggattgggagtctattgctgctggatactacatgacacagtcgaggatacaaattgcattacttttgaaaagatagaaaaagagtttggcgcaactgtgcgtcacatcgtttaaggggagaccatggcgtcaaaactgggaaagttaaagtgtaaaacggaaagagaaacaattcaagatgtatttgcagttgattctgcggagatgtttctggcgatgaaagacagaggccctgtcatttttgtcaaactagctgaccggttgtatattatgcaaactctctgcacatgcctcccataaagaattccaacttggaggggagactttgagggttttacctcctttaacaaaattgtgtggaatgttttcattaaacggctgaacggaaaatccttttttcatgcccgagaggctggggattttatagagcccctacgggttgctaacctttcaaagagctgaaaaaaactccttggaccccttcttgtgttttggcaaccaaattttggaaaaaaatcgagatgtccggttctggcctgcgactggaattctgtttggatccgggggaaggatttccctcttataaggggtttcaatcgagggggttttttttttccccccccttttctttccgggtgtttaaaaccaaaccctgtggggggggcgcctttggcccacacacaaatagttttgacttgggggctttaaaaaattgaaccctt

SEQ ID NO: 92648 - DNA, 919 bp, Arabidopsis thaliana columbia
  unsure (1)..(919): unsure at all n locations
gactttctatagggaaacctggtacgcctgcaggtaccggtccggaatttccggggcgacccacgcgtccggcaaaaagaagaacaaaaaaacaaagcgtcgaagagacaaaaagatgaacactaaatttgggcgggaagaagccgacgggaacaccgtcactagcgtggtcgacagtcgtagttgtagcctctctgctctgccggagcctgcgtcgttcacaatatatacaaagccagatctaacattatcctcagatcgaaaaccattgaaggagacaaaaaaggaggggtctgcgaacaaaaggtaaattctattttgggggttgggtagaaaaaaatctggccatgggattctaaaacctatttggggttcaggtattatatacttactacttagaaccccggggtttggaaaaagcccaccaaggggcaaatctttgtggtccctcccaaaaaaattaataaatttttttaanaaaaacgggggcggccctcttaaaaaccaaattttacgacggggcgtgggattttttattcttttttgggggccctaatcaaattccgtgccgggtttaaagggggggatggaaaacccggggttcccaattaatggctggaaaaatcccctttgccgggggggataagaaaaacgcccccaatcccctcccaaaattgcgcacctaattgaaaaagggacccccctttggggaatataagggggggggtggggtatcccaattagacctccctttgaaggcctggtgcgctttttgttgtttctttttttcgccgcgggngtgttcccgaaaattaaaaggggcccctagggcgaatatatttagtacccccaaaaaataaatggggggttcgtggccacccttaaagatttccctcgagggaacatttaaaggtttttc

SEQ ID NO: 92649 - DNA, 662 bp, Arabidopsis thaliana columbia
  unsure (1)..(662): unsure at all n locations
nnnnnnnnnnnnnnnnnnnnnnnnnnnnnnnnnnnnnnnnnnnnnnnnnnnnnnnnnnnnnnnnnnnnnnnnnnnnnnccacgcgtccgcttaagctgcaattttacttaactatttcaagttatttacttgtgaaggtgttgacattgatgctgctactaaacatgggattaaggtcgctagaattcctagtgagggtactggaaatgctgcatcttgctctgagatggctatatatctaatgctgggacttcttaagaaacagaacgaaatgcaaatatctctgagaaatagactacttggagaaccaaccggtgacacgcttcttggtaaaactgtatttatcttaggatatggaaacatcggaatagagctggctaaacggttgaagccatttgggtcgaaagtaatagccacgaaaagattctggcctgcttctatcgtcgactcagactgctagttgatgagaaaggtagccatgaagacatttacacattcgctggcaaagccgatatagtcgntgtttgtttgaggctcaacaaagaaacggctgaaatagtgaataaggagttcatatgctcaatgaaaaaggtgctcttcttgtaatattgcccgaggtgggcctattaactatgaatcagctttccagaatctggagtccg

SEQ ID NO: 92650 - DNA, 554 bp, Arabidopsis thaliana columbia
aatgtattaggaacaactatagaagagctatgacgtcgcacgcacgcgtacgtaagctcggaattcggctcgagctcaactttcctggtggatccactgtcaaggatgaagaggacaatcttaagagaaggataaaggagactatggagagagctttctgggataatgtcatggaatccatgaaattggagaagccagactatagctgcatctctaaccttatgaaagaagtgagtgacgaactttgccagatggtaccagatagctggaaagtagaaataactgaaactattgatctggacattctctcacagttgctcaactccggcaccttggatatcgattaccttggaaagatgcttgagtttgcgttggctactctgcggaaactctctgccccagctaatgaccgtgagaatgaaagcacccaccgggatttactcaaggaacttcacaggttgtgtgaagctgaagatgagtctggtaacttccgtgcatgttgcaatagtcaaggggatccccttcattcttgagcaaattcaggaacttaagcg
